United States Patent Application Publication US 2005/0228172 A9 - sequence listing, part 134

SEQ ID NO: 630802 - DNA, 589 bp, Homo sapiens
attttctaaaatcaaaagtcatagatgtgggagaggctgagacgaccaattagctcccatctacagctcccaccaagaagaatgaaaatggcaagtgaatcctgcaccttcagctgaggtatccaggttctctcactgggactaagtaagtggttggtgcaaccctcggaaagcaagggaaaacaggatgtagtgacagcccagccaggagctatacagggtaagggaaactcccaccygcaaccaaggtagacagtgagtgattgtgctacccaaccagtgaaaccatacttttcccacagatctgtgcaaccagtggatcaggcggtcccctggtgaactcacaccaccaggccttgggtcccaagcacagaactgtgcagactcttggcagccgctcgggttttgggcagtggcagcaggctagagactgcctaagaccactgattccagaggggtgaggggtagcagccatcactgcagctccaggcagccatcttaccctgctagtaccagggaggctgagtggtttgaactggaaggaattcctcacagcacagcacagcggctgtggcggattgtggccagt

SEQ ID NO: 630803 - DNA, 539 bp, Homo sapiens
ataacattgtcataaagtagaagattcaatattcttaagatggtaattctccccaaaccaatgtatacattagccrcaagctcaaaattttaaaaataccaacagattattttgaagaaactaacaagctgattctaaaatttacatgaaaatgccaatggccaatgctagtcatgattttaaagtaacataccaaagttgaaggattcaaactcccatatgtcaaggcttaataaaaagctactgtaatcacacgatatagtgttattgctaagacagagaaatagcccaatgaaatagattagagtccaaaatcagacataaatatatacgtatgtatatatacacatatatttataatatgtatatatacacatatatttataatatgcatatatacacatatatagagtccaaaatcagacatacatatatatatctctatatatcagacatatatatatagagagagagagacttgatttatgatataaatggtactgcaaaacaatgggaaagaatgttcttttccacatgga

SEQ ID NO: 630804 - DNA, 539 bp, Homo sapiens
ataacattgtcataaagtagaagattcaatattcttaagatggtaattctccccaaaccaatgtatacattagccgcaagctcaaaattttaaaaataccaacagattattttgaagaaactaacaagctgattctaaaatttacatgaaaatgccaatggccaatgctagtcatgattttaaagtaacataccaaagttgaaggattcaaactcccatatgtcaaggcttaataaaaagctactgtaatcacacgatatagtgttattgctaagacagagaaatagcccaatgaaatagattagagtccaaaatcagacataaatatatacrtatgtatatatacacatatatttataatatgtatatatacacatatatttataatatgcatatatacacatatatagagtccaaaatcagacatacatatatatatctctatatatcagacatatatatatagagagagagagacttgatttatgatataaatggtactgcaaaacaatgggaaagaatgttcttttccacatgga

SEQ ID NO: 630805 - DNA, 539 bp, Homo sapiens
ataacattgtcataaagtagaagattcaatattcttaagatggtaattctccccaaaccaatgtatacattagccgcaagctcaaaattttaaaaataccaacagattattttgaagaaactaacaagctgattctaaaatttacatgaaaatgccaatggccaatgctagtcatgattttaaagtaacataccaaagttgaaggattcaaactcccatatgtcaaggcttaataaaaagctactgtaatcacacgatatagtgttattgctaagacagagaaatagcccaatgaaatagattagagtccaaaatcagacataaatatatacgtatgtatatatacacatatatttataatatgtatatatacacatatatttataatatgcatatatacacatatatagagtccaaaatcagacatacatatatatatctctatatatcagacatatatatatakagagagagagacttgatttatgatataaatggtactgcaaaacaatgggaaagaatgttcttttccacatgga

SEQ ID NO: 630806 - DNA, 539 bp, Homo sapiens
ataacattgtcataaagtagaagattcaatattcttaagatggtaattctccccaaaccaatgtatacattagccgcaagctcaaaattttaaaaataccaacagattattttgaagaaactaacaagctgattctaaaatttacatgaaaatgccaatggccaatgctagtcatgattttaaagtaacataccaaagttgaaggattcaaactcccatatgtcaaggcttaataaaaagctactgtaatcacacgatatagtgttattgctaagacagagaaatagcccaatgaaatagattagagtccaaaatcagacataaatatatacgtatgtatatatacacatatatttataatatgtatatatacacatatatttataatatgcatatatacacatatatagagtccaaaatcagacatacatatatatatctctatatatcagacatatatatatagagagagagagrcttgatttatgatataaatggtactgcaaaacaatgggaaagaatgttcttttccacatgga

SEQ ID NO: 630807 - DNA, 559 bp, Homo sapiens
cttcacttttctgtatatacttttctgtattttgaaatatttcataattaactataaaataaaaagccgatgtgaaaaagaatgacaaaaagagggaaagcgtagtctggcctattagagaaggcagctgccatgtttcttacaggaacaaatcaaggactcaggacacacaattggaggggtaaaaagtgtcttcatgcattcctccagcagcctctgctccagaagccatgcctgtgtgtgtcctcctcagtccagcatcacctccctcagaatcagtgrgacttgcaaccagattctggcattaggttttccctaagtcttttttttaagagagtgaattttgaagtgtattaaataattagtcctcatatataaaaaagtttcctattaatgaataatacatgtcacttcaaggttttagacaatatagaaacttacagaaaagtgtttttagaccactttacatagctggagaaagaaaataaaaggattaaactcaattatgagttcaaatgcatttatgatcaaaattatgtaaaacaaaaaaatcaaaaca

SEQ ID NO: 630808 - DNA, 582 bp, Homo sapiens
cccacagctcccttctcacagggtcagaaacagaaacacacactttgacttctcatccatagttcccctaagtcttaattttaagtgatgttgtcagttttcctcctttatggtgacttcatgggtatttttaaaaggaagctaagaaaacccacattagctgcttacttctaggcatcattttaaactgcagtgcacaataatgaatcagcttaaataaatccagttgtcctaaggctcttaagacactggactttaatttatgttttttctgttctctagtagcctrtcagttcttctggggcagaaaacctttttttcttatttatctccgggtcttcagcatctggcacagtgcttgatatcaatcaaagcaaacaactgtgttcaagatatgatgaaaatttacaagtgtagagaattgaacagcaagaggaacaaaatttttaaaaggagatcataggaaagaattttgagaaaaactatatcttatactgaaacacatctactgcaaattaggacaattttgacaatacatttctgaatacagactataattattctataatatatccatgtatg

SEQ ID NO: 630809 - DNA, 557 bp, Homo sapiens
ctttcctttatatcaagatatcttgataggctggtagctctttgaggtaagaagcctattataagctgaaacatgtcctcctaaaaattcacgttcaagtccccacccccagtacctcagaatgtgactatttggagacagattcgtaccaaagtaattaaggtaaaatgaggtctttagggtggtgcctaaaccaatatgactaatgtctttataagaagaggaaatttcggcacagatgtgtaccaagggaaaatgatgtgaagacaaggcagamggaagccatctacaagccaaggagggaggcctagaacagatccttccctcacagccctcagaaggaaccaatcctgctgataccttgattttagacttctagcctccaggaccgtgagaaaataaatttctgttgtttaagccaccccatctgttgcactgtgttaaggcagtcccagcaatctatcacactccctgtattttttctcagctcacgagcatctcccacagtgaaaacatatgacggacttgcaataaatgttttctcgtgtgaatttaat

SEQ ID NO: 630810 - DNA, 515 bp, Homo sapiens
ctaaaccaatatgactaatgtctttataagaagaggaaatttcggcacagatgtgtaccaagggaaaatgatgtgaagacaaggcagaaggaagccatctacaagccaaggagggaggcctagaacagatccttccctcacagccctcagaaggaaccaatcctgctgataccttgattttagacttctagcctccaggaccgtgagaaaataaatttctgttgtttaagccaccccatctgttgcactgtgttaaggcagtcccagcaatctatcacactccctgtattttttctcagctcacgagcatctcccacagtgaaaacatatgacrgacttgcaataaatgttttctcgtgtgaatttaattaatcaccatgctataatgtattccttcccaattagtatgtaaaaactggctttagagtcaaacctgagttcaaattctaccatcttactagctgagtgacaataggaaagaaagcaaatcttaggttaaagatgggaataatcat

SEQ ID NO: 630811 - DNA, 567 bp, Homo sapiens
agacatctctccatctccagccacccttccagtgtccgcagctcataggtactaaatctgcagaggctcccaaaacaaggagataaccgaatgcctaaatcctctaccccactcagcagataaagccccaacacctgtgagcatgccatatcmcaaattactttactctcagaatggctagatcctctccccaaatgaccatgattactatcttcagctacgataattcactcacccattgctgtaatccatgagacatttacccccagatgaagtgtcattacctattcctccgtatttccaatcatgttacccctctgaaatttgggagattagtaaaaaagatgagagacatcctcagggacttgcctatgggtgaatttattgctttctactccttgcattcagagaacagtactctgtgattaaaaataaatgaaatatggcttatgttttaaaaataaacacagctttacatttgcattgatgccccttgacaaagatgtgcgttcattttcttttaataactccatatcctatgactgatatctgagaaaatgctgtatt

SEQ ID NO: 630812 - DNA, 444 bp, Homo sapiens
agccccaacacctgtgagcatgccatatcacaaattactttactctcagaatggctagatcctctccccaaatgaccatgattactatcttcagctacgataattcactcacccattgctgtaatccatgagacatttacccccagatgaagtgtcattacctattcctccgtatttccaatcatgttacccctctgaaatttgggagattagtaaaaaagatgagagacaycctcagggacttgcctatgggtgaatttattgctttctactccttgcattcagagaacagtactctgtgattaaaaataaatgaaatatggcttatgttttaaaaataaacacagctttacatttgcattgatgccccttgacaaagatgtgcgttcattttcttttaataactccatatcctatgactgatatctgagaaaatgctgtatt

SEQ ID NO: 630813 - DNA, 526 bp, Homo sapiens
ggatatcctaaatacccagatatgatcattacacattgtatgcatgtatcaaaataacacctgtaccctataaatatgtacatttattaagtatcaatcaagaaaagaaataataacagacagttcccatgtaccctttacctaatacatgtactttaccagagtagcctaattttaattatactgctaatcaagatcactcaaatcaaattttctgctacttttttttggggtgggggctgaaatttaggatccaatgcttttttaatagaggtgaaatycacataacataaaattaaccatttaatcctcatcaatgatagactggataaagaaaatgtggtacatacacaccatggaatactatgcagccatggaaaggaacaagatcatgttctttgcagggacatggatagagttagaagctgtcatcctcagcaaattaacacaggaacagaaaatcaaacaccacatattctcacttataagtgggaactgaattatgaggacacatggacacatggtg

SEQ ID NO: 630814 - DNA, 567 bp, Homo sapiens
cataacataaaattaaccatttaatcctcatcaatgatagactggataaagaaaatgtggtacatacacaccatggaatactatgcagccatggaaaggaacaagatcatgttctttgcagggacatggatagagttagaagctgtcatcctcagcaaattaacacaggaacagaaaatcaaacaccacatattctcacttataagtgggarctgaattatgaggacacatggacacatggtggggagcaacacacactgagacctgtcgaggcagagtgggcacagagagggagagcatcaggaagaatagccaatggatactgggcttaatacctgggtgatggaatgatcagtgcagcaaaccaccatggcacacatttacctacgtaacaaacctgcacatcctgcacatgcaccccagaacttaaaagttgaagaaaaaaacattagccacttaaaagtacacagtttctgttaatctgtgaataggtcatacattcttttttccttgcatacttcataatttttgctgaaaactggacatatttaacataatatggtaact

SEQ ID NO: 630815 - DNA, 603 bp, Homo sapiens
agggtttatgaccttccacatgtcatatatcccctgtaaataattataaaacaaggtactgattcatgaccccaccactgtatggaaattcatttaactttcttcctgaaaaatttgtaaatatgtgaactttgacacaaaattgaagaaaatgaattttgatacatagcaccaaatttctatttaaaattcttttttttagagtgaagaaacattagtataaccaatcaagtactgatttgtctaatatctacttatccaatattcaacatatttacataattgtatacttcttaaatgtacgtgtgtcctatgcagtattaaagtgcctgatggtgaagactggatggcaagagagtgagatagtgctgacttgtttcctcaccagcaggaaagcagcsaggtgtaaaaaacaaaccaaaggccagtagtgacaatcactcagatcagatctgagctgaggtagctcatgcctggccctttactctcctggaactctaggttctttggatgaaagatggggttctaggtcaaacccaggaagaatgaaggcagggaacaacaacaacaacaagaacgcagaacaataaacagttgagaaca

SEQ ID NO: 630816 - DNA, 603 bp, Homo sapiens
agggtttatgaccttccacatgtcatatatcccctgtaaataattataaaacaaggtactgattcatgaccccaccactgtatggaaattcatttaactttcttcctgaaaaatttgtaaatatgtgaactttgacacaaaattgaagaaaatgaattttgatacatagcaccaaatttctatttaaaattcttttttttagagtgaagaaacattagtataaccaatcaagtactgatttgtctaatatctacttatccaatattcaacatatttacataattgtatacttcttaaatgtacgtgtgtcctatgcagtattaaagtgcctgatggtgaagactggatggcaagagagtgagatagtgctgacttgtttcctcaccagcaggaaagcagcgaggtgtaaaaaacaaaccaaaggccagtrgtgacaatcactcagatcagatctgagctgaggtagctcatgcctggccctttactctcctggaactctaggttctttggatgaaagatggggttctaggtcaaacccaggaagaatgaaggcagggaacaacaacaacaacaagaacgcagaacaataaacagttgagaaca

SEQ ID NO: 630817 - DNA, 437 bp, Homo sapiens
gctgtgtaaactgtggagtgctgtctggagggagcaggcattattgctgctgcataatggatttgacaaggttttcctcctytctctattaggactcccatggcgtccctcgggatggggagcaggtggctgaaagcaaccccacagctagctccctctcagccccacagctggactgtgggtgggggtgggggaattggtttcaacctccttcctggccctccccaccaaggagcatatgactgacaggctctccctgccccctgccccaagcgtaacaagtgaccactgctctctgggggcagccactggcttcaggttcgcctcctactccattgcctccataattacaagatgctcttagcctgactcccacggactcccatcacccagcgctcggctctctcggtggggagggcagagaatgtttcactgtc

SEQ ID NO: 630818 - DNA, 591 bp, Homo sapiens
cctcttgttgtccctcctccctcggctcccctgtccaggctctggggatcgagtgagggcctgcctgtcctgcagagaccttgccaacccactcaccagctgggtgtagcagaaggtggcatggaagcccaggaaggtagacaagaaggcgatgcctagtgccaggatggtgaagaacagcagcagcaccgagagactcttccagggcacctgcaaaaccagggtgcaaagcctgcaaaaactgggcagttttacaggccagccagtcccggaatcagtctgcagaytctgaccaaggagatggataaaagaagggaagctttctagaaggggagtgacctgtcatctagtgagcacctgttacgtgcttattttaatcttagttgccttattagatagctactctgattagccccatttcacagaggatgaaacagaggttcagaaaaattgaggtacttgtccaaagccacacagctggtatgtgaaagctgggattcagacccatccaattccaagacccatgtggtcaaccattcagactgacacccatcagcaaaaaagtacagaaaggtcaagtaagaaaataca

SEQ ID NO: 630819 - DNA, 450 bp, Homo sapiens
atctgagcctgctactttttggcaaaggggtacagctcctgaaatttttatctgtggaaatttgtctatttacattttttctcttttctggggtcaatattgataagtaataacttcctagaaaattacctatttgatccagattttaaacttatttgcatataattgagcaaagtcattttaagattatcttaattttttctctgtgtgcttatttctttagaagctcctttttatatgtgctttaagaattacttaattgtggttgggtctggtggctcacacctgtaatccctttgggaggccaaggctggtgggtcccttgaggtcaggagttcaaaaccagcctggccaacatggtgaaaccctgtctytgctaaaaatacaaaaaaattagccgggcatgatgacaggcccctgtaatcccacctactcgggaggctgaggcag

SEQ ID NO: 630820 - DNA, 469 bp, Homo sapiens
tcaatgtgctaggaagaatgcttcataggtggcgtgtctacttccctcagaaggaacatcatatttataatgtttggttgtctctccttttgtgcctttagaaggctgtgatgatcattgcctatatctattatttcattagagaattacaaaacaatgatgttttaattttatcatyctttcttcatttattagctggaacacttctatggagaaaaacttctctcctgatgctttggttcccctaaggtacaattggtttaggaaggacagaactaatgctggctgatttcccctttacttatcagttttcagaataatgagctgattccctcacagtctctagaggtgatcagcaaagtttttttttgttggttttgtttttttttttaaattattatctaatatttttaaatgcatttgaaaattttcaatttattgcagttattaaccttgttgtcactcaaat

SEQ ID NO: 630821 - DNA, 469 bp, Homo sapiens
tcaatgtgctaggaagaatgcttcataggtggcgtgtctacttccctcagaaggaacatcatatttataatgtttggttgtctctccttttgtgcctttagaaggctgtgatgatcattgcctatatctattatttcattagagaattacaaaacaatgatgttttaattttatcattctttcttcatttattagctggaacacttctatggagaaaaacttctctcctgatgctttggttcccctaaggtacaattggtttaggaaggacagaactaatgctggctgatttcccctttacttatcagttttcagaataatgagctgattccctcacagtctctagaggtgatcagcaaagtttttttttgttggttttgttttttttttwaaattattatctaatatttttaaatgcatttgaaaattttcaatttattgcagttattaaccttgttgtcactcaaat

SEQ ID NO: 630822 - DNA, 556 bp, Homo sapiens
tgctcaacctggatttattccccaccctcaccttgatgtactgagatcatgaaacttcagaaagaaatcattctagaaactgagttatgacttactcaaagcaatgtctttacaagatacatttttgtatttgactcatgccttattccattataaatctctgcccttgggtttgtctccttgttttcttccacttcacttaatataatcttatattttaatccaccttaaaacctttyggaaacaaagcataatataaataatctttaatatgtgtttaaaaaaaatctggaacccattcccaaatacgttctaggctaccccattcccaaatgagaaaggggaaaaagcccatttaggaagaaaagcacaggaacgatatgacatatgacctgatctttagtaagtgacctaggcgaggatggccttaatccattaggtttggtcacctagctatctatccatatctaggtgtatactacttactacttaaaaggcccactcacaaggttagggggaactccagaaaaaaaaaaaaaaaacattttggactcag

SEQ ID NO: 630823 - DNA, 629 bp, Homo sapiens
caaagagttaaaatactagtgtttgcacaatatggagactgtgtataagaaaagtgaagttgctaagaaagcaccccagagaggataatgggaaggcagagagagggaatggagagagtgtggaaagaacaagggaagataaacagctttgcttagatgcatcagagcacataagcacagacataaatgtaccacccaaggataagggcagttaagataactgagagacatgagtactagatttgtagaaggtctcaaagtttatgatcatgagtttatttcaagaggtttcgtagaagagtaacataattcaaacagcacmgaggacaaagagttttctgctgtagaatctagcttcatcgttccttccatataattaggacaaccatatgattatctgggatacttttcagagtgaaagggagtactttaataattgtgccagaacaacataaactaggacttgtcccatgcaaattggaatgtatagtcaccctacttacagcccacttacagtctacctctgaccaccttgattctttctcagggtatagcaataaccatttcaaaatatatattcacttctttacatacgttttctcctacttacccaaaccagagaggaagaa

SEQ ID NO: 630824 - DNA, 586 bp, Homo sapiens
gaaacatgaagcatctgccaatggtgttattacttatttcaacacatgcatactcttcccagcaccatctctggaaagagctctagttcatttgccaagagccactagtttgcaagtgaccacacctatctattaaatagcycaatggaccctggccaagtatgacccattcaagccaaacaaaaccaactagcagcctgtttttcaaaaaagctcttctgatgtgtgttgtgggcatgcataggtgagcaagtggtgagtagaggtgattgtgcctatgtggtctttggcgggggtggcagtggcagagtcttgctctgtcacccaggctggagtacagtggcaagatctcagctcactgcaacctctgcctcccaggctcaagtgatcctccacctcagcctcccaagtagctgggactataggtgcacaccttcacgctaatttttgtaattttgtagatacggagtttcaccatgttgctcaggctggtctcaaactcttgggctcaagtgatccacctgccttgccttcccaaattgctgggattacaggcataagcctccacacccagcccagaaaacgg

SEQ ID NO: 630825 - DNA, 544 bp, Homo sapiens
tccttatatcacaaaaagtaatgagtcaatcaagcctgtattatcagttattctttcaaaytaataggcttatggaagaaagggatggctaatgcatagatatcagacacataatcacagaaggtgaagttggggcaagagtgggaggtcagaggcctatcctcctcttacctagaaagtagaatcagaggggagggaagaatggtctccttctggttctgtgatggctttttatatcctgttagtacttcgtagactgaaatgatcttcacacaaatactcctggtgacatttgtgtaagtcaagaagcatacccagcggctcaggcattttagtccagctactcccaggaaaaggaaatggatgtacacaggttcttgggcggagccctgctttcactccagggcctctgagaggcaggcccgaggccatgctcctgagatggacactgccccaggtcatgcttcatgccacacaacatggctgctgagttttgagcaaaaaccagacatcagactgtctttgggaatggcctaagcccatt

SEQ ID NO: 630826 - DNA, 531 bp, Homo sapiens
ccaggagcccccagccatcagtcatctcattagcttacaaagaaacacttatcatgttagagagtccaagggttttagtaactgtatgccaggacccaggggcagagagcaaatatgtttcttattatatcacagtgtcacactagcatttattaaacatttattattggtcacattttgagttacagactttatagacattatcttatttgagactcactacaaccactgaattggaactattaaccccattattcagaggaggagactgaggcccagagagattacataaactacccccaaagctcctatctcatagaagacagaacaaggacytaaattcagatctctgatgccaaagcttgggctcttaaccactacaatatattgcctcaaaagataataggagacacaaaatggtgtttataatcttgccgggggactgcaaaagacataataacagttacaagccaaaaacatgaaatacacaaagaaatcaaaccatgaacagaatggctttcaggggcacaa

SEQ ID NO: 630827 - DNA, 604 bp, Homo sapiens
  misc_feature 602, 603, 604: n = A,T,C or G
aaattggaagctaattaataaaaatatttggaaattatagtaggtactgtaaaggaaacaagagatggaaaacaaacatgaacatgtactttagatggaatggccatggaatatctctgtgagggtcacattaagtcgagacttaaggaaaagaaggagctaactatgataggagaaggaagagttacatgaaggcagagcatatccggtgagaggaaacagtatatgcaaaaggcctgcatcygaaacggaaatgatcttttgtgttcttagaatgaaaaacaaacaaacaaaaaagtagtgtagctggagtttgggttgagaaggagatcccttttgttgctatccagagaacacagtggggcagagagaggcgagatgtggggtcagagtcactgaatgtagatggagaatacttgattgcttaccgcgcttaaagcagaaggagcctgaagaagaatgaagaatgtgacctgagagaaacagacagggaaggacaggataggggcctttcatacccattgatgttgggtaaaccactgaagatgaagggagaaatgctgccatgaggttagggatggctgtgtttcatattatttccnnn

SEQ ID NO: 630828 - DNA, 485 bp, Homo sapiens
aatgctggagataaacacccagcattttactcctcattttcattatgcctaaagcccctgactgttctttcagagtggcaggtgatgtgactagcatgcatcagaccattcttttctatgtcctgtggcaaaaacaatcccccttttaagacacaacacaggggtaccccaagtgcatactttgctccraacaatacccctacaatgtgcatgtgatagattcggaaatcatactggagtgtaaaaaactacatcatctctaaattcattttcctttccttataaccagtttactttggtgcaaaatttgcccaagaagggttttagccagaaatcaatggagagaaagaaaaaaggaaagttttagttaaattgtctttgtttcttcacctacgtggaaaaggtaaagaaactttttctacttaaagcacatagcctttgctcatggaagagtcgaatccaaaagtttctgacttgaactataa

SEQ ID NO: 630829 - DNA, 370 bp, Homo sapiens
gcaaactttacctggatttaattgtctatcagttttatgcctccctgtctccagagatggcttaaactactctctgacccaacttgaccagcttccttgtccagttctgaagggcctggctcacaattaggcagaagtgagcattgtggcattgtatgtcttcaaggattccgtttagaaactagactatgagatgaaatgaaacaatgcatgtaaagtgaccacaactgtacctgtcatgtcttaaacactctataagtcatagctattattattctttcttcctgtattgcttgcaaaatgctacaawctatcagaaagtcagacctctcagtggctttagcacctagtattattttcagtcatatac

SEQ ID NO: 630830 - DNA, 518 bp, Homo sapiens
ccatcagccaaccttagttccaaacacttctcaggagaaaccttaatgataggctgtggttcctttttatccaccagagctgtcttgtctgatatcacattgatgccctgtgtcaatgccatttggatctttcctgtgtatagagtcttagaccaattttccattttgtgagtttccttctgctcctaacaaagaacagagaaatgctctccacattctgcttccagagctgctcaagtctctctgaagattcastacctagtctaggtttcttttgctgggggttagattctgaaacattgagttccctggcttctttgcctagaatgaagcctagagccagaaacgatctaaggcaaagatctcagaagaaggtcccacctcaggtgatgagccttgcctggcctgaagtctagggtgagacttaagtgctggactgtcagcatagcttacatttcacagaacaaaccagaactccattcagcactccacttacttcatctggcaaacattatgaa

SEQ ID NO: 630831 - DNA, 549 bp, Homo sapiens
tctgactcaatgaagaaaaatgccaactgccactagagcctactcaaatgaaaactctgtagcagaatgatcttgattatctcagaaatccctgacagaaatggaagcaatataaataaacayaaaagaaaatagaggtactgtaacacaactataaattgctcttctccccgactttcttccaatcatccagggcaaaagaaggaagttggtctttgtggcagagaatagaccagcagctgttctctatcctgccaagaggggagagacttattataaacaatagccaacaatatgtcctttgggacgggaaactcagccaatttggagggggccagtctggaagagagaaggagggttaatgggatgggggggtgaccaacataacagaggatgaattaggagaaaacactatcaaattttcctgtgtacttatgtttctattacctcattagggtgattacataatgtgactccatttataaactaagagggaaggaaggggcgacattctccttagcggtggctgatgtgagacattaacatacc

SEQ ID NO: 630832 - DNA, 486 bp, Homo sapiens
ttgtctaaagaaaatgccaagttgaattttcatgtactaagtcatctttctacaagaagctgacagacaaaagcaacaaagtgaaaaggtaaaaaatggctcatttgaaaaaaagtaatagcattataaccttttttttaaaagggtctggtttccttgttttatattatttgtcagggatcaatgtggccatgacaaaagcaatgggttagaaatcaaaagacttgtgtgacttgctgtrttactttgtgaatcacttcacctccctggaaggcggttttcatctatgtaatataaaggatggaaccaaattacttttgggttcaccttcagctcatgtttgttctaacagggcatccctgcccccacagggcaggctcttagcactcatttgtgagtgtgagtcataagaaaggatggtggagcttggatagtggtggggtctggagctagtttgcccaaactgagccattggaaaggattcta

SEQ ID NO: 630833 - DNA, 618 bp, Homo sapiens
gggtgctcttgggaaaatattcttaccccacactgaagctccccagtactatcaagcagtgaatttaggtgttcctgtaaacatgggtaaaatctaggagagcactgtggcttaatgtgtagattcatagggctttgcagagagtgacactgtttttcttttcttttcttttcttyttaatttgaatgcatgaatattcagtaggatgacttgtggttctatcagaggtcaagtcaataggagaaagaaagcctatgactgaggtaaaatgtgaagtagaaagacttggtttatataacttagatgtctatactgttcaaaatgcttagctcttctaatttcatttgccctcatagacacagtcagaaaaacaagttcaagatgtgaatatttttaatctgttttccaagcatatgtatcaaagaatggtatctattgtcattaagaatttttaagcctttcattctaaatataaagcctcacctatttgacagtgttcctttaaatgtcagagaagctggagaggttgaggggcagggagggatcatgaattgaacctcagaaggattttaatgctttcccttcggtggtgccttttcttcctgagaataaagaaag

SEQ ID NO: 630834 - DNA, 605 bp, Homo sapiens
aagaactggacaaagactcagagtcacacagtagagacrtgagccaaagaccagaaagtgcgatacacacactcctgtgctcacccacacagacctgtggactaccaagcaggacccagtaagctccctgtttatgaaattcatgtttcataaaggtggagctgaacttaagagcccgtgaaaagcaaactgtggaaaatgctagtggttaagggtggagagaactcacagtagaatgaaggggaaacaggtcaaccacccctgttctttcatcatcgaggatcttgaaaacttgatttagcaggatgcacagggaagcagtcattggcttccctctattatgttcaacttaatttattgcttggagaattaggcaccactttattgttcagattcattgcatcaaatgcaaacattcagccagagttctctaattagtatccagagagctgcctaggctatgcgtatgtgtgtgtgtgtgtgtttaagtttggtttctcctgcttgagacacaatgtaaaagggttaagatgattcactgacattacacttctctgatcctactagtctaaacatttgtacggtcttctgtttgaaacccagaa

SEQ ID NO: 630835 - DNA, 605 bp, Homo sapiens
aagaactggacaaagactcagagtcacacagtagagacgtgagccaaagaccagaaagtgsgatacacacactcctgtgctcacccacacagacctgtggactaccaagcaggacccagtaagctccctgtttatgaaattcatgtttcataaaggtggagctgaacttaagagcccgtgaaaagcaaactgtggaaaatgctagtggttaagggtggagagaactcacagtagaatgaaggggaaacaggtcaaccacccctgttctttcatcatcgaggatcttgaaaacttgatttagcaggatgcacagggaagcagtcattggcttccctctattatgttcaacttaatttattgcttggagaattaggcaccactttattgttcagattcattgcatcaaatgcaaacattcagccagagttctctaattagtatccagagagctgcctaggctatgcgtatgtgtgtgtgtgtgtgtttaagtttggtttctcctgcttgagacacaatgtaaaagggttaagatgattcactgacattacacttctctgatcctactagtctaaacatttgtacggtcttctgtttgaaacccagaa

SEQ ID NO: 630836 - DNA, 644 bp, Homo sapiens
gggcatattcacttcttttgtgattcttcagttacttcaggccactgggcgtatacgtgcaagtcacaggggatgtgatggcttggtttgggctcagaggcctgacagtacctccactatgttacaaatttcacctaagaagaaggcagacacacctccagaaaaagtacaagtctagtggttraatactggcgtccctataaggcaggagctgcttagctactacttgtcttatctctgcaatgcttcatgagaggataattgggagttggctctccagatcgagactattttttctccttcacaataacttaaaatctctgcctttcttttgaacctatgcaaacatcagcagtatactttgtgcaactatatttataaccaaaaaactttctattaataggaaaatcttctttactttcttttctcctgccctaccacccccttcaagtctttacaacgttgagaatagctcctaagatgcaaaaaaattacagcttttggccaagtgtcaaggagagctgacatcatatagaagaatggtcattaatagtcaacactcatccatagtggcctcacacactgggcaatgaatgctgatggccatcagtgaccatcatatcccaaactgaaaagatactgag

SEQ ID NO: 630837 - DNA, 644 bp, Homo sapiens
gggcatattcacttcttttgtgattcttcagttacttcaggccactgggcgtatacgtgcaagtcacaggggatgtgatggcttggtttgggctcagaggcctgacagtacctccactatgttacaaatttcacctaagaagaaggcagacacacctccagaaaaagtacaagtctagtggttgaatactggygtccctataaggcaggagctgcttagctactacttgtcttatctctgcaatgcttcatgagaggataattgggagttggctctccagatcgagactattttttctccttcacaataacttaaaatctctgcctttcttttgaacctatgcaaacatcagcagtatactttgtgcaactatatttataaccaaaaaactttctattaataggaaaatcttctttactttcttttctcctgccctaccacccccttcaagtctttacaacgttgagaatagctcctaagatgcaaaaaaattacagcttttggccaagtgtcaaggagagctgacatcatatagaagaatggtcattaatagtcaacactcatccatagtggcctcacacactgggcaatgaatgctgatggccatcagtgaccatcatatcccaaactgaaaagatactgag

SEQ ID NO: 630838 - DNA, 644 bp, Homo sapiens
gggcatattcacttcttttgtgattcttcagttacttcaggccactgggcgtatacgtgcaagtcacaggggatgtgatggcttggtttgggctcagaggcctgacagtacctccactatgttacaaatttcacctaagaagaaggcagacacacctccagaaaaagtacaagtctagtggttgaatactggcgwccctataaggcaggagctgcttagctactacttgtcttatctctgcaatgcttcatgagaggataattgggagttggctctccagatcgagactattttttctccttcacaataacttaaaatctctgcctttcttttgaacctatgcaaacatcagcagtatactttgtgcaactatatttataaccaaaaaactttctattaataggaaaatcttctttactttcttttctcctgccctaccacccccttcaagtctttacaacgttgagaatagctcctaagatgcaaaaaaattacagcttttggccaagtgtcaaggagagctgacatcatatagaagaatggtcattaatagtcaacactcatccatagtggcctcacacactgggcaatgaatgctgatggccatcagtgaccatcatatcccaaactgaaaagatactgag

SEQ ID NO: 630839 - DNA, 494 bp, Homo sapiens
attacaaaacttgaatggaccatatcatctgaggaacaaatgagggaactggtgatgtttagctgggaatttctgtatgcctttctcagaaaagacatagggaggacatatctgactcagaatgtttgacaagcgattctgtgtgttcctagctggtagaattagaacatgccccaaatcrgtgagcctaacttcaggcaacacgtaaaggagcattttctgtttctcacagcagtcctgaggtccaataagctatctctggggaaagcaaactcactgtcatcaaagggattgaagcagtgtctttagggtcaattgatagccttctaacatgtcttcctggctctagtcttaagacctatccagaccattctccatatccccattggtgatctttttaaatgcaaaagagaacatatcacttcccagtttaatccttttcaatggttttccattgtctgccaatctctcagttcctcttgacctggtgttta

SEQ ID NO: 630840 - DNA, 576 bp, Homo sapiens
tactttccaacaataagtttgttagaattgactcttgagtaagagcttagcccaagactagatcaggaccttacaatgagaagactgtatttttaagttgaggctatcaataaatagacagaaacaaaattttgcctttggtaccttctatcttctttttacatgtctaagtttgcttgtgttgttcctggccactcagtttccaactgacaggagtatagtgtccacatagatgttgtttactcctgcttcccctagtgcctggcatagggctggcacttaatagctaattaaatagttgttcaatgaataaatgagtgctttcccttcaaatgcccctattctaaatttcctttcacwttcttgttgctcaactaactcacctcccaacccaaactccaagcagttttatctcaaatccttgttctgtcattttataataaaaaaccttgggcaaattactgaattctctaagcttcagtatcctcttctttaagtggggttaataaaatttactttacaggtatgctttgaggattcattggaaatttatatacagaaaacttaaataaaatg

SEQ ID NO: 630841 - DNA, 642 bp, Homo sapiens
cttggctttaaactaaggaggcaatgtacaaatttatgtttcagtcataacaaaccatccattcactggctgccttccctccaagaagttttagatatgggagaattctaagccaaatatagaatccacttgagttgcatggatccaatgttagaaaaaaattcacacttttaagtgactgattatatagctctgaaaaagatcactttttggttcaagaggtaagcacttttggcttaaaccctcatgagccctgatcagccaataactctttcacaacttaagtaagtgctcactgacttgaagataaatcagaaatgcatkcattgcatccccgtcttgccctatcccataatcctcaaatcaggaagggaagaaaattatagccaagaggtatctccatgtgccaagctacaaatattagcaagacaagagtctgctatagacattttgtaaaacaccaaatagcatttgttttccccatctctggagaagaggttacttaaaaccaccccaaacatggagcaataaggatttattaaacaattttattatgctgcatccatctctcaggcatcatttacctgtaggaaaatagaggtaggtacacagtaaaagagaaggggcacaggaattgcccac

SEQ ID NO: 630842 - DNA, 594 bp, Homo sapiens
catacaacaaatccctgaacacaacacagaaaaaagaagaaaaaccaccctatcgtgatctcaaagaaagtagggtcaaagatctgatgggcaccgcggaccatgtaccctttgatgtacaatgcttaagacagatagtgtgtcactttcataagtaaagcaagcacaaaaaatgtcaaattctgcttcaagggcaatgagcctcccaacaggactgattaggggagaaacccacccatcctttctattttcctcttcattgaacttgtgcaatatatttccataaatgtcttagtggccagaactttcaagggcaagaactttccattatataaataatagacaacaattatagaaaacttggaaaatacagaatattatacagaagaaaacgaaagagatctatctaccatctgtagataaattctgttaatttttcaaatatatctcaccactgtttcttctaggcatgcataygcacaatatttttcagataaattgacctcacatcattatacattgctttgtagtgtgtttttttccctacacgttgcaatttattaagaatatttttttttgcaagtggttcttaaa

SEQ ID NO: 630843 - DNA, 578 bp, Homo sapiens
tcagtgtcttaatgcatgtagcaatactttctgaaatctcagttcttttgttttgttttgtttttttttagatggagtgtcaccctgtcatcactcaggatggagtgcagtggcgtgatctcggctcactgcaacctccacctccygggttcaagcttttctcctgcctcagcctcccaagtagctggaactacaggcacccgccaccatgcctggctattatttatttatttattgtatttttagtacagacggggtttcaccatgttggtcaggctggtcttaaactcctgacctcaaatgatccacccacctctgcctcccaaagtgctgggattacaggcatgagccacagcgcctggccttaaacctcagttctataacttacctattgtgaatgcaaaatataggttgcctctaattcacataacacattggagaataggagcatagggaaaaaaagactcctcaatgtgtatagtgctttattgtttagaatatgcaatcactggaattatctcctttaatccctatatctaccttttgaggtaagtatgaggacccaaattttactcaag

SEQ ID NO: 630844 - DNA, 519 bp, Homo sapiens
ggtcaataaataatactgtgggagtactggagggcagggagtggtgttgcatattttgcttttgatttttcctctggaaaaaaagatgaattaagtgacagagtggcaaaaggagtaggcaacaaagaaacatagccggaaacttgagcgtgactcttaatttcactctttttagagctttaatgcaaatccaattatgtatttgctttcagttctgaaggtgagaaattcgaggttagacatcacaaagctaatacatagattccctagagaggatattgataatatttcatgttttcctcctgacataatattcccccaagtgaaatccattgcctattattattgataytgtgctatcctggtagcaaacttgaaatgtaaggaaataggattctgttcattatttcttaccagtaaaattaatgaatcagagaagaagctaatgtaggtctgttttatcactaaggtgctcagaagttcaaccttccttttgttctcctttagagaagctgtact

SEQ ID NO: 630845 - DNA, 623 bp, Homo sapiens
taccagtaaaattaatgaatcagagaagaagctaatgtaggtctgttttatcactaaggtgctcagaagttcaaccttccttttgttctcctttagagaagctgtacttacaagcattgcaaagtctgacaaattgtatggtgtctattattatctgtctgtctccttcccagacagggcagggattctatcttctctattttcataccctccaagacctaacacaagccaataatattccatcaaccatcgaacacatatttaagtgcctacagastgctagggagtgtgctgggtgctggggactgaaagagggaagacagataattctggaaggtataatgtaaaagaagagaagagctgagctaggggaagtcgggtgggggtggatttgtctgagtggcttcccaaaggaagtgatgtttaaggggaaacctgactgatgaataggagtttccccaagttctctttttctttgtcttttcaggttactggaaaagctagtgaggtttgtggctggtatcatactgtttaatgtgtcatctgctaccatggtcaatgtgactcttactaatcggcattcagatagcgccttgcatattgattgtatgctaatacatttg

SEQ ID NO: 630846 - DNA, 623 bp, Homo sapiens
taccagtaaaattaatgaatcagagaagaagctaatgtaggtctgttttatcactaaggtgctcagaagttcaaccttccttttgttctcctttagagaagctgtacttacaagcattgcaaagtctgacaaattgtatggtgtctattattatctgtctgtctccttcccagacagggcagggattctatcttctctattttcataccctccaagacctaacacaagccaataatattccatcaaccatcgaacacatatttaagtgcctacagagtgctagggagtgtgctgggtgctggggactgaaagagggaagacagataattctggaaggtataatgtaaaagaagagaagagctgagctaggggaagtcgggtgggggtggatttgtctgastggcttcccaaaggaagtgatgtttaaggggaaacctgactgatgaataggagtttccccaagttctctttttctttgtcttttcaggttactggaaaagctagtgaggtttgtggctggtatcatactgtttaatgtgtcatctgctaccatggtcaatgtgactcttactaatcggcattcagatagcgccttgcatattgattgtatgctaatacatttg

SEQ ID NO: 630847 - DNA, 560 bp, Homo sapiens
agatactttcccctaacagaaagaaaaattaagatattaaaaaaaaaggaaaagaagaagggaagaagaaaaaggaggaaagaaaaggaaaaaggaaagttttgtttgaaatggaaatttcttatctgaaaaaattacttttgaaattctgaattacgggttgttatgccttttatctaggaggaaagtggcctgtcttgtaggatttgtggatcttctgctctttattcatgtcatgacattctgatgtcaaaaatgggctggtagtaggcacctatattccaaggaagcaattctgatttctggtttctctctattttaacaattgatgcacttaacagggaaccgtatttatcttctcaaatttattttcacctttatattttcctctcctgagacattgttcagaaaaaggaacctgcattgcatggctttcctgcctccagctcatttcaaacagcattcagtcaccttcagatgcacacactgtcatgtgaacttytgtccttcacccaactgttgaaattgcaccatctctgcatccagaaaagccagagggg

SEQ ID NO: 630848 - DNA, 529 bp, Homo sapiens
atgatgattgtttttggagttggagtcaaatatcagcctttaaaccaagtcaaagccagggttacagctgcgttacagctgccttctgtcactgacactgctgtggaaaaattcaaaaggcacaccaaacgttttttctagtgcatttttcaaagcaacttggaattagtacaagtacctcgacgcagaaagcaaatgtatttacctatgtaatatcaagcttgcctggaatcatttagtaggaaaaagtattctgcagagaaatgtackttgagagaatgcaaagcatgaaaggtaaattggagtcttgaaggggggattttaaatcacatttagacataaatcctttcaggtcatgattcccatagattaccagcatctgctaagcctagatagttcataatcactaaaattgtcgtaatcttcctatggaaggtttaccaaagaagtactgaattacactgggttaatacttttaaggatgaatggtcaagacgatgatgctaaattaatgcagtggctacatagt

SEQ ID NO: 630849 - DNA, 530 bp, Homo sapiens
ggagtggagcaaagccaaacgtcggtgckgccccgccagggcctgactacagggcagggtgtacagggctggcctcagatgccaagctcagagttgacggagcagggtcactgcagacagtgtggacggaccaggcgcctagagaatgatcacccagaaatgcaaagcacctctgtgcagggcacctcagccaaacagggggaacagggtgcagcctccaccgtggggagaatcccacacctcatattcctccccttctccccccttaccagtccaaccccagggcgtgggaggaaggaactcctagttggggcctcagggcagctcccagcagcccctccgagcaagaagctgctggaggctgtggccagagcctctgggcacccaggggttccgctgaggctgacagagcagggatgggtgaggaggatgacctcgcctgctgggagggtatgcagggcaggtgagcagaggtaaggcgaggacccctggccggcagggagctggggagcagacctccacagggcaca

SEQ ID NO: 630850 - DNA, 583 bp, Homo sapiens
tgagacaccctcctctgacttccctagaagcatggccccctgcctcttctccctcccagcacagagcccctgtgctgggatcagcccaggctccatttgttcctctaatgagtcttaagtatttggcttgggctcctgccagtcctactcctacagagaggagggagtgggaagaatgggacaaagctcatgccagctcagttctgctgggccctgggcagactggcacaggggctgcctggcccagacccacccaggggtgcagccaggaacccatttgaggcccacagcctttctttaccctccacttcaggggcttcccacagtgcagattcctgggcatacttcctgggtkggaatcctggggtgaggctcaggaatgtgcatttttaataagcacctcaggagattgtgatgcataatgaagattaaaaaccagtgttccagaaagtcaatgacagggattcaggctggctggtgaaattgtgtatatgtgcatttttctagagtccacagttgtcaaattctcacattaggtcaatagtccccataaccctttaaaagttttttaaaaacaagcccg

SEQ ID NO: 630851 - DNA, 572 bp, Homo sapiens
tgcccaccctcctcccacccctaaaggacataggtggtaaattttggtggcatccgcatgatgccatctcagccagtacacagagtatatgtactgtggggacatggttaccttcacctagatttcaaagatgctccagagagtgtaaggggccagccaaagaaccaccgcacgggcagggccactgtagaaagccccaacaagggcaatgcccaggggagccacggaagtagggctaccttacaacccagaccagtggggccaccagtgtgtgatcccagcccaagatagctacaggtgtacaacctaggcacagagcctccacagaaaatgggaccacaagacagaactgccatggaggcaggaccaccaccccagtgggtccagaagacaggacttctctacccctgtggacttaakagggcagagcctcaagtcaaagatgactattttccagccttaaagttttgtacttgctagagatctgttaccccttccttcctatttctcccttttggaatgagaatgtctatcctatgcctacctaccccaccagtgtattttggaagcac

SEQ ID NO: 630852 - DNA, 367 bp, Homo sapiens
ccagagcaaggtggctcaggccttaatgccagcactttgggaggccaaggtgggcagatcacttgaggtcaggagttcaagatcaacctggccaagatggtgaaaccacatctctattaaaaatacaaaaattagccaggtgtggtggtgagtgcctgtaatcccagctactggggagactgaggcaggaaaatcacttgaacctgggaggcggaggttgcactgagctgagattgcaccaccacactccagccttggtgacagagcaagactccatctcaaaaaaaaaaaaaaaargggaaatgtttagttcatgaggttgcaggtctcacaaataggattagtgcccttataagagaggccccag

SEQ ID NO: 630853 - DNA, 567 bp, Homo sapiens
actgagccccagctaacaccttgcaacaccttgactgcagctgtatgagactctaagtcggaaacatctagctaagccacagccaggctcctgacccagagaaactgcaagataaaaagtgcctgttgttctaagctactaagtttgaggaggatgtgcttctcggcaattaataactaagacagagcccatgcaagagcccggaggaccctgtcgtttagtagctggtagaagagaatgarcctagaaactttatacatcagggcaatccaggtgagtgccaaatgtctttatcaattttgtgctgctataaaggaatgcctgaggctgaatactttataaagaaaaaggggttatttgactcatcatttaatggctggaatgtttaagatttggcctctgcatctggtgagggtctcaggcttcttccactcatggcagaaggtgaaggggagccagcttgtgcagagatcacttggcaacagaggaagcaaaagagaaaggggtgggataccaggctctttttagcaaccagctcttacgggaattaattgactgagaagccac

SEQ ID NO: 630854 - DNA, 583 bp, Homo sapiens
cagtctgaatggatgtggtcaaaaaatgtgactccttcttccctaagttcccagacaagggacataatatttcactgggaaagacagaccaccagcatttctcatttccccaaactccaaaatgcagaggataaactcctgggaattgtgggcaaactatcaggagctcactttctccagctagttctcattcatggagcagagattcaccccaggcacagcagactgagaatacgggggtcttgattacctttagttttaaggcagaggttccacactggaggaggcaaactgagaagaggaagagttaaccattatcactcagtgccctgctctagtatctgkgtatcactctaagagaagtgggtcattatccctgttcccagatccagagaaaaggttcaaagactttggccagtaggagaggcagttaataagaacaaagagctccaaagctctctcaagatgaactgactttatttgaaacagagtgtagggaagttcaagcctaagggtgctctaaataacagtggagattttggtagtaagtaataataaatggaggccagtagctccattaggg

SEQ ID NO: 630855 - DNA, 448 bp, Homo sapiens
tttcacaagggttccatggggcaggcggtggcacaaggagtcggctgaacccttttattaayacaagaaggcaaactaaaatccataggttacctgactgcctgaaagggtggcagaactaagaactaggacttgaactaagggaataattcaagaactaacatctgtagactcttttacacttcatgtcctatttcagatttagcataatctaaggaggccaggaatgtgcctcccatgttaagagtgaggttctgcgatgggagtaatcccaacgctcactagcccttacatagcacagcccttggtgctcttgcacttggcctccctccctccccatgttccttgtccattgctaccttgggcttccttacagcatgggggacccagggtaagtagagttttacatggtggctggcttccaagaaagaggtggtgaagctgctag

SEQ ID NO: 630856 - DNA, 571 bp, Homo sapiens
aattcattctatttgtttggtgattatgtaaaattaataacgaagctttactctgagtatgaaaataamcaaaaactattgctatacccaaaaaagtctctgacacacacacacacacacatacacacacacacacaaaagggtatttcattcatgctgaacctatgcaaagtgaaatgaagtaactcatcaaaagtcaccacctagcatatggcagagctggtgctgattcatccatgttttttcaacattagcatgcagaaggggtaactggaaaaagatcccactaccccagagatcttagagcagagttctggaatgagtagcctcagcagtcacactgcttggtgggtgtagagatggagtttgaaaggttctgggtgtggtcagcagtatatacaaatggtgccatagattccttccctctctgctcttgctccacaactcctcacatcaagaagttaggtctttttttcctccccttcaacttggggtggccttttgatttgctctagtgactgaaatatgacagaagtgacactgtgaccattctgaacccagaccaaagagg

SEQ ID NO: 630857 - DNA, 583 bp, Homo sapiens
ccaccacattcactctgcccagactttacagctctgttcactggaggtccaaacacaccgaagagtctgcaagggatgttgctgcagaggccatgacaggctgcgcatggtgacatttcccactcactgtggctctaagatttcacttgagcggagcatagcctggctttccatcatcctgctctccttccaccagcccagaagcctggtggagtgaaagccagagactccatgactaaggtgccctgggttggagattcccctcacccactcctcctccagagagaacacacaccaagaaaaagcacttagccttgatgctggtttcctgtcactgcccttcctattgagacgtcattggccttggctcccctcctgacttttctatttttttctacctcctgttaaagaggcaacaggtccgtaaaagatttatcccataacctagtgtttcaggctctatctccctgttggttagactccctgacagattaataaattaacaatktattaattgttttgtttgttggatggatggatggatagatggatggatatacggacagatggacagatggacgga

SEQ ID NO: 630858 - DNA, 557 bp, Homo sapiens
cttggttagttcatgtgagatcttatcagggaacgtgccctgatagtcacgtaggttcttttctattttgcctaagcgtcagccggtttgagaaataaagggacagagtacaaaagagagaaattttaaagctgggtgtccgggggagacatcacatgtcagtaggttccatgatgccccacaagccrcaaaaccagcaagtttttattagggactttcaaaaggggagggagtgtacgaatagggtgtgggtcacaaagatcacgtacttcacaaggtaatagaatatcacaaggcaaatggaggcagggcgagatcacaggaccacaggatggggcgaaattaaaatgctaatgaagtttcgggcaccattgtcattgataacatcttatcaggagacagggtttgagagcaaccggtctgatcaaaatttattaggtgggaatttcctcttcctaataagcctgggagcgctatgggagactggggtttatttcatccctacagtcttgaccatagaagatggccaaacccaaggggtccatttcagagaccca

SEQ ID NO: 630859 - DNA, 497 bp, Homo sapiens
aatagggagaaatcatcagtaagggactgttgtgtaacatcttgtggactgatattttcacccagaaagagtcgccagaaaaattcagcttcaaattcagttaaaaaaaaaaaaatctaattccttttctaggtttaacaactacagaagtaaaaaatatataaatargtagtatgcgcctgacctagtcatctatcttggtgattaaatgcttggctagttgatggcgtgtcaatgaagtcaggattacataaatgatattcaaacagtctcgccaacaaagcagctagtaatgcagatacatttttctactaacgtattagaacctttgaaatttgtttctttttttctctttttttagattgcaaatctggatcttctttaagttcaagagaagggaaaaatatttatgaagcttattagtgagcagacagtactttacctgataaatataaactatccccgagcctcccagtgtcttctttagcatctcccag

SEQ ID NO: 630860 - DNA, 620 bp, Homo sapiens
gataacaaaacatgtacattaataataattccggcttttctgtttaggaatcatggttttttttttttatgattcttgccgaaaattaaacttaaaaacaaacaaaaaacccacattcccctgtgtagtcaaaacacaacatattcttcgcaaagaaaaagaagttgaatggatgagcatatttttcatcactcatgctctttgaaccggcagtaaatgacaaacatgaggagaaacaagagcactaaacgggtacccgtaatctagtcctgaccgacactagcttgagacattgagtgtgaccttgggaaatcaaagagctttcctggrcctcagttatccaatctgaaatccaggatattggatgtggtggttgccaagacctctccaattaaaggctgtaatttagaaattgtcttttttaacctttttcaaggaatgatagtatattcaatgcagcctggaaataatgatggtatcactgtttttgatggaattggtactggataaccttacattaagtagaaccaggctgcattttcagcaagagagcatattatctaatagatacaaaatataaaaatagattgggaggccgaggcgggtggatcatgaggtca

SEQ ID NO: 630861 - DNA, 620 bp, Homo sapiens
gataacaaaacatgtacattaataataattccggcttttctgtttaggaatcatggttttttttttttatgattcttgccgaaaattaaacttaaaaacaaacaaaaaacccacattcccctgtgtagtcaaaacacaacatattcttcgcaaagaaaaagaagttgaatggatgagcatatttttcatcactcatgctctttgaaccggcagtaaatgacaaacatgaggagaaacaagagcactaaacgggtacccgtaatctagtcctgaccgacactagcttgagacattgagtgtgaccttgggaaatcaaagagctttcctgggcctcagttatccaatctgaaatccaggatattggatgtggtggttgccaagacctctccaattaaaggctgtaatttagaaattgtcttttttaacctttttcaaggaatgatagtatattcaatgcagcctggaaataatgatggtatcactgtttttgatggaattggtactggataaccttacattaagtagaaccaggctgcattttcagcaagagagcatattatctaatagatacaaaatrtaaaaatagattgggaggccgaggcgggtggatcatgaggtca

SEQ ID NO: 630862 - DNA, 563 bp, Homo sapiens
ctcatcaaggaagtgaacgagctcctaaatattcgggatatrgcagagcaggcagctcatccaggaaccacacccctgggagaaatgtctttcggcaggctcactgctgcaccagtctttttcacgctctcacactcacacagccacacacatcttctcacacacagtagacttcatggtctgtggctgcatttcagtcactgtcctcctacttccagggagaggaagctagagatgatttcttcagagccatgctgcttcatgccaaggcttctgaacctgtggttcagcatgccagccgcttctttccaactacccaaaaagagccgtctcataagaccatgttccacgaaactcaccagcacaagtcttcagtggagacaaactatagtgtacaaatgattaaaatactgttaatgatgatatcaaggtacttgaggctctatcagggaaactttgaaaatgagacattaccagaagctctggagccttaagcacttgtcagttgatgttttgaaaaagtgcatccagcatccatgtaacctttctcctctcccttgctc

SEQ ID NO: 630863 - DNA, 563 bp, Homo sapiens
ctcatcaaggaagtgaacgagctcctaaatattcgggatatagcagagcaggcagctcatccaggaaccacacccctgggagaaatgtctttcggcaggctcactgctgcaccagtctttttcacgctctcacactcacacagccacacacatcttctcacacacagtagacttcatggtctgtggctgcatttcagtcactgtcctcctacttccagggagaggaagctagagatgatttcttcagagccatgctgcttcatgccaaggcttctgaacctgtggttcagcatgccagccgcttctttccaactacccaaaaagagccgtctcataagaccatgttccaygaaactcaccagcacaagtcttcagtggagacaaactatagtgtacaaatgattaaaatactgttaatgatgatatcaaggtacttgaggctctatcagggaaactttgaaaatgagacattaccagaagctctggagccttaagcacttgtcagttgatgttttgaaaaagtgcatccagcatccatgtaacctttctcctctcccttgctc

SEQ ID NO: 630864 - DNA, 563 bp, Homo sapiens
ctcatcaaggaagtgaacgagctcctaaatattcgggatatagcagagcaggcagctcatccaggaaccacacccctgggagaaatgtctttcggcaggctcactgctgcaccagtctttttcacgctctcacactcacacagccacacacatcttctcacacacagtagacttcatggtctgtggctgcatttcagtcactgtcctcctacttccagggagaggaagctagagatgatttcttcagagccatgctgcttcatgccaaggcttctgaacctgtggttcagcatgccagccgcttctttccaactacccaaaaagagccgtctcataagaccatgttccacgaaactcaccagcacaagtcttcagtggagacaaactatagtgtacaaaygattaaaatactgttaatgatgatatcaaggtacttgaggctctatcagggaaactttgaaaatgagacattaccagaagctctggagccttaagcacttgtcagttgatgttttgaaaaagtgcatccagcatccatgtaacctttctcctctcccttgctc

SEQ ID NO: 630865 - DNA, 563 bp, Homo sapiens
ctcatcaaggaagtgaacgagctcctaaatattcgggatatagcagagcaggcagctcatccaggaaccacacccctgggagaaatgtctttcggcaggctcactgctgcaccagtctttttcacgctctcacactcacacagccacacacatcttctcacacacagtagacttcatggtctgtggctgcatttcagtcactgtcctcctacttccagggagaggaagctagagatgatttcttcagagccatgctgcttcatgccaaggcttctgaacctgtggttcagcatgccagccgcttctttccaactacccaaaaagagccgtctcataagaccatgttccacgaaactcaccagcacaagtcttcagtggagacaaactatagtgtacaaatgattaaaatactgttaatgatgatatcaaggtacttgaggctctatcagggaaactttgaraatgagacattaccagaagctctggagccttaagcacttgtcagttgatgttttgaaaaagtgcatccagcatccatgtaacctttctcctctcccttgctc

SEQ ID NO: 630866 - DNA, 627 bp, Homo sapiens
ttcatgttaggcttgcaatgatttgagtgtgttgcgttagtccacagaggggcatctaactatgatggggaattaagaaaagattttccagaaaattagactgttaacgatttttgagttgactcttgaagatgaataagcagctaacagggttggggatactaaggaaagccttctagaaagataacacaatttaagtcatggcaaaaagaaatacaattgtcaactgcatgtaggaaatgcaaagcaaataggtgtatcaggattattaaatagaggtagaagtagtaggatatgaaagaggtatgaaaggtgaggttggaaaaaattacagggtgtgatcatattatataccatacrtactaagagagtggatttgagtttgctgacagcatgaggaattatgcatggatttaataagtattattttaaagagaacactgtgtccaaagagaattatcagttctatatgttttggaggagatggggatgtatggtgagacagagcaagtgttggtgggagaatgtttataggcagatatactagttaggagaatatgtttttaaagttcgaacaagaataataaggacctaaattaagtcactactacagaagttggaagagag

SEQ ID NO: 630867 - DNA, 591 bp, Homo sapiens
ttagtccacagaggggcatctaactatgatggggaattaagaaaagattttccagaaaattagactgttaacgatttttgagttgactcttgaagatgaataagcagctaacagggttggggatactaaggaaagccttctagaaagataacacaatttaagtcatggcaaaaagaaatacaattgtcaactgcatgtaggaaatgcaaagcaaataggtgtatcaggattattaaatagaggtagaagtagtaggatatgaaagaggtatgaaaggtgaggttggaaaaaattacagggtgtgatcatattatataccatacatactaagagartggatttgagtttgctgacagcatgaggaattatgcatggatttaataagtattattttaaagagaacactgtgtccaaagagaattatcagttctatatgttttggaggagatggggatgtatggtgagacagagcaagtgttggtgggagaatgtttataggcagatatactagttaggagaatatgtttttaaagttcgaacaagaataataaggacctaaattaagtcactactacagaagttggaagagag

SEQ ID NO: 630868 - DNA, 342 bp, Homo sapiens
aaaaggtagaaccagggtagtacagaagtaggaaggcctcagggtaaattgctaatagtgggttaggagagaaaagggaaggaaggratgggatagagtggagcttcacagagtggcagagaccactaccctttggattcatgctgtctagttgctattcagtttttggccccaattctgcttctgggaaaatttatgattgctgttttgacaagtcatcataaggtgagaaaaaatgggtggaaaaattctccctgtggagttctaaatggttacagatacgtgtttcttcctgtcagaagtgtagtttccaatactcaatgaccaaaacagaaagtgctt

SEQ ID NO: 630869 - DNA, 342 bp, Homo sapiens
aaaaggtagaaccagggtagtacagaagtaggaaggcctcagggtaaattgctaatagtgggttaggagagaaaagggaaggaaggaatgggatagagtggagcttcacrgagtggcagagaccactaccctttggattcatgctgtctagttgctattcagtttttggccccaattctgcttctgggaaaatttatgattgctgttttgacaagtcatcataaggtgagaaaaaatgggtggaaaaattctccctgtggagttctaaatggttacagatacgtgtttcttcctgtcagaagtgtagtttccaatactcaatgaccaaaacagaaagtgctt

SEQ ID NO: 630870 - DNA, 591 bp, Homo sapiens
ttagtccacagaggggcatctaactatgatggggaattaagaaaagattttccagaaaattagactgttaacgatttttgagttgactcttgaagatgaataagcagctaacagggttggggatactaaggaaagccttctagaaagataacacaatttaagtcatggcaaaaagaaatacaattgtcaactgcatgtaggaaatgcaaagcaaataggtgtatcaggattattaaatagaggtagaagtagtaggatatgaaagaggtatgaaaggtgaggttggaaaaaattacagggtgtgatcatattatataccatacatactaagagagtggatttgagtttgctgacagcatgaggaattatgcatggatttaataagtattattttaaagagaacactgtgtccaaagagaattatcagttctatatgttttggaggagatggggatgtatggtgagacagagcaagtgttggtgggagaatgtttataggcagayatactagttaggagaatatgtttttaaagttcgaacaagaataataaggacctaaattaagtcactactacagaagttggaagagag

SEQ ID NO: 630871 - DNA, 620 bp, Homo sapiens
tagtctaggtgtgagcaggaaaaggagaatgagagaccccagctggactgatggcaagggcaatgtgaggtcaagttataagagcacagacagcagatctgttgagtgccaaatagggaagtgttacaaaagaatcattacagaataacaggaatctgtagtcagtgtgctgaggaagtgcataataatttcaatagtcacttgagcagaacacaattaaggtggtgtattggctgtaaagtacagagtaaattatacattttctacatatgcatttctaaagatttatttcttctcgttttcttttttctcttttttttcttccttttctctctccttctctttctttctcaacttatttatttaaaatccatgataaggaaackcgactttccctacttataatgaaaatttgggttttcatgccagagcttcttaaacccttacaagtttctatggaaggatcctcctctacagagagtcccacaagctcagtctttcttagtgtcttgcccacatgttgagtgctgtttcatacatatgagtaaaatggagaaggctggagaaattcaggttaccttcgggtcagactccctgttattttggttgcctcggagcag

SEQ ID NO: 630872 - DNA, 593 bp, Homo sapiens
cctgtggctttattgcctccagggaatatctctctgggcttttcatggcccaaggaaagagttttgcctgccttctattttattttttaggagagacagttcgcataatctgtataaaataagccactattctggaaaagatgattggcttattaaaaatatatagcatatatttttaaacaggcagagttgacattctacaggagcaatgctgtaggaacggtgaagacttcacctcccatcccttctccgccatctgtcyctgcccatctgtctgtttcatgagagttttatttttaaaaactcaaataaggttttgttcagatgtgtaatctgttcaggatggcacaggatgaatcaaggaaagctactggcctactagttggccattaagccacagtcacctgaacacacacaatttctgttttctaaacttgaggcagcacagtctatgggttgtgattggaagagatggatgtcctacttaattttccaaactgtaaaactgatgtatgtgtagatggagagatgaacactaggaaaagttaagatcattataacatgaggggtatcattactctttagtagtaagt

SEQ ID NO: 630873 - DNA, 569 bp, Homo sapiens
acagtggcacgatctcagctcactgaaccctccacctcctgggttcaaggaattatctgcctcagcctcccgagtagctgggattacaggcacccgccaccacacctagctaattttttttgtattttcagtagagatttctatgcagcctaactaaaggtgtaacaggtaccaartgcagttgactatttaaaataaagattaataaataacacaaatcaatccatatactagacattctttaagaccatggcatcatattaattaactgtagtggaaacaaccacaaaataaagacacaacaagtaatcttctcttaataaaaaggcataattggctaaaatactctaaaaggaaatgaagaatagcgggtgtgggaaaatagctctgatcctcccttgataaatacgatgtcaattattttcttctctgtgtaatgtaattttgatagtataaaaatgtggtgatggaactcaggaagataaccccctggagaagcacctgagtgataaactgtcaaagggacaattctctgtggaagagagcagttctgataacctggaccaggg

SEQ ID NO: 630874 - DNA, 547 bp, Homo sapiens
ctgcaacctcccttggttgtgtttccactactctatgtcctcatgttgcaggccctcacgttgaaggcattagtgtgttttctctgcataacctcccctcccgctccacacacacatacacatgcacacacacgtgggcatgcacccttcctatgtattaatgtgacatctcccctccagctggtgttagtgtggcactgtcttccaattttccagcgagtggcagatgtcatgttatgtcagayttcaaagtcaacccgttgcactactgaaatatttttgtgctgtactctccttaagtagctcttatccctcaccatttttctgcagaggctttcagatacattctcaaccaataccttatcagcaaatattagctctagcagagtgattactctcgttgcatttccaactatctgaatcataaagttttcccttacataatttagggtccctgttgatgctctgaagttggctctatttgtaactcaggaaataaatgagtagttaaagcctcctgggagaacagcttttgcaatttagaata

SEQ ID NO: 630875 - DNA, 609 bp, Homo sapiens
acagcttgtcagaaaattccagagaagagaaatgacaactggtgaaattccctttaagtttattaaatacctgcctttcttcttttaaagaaagtgaaactccgtgacccatgagactaaaaataaaaaacttgagacaagggactgagggayggccattccatttaaatatgctcagtatgaaatgagcattctttaacaagaaatcattttgttaaagtgctaagcctttttcattatcgtttaatatctggtgacactggtagccataatgtatgtgtaaagaaaagattttattgtttgtgtctgatttttagagctatctgcaactgctttattctgattcactgagaaaatttcttagcttcactcccttctccaattaatgaactttcagtgtttctcaaggagcaaagatcatattaatctctctggttctttctatcagagtctgagtaaatcacttatactctaatgacaccaatagggtaagaaggatccagcggcgtttgacctgtgttacctacttggtctgattttcagttcttttgttaatatagaagccctttgattatagctgagtataaagtaataataaggattgttctt

SEQ ID NO: 630876 - DNA, 609 bp, Homo sapiens
acagcttgtcagaaaattccagagaagagaaatgacaactggtgaaattccctttaagtttattaaatacctgcctttcttcttttaaagaaagtgaaactccgtgacccatgagactaaaaataaaaaacttgagacaagggactgagggatggccattccatttaaatatgctcagtatgaaatgagcattctttaacaagaaatcattttgttwaagtgctaagcctttttcattatcgtttaatatctggtgacactggtagccataatgtatgtgtaaagaaaagattttattgtttgtgtctgatttttagagctatctgcaactgctttattctgattcactgagaaaatttcttagcttcactcccttctccaattaatgaactttcagtgtttctcaaggagcaaagatcatattaatctctctggttctttctatcagagtctgagtaaatcacttatactctaatgacaccaatagggtaagaaggatccagcggcgtttgacctgtgttacctacttggtctgattttcagttcttttgttaatatagaagccctttgattatagctgagtataaagtaataataaggattgttctt

SEQ ID NO: 630877 - DNA, 609 bp, Homo sapiens
acagcttgtcagaaaattccagagaagagaaatgacaactggtgaaattccctttaagtttattaaatacctgcctttcttcttttaaagaaagtgaaactccgtgacccatgagactaaaaataaaaaacttgagacaagggactgagggatggccattccatttaaatatgctcagtatgaaatgagcattctttaacaagaaatcattttgttaaagtgctaagcctttttcattatcgtttaatatctggtgacactggtagccataatgtatgtgtaaagaaaagattttattgtttgtgtctgatttttagagctatctgcaactgctttattctgattcactgagaaaatttcttagcttcactcccttctccaattaatgaactttcagtgtttctcaaggagcaaagatcatattaatctctctggtyctttctatcagagtctgagtaaatcacttatactctaatgacaccaatagggtaagaaggatccagcggcgtttgacctgtgttacctacttggtctgattttcagttcttttgttaatatagaagccctttgattatagctgagtataaagtaataataaggattgttctt

SEQ ID NO: 630878 - DNA, 623 bp, Homo sapiens
gttcattgatattactcttaaagagtgctacccagaactgaacacaatctgagtcttcatcagttactgggcaatatgtttgtacatatccaagttgaaagatgcacagacactcagagaatatgtaagtgaaatacccataaggcctgctagtgatggctgtaatagggtagtttatcttattttgtgaactaattctacatgttggttaaaacaatgcccctttgaaccatttctcagccatgtgcctggataatgtaataatgtgtctatactagaagtyctcatctgtatgccctatttttgttctcattgtcagtgggcagatgtcatttgctatattctcatataactgaaatatgttccataggatcctggaccaaaagtgcctagcagagtgctggcacatactaggtattccataaccattagctgctttctttttctttaatgtttctgcttagagcaataatatcatttactcctggatctcctgtggtctgctggagctgatgaaaggctggagcatatgtgtttgttgccgtctcatcctggcattctattgggccttggctctgaagctcactgatacagttccgtatattgctctgcctaacttctct

SEQ ID NO: 630879 - DNA, 535 bp, Homo sapiens
gtgccactgcactccatcctgggtgacagagtgagactgtctcgaaaaagaaaagaaatacccgagactgggtactttattagaaaaaagatttaataggttcacagttctgcaggctttagaagaagtacagcatgaacatctgcttctaggggtgcctctggaaacttacaaccgtgatgaaaggtcaagtgggagcttgcatgtcacacggcaaaagcaggagcaagggcggggggaattgcmgtacaatttttatttttactttttattttttttgagaccaggtctggctctgttgctcaggctggtgtgcagtggcaaatctgggctcactgcaccctctgcctcctgggctcaagagatccttccacctcagccaccttagtagctgggactacaggcacatgacaccacacccagctgaatttgttattttttttgtagtcatggggttttgccatgttgcccagactggtcttgaactcctgagctcaagtgatctgcctgcctcagcctcccaaagtgcccagat

SEQ ID NO: 630880 - DNA, 535 bp, Homo sapiens
gtgccactgcactccatcctgggtgacagagtgagactgtctcgaaaaagaaaagaaatacccgagactgggtactttattagaaaaaagatttaataggttcacagttctgcaggctttagaagaagtacagcatgaacatctgcttctaggggtgcctctggaaacttacaaccgtgatgaaaggtcaagtgggagcttgcatgtcacacggcaaaagcaggagcaagggcggggggaattgccgtacaatttttatttttactttttattttttttgagaccaggtctggctctgttgctcaggctggtgtgcagtggcaaatctgggctcactgcaccctctgcctcctgggctcaagagatccttccacctcagccaccttagtagctgggactacagrcacatgacaccacacccagctgaatttgttattttttttgtagtcatggggttttgccatgttgcccagactggtcttgaactcctgagctcaagtgatctgcctgcctcagcctcccaaagtgcccagat

SEQ ID NO: 630881 - DNA, 535 bp, Homo sapiens
gtgccactgcactccatcctgggtgacagagtgagactgtctcgaaaaagaaaagaaatacccgagactgggtactttattagaaaaaagatttaataggttcacagttctgcaggctttagaagaagtacagcatgaacatctgcttctaggggtgcctctggaaacttacaaccgtgatgaaaggtcaagtgggagcttgcatgtcacacggcaaaagcaggagcaagggcggggggaattgccgtacaatttttatttttactttttattttttttgagaccaggtctggctctgttgctcaggctggtgtgcagtggcaaatctgggctcactgcaccctctgcctcctgggctcaagagatccttccacctcagccaccttagtagctgggactacaggcacatgacaccacacccrgctgaatttgttattttttttgtagtcatggggttttgccatgttgcccagactggtcttgaactcctgagctcaagtgatctgcctgcctcagcctcccaaagtgcccagat

SEQ ID NO: 630882 - DNA, 569 bp, Homo sapiens
acagtggcacgatctcagctcactgaaccctccacctcctgggttcaaggaattatctgcctcagcctcccgagtagctgggattacaggcacccgccaccacacctagctaattttttttgtattttcagtagagatttctatgcagcctaactaaaggtgtaacaggtaccaagtgcagttgactatttaaaataaagattaataaataacacaaatcaatccatatactagacattctttaagaccatggcatcatattaattaactgtagtggaaacaaccacaaaataaagacacaacaagtaatcttctcttaataaaaaggcataattggctaaaatamtctaaaaggaaatgaagaatagcgggtgtgggaaaatagctctgatcctcccttgataaatacgatgtcaattattttcttctctgtgtaatgtaattttgatagtataaaaatgtggtgatggaactcaggaagataaccccctggagaagcacctgagtgataaactgtcaaagggacaattctctgtggaagagagcagttctgataacctggaccaggg

SEQ ID NO: 630883 - DNA, 632 bp, Homo sapiens
cttacccttgtgttacaattgcctacagtatacaaaataacaacatgcctatagcctaggagcaatagactatataccatatagcttagttgtatagtaggctatactacctaggcttgtgtgagtatactctataatgtttgcacaacaaaatcacctaacaacacacttctcaggacatatctttgttgtcaagcaatgcaggagtgtaacctagcctaatgaaatggaaatataggaactgcctgaaaaaatttaaaataattgtctttaaagagctcagttrtctagaagacaaaacagatagagaaccaaacaaaattaggaaaacactacatgaacaaaattacaagtttaacaaaaagatgagagccattaaagaaagaaccaaacagaaatcctgcttctgtggaagacaatgactgaaatgaagaatttcatataaagcattgacagtagactcaatcaagcagaagaaataatcagcaagatcaaagtcatgtcatttgaagtagaggaacaaaaagaaaaaaaaagagtgaaaaagcctacgggacttatgggacaccatcgagtgagccaatatgtagcattataggtgttccagaaggagcaaagaaagagaaagggga

SEQ ID NO: 630884 - DNA, 632 bp, Homo sapiens
cttacccttgtgttacaattgcctacagtatacaaaataacaacatgcctatagcctaggagcaatagactatataccatatagcttagttgtatagtaggctatactacctaggcttgtgtgagtatactctataatgtttgcacaacaaaatcacctaacaacacacttctcaggacatatctttgttgtcaagcaatgcaggagtgtaacctagcctaatgaaatggaaatataggaactgcctgaaaaaatttaaaataattgtctttaaagagctcagttatctagaagacaaaacagatagagaaccaaacaaaattaggaaaacactacatgaacaaaattacaagtttaacaaaaagatgagagccattaaagaaagaaccaaacagaaatcctgcttctgyggaagacaatgactgaaatgaagaatttcatataaagcattgacagtagactcaatcaagcagaagaaataatcagcaagatcaaagtcatgtcatttgaagtagaggaacaaaaagaaaaaaaaagagtgaaaaagcctacgggacttatgggacaccatcgagtgagccaatatgtagcattataggtgttccagaaggagcaaagaaagagaaagggga

SEQ ID NO: 630885 - DNA, 567 bp, Homo sapiens
acctatctaaagtacttatcataattcttgatatatggtaaatattcagtaaatgataggaaacacatatacacacaatggagcttcagattttaagataaagaatctttgtgatagccaggcccccagatgcctcccttattctgcagcaatccccactttcttaagtagawccctcctacacggaatccagagaggcctgtgcatccagtaacatgtgtcagatgtgatggtatctgactcccacagtagcatcacaaaaggcgttgcagtttccaccttggtatttcttgaatgactcactctggaggaagccagacaccactttatgaaatcattcaagcagaccaataaatccacaatgtggggaactgaggcatcctacaaatagccagcagccagttgctagccatatgagtgaaccacattggaagctgatcctccagttccactcataccttcagatgcagacatcatgacagcatcttcatgagaaactcaagcctgaaacacttatctaacttattcttgaatttctggcccacaaaacttgtaggagatcaacat

SEQ ID NO: 630886 - DNA, 567 bp, Homo sapiens
acctatctaaagtacttatcataattcttgatatatggtaaatattcagtaaatgataggaaacacatatacacacaatggagcttcagattttaagataaagaatctttgtgatagccaggcccccagatgcctcccttattctgcagcaatccccactttcttaagtagaaccctcctacacggaatccagagaggcctgtgcatccagtaacatgtgtcagatgtgatggtatctgactcccacagtagcatcacaaaaggcgttgcagtttccaccttggtatttcttgaatgactcactctggaggaagccagacaccactttatgaaatcattcaagcagaccaataaatccacaatgtggggaactgaggcatcctacaaatagccagcagccagttgytagccatatgagtgaaccacattggaagctgatcctccagttccactcataccttcagatgcagacatcatgacagcatcttcatgagaaactcaagcctgaaacacttatctaacttattcttgaatttctggcccacaaaacttgtaggagatcaacat

SEQ ID NO: 630887 - DNA, 586 bp, Homo sapiens
ctgccgcttcccactcagcatgaaatcggacccaccaaaaagcatttcagctctcgcttctggcaaggtttccagttttgaggcagagctctggcacggggcagcctggtggtcagggaaggagaggggaaatgacatgcagtttacaaagaaagaaaggtcataaaataattataaagtacatttaaaacttttgctagcccacgtcggcttaagcctcatcgctcttcatcactggagcaggcgatgctcaggcctctgtagcagtgggctgcgtttacacaaagttgacctctgctagccagggtgggctccgagggcgctttccacaccccaacacaggcgcctgctttttccccctcatagatccctatcccctttgtttyctctcttccatctgaaagagcttgggagctcctttaaaattttgagggagccagttattatttcaatctcaaaatgtaatgtcatccagaacaagacactttatcatgaaattataatgacacgacgcttcgtaattcatcacgtgctttatttgccgattcattaattaatccatccaagattccaggataatggcctc

SEQ ID NO: 630888 - DNA, 633 bp, Homo sapiens
gaccagtctcacctggcctgcatggctcagggtctccaagcaccagaaccatgaccctctagaatggggaaagcacctgatctagggcggtcctctccctggttggtaggaagaataaaagcaataccagcttccggtcacccaggcctttttatgagctggcccatctgccctttagccgctgagaagttgggtagggagggtgttaggcactctcacaatattgcaggaagacattgttcttttctaaataagcatgtgaacaatacaaagtgaataatgcatgtaaataacactaagatgatacagacccatctaaccattcactcctcaccaatgcccagmaccccatggtgatttgctagcaacttgttatatctcagtctacatcttactccttatacacatgcatgaacttgtatgaagcttgtgctgatttgctttcacctgaaatagaatcatactctaacattccaatgaaactatttttttttatttgaccacaggcatcccttgcacaccagcagttacagacctcaatctgcatactttctaggtaagcgagtttccagggcccaactgcattcaccagtaggacctgataatctaggtaccatcgaatgattctttcac

SEQ ID NO: 630889 - DNA, 633 bp, Homo sapiens
gaccagtctcacctggcctgcatggctcagggtctccaagcaccagaaccatgaccctctagaatggggaaagcacctgatctagggcggtcctctccctggttggtaggaagaataaaagcaataccagcttccggtcacccaggcctttttatgagctggcccatctgccctttagccgctgagaagttgggtagggagggtgttaggcactctcacaatattgcaggaagacattgttcttttctaaataagcatgtgaacaatacaaagtgaataatgcatgtaaataacactaagatgatacagacccatctaaccattcactcctcaccaatgcccagcaccccayggtgatttgctagcaacttgttatatctcagtctacatcttactccttatacacatgcatgaacttgtatgaagcttgtgctgatttgctttcacctgaaatagaatcatactctaacattccaatgaaactatttttttttatttgaccacaggcatcccttgcacaccagcagttacagacctcaatctgcatactttctaggtaagcgagtttccagggcccaactgcattcaccagtaggacctgataatctaggtaccatcgaatgattctttcac

SEQ ID NO: 630890 - DNA, 641 bp, Homo sapiens
ttacagatgaggaacccaaggcacagataagaaaaaaggaaagctatctggaagacacttgtacacattcttaacctctagccatgtgtgaggaaagaaggtataaatgagagtctggaagagcaaagaaatgcctgacagacatcagaaggcagagatgtttctgaatrtgtaccgtggggttaagattcagggtcgttttgttttgttttcagaggaagaggtgaacttagggaaatccatgccttaaagcagtggttttcaaccttttctgtgcatcaaaaacagattgctgaagccagcccccaaagagcttttggttcatgggtctggagggaccaagaatgtgcattttcaacaagttcccggatactgcggctctggggactcctcctggagaaccactcactgccttaaagaaatgaggcaagtgacaggttggaattttaatcaaaataatcactgaaaattaaaatcaattggctttaacttttttgtgttctttacttttgtttttatattttgtctttgaaaatgcaaaaaaaaaaaaaaaaagtgccaagattcattcaacagatatggagtgagtgcctaaggtgcatgagataacttcctaggagctgagaacacagtaggaacag

SEQ ID NO: 630891 - DNA, 642 bp, Homo sapiens
tagtttttttcctataaatgattacttatggtccaaggcaaattttaattctttgttaacttctttttaaagaaggtataaaggtatatttcatgtggcaaaatgcatctgccccattctttccattgatgtattttacaaagcttatttcatgagataaagatcctcttaaggttcagctacttggataagatctcacaggtaagtaaatggcagggctgagttggaatgccagtgttttgactccacagactctgttatcaaattctgtgcagtactgctcttcctgcctcatgacacctcgtctctaccttccagagatgttaaatatcaatttatgacattgagccatctcagtcaaaaatacagctaaacaaatgtttttstaagctatctgtgacacagtctacttttgaaccagtggataaggttgcaggcatttttcttttctaatacccttagctgggaatgggattggtgtggcttctagaatcacaattttgtcaatacacggagagagtctttgccctattcctcagaacaaaaccattactctttaccacaaaatttgaactgtcagtcatccaaacatttttgctctttataaacttgtcattttaaatcaatgagaaaacaaaggag

SEQ ID NO: 630892 - DNA, 564 bp, Homo sapiens
aggaaagtgaacaagttcaatgtgaaagaaaggctggttagggggtcaagaagtagcactcttctcaaatgccacygatggaagagagaagtgtagcagcctcagggaagatgagagtaaaaatgaactttctgtggactcacttggactcactgtcacttcacattatgcacaatgattttatataacaacatccttgtagagctcaagtaaaagcaagatacattgtacatacccaggcagctttttttaaagccttcatgaatggatgtttaactaatcttaaaatgcacattcagctgcactatctcatgatgtcctggatctgtgaaaaccgaacacacccatattatagattttacacacacacacacactcttctaaggttggacaaaggttaaacgggctggtcaaacttgagcataagtcacacctgtgtcaggaacagaatgccaaaagatccttaatgttactccagtagctgtgtattctggaactcccagacaggtacatcgtctgtctcctttgctcatccaaggttcagcagccacagtttaatcacac

SEQ ID NO: 630893 - DNA, 564 bp, Homo sapiens
aggaaagtgaacaagttcaatgtgaaagaaaggctggttagggggtcaagaagtagcactcttctcaaatgccactgatggaagagagaagtgtagcagcctcagggaagatgagagtaaaaatgaactttctgtggactcacttggactcactgtcacttcacattatgcacaatgattttatwtaacaacatccttgtagagctcaagtaaaagcaagatacattgtacatacccaggcagctttttttaaagccttcatgaatggatgtttaactaatcttaaaatgcacattcagctgcactatctcatgatgtcctggatctgtgaaaaccgaacacacccatattatagattttacacacacacacacactcttctaaggttggacaaaggttaaacgggctggtcaaacttgagcataagtcacacctgtgtcaggaacagaatgccaaaagatccttaatgttactccagtagctgtgtattctggaactcccagacaggtacatcgtctgtctcctttgctcatccaaggttcagcagccacagtttaatcacac

SEQ ID NO: 630894 - DNA, 564 bp, Homo sapiens
aggaaagtgaacaagttcaatgtgaaagaaaggctggttagggggtcaagaagtagcactcttctcaaatgccactgatggaagagagaagtgtagcagcctcagggaagatgagagtaaaaatgaactttctgtggactcacttggactcactgtcacttcacattatgcacaatgattttatataacaacatccttgtagagctcaagtaaaagcaagatacattgtacatacccaggcagctttttttaaagccytcatgaatggatgtttaactaatcttaaaatgcacattcagctgcactatctcatgatgtcctggatctgtgaaaaccgaacacacccatattatagattttacacacacacacacactcttctaaggttggacaaaggttaaacgggctggtcaaacttgagcataagtcacacctgtgtcaggaacagaatgccaaaagatccttaatgttactccagtagctgtgtattctggaactcccagacaggtacatcgtctgtctcctttgctcatccaaggttcagcagccacagtttaatcacac

SEQ ID NO: 630895 - DNA, 598 bp, Homo sapiens
gctttttttaaagccttcatgaatggatgtttaactaatcttaaaatgcacattcagctgcactatctcatgatgtcctggatctgtgaaaaccgaacacacccatattatagattttacacacacacacacactcttcyaaggttggacaaaggttaaacgggctggtcaaacttgagcataagtcacacctgtgtcaggaacagaatgccaaaagatccttaatgttactccagtagctgtgtattctggaactcccagacaggtacatcgtctgtctcctttgctcatccaaggttcagcagccacagtttaatcacactttcccaatgggaaagactttgcagcaattgcatctactcagtcaaaagggttccagaatgagaaaaggctggtgttaacgccttaagattacattcttagtccatgtggtttgcattcaaatgccttctgcaggacagccgtggagtttgtcagaaaacatcagaccgcctttgttggttgatgagtgagaacagttgtcaggagacacaggaaggaagaagccagcccaggtacacatgaaggggatgagcaggatattctaccaaaggcaagt

SEQ ID NO: 630896 - DNA, 561 bp, Homo sapiens
acagcctccctgttcacagattggtgattgcaggtttaggccatctatagtggatgggatccaatcttaacaaaatctttttgcctgtgagtgaagcgggaggggaggtgtgtgtgtactgggatgggggcatgggggtgagcagggtgatgctgctgagctgtccactgggacttctgaaccccaaatttttaacctgaaaaacttgaagaacacttggcaaaggaatttggtagctgtccgcaacattttggcctaagtattgttgatgtagtgtggatttgtggattgttccttatgtggatttttctacaactggaacactagaatgtacctatctcctcttaaatatcagctatgtcctgtcttgttatcatgtcattatgctggaactatgatcatatgtaagacatctttgttgagaattatgtttctattattaataggtttatattacttaaaatttaagctgcaggcmaacagaaataactagaagctgtaataaaatttgggcactagtcattccaattatcagagctcaaatttttttactctgatttt

SEQ ID NO: 630897 - DNA, 401 bp, Homo sapiens
gctacaggagtggccaatggaatacatggctgaggtggaatgtagaacatgtaactggagacaaaaaagtcaaggcacacaaagcccaaggcattagaagattaatctacttgagtgttgaaacactaaaaacactggcaaaattgaaggtaggtaagtaggtaaaaagtctgagagaaaaagcaatgcggtttagccagatggcagaagcttaaagggaacagtgtgtttgcaggcagaaaaggaagcagtgggtggagcaaggagaacagtgatccccgcttctttccaaaagcccaggggtaagagaactgyatgggacacaggaacctcaggggacagctgggcttcactgaaggttagaaagtggaggtaacattcagagaagagactgataataa

SEQ ID NO: 630898 - DNA, 646 bp, Homo sapiens
acagacaagtggaaacccgaaaagagaaagcagtcaattctatatttggaggaagatcatgaaaggttttacataggaaggatttcccctttggtcaatcagaaaagcatgaattctatcaatagtagaaatctataaatcagtctaactatatactagagaaaacacacagaaaatgcaagtaagtataaatatgtccagtaatttcttaacattatctttttactaataaatataatgggagtaaaaacatcaatctcacataagtgctaagagttttcaatatcaaatattaaataaacaagtgatatgcaaactatggtattatacctatatcagttattatttaaagatacatgaaatgcaaggtgatagaagacaagaaggaatagttttccctaatattaacttacatcattggagattcaagtaaaagtgttcacatagtttaaccaagcattcatttaatccaaaccaatattcttccattcacccaacaaatactgttacccaaacactgtctactttatgtcagatgtcccaggcttcttctagatatggaagacacagcagtgaacaaagtccttgttctagtgtgggaaacaagcaatgcaggttgagtycctaatctgaaaatccaaaatcc

SEQ ID NO: 630899 - DNA, 580 bp, Homo sapiens
caaatccaagaggcacagtccacaaacctgaagtaaattttattgagatgagcaatttacaataaaacactttacagcacattggaaaaactcaagtttcacaaattttacattcacaaaaagaagtcactttttgctcaaagtcacacacggacctcggggaagggacagatctaatgagccatcagtgggttctccccagagtaaaagsgttttctctgggacttggcagtactgaaggtcccggactaacaatgattcaacttaggatttttaaaaattttatgatgatgggaaagcaatacacattcagtagaaaccatacttcgcatatccatacaaccattctggttttcaccttcagtacagtattcaataaattacatgagatattccatacttcattagaagataggctttgtgttaaatgatttttcccagctgtaggctaatataagtgttctcagagcatttaaggtaggcttggctaagctacgatgttcagtaggttgggtgtattcaatgcattttcaacttccaatattttggacttacgatgggtttattgagatgtaagtca

SEQ ID NO: 630900 - DNA, 623 bp, Homo sapiens
gacactgaaacttgcgtgaatcctaaattgcatcaattatctatttgataaaagcttattctaatttaaaaccttatagagtaagagactgatatatatagcagtcttaaagatcacgtcatctgccttacattagtccagtcacgtgcttcgtaaaaaaaaaaaaaaaattacagtaccaaagcmcaggactacaaaggcaaaacatcacagcttctgattacattgaataaaaagtaccaagaaacgcaaatgataatcctgtattaatactgatgaattaaagagctataacagacttttcacagcatgctacatatatcgctcacaacttagggataaatgtctaccattgaaagtcaagaagttggcaatctgatttcatgtgcaattcagctacagtcttaatatatacattcattatgtagctgtcctgcaaaaccaggattttttaaaaagagttttcaagttcaacttctatttcataagttaaaagatgcgtccagttcttccatgaccaggaaagttattttcaggcttaaaggagctaatccaagtagcaaggccatgttgcaagtggacctgacagggttctttataaccttgctgagactgtgtatgtg

SEQ ID NO: 630901 - DNA, 623 bp, Homo sapiens
gacactgaaacttgcgtgaatcctaaattgcatcaattatctatttgataaaagcttattctaatttaaaaccttatagagtaagagactgatatatatagcagtcttaaagatcacgtcatctgccttacattagtccagtcacgtgcttcgtaaaaaaaaaaaaaaaattacagtaccaaagcccaggactacaaaggcaaaacatcacagcttctgattacattgaataaaaagtaccaagaaacgcaaatgataatyctgtattaatactgatgaattaaagagctataacagacttttcacagcatgctacatatatcgctcacaacttagggataaatgtctaccattgaaagtcaagaagttggcaatctgatttcatgtgcaattcagctacagtcttaatatatacattcattatgtagctgtcctgcaaaaccaggattttttaaaaagagttttcaagttcaacttctatttcataagttaaaagatgcgtccagttcttccatgaccaggaaagttattttcaggcttaaaggagctaatccaagtagcaaggccatgttgcaagtggacctgacagggttctttataaccttgctgagactgtgtatgtg

SEQ ID NO: 630902 - DNA, 603 bp, Homo sapiens
ggttttaaaataagcttcaataaagaagatatacaaatagcaaaaagtacatgaaaagatgctcaaccccattrgtcattacagaaattcaacttaaaatcacaatgagatcaactgtactcactatatagtataaagtagacccatgcaaggatggcgaggatgtgcagcaacggagctctcatttaatattagtggaaatgtaaagtggcacaaccactttggaaagctgtttagaagtatcttaaaatgataaacttacgtccaccatatgattcaggctttccactcctaggtattgatccaagagaaaagacaacatacatcaatacaaagacataccatgcaatgtgcatgttcggagcaactttatttgtaacagtccacaaccgggaaaaaaaaaaccaaatgtccagcatcagttgaataaactatggtataaccataaatgaatgctatttaccaataaaaaggaactgacatatataaccacatgggtaaatctcaaaaaaattatgctgagttaaagaagccagacgaaagacaacatatgatatgattccatttgtaaaaaattctagaaatgtaaattaatctatagtg

SEQ ID NO: 630903 - DNA, 603 bp, Homo sapiens
ggttttaaaataagcttcaataaagaagatatacaaatagcaaaaagtacatgaaaagatgctcaaccccattagtcattacagaaattcaacttaaaatcacaatgagatcaactgtactyactatatagtataaagtagacccatgcaaggatggcgaggatgtgcagcaacggagctctcatttaatattagtggaaatgtaaagtggcacaaccactttggaaagctgtttagaagtatcttaaaatgataaacttacgtccaccatatgattcaggctttccactcctaggtattgatccaagagaaaagacaacatacatcaatacaaagacataccatgcaatgtgcatgttcggagcaactttatttgtaacagtccacaaccgggaaaaaaaaaaccaaatgtccagcatcagttgaataaactatggtataaccataaatgaatgctatttaccaataaaaaggaactgacatatataaccacatgggtaaatctcaaaaaaattatgctgagttaaagaagccagacgaaagacaacatatgatatgattccatttgtaaaaaattctagaaatgtaaattaatctatagtg

SEQ ID NO: 630904 - DNA, 578 bp, Homo sapiens
ttctggttctccactatgacaatggttttaggaaacacttaytgagtacttataatatgctggacacttatgttcagcactaggagcacagaaattgtttaaatttctcagcccttaagatgcttacagtctaacgagaaagacaggaaaacaaaccgcattgacacaatatggtaaatgtttaaagagattcacagataatatggaacttttagcacatcttggcttccttaaaaaggtgatagctgagatgaattttaaagacacatgagggttagccaggtgaataaaggcatagaagggcattttagatgcaggtaacagcctggtcaaagaaatataggtactgtgtatttggagacaaggatgagctcagttcgagatgtgttgtgggaaaattaaataaatctagcaggcattttgatattatgaaaaaaaaaaaacaaagctcaaggaagagttaagggatggggatatagatttaggagtcatcaactgatgaagaaaagatgaagccagggaaacagatcaagggaaaagatcagagggtaagactgagaccctggggagaacccagg

SEQ ID NO: 630905 - DNA, 417 bp, Homo sapiens
tcataaaactccatcctattttaatgcacatttcctaatttattgaggtcatatggaactctttctagtattttaatatactggtaaacttgctaactttttaccttttttacatttaatagctgtgctctttcttacttataaaattcacataacataaaattaaccattaaacattataaartgtacaattcagtggcatttagtatcttcataatgtggtgcgaccatcacctctatccactcagaagacatcttcatcaccccaaaaggaagccctgcgcccattaagcagcaggtgtgcttttaatgagaatctaaatcatttcttccttgcttgctgcttaggttatcacctggagcggaattacaggatgttttgttgtattgcttcctgcacttctgcaggcctttcac

SEQ ID NO: 630906 - DNA, 584 bp, Homo sapiens
atgagcaatccagatcactttcctcaactgttactgccaaaagaccaagtttcaggcaaagcagtgtgtctgatagaagagatttccagtactgaaatccaggtggagatgaagatgccagcctatgaactaaaaattgtgcatgatcacagtgagaaacctctgaaaattgagttgaaagttgaattacctggtattaattctgtctctctctgtgaccttagtgtttctgaggtaagytgaatagataacactgtaaatttgtattggccagcattcactaacatatattatgccacagtaacaaactacataatttcaggggcttacaatgatttgctcaggttacccggtgaaggagcaattcccttctgagatgtgccattcacatctcagcaaagggaaaatagaatgatcaaaccatgcagtggatcgtaatacttctactcagacatgacacttcatgatatcacttctactcacgctccactggccaaagtaagtcacaaggccagttctacatcagtaggactgagaagtgtattctcacagtcacaggaagtcatatggcagggtaaacgtac

SEQ ID NO: 630907 - DNA, 550 bp, Homo sapiens
catgcaaacaaataagaacccaagagtataaactctatgacaaaagtcagtatgcaagcattaagaactctttcagaaatgtgtatttaaaatgaccagaattcccagatcatttgaaagctgcctcttaaatgcctcttatcaattcatcttaaatgtttgctatattaaattctttatccctgagtgccttcatttgacttccaattacgtattttcaactattaattggctatcccattrtgttaaaattaaatatgtacataactcaaaatctttcactaccaactaatttctgtttctctcaatatcagtgatatcaccattctcttaagtatctctatttcaaacctttgagtcttgagtctccttttccataatttcctttatccagtctgtttagtggaattcaagcttgttctctcaggactgatttgagaaacctaagcattcctagcccacctctggggtaagctcgccatctctggactgtttgagctatgcattcctataatttaactacacttaagtcaaaagtatattcaagaca

SEQ ID NO: 630908 - DNA, 424 bp, Homo sapiens
gaaaaataaacaatcagctgaagaggtctaagaaaatgctgacttttaaaatttcacttattttccttgaagttttctacccttcccatcgatgataaaccaagatcatgtaatgggaaaatttcaaaccagggctaaattctaaagtaaagcttcaattcaagcccttcccccaagagaattaattttyctgatttctctttctctcacatctaaggagaacattttaggcagttaaatttcagaacttcaaggtttcatcagggtcacctttatgtacttgtctttagggaaccacaattctacctatcgtacatttcctagaggaagtacttatcaccaaagggctaggcaaggccacatacatgtcccttaattaggagtacagagctaaaaatctggtgtctgattattaaatgtgcac

SEQ ID NO: 630909 - DNA, 550 bp, Homo sapiens
ctacccttcccatcgatgataaaccaagatcatgtaatgggaaaatttcaaaccagggctaaattctaaagtaaagcttcaattcaagcccttcccccaagagaattaattttcctgatttctctttctctcacatctaaggagaacattttaggcagttaaatttcagaacttcaaggtttcatcagggtcacctttatgtacttgtctttagggaaccacaattctacctatcgtacatttcctagaggaagtacttatcaccaaagggctaggcaaggccacatacatgtcccttaattaggagtacagagctaaaaatctggtgtctgattattaaatgtgcacaatatttgggtgtaatcggcattttaaaaattcagtaatgcccattataaataacttatctggacagactcaataataaaaataactgkttaaaataaaaagaaccacctgtttaataacatataaatatcttgttaagaatgaatcagtgtgacctgggagagtttagaaattcttgagttagttacaacaacatagtgat

SEQ ID NO: 630910 - DNA, 612 bp, Homo sapiens
tttctagtacctagaacagtgcttgatgcttggtaggaactcaataaattgttatggtatgaaaaactttattcaacaatcttcattgtgtgtttactaaccaccatgcaccattttagtctcatccctgctccttaatagctattttttcttaatcacttaacttttgttagtcaatttgttaccatttgcaaaaaaatgatatatagtagcataattttaatttgtcaatttaacgataaatacactgagcaagtactattacacagacaaagaactaagcctgtcctgttataggtgagaccagttaaaaaaaaaatgaaggcacaatgctkggtcttcaaaacatttaattctaaaagaagggtcaaaacagaagtacaaatgaaatataaggggagttcaaagaacattacattttattcgataggtttaggaaagtcttagtggtttagttatttcatgtgagtcttgaatggtggttgagattttgaagaggaatgtgttcctgatgaagcaaaaatataaaaaagaaaagaaatggatagaaagcaagggaagacaaaaacatgtctggttgcaaagaaacagagctcatagaaggggagctca

SEQ ID NO: 630911 - DNA, 612 bp, Homo sapiens
tttctagtacctagaacagtgcttgatgcttggtaggaactcaataaattgttatggtatgaaaaactttattcaacaatcttcattgtgtgtttactaaccaccatgcaccattttagtctcatccctgctccttaatagctattttttcttaatcacttaacttttgttagtcaatttgttaccatttgcaaaaaaatgatatatagtagcataattttaatttgtcaatttaacgataaatacactgagcaagtactattacacagacaaagaactaagcctgtcctgttataggtgagaccagttaaaaaaaaaatgaaggcacaatgctgggtcttcaaaacatttaattctaaaagaagggtcaaaacagaagtacaaatgaaatataaggggagttcaaagaacattacattttattcgataggtttaggaaagtcttagtggtttagttatttcatgtgagtcttgaatggtggttgagattttgaagaggaatgtgttcctgatgaagcaaaaatataaaaaagaaaagaaatggatagaaagcaakggaagacaaaaacatgtctggttgcaaagaaacagagctcatagaaggggagctca

SEQ ID NO: 630912 - DNA, 636 bp, Homo sapiens
caggatttctcccctcagagtgctgacagcatcaaaggacaaagcaggatcacagttggctggcgtcccaggttctggagggacaggttccgtgggtaccaggggggtctcaggggagtcagggggaggtcctaaagggaacattaggggaaatgtgatacgtttcaatatatgcccatttgtatgctttccaaacattctcacgtgcttgaactaaatcataaatacttaatgtagcatttgaaagctcttctgaataccatcattgcaaaactacaatggctgatttacccagtgtcactcaccatagagggactgaatgccatttatatcatcttgagacaggcggaaccgagtcaggtctgtgagtgagtgatagagtgggtacatcaaagcttcagtgttggctgagtgaaagagacccagggagtggccaatttcatgagcagcaacgagaaataaattggtccctatttaagaaatygagaacaatagttacttattttttaaatacatgtgcattacacaggtctgctgtgcattgtattggtttttacttcttggaaccacacagggctttttacaccttgtttgttggttaattgaacaattgactaattacacacttaatggaaa

SEQ ID NO: 630913 - DNA, 579 bp, Homo sapiens
ttaatctgtcactgtggcttgagggatactaatgaactttgaagtaggaccaaaatgtttatgtctgtcagccaacatgttattactgcaaattaccttttggcatgttgaggaagtacagtttattagaaatatctaactaaaaactaccagggctggatctatgggtcatacatgaattagatgtgaattgaaatagttttttgcttggtagaaatatgttcaatcaaatttctgtttcccattatatgagttgcttgattcagtcttgtctrtatattgtaaacactattcttaaaaacctagacagactcttactccaaacagcatgaaacagacaagatgatggttgtatttacaagagcaaaatgaaactgaatgttgaatgagatcagttagtagttaaatcttcaagtctcaaaataattgggaatgttaacttaggaagaaaagccatagattgttctaactaggacttagttatgacaagtagatgttgtcttcatagacagctgagttttatttttcatttaaataaaaaagattatttctccaaagaataaaactgggccttacatg

SEQ ID NO: 630914 - DNA, 406 bp, Homo sapiens
tcactatcatgagaacagcatggggaagacccacccccgtaattcagtcatctcccaccagatccctcacacaacacatgggaattatgggagctacatgatgagatttgggtagggacacagagccmaaccgtatcacccatgtttactgtggcactattcacaatagtgacaatgtggaatctacttaagtgtccatcaatagatgaatagataaagaaaatatggtatgtatacagaatggaatattattcagcccaaaaaattaaatcctttgaccatgtttgattatgttaaaaaaaaaaaaagaatgaaatcctgccatttgcagaaaaatggatggaactggaggtcattacattaactgaagtattgcatgttctcactcacatatgggaccttagaa

SEQ ID NO: 630915 - DNA, 406 bp, Homo sapiens
tcactatcatgagaacagcatggggaagacccacccccgtaattcagtcatctcccaccagatccctcacacaacacatgggaattatgggagctacatgatgagatttgggtagggacacagagcccaaccgtatcacccatgtttactgtggcactattcacaatagtgacaatgtggaatctacttaagtgtccatcaatagatgaatagataaagaaaatatggtatgtatacagaatggaatattattcagccmaaaaaattaaatcctttgaccatgtttgattatgttaaaaaaaaaaaaagaatgaaatcctgccatttgcagaaaaatggatggaactggaggtcattacattaactgaagtattgcatgttctcactcacatatgggaccttagaa

SEQ ID NO: 630916 - DNA, 358 bp, Homo sapiens
aattcagtcatctcccaccagatccctcacacaacacatgggaattatgggagctacatgatgagatttgggtagggacacagagcccaaccgtatcacccatgtttactgtggcactattcacaatagtgacaatgtggaatctacttaagtgtccatcaatagatgaatagataaagaaaatatggtatgtatacagaatggaatattattcagcccaaaaaattaaatcctttgaccatgtttgattatgttaaaaaaaaaaaaagaatgaaatcctgccatttgcagaaaaatggatggaactggaggtcattacattaactgaartattgcatgttctcactcacatatggga

SEQ ID NO: 630917 - DNA, 418 bp, Homo sapiens
gtatgtgttattattattattattattattattattattattattattattgagattgagtcttgctctgtcacccaggctggagtgcagtggcacaatcttggctcactgcaccctccacctcctrggctcaagtgattctcctgcctcaccacccaagtagctgtgattaaagcgcttaccaccatgcccagctaatttttctgtatttttagtagagacagggtttcaccatgttggccaggctggtctcaaactcctgacctcaagtgatccacatgcctcagcctcccaaagtgctgggattatgggcatgagccatcgcacctggctcaggtatgtctttattagcagaatgagaacagactaatatagtaaattggtactggtagagtaaggtgctgctgtaaagatacct

SEQ ID NO: 630918 - DNA, 418 bp, Homo sapiens
gtatgtgttattattattattattattattattattattattattattattgagattgagtcttgctctgtcacccaggctggagtgcagtggcacaatcttggctcactgcaccctccacctcctgggctcaagtgattctcctgcctcaccacccaagtagctgtgattaaagcgcttaccaccatgcccagctaatttttctgtatttttagtagagacagggtttcaccatgttggccaggctggtctcaaactcctgacctcaagtgatccacatgcctcagcctcccaaagtgctgggattatgggcatgagccatcgcacctggctyaggtatgtctttattagcagaatgagaacagactaatatagtaaattggtactggtagagtaaggtgctgctgtaaagatacct

SEQ ID NO: 630919 - DNA, 612 bp, Homo sapiens
agtcaaacatgaaataaagactattgtcatatctgaatgtatgacaatatgttttgtttgtgaatcactgtaaatagtttcaccacactgcaatttaaatgattgacaattggtaaactctgttacactttcttcaaccactgagggaaaaaaactgggtcaagtcaaaccttataatgttaccacacaattcccatggtgttagcttaaccctccaggacctcaaaaagcattttgtttgactctgttttgttgccttaattgccatttagggatataagctagaaatcccaatattttgaccacttatgtacataaactggacaaagcaattttctctgwaaagggagatttctgtaactttgaccactcttcaagttcaatgaccacattaaatcctgaagaatattcatctttgcctttggaatcatttgtccagacttcatcatcatctaagtaaacatcaccttcagacccttaccaggagaaaaggcatgagctggctgtctaaaagggcccatcaaatggggagaaatcaccatgttctaaaagggaaggaactcagaaaataactgggaaaatcatcaagacaataacaaagcctatcacttc

SEQ ID NO: 630920 - DNA, 598 bp, Homo sapiens
aaatgtgtgggtttttttttttttggcccaggtttgggtaaaatctggcgtttattttagagaaatgctagttttcccagaaatttgaagggggaaaaagtgcttatagtatatttgagcaaaggtgtccaaatgctgtgaaatctagttctctcctcttccaaattatagagcatgagaagtggtttgctggctttccggttcctaccctgggtgttttgggaagtgagaccacagcagtctagatttacattgtcgggattttaaatttttttcagtaaatgcttatatgaattcatcttttcttgttggtctttgactggtttgttttcagctcacattcttggctgacctgaagttattatatttatttatttttttaaataagcctttgcattaggtcatgagaacactgtattgaaccctattcacagcttaggtgtttactgcctggtggtggcaaaaaagctggctttgaggaagcagtgacagcatcttcagaattctctgaaasggaagtaggacttcaagtcatcaaccataacacagaaaagcaaaccagagtgagaacatgcaggaaatctctctgccccaataa

SEQ ID NO: 630921 - DNA, 455 bp, Homo sapiens
ctcaggattgcacttttcccaaatcaaggtttctgaatgcttggtaatttgtgcgtgtattcttaggagtctgcaatgttcccatgagaattttttattttgyattttcattttaatgatcaactaaaagtaatcaacatgagcataacctaaattatttgaatgaccaccttgtaaccaggaactatggcataatttcagggtccaagtttattattgttaagttttaaaattattgaggatgactgaagaaagaacagaacagaactgactaggccaagtaaaaactgaatgatgcgataagcattgtgtgaaggaagattctggggtagagaaagggtgggagaatttcattacacccatatgcgaataaggaaagtcaggaacacattcatattgggagccaaaatctagtttcagcaatttgcactgaacgttgtatcaacttaatggag

SEQ ID NO: 630922 - DNA, 596 bp, Homo sapiens
tgaattccctgtactttgtacagcatctggaacacagtaggtatacacaggatggatgggtggatggatggatacatggatggatggatggggcayattcaatacaaaccttagaagtaccaatgacagtccaggcatggtgattcatgcctgtaatcccagcactttggaaggctgaggcaggatcacttgtggccaggagtttgagaccagcctggacaacacagtgagacctccatctctacaaaaaattaaaaattaacaaaaaattactaatgacagaatttcatgaataattggatatttgaacaaccagaaagagtcaaagatgacttgaagcttcctagcacagattttaaggaatacaaaaggatgagctggtttgaggaggtgagagatattttaataaatttatatcctgcacctaaaaatgtggagaggggacgatcacatggcacagaggaaacaggaaggcatcaagggggctgaatgcagcctggagggccctgtctctgtgggtgggagtcgggggtactcatcactctcctggaccctgacaagctactactagggtttgctcggggataccagagggg

SEQ ID NO: 630923 - DNA, 398 bp, Homo sapiens
cctgagtagctgggaccacaggtgggcaccaccacgcccggctaatttttgtatttttagtagagatggggtttcaccatgttggccaagctggtatygaactcctgacttcaactaatcagcctgccttggcctcccaaattgctgggattactggtgtgagccaccatgcctggcctcttccaaaggcatttggaagaggcatttggacatactcatgaatgagtatgtccaaaaagccctatagaaccaagaaaataaaaaaacaaattgttgttgccaattattgataaaataatggcatcttattgttttaatttgtatttttatgactgctagggagatttaatatttttacttacacgcttttctttgaattttctgttcatatatttagc

SEQ ID NO: 630924 - DNA, 426 bp, Homo sapiens
cctcaaaaattaaaaatagaactaccaagtgatccagcaataccacttttgaatgtttattcaaaacaactgaaaataggatgtatttgcactcccatgttcaatgaagcattattcctaacagccaagatgtagaaatatcctaaatgtccatcgacagatggatggttagagaacatgtattagccaggtgtggtgactcacgcctgtaatctcagcactttgggaggctcargtgggcagatcgcttgaggtcaggagtttgagaacagcctggccaatatggtgaaatcccatctctactaaaaatacaaaatatagccaggcatgggggcatgcacctgtaatcccagctactcaggaggctgtggtaccagaatcgcttgaatctggaaggtggaggttgcagtgagctgagactgagat

SEQ ID NO: 630925 - DNA, 426 bp, Homo sapiens
cctcaaaaattaaaaatagaactaccaagtgatccagcaataccacttttgaatgtttattcaaaacaactgaaaataggatgtatttgcactcccatgttcaatgaagcattattcctaacagccaagatgtagaaatatcctaaatgtccatcgacagatggatggttagagaacatgtattagccaggtgtggtgactcacgcctgtaatctcagcactttgggaggctcaggtgggcagatcgcttgargtcaggagtttgagaacagcctggccaatatggtgaaatcccatctctactaaaaatacaaaatatagccaggcatgggggcatgcacctgtaatcccagctactcaggaggctgtggtaccagaatcgcttgaatctggaaggtggaggttgcagtgagctgagactgagat

SEQ ID NO: 630926 - DNA, 420 bp, Homo sapiens
ctctctcctactcattttattatatatacatgtatgtatacattaagcttacacagatatgtacaaatacacatatatgaatatacttttcatgatccccaccatacactgagttcagtgagaatacagaaaagataataggcaattttaaggccaaaaaaaaaaaagggtggggggaggccatgcccctaactcaaacckggagccaggaaatacttctgagatgaagtgacatttaaaatgagacttaaaggttgaagagggagttagctgggatgggaagaatgtcctatactaaggccagaaaggatagagagcatcacatcttcaaggaactgaaagaatgactgaagctgaggttgcaatggggtggggaggtatggaggtgggggagaggagaatgcggggccacagagtgag

SEQ ID NO: 630927 - DNA, 509 bp, Homo sapiens
gatcctcggatattatatttatatactaacacaaraagagacaagagcttacattttaatcctcatggattgggagctgtcttgcataaatcagcaaatcctttttctatggtatattacgacctccttaaaatattttgatgttcttataccataatgctataatctagaaaatcaccccagagatgatacatattggaaagactattacttatggtcctcctaagatatcccattaacttccaagttgcgaccttctacctacacactaaccacttcaacattttaatttctggttcagacacctttattgggccttgaccccatcccgttacctactagacatctccccctggctccccagtttcaacagacctagttatttcctttccatcaatcacaccaccatctcttctgcaaccagattttccttctctattcaaagtcacttcttaaaccagatgcttaaaaaaatcaccctatactattccttttcagccatactccat

SEQ ID NO: 630928 - DNA, 573 bp, Homo sapiens
agaagccatggatgccaggacctttgaaaagtgggcagatgtcagcagcgtcaaaagcttccacccctaaccattccctgatgtccaaaaatagtcaaagacatgaggaataaagactcttatgcttgacaattaaagaaacacagctattcagaaaaccttggaaagcacagtctcagtaggatagtagggctttgggttgaagccacgtaacaaggattggatgaattaattacatgtcagaagtagactcagtgcagttcatgaactatgcctcgagcamtgacatgtgctataacagcatttgacattggggtagagagataggaaaagaatcatcaactataggagacaactagtgcctccaccctcaagtaacatattatctagaagagagagggagaggaaagctgaggacagtgtgagagtctgtcagaatcaaatgcattcactactcatgcccccagaagtttactgtttaatgtggcaatgatgaacctgttcaggttaccatttctgtggcggctttgagtcctttagaaacattggcaccatcattgtgttgtaaaattt

SEQ ID NO: 630929 - DNA, 456 bp, Homo sapiens
agatctgatcaggcaagacaccacaattatagtttccatgtgccaagcrtcatgtatatttagccaccacacaccagaacaaccagttggctccactcttatggtcatgcatacattctgattggtcaatgccaaagctatattggttgttaatttaaatggcactatagtgccaactactaaggtaattctttacaggtattgaaagtgtatttacatgtattgaatatatgtattgaaaatacatctttatatgtatagaaaatgcttctctgtatgttttcttcatagcatttactacaattacatatttttatgtaattagattatctttctgcaacattagactgtaagctacatgaaagctggagcacaaaactatttgctcaacattgagcctcagtatctagcacataatagatgttgaataaatatttgtcaaatgaatgaattcat

SEQ ID NO: 630930 - DNA, 456 bp, Homo sapiens
agatctgatcaggcaagacaccacaattatagtttccatgtgccaagcgtcatgtatatttagccaccacacaccagaacaaccagttggctccactcttatggtcatgcatacattctgattggtcaatgccaaagctatattggttgttaatttaaatggcwctatagtgccaactactaaggtaattctttacaggtattgaaagtgtatttacatgtattgaatatatgtattgaaaatacatctttatatgtatagaaaatgcttctctgtatgttttcttcatagcatttactacaattacatatttttatgtaattagattatctttctgcaacattagactgtaagctacatgaaagctggagcacaaaactatttgctcaacattgagcctcagtatctagcacataatagatgttgaataaatatttgtcaaatgaatgaattcat

SEQ ID NO: 630931 - DNA, 612 bp, Homo sapiens
agccaggccacatcttgaatgcttggctgcttagaaatttcttctgccagataccctaagtcatcattctcaaattcaaacttccacagatctctagggcatgggaacaatgcagccaagttctttgctaaggcataatacttgtggcctttgctccagttcccaataagatccacatttccatctgagacttcagcaggctggacttcactgtccatatcactatcagcatttcggtcacaaccatttaactagactctaagaacttccaaactttccctcattttcctktctttttttgagccctccaaattcttccagcctctacctgttacccaattctaaagctgcttccacattttcaggtatccttatggaaaagccccactccttggtaccaattctctgtattaggctgttctttcattgctataaatacctgatactgggtaatttataagaaaagagggtttattggctcatagttctgcaggctgtacaggaagcatagcactggcatcttgcttctgaggagacctaaggaagcgtttacttatggcagaaggtgaagcaggagtttgcatatcacttggcaaaagcaagagcaagaga

SEQ ID NO: 630932 - DNA, 562 bp, Homo sapiens
atgaaagaaaatggttaaacatagggaaaatgtttctgaaatcaagtgaaacatcttttctatttttgtttgtttattttttgagacggggtctcactctatcacccaggatggagtgcagtggtgtaagcatagctaactgcagcctcaacctcctgggctcaggtgatcctcttgcctcagcctactgagtagctgggacctggcttcttctccttctccttcttcttcgactaggtcttgctctgtcacccaggctggagtgcagtggtgtgatcacatttcactgcagccttgacctctccctgcctcgtgtagtcctcccaccttagcctccctagtagctgagactacaggcacataccaccacccccagctaatttgtttttttttggtttggtttggtttkgttttggtagagactgtgtttcaccatggtgcccaggctgatcttgaaatcctgggcccaaacaatgggtctcccaaagtgctgggagtgcaaacatgagccactgaacctggcctaaacatcttttcttaaaaagaaaaaaaaagaagggtc

SEQ ID NO: 630933 - DNA, 573 bp, Homo sapiens
acaggcacataccaccacccccagctaatttgtttttttttggtttggtttggtttggttttggtagagactgtgtttcaccatggtgcccaggctgatcttgaaatcctgggcccaaacaatkggtctcccaaagtgctgggagtgcaaacatgagccactgaacctggcctaaacatcttttcttaaaaagaaaaaaaaagaagggtccagtgcagtggcccacacctgtaatcccaggactttgggaagctgaggcaggcagatcacctgagatcaggaattcaagactacctggccaatatggtgaaaccccatctctattaaaaatacaaaaactagccgggcatggtggcgctcacctgtaatcccagctacttgggaggctgaggcaggagaattgcctgaactcgggaagtggaggttgcagtgagctggaatcacaccactgcattcaagcctgggcaactgagagagactctgtctccaaaaataaaaatattggcaatgaaccctctttgggtgaggaaagattgaaattatacctaaagacaatgtaccatatagcaattg

SEQ ID NO: 630934 - DNA, 606 bp, Homo sapiens
attatagtatatgagatgcacatatatttgcttgtactttccatgttatctactactatggaggtatgcttatatatacttctattgtttttctttagagatacttctatttgttatttatgttgtaggtactgtgatttctcattcacaaataatagctcatatctgggattggcarttatggccagtggattaaattcagctaggcatctatgtttataagttttattggagcatgggtacattcatttagatattgacagttcatatgctacattggcagaattgagtacaggcatacctcagatatattctgattttggttccagaccaccaaaataaagtgagttacacaaatttcttacaattttacggtgcacatatgtattgactacgctgcagattattaagtgtgtaatagcattatgtctaaaaagatattaattttaatttaaaaatgctgtactttgttgctaaaaatacaaaagatcatctgaaccttcagcagtcataatgtttgcaggtggaagttcttgtctcagtaatgatggctgctgattgattagagtggtggttgctgaaggttggggtggctgtggaaatttc

SEQ ID NO: 630935 - DNA, 606 bp, Homo sapiens
attatagtatatgagatgcacatatatttgcttgtactttccatgttatctactactatggaggtatgcttatatatacttctattgtttttctttagagatacttctatttgttatttatgttgtaggtactgtgatttctcattcacaaataatagctcatatctgggattggcagttatggccagtggattaaattcagctagscatctatgtttataagttttattggagcatgggtacattcatttagatattgacagttcatatgctacattggcagaattgagtacaggcatacctcagatatattctgattttggttccagaccaccaaaataaagtgagttacacaaatttcttacaattttacggtgcacatatgtattgactacgctgcagattattaagtgtgtaatagcattatgtctaaaaagatattaattttaatttaaaaatgctgtactttgttgctaaaaatacaaaagatcatctgaaccttcagcagtcataatgtttgcaggtggaagttcttgtctcagtaatgatggctgctgattgattagagtggtggttgctgaaggttggggtggctgtggaaatttc

SEQ ID NO: 630936 - DNA, 606 bp, Homo sapiens
attatagtatatgagatgcacatatatttgcttgtactttccatgttatctactactatggaggtatgcttatatatacttctattgtttttctttagagatacttctatttgttatttatgttgtaggtactgtgatttctcattcacaaataatagctcatatctgggattggcagttatggccagtggattaaattcagctaggcatctatgtttataagttttattggagcatgggtacattcatttagatattgacagttcatatgctacattggcagaattgagtacaggcatacctcagatatattctgaktttggttccagaccaccaaaataaagtgagttacacaaatttcttacaattttacggtgcacatatgtattgactacgctgcagattattaagtgtgtaatagcattatgtctaaaaagatattaattttaatttaaaaatgctgtactttgttgctaaaaatacaaaagatcatctgaaccttcagcagtcataatgtttgcaggtggaagttcttgtctcagtaatgatggctgctgattgattagagtggtggttgctgaaggttggggtggctgtggaaatttc

SEQ ID NO: 630937 - DNA, 631 bp, Homo sapiens
tttgttagacaaagagaacatttagaggtgctatacaaacatgaaactaagcctgtatctagtagtggtatcatgagaacttttattattatttacctattttttcctaatactttagaatttgcataccttctgggaagaaagcacaaaaaaacacattatggtttacattagaatgagataaaattcgtcaactggccaaaggaaatctaggacccaatattatatagaaaataaaatatttcagtgaatgtgcttattaaagcatttcatcaaccatgaactatctttttaaatcctttcagtctaattgtggatattatttatattgacttcttaagggccaatatctttatgaatttttcatatctttatggttttttttgtctaatactacaatactatgaatctggcattgtctcgtttcataggaaaccatgacttttaggaagatagaaatagtaagatattcagggaaaatacaaaatttaaacaaagaataagcccmattataccataaatgatttaattgctttttaaataatggtatttgaataattatgttgtatcatagaagcaatagatttagattaaattaaaacttactaggggttcctgctttcctacacag

SEQ ID NO: 630938 - DNA, 631 bp, Homo sapiens
tttgttagacaaagagaacatttagaggtgctatacaaacatgaaactaagcctgtatctagtagtggtatcatgagaacttttattattatttacctattttttcctaatactttagaatttgcataccttctgggaagaaagcacaaaaaaacacattatggtttacattagaatgagataaaattcgtcaactggccaaaggaaatctaggacccaatattatatagaaaataaaatatttcagtgaatgtgcttattaaagcatttcatcaaccatgaactatctttttaaatcctttcagtctaattgtggatattatttatattgacttcttaagggccaatatctttatgaatttttcatatctttatggttttttttgtctaatactacaatactatgaatctggcattgtctcgtttcataggaaaccatgacttttaggaagatagaaatagtaagatattcagggaaaatacaaaatttaaacaaagaataagccccattatacmataaatgatttaattgctttttaaataatggtatttgaataattatgttgtatcatagaagcaatagatttagattaaattaaaacttactaggggttcctgctttcctacacag

SEQ ID NO: 630939 - DNA, 528 bp, Homo sapiens
acttcttccttaaagctcatgaaccaacctctgctagcttcaagcttcacttctgcagctttctcacctctcggtctttatagagttgagaagagttagagccttgctctgaattaggctctggcatgagggatgttatggctggtttgatccagaccactaaaactttctctatatcagaaataaggctgttttgctttcttgtcatttgggtgttcactggagtagcacttttaatttccttcaataacttttcctttcatccaaaacttgaccgtcgggcacaagaggcctagcttttgtcttttcttggcttttgacatgccttcctcactaagcttaaccatttttggcttttgattcaaagtaagagatatgyaactcttcctttcctgtgaacgtttagaggccattgtaggattattaacatcttaacatttttgtctcagagaatagagaggcctgagaagaggaagagagacaagaatggctggtcagtggaacagtaggaatatatacaacatttat

SEQ ID NO: 630940 - DNA, 528 bp, Homo sapiens
acttcttccttaaagctcatgaaccaacctctgctagcttcaagcttcacttctgcagctttctcacctctcggtctttatagagttgagaagagttagagccttgctctgaattaggctctggcatgagggatgttatggctggtttgatccagaccactaaaactttctctatatcagaaataaggctgttttgctttcttgtcatttgggtgttcactggagtagcacttttaatttccttcaataacttttcctttcatccaaaacttgaccgtcgggcacaagaggcctagcttttgtcttttcttggcttttgacatgccttcctcactaagcttaaccatttttggcttttgattcaaagtaagagatatgtaactcttcctttcctgtgaacrtttagaggccattgtaggattattaacatcttaacatttttgtctcagagaatagagaggcctgagaagaggaagagagacaagaatggctggtcagtggaacagtaggaatatatacaacatttat

SEQ ID NO: 630941 - DNA, 634 bp, Homo sapiens
gttttgggtccacaaaccaatgactaaaactgcagtattcacattttaattgtcagttaatttaatagttcatgtagtattgattattctcttcaacatttttggatgttgcttctatctgtaggaaagacaaataggatttgggattccaaaaactgtgtgttcctactttaaaatatttttttggcaacatatctcttttgcctgtgatagtgttttttttgttgttgttgttgttttttaaaatattctggttaaatctagtttgagagaaacatttcgttttgaaacagtaccacaaatacccaactcttgttgttgacctaaaattttgatgaaaatggggtatatcagtttatatagttcctgtattaataagagagaaatcaatctttccagtcaccagaaaacttttttttttttkgcttaatgttaaattgttgctatgttttgtaattatagccctagtttttcattttgggtatcacatctatttctagtaaagataattaaggtgaactgattctattttgggatccaagtacatgacttaatcattggttggctgctgtatctctagtctcaaaaaaaaaaagtctagtatttggccagtactccatttagcatgaggctg

SEQ ID NO: 630942 - DNA, 634 bp, Homo sapiens
gttttgggtccacaaaccaatgactaaaactgcagtattcacattttaattgtcagttaatttaatagttcatgtagtattgattattctcttcaacatttttggatgttgcttctatctgtaggaaagacaaataggatttgggattccaaaaactgtgtgttcctactttaaaatatttttttggcaacatatctcttttgcctgtgatagtgttttttttgttgttgttgttgttttttaaaatattctggttaaatctagtttgagagaaacatttcgttttgaaacagtaccacaaatacccaactcttgttgttgacctaaaattttgatgaaaatggggtatatcagtttatatagttcctgtattaataagagagaaatcaatctttccagtcaccagaaaacttttttttttttggcttaatgttaaattgttgctatgttttgtaattatagccctagtttttcattttkggtatcacatctatttctagtaaagataattaaggtgaactgattctattttgggatccaagtacatgacttaatcattggttggctgctgtatctctagtctcaaaaaaaaaaagtctagtatttggccagtactccatttagcatgaggctg

SEQ ID NO: 630943 - DNA, 634 bp, Homo sapiens
gttttgggtccacaaaccaatgactaaaactgcagtattcacattttaattgtcagttaatttaatagttcatgtagtattgattattctcttcaacatttttggatgttgcttctatctgtaggaaagacaaataggatttgggattccaaaaactgtgtgttcctactttaaaatatttttttggcaacatatctcttttgcctgtgatagtgttttttttgttgttgttgttgttttttaaaatattctggttaaatctagtttgagagaaacatttcgttttgaaacagtaccacaaatacccaactcttgttgttgacctaaaattttgatgaaaatggggtatatcagtttatatagttcctgtattaataagagagaaatcaatctttccagtcaccagaaaacttttttttttttggcttaatgttaaattgttgctatgttttgtaattatagccctagtttttcattttgggtatcacatctatttctagtaaagataattaaggtgaactgattctattttkggatccaagtacatgacttaatcattggttggctgctgtatctctagtctcaaaaaaaaaaagtctagtatttggccagtactccatttagcatgaggctg

SEQ ID NO: 630944 - DNA, 540 bp, Homo sapiens
gcatcttagttcattagatatttaatccaaaatacacacaaatttcccagtggataaatttgaagtcttggctttttggctattcttatttatactttttgcagataattacgttaggaactyattcacatagagtttgctttaagctttattgatcttccctcgctcttgggttctgtacagtgttgaacacggggggttaagggttccttgtcatttcacatttatccatacttaaatacatacagaatgtaatttaatcttggcatgaaaatcaatattggtaggaaactttgatgaagagtattggtagcaaaattttatgacatttataataaatgttttatcagtattggtagagaattttatgaatttttatagcaattcccagtgtaataataaaacatggcttgactctcacttttagtcaatgcttagtaaatttgtcatcacacttaaatgagtcatacacacccccagagtagagtatcagaaaggtaaacatcctgaaagtggcgtgtatttagcttgacaaaaaat

SEQ ID NO: 630945 - DNA, 540 bp, Homo sapiens
gcatcttagttcattagatatttaatccaaaatacacacaaatttcccagtggataaatttgaagtcttggctttttggctattcttatttatactttttgcagataattacgttaggaacttattcacatagagtttgctttaagctttattgatcttccctcgctcttgggttctgtacagtgttgaacacggggggttaagggttccttgtcatttcacatttatccatacttaaatacatacagaatgtaatttaatcttggcatgaaaatcaatattggtaggaaactttgatgaagagtattggtagcaaaattttatgacatttataataaatgttttatcagtattggtagagaattttatgaatttttatagcaattcccagtgtaataataaaacatggcttgactctcactttwagtcaatgcttagtaaatttgtcatcacacttaaatgagtcatacacacccccagagtagagtatcagaaaggtaaacatcctgaaagtggcgtgtatttagcttgacaaaaaat

SEQ ID NO: 630946 - DNA, 570 bp, Homo sapiens
atattgtttgtaggttattggaaggttgcatgctgtggttttgattygcaattcttgatataaacaattagagacgataaactcttttttattttttaatttaattaattacttaattaatttattttttgagacaaagtctcgatctgccatccaggctggagtgcagtggcatgatctctgcccactgaaaccctctgcctccccagttcaagtgattctcttgcctcagtctcctgagtggctgggattacaggcatgcaccaccatgcccacctaatttttgtttttgtatttttagtagagacagggattcaccatgttttccaggatggtctcgaactcctgaccacaagtggtcctcccagcttggcctcccaaaatgctggaattgccaggcatgagccctgatgccaggccaaaaatctctttctgattaagagaaaccacatttgccaagtacaaatgaagtcctaaaaattatcttatatataactatatgttacatttatagatacttaaaaaattgaatgaaaaatgggtattgatgaattgccttgtggtacagca

SEQ ID NO: 630947 - DNA, 553 bp, Homo sapiens
aggatgctagtgtttttatgggaattgcattgaatttgaagattgtttttggcactatggtcattttcacaatattgattctrcccatccatgaggatgggatgtgttttccatcccactggaagcacttgtttgtgttatctatgatttatttcagcagtgttttgtagttttccttgtagaggtctttcatgtccttggctaggtatgttcctaagtattttattttttttgaatctattgtgaaaggggttgagttcctgatttctcagtttggtcgctgttagtgtatagcagagctactgatttgtgtacattaattttgtatcctgaaactttgctaaactcgtttaccagttctagaagttttttggatggccgtttagggttttctaggttatacgattatatcatcagcaaacagtcacagtttgacttcctctttaccgatctggatgccatttatttctttctcttgtctgattgctgtggctaggacttcctgtactatgttgaatagaagtggtgaaagaggtcatccttgtagtgttct

SEQ ID NO: 630948 - DNA, 521 bp, Homo sapiens
catccatttccagtagctttgatcaagtaagtttttactgtacactytaaatgttgctcagatttgcttgggtctttagggctcactaaaggcctagagatgccaatgtgtagttttgatgaggcaatctatataaggctttactggctccacccagatgttacttttgatacccttcctcagtctcttaacttggttgttgatcattgagcctcttatttcttggggacccctacacagataattagtaacctgcacatataaagcattgctagttgctatacttcagaaataactcaatccgggtattggtaggaaatcacctgccaaatgttggggttgtatggctcttccactctactctttttgcttcttggacttctcaaattttttttctccgtactaaagatgtatatgtggaagatacagcagcctactacataagcagatagctacttggaagtgagatgccagtctccagtgtaggtatccttggtgtctaactcttcatttaaggcacc

SEQ ID NO: 630949 - DNA, 570 bp, Homo sapiens
gtttttgtatatttcatcctgttttctatttatttatccttctggttagtatttcactcacctatattcaatgcatcttattctgcctgtttcactggcttcttacttgcttatgtcacttctaatgagttttgaccactttgttttctgcttttagagataaatattctcaaatcacacagtaaatctacactataaaaggttattaacttgtacaggyttatctgtaaacttggatgctaaaggtctacagaataatagcaattgtgatcaaatttattttaatctttccccccatattcaggctaactagatttcatttgtgagaagaaaaagacttaaatgtatagtcttaaagtattattcatcttagatatcctgatggtataaagatatcaaaaaatcaaataaggattacaataaataatacagatccccttctaaagaattattagactatgtgctccaaaagaaaaaatgtaaatgcaaataaagttagagagctaagatattggcaaaattcattctttggcataaatttagtactggaatgtaaaatctgaaaatccc

SEQ ID NO: 630950 - DNA, 570 bp, Homo sapiens
gtttttgtatatttcatcctgttttctatttatttatccttctggttagtatttcactcacctatattcaatgcatcttattctgcctgtttcactggcttcttacttgcttatgtcacttctaatgagttttgaccactttgttttctgcttttagagataaatattctcaaatcacacagtaaatctacactataaaaggttattaacttgtacaggcttatctgtaaacttggatgctaaaggtctacagaataatagcaattgtgatcaaatttattttaatctttccccccatattcaggctaactagatttcatttgtgagaagaaaaagayttaaatgtatagtcttaaagtattattcatcttagatatcctgatggtataaagatatcaaaaaatcaaataaggattacaataaataatacagatccccttctaaagaattattagactatgtgctccaaaagaaaaaatgtaaatgcaaataaagttagagagctaagatattggcaaaattcattctttggcataaatttagtactggaatgtaaaatctgaaaatccc

SEQ ID NO: 630951 - DNA, 596 bp, Homo sapiens
agattgtgtattagctttgtttttctcacaacgaatttccacaaatttattggcttcaaacaacattcgtttattgcctcatagttttctggggttggagtccaggcaccaagtggctcatttagattctctggagtctcacaagagtgaatcaagttgtcagcagggctcttgggtaatttaagttggcagaattcagttccttgtaattggagaactgaaattcctattttcttgctggtcatcggctgggggtagttctcagcttttagagaactcacatgtcttccyatatggatccttctaaagcagcaatgacaggacgagtttctcacacacttcgatttctctgacagatccttttctgaggcagtctccctggctggaagcagtccttactgttaaggactcactcaattaaattgggtttctcagacaatctgggataatctctctattttaaagcccttaatcttaattatacctgcaaagtacctagattaatgcttccttgaataagtcagggataggaatctggaggaaatagctttagaattctgcctaccacatactaattaactccagatgatcataga

SEQ ID NO: 630952 - DNA, 626 bp, Homo sapiens
tgttgtggggtggggggaggggggagggagagcattaggagttaaatgacgagttaatgttaatgttaatgttaaatgacgagttaaatgttaaatgacgagttaatgggtgcagcacaccaacatggcacrtgtatacatatgtaactaacctgcacgttgtgcacatgtaccctaaaacttaaaatataataaaaaaatgagtaaactattaacataaagaaattcccttattttgataaaggttccatcaaatatacctggtagttagaaaacattaaaaaattacaatagcatataaataataactattttgaataaatctaacagaacctttgtaagaatgtaaagggataattataatgctttactcacggacactaaagacgtaaataaatggagggataatatgttcatgatttggcagtcttgtgggatatagattgattccaatcacaataaaaattgcaaccatttttaaaaacattttatctttatacagcagttttaggttcacagcaaaattgagaggaaggtatttcatatttcccctgcctccacatataattgccttcctcattatcaacacccccaaacagagtggtaaatatgttacaattgatgaa

SEQ ID NO: 630953 - DNA, 473 bp, Homo sapiens
cacatatcctttttacattcataattatctcacgtttaatccccagtctgagtattcttttttaacttcagatgcatatttcccactrtctgtttgaatatctaatggcatttcagacttaacctttccaaactgaacttctgctattaactgccacttttgtttctcccacattatccctcatatcagcctatggtgactatgttgggaaaaaataactaaaaacaaaatcttctcccagccaaggaaaacactccacagtggtagaagagaaataaaactgttctattattgaataagaatgtgatagacatcacagtcaatctgctaagagattgcaaagaaagaaaatctcactctttcatatagctatgcagatagaattccctatatgtgttctcaagttaaaaaattagtccttaggaaagaggacttgacttgatggtaccatttgtcacatgtaacttgtccta

SEQ ID NO: 630954 - DNA, 555 bp, Homo sapiens
agaggaaagaagagagaacagtgtctagataactagactatttcaggctaaatatagttgtatttgaatatatgatayaatgatggcacatattcaaaaacatattcaaaatatatcactcatcatatattcaaatacaatgcttatgacaaaacatgagatttaaaaaattgtttaaaatggtggttgtcaaactgttgcatgtctcacctggaaagcttgttaggacagattgctggggcccaacctggtgtctgacacaggtctgagtagagcttaggaatttgtatttctaagaagttccttaggatgtcaactctattggtacaaggattaaactttgagaaccactgattcacagtgtggcctctttgtttcaagaaattcaaattagtacaaagttatcttagtgaaacctaggtggtaggagatacaagtaagcaagtacatttcaaaggtcacattgggtgggaagagaacaaagtaaaatgtaaaggaattttaaaagtgttatagaatggggatggaagcagtgagaaaagtttccttgattcc

SEQ ID NO: 630955 - DNA, 457 bp, Homo sapiens
tacccacatatttattaacagcaaaccagtcattagcattgtttctatagctttaagttaactaaaagtatcccgtatgggaaatgaagggatgggctgaattaattgcagcaggaacatgcccttaagacacagattgctcatgcttttgtttgtggcttaaaaatgcctttaagcagttttccaccctgggcaagccaggtgttccttgccctcattcccrtaaacccacaaccttccagcttgtgcattagggtcattatggacatgttacagtgctgcagaaattttacttatggccagttttgaggccagtttatggccagattttgggggcttactcccaatagccaggtaccttttcacaatccctttttagtaggcactctcttcatttttaactttatataagacaatgtttatgaataaagtttattttatctcattagatgtctat

SEQ ID NO: 630956 - DNA, 508 bp, Homo sapiens
tgttttttgatgagcagacgtctttaattttggagtttaatttatagactcttccttctagttattgctttctgttctgtcgtaaaattccttgctattgccaagtsttattttcttctagaagttttatggttttgaatatatttgggtttataatccatctgaacttaatttttgcatgtagtgtaagaaaggtcaagattcttccctctccatagggacatcctgttgatacagtaccattaactgaaatgaaatttctttcatccttgaattgctctgactctttcgttatatcaatgaccttataagcttggatttctctgggctcttatttatgtcttaatgatctatttgatctttatcttgactacctaagttcatttgcaacttagcaatgccattttcagctgttcaggatgatttcaaacaaattctcactatatccttatacttcttgaagggtggaaaaggtcagacaaaattaaggcaccctgcaaggaatgac

SEQ ID NO: 630957 - DNA, 579 bp, Homo sapiens
tgttgaataaataaatgaaattataacagttctcctgaactagagatctgaaaatctggctgaatttgataatgcaaaatgtgacaggcaaagatgacagatcattctctctccagcccaaagctgagcctaggcttctctcattagggcacctttcctggttgcttttgcaggcaccctgacctgggagatgcaagcctcccacctgtggccagctgcgacaggagtctggggtttttctctgtactcccttgtaccaatgggttgccaggctgtctcaaagcagactgaatttagtcttctgatgcaatgggaattaggaggaagcagatttttgaggatcatccaattgctgggtttytttgcttgaccagtgctcatatgctgcctacaaagaataagtttacagggtgctttttcctcattgaatcagagtagacctttgcatacagcttagttctcagaagccatcctgttgaagcttttgaaaacaaagagctagttctggggcctctgttttgagggctgggagccaggagacctgggctcccactccaaccgcatatacacagtattagg

SEQ ID NO: 630958 - DNA, 555 bp, Homo sapiens
gggcttcgggttggttggtctgcatatatactcctccttgtaggtgcgtcctttactatctctaggaattggctggccctgagaagagcagtctccccaggttaagcaaggccctacgaagtcaaagcactggaaatatagaaaaaaawtttttttttggtgagacagagtttcactcttgttgcccatgctggagtgcagtggcactatctcggctcactgcaacctccgcttcctgggttcaagcaattctcctgcctcagcctcccaagtagctgggattataggcgcccgccaccatgcccatctaattttttgtatttttagtagagacaaggtttcaccatgttggccagcctggtctctaactcctgacctcaggtgatccacccaccttggcctcccaaagtgctgggattacaggtatgagccaatacgcccggccagaaataagaaaaaattttaaaaggcatgattaaaatacattgacctacagaataaggatctgcattttaacaagagactggagtcattgatgtttgagaaccactgctc

SEQ ID NO: 630959 - DNA, 555 bp, Homo sapiens
gggcttcgggttggttggtctgcatatatactcctccttgtaggtgcgtcctttactatctctaggaattggctggccctgagaagagcagtctccccaggttaagcaaggccctacgaagtcaaagcactggaaatatagaaaaaaatttyttttttggtgagacagagtttcactcttgttgcccatgctggagtgcagtggcactatctcggctcactgcaacctccgcttcctgggttcaagcaattctcctgcctcagcctcccaagtagctgggattataggcgcccgccaccatgcccatctaattttttgtatttttagtagagacaaggtttcaccatgttggccagcctggtctctaactcctgacctcaggtgatccacccaccttggcctcccaaagtgctgggattacaggtatgagccaatacgcccggccagaaataagaaaaaattttaaaaggcatgattaaaatacattgacctacagaataaggatctgcattttaacaagagactggagtcattgatgtttgagaaccactgctc

SEQ ID NO: 630960 - DNA, 519 bp, Homo sapiens
attagcaatgccttccatttcttggacatatgctaataatattcttttgattgttactaatgaatggtacagcagtcttagatattatacaaacagatgataactactttctataacagaacttatttgaaaggaaggaacttaacacctcatcagtgaatagagataaaagccaacatttttaacccatttcacagtgggaaaattgatcagttaattatccaatgaaatcttagtttcctacattcccaaataagttgcgctccaatttattttaatggggcaaaaatatttctttggatgactcatctgacttatatttgtcttcacccctagaaactcctttagaaggagcccttactggcccacwgaacttggagaggctgttttattgaggaagagaggaagaggaacaagagccaaatgtgggtgcctcacagaatcacagtgcttggaaataaggggaccattgaaatcattcaatataatccctcattttaaaggtagggacactgaggc

SEQ ID NO: 630961 - DNA, 519 bp, Homo sapiens
attagcaatgccttccatttcttggacatatgctaataatattcttttgattgttactaatgaatggtacagcagtcttagatattatacaaacagatgataactactttctataacagaacttatttgaaaggaaggaacttaacacctcatcagtgaatagagataaaagccaacatttttaacccatttcacagtgggaaaattgatcagttaattatccaatgaaatcttagtttcctacattcccaaataagttgcgctccaatttattttaatggggcaaaaatatttctttggatgactcatctgacttatatttgtcttcacccctagaaactcctttagaaggagcccttactggcccactsaacttggagaggctgttttattgaggaagagaggaagaggaacaagagccaaatgtgggtgcctcacagaatcacagtgcttggaaataaggggaccattgaaatcattcaatataatccctcattttaaaggtagggacactgaggc

SEQ ID NO: 630962 - DNA, 519 bp, Homo sapiens
attagcaatgccttccatttcttggacatatgctaataatattcttttgattgttactaatgaatggtacagcagtcttagatattatacaaacagatgataactactttctataacagaacttatttgaaaggaaggaacttaacacctcatcagtgaatagagataaaagccaacatttttaacccatttcacagtgggaaaattgatcagttaattatccaatgaaatcttagtttcctacattcccaaataagttgcgctccaatttattttaatggggcaaaaatatttctttggatgactcatctgacttatatttgtcttcacccctagaaactcctttagaaggagcccttactggcccactgaacttggagaggctgttttattgaggaagagaggaagaggaacaagagccaaatgtgggtgcctcacagaatcacagtgcttggaaataaggggaccattgaaatcattcaatataatccytcattttaaaggtagggacactgaggc

SEQ ID NO: 630963 - DNA, 526 bp, Homo sapiens
caaaaacaactatgatgctcttaaagttaaaaaataagcacagtggctaagagaaataattcagtttagctagctctcagaccactgcagactgctgcccactgatccctgcatttctctcttgctttactgtggattggctaattatttcctgatttattcatttattatctaacacacttggagtgcctgctatgtaccagtactaagaaaaagttcctgacttgggctctttatatgcgaagaagggtggcaaatctatctgttactacggagccacgtgccaggtgctaaggtggaggtgtgctcagtgggtccagagagcagagagaaagggcttcaggtgagacctggcagaggttcaggatagcagggaatctcctaagtrtcccaaatgcgctaatgtttgagctagatcctgaaagaaaacaaggagttaaccaaggtgaagaacaaacgagtggaccaggattccagagaaagaacactgtgcaccaagccacagaggcgtgaaacaaaaggctct

SEQ ID NO: 630964 - DNA, 649 bp, Homo sapiens
caaacgagtggaccaggattccagagaaagaacactgtgcaccaagccacagaggygtgaaacaaaaggctctcagttgtctagtgtggcaagtggcaggggtgcatggggggagggtgtcggagtggtgccctggagacagggagagctgcgacagattcctggggacggatccttctgcagctcaaagataggagaggcccttagacatccctcaaggccatatgtcaatcaaaataattaaaagtaaaagaaccggaaggcaggcttatatattccaacatccatctagtttttcccccaaaaaaagcttttgataaaataagatgaagtgccaaaaagatgcatgtgttcaatagcgcagcagaaagtgaatagagtaaaagtaataaaaaaatactcggccgggcatggtggctcacacctgtagtcccagcactttgggaggccaaggcaggtggttcacctgaggttgggagttcaagactagcctggccaacatggtgaaaccccattactactaaaaatacaataattaggcaggcgtggaggcacgcacctgtaaatcccagctacttgggagactgaggcaggagaattgtttgaacccaggaggaggaggttgcagtgagccaagatcataccattg

SEQ ID NO: 630965 - DNA, 645 bp, Homo sapiens
cgtgtatcgtcagaggctgcatttcagtcctcccattttttgcatgccttttaaacttattttaagygaccaatttccccctcattcttttccttacaatttttctgttgaagactcttgctgtccaatctgcagtttctcactgtctggattttgcccttgatgcatgccaatatgtccaaatgcactcattttcatgcaaataatcacccatttaaaaaaactctgtttgccagccatgttcttaaggagggcacaacccaccataatcactttctcatgagcatgtgggcaaagggagtgctcacaatagaggtaatgagacagagagaaaaatgtgaatgtgatttatgaaaaagaaatatatatatttccaactggaagcgaccagggaatgcttctctttaatgcctttcaatatagtttgctttagtaggaaacacatttggaaagggatttggcatcatgttgtactctagggtccagggttgcatgcattagtttttatcaaagatgactgcataataggaacctggatgtagcaaaaacctaaggaatctaaaccactaaccaagctcaccaaatgtaataaatataaatcacagatgaaaggaagattaaatctggctattcacttatgcaaga

SEQ ID NO: 630966 - DNA, 645 bp, Homo sapiens
cgtgtatcgtcagaggctgcatttcagtcctcccattttttgcatgccttttaaacttattttaagtgaccaatttccccctcattcttttccttacaatttttctgttgaagactcttgctgtccaatctgcagtttctcactgtctggattttgcccttgatgcatgccaatatgtccaaatgcactcattttcatgcaaataatcacccatttaaaaaaactctgtttgccagccatgttcttaaggagggyacaacccaccataatcactttctcatgagcatgtgggcaaagggagtgctcacaatagaggtaatgagacagagagaaaaatgtgaatgtgatttatgaaaaagaaatatatatatttccaactggaagcgaccagggaatgcttctctttaatgcctttcaatatagtttgctttagtaggaaacacatttggaaagggatttggcatcatgttgtactctagggtccagggttgcatgcattagtttttatcaaagatgactgcataataggaacctggatgtagcaaaaacctaaggaatctaaaccactaaccaagctcaccaaatgtaataaatataaatcacagatgaaaggaagattaaatctggctattcacttatgcaaga

SEQ ID NO: 630967 - DNA, 645 bp, Homo sapiens
cgtgtatcgtcagaggctgcatttcagtcctcccattttttgcatgccttttaaacttattttaagtgaccaatttccccctcattcttttccttacaatttttctgttgaagactcttgctgtccaatctgcagtttctcactgtctggattttgcccttgatgcatgccaatatgtccaaatgcactcattttcatgcaaataatcacccatttaaaaaaactctgtttgccagccatgttcttaaggagggcacaacccaccataatcactttctcatgagcatgtgggcaaagggagtgctcacaatagaggtaatgagacagagagaaaawtgtgaatgtgatttatgaaaaagaaatatatatatttccaactggaagcgaccagggaatgcttctctttaatgcctttcaatatagtttgctttagtaggaaacacatttggaaagggatttggcatcatgttgtactctagggtccagggttgcatgcattagtttttatcaaagatgactgcataataggaacctggatgtagcaaaaacctaaggaatctaaaccactaaccaagctcaccaaatgtaataaatataaatcacagatgaaaggaagattaaatctggctattcacttatgcaaga

SEQ ID NO: 630968 - DNA, 645 bp, Homo sapiens
cgtgtatcgtcagaggctgcatttcagtcctcccattttttgcatgccttttaaacttattttaagtgaccaatttccccctcattcttttccttacaatttttctgttgaagactcttgctgtccaatctgcagtttctcactgtctggattttgcccttgatgcatgccaatatgtccaaatgcactcattttcatgcaaataatcacccatttaaaaaaactctgtttgccagccatgttcttaaggagggcacaacccaccataatcactttctcatgagcatgtgggcaaagggagtgctcacaatagaggtaatgagacagagagaaaaatgtgaatgtgatttatgaaaaagaaatatatatatttccaaytggaagcgaccagggaatgcttctctttaatgcctttcaatatagtttgctttagtaggaaacacatttggaaagggatttggcatcatgttgtactctagggtccagggttgcatgcattagtttttatcaaagatgactgcataataggaacctggatgtagcaaaaacctaaggaatctaaaccactaaccaagctcaccaaatgtaataaatataaatcacagatgaaaggaagattaaatctggctattcacttatgcaaga

SEQ ID NO: 630969 - DNA, 643 bp, Homo sapiens
  misc_feature 1, 2, 3, 4, 5, 6, 7, 8, 9, 10, 11, 12, 13, 14, 15, 16, 17,18, 19, 20, 21, 22, 23, 24: n = A,T,C or G
nnnnnnnnnnnnnnnnnnnnnnnncatgccaataaaacactgagggtactgccagcctaaaaatggtgyctgttggtgaagcaaaaatgaagtcatctgtccttggaaaaaaatctcaagacacaaataaaatcacctattgtcaattggctattgtcaaggccaacaaccctcaggttgctaacttagcgacctcttctctttagtgtcttactcaacctcttggcatttgacatgatctatgaaacgctttcttctcttggcttccgtgtagtcattctctgctgctttttctgccaagtcactggccattctccttcaacctaactctaaataaatgttgactcttccctttccaatctaatccaatccattctgtcagcaaattctgtcagctacatttccaaaatagatctcgagtttatccttttctctccatctccacggctaccacgatgatctgttaccgctagctatgcattagctccttccgggtctcctgggctccactgcagccagagtgagcttcagaaaacagaaaccagattatgcctttccctcactcaataccccccagtgtcttagcaccacacgtagagtaaaacccaaccttcagactctgttctacatgactctgacattc

SEQ ID NO: 630970 - DNA, 515 bp, Homo sapiens
agatctgggtactagttatgctcattgcagctggagtgttgctgcttctggsccttctcagatggcagaacaagaaaataagtgtgtgtcttctaactgtgtatttatagctataaataggtatcatatacctataaatatttctatatgtaaccatctatatctatattaagcatgagttcatactctaaccaattaccatatggatcattctagtcccctccctttgcttatctataaatttctactgcaacagtaagaaacccagcatctaccatatgctatccattttcttaattgttcagttccaatatgcatgaataacagtatgagaattataacccatgggaaacaatgttatcgaatagaggacagtgcttatattcacttttgcctttagtcttagggactactcattttcaaagttacttaggtcagcacttttccctcaaccctcttcagtgaagtttttttacacgtttgtaatacagttagattttcttgccactgtctgc

SEQ ID NO: 630971 - DNA, 581 bp, Homo sapiens
acatccaaggattatctctgtctgatgggcggggtgtgcagccgtatggccttctgctgagaggactagtgccaagtgtggcagacaaattctgtgggatctgtgtacatgaaggtgttatttcttttgcctttaaaaaaaaattattttgaagtggaaaggactgcaattttatggactgctgtaagataacttgttttacactttgcatgtatgtgtgatggggaaataattccaatggctagctctgtgcaagctgaaggagtcaactttctacatgyggctgtgattccacagaagtcatttctgggcataaacacatattttactttgataaaaaatttaaatacagaaaagcatgaaatacagtataataaacaggggcatgttatattttacggcagtagttcccaactgggggcgattttgcaccctaggggctattggcaatgtcccgagatggttttggttgtcaagattaggagtggggtagagactgctattgctatccagtaggtagaggtcagagaagccactcaacatcctatagtaagacacagaatgagccccacagcaaagaa

SEQ ID NO: 630972 - DNA, 468 bp, Homo sapiens
gccagatggtctgtgtaatttcgtcaaacctttgggagtctgctaacagcgacctcactttgccatagwccattcacccccaaggtcttgtcttttctggaacaacagccatgacatatacattaattagaaccagtaatcagattactttttgggtaagaggtgaaacaagaaagtaagctgataaaaggagttgatcactcccagactatgacctggagtcatacattttcagaccagctactcacacctgctccgtgtacttgtagactacttcagcttcaggacttcagggcaggcagactgccagttatcagggtttaggagatttgtcccaccttgaccttgctgttactgaccatgggttcttgggcttttggtgcaatagaaatgaggccaaaagagtcttcccagacaaggcttcattggcgcttacgccaggggcataaggtagagagagagagaatt

SEQ ID NO: 630973 - DNA, 617 bp, Homo sapiens
gggatataaaaaatagaacatgttattatctgtggccttcttctcatctctcccactcacctggcctctcctcagggaagcctccctctcccctcctggtgcgccctcactcggcaaagcccggcagctttcctaaggctgttgtggagtggctggtttatgtctctgactctcaccagacggcaatcttccggaagacaggaattgtgacttatcgcccttcctatctccatagtcaaacagtctggcatgtggtagctgcttaatcaatggtaatatgttaactaggctgaggttcccaagaagttgatttattttccatactcattcattttctcttctctckaaaggggaagtagtaaatgataataaattgccctaatatccatgctgctatctaagattacgaggtcaataattgtctctatttattcactctttgagctccttggaagataagcactaagggaatctaaggcatgatccaggtgagccgtcagtggagaagtggtctattcctgtgcccaccatgccaagtgcatgaaagctgttccttccccccaccccatggcaaacacagctactctgcactcaacaaggcccccttcagagccagt

SEQ ID NO: 630974 - DNA, 490 bp, Homo sapiens
gcacagtggcaataagggtgactcaaggcccaaaggggaaaggttaggactccgcaggttggctggctcagggcaccyatggcatgctgccaacctgagccatgtcagacatggggcctggatgacacacatgcaccctcaagaaaccccagtcaggaggcctcagagggcctccagggtaagccttaagatccatgcaattttctggtaccccacagcaagaagctacccagatgcccattagcccttctgcccagaggtacatgagggctctgagcacctcactctctctcagacgacccagggatttgagaactgacctagacaggatctcaaaacttctgactgcaaggccagagcacttttctccactccaggacatcgtggttccatgtgttgctaataaaagcaaaccctgattaagaactatccatttgaaatacttcacatagcttagctcatctaatctccacaactctatatagtagct

SEQ ID NO: 630975 - DNA, 524 bp, Homo sapiens
agcatcctttacaacagcatgaatcttgaattcctttggctgccaagccaagggaatagctttcaaaaagaaagaggcagctaccctcctggataactggagtagtatgctatctaaacaatgcctaaaggcatttctgtagatagtcacttggagcacawgctcaaatgtcatcaaactgtgggtaggggtgctcactcagggaccaaggaaattcacatttaagcaatggttttgttctcatctctgtgactcaactatacctggtaaaactgtgactagtggcatgtcattaaaagtgtatccccactgcaaaccccagaggtggagaaatgacagtggtggtgaaaaactggctgcaagcacagaccaaattctgcagtgacatttcagtcctttgagtcaaaccaatcctccatttctgggcatatggataccttggaggaagcagttcttcacatttgctgtgactggagcgtcctaattggcaccagcaggcttaaggtataggcaaagaaaaggaa

SEQ ID NO: 630976 - DNA, 603 bp, Homo sapiens
cagagaatgaggtcagggctcttggccttctcagagaagcggactaagcctaggaatgattagattttgctttggggaaatctgatacctattcaaatagggggtgtacctggagcccacagtggaaatgggaagggtkaggatttggcagctccatcaacagaagacagataaaaactcaccacttacagaaaaagcaggggcaaaagcagtgagcgttccttttggagtagatttctgcttttcagcaagcgcagggaacagaaagatccagctgtgaaggggccagcgaatcatgcatttaaaagttgcactgccagggcctaggaaaagaggcctctcttcagccgtgaccccactttggattcttccaaaacccaggtgatcatataatcctttaaacgtctctggcccctttaactaccaaagcccagtgacatcttaataagaagcctggtggcatagtcttggatctggagccaggagtgtgcttcttgcttctttaaatagtccgaataccatgtaggaagcctgaaatcttgatcttggtatagcccttgggtcagttacctctctggacagctttccctagtgcaggtggtt

SEQ ID NO: 630977 - DNA, 548 bp, Homo sapiens
ataagctctggaactttctagcctccacacttatgctttcccttcctgatagagtgcctgacattgtcagcattaaytgaaaaggtggaggctgccagactgagctggtgaaataattctatgggaacaaagactcacacttctcctctgtgcattctcacctataagggctaaaacaatttcaaattaaatacctcgaagaaatccttttttcctcagccactttcccactagatccccttgacctgggctataataacaacatctacaataataatgatgatatctgctggataccttttatacagtactagctcagccaggcattgtataaacactgccaaccacaagaagcgtatctacactgagactccagtccttcttttgggatattccccgtgatttcagggtccaggaccttccatcaagttatgcgctaatggaagctcatccctattaacatgttgtctttctcttgtattattattatttttttaacatggtaaggcacactttattcaagagggctctggcgataggcatagaga

SEQ ID NO: 630978 - DNA, 532 bp, Homo sapiens
agggtacacctggcacatggttcagtttgcccctctgaatcacctctacttgtgagctctttggatatatgcgttggaggcccatgagctcagtggtgtgctggagccgaatggaactgctcatgacagccaattgtgcacatcttttcccaacttcatatttacagacttcacattrgtagtttgaaattggcacagtgggagtagttacaccttgaaaattggcaaacactacaaatgcaaggcttttacatttcttcagagagccagtgtattggcacaccactggttctcattcataataaaattctgtgcaggaacccaaactcgacggaatgtggcccacggcattaaatttaggtccggggaaggtttggggtcacttaaagcctggtgtctgaaaaccttcctaagatgctaatgatgttctagcattttaatctgcatagcttggctcaagagaaaacttcccttgtgctctgtggtcatcctctaaaccccagccttgggccaaccacctagcaaactgcag

SEQ ID NO: 630979 - DNA, 480 bp, Homo sapiens
aataatgtcagtgtttggaaagtgcctgcccagagtaagccctcagcatgtggtagccatttttgtagtgtrgaaggacacagacccaggttattctgaatatatctaatagatcattgtttctgtgtggggatgtgtgtctcatttaatcctttggtgacttgagaggtgatgatgtttctgttttttaacaaatgggaaaactgaggcacaaggagcacagccatttagagagagaactgggcattgaaccagacctcagccatcaagctcatgctgcaacgtgctgtttcaaacccattaaagggttttctccgcaatcagtccttgctttgctttgctcaaaacaagacttaaataaagacgccagctccattttccactcatgtcagtgattgatacttgattaatgttcaggattgctgtcatctagagcataattttcgcagatgcaaagaccaattttgttgttactgaggc

SEQ ID NO: 630980 - DNA, 576 bp, Homo sapiens
acagtactgcaaatgagcacttcctaaagtcactgtttcctcctttggcatttctctaactttgttgaatgagaaaggggttgagcttccagcagaaaaggaagagagccatagactggcacttgatcgaaatataattccttaataattttttgaaataattttaaattcatagaaaagatrcactaatagtaaaatgaactctcatataccctttatttctttcctaatccctaatttcctaatttgatattaatattttaccacctttgcctttcatgctttctctaaatgtatttatatatttagggtttttttttttttttttagttttaagaggcaagggccttgctatgttgcgcctgcctcttaaaacaaaaagagggaccttgccatgttgaggctggactcaaactcgtgcgctatagggaaactttcacctcagcctctcaagtagctgggactacaggtacgcaccactgcacctagatagttttttttaaacctttgagaataagttgcagatatatctcttactccttaacacatcaatgtatatgtcctaaagacaaggac

SEQ ID NO: 630981 - DNA, 576 bp, Homo sapiens
acagtactgcaaatgagcacttcctaaagtcactgtttcctcctttggcatttctctaactttgttgaatgagaaaggggttgagcttccagcagaaaaggaagagagccatagactggcacttgatcgaaatataattccttaataattttttgaaataattttaaattcatagaaaagatacactaatagtaaaatgaactctcatataccctttatttctttcctaatccctaatttcctaatttgatattaatattttaccacctttgcctttcatgctttctctaaatgtatttatatatttagsgtttttttttttttttttagttttaagaggcaagggccttgctatgttgcgcctgcctcttaaaacaaaaagagggaccttgccatgttgaggctggactcaaactcgtgcgctatagggaaactttcacctcagcctctcaagtagctgggactacaggtacgcaccactgcacctagatagttttttttaaacctttgagaataagttgcagatatatctcttactccttaacacatcaatgtatatgtcctaaagacaaggac

SEQ ID NO: 630982 - DNA, 660 bp, Homo sapiens
aatatatttcaacattaaatagtgcttgtttcctttttagtggtgactgaggtctactaaaattgaaattctgtattatagtttcatcttgtgtcaaatggaaaagygtttttagaatcagcattttggcacatataatagaaaagacatgtcaagagaaggctctaattactttaggaagttgctccataaacagcaatcagttctagctgagacagaaaagtctttgcagaggaggagggggtttgaactggcatctccaggatgtattggctttgaacaaatgaatcagaagtataccgtggaaggaaagatggtaagtgaagtcaaggaataggtagagtgggtaagaacaaggagtatcaggtgacagtgattagatcaatttggcagaaaatattcatgtaagaatgtgggagataaacctggaaagttaggatcctgaccacgcttcagattgtattttgcaggcaatgggtagatacccttcatcctttgaatatcatgataaagatgaggctggcagcattggtcaagatgcactgatgggagaggaagcagttaggccattactacgagggtttgagtgctgaagataaaggcactggaaaggaggggagggggcaggtgtagcagacagggtccagtcagggaagctga

SEQ ID NO: 630983 - DNA, 584 bp, Homo sapiens
tctgcctgggtaaaatcttcacagacaaggaaatatctcagctagaccttcagaaataaatgggaagagagagacagaaaggtaaaaccagtgacagggtcagcatataagagatgaggagtcgtgaaaattcaatgtaactaacgatgagcctgaaaagggacaaatttatgaaatggttcttctcgatgtgccaaatgcctgcctctttccaacaagtatttgttgaaggaaggaatctgtatctcaacctatggacaaaaggcagccaatggaagaatttcattaagggagtatgaatagaagtggtgagaaggaagatgttggctggattgagtaggggaggggagcaagaccagaggttctcagactggtacagtggagaggagctggggacctaaactaatactgagcagttgagagggtgacaagagaaactcaytggagataaatgtttgaagtcgagtgagcagatttcataattcattagttgtagggagtaacaaaaaggaggaagtggaaaacattttaaaatcccagttggccagataaatcaattttataaagatatactttacataaaa

SEQ ID NO: 630984 - DNA, 433 bp, Homo sapiens
aaagctggaaatgtgttctgaagcccatgaaakggtgatctgcaaagagactgagtttcaagataacagaatcttatctaagtgtcaactgccacaaaaaggtcgagtaaaataaagacaaaaaaagtggacttcaacagtggtttttaaactgtgggcaacagcctgttagaaaccaatttagtagagtctgaccagtatttcttttaaaaaaattaaatagaatagaaaagtgtattgcaggtactaaggttaagtgtagttccatgaaatttttctctgttatatatgtgtattgtgttctgggtcacagagtaagatatatctttaactttgggttatggtaaaagaaaatcttggaagaagaaaggaggctactgatgtccatcccaacattatcctagaatagggcagtggctaataatttggaccc

SEQ ID NO: 630985 - DNA, 433 bp, Homo sapiens
aaagctggaaatgtgttctgaagcccatgaaagggtgatctgcaaagagactgagtttcaagataacagaatcttatctaagtgtcaactgccacaaaaaggtcgagtaaaataaagacaaaaaaagtggacttcaacagtggtttttaaactgtgggcaacagcctgttagaaaccaatttagtagagyctgaccagtatttcttttaaaaaaattaaatagaatagaaaagtgtattgcaggtactaaggttaagtgtagttccatgaaatttttctctgttatatatgtgtattgtgttctgggtcacagagtaagatatatctttaactttgggttatggtaaaagaaaatcttggaagaagaaaggaggctactgatgtccatcccaacattatcctagaatagggcagtggctaataatttggaccc

SEQ ID NO: 630986 - DNA, 606 bp, Homo sapiens
ggtacatatataccatggaatactatgttgccataaaaaaaatcatgtcctttgcagcaaaatggatggagctggagggcataatcctaagtgaattaatgcagaaaaccaaatacagcatgttctcacttataagtgggagctaaacattgaacatataaacattgaacataaacataaccactgtttgctgagcacctgccaaccatgggcactagtcaaggtgctgtacccacagtcatatcatttaaccctctctccagcccagatgtcctgatcctaagggccaggcagttagawgggtatacccctaaagtcctatacaactcagggcccctgaaaatgccccctcatccagcattttccctgcatatggaaacaaacaccattgtttgaaaaaagtaaaaaaccttctttacactgagctgaaatttgcctccagtgatttcttcttggactacaccgaataagtttcggtgttcccatataaagatgggaacaacagacactgggggctactagagcagggagggagggaggtgtgggctggaaaagctacctgtttggtactatgctcaccacctgggtgacagagtcattcttacc

SEQ ID NO: 630987 - DNA, 552 bp, Homo sapiens
cctatacaactcagggcccctgaaaatgccccctcatccagcattttccctgcatatggaaacaaacaccattgtttgaaaaaagtaaaaaacyttctttacactgagctgaaatttgcctccagtgatttcttcttggactacaccgaataagtttcggtgttcccatataaagatgggaacaacagacactgggggctactagagcagggagggagggaggtgtgggctggaaaagctacctgtttggtactatgctcaccacctgggtgacagagtcattcttaccctaaaccccagcatcatgcaatgtatctgtgcagacctgcatatgtaccccttggatctaagataaaagttgaaattttttaagaaagagcacagtcttaaagtcagtgtgttgctttccccagagtgtctgctttttaagcagatctgctttacagttttctcagatagcagaataaaagtttctttaccttattaaaggactcttgggcaacaggtactatagatgagggttgtgggtattttggggatggagactgaatt

SEQ ID NO: 630988 - DNA, 552 bp, Homo sapiens
cctatacaactcagggcccctgaaaatgccccctcatccagcattttccctgcatatggaaacaaacaccattgtttgaaaaaagtaaaaaaccttctttacactgagctgaaatttgcctccagtgatttcttcttggactacaccgaataagtttcggtgttcccatataaagatgggaacaacagacactgggggctactagagcagggagggagggmggtgtgggctggaaaagctacctgtttggtactatgctcaccacctgggtgacagagtcattcttaccctaaaccccagcatcatgcaatgtatctgtgcagacctgcatatgtaccccttggatctaagataaaagttgaaattttttaagaaagagcacagtcttaaagtcagtgtgttgctttccccagagtgtctgctttttaagcagatctgctttacagttttctcagatagcagaataaaagtttctttaccttattaaaggactcttgggcaacaggtactatagatgagggttgtgggtattttggggatggagactgaatt

SEQ ID NO: 630989 - DNA, 575 bp, Homo sapiens
tgagtataactttttaaaaattcctatattaaaattattcttattcttctgtcacctttttgtagctggttatgtttagcaaccatttaaaataccctttaattacataatgccaatcaaaatcttgtcacggtgggccgtgtgagagtcctagtccttaatcaacattgcattgtttctaatttcacttccaaagtatattctcatctggagtgacaacatgtaaaaaaaaaaaattcttacatttcacatctcacayttacaatctaaactgcacgggacacagtggtaatcagactatattgtttcaatcctaaatctaacagtaggaggacatggggctcctaatggaaagaattaatcaggggcttttttgggtattcatggaagggggagataatctttctgcagagtgacatccttttgagagagctcagcttctggctgtgaaacccattcccatgtgatttctttctaacaagccagaaagctgctttaatctttaaacatgaaggatcctgcttacagtatcaaaggtaggcaagttctcttactgaggttcaaaagcagataat

SEQ ID NO: 630990 - DNA, 575 bp, Homo sapiens
tgagtataactttttaaaaattcctatattaaaattattcttattcttctgtcacctttttgtagctggttatgtttagcaaccatttaaaataccctttaattacataatgccaatcaaaatcttgtcacggtgggccgtgtgagagtcctagtccttaatcaacattgcattgtttctaatttcacttccaaagtatattctcatctggagtgacaacatgtaaaaaaaaaaaattcttacatttcacatctcacacttacaatctaaactgcacgggacacagtggtaatcagactatattgtttcaatcctaaatctaacagtaggaggacatggggctcctaatggaaagaattaatcaggggcttttttkggtattcatggaagggggagataatctttctgcagagtgacatccttttgagagagctcagcttctggctgtgaaacccattcccatgtgatttctttctaacaagccagaaagctgctttaatctttaaacatgaaggatcctgcttacagtatcaaaggtaggcaagttctcttactgaggttcaaaagcagataat

SEQ ID NO: 630991 - DNA, 621 bp, Homo sapiens
aagcttgctacaagaagtaagaatctcaggccccaactcacatccactgcatcagaatgtgcattttaacaaaatccccaggtgatttctatgcacacagagtttgagaagcactgctttacatgcataatctcgtttcactttatctttccaacaaattacaaggtaatttttcagatgtgtgggtgttgaggtctagggaagttaagtaatctgctagtaagaattcaaacttggctccacctgagtctagaacccacattcataacaaatatatcagtgattctcgcaatttagtatatagaagatttacctagggagcttattaacaatattgattcctgagctttctccctgaaattctgatccaacccatctgaagcagagcccagaaatcagcattttaacccttccatcccaggaacttcgagggaggtgactgcagaacacaatttgcaaagcactggcactttattatatttaccraaagtacttttggggagagaactaccctatattttcaaagcacctcaaaatgagagcttgactgatagtaataaagtttttttttttttttttttttaccaagtgctggattgagatcccctaggcacctctgga

SEQ ID NO: 630992 - DNA, 668 bp, Homo sapiens
cttagaaagatgaaatcagaggtctcaggacatgacataccactacccaggtgctgaaatcatcaaaaatcacaatgcttttccctgggcctatctttcctctctgaagatcaaggtgtgttggggctggagtcaaacctggcagtctgtctgtatgaagttgctgtatgtggtaggaattcaaggatgtgtgaatcagttatgctgtagtaacgaatgagactcccaaatatcaatatttataacaataaaagtttatttctcactcctatttccagcatgggccagttgcagctgtgttccacatctctgtgctgagtccaggctgataggccagtctcttcctgaagcattccctgttgttgagacctggggaaaagagatggcaagccatgctctggttcctagtggcacttctcacttttcactggccatgtcagccttagctactctggagttcaacagggaaggcttctataatcctcacagaaaggagaatcagaatatttggtggcaagtaaatctagyctactgcaatgagtcgagggttttgaggaacacatttgggatcaaaattcaggggtcaagtacaatgcatgacagcagggccataaatgaaagggaagaccagtaaggctacaatccaccagaactgaggagcacaggga

SEQ ID NO: 630993 - DNA, 559 bp, Homo sapiens
gtgtcacgggtatttggctgtccttcaatatatttactttcttgattatgtctgacttgggataatttgaaagtcactttgcattcccagaggagggccatgcaagtatcactctcctggtttctttccttcctgcaaacatgcttagctctccccattctaataaatgttgaccttaaactaaaaaccagcttttaaaaattctataaataatataattgagagcaagatatattagaatgatggtagcagtaattaatgagtctcagtctaatctgccttaaaacatttgggcaatgtttactagtcaataacatttaaatctccttgatagtcgttcatccataaacaatttgagggccatrtagcgggtgcagaagatacagaaataaataagatcattgctctcaaggaaccactgctctagcagaggaaacagatgtagaaacaaatctttcctctcaaatttaataaatataaggaaaaagcaatcaactcagcctggaatcaaggccttcagtgaggatatacatgagagctatctaaaaatactacctca

SEQ ID NO: 630994 - DNA, 579 bp, Homo sapiens
actgcagtggcacaatcatagctcactgcagccttgacctcctgggctcaagctatcctcccacctcagtctcccaagtagctaggactacaggtgcacaccaccatacctggctaatttttaaatatttttgtagagattaagtctccctatgtttcccaggttggtctcaaactcctgggctcaagcaatcctcctgcctcggccttccaaagtgctgggattataggtgtgagccactgtgctcagccaagatcttaaacattattctatactatctcccaagatgtccagatgtgtttgtctatgagaatttaaataaaaatctacagccctttttaatttgcaaaaaaatagaaattcccattcaaagcagcttcagtagaagactgaatggctgctaccagtttgctgcagaataggcaggcatattgacctcaggtatggctagatccagggacttgaacacyatccaaattctctctctgcgctccttgctgtcacactcattctttcagaccagcttgtgggggaccacctgggaaagctccaggtttacatcctaacatgagcccagag

SEQ ID NO: 630995 - DNA, 605 bp, Homo sapiens
gaattcatttgagttcctctttccaaatagcttttcaaaaaagtttaagtaaacctcctttcatataacctgttaaatatgcattctttaggttcgagaacaagaaagagatatcgccttacagataagagaagacataaaacagaggagaaatcaacaatttacacgtttggcagaggagctaagggcagaatgggaagaatcacaaactcagaaaatacagaacttggaaaaactgtrtttggcaagtttaagaagtatgggagagggacatcgacaggccaaagaaaatgtgagtgagatcttatttgactaccctgttgtggcagtaatattagtaaaaagtaaattatagttgttgaatgcttttctgataacattttcatgcattgaatttctttggggcagcttgaacttttttataaatttaatgtaatttgtgaataataggctcatttcttactaagagttatttcaagtaaaatccatgtcaaataaaattggtcttcctatgatgttcaagttagcattattctcttccagtactcctctatctggggaaataataatcttctgaatcagaagttgttgtccatctcaggcat

SEQ ID NO: 630996 - DNA, 584 bp, Homo sapiens
aaggttggggaggttgtggcaatttcttaacataacaatgatatttgccacatcaattgactcttcctttcatgaaagatttctctgtaacatgtgatgctrttaggtagcattgtacccacagtggcactgctttcaaaatttcactcagtcctctcaaatcctgccactgctttagcaactaagtttatgtaatattctaaaccctttgctgtcctttcaatagtgttcacagcatcttcaccaggggtacattctatctcagtaaaccactttctttgtttaatctataaaaagcaattcctcatcaattcaactttcatcatgagagtgcagcaatccagtcacatttttcaggctccacttctaattctagttttcttgctatttccatcacatctgcagttatttcctccactaaagtcttgagcccctccaagtcactcatgaggatctgggttatcagtaaaataattttatttatttattcatttattgtattcttttttagggacagggtctcattctgttgcccaggctggagtacagtggtgcaatgatggctcactgcagtcctgaccttc

SEQ ID NO: 630997 - DNA, 584 bp, Homo sapiens
aaggttggggaggttgtggcaatttcttaacataacaatgatatttgccacatcaattgactcttcctttcatgaaagatttctctgtaacatgtgatgctattaggtagcattgtacccacagtggcactgctttcaaaatttcactcagtcctctcaaatcctgccactgctttagcaactaagtttatgtaatattctaaaccctttgytgtcctttcaatagtgttcacagcatcttcaccaggggtacattctatctcagtaaaccactttctttgtttaatctataaaaagcaattcctcatcaattcaactttcatcatgagagtgcagcaatccagtcacatttttcaggctccacttctaattctagttttcttgctatttccatcacatctgcagttatttcctccactaaagtcttgagcccctccaagtcactcatgaggatctgggttatcagtaaaataattttatttatttattcatttattgtattcttttttagggacagggtctcattctgttgcccaggctggagtacagtggtgcaatgatggctcactgcagtcctgaccttc

SEQ ID NO: 630998 - DNA, 634 bp, Homo sapiens
accccaacttgaagaccattggtcagaagttcctgaggcctggagttgtgatctgtgggaagtggggcgccgtcctgtgggactaagycctcaatatatggtttttgaggctatctcccaggtagaacgcatcaggattgaactggaggatacccagctggtgtccactgcaaaattaattgcttgcttaagtatgtgaggaaaaacccccatacatttggtcatagaggtcttctgtattgattgttgttggtagtgtgaaagcagaggaaaacactttgagtttgagtgtgtttcctattagaagtagccactagccacatgtggatatagagcacttaacatgtggctagtgtgactgagaaaccaaatttttcaaattaatgtttattactttaaatttaaatttaaataaccacatgtggctagtggctgccatattggttcagcacaggattctagacaatcaagtcaggcaaacttgaattcaaatcccaaatctgtgtgaccttacttctctgagccccagtaccctaaaatggacataacaagatttacttctaaccacatcaagaagggaagtttctggaagaaatatcatcacccaacactgagaactgtctctctttcggga

SEQ ID NO: 630999 - DNA, 631 bp, Homo sapiens
aagcagaggaaaacactttgagtttgagtgtgtttcctattagaagtagccactagccacatgtggatatagagcacttaacatgtggctagtgtgactgagaaaccaaatttttcaaattaatgtttattactttaaatttaaatttaaataaccacatgtggctagtggctgccatattggttcagcacaggattctagacaatcaagtcaggcaaacttgaattcaaatcccaaatctgtgtgaccttacttctctgagccccagtaccctaaaatggacataacaagatttacttctaaccacatcaagaagggaagtttctggaagaaatatcatcacccaacactgagaactgtctctctttcgggagagagaatctgatttgctatgttcagccactgctttgcccaccccatgcccccaattcctggtgcaatctatagtgacagcagaactggcctcaccacagtggaaacatggccacacagcagggagaaaggggagacatgactgatgctggtttatccttaagtaatgtctcccacattctttatattttaggagttcttgtaagctgtcttcagtgttttttgraaaaagatgggagagagggagatggcaggagag

SEQ ID NO: 631000 - DNA, 495 bp, Homo sapiens
atgatctgcatgtacctgcaaaactatgcaaaagatacgacaaacacaaaactaagggaaacacaaaactaagcctactatttttacacatctgagggaggaacttcaggaaaatcctacaggggccacygcagagtaattatgatagttaacacagcaggcaccactgttaggcacttagtatatagtaacttatttaaataagatacatatatatatgcatatacatatatacacatacatatacatatatacacatacatatacatatatatgtatgtgtcttgtatataattctgaaaggtagagattatcatcactcccactttacagatgaggaaacagagttaatgagtgaagaaaacctttggtttacatgacactatctatttttaaagaatttttggtggcctaataagtcaatgtctaaagagccaaatataaagttgaaaataaactaacattcagtagttgtccagacacccaacccagata

SEQ ID NO: 631001 - DNA, 547 bp, Homo sapiens
tagttgtccagacacccaacccagatagttctggctcagaaatggattttggagggtccaaattagtcattcatccaagcaggtgttaattctgcaatttttagaactgcgggtgtctctacggaatctacaatttaaattagcaacaacctccaccccaaatcatacattaaggtgacaaccacttataaaagtcactaagatgtccaacttctcaacttttgagttcagttgtggaactcagccaagaggctttttaactcaagcacagacacagtgggatggcataatygcattgagtcaagatcaaatttgacaacagggaagtcatctattaaagaaaatcactcaaagagcacacagaattgctcgttaaaagtgatcataaaccatggtacaaatattgatgtttattaacatttttattatggccattttaaatggatagcttagcagactattcatttatctgttctgtgggcccctaacttggctctaatgagtttgccttataacattactgaaatcagaccatgctgtaaaagcc

SEQ ID NO: 631002 - DNA, 426 bp, Homo sapiens
atattcccattctgggtgctcaccagagctctgcataccccttttgtgaacagctggcagggtcatcatcggascagctatgacagtcatggaagttctcaagtagtataaaagggaaaattaaaagttagattttaaggcatgcgtaaaggagaatgggatattctgaaaaggggttttggagactagaacatttaaaatacagttaaaaatataagaaactagttacagtggttgcttctggggagagggacctgaagactgggacaaagtggaaggatgacttccttttaattgtacttaatccttttgcaggttttggatgttgtatcatgtgtatttttttaaatcaggctttaatggacattgggggtcatctagttgaagctgagatgtaaggcattattttttaagaaacagaacccc

SEQ ID NO: 631003 - DNA, 605 bp, Homo sapiens
agtcttcttgggctgccataaaaarttgccatagactgggtggcttaagcaatacacattcatttctcacagtcccgaaggctgggaagtctaagatcaaggcaccagcagattggatgtctggtgaggacctgcttctcggtttgttgatggctgccttctcactctgtgttcacgtggcagagagcagagagagaaaggaagtttccttgcatttcttcttataagggcattgacctcattcatgaagactctaccctcatgatctcatctaaccctaattaatgcccaaaggccctatcttccaatactatcacattgggggttaggatttcatcatacacatttggaggagagaggggagacacaaacattcaggccatagcaggacttttttattttttttccctgagacagagtctcactttgtcacccaggctggagtgcagtggcacaatctaggctcactgcaacctctgcctcctgggttcaagcaattctcctgcctcagcctccagagtagctgggattataggcatgcaccaccacacctggctaatttttatattttagtagagatgggggtcatcatgttggacaggctg

SEQ ID NO: 631004 - DNA, 605 bp, Homo sapiens
agtcttcttgggctgccataaaaaattgccatagactgggtggcttaagcaatacacattcatttctcacagtcccgaaggctgggaagtctaagatcaaggcaccagcagattggatgtctggtgaggacctgcttctcggtttgttgatggctgccttctcactctgtgttcacgtggcagagagcagagagagaaaggaagtttccttgcatttcttcttataagggcattgacctcattcatgaagactctaccctcatgatctcatctaaccctaattaaygcccaaaggccctatcttccaatactatcacattgggggttaggatttcatcatacacatttggaggagagaggggagacacaaacattcaggccatagcaggacttttttattttttttccctgagacagagtctcactttgtcacccaggctggagtgcagtggcacaatctaggctcactgcaacctctgcctcctgggttcaagcaattctcctgcctcagcctccagagtagctgggattataggcatgcaccaccacacctggctaatttttatattttagtagagatgggggtcatcatgttggacaggctg

SEQ ID NO: 631005 - DNA, 579 bp, Homo sapiens
tagcatattttggcagaacataaaagcaaggtctgaaacattatgccactggcttgcaagccaccgtgaacccttttgtcagagacaatggtagcaacaagcacctgaataatttttagagatgtcctttctaagaatttgagcatccacatggaaatcccagggggatggtaaagagccctaaattaggaatcaggcaaagcaaataacaagtactgtgtgccacacatgtgctgaggaagcttgcagattctgccctggaagcgctgaagtcggctgatgagataaaaagtaaagaaaaaataatatactggtataaatgcaacaataaggttgagaatatgtatggaagaatacacccctctttgatgagcagaaacccagaaagctagcaacctgtagcctccactttcttctgccctaaccagctgcattctcttctcaccttttggttcctgtctgtggccctgggcccacccaaatgctgacatgactcctgccaagacagcttyataacaaagattcttcatctctgagaactcccagtctgccgttgaccctggtagccagtagcccttt

SEQ ID NO: 631006 - DNA, 427 bp, Homo sapiens
ctcttgttatgacttgtcatccttgtctaggtgaaattacccaatcagtccctgtgatatggtttagctctgtgtccccacccaaatctcatcatggaatcaggaatcccatgattcctatgtgctgtgggagggacccagtgggagataaccgaatcacgggggcagtttcccccatagtgttctcatcatggtagtgaataagtctcacaagatctgatgattttataaggggttttccctttcttttggctctcattctctcttgyctgctgccatgtaagacatgccttttgccttccaccatgattgtgaggccgccccagccacgtggaactgtgagtccattaaacctctttttatttataaattacccagtctttagtatgtctttatcagcagcgtgaaaatggtttgtaaggtttgg

SEQ ID NO: 631007 - DNA, 480 bp, Homo sapiens
tattgtgggtctccccactgtactagaagtccctaggatggaggcagcaacttgcttatctctatacccctatgcttaggtcagtgtctggcacatagtgacagcatgattagtgcttagtgaacaaattaataggcctgtgtttcactctgttttgaatctaccaattaaatattctttcagttaatacttcttgaattgaattcagttattaatagagattagggggccctttctgaaatgttggcttaggagacccaaaatttttaattaaagtaccaagtctccttctatttaggcagcacataatctttggcaaaaaaaaawaaaaataattaattcagatccaacctaatctagattgtaaggattcctttcttaaggttgatgtcattgaactgtgaccttcagagattagtctggcattttgaagttggagcctcaggttcaactaaggttcagagcaatccagtgaatgaa

SEQ ID NO: 631008 - DNA, 480 bp, Homo sapiens
tattgtgggtctccccactgtactagaagtccctaggatggaggcagcaacttgcttatctctatacccctatgcttaggtcagtgtctggcacatagtgacagcatgattagtgcttagtgaacaaattaataggcctgtgtttcactctgttttgaatctaccaattaaatattctttcagttaatacttcttgaattgaattcagttattaatagagattagggggccctttctgaaatgttggcttaggagacccaaaatttttaattaaagtaccaagtctccttctatttaggcagcacataatctttggcaaaaaaaaaaaawaataattaattcagatccaacctaatctagattgtaaggattcctttcttaaggttgatgtcattgaactgtgaccttcagagattagtctggcattttgaagttggagcctcaggttcaactaaggttcagagcaatccagtgaatgaa

SEQ ID NO: 631009 - DNA, 633 bp, Homo sapiens
gcacagtggctcagacctgtaatcccaacactttgggaggctgaggcaggtggattcctcgagcataagagtttgaggccaccccgggcaacatagcaagaccctgtctctacaaaaaaaaagtacaaaaatcagctgggtgtggtggtgcatgcccgtagtcccagctactaaggagkctgaggtgggaacataacctaggcctggggaggtcaaggctacaataagccatgattgtgtcactgcactccaacattttttgagatagagtaagaccctgtctcaaaaaaaataaaaataaaaaagaagaagaagatttggaaacagacctggacagaaggaagatgatgtgaaggcacagggataagatggccatctgtaagctaaggagaaaggtctggaataaattcttttctcatgacccttgaaagaaaccaactctgctgacaccttgatctatcttacacttctagtctccagaaccatgagaaaatacatttctattcatccactcactctgtgggactttgttacagtagtcctagcaaatcaatacatcttcccacagtcacccccatcaccagcaaatgagcttccacaactctttccaaaggaagagaaatccatcaacaa

SEQ ID NO: 631010 - DNA, 671 bp, Homo sapiens
accactgtgctctagcctgggcaacagtgagaccctgtctcaaagaagaagaagaaaaaaaagacaccaacaacctagagatagtaacgtggaaatacaggaaggacccggtcctccatggcattaagcaagggtcactgcactgcttatctctggacttcttgttatgggaaagaaacaaaccctatttgtctaagctactttggatgggttttccatattttgtggctgaacacattccccaaaccatccctatactagcccttcagttctcagctgaggcattaccttgtctgagatcaccccaagcctgggtgactgtattagcttcctaaagctaccgtaacaaattgccacaaattcagtgccttaaaacaacgtaaatttattacctcatagtccaagaggccagaagtcctaaatcaaggtggccatagggttagttccttctggaggctctgaaagagaaatcatctcccagctgctctcctggcttctagcagatcccagcaattcttggtgttccttggctatagctacattactccaatctgcgtcagtcttcatatgcccttcttccctctgtgtgtgtgtgtgtgtgtgtgtgtgtgtgtgtgtgtatgtgtktgtgtgtttcccttaaaaggacaccagtcatttgatttagggcc

SEQ ID NO: 631011 - DNA, 601 bp, Homo sapiens
ggagggtgctacaatttggtaatttagaggggtagtcctaattaagagaagttaatgtttcttcyacctgctgggtgattcccttctgagaaggggagtacggctaacctatatggatgatgctcatgcccatgcctttttctaggtaccagggataaactgttgcgcttttaggacaggcagttgagaaactgaaaaggaaagggcactgttaatatgtttttgattctctgggttggggaccagcctttaaaaaaggcaatggtccagatttcagttgaagatgcatgttctcaagcccctctactacggttgggggtggaggctttatacttatcacaggcaggcattagagcagaaagaggtaaagagggtccttgccctgaaggcattcagagcctagtaaggaggaaagacaattaagcatgtgagtataatggagtgtgatggctgttatgatggagctaccaaggagatttcccttggggtgtccctagcagactatgatggctgctgatacccttattgtcctctctgcatcttacactctctatgtcctactacaggctggatacctgacttccagacccttacccagaag

SEQ ID NO: 631012 - DNA, 539 bp, Homo sapiens
ggaaggatgggttctgttagcagtaacagattcttttaagcattagggactcactaggtttataattacaggagtgagaggattatatttgtctttaaaattgtcacccaggtagtagtgtggatgagaagttgaggtagaaaagacagatttgggaactagatgaatggggtcatcaaaacaacttcccctactacttctaattttgcctgaacaagtccatccagctaagcagtggggaaaaggaagaaagaatagagaaagcaggtgaatctttgagtttcctctgagatatgaaaagatgtgtgctatttcttaaatatcgtggattgagcactcttgctgagaccagaaaatacagcttgcagcctatttcctcaaggaataakagtgggaagaaagaaagttttaggctgtttagtctgtaaaataaactaatctccaacagactttcctgtcagtgctaaataccagaacagagctttagtatagaagagaaagtaaggacaaggacaatattagaattattccaactggcc

SEQ ID NO: 631013 - DNA, 539 bp, Homo sapiens
ggaaggatgggttctgttagcagtaacagattcttttaagcattagggactcactaggtttataattacaggagtgagaggattatatttgtctttaaaattgtcacccaggtagtagtgtggatgagaagttgaggtagaaaagacagatttgggaactagatgaatggggtcatcaaaacaacttcccctactacttctaattttgcctgaacaagtccatccagctaagcagtggggaaaaggaagaaagaatagagaaagcaggtgaatctttgagtttcctctgagatatgaaaagatgtgtgctatttcttaaatatcgtggattgagcactcttgctgagaccagaaaatacagcttgcagcctatttcctcaaggaataatagtgggaagmaagaaagttttaggctgtttagtctgtaaaataaactaatctccaacagactttcctgtcagtgctaaataccagaacagagctttagtatagaagagaaagtaaggacaaggacaatattagaattattccaactggcc

SEQ ID NO: 631014 - DNA, 673 bp, Homo sapiens
cctactacttctaattttgcctgaacaagtccatccagctaagcagtggggaaaaggaagaaagaatagagaaagcaggtgaatctttgagtttcctctgagatatgaaaagatgtgtgctatttcttaaatatcgtggattgagcactcttgctgagaccagaaaatacagcttgcagcctatttcctcaaggaataatagtgggaagaaagaaagttttaggctgtttagtctgtaaaataaactaatctccaacagactttcctgtcagtgctaaataccagaacagagctttagtatagaagagaaagtaaggacaaggacaatattagaattattccaactggcccatttctctccctcaatttttaaaatrgaaataccatatggatcaatatgatagaatatctttagtgtagtgttatatatagtctctttgttgatatgactgatttttttatttgtttacactttcatccccaaatagttaatgatgtatgaatgtgaggccagaatgtaatgccagcagctagagaatttatctggaagaagtttaaagcattagttcaggtaatagcagcttattagcatttattcttccatgttaaaaatatacactcctttaaggacagtgacagctatgtaatttttggggcccaatgcaaaataaac

SEQ ID NO: 631015 - DNA, 534 bp, Homo sapiens
ctatcattctaatgtctacctccatgagattaacttttttagatctcaaatatgtaccctataaaaatgtacaatactatgtatcaataaaaaattttaaaagacctataaaccatctccagagtaaataaagraggctaaagagacataactaattgcaatacctgaccctagactagatactgtatcgagggggcaaaatgttataaaggcctctattgagccaattaacaaaattaaaatatggacactaacctagacaaaaagtactgtggcaatgttaaatttcctgaggctaatagttgcattgtgattatgtaagaaaatatcctgtactaagaatatgctctgaactatttaaggataaataactataatatatgtaaattgcccttaaatggttaaaaaaatgaatgttataccatgggatttggtattctaacaccatatttcccattcttgatatttatcgcagtcattatggtgtatatatatttattaaagagccctacatatatgttaacttcttttttg

SEQ ID NO: 631016 - DNA, 534 bp, Homo sapiens
ctatcattctaatgtctacctccatgagattaacttttttagatctcaaatatgtaccctataaaaatgtacaatactatgtatcaataaaaaattttaaaagacctataaaccatctccagagtaaataaagaaggctaaagagacataactaattgcaatacctgaccctagactagatactgtatcgagggggcaaaatgttataaaggcctctattgagccaattaacaaaattaaaatatggacactaacctagacaaaaagtactgtggcaatgttaaatttcctgaggctaatagttgcattgtgattatgtaagaaaatatcctgtactaagaatatgctctgaactatttaaggataaataactataatatatgtaaattgcccttaaatggttaaaaaaatgaatgttataccatgggatttgrtattctaacaccatatttcccattcttgatatttatcgcagtcattatggtgtatatatatttattaaagagccctacatatatgttaacttcttttttg

SEQ ID NO: 631017 - DNA, 606 bp, Homo sapiens
gcagtatatatacacaatggaatactactcagccataaaaaagaacaaaatagtgtattttgcagcaacttggaggagctagaggccattattctaagtgaagtaactcaggaatggacaaccaaatacygtatgttctcacttataagtgggacctaatctatgggtacacaaaggcatgcagagtactgtaatgggctatggaagctcagaagggggatggaggataaaaaactacatagtgggtacaaagtacattagttaggtgtggtggttaataataagtgtcaacttgattggattgaaggatgcaaagtattgatcctaggtgtgtctgtgagggtgttgccaaaagagattaacatttgagtcaatgggctgggagagacagacccacccttaatttgggtggtcacagtctaatcagctgccagcatgggtagaatataagcaggcagaacaatgtgaaaaggagagactggcctagcctcccagcctacatctttctctcatgctggatgcttcctgccctcaaccatcggactccaagttcttcagttttgagacttgcactggctctccttgctcctcagtttacagacagcc

SEQ ID NO: 631018 - DNA, 597 bp, Homo sapiens
tctcatataaaatagaaatattcaacatatttcaaggggtgcatataaaaattaactgtttggtatatagcagtttaggcaaccctcccctcaaccattacaatttatttttcctttttccttctctaggtatacttagtttccacactttctttaattgtatctggcctctattcaagggtacacttttcatattgtgactgattttgcaatcaatgtgttttaacctccaatgtttcctacctgactttttgttatctaattgtaagcattttgatgcatctgtttacattcagcttttccctctggtctgacatttccctattgagtgagaacatctttgaggacattccaactttgccagtcatccctcayatttaatatgtagagtgggtcatcacctcattcgttgaatactttctgcttcttacagttccttccatttgtgttgaactgtatttaatacaggcttctctctctctctctctcactctcctaggatggagtgtcatcttggctcatttcaacctccacttcttgggttcaaccaattctcattcctcagcgtcctgcatagctgggactacaggcatgcaa

SEQ ID NO: 631019 - DNA, 530 bp, Homo sapiens
atcaatgtgttttaacctccaatgtttcctacctgactttttgttatctaattgtaagcattttgatgcatctgtttacattcagcttttccctctggtctgacatttccctattgagtgagaacatctttgaggacattccaactttgccagtcatccctcatatttaatatgtagagtgggtcatcacctcattcgttgaatactttytgcttcttacagttccttccatttgtgttgaactgtatttaatacaggcttctctctctctctctctcactctcctaggatggagtgtcatcttggctcatttcaacctccacttcttgggttcaaccaattctcattcctcagcgtcctgcatagctgggactacaggcatgcaacaccatacccagctaatttttgtatttttagtacagatggggttttgccatgttgcccaggctggtttcgaactcctaacctcaagtaattcacctgcttcaccctcccaaagtgtcaggattacaggcgtgagacaccatgcc

SEQ ID NO: 631020 - DNA, 471 bp, Homo sapiens
tttttattcctgtttttactaccagtgctatcacttrttgagcatctggcatagatcagacctggtgaaaggtacattaaatatgttagtttatgcctcttcatttaagtatgtcagatattatttttaactttttggtggagtttcgctgtacagaaaaatggggaagtagctagaggggaatatgagactaaaagaggatttaaaaaaacaatatgggaattgtgataatatttaatgatgatgtaaaaatctgttatagaaggagagacagaagatgcaagagagagtaggataactgagaacatgagagagaatgaaatccaaagcgtatggaaagggtagagggcgtgatcattgctagcaaggtatgtttcatggttataaaaggaaagaaagagaaatgactgcagattaggtatttttgtacatttgaaggtaggaaggtatgggagatactattaggtggct

SEQ ID NO: 631021 - DNA, 502 bp, Homo sapiens
aatatatccaaaaacacagaggtaagatagaggtaatgacccattttggaggcctgagcagttccatgtgggtgtattctaggctgtatttgtagtgatgataagaactgaggcctagaaacatgtagacagagtggaaayggctttgtgtagcatcatagagtgttgagcctttttgctgaagactgtgtggtatcatagaaggtgttaaggtggcactagtctgtggaagcaaatttatgtgtttgcaatggggaaggagaggaataaactattaaaacaaatactacagtggtggaatctgtagaactttattactgtggcaactgaatagcagagaggaatctaagattcatatttctgtcttgaaagactagatgaatgctaattccattcactcattcattcatttgttcattcaataaatattatttaatacctaccattagcagagaattgttttatttacaataaagaaaaagatgaacaggttatgggcttt

SEQ ID NO: 631022 - DNA, 502 bp, Homo sapiens
aatatatccaaaaacacagaggtaagatagaggtaatgacccattttggaggcctgagcagttccatgtgggtgtattctaggctgtatttgtagtgatgataagaactgaggcctagaaacatgtagacagagtggaaacggctttgtgtagcatcatagagtgttgagcctttttgctgaagactgtgtggtatcatagaaggtgttaaggtggcactagtctgtggaagcaaatttatgtgtttgcaatggggaaggagaggaataaactattaaaacaaatactacagtggtggaatctgtagaactttattactgtggcaactgaatagcagagaggaatctaagattcatatttctgtcttgaaagactagatgaatgctaattccattcactcattcattcatttgttcattcaataaatattattyaatacctaccattagcagagaattgttttatttacaataaagaaaaagatgaacaggttatgggcttt

SEQ ID NO: 631023 - DNA, 592 bp, Homo sapiens
agtgacaatacagtgtgttaattacaatgatgttttaaagttataaggtagaataagacttagaacagggtataattaatttttcttgggagtgaataggaaagtgtgagagaggtgatgattcttgggctaggtctttttttttctttccaggtaagaaatctttattcatgccattactgatggggtttatgaaatgaaattacacatgcaagatttttcgtattactattatcaagctttgctgaggcatttactaccttagttggctgttttgctttccctagacatttttttttcagcttgaatttccttttctttttctcaacttttattttaagttccggggtacatgtgcaggatgtgcaggtttgttacataggcaaacatgtgccatggtsgtttactgcacagatcaacccatcacccaggtattaagcccagtatccatcagctattctttcttatgctctctctacccttaccatcaccaacccccaacaagccccagtgtgtgttattctcctccctgtgtccatgtgttctcattaatcagttcctacttataagtgagaacatgtggtgtttggtt

SEQ ID NO: 631024 - DNA, 550 bp, Homo sapiens
tgtgatccaacagctcaacatttgtaggggagagagtgatctctcaatgtctttcagttcaaaggtattatgtcctgtctcttcaaaagtacagggagaagaaagcagttttacttaatgaggcagaacatttgagctgctagttcagaaaagatatcaaagaaggttgttcatgtcagcctcttgatttttactgtataggtctttctagttccctgggacataaaagtgtgtcatttaaaaggcattagatacatttctctggtttaacatgtttgatgagtctcagacattgtaaaaagttgtggagcctataactcttatggccccagtgttgcaaattatctatatggagccagagggtagcataggattataaartgtgggttagccatcatctagcagactataaagtttctctgttttatatttttcaaaagataaactgacaaaattagtttgggaatggaaatgttaataagagaccttaaaaggcacagtttcatcctttattttgtctggtgaacagtctgagaataggaaagataaa

SEQ ID NO: 631025 - DNA, 604 bp, Homo sapiens
gtgtttgttatttacatttatagtttaaggtaatgctaaatttcagttagagacaagtaaaaattagatcagatatgttttcctatccaacttcatggatcccagaaatctctttataatcctgytggtggtctgtggatcccagatcaagatcttatgctaggacttcctgtcagttgtcctctctccctgtcctctttactaggtcgccgtgacctgcttcccagatcttcctcattgtcacagttttgtataaatatcttagaatgtcactaatatcaggataagttcatagcatctatgagagtaagaaagcttgagctgtcaattttgcttcaggctgcaaaatacagtaatacaatttttctttccttcccttgccattccttgctttttttttttttttaaataattatttagtgggagaatcaagaggtgggggaagaaagatggcaactgcagatggaacataaggaccacatagctcatggtagctatccagatgagcatgcgtatgcagattttaggcatatgataatcaaaagacctggaggttctttccctgctctccttatatttcagtgctacattctgatgatcctaa

SEQ ID NO: 631026 - DNA, 563 bp, Homo sapiens
agacataccagttcatttcatgcctctgtgctcctgtacatactgtccccactggctagaattcattcatcctacttttttttctggaactcaaaattttrcacaaattacaccttgttcaattaaccttctttagaaatatttctcccacatttttgggaagcattcagcacttttttctctgtgttcttacactcctgtgtttggtgtttgtaggttgatggcagaatttgttaattcttttggcacaggtttattagagatctgctcagttatgggctcaatttctaggcattgatgaatatgacagatgccctctgccttcccagagctcacagctctgcaaacattccatattattgtgtctcttatttaccagtttttaccgtcaactcagatgaggaatagagccatcttttccttattttttcctcaaaccactcacaaagcctttacatcaaagtaggctttatttacagaagggtttttgcactgcagacattgaacatattatacaattcaagattagacagctctttttaaaaaagtttttctaccatccc

SEQ ID NO: 631027 - DNA, 563 bp, Homo sapiens
agacataccagttcatttcatgcctctgtgctcctgtacatactgtccccactggctagaattcattcatcctacttttttttctggaactcaaaattttacacaaattacaccttgttcaattaaccttctttagaaatatttctcccacatttttgggaagcattcagcacttttttctctgtgttcttacactcctgtgtttggtgtttgtaggttgatggcagaatttgttaattcttttggcacaggtttattagagatctgctcagttatgggctcaatttctaggcattgatgaatatgacagatgccctctgccttcccagagctcacagctctgcaaacattccatattattgtgtctcttatttaccagtttttaccgtcaactcagatgaggaatagagccatcttttccttattttttcctcaaaccactcacaaagcctttacatcaaagtaggctttatttacagaagggtttttgcaytgcagacattgaacatattatacaattcaagattagacagctctttttaaaaaagtttttctaccatccc

SEQ ID NO: 631028 - DNA, 584 bp, Homo sapiens
ttgtggttcacaaactgtgtagccatgtttattgctactgtttacaacagctgagaaaacagctatgtgatctatctggttgcaaaccttgaaaagcttcctcgttacttttatgctttggtgatcagaaaactgttttattggcattgttaatagtaatctgaattcgataactgtgaaaatgtattgagagcctatgatgtgctatgtatatgctcttccaggtgctggtgatgcaatcagacaagttctctgctgttctggagtttacatttggaagaattgtgttatataccagggaaggatgtggtaactctcctgaaaccttcccttggtcattgtcttcttcttcttctcctcctcccttttctccctctcttccccctcctccttctcctcttattcttcytcctccttctgtttttaaatgaggaagcccatagaaaatattgtgacagggagaaatggattttaaataagtatgactgaaaaaaaacttttactataatagaaaatcttggtgctgagggaagaatccaaaaaattaaaaatcttcagaaggtatgtctttgaacagacaaaca

SEQ ID NO: 631029 - DNA, 595 bp, Homo sapiens
attttaactgataatactcaagactgcggtgaaacaacactaatatctgttactggtgggagtgttaccaaacatttatggaaatattctacagtgctacagaaagcttttaactcaactccttttgtataaatctattcccaaggaatatttttaaagccaatatataacartctttagtacagcatcatttaagagagcaaagacttgaaaacaatgttagtaacagtcataggagaatagatacattagttatagaagattgaacacctgtcctttgtgtatgcccaatatttttttagcactttcctaaattttggcaattttttacactaggaattctacctcctaatgtagaaataggaaaactaacattcttaatatctctgtaactaagatgcagacatgtgacttcacactcaggaagacttgaaatagaaaaatgtgtaacaagagtaggctgcagtatatagggaaatcaatcttgcaggaatctcagtgacagagatacttaattcttcagcagtggcagtgatgggatatacagaagcaaaagaactggctgtgaattaaaaagtttaatacagttaggctt

SEQ ID NO: 631030 - DNA, 632 bp, Homo sapiens
cactgtgcccagtcttgaagagctaaaatttctaaagcactcagaaaagaggcttgtagaaaacactatgcaaatactacataatacagctatcatttgccatcaaaggactttgggagagtggaatttgtactgttgcacatacacacatgtattattatttaagaatgttattaagttagaatgtgtgttagaatgtttattttaattgctatgaaccttgatgcacagaaatattaatttttacagctgctgggagtggcaattgctggcaagcagattagagcagtggagaaagtacaagcaaacatgggtttgaatttccattctactgaaaaattttatgtggcctcatgcaaattatttaacctccctaagtctcatttttcccatatttaaaacatgaatgataatacctaaggtttcaagtaatgagtattagagaaaatgtactcaaaccaattaacctaacacaaagtgtgcattcaataaatgttgattttcttcataatgaattcattgattaaacatctgttcagtgtttttgatatgccagatgctggaaatagaaaaataaacaaaactgtactctgccctaagaagkttacagtgtattgagaaagaaagctggt

SEQ ID NO: 631031 - DNA, 294 bp, Homo sapiens
taaatttatttcccctagtcctggaatctggagtccaaggtcaaggcactcttacgtttggcgtctagtgggggcccgcttcctcaaagacagctgtcttctccctgtgacctcacatgggaaggggcgagggatctctctctctgggttatcttgtwtaagggcaccaatagcctaaccctccaaaggttccatctcctaataccgccaccttggagttaggatttcaacatatggatttagggaggacagaaatctcagtccattgcatttttctaatgatgttacttctct

SEQ ID NO: 631032 - DNA, 578 bp, Homo sapiens
catggtggctcatgcctgtaattccaacattttgggaagcctaggcaggcagataatttgaagtcaggagttcgagaccagctctgccaacatggtgaaaccccgtctctattaaaaaatacaaaaattagccgggtatggcggtaggcacgtgtaatcccagctactcacgacgctaaggcaggagaatcrctttaacccaggaggtggaggttgcaatgagatgagattgcaccattgcactccagccaggatgacagagtgaaactctgtcttgaaaagaaaagaagagaagagaaaagaaagaaaagaaaagaaaagagaaaagaaaagaaaagaaaagaaaagagaaaagaaaaaaaagacagaaaaaaagaaaaaaaagaaaaacaggagcagaacagacatacaaaaagaagttgagattagaaagcagggagttccccatctgcctttccacagttgacttctgtgaggtttccctgaatccttccaataatttctctttttcttgatctactttgagtagatttgggtttcatgcaccccaaactgagacagtcaccttgttagagaac

SEQ ID NO: 631033 - DNA, 540 bp, Homo sapiens
ataatttgaagtcaggagttcgagaccagctctgccaacatggtgaaaccccgtctctattaaaaaatacaaaaattagccgggtatggcggtaggcacgtgtaatcccagctactcacgacgctaaggcaggagaatcgctttaacccaggaggtggaggttgcaatgagatgagattgcaccattgcactccagccaggatgacagagtgaaactctgtcttgaaaagaaaagaagagaagagaaaagaaagaaaagaaaagaaaagagaaaagaaaagaaaagaaaagaaaagagaaaagaaaaaaaagacagaaaaaaagaaaaaaaagaaaaacaggagcagaacagacatacaaaaagaagttgagattagaaagcrgggagttccccatctgcctttccacagttgacttctgtgaggtttccctgaatccttccaataatttctctttttcttgatctactttgagtagatttgggtttcatgcaccccaaactgagacagtcaccttgttagagaacagagggggctgtga

SEQ ID NO: 631034 - DNA, 556 bp, Homo sapiens
tgcctttccacagttgacttctgtgaggtttccctgaatccttccaataatttctctttttcttgatctactttgagtagatttgggtttcatgcaccccaaactgagacagtcaccttgttagagaacagagggggctgtgaaggaagctctggcccaaacgagtgaggaagggctcatccatatctttgactgccccaaaacacttccttccacctaccacatctctcccccagyggattccctcaatttccctcagcattgctattcgaaacatcaccccaagttattcaggaaactctgagattatagcccctgttgatgtgtaaacatcttaaggagaatatgaaatagaagcttgaactaacatgtacattaaagtttttattaataattaattgaaggttaggagaaagtgagaagctatattcccactttattcagtttattggaaagcaaaagtttgttgagaaaatatgttaggcggaatctttatccctctaacaagaagagctgaaagacacagcaagtcagtctcccaggcaccaaagaagta

SEQ ID NO: 631035 - DNA, 556 bp, Homo sapiens
tgcctttccacagttgacttctgtgaggtttccctgaatccttccaataatttctctttttcttgatctactttgagtagatttgggtttcatgcaccccaaactgagacagtcaccttgttagagaacagagggggctgtgaaggaagctctggcccaaacgagtgaggaagggctcatccatatctttgactgccccaaaacacttccttccacctaccacatctctcccccagcggattccctcaatttccctcagcattgctattcgaaacatcaccccaagttattcaggaaactctgagattatagcccctgttgatgtgtaaacatcttaaggagaatatgaaatagaagcttgaactaacaygtacattaaagtttttattaataattaattgaaggttaggagaaagtgagaagctatattcccactttattcagtttattggaaagcaaaagtttgttgagaaaatatgttaggcggaatctttatccctctaacaagaagagctgaaagacacagcaagtcagtctcccaggcaccaaagaagta

SEQ ID NO: 631036 - DNA, 486 bp, Homo sapiens
agacctttctcaaagacgttgtctcattaactttctcactgccagtaatggagtttctattaycattattctatggtcattccaaggagttctcctcttatcaatttccttttttttttttttgaagtcaagagaactgttattttagctccgtagctgaagtttctcattcaagggctggtattcttttgtgcttggagaggattagaatggaaggtgtagggtcctttttgaatgatttctgaaccagttgagaaataagacaggaaagtaagtaaatggggcctaaaatttctttattggcaaaatctaggaattagggaatgtggcttttatgtccagataaatggattttctattactgaacctatgaattcaacaaatacaggcagcttttatggtgcagggagaatgtgtgctctctgtaggtagacccacttcaaatgggataaaagagaagaactagctgagcatgcttgctttatt

SEQ ID NO: 631037 - DNA, 486 bp, Homo sapiens
agacctttctcaaagacgttgtctcattaactttctcactgccagtaatggagtttctattatcattattctatggtcattccaaggagttctcctcttatcaatttccttttttttttttttgaagtcaagagaactgttattttagctccgtagctgaagtttctcattcaagggctggtattcttttgtgcttggagaggattagaatggaaggtgtagggtcctttttgaatgatttctgaaccagttgagaaataagacaggaaagtaagtaaatggggcctaaaatttctttattggcaaaatctaggaattagggaatgtggcttttatgtccagataaayggattttctattactgaacctatgaattcaacaaatacaggcagcttttatggtgcagggagaatgtgtgctctctgtaggtagacccacttcaaatgggataaaagagaagaactagctgagcatgcttgctttatt

SEQ ID NO: 631038 - DNA, 636 bp, Homo sapiens
tgacacaatgggaagctatttcctttccctgggcttaaatagcaagaagagagagtaactactggaatctcgtgagaaagtgcagtgtggaaagcctggcaaggtctgtgatgtttgttcaagsttcacagctaacttacggggtcgtagtagagatggagtgatgggcatgactactccaacttctctctcccctgtctttgatgtctttctgaggctcagcattggctgcatgtagggccactggtgcccttcacagggggccagcttctagggacacagagcaaggcagagacaggaagagagtgaatctgcagaggccaatggaagatatccagcacaataacacattgaatgcagtagatcagaagcagaaggagtctttatatttatgatcttgaagatggagaggaaccccttcaatgattataagagatgcaagatgaaagtaaagttcttttacttatagttcctggtaggactggtacacagtgtgcccaaagaccacacggaaagtttagagaaagtgtggaaagagagagggacccttgaccaattcctttattggagtccagagcattgtccaagcaggttttctgcagggagttttaattggcgggttgaaagcaagaaggc

SEQ ID NO: 631039 - DNA, 636 bp, Homo sapiens
tgacacaatgggaagctatttcctttccctgggcttaaatagcaagaagagagagtaactactggaatctcgtgagaaagtgcagtgtggaaagcctggcaaggtctgtgatgtttgttcaaggttcacagctaacttacggggtcgtagtagagatggagtgatgggcatgactactccaacttctctctcccctgtctttgatgtctttctgaggctcagcattggctgcatgtagggccactggtgcccttcacagggggccagcttctagggacacagagcaaggcagagacaggaagagagtgaatctgcagaggccartggaagatatccagcacaataacacattgaatgcagtagatcagaagcagaaggagtctttatatttatgatcttgaagatggagaggaaccccttcaatgattataagagatgcaagatgaaagtaaagttcttttacttatagttcctggtaggactggtacacagtgtgcccaaagaccacacggaaagtttagagaaagtgtggaaagagagagggacccttgaccaattcctttattggagtccagagcattgtccaagcaggttttctgcagggagttttaattggcgggttgaaagcaagaaggc

SEQ ID NO: 631040 - DNA, 636 bp, Homo sapiens
tgacacaatgggaagctatttcctttccctgggcttaaatagcaagaagagagagtaactactggaatctcgtgagaaagtgcagtgtggaaagcctggcaaggtctgtgatgtttgttcaaggttcacagctaacttacggggtcgtagtagagatggagtgatgggcatgactactccaacttctctctcccctgtctttgatgtctttctgaggctcagcattggctgcatgtagggccactggtgcccttcacagggggccagcttctagggacacagagcaaggcagagacaggaagagagtgaatctgcagaggccaatggaagatatccagcacaataacacattsaatgcagtagatcagaagcagaaggagtctttatatttatgatcttgaagatggagaggaaccccttcaatgattataagagatgcaagatgaaagtaaagttcttttacttatagttcctggtaggactggtacacagtgtgcccaaagaccacacggaaagtttagagaaagtgtggaaagagagagggacccttgaccaattcctttattggagtccagagcattgtccaagcaggttttctgcagggagttttaattggcgggttgaaagcaagaaggc

SEQ ID NO: 631041 - DNA, 636 bp, Homo sapiens
tgacacaatgggaagctatttcctttccctgggcttaaatagcaagaagagagagtaactactggaatctcgtgagaaagtgcagtgtggaaagcctggcaaggtctgtgatgtttgttcaaggttcacagctaacttacggggtcgtagtagagatggagtgatgggcatgactactccaacttctctctcccctgtctttgatgtctttctgaggctcagcattggctgcatgtagggccactggtgcccttcacagggggccagcttctagggacacagagcaaggcagagacaggaagagagtgaatctgcagaggccaatggaagatatccagcacaataacacattgaatgcagtwgatcagaagcagaaggagtctttatatttatgatcttgaagatggagaggaaccccttcaatgattataagagatgcaagatgaaagtaaagttcttttacttatagttcctggtaggactggtacacagtgtgcccaaagaccacacggaaagtttagagaaagtgtggaaagagagagggacccttgaccaattcctttattggagtccagagcattgtccaagcaggttttctgcagggagttttaattggcgggttgaaagcaagaaggc

SEQ ID NO: 631042 - DNA, 559 bp, Homo sapiens
atttattttctcccaacttacacctaccaccagggagtgtctgagacaagattcagacccaaagatagctgatttcaaaattatgttccatctactttatcatgctgccactcaagacatagcaatcacagctatgcttatgacaaatgtttgaatgccccttttacagtttccaaagcatgttgatatcttatagtatcttatagccaggccaatgcttaggaacattaattgcatggtatatgacctttgctgtggatgtcaccacctctacccctcctggaaatamctgaaacatcagaaatatcttctaaccacaaatttacctcaagacaaatataaagttcagaaatcatataaaacaatggtcaagttggtagtgttgcacagattcccaaaatcccccaagctgcctaaacttccatctatgtccttcacttcactcagaaggctgaggaaagaggcagcttcttgtgtcttttttcccagagcctcagttttaggcactgtctggatttctcctcccacagctctccctgattactgtctgtggcatggt

SEQ ID NO: 631043 - DNA, 607 bp, Homo sapiens
ctgtgcagctgttcctctttttaagacagtcacctcaggcttcctttgacatggcttctcctaataagattttcagcgcatcygtccacatctctgaattacagctacattaggctatagccaatgctcaggaaaatcctctgagggggctggtgtagggattattaccatgatgataagcatttgatcaaagaaaaaaccaagtcaatgatttttccagattcacattgtcattaagtgaccagaacaaaaactggatcctagattttctagcaacagatctttcggcttatccactgcaacatcctcatgtataacagcaaaaacatcaaaaagaactgcttaccatttgcttaacactggcctaagttgctattacatactagcttgtttaaccctcaagacaatccttttctcatggaataggaaaataatgatgccatctacattttacatatgtggaaactgaggttcagagaggttatgtgcaacctgccccaagttgcataattaggaactagtggagctgagatatgacccagtcataagtgattgctctaccatggtgcaaaattaactgttattctaagaagacattcccagtcct

SEQ ID NO: 631044 - DNA, 602 bp, Homo sapiens
cactgcaacatcctcatgtataacagcaaaaacatcaaaaagaactgcttaccatttgcttaacactggcctaagttgctattacatactagcttgtttaaccctcaagacaatccttttctcatggaataggaaaataatgatgccatctacattttrcatatgtggaaactgaggttcagagaggttatgtgcaacctgccccaagttgcataattaggaactagtggagctgagatatgacccagtcataagtgattgctctaccatggtgcaaaattaactgttattctaagaagacattcccagtccttggtcttatttgtgatattatgttggcagaatttactttccagacccacatgactcatatggcacttgtcttccatgttcatctgccattgtataaaattttaattaccttctggaaacatagttacttctctatccttttcttctcaagtaatatccaaacatttatttcaggcaaattctcacttgaaaactgtctcacagatattatgaatataggtaatctgcaatatcttcaggccagcaacatgtttataaaaaggaatagatttagtatctattgaatgttc

SEQ ID NO: 631045 - DNA, 543 bp, Homo sapiens
tgaagttgcagggtgtaattacactgatgggatagtaggtgccctgggacaggcctgataacaggttgcgttggatgcataaaggggcttggaaagttaagatggtattggttacagggccatgtataggcttttcattgctcatgtaataggtgaggttggaaatgtaagagagtaaaagctggattgtgcatcctgttagagtatttttggacctatcagagatggggaaggaagtctaactgctagtcctctctgggatagtgccctattctttgttcccccagaggggccttatgatggaccaagggattattcctttggcacatctcacaggctttgacaayttgttggatggtccagaggagatttggcccagtaaatagggatttggtcatttgatgagtgttctcaatactcatatgaaaagtttggtaaagagtcttaattattttccactggctggcttcaggtatgagtacctttccctcttctgtcgttaaccaccctgaggggagaaaactatgtccccatgaaagtccc

SEQ ID NO: 631046 - DNA, 599 bp, Homo sapiens
aacttaattaaactaaaaagcttctgcgcagcaaaagaaataatcaacagagtaaacagacaacttacagaatgggagaaaatacttgcaaattatgcatccaacaatggattaatatccagaatctacaaagawctcaaaagacaaaaacaaataacttcattaaaaagtgggccaaggacatgaacagaaatttttcaaaaaaagacacgtaagcagccaacaaacatgaaaaaaaaaatgctcaaagtcactgatcatcagagaaatgcacattaaagccacaataagataccatcttacacctggatgtaaaataccatcttacattctggatggtcacagaatggatattattaaaagtcaaaaacaacagatgttagcaaggatgcagaaaaaaggaattgcttatgcactgttggtgagaatgtaaattagtgaaacctttatggaaaacagtacggatattgctcaaagaactaaaaatagaaccaccagttgacccagcaatcccactactggtatctacccaaagtaaaagaaatcattatatcaaaaagacacctgtacacatatgtttattgtaacactattcacaa

SEQ ID NO: 631047 - DNA, 626 bp, Homo sapiens
ctatgctaataactaggaatcaaaaggttttctatctcccacttctactcactggctagtactcaaccaacatactcaattaaaattttcaaatgcaattaaargagtttcttgaactacttaattcatgtagatttatttgaattcccaagttgtgttagagacccctgacacacaactgtaatatgccccatatcttaatgttgaatttatcacattataattatttatttcatctgtttttaactagtctatgaactcttccaaggaaggattatgtgtttgtaacttgagggcttagcagagcatctaccactttgtagacacttggtgtatacttgccgaatgaataaaagatactgacatatattcacttaaatcaatttatgatactattttgatagactcagctggtggattaataggttctcctgccacagaggattgaagtgagggtggggctcaggaacaggctcttgcttctctggcacagctagaatgcatgtactgaaggtggtcagcctccaggctcggtccctcttgagtgtaaggtgatgagcactgtggtgaagtgctgaattttttctactaaatgcaagcggaatttgaacttgatttcattttcc

SEQ ID NO: 631048 - DNA, 585 bp, Homo sapiens
taatactgagtgtcaacttgattggattgaaggatacaagtattgatcctgggtgtgtctgtgagggtgttgccataggagattaacatttgagtcagtgagctgggaaaggcagacccactcttaatttgggtgggtacaatctaatcagctgccagcgccgctataatataagcaggctgaaaaatgtaaaaagagagactggcctggcctcccggcctacatctttctcctgtgttggatgcttcctgacckcaaacattggacttcaggttcttcagttttgggactcagactggctctccttgctcctcagcttgcagacagcctattgtgggaccttgtgatcgtgtaagttaatacttaataaacttcccttatataaataaactttaataaacttaatatatatatctttatgtatatcttaaacttcccatatatatataattgatgaataaaattatatatattgaaggtgtacaacatgatgttttgatatacatatacattgtgaaataattgccaaaatcaaggtagttaacatatacaatatcttacatggttatcttttcattgcaacaa

SEQ ID NO: 631049 - DNA, 652 bp, Homo sapiens
atcgtggtaattattttacaatatatatgtatatcaagttatagtgtatgtcttaaacttatacaattttatttgtcaattatacctcaacaaacagggtagtaaaagaaaaaacagaatgaaagaaagaaagaaacaraaacttttaagaggtatcaggacaaagatgaagactgagcagagaacatgagcaattcattcataaaataggaatattaaattatttcaaccgcattgatagttacacaaataaaattggagatattctcataatgcaaaaagaacctccatcaatgaagacaggttatataattttgtaaggcaacaaagtacctacttatattcatcaggcaacactgtctctgttagctgtggagtaggtgttatctatctatattctgttttttggccaagctagctggcgtcccagacatcctcaagttatcactgaatgtcttgttgctgtatgtagcctatatcattccttagcctaaatttttgtaaagactatgtggtagaatggaaagaacataaactttatagccagagagatttcattgtcatatgagtgtgtgatgttgggcaatctatttaatctctttgagtctaaattttctcaatcatcataaaaaaatgggagcaattatgtttg

SEQ ID NO: 631050 - DNA, 558 bp, Homo sapiens
ggtatcaggacaaagatgaagactgagcagagaacatgagcaattcattcataaaataggaatattaaattatttcaaccgcattgatagttacacaaataaaattggagatattctcataatgcaaaaagaacctccatcaatgaagacaggttatataattttgtaaggcaacaaagtacctacttatattcatcaggcaacactgtctctgttagctgtggagtaggtgttatctatctatattctgttttttggccaagctagctggcgtcccagacatcctcaagttatcactgaatgtcttgttgctgtatgtagcctatatcattccttagcctaaatttttgtaaagactatgtggtwgaatggaaagaacataaactttatagccagagagatttcattgtcatatgagtgtgtgatgttgggcaatctatttaatctctttgagtctaaattttctcaatcatcataaaaaaatgggagcaattatgtttgcctcttgagttgcttaaggattaaatgagttaataatatgtggatgcacatgacaca

SEQ ID NO: 631051 - DNA, 593 bp, Homo sapiens
aaaatatgtaggctgaaataccaaatccaaacttaatgctctagtccagaatgctgtcarctttaactgggattactgcaatgaccttccatctggactatctgcatttattcttacccctttctaagttgttctccatgtagcatccatggcaatatttttgacatgcagatctcattttgttaccccctgacctaccacaccttttaaacgctaagtggtttaattatttctgagccagtgagtttgctggcattttatcagttagggaaaatctagcattttaaatggcatttaagtggcagttgccattcttcctaattgaaaataatctatgtattaagttactgattcttcactcacaggagtgaaactgtgccccaaagagttaaagaaaccaatgactaacagaaattattgagtttgcaggatagcaggcaagaaaagaaacaagactgaaactccctctgctagaaagataacaaaactggctgaaattcattggaaccaatatgactgactgaggtttagatcaaatcattttccaaagtcaatcagtcgtaagtccagggcagatcagaaaatagccacag

SEQ ID NO: 631052 - DNA, 343 bp, Homo sapiens
tttggaaaacttctttctaaatggagttccagaacatggcctgatgctacagagccttgaatgatgtgtttattcagtcttttttcaagaaaatattggaaagacagaacttctgatttttttatagaggatcttctgtcagtcatttcccaggatggggcagggatggcctctaaaatatgtaggctgaaataccaaatccaaacttaatgctctagtccagaatgctgtcagctttaactgggattactgcaatgaccttccatctggactatctgcatttattcttacccctttctaagttgttctccatgtagcatcyatggcaatatttttgacatgc

SEQ ID NO: 631053 - DNA, 644 bp, Homo sapiens
gatgctacagagccttgaatgatgtgtttattcagtcttttttcaagaaaatattggaaagacagaacttctgatttttttatagaggatcttctgtcagtcatttcccaggatggggcagggatggcctctaaaatatgtaggctgaaataccaaatccaaacttaatgctctagtccagaatgctgtcagctttaactgggattactgcaatgaccttccatctggactatctgcatttattcttacccctttctaagttgttctccatgtagcatccatggcaatatttttgacatgcagatctcattttgttaccccctgwcctaccacaccttttaaacgctaagtggtttaattatttctgagccagtgagtttgctggcattttatcagttagggaaaatctagcattttaaatggcatttaagtggcagttgccattcttcctaattgaaaataatctatgtattaagttactgattcttcactcacaggagtgaaactgtgccccaaagagttaaagaaaccaatgactaacagaaattattgagtttgcaggatagcaggcaagaaaagaaacaagactgaaactccctctgctagaaagataacaaaactggctgaaattcattggaaccaat

SEQ ID NO: 631054 - DNA, 565 bp, Homo sapiens
tctgtttgctgctgtgatgacccaaataaccccaatccctaatccagccaaaggggttaatgtcactcaagctcctgctccaccaaactctcaagacactggggaacaytgggccccatctccttcatagcttaacttgccctatctatcttcaccatgccaaacacccagagcttaaaggcatacaaagttcttgagtaatgaataaagcagatctcagaaatgtatcacagtgaagggagtggggataaagactggaattcctgataacacaatcatcaattctactgcccgaggggaaccccttcttggtgtgaatcttggtaagcatgttcccactggatactcctgaactgccttgcttctctaggcactcttcttttatgcagacctctttcaagtttctcagtctcatgaactcactcttcttcctcagaaacctctgtttatgccacacgtattagtccatttttgcactgctataaaaaacccctgagagtgggtgatttataaagaaaagggatttaattggctcatatttccacaggctgtacaggaagcatgg

SEQ ID NO: 631055 - DNA, 565 bp, Homo sapiens
tctgtttgctgctgtgatgacccaaataaccccaatccctaatccagccaaaggggttaatgtcactcaagctcctgctccaccaaactctcaagacactggggaacattgggccccatctccttcatagcttaacttgccctatctatcttcaccatgccaaacacccagagcttaaaggcatacaaagttcttgagtaatgaataaagcagatctcagaawtgtatcacagtgaagggagtggggataaagactggaattcctgataacacaatcatcaattctactgcccgaggggaaccccttcttggtgtgaatcttggtaagcatgttcccactggatactcctgaactgccttgcttctctaggcactcttcttttatgcagacctctttcaagtttctcagtctcatgaactcactcttcttcctcagaaacctctgtttatgccacacgtattagtccatttttgcactgctataaaaaacccctgagagtgggtgatttataaagaaaagggatttaattggctcatatttccacaggctgtacaggaagcatgg

SEQ ID NO: 631056 - DNA, 565 bp, Homo sapiens
tctgtttgctgctgtgatgacccaaataaccccaatccctaatccagccaaaggggttaatgtcactcaagctcctgctccaccaaactctcaagacactggggaacattgggccccatctccttcatagcttaacttgccctatctatcttcaccatgccaaacacccagagcttaaaggcatacaaagttcttgagtaatgaataaagcagatctcagaaatgtatcacagtgaagggagtrgggataaagactggaattcctgataacacaatcatcaattctactgcccgaggggaaccccttcttggtgtgaatcttggtaagcatgttcccactggatactcctgaactgccttgcttctctaggcactcttcttttatgcagacctctttcaagtttctcagtctcatgaactcactcttcttcctcagaaacctctgtttatgccacacgtattagtccatttttgcactgctataaaaaacccctgagagtgggtgatttataaagaaaagggatttaattggctcatatttccacaggctgtacaggaagcatgg

SEQ ID NO: 631057 - DNA, 565 bp, Homo sapiens
tctgtttgctgctgtgatgacccaaataaccccaatccctaatccagccaaaggggttaatgtcactcaagctcctgctccaccaaactctcaagacactggggaacattgggccccatctccttcatagcttaacttgccctatctatcttcaccatgccaaacacccagagcttaaaggcatacaaagttcttgagtaatgaataaagcagatctcagaaatgtatcacagtgaagggagtggggataaagactggaattcctgataacacaatcatcaattctactgcccgaggggaaccccttcttggtgtgaaycttggtaagcatgttcccactggatactcctgaactgccttgcttctctaggcactcttcttttatgcagacctctttcaagtttctcagtctcatgaactcactcttcttcctcagaaacctctgtttatgccacacgtattagtccatttttgcactgctataaaaaacccctgagagtgggtgatttataaagaaaagggatttaattggctcatatttccacaggctgtacaggaagcatgg

SEQ ID NO: 631058 - DNA, 571 bp, Homo sapiens
agcagaacaacaccaaaggggaaatctgcccccatgatccaattacctcccaggccccatcttcaacactggggatttcgatttaacatgagagttgggcagggacatagacccaaaccatatcaccatacaaatgatgaggtgcaatctcttggatcttgcaaatttatattttcttgtggcttgcaaacttgagcaacaccacaggctacagctgaatgcatattgatatttatgatmaaaaaaaaggctacagaaaggatgtgaggtctgatctcccaaataaggataacactttgataatactttctttacgaagtcacctgagaagtaagcaggccttgtaaatataagcattattctttcctagatattttgcagcgtaattccctattgaagaaaaaatatttctcctgttagcagggttttgtccttgactttatgatgtatagattccctggttactggactgagagtcacttggcttttttcccctctgctgattgctagtggatgttatttttgctaactaaaaggagaggggttatatcagcttgggtttgctgcatct

SEQ ID NO: 631059 - DNA, 572 bp, Homo sapiens
gaattccaaaaaatatttgtggaatagaacagaaagaaagcaaaatagatagcatgatccaaaataatcttttgaaacatctcttgaacaggtcaattaaatgcatctcagtaacatgaaagcattttgaaaaatatttcttaagtttccattccctcctaaaagtgctctatctctgttggcagacccaccattaggaccaatgagtgagctattttatctctgtctggaatcttctagatgtcaactttctgtgacatactcatatgtgatttcattctgatctccttccygaaccctctgaagcagttgcagctcgaaaggttgttaaccttactgtcagcaggatccctttgcagataagagcttcttaaggactaattttcttcagttaagctgcctgcatcttgctgcattgatcaagcaattaattgatagttgaagacttacctgaaactgcaaggcagctttttattttaaacatattgatttttgttacctttccctcactctccaccttcaatatagataaatatttttttaatgctttctatgcatatcctttagtcctc

SEQ ID NO: 631060 - DNA, 455 bp, Homo sapiens
agggaactcagaggtggatgctctgactgggatgggacaggcaaacagacccttcttaacgtttgcagggcaagggtacaaatggaggccctcataccaaatgtctacacatttaaaagctattaatcaatttatgcctgcaacctggctcaggttgctacccagggccctacagcatgtgtctgggtattgttcatgagacctgtggagtaaaattcctacattctccctcaggcaacacctgtcccctgtaagcctcagatctgctgcgatggcagggtgaacatgacccagagctcaggactcctgggcagtgcctggatcaacttgaagccaggatggggactgacctggtcaagctctccaggggttgagtgggcagtttatcctcaacacattacttttcctaccyggcaattacaggcagttctaagccttccccaaactatacaatc

SEQ ID NO: 631061 - DNA, 549 bp, Homo sapiens
gcgatggcagggtgaacatgacccagagctcaggactcctgggcagtgcctggatcaacttgaagccaggatggggactgacctggtcaagctctccaggggttgagtgggcagtttatcctcaacacattacttttcctacccggsaattacaggcagttctaagccttccccaaactatacaatctgagcagaagggatgtgggagggcagttatcagaggtatctggcctgcctagatacttactttaggtgaatttggggtggtcaaatttaaacaaaagcagctattctttcttttgtttctcaggcaagaggtggtgattttctctttcttctgcatatactctcaaccccacatcttctggtcttcatgggtgttgggagaagggatttggcttgtatgatcctcatctgtaattcctgtttgctgaaggggtttctaaagtgtaaagaaatgtcctctttatggtatcaaaaataaaagaaatttatgttttggtatttgcaatgcctgggacccagagcaaggggtcctcttgcctggat

SEQ ID NO: 631062 - DNA, 405 bp, Homo sapiens
gcgatggcagggtgaacatgacccagagctcaggactcctgggcagtgcctggatcaacttgaagccaggatggggactgacctggtcaagctctccaggggttgagtgggcagtttatcctcaacacattacttttcctacccggcaattacaggcagttctaagccttccccaaactatacaatctgagcagaagkgatgtgggagggcagttatcagaggtatctggcctgcctagatacttactttaggtgaatttggggtggtcaaatttaaacaaaagcagctattctttcttttgtttctcaggcaagaggtggtgattttctctttcttctgcatatactctcaaccccacatcttctggtcttcatgggtgttgggagaagggatttggcttgtat

SEQ ID NO: 631063 - DNA, 579 bp, Homo sapiens
tctccaggagaaaaaaagatgtgcagtttttctaaaacgtattggctaatggtcacttgcttcatagagcatcttggggaactggtatttcacaaaccaccctttgggaaatgtggaggaaatggcatggcaaatgcacagaggcatgaaattgcctgacatgcctggggaccaatcagtagttcaccatggctgtggtgtgtggaggggkataaagcagggatcagataacagagaccactgttaatagtttggcctttatcctagacaatgagagcaactggaatatgtaagaagagtgaagcaatgaccaaattttatggtttagaaagattactctggctttggtgcagagattatatttgaaggactgagaattggaggaagccaggatgaccagtttggatggaagactaaaccaacatattaaagacacattctcactggctgggctagaaaggaggggaagatgttaggtaggtggattctataagatttggtgaccggaagggaatgagcaagcagagtctgagttgacttccaggtttctggtttagatgactggggcatgggggtgcc

SEQ ID NO: 631064 - DNA, 621 bp, Homo sapiens
gtttttctaaaacgtattggctaatggtcacttgcttcatagagcatcttggggaactggtatttcacaaaccaccctttgggaaatgtggaggaaatggcatggcaaatgcacagaggcatgaaattgcctgacatgcctggggaccaatcagtagttcaccatggctgtggtgtgtggagggggataaagcagggatcagataacagagaccactgttaatagtttggcctttatcctagacaatgagagcaactggaatatgtaagaagagtgaagcaatgaccaaattttatggtttagaaagattactctggctttggtgcagagattatatttgaaggactgagaattggaggaagccaggatgaccagtttggatggaagactaaaccaacatattaaagacacattctcactggctgggctagaaaggaggggaagatgttaggtaggtggattctataagatttggtgaccggaagggaatgagcaagcagagtctgagttgacttccaggtttctgrtttagatgactggggcatgggggtgccattcaccaagataaggactgcaagagggagtgcaggttttgagggagaggcaatgaattcagtgtag

SEQ ID NO: 631065 - DNA, 572 bp, Homo sapiens
actacttaaatataagatcatttactttcatttaatcttctgaacatctgcatgtattaggtattattatacccattttatgagtaaaaaattgagacaagaagacttcaaggaacttgctcatgttcacacaattacaaagtggcagaggctgggtgcagtggctcatccctgtaatcccatcactttgggaggctgaagtgggcggatcacctgaggttargagttcaagaccaacctgaccaacatggagaaatcccgtctctactaaaaatacaaaattagccgggcatggtggtgcatacttataatcccagcaactccggaggctgaggcaggagaatcacttgaacctgggaggcggaggttgcggtgagccgagattgcgccattgcactccagcttgggcaacaggagcaaaactccctctcaaaaatagaaaaaataaaaacaataaagtggcagagttgggatgccaactagatttttatactaaatgggtgtgcatatgaggtccctccatgtcaagctcttatccagggatcaagttttcactggtcttacttagcaga

SEQ ID NO: 631066 - DNA, 655 bp, Homo sapiens
acttgctcatgttcacacaattacaaagtggcagaggctgggtgcagtggctcatccctgtaatcccatcactttgggaggctgaagtgggcggatcacctgaggttaggagttcaagaccaacctgaccaacatggagaaatcccgtctctactaaaaatacaaaattagccgggcatggtggtgcatacttataatcccagcaactccggaggctgaggcaggagaatcacttgaacctgggaggcggaggttgcggtgagccgagattgcgccattgcactccagcttgggcaacaggagcaaaactccctctcaaaaatagaaaaaataaaaacaataaagtggcagagttgggatgccaactagatttttatactaaatgggtgtgcatatgaggtccctccatgtcaagctcttatccagggatcaagttttyactggtcttacttagcagaatggatggctccaggctatgtatactggaaaatcttggatgatatcctccccaaatcctcacctcattcttttttatattattgctggtacagtgcttgttattcttcttccagtgtacttctcatttactcagacagagagactctctctaaatcttatattgtccccagagcgcagcacagagttctgtatacat

SEQ ID NO: 631067 - DNA, 640 bp, Homo sapiens
ctggcttggttggctattttcagcaagtgatagccaacatttaagctatttatttcagtatatttgctatacgctgtgtctttcctgttggtccagatagaatggatttattttcaagtcgagatgaatgcttaagtccagggctcagagtttggatgcagaagtgtaggcaatggtagtttaagaacataaatactgccacaacttgtccatgagatggaaagtaataacttccctcatccactgcaatcctatctaaaaaaaatcttwgttttactatcgaaaaatataacaattctttccatttctgtatcacactacactttgatataatatgttcacatggattaccttagccaaatcttactcccctgagggattcagattcaaaaagcgtttattaataaacacccactatgtgttaaatttggttatgaggcactttcacacaacttttttatgtagtcttcactttcagcacttaatgaaggaaaagtaattggaaagcagaacttttgagaactggtactcaaacccagatcttaaattcccagtcgagttggtgccttttttccaataatcttgttcctcaaagagatgatgtgatgctgtagaaagagcaccagcttgcatcagggga

SEQ ID NO: 631068 - DNA, 581 bp, Homo sapiens
agctttgttgggggaagaagcggagaatcacatattcacattttagatttagcaatcatctacatttatccatacttctttcttcagtggcctaatcaagtttggagcataaggtgtagacttggcataacctatgcttaagatagtgggcttttcatacctttcggattaacagtattgttttctggcatacggaagaatattggtgtttcatctacatagcctcacagctttattctttctctttacaaaaggaagtatcctgaaagttagccaacttctcttgaaagtcagccaacagcttttgagaaagagctatttggtacctaaatgacaacttttttttttctttttctttttttagacagagcctcgctctgtcgccaggctggagtgcagtggcgtgatctcggctcactgtaacctttgcctcccaggttcaagcaattatcctgcctcagcctcccgagtagctgggactacaggcatgtgccaccacgcccagctaattttkgtatttttagtagagacagggtttcaccatgttggccaggatggtcttgatctcttgaccccatgat

SEQ ID NO: 631069 - DNA, 626 bp, Homo sapiens
ctgttgtaagaattatagaaattggtctgcatgagcctggcacataatgagactcaaattatatacactgaatagtaaaatattatttaaacaaataactgcacaacagacaaagaactcaaatggaaagggaaccagatagaaggggacgatggaaaaaaatattcgcctatttgtctagatttttattctaaatccttcctgccactaagtagctgtgtgactttggagaaaaacatttttctctatgggcaccagtctggttgtaaattgasgaatcagattacatgatgtctttggctccttcctgccttaatttgctctattcttttgttttctttttttaatcataccaagtacacagctttcaaatcttgctcaattctttgagagaaatccttggcttttatcttttcacctgatatttctcaacagctgtcacttcctacacagagctacagaaagggcttgtcatagcctcgagcaagcatgggtgtttggcagccaaagtgcagagctgagggaacagggcagattctccaaccttccccccttgaatggggcagcaacacaaggtgtttgatcagacacggctttctacagtctttctgtctgggctctccctc

SEQ ID NO: 631070 - DNA, 593 bp, Homo sapiens
gcaagactatggaccctgctgagctactaacactttgctaaagtgtgtgtgtgtggakgcatacacacacatatatatgtgtattctgcggttgtaaatacagaatgaaatcatatttcaacgactggtcactctttagctttgatgggataagtattttgaggtgtttgttggtttgcagtgtgcttcctagatgatttctcccaccaaatatcatagcagtaaaactataatgaactttgacagactgagttgaagctgtctggactgttcaatacaaaattcagttctatatgtactgtttcatcctcgaatgcaaatgctcctgacaacatgtcctagtggcttttaaaggttctgtaaaatgcatgaggtctgttagactctgcctctttgaaattcagattactgagatcagcaatccaggagtcatcctctcttcctcaacttcacatcctatctatccatcagccttcccagacccccttcatcccttctgacccattgatgttgccatttcagtccctcatcacctcacagcccaaacaccagaatgatttgtttatttgtttctaaaacaaacacctgactgt

SEQ ID NO: 631071 - DNA, 593 bp, Homo sapiens
gcaagactatggaccctgctgagctactaacactttgctaaagtgtgtgtgtgtggaggcatacacacacatatatatgtgtattctgcggttgtaaatacagaatgaaatcatatttcaacgactggtcactctttagctttgatgggataagtattttgaggtgtttgttggtttgcagtgtgcttcctagatgatttctcccaccaaatatcatagcagtaaaactataatgaactttgacagactgagttgaagctgtctgractgttcaatacaaaattcagttctatatgtactgtttcatcctcgaatgcaaatgctcctgacaacatgtcctagtggcttttaaaggttctgtaaaatgcatgaggtctgttagactctgcctctttgaaattcagattactgagatcagcaatccaggagtcatcctctcttcctcaacttcacatcctatctatccatcagccttcccagacccccttcatcccttctgacccattgatgttgccatttcagtccctcatcacctcacagcccaaacaccagaatgatttgtttatttgtttctaaaacaaacacctgactgt

SEQ ID NO: 631072 - DNA, 593 bp, Homo sapiens
gcaagactatggaccctgctgagctactaacactttgctaaagtgtgtgtgtgtggaggcatacacacacatatatatgtgtattctgcggttgtaaatacagaatgaaatcatatttcaacgactggtcactctttagctttgatgggataagtattttgaggtgtttgttggtttgcagtgtgcttcctagatgatttctcccaccaaatatcatagcagtaaaactataatgaactttgacagactgagttgaagctgtctggactgttcaatacaaaattcagttctatatgtactgtttcatcctcgaatgcaaatgctcctgacaacatgtcctagtggcttttaaaggttctgtaaaatgcatgaggtctgttagactctgccyctttgaaattcagattactgagatcagcaatccaggagtcatcctctcttcctcaacttcacatcctatctatccatcagccttcccagacccccttcatcccttctgacccattgatgttgccatttcagtccctcatcacctcacagcccaaacaccagaatgatttgtttatttgtttctaaaacaaacacctgactgt

SEQ ID NO: 631073 - DNA, 404 bp, Homo sapiens
ggtggattacagagtggcatactttctgcaccaaaagtcaagatgcatgggaactaataaagcytaatagacaaaagcatgaacgtggccatcagaaaacctgggttaccgttctagctctatcatgtcctactcttgttaccctgaaaaagtaaatcaacctaattaaactaagttatatccaaaataaaaatgataataatatctggctcacaggaccatttggaagggctgaatgagataataaatataaggcttctggaacatgtaaagggttttttaaagggttggatattttttaatgttattattgtctagaaaaattatttctccaggttttaaatttgcttaatacctttggaagagtatagaaattaaattctttctgtagcttgtttaataaa

SEQ ID NO: 631074 - DNA, 583 bp, Homo sapiens
aaatctgctataaaaaataaaattggccaggcgcggtggctcacacctgtaatcccagcactttgggaggccgaggcgggcagatcacctgaggccaggagttcgagaccagcctgacgaacatggagaaaccrcgtctctactaaaagtacaaaattagccagttgtggtggcaggcgcctgcaatcccagctattcaggaggctgaggcaggagaatctcttgaaccactccagcctgggcaacaagatggagcagaactccatctcaaaaaaataaagataaaaataaaataataaaatcatatgttctttgagtaatagtgagaatacaatcttgacccaagaatatatgtaatgtaacatctgttctttacaacagatctgtgagcttgacactattactatctctattttacaggtgaggaaattgaagcataatgaggttaaataagtttcccaagtcaacagctaggattccaacccatacctgattgaggccaaagccactcttgtaaccactacacctaaccaaagtttaaagtcaaatcatggaagatattaaatgtcagcatgtaaacttc

SEQ ID NO: 631075 - DNA, 532 bp, Homo sapiens
taattagactgaactgcattttaatctcccctctgtcatatattacctggggaatactgggcaaaattctttacttttgagagccttagttctcttatctgtgaaatgggaataataacacctacttcatggatttgctgtgactattttctttaatattttattatttttaattgataaaatttatgyatttattatgtacaacatgatgttttgaaatatgtatacattgtggcatggctccatagagctaattaacgtatgcattatctcacttattttttgtagcaagaacacttagaatctactgttttactgattttgaaaatacaatacattgttattaactctggtcatcatgttgtactacaggtctcttaaacatattccttctatctaactgaacttctgtattctttgaccatcatctctccaaccctgcccaggtccccaacagcccttggtaaccaccattctattctgtacttctgtgagctccacttttaaagattccacacataagtgaaatcac

SEQ ID NO: 631076 - DNA, 532 bp, Homo sapiens
taattagactgaactgcattttaatctcccctctgtcatatattacctggggaatactgggcaaaattctttacttttgagagccttagttctcttatctgtgaaatgggaataataacacctacttcatggatttgctgtgactattttctttaatattttattatttttaattgataaaatttatgtatttattatgtacaacatgatgttttgaaatatgtatacattgtggcatggctccatagagctaattaacgtatgcattatctcacttattttttgtagcaagaacacttagaatctactsttttactgattttgaaaatacaatacattgttattaactctggtcatcatgttgtactacaggtctcttaaacatattccttctatctaactgaacttctgtattctttgaccatcatctctccaaccctgcccaggtccccaacagcccttggtaaccaccattctattctgtacttctgtgagctccacttttaaagattccacacataagtgaaatcac

SEQ ID NO: 631077 - DNA, 612 bp, Homo sapiens
tcatctctccaaccctgcccaggtccccamcagcccttggtaaccaccattctattctgtacttctgtgagctccacttttaaagattccacacataagtgaaatcacgtatttgtctttctgtgcctggctcatttcacttaacaacataatgtccttcaggttcaggaaagctttcaaaaatgacaggatttccttcttgttaaaggccaaatagtattccattgtgtttatttttatatatgtagatacacacacacacactatatatatatatagtaaatatatatatatacacacacactatatatatagtatgtgtatatatatatatacacacattgtacgtatatatacatgtgtatacatatcatttatcattttctttattcattcctctgttaaggaattcttagattgattccgtgtcctggctatagtgttgtaattattaacagaagtaatatatttaaaagcatactacctggtatatagtgaaccttaaataaatgccaacttcccttccatcacatcactgcttcctttcttctgagcttacaatagataaaagtttattatctaaagcaatagctctcaaagggtggttcccag

SEQ ID NO: 631078 - DNA, 612 bp, Homo sapiens
tcatctctccaaccctgcccaggtccccaacagcccttggtaaccaccattctattctgtacttctgtgagctccacttttaaagattccacacataagtgaaatcacgtatttgtctttctgtgcctggctcatttcacttaacaacataatgtccttcaggttcaggaaagctttcaaaaatgacaggatttccttcttgttaaaggccaaatagtattccattgtgtttatttttatatatgtagatacacacacacacactatatatatatatagtaaatatatatatatacacacacactatatatatagtatgtgtatatatatatatacacacattgtacgtatatatacatgtgtatacatatcatttatcattttctttattcattcctctgttaaggaattcttagattgattccgtgtcctggctatagtgttgtaattattaacagaagtaatatatttaaaagcatactacctggtatatagtgaaccttaartaaatgccaacttcccttccatcacatcactgcttcctttcttctgagcttacaatagataaaagtttattatctaaagcaatagctctcaaagggtggttcccag

SEQ ID NO: 631079 - DNA, 576 bp, Homo sapiens
ggtaaggagcgctaatggcaattgattccaagatggaataaaatcctgaataaaaggtttctttgctccatatcttcagcaattactggaccaccctggctttctgggtattgtcagaatttataatttctgccaatctaatggatatgaaactgtgtattattctgactttaatttatactttcctgattctaatggttattgcttgtacaattttgattggccagtttttccacttctatgaaatgttagtttatgcctgttattcatttttctatggagctgcttagttttttcttagtgatctataaaattatttagatcagtttagaccaaatgaattatcartatttggtattctgttgacctataagaatgacagttttgtatggttcaacctactatattttgaataaatgtctcttttttgttttttatttttataaatttttcttccagattatggtttttcttctattctcttcatataattttttgatgaaaaagttttaaattataatgtaatcaaatttattaataatagcctatatgatctgtagttcatatgtcttgttt

SEQ ID NO: 631080 - DNA, 489 bp, Homo sapiens
tttgttctgcattcagccatgtatagtttatctcctttataattgtgtggagggtggcctagattctttatcatcctccaggtggaactcttaccctgggaaatgattttcatgcagccttaaaaaaataaaagtgagcagaagcttctgtgagaggaattgctttggtcaatgagtggttagargaatcccagtcctaattacccaaatgtgtacaaggaccctccagtatactcaagtgctcctccgcgcctcgcataatttggagtggcagacagttatgctgcttgcattatgatgagaatagagacagtgggtatagttaatattatctttctttaggtttctactctcagttatgactaggtgaaactctaaacctctggacattcctgtgggcttagcacttaattatgcaaaccaattccaacttgcacaaatatacaagggattaggtgggggaggaaggtggggcggggtaaggtgtag

SEQ ID NO: 631081 - DNA, 605 bp, Homo sapiens
taggtggtccagttgatgtgagacatgaaattgttggactgattcctttgcgggaatgacatctgggtaactgcccacaatagcatttcataggcgagattgttagcgctgctataccacccttgagtcctctgacctcatgatcattcatgaaacaatgttactttgctttttgtcatttaataagtcatacaaattgctttaaactgccataaagtatggcattatgctcccaaacatttaaaaaagagactcctgatttagccacacttttycccccccaacacctctttcttgatagaatagaagagaaattcatccatacaagcaaggagagttggctttattgaattgttagtctttactgctataagggaatgggttaagggtatgttaccaagaaacaaaacagtggaacatcacaattagaggtgtgaatttcagacatgaaatgtaattgttttaccagttttcacagggatcaccacctggtactcaccaaagctattttgagactgtctttcatcatccatgggtattaaaacaaccagcaagcagtcgctctttgttagtttatgacccataagtacttattaaatggagaa

SEQ ID NO: 631082 - DNA, 605 bp, Homo sapiens
taggtggtccagttgatgtgagacatgaaattgttggactgattcctttgcgggaatgacatctgggtaactgcccacaatagcatttcataggcgagattgttagcgctgctataccacccttgagtcctctgacctcatgatcattcatgaaacaatgttactttgctttttgtcatttaataagtcatacaaattgctttaaactgccataaagtatggcattatgctcccaaacatttaaaaaagagactcctgatttagccacactttttccccyccaacacctctttcttgatagaatagaagagaaattcatccatacaagcaaggagagttggctttattgaattgttagtctttactgctataagggaatgggttaagggtatgttaccaagaaacaaaacagtggaacatcacaattagaggtgtgaatttcagacatgaaatgtaattgttttaccagttttcacagggatcaccacctggtactcaccaaagctattttgagactgtctttcatcatccatgggtattaaaacaaccagcaagcagtcgctctttgttagtttatgacccataagtacttattaaatggagaa

SEQ ID NO: 631083 - DNA, 605 bp, Homo sapiens
taggtggtccagttgatgtgagacatgaaattgttggactgattcctttgcgggaatgacatctgggtaactgcccacaatagcatttcataggcgagattgttagcgctgctataccacccttgagtcctctgacctcatgatcattcatgaaacaatgttactttgctttttgtcatttaataagtcatacaaattgctttaaactgccataaagtatggcattatgctcccaaacatttaaaaaagagactcctgatttagccacactttttcccccccaacacctctttcttgatagaatagaagagaaattcatccatacaagcaaggagagttggctttattgaattgttagtctttactgctataagggaatgrgttaagggtatgttaccaagaaacaaaacagtggaacatcacaattagaggtgtgaatttcagacatgaaatgtaattgttttaccagttttcacagggatcaccacctggtactcaccaaagctattttgagactgtctttcatcatccatgggtattaaaacaaccagcaagcagtcgctctttgttagtttatgacccataagtacttattaaatggagaa

SEQ ID NO: 631084 - DNA, 626 bp, Homo sapiens
gaattttattccacaagtagatattacccctccattttaatccttcttaactcactctggtaaaacctgctacactcccaaataatccactaaaattatttaaaaaacaacagcaacaacaataataatacagttgtagtcttttgttggaggaaatggaaagarggacggtatacatgactactcatgttcttctactgactgcttcttatggatgatcagtagcaagcccaatgcttagcatacctcatttctaaccccgtaagaaacatcaaaagtagttattgtaaaattcatattacacattgaagaaactgaggcttagaaagggccagtgaattgcctaagtgcaccctgcaatcgggaatcagagtggggatctttacccaagtctacctggctccatagtagatgcgcttcccactgcacatcacggcttagcctttgccacccccatgacattcatactcccaaggaaacaggtgtgtgggatagaaacaaaagtcactactgcaagggccactgagatcggctccatgttgggagcaggcagtcagacaggcaggcggggcccacgattcctgatagattactcccactctatcttgtgcaacatggttatcgtg

SEQ ID NO: 631085 - DNA, 497 bp, Homo sapiens
aaaccactgtcaacaaatcgccatgaagtgtgatgatattgaaagaaaaaattggaaaacccagaccgaatgataaaatagttaatccctaaagtgcctggcagaggaaagaaagtkcaagctaaatcaatgtagtatctttcctcagctaatgtattaacttatgaggaggctagatattgaatttttagtccagatctttcacagttttttctagagagaagaatattggacagttttctacttatatgtgatatttttatgaaatagtggaagatgtataatgttgatgtaaatataattttctttttttaaatgtgtattaaaattgcctaaattaatgtgtaggatgctggcatttggcatacaggattcagctttgcagaataaggacaaatgatctctccaatagtgataacaaatattgataaaaaaccactgtggagtgatcatttaaaaatatgtagaaaaattacctaaaagttctgggagaattt

SEQ ID NO: 631086 - DNA, 497 bp, Homo sapiens
aaaccactgtcaacaaatcgccatgaagtgtgatgatattgaaagaaaaaattggaaaacccagaccgaatgataaaatagttaatccctaaagtgcctggcagaggaaagaaagtgcaagctaaatcaatgtagtatctttcctcagctaatgtattaacttatgaggaggctagatattgaatttttagtccagatctttcacagttttttctagagagaagaatattggacagttttctacttatatgtgatatktttatgaaatagtggaagatgtataatgttgatgtaaatataattttctttttttaaatgtgtattaaaattgcctaaattaatgtgtaggatgctggcatttggcatacaggattcagctttgcagaataaggacaaatgatctctccaatagtgataacaaatattgataaaaaaccactgtggagtgatcatttaaaaatatgtagaaaaattacctaaaagttctgggagaattt

SEQ ID NO: 631087 - DNA, 617 bp, Homo sapiens
attttacttttttagcataaccgtcaagaagagatttgaaatgaatagatatattttattgttgatgtattatataaatttttaatggctagatgatgatttctggaattatttgaatgcatcttgacaaaaagaaaagctttctagagcttactcatgaacaaatgattggtcaaaataacaaaaatgaatawaaaggaaattcattatactttcataacaatttttttagtcatgtgtaaagtattactgaaagaatcaatatatgtcttgttttttccaaatgtaattattcatggttttaaatcactatggctacatcacagtattctaattgactgtagtaaattcctttttagaggaaataacctatctaaaagtggtttgttactaaaatttaaaataataaacagaaaattgtattatccaattagttgtatattcccactgaaataaatcttgctctcaatttccaatacagcaggtaaattcaaggttgtattaaatatggagcagctggaggttgccaaatgaatgttttgaatgagtacattttagtgaagtgtgtactatcttttttgacatgcatgtaatcataacacattttctggcagctg

SEQ ID NO: 631088 - DNA, 617 bp, Homo sapiens
attttacttttttagcataaccgtcaagaagagatttgaaatgaatagatatattttattgttgatgtattatataaatttttaatggctagatgatgatttctggaattatttgaatgcatcttgacaaaaagaaaagctttctagagcttactcatgaacaaatgattggtcaaaataacaaaaatgaataaaaaggaaattcattatactttcataacaatttttttagtcatgtgtaaagtattactgaaagaatcaatatatgtcttgttttttccaaatgtaattattcatggttttaaatcactatggctacatcacagtattctaattgactgtagtaaattcctttttagaggaaataacctatctaaaagtggtttgttactaaaatttaaaataataaacagaaaattgtattatccaattagttgtatattcccactgaaataaatcttgctctcaatttccaatacagcaggtaawttcaaggttgtattaaatatggagcagctggaggttgccaaatgaatgttttgaatgagtacattttagtgaagtgtgtactatcttttttgacatgcatgtaatcataacacattttctggcagctg

SEQ ID NO: 631089 - DNA, 528 bp, Homo sapiens
atctcactccttttgcctggagatcagggccaaacatcaagcatgttgggaggggcacaatttaaagcaacactgttgattgtaaagcatttaccagcaatttacagtacaaaatgacagacaacaattcttattacaatgcaagagaatgacaagcagctttctgtagcatgaaagttaacaagttaacagctctcaggttgcccattcctgcaaaagagtatgtatcaaggtgggcagagggcaacacatttacacactagaggaaatkatctacagaaaattacgctccagaactgctaacgttaccaaagctggtactggctaatattctgaaatgcaaatctgcggtttatatatatattgctcaatgacactgccattcaacagaattcccacactgcaaggcagattaatctttgcccccgtttgcagagcttcaaatattcctcaaacttttagaaagtgggaagaagcaaaatcagagcttctcaaaaaaaaaaaaatcttgaactatcaatgttttga

SEQ ID NO: 631090 - DNA, 553 bp, Homo sapiens
aatgaggctatccatcttggccagctcttaactgttgttataaatctctgaggatcaggtctccctgtgatggtctgaccttgctacttgccacttattacagtaattgcatccacctggactctattattttggagccctgccatgcacactgattatttggatagagtccagcatgggtcccttgcactcctacacatactgttggatttgtcacttttcttaggattgtttatgcagctactagttctgaaaaatcaggtcatattttcytccacacaaaaagccaccttgcttctgcttgccagtaactttaatattactctgactatggctattgctgtaagtacaaatttgtctctgatccaggagaatctcgtccttcgctagtatccatgaaattttggcagaccaaagtattaccttccattaagagtaaaatcaataccttcatagccatcatcaagcttatgtccttaataatttcctatattatcattccttatctatggaagacagatactgtgttttctttccagtgcattcctttttg

SEQ ID NO: 631091 - DNA, 553 bp, Homo sapiens
aatgaggctatccatcttggccagctcttaactgttgttataaatctctgaggatcaggtctccctgtgatggtctgaccttgctacttgccacttattacagtaattgcatccacctggactctattattttggagccctgccatgcacactgattatttggatagagtccagcatgggtcccttgcactcctacacatactgttggatttgtcacttttcttaggattgtttatgcagctactagttctgaaaaatcaggtcatattttcttccasacaaaaagccaccttgcttctgcttgccagtaactttaatattactctgactatggctattgctgtaagtacaaatttgtctctgatccaggagaatctcgtccttcgctagtatccatgaaattttggcagaccaaagtattaccttccattaagagtaaaatcaataccttcatagccatcatcaagcttatgtccttaataatttcctatattatcattccttatctatggaagacagatactgtgttttctttccagtgcattcctttttg

SEQ ID NO: 631092 - DNA, 553 bp, Homo sapiens
aatgaggctatccatcttggccagctcttaactgttgttataaatctctgaggatcaggtctccctgtgatggtctgaccttgctacttgccacttattacagtaattgcatccacctggactctattattttggagccctgccatgcacactgattatttggatagagtccagcatgggtcccttgcactcctacacatactgttggatttgtcacttttcttaggattgtttatgcagctactagttctgaaaaatcaggtcatattttcttccacacaaaaagccaccttgcttctgcttgccagtaactttaatattactctgactatggctattgctgtaagtacaaatttgtctctgatccaggagaatctygtccttcgctagtatccatgaaattttggcagaccaaagtattaccttccattaagagtaaaatcaataccttcatagccatcatcaagcttatgtccttaataatttcctatattatcattccttatctatggaagacagatactgtgttttctttccagtgcattcctttttg

SEQ ID NO: 631093 - DNA, 553 bp, Homo sapiens
aatgaggctatccatcttggccagctcttaactgttgttataaatctctgaggatcaggtctccctgtgatggtctgaccttgctacttgccacttattacagtaattgcatccacctggactctattattttggagccctgccatgcacactgattatttggatagagtccagcatgggtcccttgcactcctacacatactgttggatttgtcacttttcttaggattgtttatgcagctactagttctgaaaaatcaggtcatattttcttccacacaaaaagccaccttgcttctgcttgccagtaactttaatattactctgactatggctattgctgtaagtacaaatttgtctctgatccaggagaatctcrtccttcgctagtatccatgaaattttggcagaccaaagtattaccttccattaagagtaaaatcaataccttcatagccatcatcaagcttatgtccttaataatttcctatattatcattccttatctatggaagacagatactgtgttttctttccagtgcattcctttttg

SEQ ID NO: 631094 - DNA, 567 bp, Homo sapiens
ggatgatgactgctattatattgattgtaattgcttacgtgtgtgagtatgtgtgcatgcctatgtctgtgtagttstgtgcaggtaggaagagagaaagaacggggaaaggaaaaggaaagaggagagacataatttaacaaatgtcttgttttccaactgaagaaagaaaaacaagcattgctgagaatgctagcaatgttgggatttctccttcctatttgcttggtgtctctgcctcatatttctcaatcttcccttttcaggggaatacaaacagccaagacctgtggaatttacatatgtagttacactcttctctcatttctagtcctacaattacaacactaattcatattcttagttttatctcaccgggaccgttgcaatagtgtcttaaatagtctccttatgttcagtctcttttctcaaaagcaacacatatgctgtgtttttatttactttggctccttaaaagtttcccattcttcaatgataggtgcttaggcatttgaggaactccattgactagcttatgtggttccaattgtcatttattgctatttt

SEQ ID NO: 631095 - DNA, 567 bp, Homo sapiens
ggatgatgactgctattatattgattgtaattgcttacgtgtgtgagtatgtgtgcatgcctatgtctgtgtagttgtgtgcaggtaggaagagagaaagaacggggaaaggaaaaggaaagaggagagacataatttaacaaatgtcttgttttccaactgaagaaagaaaaacaagcattgctgagaatgctagcaatgwtgggatttctccttcctatttgcttggtgtctctgcctcatatttctcaatcttcccttttcaggggaatacaaacagccaagacctgtggaatttacatatgtagttacactcttctctcatttctagtcctacaattacaacactaattcatattcttagttttatctcaccgggaccgttgcaatagtgtcttaaatagtctccttatgttcagtctcttttctcaaaagcaacacatatgctgtgtttttatttactttggctccttaaaagtttcccattcttcaatgataggtgcttaggcatttgaggaactccattgactagcttatgtggttccaattgtcatttattgctatttt

SEQ ID NO: 631096 - DNA, 567 bp, Homo sapiens
ggatgatgactgctattatattgattgtaattgcttacgtgtgtgagtatgtgtgcatgcctatgtctgtgtagttgtgtgcaggtaggaagagagaaagaacggggaaaggaaaaggaaagaggagagacataatttaacaaatgtcttgttttccaactgaagaaagaaaaacaagcattgctgagaatgctagcaatgttgggatttctccttcctatttgcttggtgtctctgcctcatatttctcaaycttcccttttcaggggaatacaaacagccaagacctgtggaatttacatatgtagttacactcttctctcatttctagtcctacaattacaacactaattcatattcttagttttatctcaccgggaccgttgcaatagtgtcttaaatagtctccttatgttcagtctcttttctcaaaagcaacacatatgctgtgtttttatttactttggctccttaaaagtttcccattcttcaatgataggtgcttaggcatttgaggaactccattgactagcttatgtggttccaattgtcatttattgctatttt

SEQ ID NO: 631097 - DNA, 566 bp, Homo sapiens
cagggatagaccatattttaggtaacaaaacaagtcttaaaatatacacaaaaaaaattgaaaacatatcaagtaagttctctggccacaatagagtaaatctctaaatcaatagcaagaactttagaagcttgacaaacacatgaaaattaaacatgttagtgatgaatgggtcaaagaataaattaagaaggaaattgaaaaatgatttgaaacaaatgaaaatgaacacacaacatatcaaaatctatggaatacagcaaaagtcccagtaagaggaaagttaatagcaataagcacctacatcaaaaaagtagaaaaatttcaaataaaaaacctggccaggtgcagtggcttacacctgtaatcccagcactttgagaggmtgaggtgggcggatcatttaaggccaggagttcgagaccagcctgggcaacatggtgaaacccccatctctactaaaattacaaaaattagccaggtgtggtggcacatgtgtgttgttggcacatgtttgtaatcccagctacttgggacgctgaggcacaagaattgcttgaacacag

SEQ ID NO: 631098 - DNA, 598 bp, Homo sapiens
tactcttattttatcctgttttataagcagcttatcaaatatctaacttataccattagttatcttttttgctatattcataaataaaagaaaagcatgttatatatcttccaaaaaactattactgcccacaaatctttatttgattctgagtctaaaattattctatttatatcataatttacagagtttgaatttataaattatatattttcaacctatattatatagataaaatcttcaaattattatcttagtcattctttcaaatgcaagttcccttattatgctaaattattttgtccagttggaaaaataatttaaaaatatatacgtataaaaagaataagcaatcaggaaatcgatatatatatataattatttgatgattaagacacagctaagatagaagtttgctgacattaytgatatccaatatatcgaagattaaaattattaacccatgtactcattcaacttatatttacctaaaactaaaatataccatgtgttagacacgcatgcacgtagtaataaacttgaaactcctgaaaggaaaaggatatgctttctatctttgttattataacactaccct

SEQ ID NO: 631099 - DNA, 606 bp, Homo sapiens
tggggttcagaacatttttcaaagctactttctacttcacttctgttaaggtaaatgaagcaatgcccagtagtcactgtgggccaattacttattttgtatctatcagataaacatcctgctttatacctagtatgtaacactagcaaggagtagtgtgagttcatccctggtggagaaaggggtttaaagtttccatccccctgtacaaatgtttttgtcatttttataacaaggaggtaatgtttgcaggacatmtgaaaactttaaatgttttccttttacctgacttaaagaaacagaaaatttggggcagggggtggctatcatcgctattcttcaagtgctcaaatgcatggaggtgcttttattaaatcatgaaaattaagaataatgttataatgatgaaaatgtacattacattttactagagcaacaattaaaatttatagttataggaactttatgaaatttcaacttgcctctctgagttactggctatcttatttttctatttttaatttgtgtttattgccactaatgatgttgtgatgaagcgtctcatttatctgtagaaaacctaggctggaatttaggtttttaaac

SEQ ID NO: 631100 - DNA, 606 bp, Homo sapiens
tggggttcagaacatttttcaaagctactttctacttcacttctgttaaggtaaatgaagcaatgcccagtagtcactgtgggccaattacttattttgtatctatcagataaacatcctgctttatacctagtatgtaacactagcaaggagtagtgtgagttcatccctggtggagaaaggggtttaaagtttccatccccctgtacaaatgtttttgtcatttttataacaaggaggtaatgtttgcaggacatctgaaaactttaaatgttttccttttacctgacttaaagaaacagaaaatttggggcagggggtggctatcatcgctattcttcaagtgctcaaatgcatggaggtgcttttattaaatcatgaaaattaagaataatgttataatgatgaaaatgtacattacattttactagagcaacaattaaaatttatagttataggaactttatgaaatttcaacttgcctctctgagttactggctatcttrtttttctatttttaatttgtgtttattgccactaatgatgttgtgatgaagcgtctcatttatctgtagaaaacctaggctggaatttaggtttttaaac

SEQ ID NO: 631101 - DNA, 546 bp, Homo sapiens
tatttatatgattactctcaaatggatttgcttctctgcatttctattatccctattagttcacatccataaattcattctgtattttatcagtcttttacattttcctgctttagtctttaaaatacaattctaattattgttcagaaggtatggaattacagtattcttgatttgctttagcacaatatagaaattcctcagcttggcaagaagtaccttcctgaattttcctatattttattcttaatctctccaaccaggatattaaattattactggttaaactgcattatttttagttttagtcaaggatgccatcatctctccatttgtttttcttttacattagagattgtacttcaaatggaagaagyattttcatactttaaaaaccatgactagatacatgtcttaaaacacaagaaaaccaaacaaaatattgctcactcatacttccatccctgtcccaaacaaaatgttgctcttgtcacctattcctattctgaacctgcccttctctgtttacaaagatgttgtaagctt

SEQ ID NO: 631102 - DNA, 615 bp, Homo sapiens
atgcttactgtagatcttagccacctcagcatactttttttttctttctctgttaagtttagaacttctatcttttcacttaaagcaataacttcatggcttctctggcatatccaaatkgctagcataactactcttgtgtttggggcccttatgaacccaagcactgcagtgccatgacagtgaagctgatagctgagatggctgctaaatgacttatgggcagaatgcagagaatgtggagactctggacaaagaaatgattcaagtcctgaatggatggagtaggacaatacaagatatcatgatgctactctgaatgctgaaaaatttaaaacttaggaattgtttctttctgaaattttccatttaatatttttggaccatgagtaactgaaacctcggaaaatgaaactgtggataatgaaagtctacagcactgctaactatctcttttagatcaacacttactaaggatataaatcgtgagaaatgcaccagcttactttctgtagaaaaatattgaattcctgcagatatacataaactcctgattctatctgaatgaactggataaaagtaatgacacagcatcttctgtcgccatttatgagc

SEQ ID NO: 631103 - DNA, 490 bp, Homo sapiens
ttaatccactcgcgctatttattttttctttcagcagttatttattgaacacctactgtgtgccaggcactgagccatgtgctatgaatctagtggtacatggggagaagtggttttttgcttcttggaacttaaatctcgtggaggttagggagaggacacagaagattaagcacttactgaaaagtatcaaatgtgtcctaatagaggaagtwtgaagtactacagcgtcccatagcaaggccctgtgacctggtctgggagttaaggatggcttcctagaggaaatgactcaagctgagactggagtttaaataaaaggtagatgttactctagatgaaggggacatggaacagtgctttttcagggcctgagtcaagagagaatatgattctttttgaaatgtagggagagggggaggtgggaacagatgagcctggagaggtaggaagcggtcagatcataaaggctcttaggagtcttgttaag

SEQ ID NO: 631104 - DNA, 627 bp, Homo sapiens
caaattaaaaaacttctgcacagcaaaggaaacagtcagcaaactgaagagataacccacagaatagaagaaaatatctgcaaactactcatctgacaagagattaattaccrgaatatataaggagctcaaacaactctataggaaaaagtccaatgatccaattaagaaatgggcaaaagatctgaatacacatttctcaaaagaagacgtacaaatggcaaacaggcacatgaaaaggtgctcaacatcactgatgatcagagaaatgcaaattagaactacagcaagatatcatctcaccccagttgaaacgacttttatccaaaagtcaggcaataacaaacgctggcaagcatgtggagaaaagggaaccctcacacactgctggtgggaatgtagattagtataaccactaaggagaacagtatggaaattcctcaaaaactaaaaatagagttaccatacaatccaggaatccactgctaggtatgtacccaaaagaaaggaaatcagtgtatcaaagagatatctgcactcccatgtttattgcaactctattcacaatagccaagatttggaagcaacttaagtgtccgtcaacagatgaatggataaagaaaatgt

SEQ ID NO: 631105 - DNA, 627 bp, Homo sapiens
caaattaaaaaacttctgcacagcaaaggaaacagtcagcaaactgaagagataacccacagaatagaagaaaatatctgcaaactactcatctgacaagagattaattaccagaatatataaggagytcaaacaactctataggaaaaagtccaatgatccaattaagaaatgggcaaaagatctgaatacacatttctcaaaagaagacgtacaaatggcaaacaggcacatgaaaaggtgctcaacatcactgatgatcagagaaatgcaaattagaactacagcaagatatcatctcaccccagttgaaacgacttttatccaaaagtcaggcaataacaaacgctggcaagcatgtggagaaaagggaaccctcacacactgctggtgggaatgtagattagtataaccactaaggagaacagtatggaaattcctcaaaaactaaaaatagagttaccatacaatccaggaatccactgctaggtatgtacccaaaagaaaggaaatcagtgtatcaaagagatatctgcactcccatgtttattgcaactctattcacaatagccaagatttggaagcaacttaagtgtccgtcaacagatgaatggataaagaaaatgt

SEQ ID NO: 631106 - DNA, 627 bp, Homo sapiens
caaattaaaaaacttctgcacagcaaaggaaacagtcagcaaactgaagagataacccacagaatagaagaaaatatctgcaaactactcatctgacaagagattaattaccagaatatataaggagctcaaacaactctataggaaaaagtccaatgatccaattaagaaatgggcaaaagatctgaatacacatttctcaaaagaagacgtacaaatggcaaacaggcacatgaaaaggtgctcaacatcactgatgatcagagaaatgcaaattagaactacagcaagatatcatctcaccccagttgaaacgacttttrtccaaaagtcaggcaataacaaacgctggcaagcatgtggagaaaagggaaccctcacacactgctggtgggaatgtagattagtataaccactaaggagaacagtatggaaattcctcaaaaactaaaaatagagttaccatacaatccaggaatccactgctaggtatgtacccaaaagaaaggaaatcagtgtatcaaagagatatctgcactcccatgtttattgcaactctattcacaatagccaagatttggaagcaacttaagtgtccgtcaacagatgaatggataaagaaaatgt

SEQ ID NO: 631107 - DNA, 627 bp, Homo sapiens
caaattaaaaaacttctgcacagcaaaggaaacagtcagcaaactgaagagataacccacagaatagaagaaaatatctgcaaactactcatctgacaagagattaattaccagaatatataaggagctcaaacaactctataggaaaaagtccaatgatccaattaagaaatgggcaaaagatctgaatacacatttctcaaaagaagacgtacaaatggcaaacaggcacatgaaaaggtgctcaacatcactgatgatcagagaaatgcaaattagaactacagcaagatatcatctcaccccagttgaaacgacttttatccaaaagtcaggcaataacaaacgctggcaagcatgtggagaaaagggaaccctcacacactgctggtgggaatgtagattagtataaccactaaggagaacagtatggaaattcctcaaaaactaaaaatagagttaccatacaatccaggaatccactgctaggtatgtacccaaaagaaaggaaatcagtgtatcaaagagatatctgcactcccatgtttattgcaactctattcacaatagccaagatttggaagcaacttaagtgtccgtcaacagaygaatggataaagaaaatgt

SEQ ID NO: 631108 - DNA, 652 bp, Homo sapiens
cagcacccactacagaagccgcagagcacacagctgagactaccagcctgggagcttgcctgctacactggaccccaggcccagacactgactagctgtgtaaactacctcaagttacttaacctctctgagcttaagattcctcctcagtaaagtagtacttaagtccaaaagacaccatgagaagtgagttaaaacatgtaaaacatgcctcacatatagtgtccaataaatgttatcaatgatgattcccttaactgctggtattaaccgtgtctttcattttctgtattttgatgcttcgacatcttggggtcttgctgacccgggagagactgcccctcccagggttagccagttcctagagataggwacacaagggcattttctgagaacaaaccaaccaatccagagcctatagcccaactatttcctttattgaatctcccactctggaccaccagccacctgccctaatcaccccgggccaggtaccacacaactaggatggcacctataccccagagctgctggaattattcaaacaagcccaccctaaatctgcttgccttgcttcacctggttcttcccacagaaaccacagtaaaggttcttgcttgctcctgagtgatcccaggacctcccatgtggc

SEQ ID NO: 631109 - DNA, 609 bp, Homo sapiens
cttactcctttcccctttcctgcatcttcacagggtccctcctccggacagagagcagttcagggaggggagggtgaggctgtgtcgcagatggtttagaggagctaatggtaagtgccactgactgtagcccccctccaggaaggagcagcttcctggatggacccagggggccaggtcctcctgcctgacagtgaggagctgctcagtgctctctgggcccagatggcaaacaaccctggccccacggggctcacagagatgtgcactggggagggctgggagaactcagagtccttcacrcggaagcacttcccgatgctgcagcctgaatggagcagagggtgcagtctccctctgagcctgtttatactgcacagagtacacgtgaagccctggccatcctagggcaaggcaaacaattgcctcatcacttccaaagaaccatctcctctcttgtgccaaagctgtcaggaacgcattccattctgaactctctgggagtagacaggggactaaatggattggccttgctggctcttgagccaaggaagaaagtgtgtgagggcatgagtgccacgccccatgacgggccccctggtgtccaag

SEQ ID NO: 631110 - DNA, 542 bp, Homo sapiens
tccaagagtagttattaggcagcctggccaacacctgcagcttgtgagactggccacactgcaagttgagctgatccaatcagagccagaccttggggatgcacattaagaggcactgggggaagctgcycctgatgtgcagcctaaagacagactgaaagccacctgaggtcaggagcacatctatcttatttcctgctttgttcccaatgcccgatatcctgaattatgcctgagatagagtcaatgctcaataaaagtttctgaatgaataaacagagagtaaatcaggtctgggtagtcattatggacaagtacatgatgaataaaccagggaacccaaactaagagagagggaagagcctggatccaacaccacaggagcaagaaggaagctgtgagagggagaaaggctggggagtctccagagccactgcctgcatcacttcttaacttttctggatgtcacgacaccccacatgtgatgcttgggcctgtgtggatgtactgattttcttgaaaccctaacagcccaggctgga

SEQ ID NO: 631111 - DNA, 542 bp, Homo sapiens
tccaagagtagttattaggcagcctggccaacacctgcagcttgtgagactggccacactgcaagttgagctgatccaatcagagccagaccttggggatgcacattaagaggcactgggggaagctgctcctgatgtgcagcctaaagacagactgaaagccacctgaggtcaggagcacatctatcttatttcctgctttgttcccaatgcccgatatcctgaattatgcctgagatagagtcaatgctcaataaaagtttctgaatgaataaacagagagtaaatcaggtctgggtagtcattatggacaagtacatgatgaataaaccagggaacccaaactaagagagagggaagagcctggatccaacaccacaggagcaagaaggaagctgtgagagggagaaaggctggggagtctccagagccactgcctgcatcrcttcttaacttttctggatgtcacgacaccccacatgtgatgcttgggcctgtgtggatgtactgattttcttgaaaccctaacagcccaggctgga

SEQ ID NO: 631112 - DNA, 520 bp, Homo sapiens
tgtgcgacattgtgcaaaccacatccccttctgagccagggacgatgggcttgctctaagaatgaaatgagatcatccctggctttttttgagtaagcactcagtaattggtagctctgtgaggtatggcatccctgaaataacaggtgcgtgctgtcgccaaactctcacaattcaggcccacaaactcaagcctttctcagtatcagcagacctactgccttgatgttctaacaacccctaatgagtatagtatgatcatcagttaaataaacaaacaattagtgagtgagcagaaggctcttcctcagcacatcctattaatccgctggtctttagttcacatttgttggaagctgattaactgcacgtcccaacaggcactgggcaacttcagttctgagccagacctgcgcatccccagyctgtcttgacttgccccagtctcctcccccgctagggtgtgtgacaaaccgagtcagtgttagcagtgatgaaaatgtctggaaggaagccagaa

SEQ ID NO: 631113 - DNA, 584 bp, Homo sapiens
aagggggagaagaaacaatagggagacataagtctaagaatacaaaatggcaggtatgtaggatgaacacgtttagagacctaacgtacaatgtgaggattaaaatctacttatttaacaaaaatctctaatataaagtgtgttatattagagatttttgttaaataagtagattttagctgctcttgtcataaaaagtatgtgtgataatagacatgttaatctgcttcactatagcaaccatcttactatctatatgtatcccctaacatcatgttgtaagcctcaaatatatacaataaaaaatttattttamaaaaagattctaggaaaaaaagaagtcataacagagaccatatggcccacaaagcctaaaatatttactatctggcccttcatggaaaaactctgccaatcgctgggtctaagtcaatcacagtaatcccatttcccttaccagtattttggtttgttttgttttgctttgcttttaagaacccagactaagtcaatcagagccaggcattcccccatgacaataatcagttcagggtggttaagtgagccagattggccccattaag

SEQ ID NO: 631114 - DNA, 586 bp, Homo sapiens
acaccccactttcagcatcggacagatcttccaaaaagaaaatcaacaaagaaacactggacttaatatgcactgtagaataaatagacctaatagatatttacagaacatttcatccagtggctgcagaatacacattcttcttctcagcacgtggatcattctcaaggacagaccatatgctacgtcacaaaacaagccttaaaacattcaatgaaattgaaataatatgaaacatattctctgaccacaatggaataaaactacaaatcaataacaagaggaatttggggaactacataaacacacagaaaataaacaatatgctcccgaatgatgaaaaaatttatttaaacaaacgataatggaaacacaacatactaaaagctatcaatacagtgaaaacagtactaagagggaagcttatacctgtaggtgcctcattaaaaaataaaaacaatttcaaataaayaacctaatgatgcatcctaaagaactagaaaagttggctgggcatggtggctcacacctgtaatcccagctttgggaggccaaggcgggcagatcacaaggtcaggagttaaag

SEQ ID NO: 631115 - DNA, 471 bp, Homo sapiens
ttttttctcttgcctgattattctggctaggacttcaggtactatgttgaataggagtagtgaaagtgagtatctttatcttgttccmgttcttagaggaaaggatttcagcttttccccattgggtataatgttagttatggatttgtcatatatgatctttattatgttgaggtatgtttcttcaatgactaatttgttgagagtttttttttttaaatcaggaagcaaggctaaattttatccaatactttttctatgccttttgagatggcatatattttttgtccttcattctgctgacgtgatgtatgacatttattgatttgcatgatttgcaaactttgaaccattcttgcatctttgaaataaattctacttgattattgtgtattttctttttgaggtgatgttgtattcagtttgttaatattttgttgaggatttttgcatgtatgttcatcagtgata

SEQ ID NO: 631116 - DNA, 471 bp, Homo sapiens
ttttttctcttgcctgattattctggctaggacttcaggtactatgttgaataggagtagtgaaagtgagtatctttatcttgttcccgttcttagaggaaaggatttcagcttttccccattkggtataatgttagttatggatttgtcatatatgatctttattatgttgaggtatgtttcttcaatgactaatttgttgagagtttttttttttaaatcaggaagcaaggctaaattttatccaatactttttctatgccttttgagatggcatatattttttgtccttcattctgctgacgtgatgtatgacatttattgatttgcatgatttgcaaactttgaaccattcttgcatctttgaaataaattctacttgattattgtgtattttctttttgaggtgatgttgtattcagtttgttaatattttgttgaggatttttgcatgtatgttcatcagtgata

SEQ ID NO: 631117 - DNA, 594 bp, Homo sapiens
ccattaattatacttttaaatgtaagccacggggtcttattgttattttttgtatattcaatgttcatttggatttacccacttatttatagctgaaaggttgtctttctcttgattactttttgtatttcaacccttccatctacaatcattttctttcttcctgaaatacgtcattaagaatttcttttactgagggtctcttgatgacaaactctgttttacttayattaaaaagtcttggcaggcatggtggctcacatctgtaatcccagcactttgggagacagagttgggtggatcacgaggtcaggagatcgagacaatcctggctaacatggtgaaaccccatctctactaaaaatacaaaaaattaactgggtatggtggtgggagcctgtagacccagctactagggaggctgaggcaggagaatggcatgaacccaggaggcggagcttgcagtgagctgagattgagccactgcactccagtctgggggacagagcaagactctgtctcaaaaaataaataaataaataaatagtctttattttgttctcattattaaaagatatatttcgtgggtataga

SEQ ID NO: 631118 - DNA, 589 bp, Homo sapiens
gggaaaaattgtctcccagtctcctttaccaatggagggaggaaaaaratgcaagggagggaggtgaaaagagacaagagggagtctccacactttctgtttcctaccaaaataaatcaaaataaaaaccatatccttatgagaatcatggaaatcagtgttgtcatcaaatacttagaaaaaaacaggagtcatgattccaattcactggcccattttttctgtgttttagccactgccatggatagatataccttgaaaaatggcagtggattgttgtgagtttaatgatgtatgactctaactgcaggtgcttttcctttctagtctccttattagaacaaatcagtacagcccttaatattgagcatagagttgttaatctgacaaatgcttttccccgcctcaatttccaacaaacagaggacaccagaagcaattttcttttacttgatgggacaaatgtacacttttatggcttagagatatcttaactgtcctttgaccagcatctctctttttccactttgcctggaaagaatgatgcacagagtcaaagatttaggtgattgctaatgatttagtcaaa

SEQ ID NO: 631119 - DNA, 501 bp, Homo sapiens
accagcctgggcaacatggcaaaaacccatctctattaaaaaaaacaacaaagcaaaacaaaaataaagactacagtgaaaacacggtattataattttatgggaccacggttgtatatacaatcattgacagaaacattgttatgcaatacaagactatattatttactgatacagtagtaastagggaagaaataattgttaagacagtatttcctgaaaagttctaagagagactatggcagccccagagaatggcagagaggagagcaggtgagagctagtggtgaaagtttcagaacaggggcttcatacacggaacacaggatgttatggcaaacacctcagataggattggaggatctgtgagaagagagaacaggtgctgtctgcccagggcagccttcgaggtggcagaggaaattttcctaagccagcatgatgggttaggcagcagcggggtagaaatggcagcaggctgactcccgcctgacagagggc

SEQ ID NO: 631120 - DNA, 501 bp, Homo sapiens
accagcctgggcaacatggcaaaaacccatctctattaaaaaaaacaacaaagcaaaacaaaaataaagactacagtgaaaacacggtattataattttatgggaccacggttgtatatacaatcattgacagaaacattgttatgcaatacaagactatattatttactgatacagtagtaagtagggaagaaataattgttaagacagtatttcctgaaaagttctaagagagactatggcagccccagagaatggcagagaggagagcaggtgagagctagtggtgaaagtttcagaacaggggcttcatacacggaacacaggatgttatggcaaacacctcagataggattggaggatctgtgagaagagagaacaggtgctgtctgcccagggcagccttcgaggtggcagaggaaattttcctaagccagcatgatgggttaggcagcagcrgggtagaaatggcagcaggctgactcccgcctgacagagggc

SEQ ID NO: 631121 - DNA, 573 bp, Homo sapiens
gagaaagaacctctgagctaggcctgggcaacattgtgagaccgcatctctacaaaaaatgtttaaaaagttacccaggcatggtggtgtgggcttgtagttccagctccttgggaggctgaggcaggaggatatcttgagctctggaggttgaggctgcagtgagctatgatcacccactgtactccagcctgggagacagagccagtccctgtctctaaaaataaataaataaaataaaaatagaaggaacctccaagtatgagaaaaactcgaatatagaagagactaacttaaacattatcaagtttctggtcagaaactggctatgttcaaccagggtgtcatgctgtgaggctgatgaagatgagatacaagctccaratgtggagttggtctaaatggctcctaagatccctcaaactctgatatccaagcttttgtagtctcaccacctcaggaaagtcttctttatccaccactaccttcagaaaatttatttctctgggcaccttagaactggaacctctatatttagtccttattattagttaccctatctattattagtta

SEQ ID NO: 631122 - DNA, 506 bp, Homo sapiens
taatcccatcatccaggaataaccacagataaacacattcatgtacttcttttcagtcttcaatgaatacagtatttattttttgaagtgatgatcgtgaacttcaggggaagtttgtacttttcagatttagaaacaaatggcaagaagctcagtcagccctctgggatgcacagctgggtccagagcttcttcctcctgctggtgcctcctctggagcaggggaagggaagggctcttaaatygctatgggtactgactgttccaggtacagtaccaaagaagcacctgagaaagtgtcctttttacagatgctgtttgccttccaactctaagatgttactcatggtcaaacgagctctcattccctacaattaccagcgggtgtccacggggaggattaacctggctggaaatgtgtgtgtgcctatgtgttttcctttctccctaactcacggagagcttggcaaggccaggggagaggcagctgaatatttttagcccct

SEQ ID NO: 631123 - DNA, 634 bp, Homo sapiens
ctaaagagatagactatggtagaaacttgttttttcccttcctctttccaatatctaactcctctttctattgtggaagaatatctgttatatagtattcctgctgcattactgacactgaaatactagtttttccctctatttccttagcaagcaaataacaggaacaaccctagacttagccaataagttgccttaccctctcctaccccagaccctaagtcttgaaaaaatgatgcaaagatgaaggatgttagaatttatttacatgattgatgacagcatacaggcactgtctttaataacgacaatgaaagcacctaattttttttttaagagaatgatagtggcatctgtttcccctaggaaaagggcagtggatggacagggactgtgttgggtccaacttaggaatgtttgagtggaaccagacaagtgaaaaatgccaacttagtgacagtgctgactagttgttgaaggaatccctgcaaactcatccttcttcatgacagcaaaacttgaccmagattttttttttcaaacaaaagcgggggcaaattcagagtcataagtgattttctatttattcagtagttttgaaataaagtggtgaccaaaattgaacaatttttat

SEQ ID NO: 631124 - DNA, 437 bp, Homo sapiens
ttatggaaagaaacagcaaaaccttttttaagtgagtatctaggtgggaaaagaatggttttagaagacatacagccaagtgtacaggtcagygggcagctcaaataataccctcagccccaatgccagtcctgaaacaaaaccagtggaggctgagcagcctctgcagcagataaaccaccagacacatggccatggaagagtcagtgctaaggaagggacttgggaaagtgggaagcaccatctggggctgttctggagcaaagagttctctgagctgacagtccaagttaagcagtaaacaatcattgattttgcaaacagagcgttctttcctaaaccaaagagtaatcttcttatgtgcacaatgtggaaaggacagttggtcccaggatggtctttttcatctacggccgcacacacagataacagttatt

SEQ ID NO: 631125 - DNA, 615 bp, Homo sapiens
caatatatcagaatacagtgctagcgacatatccacagaaacttatatgactggtggccttgcaggtcactggggagataagggacaacttaacaccggggctgggacaattgcctgtacttatacagaataactgaaattggatcctaatgcacaaatcctaaaaataatttcttgaaaaactagacttaaatgtaaaagggccaagctgttaaacatttagaagtaaataaaggaggctctctttgtaactatgaggggtggaagatttcttcaacataacacaaaaagtattaataatgaattcaaaagttgataaatgtaaatacattaaaattragaatgtatgttcaccaaaacaatggcatgaagaaagagaagagacaagcacagatgggaagaaatatatttgtaacaaatagattcagtaaaggattagtacaaatagattcaataaaatataaagaattcagaaaagccattaagaaaaagacaagtagtccaacagttaagtggagtagggggagatgtgaaaagaccttctatagtaaagagaataaagactgacaaggggccaagagctgggtagaaactgggaaggttaaagggtcatag

SEQ ID NO: 631126 - DNA, 615 bp, Homo sapiens
caatatatcagaatacagtgctagcgacatatccacagaaacttatatgactggtggccttgcaggtcactggggagataagggacaacttaacaccggggctgggacaattgcctgtacttatacagaataactgaaattggatcctaatgcacaaatcctaaaaataatttcttgaaaaactagacttaaatgtaaaagggccaagctgttaaacatttagaagtaaataaaggaggctctctttgtaactatgaggggtggaagatttcttcaacataacacaaaaagtattaataatgaattcaaaagttgataaatgtaaatacattaaaattgagaatgtatgttcaccaaaacaatggcatgaagaaagagaagagacaagcacagatgggaagaaayatatttgtaacaaatagattcagtaaaggattagtacaaatagattcaataaaatataaagaattcagaaaagccattaagaaaaagacaagtagtccaacagttaagtggagtagggggagatgtgaaaagaccttctatagtaaagagaataaagactgacaaggggccaagagctgggtagaaactgggaaggttaaagggtcatag

SEQ ID NO: 631127 - DNA, 615 bp, Homo sapiens
caatatatcagaatacagtgctagcgacatatccacagaaacttatatgactggtggccttgcaggtcactggggagataagggacaacttaacaccggggctgggacaattgcctgtacttatacagaataactgaaattggatcctaatgcacaaatcctaaaaataatttcttgaaaaactagacttaaatgtaaaagggccaagctgttaaacatttagaagtaaataaaggaggctctctttgtaactatgaggggtggaagatttcttcaacataacacaaaaagtattaataatgaattcaaaagttgataaatgtaaatacattaaaattgagaatgtatgttcaccaaaacaatggcatgaagaaagagaagagacaagcacagatgggaagaaatatatttgtaacraatagattcagtaaaggattagtacaaatagattcaataaaatataaagaattcagaaaagccattaagaaaaagacaagtagtccaacagttaagtggagtagggggagatgtgaaaagaccttctatagtaaagagaataaagactgacaaggggccaagagctgggtagaaactgggaaggttaaagggtcatag

SEQ ID NO: 631128 - DNA, 520 bp, Homo sapiens
ggccagcaccaagaggttagtcttcccccatacttctttctaaccttctatctctctctcacatgagaagaaaaggagccatgtcctcagatgtataaaaaatacaggttatttcattggttcccaaactggaaatgttagatagtcccaaaatatcattcttgtgctatataaccatctgatatttcttcacattttaaaaataatgaggacaatgatcccagcataacagggtctccaagcattacctgaatcaaccctctcatttatccaggcaawgttactagggctataggggctgatgtgacatgcccagtgtcacatagcattagtgggtctgattgaatgaaaactcaagtttcatctaaaaaattgaaggaggtagagggaagagagtagaggagtttggggtaaggaagtgttggtaaccatggagtgtgtcatggggagacatggtgtgattatataatctgtctgtaggaagacaatgttacaatgtcagactcaaaaaatcatcgaa

SEQ ID NO: 631129 - DNA, 470 bp, Homo sapiens
ctgaagctttgacttggataaataggtgctgggctgaaaccaaggaaggcagactttctaagatgggattcaggtggctgcaaagggagttgtttgactcascattgagaggcagaatttgggcagccagcaagaaatgacggagttaaccagacatccaactaaaggaatactaggtgtgaaataaggcagatgagcttgttgagcccctggtttcagaaatgaggagatgcacctgtgatggatccatctaactatagcttggcctgaagaggagctcacaccagagaggttgtctcgcacttgaagtggctggatgagcatggcagagcagtaaggaggcagggaggtccagagcccgcttcctccaagactcaagagaaaagacaggagaagcccaatcctctgtgaggtgtgaaatgtggagtgaaatatacagggcactgtcaactttgttgttggaggaggtg

SEQ ID NO: 631130 - DNA, 470 bp, Homo sapiens
ctgaagctttgacttggataaataggtgctgggctgaaaccaaggaaggcagactttctaagatgggattcaggtggctgcaaagggagttgtttgactcaccattgagaggcagaatttgggcagccagcaagaaatgacggagttaaccagacatccaactaaaggaatactaggtgtgaaataaggcagatgagcttgttgagcccctggtttcagaaatgaggagatgcacctgtgatggatccatctaactatagcttggcctgaagaggagctcacaccagagaggttgtctcgcacttgaagtggctggatgagcatggcagagcagtaaggaggcagggaggtccagagcccgcttcctccaagactcaagagaaaagacaggagaagcccaatcctctgtgaggtgtraaatgtggagtgaaatatacagggcactgtcaactttgttgttggaggaggtg

SEQ ID NO: 631131 - DNA, 529 bp, Homo sapiens
tgcagttgggcactacaaagactgtagatgttgattggcagagttccttgtggggcattttggtaaagggtaggcaagcaggtgtgctggaaatgggggtctttctggataaggagggccctgctctggagatggcggggatgttctyttaagtgaagctgccttttctttctccctactcatgatttactctgttttatattcaagttgaaatactctcaccaggaggtcttgagaccctatgggtatttcagttgctctgtcagtctgtatttcatgggaaggtcagaccccattctgtgataatcccattgaattcatgagatagagtggtggatggaccctccagataaagagcctgggcattagaaaacacagtcgataacttctcactgcacaaagagctgatcagtgcagggctttgcctattgctcacagacataggcaacattcggaagatacaagaataaaaaggatgagaaagcaaatgcccaaagttctatcatttctgtagtgtagcagttatcac

SEQ ID NO: 631132 - DNA, 582 bp, Homo sapiens
ctctgaagggagttaatgaggagcagttgcaatggggcactctgtagaacttgccattttgacagccctgcttccatgtggagagctaaatagaggaggctctgggaaagttatcccacaataaaacccacccagcccttcctaccttcgttgtgagtcagacacattctcccatgcctaaccctgcctatgttctctcccagaactctggacagagagatacaattcagccaattagagcactgcttarttgctagcattttgcaaaccactgccttattggctagaagggcaatatatcaaaaagacctcctggtgattcacagttgggaaaatagatgctcctaagtcatcccttctacctcctctaagtaacaaacacctttctcaccctggggaaatttcttctttcatttgctgtaaagtgacttctgctgaagtgtgtgtttttgaagtggaaaattgaaagcacatgattcaattccaaaagcaaactgttagttcacagctgagaaatcactttgctattggtccaaagagtttgcttctcaggtttgaggggggcaaatttgtaactccact

SEQ ID NO: 631133 - DNA, 635 bp, Homo sapiens
tagagcactgcttaattgctagcattttgcaaaccactgccttattggctagaagggcaatatatcaaaaagacctcctggtgattcacagttgggaaaatagatgctcctaagtcatcccttctacctcctctaagtaacaaacacctttctcaccctggggaaatttcttctttcatttgctgtaaagtgacttctgctgaagtgtgtgtttttgaagtggaaaattgaaagcacatgattcaattccaaaagcaaactgttagttcacagctgagaaatcactttgctattggtccaaagagtttgcttctcaggtttgaggggggcaaatttgtaactccactttcaccctctccgactacagaaccactccattgacagaccaagagccagagaaatgaagatcgaaatagcacctttattcctgataatgttaaattagaggggktggcttgtgtcagaccagaatgacctgctactctacccctgagctgatctgatcccccaaaacttcaggcttccccagtcggggcagagccagccccacgaatcttaccacatggctgacagcagagcttgtgtgttctcccagggcaggcatataccaaaagagagggagagggaggggaaga

SEQ ID NO: 631134 - DNA, 509 bp, Homo sapiens
cacaattcttttagatccttacaagttgtagtggatagttatcattttgatgtctgtcaagcaacttgttattttgtgagattccctcatgtatttcatctcattgtgaagctggcttcacctccctgccactaaggaagccccaaacgcccaaccttctttttctctgtgtcttggcagccacagcacaggcaggtaaataggatcagcaaatcagaggctcctaccctggactttgacatttgatgaagtggtcagaattccatcatgaagttagcagtgatggcagcagttgtgatgaragcaatgtcctggccagactgtctccctgcaaaatgttgaatgtatttctttctccttggcccactgtagggactttagttcctgtttgttagccaagactggtcttgtagcctgcttctgtcaattctgacagccttgtaataaaacatcattttgtttaggtaacaaaaaaaaatagtttctgttacttacagacaaaaacattc

SEQ ID NO: 631135 - DNA, 556 bp, Homo sapiens
tcattagctcatctgttcttagtgtttatgcaatagtagtttaataaataaatttcaggatagcatctaggttgcgtgaagttttaaataaacaagttacctatttgtaattattcgtaccagtttgtaaaaatacatcctaaaatatctgttttccatttcaggatcaccttcgatggatggacagcattacttttatagtggactatataaagtgtctacaagtgtctacaacttcaactcatgtaaaactacattaaatatttatgcctactttactgcctggaaatcttgrttaatttacctttcacctgaagtttgtgataactgaccaggaagtgtttgtttttataaaaaggaaaaaacattattaaataaacttttaaacatagtgctctagggagtcttacgttggcaattaaaagcttcagccaaaaatgacacaagtccttttggctcacaactcactagtctgaacctattacagagctacatacaaaatgaaggcatcagagttcaagtcttcaaacgacaatcacatattcacaaattatac

SEQ ID NO: 631136 - DNA, 533 bp, Homo sapiens
cacattttactggttaaaacaagccataaggccataccagatttaaagggtaaggaaataggctccacctctggttgggaagaactgcaaaattttgtggccatttttgcaacctaccaccatctgcccacaatttttacatttctccaacttgcaactttcataccagaatccacagaagtctcattcaatcatggctccaaatttactttccagttagcttttgctgcaaaacaaactgcccaaaatgtatgactcaaatctaatggtcagtggcttgatctggactcagttgagtgactgctggtggtctcagttggggtcataaatgcatctactgtcagcgatcaggtcaactgggagctgtttggtgaagggggcagctaggatggcttgtctctactctaagtggtcttctattctgcagcaggctagtccaagctatgtcrcgtggttatcacagaatttcaagacaggaatctccagtgcacgcacgcaatgcaattgtctgtttgctccatggtcacacatgt

SEQ ID NO: 631137 - DNA, 586 bp, Homo sapiens
acagggtttataaggtctaggatttatgaaaaaatatgtctattgcatcrcccaatatcaatgttgaagccactaaaatagcgactaaggataaggtaaagaaaataaatgagatccaggtgttgaagaagatgtctaacaagtttttagactgtggtgacaggaatgtagaggagcatctacaatacattataatgatttaatagtgagaagaatattaactataataatactaatagctgtgataatctcactgtattgtactgtattaaggtgcttactaagtgtttgcaaacattaaattgttcatttacttcttcgtcactgggaggtgggcattgttatccccatttcatagaggaggtaatagaatctcaaagagattacttagttaataaataataataaattatttagtcaataaccttattatatgttaagttttatggtaggcactgggtatcagagagttcattctaatgagaagttatttgctcaaatcactctgctagggaacagcacagctgagatttaaatttggatgtgattgtaaatcctaatttgtggaaggaagcaaggagtacag

SEQ ID NO: 631138 - DNA, 661 bp, Homo sapiens
gaggccttcagatcagacctcattagggaaagaacagtcttttcaataaatggttctggaaaaattggatgttcacatgcagatgaatgaaactagacttctcacccctcacctcrtacaaaaatcaattcaaaatgtatcaaagagctaactataagaccagaaacaataaaactactagaaaaaaatatagaggaagtgcttcaggaccttggttttggaaaagattttatgaataagatctcaaaagcacaggcaacaaaagcaaaaataaacaaataggattataccaaactaaaaagctcctcacagcaaaagaaataatcaacagaatgaaaggacaactcgcagaatggaagaaaatatttgcagactattcacgtgaaaggggattaatgtgcagcatatatgaggaactcaaacatttcaacagcaaatagacaaacaacgctattaaaaaacagtcacatctgaaaagacatttatcaaaagaagacacacaaatgaccacaaatatatgaaagaaatggtcagcatcactgataatcagggaaatgcaaatcaaaaccaccatgaggtatcatctcaccccagttaggacggctatcatcagcaggacaaaaataacgattgttggtgagaatgtggagaaaaaggaagt

SEQ ID NO: 631139 - DNA, 586 bp, Homo sapiens
caaagatttatataaccaaggtactgattgtggctgtgtaattatttataattataaaccattgtaaacaacaaattgcccaataatcaygtaatgtttaaattctaaattcttataatgaaatattaggcagccattaaactgcctatttatttttctgtaacttccacttatctgaacgtccaacatggtacttgacatacaattagaccctcaataaatatttgtagaaggaaagatgaagaaagggaaaaaaagaaggaaaaataaataaaggaagaaaggatagaggagttatattttgagtgtggaatgttgtataacaattaacaagtaaaagaatgttttaaaatataattatattagacggagatgcgatttaagtttcatttttgttaaatcaaactatatttgggttaacagggttttttttcatccaagtttagagtggtaataaaaatgacagacaagctccatgaatgaagaaaataatcctttcatatgatttaataataaggatgatccttattagaaactgagagcgttatagcctctggacagctaacttttctaaatgatggtaaat

SEQ ID NO: 631140 - DNA, 615 bp, Homo sapiens
gttatatattttctaatttttatagttaatttggtactgataccccttttccaaaaatgaaaagcaaagcctcagaaagttcagataactcacctaaggtaatgtcaaacaacattccttaagtggctccggggttttattctgattcttatttgcatatgaatatgagctttaactccatgattttcattactacataaaactgctttacatagttcagcacagacaggacatgtagatttcagaagattaaaaattatgagcaggggcaaataatatttttattgattgaaaatgaatttcgaggtagcttttctacctctgcttgctaaagataaagtagactttgtggttgactccctaatattcactctacttgtctcagtgtggtataagracttaacccctctgcctcctcctcattatatgaatggccttgattagcctatatcagtcctgccaatctcatgtgcccctgctaaggattggttcaggaagctaggcctaagccaatcagatcacggcaatcttcttgtgacagagacttgttcaggagtaagcacattctctaaaatggtataaccagatggttcgatgcaagtttgtatgaagttt

SEQ ID NO: 631141 - DNA, 606 bp, Homo sapiens
caattatagtgcccttcaacagataaattttatcagacacttactatatgccagacacactgctatgggctttactcacattatcatattgaaactctgagagaagctctgagcaatggagtgattttcccaaggtgaatatctaataagtggtagagcagggattcacacaattctgtcattctagaacccacatatactcttgaggtgttttttccactgtctttttccatagtctttttctcttttcctaacttactagagaggaaaaggggcagcagggccagaggtattgtcagctacacacaggaaaggaagcaagccttcatgcattcatcakctcgcttaatgatccttggctgcactagtgctagctcagctttgggaatgcccatcgtggaccttgggggagacatctacgaatagcaagtgctgattcagagacatgaacaaagtgacattggagcataaacagagggaaagctaaggaagcctagggagagagagtccagaaaaacctctgagctgtgtctaaaagaatctttccaggaaaagaaaaaagaaagagcacctgcaacagaacaaaaaagctatgcaaacaggcta

SEQ ID NO: 631142 - DNA, 634 bp, Homo sapiens
aaaaaaaaaaaaaaagaaaaagaaaaacttcaaataaacaacctaatgaggcatcctaaggaactagaaaagcaagagtaaaccaaacccaaaattagtagaagaaaaatacaataaagatcagagcagaaataaatgaaatgaagaaaacaatacaaaagatcaatagaacaaaaaggtttttttaaagttaaaatgaacaaatctttagccagactaagaaaaaaagagagtacacaaataagcaaaatcagacataaaaaggagacattacatctcacactgcagaaattcaaaggatcattagwggctactatgagcaactatgtgccaataaattggaatatctagaagaaatggacaaatttctagacacatacaacctatcaagattgaactatgaataaattcaaaacttaagcagatcgataatgtgtgattgaagctgtaataaatgggcatccagagggaaaaaaaaagaagcctcagactcaatggcttcactgctgaattctgccaaacatttaaagaagaactaaaaccaatcctactcaaactatttcaaaaaatagagaaggagggaacacttccaaattcattctatgaggccagtattatcctggtaccaaaaata

SEQ ID NO: 631143 - DNA, 558 bp, Homo sapiens
tttaaatgcatggactttgagcacatcagtactgtgcattttactttcaattttacaatatatgttattttcgcttaaccttttgcctttgaaaaaattacatggaaaactsctccttagtaacagatgaaaaccaccaaactaacttcagagtccaaaacacctttagtagtaagttgtcactaagtgtttaacctaatgccaaggaaataatctaaacagttgagctactaagtcacttggactacagagataaaatttgtgtgtgtgtatatatgttttgcaaatgaaaagctagtggaacccccaggcatttttttcttctactacttctaagttgggcttccaaaaacagaaaaactgcatgtgtaagatggtggcatttgcaattgttaagtgacaaggatttttttaaagtctgaaaatgtcaacatacaacctctctatgcagaaatgacagttaaatggtttccagttatgaaacagtacaccaaaattctgcaatccataggaagctacatcttaagcaaatgactagagcacccatttcctttagca

SEQ ID NO: 631144 - DNA, 465 bp, Homo sapiens
agtattgcatgcttagatcccttgtatggtctgtacagataaaaacattatcatctatagcaagaaactatattttagattaactggtcttttattcatctggrctcttacaatttaaatattaaaaatcttgaacagtaaacataaggcatagagtgagcctcatcatctctatgttttagttatatatatcaccgaatgtatatgggttttggtagtgcatccatcattggttcaagtaaaatgttgtttttaaagaagtgtgttattgggtgattggtagtttgttcattttttgtgtgtttctgttcagaaggctacttgatcttttcttcaaatttatatctagcatgtatatctgtgttaccttattataaaacaccaactttttaaagtattcatcctttcaatacattctattccatttagctaaaaatttctctttgtgccttctgaagttacaag

SEQ ID NO: 631145 - DNA, 465 bp, Homo sapiens
agtattgcatgcttagatcccttgtatggtctgtacagataaaaacattatcatctatagcaagaaactatattttagattaactggtcttttattcatctggactcttacaatttaaatattaaaaatcttgaacagtaaacataaggcatagagtgagcctcatcatctctatgttttagttatatatatcaccgaatgtatatgggttttggtagtgcatccatcattggttcaagtaaaatgttgtttttaaagaagtgtgttattgggtgattggtagtttgttcattttttgtgtgtttctgttcagaaggctacttgatctttycttcaaatttatatctagcatgtatatctgtgttaccttattataaaacaccaactttttaaagtattcatcctttcaatacattctattccatttagctaaaaatttctctttgtgccttctgaagttacaag

SEQ ID NO: 631146 - DNA, 572 bp, Homo sapiens
tcctggtaattcaacaagctttgatgtttgaatattgctgtttttaatgttggcttgcgaaataaaatttgaaatagttttactctgccagtctcccttctcacactcctccatttgttggtctgtaaactcatggtattctaatagtatatgccacaggaccaaagttgagcattctagatggagcttttctgatgatggctacaattctggcagcagaatacttaaagcacaattattcaaatatgtgtcacagagagatgggaatattaaaaacaatttccccattcatcttttagtagaatactaaaagtagattggctgagcagttcactttgctcaatgtcttcatcacaaggaacgtacttggatggcaaggattatgttcttatgattctatttcagtggaaatttaagggaaaaaatctatgttctctttgatggacgggarcaacttttttattgtcttccttcccatgagagatagtctataaaattattttatacattttaccaaatcctgcaattcttcaaccttgccgctcatgaacactaaattggagcacaggtgt

SEQ ID NO: 631147 - DNA, 607 bp, Homo sapiens
tcactttgctcaatgtcttcatcacaaggaacgtacttggatggcaaggattatgttcttatgattctatttcagtggaaatttaagggaaaaaatctatgttctctttgatggacgggaacaacttttttattgtcttccttcccatgagagatagtctataaaattattttatacattttaccaaatcctgcaattcttcaaccttgccgctcatgaacactaaattggagcacaggtgtgtagccacatggcctcatcattgcctatttagaatctgagtgtttctgagtagtaatgttccctgatactctccccattcactactttaaggactattttttcctcaactgctygtttgcactttctcctcattttgcttgtgaatgtcagtgccattattcacctctattccaccatgatcacctttctccaaagattgcttttttcgtaaataattacctgaagcataaagtcacttgctttcccaaatttaatattcagtgaaccagcattatcacagcaccatgcataatctggagaaccataatagaatgaatatgttagaaaaaattattttgctgaaatataaaaggaaattaaagcc

SEQ ID NO: 631148 - DNA, 607 bp, Homo sapiens
ttagaaaaaattattttgctgaaatataaaaggaaattaaagccacacctggacatctgtgcaccattttagtcacttaagtgtgctataacaatagagaaagcatgactaaatactgctatagggaacctttttaaagatgagtagaactcgatcatgctattaaggaaagggaggtagatatgtaagagataatctcactgaggaggatatacaaattgttaagaaccagtattcccagacaatatcagaagtgatcaaacacaaagtaaaagactctggagaaaggaatattagttttttgttattttattttatagaaattaatgttagaagtatgttttctaaagtaattatawgggtaggaaactaaagaataatatgtgcttagctaaactagggtaactaggagtgatagcactatctttctattcagaagaagtgataaaaattcactttctcatacaacttctctatttgtattactctgcttcttagtacaaaacagtaggtcaagaaactttgggaatagtcaaagaataatcaataatctctcgagtccttctgaatacacagcctttcctcaaacttgaacaattttcacttc

SEQ ID NO: 631149 - DNA, 542 bp, Homo sapiens
aaagtaacatttttttgtcagtcagatgttcagattttctgcaccagctttagtttggctcattgaaataatagttacctgaagtgatctgactggccaaaatgattaaagcagtttgcatgcatgtacatatatatctgcaaatatgaaatgagcaaacagatgaattgtcattgcacacagacaaccaatcaatacaaactaaatctcttgtattttattcccccaaatactgagtgcctgccaaaagccagactcttttargcactgatatctccgtcaactgactgagacattctcaggtttcttgatgggagtattttgccattttgaaacaaatattctgacttcactcttcaaatttgagaaaagttctaatcaactgagttttatgtaatacacatttggatttataaattgtaagatgaaattgtatttcactatattttgtcccacagacttaacctatgtttcttacacatccatcctaatataaaaatacagtcacttcacatctgtgtaagtttgtggagataaattct

SEQ ID NO: 631150 - DNA, 542 bp, Homo sapiens
aaagtaacatttttttgtcagtcagatgttcagattttctgcaccagctttagtttggctcattgaaataatagttacctgaagtgatctgactggccaaaatgattaaagcagtttgcatgcatgtacatatatatctgcaaatatgaaatgagcaaacagatgaattgtcattgcacacagacaaccaatcaatacaaactaaatctcttgtattttattcccccaaatactgagtgcctgccaaaagccagactcttttaggcactgatatctccgtcaactgactgagacattctcargtttcttgatgggagtattttgccattttgaaacaaatattctgacttcactcttcaaatttgagaaaagttctaatcaactgagttttatgtaatacacatttggatttataaattgtaagatgaaattgtatttcactatattttgtcccacagacttaacctatgtttcttacacatccatcctaatataaaaatacagtcacttcacatctgtgtaagtttgtggagataaattct

SEQ ID NO: 631151 - DNA, 583 bp, Homo sapiens
aaaggatcacagcaggaaagggacaggataagatgtgtctttaaaaagaccattcaggaaaatgttgagtgttttagaggacactgtgactagtggcttgctaataaagcagatgggacaataacggtaatcttgacaagaaataagaagggtcttataaaaggcaataatagagayaggaaggggtgtgtatatattcaaaagataggaaggaggcaggatctatagaacttgatggcccactggttatgtaaaatgagaacgagaaggcaaagaagattgccaattgcaatgcttgagtggcccatcagagggacaccgtatactctagttagttagactaacagagttccaagttatacttagagtgtcaaagtagttattaatgaggcccctttatcctcaaaattgtcctggtttagaagataaattttgtggtcccctaatagagaatgatcatgcaatcatagtcattcatgatcacgtttatataatcagaaagatgtggagataagtggatttgtagtaaaggaataacatttagggttctccattctattctattctaagcaaatagttgtgt

SEQ ID NO: 631152 - DNA, 516 bp, Homo sapiens
acatttttgcctacaaattggatttaaaatgctgttgcatacttattagtatcagttgatccatcctgaaacactttgagaagcattggraaaccatagctttagtgagcccaagtatttaaactcagtgtcaattggattttattttaaaggttatgggatacaaggaaaaaaaaaaaaagccctaaatccaaagtcaggaattctctggatcaaatcccagcttaatctctagtcagctgtgtaacataaagccagtcacatgatttgcctgggcattaatttctggagaaatcaaagtgaaaaagttacaccagataatttctaagatagcttctcaccttagaatttggtaaatgtatattagtggaagagtaaagatgagctctctttgttgcattttccaatgtaacaaaaattagcccactttcttcaaaactattcctttcttcctggtttactatccaattaataggagagagtatataaataagaaacaattgccaactacattgt

SEQ ID NO: 631153 - DNA, 534 bp, Homo sapiens
ataagtaatccctctctttattttacaataccaatataaaaatgaatgtacctggtgaagttacatgaattattgtttttgtctcttagacatagatatgtttaggttgatgtcattcatttgtatcaataaatacctttttttccatgaagttggcagttaagaacatctgctgtattcttctttgcatatatgctttccttgccccagagagtgccaaatggactccttattccacgcaaacccatataattacaacccactttgaaattaggctctggattagagacagtaacaataaactctgagatagaagaagaaagcaaatcatggtactgagaagggagaaaaacatttagctttaaggtataaagccaaaatatacttttagtatgcatatgtattttaaaacatatggaagcttcaaaactatggyatgtataagaaattatctatcacctttctctcagttacttcaaacactgagtcttggttggcttcaaggacacacaccagagaaaataccattgtatg

SEQ ID NO: 631154 - DNA, 572 bp, Homo sapiens
tcaatatcatgtgatttttaaactacacatttgttcactctcctttataaaccctctccatattcactgaccacttcttatgtgttaagcctttgtctataaactgtgagaaataaaaataaaaggaaggtttgawtccagtcttcagtaaacataaagataatgcaagacattaagcaattcaagaaaaatatgaccataaaaacaattactaactaacttttaaaatcacagccaaattttgttgaagactagaaagagattaatgtgatattttgtcattgtggagaaaagcaaaataaataattgaacacctatgtgccaagcactgagctaagatagatggatactgtatgtatgtctgtctagacacacacacacacacacaatagctcactgattcctcttaacagccatatgaagtaatgttatttggggaaaacatgctacctgacctagacctcagtgagtagcattagaatagtcaaagaagaaaaaggaaggcaacctaaggtgagaaaagatattgttatcttagggttgtgctggatcttagagattattgagtttgg

SEQ ID NO: 631155 - DNA, 632 bp, Homo sapiens
aataagattcaatatcatgtgatttttaaactacacatttgttcactctcctttataaaccctctccatattcactgaccacttcttatgtgttaagcctttgtctataaactgtgagaaataaaaataaaaggaaggtttgaatccagtcttcagtaaacataaagataatgcaagacattaagcaattcaagaaaaatatgaccataaaaacaattactaactaacttttaaaatcacagccaaattttgttgaagactagaaagagattaatgtgatattttgtcattgtggagaaaagcaaaataaataattgaacacctatgtgccaagcactgagctaagatagatggatactgtatgtmtgtctgtctagacacacacacacacacacaatagctcactgattcctcttaacagccatatgaagtaatgttatttggggaaaacatgctacctgacctagacctcagtgagtagcattagaatagtcaaagaagaaaaaggaaggcaacctaaggtgagaaaagatattgttatcttagggttgtgctggatcttagagattattgagtttggcctaggctggtaccggaagtctctttcagtatcactagtgtatgtcctaacc

SEQ ID NO: 631156 - DNA, 353 bp, Homo sapiens
aatgtacatgggtttcgctgattagctgcatgtaattaggaaatttaagccaattggaattagagtacccaattcaaacactgtgcccatgacaacaaaacactgcgtgagctgcagctattacagcctaaagttttccattagtgaatccgattatayctagtaaactttttttaaaatttgagtagctgttacttatacacatatgctattaaaacatggtgagccataatgcctctcttgtcagttattgttcattaaaattggaggtaaggtaagagaaggatgatcttatttctttacattaagttgaagatgggctatcttgtcttgaaaataaattagcagcagta

SEQ ID NO: 631157 - DNA, 655 bp, Homo sapiens
tatgtagttttataaagggatataattaaaaccagtggactccatcagtgcagagataataactgtgtgccaccaacttgaaaagaaaatgaatgtacatgggtttcgctgattagctgcatgtaattaggaaatttaagccaattggaattagagtacccaattcaaacactgtgcccatgacaacaaaacactgcgtgagctgcagctattacagcctaaagttttccattagtgaatccgattatatctagtaaactttttttaaaatttgagtagctgttacttatacacatatgctattaaaacayggtgagccataatgcctctcttgtcagttattgttcattaaaattggaggtaaggtaagagaaggatgatcttatttctttacattaagttgaagatgggctatcttgtcttgaaaataaattagcagcagtaagaaaacctcacggagctgatttcaagtagtaaaacaaatgtttttaaaacttagatcattagttgaaatttgaaatcacatactttcaaaaaatgaattaaatagaagtgaatcaaatcatagaagaaagccctcttttgctttcttagtttctcaaaatggaaattttccccaaaatgttcacttgtttttttttaattttttactcac

SEQ ID NO: 631158 - DNA, 589 bp, Homo sapiens
agcaataaataatagaaaatatcactattgtgtacattcctgatgaggcagtatagtgtagtagttaaaaaatgtgctttccagtcatatagacctggttaaaatcctagctctgtcacttactatcatttcttgtaactgtcacttactggtgtgaatttgagcatgttacttaacctctctgagactcagtttcctgaaatgtagattaaggtttgagattccaatttcatatttggttttaacctttacattagataacataagtaacatggtatatggactttatctgaaaacacatcagaaatctgagatgctaagtgcaattggtatctcatcagaatacctctagttccttgccattacttgattyttcacttccctggttattcttatgctaagataaactttctgattctgctttaaaatttggctctatattataaaaatatgaggcagcttactattgaaaaactacatcttccttaaatcaaacattatctttgtttttaaatattcacatgactatatttatatcccccgtgaagctcatagcttcatggggggatataataattaattatgaata

SEQ ID NO: 631159 - DNA, 591 bp, Homo sapiens
aaagcagtacactgtagtttaaattttgtggggattggagtgttctgagtaaacaattaaactcatgattaagaaaataacatttttgttgttattttaaaaatgtctttggatctagcattgccttattacaaaatggaacaactagcacacagaaggaataagaactgaaaggctgcgtttgagtccagtaatgcattatataaatgaaagtatattttacattttgttcttttctttcttgatgttctctcttctaaaatatcagagtactggtattttagtaccagtaatgtaaatgtattaattacatttttattttaaagacagaaaaaataatatttttatatttttatggccggagtatggtttgccatatgatacatgcacartgaaaacaattaaagactcaatgtgaaaaacatctgaagggactgcctaagataggttttctgtcactaaacaatgacatagagcctcaacagaatgttctaggcttgaaatcgagctcattttagaacgataaaatgaatggaaacatataagcagtaatattaatattgcttatataaaataaaggcatataaaaat

SEQ ID NO: 631160 - DNA, 591 bp, Homo sapiens
aaagcagtacactgtagtttaaattttgtggggattggagtgttctgagtaaacaattaaactcatgattaagaaaataacatttttgttgttattttaaaaatgtctttggatctagcattgccttattacaaaatggaacaactagcacacagaaggaataagaactgaaaggctgcgtttgagtccagtaatgcattatataaatgaaagtatattttacattttgttcttttctttcttgatgttctctcttctaaaatatcagagtactggtattttagtaccagtaatgtaaatgtattaattacatttttattttaaagacagaaaaaataatatttttatatttttatggccggagtatggtttgccatatgatacatgcacagtgaaaacaattaaagacwcaatgtgaaaaacatctgaagggactgcctaagataggttttctgtcactaaacaatgacatagagcctcaacagaatgttctaggcttgaaatcgagctcattttagaacgataaaatgaatggaaacatataagcagtaatattaatattgcttatataaaataaaggcatataaaaat

SEQ ID NO: 631161 - DNA, 580 bp, Homo sapiens
ttcctttgtccctaaactcacaaccatctgatggcaaaactaggtgtcaaaggtggagaaacacgacagagttaccatccagccattgctgagggttaacccaaatgccctctgggatttcatctggattgaatgtaaacccatctgccaytatccagttgcccacttgagctagcttctgacctgctaatcttccagccacagatctccaacatcctgcaaatgtccttcactaagaggtgcacagatgcacttaacatacatcctgaagtttgtcacactgaagttcaggacacccctgagacgggtgaagcaaatcgtggtgaggcaatccaggacgggtagtgcctactagcaggtgatctctgggcaggcaggaaagagatgagagcaccagatagtctacatttatccacagaaggaatataaactatgtgcactagcctgtgaaacaagagagagttagaattcccagaccttgaagcatttgcaaggtctctgggaagatttttctcattctgaaataagtgctatcccaaagaaaacagctttgcattaatgcacaatcctagtaaggttt

SEQ ID NO: 631162 - DNA, 580 bp, Homo sapiens
ttcctttgtccctaaactcacaaccatctgatggcaaaactaggtgtcaaaggtggagaaacacgacagagttaccatccagccattgctgagggttaacccaaatgccctctgggatttcatctggattgaatgtaaacccatctgccactatccagttgcccacttgagctagcttctgacctgctaatcttccagccacagatctccaacatcctgcaaatgtccttcactaagaggtgcacagatgcacttaacatacatcctgaagtttgtcacactgaagttcaggacacccctgagacgggtgaagcaaatcgtggtgaggcaatccaggaygggtagtgcctactagcaggtgatctctgggcaggcaggaaagagatgagagcaccagatagtctacatttatccacagaaggaatataaactatgtgcactagcctgtgaaacaagagagagttagaattcccagaccttgaagcatttgcaaggtctctgggaagatttttctcattctgaaataagtgctatcccaaagaaaacagctttgcattaatgcacaatcctagtaaggttt

SEQ ID NO: 631163 - DNA, 386 bp, Homo sapiens
ggcatatatggctgtatctgagcctttacttacctttggttgggttcattaatccaaattaatcctttctgtcaagctcaaaaatgtttactaaaatcctactaaatgttagacactgatctakgtacttgagatgataaatacagcattcttccctggagaagtttaacttaggatgttagggaaaaatatatacacataacatcaacataatatgatgagatgtgaataaaatgttggcagaataccaaggaagaatgctgtatcctagttacaaacccagaggagtcttcttagaggagataccgattgaatcagatatcttaaagtatgagtaaatgaaaacttgaaggggtgacttggaggacttcccactctagagcatt

SEQ ID NO: 631164 - DNA, 557 bp, Homo sapiens
aagagtaaaagtcaaaaaccacactctttctggtttgtgtggtagattgaataactggtcacatatcttttcccctcctactgttggcagggtatactttcccaccactgtgtttggagcttggctctgtgccttgctttggcctgcacgatgtttgtagacaggattgaggcttgcaatgtgcatgagtggctagcttgtcattttgcgccctggtgttccatcaaccaggtctgggtgagtagctgctggctcctcagtctgggccccagaatgaacatatgtggaagaagcctgagcccaattttcagtctatagtcctcccagcgaacctacaagtccaaagtgagaaaaaatgctattttgtaagcccatgagttttatgcagcactrttgtggcactagctgactaattcagtgatctagcttcccactatctctctgctctcatctcctgcttcttctccctttctcactctcactcctgcttttgttccctttctcagaatcatatcttcttcttaagtttcctgatccaaagcatactcctgccacag

SEQ ID NO: 631165 - DNA, 481 bp, Homo sapiens
acacttccctgggtggcaggaattaacttacaggactcttgcaggcacaggcrtatttcaggggagcacactgtgtgtttaaaaatgctttagaaaagcaggtttccaattgtagcttttcctaacaaaagacagggagacttctgccagaggtaaagcttccaggctgatggcagagggagggctggaccatcagtcagcgggaagcagagtgtgtgcaggacacattccccacagcgctgatctggtgtctgcctgtctttctttcaggatgtggatttctgccttggtgtcctgctggtgaattctctccagttataaaacattttgttaccttcattcgctcttaattaaaaagggaaaagaaactcctagggctctgacaacaggaaaaaaaaaaaaaaaaacaaggaaagaaagaaaaggaaaagaaaaaaggaaagaaaggaaaaaaatgaagagctctttgagttgctgaaat

SEQ ID NO: 631166 - DNA, 553 bp, Homo sapiens
aaccatgtaagagtttgtaattcccagtgtaaggtgggaagaaaagaaaaataaaattgagtactaggcaatggtgcacttcacaatttatcttattaagtactcaggacaactccatgaagtgaatgtaaatggtatgtcacaaggatacaattcatatatgtgtgtgtgtctatatatatatatatatatatataatatgcctagacttttttttttttcccttaatagcttatagcaactttgctctctgaacccccamcccacatggattggggattgagtgtgagaaaatacttgacattaccaaatacaggcggcttaatcccttctgataatttttgtgggctcatacttgtcatccctgtccaaaggttaactcttccgcccttaatttaggttacaaatactcaggtattgaaaactacttgctttctctctccctcttctatctctactcttcttgtctttcacccatagaggaatgggagggttggtggcgaacttctgattctatcagggatggtatcctgacttcctgatgctgactttg

SEQ ID NO: 631167 - DNA, 472 bp, Homo sapiens
agtagggtcatgattcaaactgtgaggggccaaggtgaggaggataggcagactctgggaaggctgtaaggaaaggaaggatagtgctaggggagtagcacgattaagagaaagtattttaaatttggggtaacctgagcatccttgtaaaccaaaaaaggagtccatagaaacggactgacaatataagaaasgagtgggcaactgatggggggcaagttcccagaggaagcaaatagaagagaaagagaagggataatggacaagtggaggtcttgaccatcctgcatggagacactgagcatcacagataaaggctaaggttggaggacgaagctttctgctcactagtctgtctctgctcctttcaggtggaaaactccaattcatggttcaagggtgtgagaacatgtgcccatctatgaacctcttctcccatggaacgaggatgcaaattatatgctgtcgaaat

SEQ ID NO: 631168 - DNA, 561 bp, Homo sapiens
ccctggtcttgttccatgctcttcctctccttggctagatctcaggagtgctgagtatctagaggcttgattgtttttatcaagcatgatgaattagctaaagacattttagagaatatcagtagaaaattataatttaaaaaaagtgaaaagtattttgtactctaagtgtcttacctgtcacaccctagtccaggccctacaggtagtatgtgtggaaattctgagccttccagcctagtgctagagcagtaagtgagagcctctatctacataaacccagcttgattccaattcctctgtgtttcagcgactgaaaaataagggtatcaaaagtagcaggaattgtttcttactttgcaaaataatctatcacctgtaaggcctctgttacttttgttgtttagatagcatttgctgtgtacttgatgtgyttttgatagactgaagacatatcttaagtgacatattgaatggtagtagcagatacagatcctgctatatggataatactgaataagtatttgctattatgactactcccagcattgccaaaaccaa

SEQ ID NO: 631169 - DNA, 592 bp, Homo sapiens
cccagaagagtcagctcaaacatgcttaactctgcccccacctgatggtctttctctacccaccccggtagctgaagacaaaggatagctctatgggagctctatggccctgcccaccacctaagaaacctgaatacttatccaaaggcaaccctagggtaaacttgtatcctccctataaaactgtagctaatgcattcttgaaagtgccaccttctggctggagaccaaccaacacaaaaccagtgcacttatcaaaaatacaaccaacgaccctcacagagtccacttcactgcccagctacctccactggaggaggtttctccatggctgagagacctgaagatggatcacatcatatgactctttgcggacactccccagtaccagcctggtgcctggtagctctgctgggtggctacatccagaagggaaataacaaacactgcagcttggctctcaggaagccacatccctaggggaaaggggagagtaccacatyaagaaggtctgagaaactgccacagccgagaagagggtaaggacacatgatgagtaaaaacaatgtgttgccctggaagagaaagacaa

SEQ ID NO: 631170 - DNA, 543 bp, Homo sapiens
tattttatgaagcgtttattaaatgacttgtgtgacagcataatgacgtctttggagggttagctattgtatttcacattttagaaaggagtagtgtgtgttgagaacatagcagaaaccacttccttggtttctcctttgtggaaaaagtaatagaggtaaaatcgttttggatgagtcatgtttaatctttggaagttttagaagaaatkgaattctgtaatgttaaaactcttttcctttttagagttcaacttgctgtgaatagagtaactgaagaagcagtcgcagtgaagattgtagatatgaagcgtgccgtagactgtccagaaaatattaagaaagagatctgtatcaataaaatgctaaatcatgaaaatgtagtaaaattctatggtcacaggagagaaggcaatatccaatatttatttctggagtactgtagtggaggagagctttttgacagaataggtatggaagaaatttaagataattattttaaacaagtttttaaatttgttttttaaatcttgggcatgctat

SEQ ID NO: 631171 - DNA, 563 bp, Homo sapiens
caagttcccttccccaagcccaaattgccagcgatggcagagcaagggtaactaaggggccttcccagaaaggggaagcggacagggggtgcctagggagggcagggcttggctgggcagcctgactcaggctgggcacgccctcctgggaagctgcaacctgggcagggacagcttcycggcctgggctccaggctaagcagcccaggaggccctacccacagccgcctgtgactcagctgcgttgacactgccggcaccctcagcctgctgtgcccagtgtttccctggcctcccgcaggatgctggagcaggagccagaggccagagttcaagtgccagcccccaagctctcccaggctctgctgaaagatgtgaatggccctctagcaggcccagtgtgggcaaggccaaggatatggcagctgcccaagggaccccagcctcctgcttactcccctccccctggaccccatggtcccttcctgccccagcccttcccctggggagcctaaatttagccccgcctggcgggtgaggcccccacagctgtgccctaatcc

SEQ ID NO: 631172 - DNA, 606 bp, Homo sapiens
atccacgttcctggcactctgcccagtgcttggtaggctggaaggtgggtttgggcatttctttccctgcaggtggctyatcgttaaccagcagccaccctgccccatgagctgggtgcagactatctgtactcaagggggattctccagggcctcccagccccaggactctggcgtacatctttaaccccagatgctggagaccagtctcctcttttcttacaatggaaggttggagatgtgagatcgtgagggcccgtgtccctgctgtcatcccctatgggttgtaggtcatctcctagagtgtcgtgtcactgtgctgaaggggacatggtcccagaaagagcagggatttgctcagtgacccacagctgctggagtccaggacacgggctttccagctggagtcccagcactgccccatcctgcctgtcaaccaaggggcagctctgccaggctgctgcaaaccttcagctgtccaggaatgacccctgcatttgaaggaaaggagtgaattcattgggaaagtctttctggaagaagccaccatttgagctaggttgataagatggccaggtttttcccaggtgaaaaatgagtggggtt

SEQ ID NO: 631173 - DNA, 606 bp, Homo sapiens
atccacgttcctggcactctgcccagtgcttggtaggctggaaggtgggtttgggcatttctttccctgcaggtggcttatcgttaaccagcagccaccctgccccatgagctgggtgcagactatctgtactcaagggggattctccagggcctcccagccccaggactctggcgtacatctttaaccccagatgctggagaccagtctcctcttttcttacaatggaaggttggagatgtgagatcgtgagggcccgtgtccctgctgtcatcccctatgggttgtaggtcatctcctagagtgtcgtgtyactgtgctgaaggggacatggtcccagaaagagcagggatttgctcagtgacccacagctgctggagtccaggacacgggctttccagctggagtcccagcactgccccatcctgcctgtcaaccaaggggcagctctgccaggctgctgcaaaccttcagctgtccaggaatgacccctgcatttgaaggaaaggagtgaattcattgggaaagtctttctggaagaagccaccatttgagctaggttgataagatggccaggtttttcccaggtgaaaaatgagtggggtt

SEQ ID NO: 631174 - DNA, 643 bp, Homo sapiens
tgtcattttattctgttgatagtgtcatttgatgcaggatagttcttcacattaaagtccaatttatctattttttgttgttgtttgtgcttttggtatcatatccaacacataattgcctaatgcaatgccatgaagatattctcctactttttcttctaagagttttatatttttaactcatgtttggatctttgataaatttcaaataaatttttgtatgtggtataaggtaagggtctaacttcattcttttgcctgtggctaaccagtttcctcagcataatttgttgaaaaaatgattgttttcccattgaatggtcttactaccctggacaaatattaattaaccatgtatgcaagagtttatttctgggttctctattctactctatttttctaaatttctgtacttgtgcccatgacaccttgttttgattgctgtagcattgtagtaagttttcaagtcaggaagtgtgaggcctccaactttgttcctttgtaaaattgttttgctagtcagggtcccctgagattccatatacattttagaatttgttttaatttctgtaaaatgtatgscattaggatttaatacggattgcatggaatctgcgattactttggatagcatgggtatctt

SEQ ID NO: 631175 - DNA, 628 bp, Homo sapiens
ttactctgcttaaaacttccaatactatgttgaatacaaatagcaaaagcaagcatcttgtctggctcttgatcatggggagaaaggtccagtctttcactattaaatacaatgttagctgtggaatgttcacttatgttgagaaaattaccttatattcttatttattgagtattttttattactaaagaatttgtactttgtcaaatgcttttattgcattgattgagatgattgggttttattgctttagtctatttatgtggttgattttcatgtttacacaagtttgtgtttggataaatcccacctggtcattgtctgagtctattttctgtcactaaaagagaatgcctgaggctgagtaatttataaagagaagagatctacttagctcatggctctgcagactgtgtgagaagcatggtgctgrcagctgctcaacttctggtgagaacctttgcactgagtgtaaatatagtaaatactgtataataacccattctcccagaaactagtccattcccccaagaaccaatcctgtcacaccagagtgagaactcactcatcatcacagggagaaggtcaccaagacattcatgagggatctgcccctgaatccaaaccc

SEQ ID NO: 631176 - DNA, 544 bp, Homo sapiens
cctccctcatttctactcctgggccacagctctgtttcagcctaacgaggagagctgcggagtctgaaatacttcaaggggaagaaaaggttagaagcaaaattcaagaggttgattctgtcaagacattcatctgggattctccgctctggcagattcattattttgtgaaatgataactgattgcatctgaaggagcatgagagagtgattgagatcacttccagcccctgtcagcaaacagwatctcaggcagcatcagaaaacgagacagcgtagctgtgcagccgggaaccctctagagcgtcccgtttcaccctggtcagaaagggcttagcggccaacactagacgatgtttctgatttaacaccaactgttcatttgttaaggtcatgatttatcttaactgtttatttagatgaattttgatgattgtatttattcataaaactactgcaaaaatgtggtacagattatttccatcactgcagcacgtttgtttgtactgccttatagaaccgttcgcctcccaacaagaaccag

SEQ ID NO: 631177 - DNA, 553 bp, Homo sapiens
  misc_feature 1, 2, 3, 4, 5, 6, 7, 8, 9, 10: n = A,T,C or G
nnnnnnnnnnaaattttccagtttcatcttgatccctctctttctccagccaggtttgttttcgtccatctcctgcctccaacatgagagctctgcccttctagatgaccagacctctcctgactccccagccctgaaccctcaggcctgagactcgctgtccagtgctgaaaacgtctgtctccctaacactgacaatcgagctcttttcatgtgttgcccggggaaatctcaggcaatgaatcttattcttaatttcacacttgcttttctttatggcaagaagccagggacatytgggcacctataaataataaacataaatgacattggaaggaggcaaggccatcaacatcatttaaaatctccccattctgggctgacaactactcactgggcctggactagacaagtgaatcttgaaaaagagacaaaggcagagattatgctgggacttcatcaccataggcatcaaacagataagtaggtgtttgcttgagtgatggcccctctggccaggtgaggctctcgatatttccagatcacatgccct

SEQ ID NO: 631178 - DNA, 611 bp, Homo sapiens
atgcctctctgcagcctcaacttcctagggtcaagtgatcctcccacctcagcttcctgagtggctgggaccatgggcaggtgccaccacacctggctaattttattttcatttytggtagagaccaggtctctctatgttgctcaggctgatcttgaacttctgggttcaaatgatcctcccacctcagcctcccaaagtattagaattacaggcatgagccactgtacccagccaattccagaatttctaatccttttctaaatttactttaggttgttatggatacataatagttgtacatatttatacagtatatgtgatgttttgttacatgcatggaattcgtagtgatcaagtaagggtatttaggatatccattaccttgagtatttattatttctgggttgataacatttctcctccttttactggctattttgaaatatataatacactgggcttaactatagttaccctactctttctattgaaaattagaacttactccatctaactgtatgtttgtacctggtaaccagtctctctttactctccctgccgcccacccatccacacacacaaacacacacccttcccagcctctatta

SEQ ID NO: 631179 - DNA, 611 bp, Homo sapiens
atgcctctctgcagcctcaacttcctagggtcaagtgatcctcccacctcagcttcctgagtggctgggaccatgggcaggtgccaccacacctggctaattttattttcatttctggtagagaccaggtctctctatgttgctcaggctgatcttgaacttctgggttcaaatgatcctcccacctcagcctcccaaagtattagaattacaggcatgagccactgtacccagccaattccagaatttctaatccttttctaaatttactttaggttgttatggatacataatagttgtacatatttatacagtatatgtgatgttttgttacatgcatggaattcgtagtgatcaagtaagggtatttaggatatccattaccttgagtatttattatttctgggttgataacatttctcctccttttactggctattttgaaatatataatacactgkgcttaactatagttaccctactctttctattgaaaattagaacttactccatctaactgtatgtttgtacctggtaaccagtctctctttactctccctgccgcccacccatccacacacacaaacacacacccttcccagcctctatta

SEQ ID NO: 631180 - DNA, 611 bp, Homo sapiens
atgcctctctgcagcctcaacttcctagggtcaagtgatcctcccacctcagcttcctgagtggctgggaccatgggcaggtgccaccacacctggctaattttattttcatttctggtagagaccaggtctctctatgttgctcaggctgatcttgaacttctgggttcaaatgatcctcccacctcagcctcccaaagtattagaattacaggcatgagccactgtacccagccaattccagaatttctaatccttttctaaatttactttaggttgttatggatacataatagttgtacatatttatacagtatatgtgatgttttgttacatgcatggaattcgtagtgatcaagtaagggtatttaggatatccattaccttgagtatttattatttctgggttgataacatttctcctccttttactggctattttgaaatatataatacactgggcttaactatagttaccctactctttctattgaaaattagaacttactccatctaactgtatgtttgtacctrgtaaccagtctctctttactctccctgccgcccacccatccacacacacaaacacacacccttcccagcctctatta

SEQ ID NO: 631181 - DNA, 585 bp, Homo sapiens
gtaggatcggagaaagaaatggacaaaaggctctgctagaaacctgaggctattcctgaaaacaccaagtccactgagaatcttccttgagttgccctttgctgctggagttgattttagtgctctcggactccagggctccagccgcagttagaaacacaggcttttgactcttcttaatctgatgattgagaatggggatttctcaatgggccttcagtcctgcctcacccaggacctgggttcaacagcccaccctggtaggcaattgtgcaggctaaggcagatgatgccctaggcagcagtgggctctgtgtagtgattaaaacaattgcagcagctgcagctgccgtgtactgagagacgactgctgttttccatccrttttctcatttaatcctatagcagcacttttctcatgaggaatattcccagaacctgccaaggtctcccagctagtcatggagcaggtggagccaggaacaagcctgtccaggtgcccacaactcattgtaccgccctggggaccaaatatagcttctaacccaaagggctgctgtgagcaccatggaaatcatgtgggtg

SEQ ID NO: 631182 - DNA, 607 bp, Homo sapiens
actttgcccatttttaattaggttgtctttatcatacaactgtaaaagttctctataaattctggttacaggtcccctgtcagttatatgattgtaaacattttctcccattctgtgcattctttttattttctcagtggtgtcctttgaaccataaaagttttttttttttttcattttaatgaagtctaattttgttgttyttgctcatgcttttgatgtaatatgtgggaatactttgccaaatttaagtttctgaaactttactcctctgttttcttctaagggtttggtagtcttagtccttacatgtaagtttttgatccattttgatataatctttgtataggtatgaagtcatgctccaccttcattctctggcatgtagttctccagtttttccagcaccgtttattaaaaagacattttgtctccattggatggtcttggagcttcgtcaaaagttatctgatggtagatgtttaggtttgcttcaggagcatcaattctcttccttcggtctgtgtgcccattgttttgtcagtaccacacagtcttgtataaagttgctttgtggtaagtttcaaaattagaaagtgtgattact

SEQ ID NO: 631183 - DNA, 607 bp, Homo sapiens
actttgcccatttttaattaggttgtctttatcatacaactgtaaaagttctctataaattctggttacaggtcccctgtcagttatatgattgtaaacattttctcccattctgtgcattctttttattttctcagtggtgtcctttgaaccataaaagttttttttttttttcattttaatgaagtctaattttgttgtttttgctcatgcttttgatgtaatatgtgggaatactttgccaaatttaagtttctgaaactttactcctctgttttcttctaagggtttggtagtcttagtccttacatgtaagtttttgatccattttgatataatctttgtataggtrtgaagtcatgctccaccttcattctctggcatgtagttctccagtttttccagcaccgtttattaaaaagacattttgtctccattggatggtcttggagcttcgtcaaaagttatctgatggtagatgtttaggtttgcttcaggagcatcaattctcttccttcggtctgtgtgcccattgttttgtcagtaccacacagtcttgtataaagttgctttgtggtaagtttcaaaattagaaagtgtgattact

SEQ ID NO: 631184 - DNA, 607 bp, Homo sapiens
actttgcccatttttaattaggttgtctttatcatacaactgtaaaagttctctataaattctggttacaggtcccctgtcagttatatgattgtaaacattttctcccattctgtgcattctttttattttctcagtggtgtcctttgaaccataaaagttttttttttttttcattttaatgaagtctaattttgttgtttttgctcatgcttttgatgtaatatgtgggaatactttgccaaatttaagtttctgaaactttactcctctgttttcttctaagggtttggtagtcttagtccttacatgtaagtttttgatccattttgatataatctttgtataggtatgaagtcatgctccaccttcattctctggmatgtagttctccagtttttccagcaccgtttattaaaaagacattttgtctccattggatggtcttggagcttcgtcaaaagttatctgatggtagatgtttaggtttgcttcaggagcatcaattctcttccttcggtctgtgtgcccattgttttgtcagtaccacacagtcttgtataaagttgctttgtggtaagtttcaaaattagaaagtgtgattact

SEQ ID NO: 631185 - DNA, 571 bp, Homo sapiens
ctgcttggcaggctctgagtacatcaagggggctgcctcccagcggggctgatccaaggaaaaaaacctcacaatgggaaagaagacacacagttattaccagtatcctacggaaggatgtggaaggaaaaagcccctcacgctttcctacaacacctgaccagggagaataggcatccctgaattataaaacaaggttttatatttctcaagtttccctagaaataaaatgcagcagttaaggatgtatcatttgttttgccagatccttgaaatgatttgagtgatcacagtgaccaarggatataccaggaaaaactgaagccaagctctcaaataatagtgagattcctactggtagtaagttcagggtaacaaatccagacactgatgtactaacaactccttgaagaactttatctatttatttatttgtttttgagatggagtctccctctgttgcccaggctggagtgcagtggcacaatctgggctcagtacaaccaccgcctcctgggttcaagcaattctcctgccgcagcctcccatgtagctgggactgcaggcacct

SEQ ID NO: 631186 - DNA, 539 bp, Homo sapiens
ataaatgtaatacacagggtttctttttgaggtgataaaatatattcttaacttgatagtggttatcactgcacatctttctgggcatactgaaaaaacactttaaattgtactctttaaatgggtgaatcrtatggcatatgaaagctgttaaagaaacaaataacactttaataatcctggctttctgggtactattttatctcttcctttttgtgtgtgttttcatgtttctgcctgccatccacctcttacttttggtggcttttccttgcagttggcatgtgtttctcataaatatcacgtggtttgggtcttgtcttttaaaaaactagtcttgaacatatgtgtgtttaagtctgggaggagatttattccccaataccatgaatgtaattactagtatgctggatttaattctacatgtcacatttttttcattgtctccataatttttatttcctttgtcctccttttctacctttttttgaactaagattatgatttcaatttggttctcttattttagttatatttta

SEQ ID NO: 631187 - DNA, 624 bp, Homo sapiens
cgccaacctcctgttccctcctctctgttcatcagagccctctctctaggcaggagggccttcctgggggctgctgtgtcctccctcatgtcaggcacctccgggactgacacttgcagctgcctctgtgtgaggaaggggtgttcatttttctaaggtgccatcagatgacagatccmtcggtgcagagtgcacagtggtgctcggagtggcagaacaaccacagcttctcaggcaagcagaggcctccagagcggccctggttgagggcctgggagcccagagaggccttggaaggcacgatggctgcatggaggatcttgacctgggagtcaggtacagacataacttgcttcatataagtaccacatgctaaccgatggcctcactggagcttatacataacttggttgaaatatcatgctgccactgtgtgtgaccctgggcaagagactgtgaagtctctgatcctcagtttcttcgtctgaaatttggagtggacaatgcaacaagactgtagggaggatccaatgacgcagatggaagtgaatgaacttgcagatataaagcacagatgagctcattaagaggcagtgtagcgtcgcggttctaagcacagccttt

SEQ ID NO: 631188 - DNA, 624 bp, Homo sapiens
cgccaacctcctgttccctcctctctgttcatcagagccctctctctaggcaggagggccttcctgggggctgctgtgtcctccctcatgtcaggcacctccgggactgacacttgcagctgcctctgtgtgaggaaggggtgttcatttttctaaggtgccatcagatgacagatccatcggtgcagagtgcacagtggtgctcggagtggcagaacaaccacagcttctcaggcaagcagaggcctccagagcggccctggttgagggcctgsgagcccagagaggccttggaaggcacgatggctgcatggaggatcttgacctgggagtcaggtacagacataacttgcttcatataagtaccacatgctaaccgatggcctcactggagcttatacataacttggttgaaatatcatgctgccactgtgtgtgaccctgggcaagagactgtgaagtctctgatcctcagtttcttcgtctgaaatttggagtggacaatgcaacaagactgtagggaggatccaatgacgcagatggaagtgaatgaacttgcagatataaagcacagatgagctcattaagaggcagtgtagcgtcgcggttctaagcacagccttt

SEQ ID NO: 631189 - DNA, 580 bp, Homo sapiens
actgtttggattcaatcccaacttttccactaattattcgtgtgctctttgatgagttatttgtgcctccatcacctgccctggaaaatgggatgagttgcccaggtctccctccagggaagacttactgggccatgggsagtgagggcagcatgcaacctctagccccagggttggcctgactgcaggagttcccttgactgaggccacagctttgcctgtgaagtccaggaaagcctggaggtttggaggcctgcccatctcggctggtgtgggacaactttgatgggcaatgcccaccccagagctccctgttggattgttcaagccttggctgggcctgccttgtggccagagctcctcctctgcccagtcccactcctgtcacaggtgctgatccctaatcagcagtttgcacccaaactcagtcccagtgtctgcttctagagagctcagcaggttcccagcaaataaatataaggcaaagcaaaagggtattatgatcgtcagataagttcatagattctaaggatgctgaacagtgtctgggacgtggtgctattattagtattaatcattg

SEQ ID NO: 631190 - DNA, 580 bp, Homo sapiens
actgtttggattcaatcccaacttttccactaattattcgtgtgctctttgatgagttatttgtgcctccatcacctgccctggaaaatgggatgagttgcccaggtctccctccagggaagacttactgggccatggggagtgagggcagcatgcaacctctagccccagggttggcctgactgcaggagttcccttgactgaggccacagctttgcctgtgaagtccaggaaagcctggaggtttggaggcctgcccatctcggctggtgtgggacaactttgatgggcaatgcccaccccagagctccctgttggattgttcaagccttggctgggcctgccttgtggccagagctcctcctctgcccagtcccactcctgtcacaggtgctgatccctaatcagcagtttgcacccaaactcagtcccagtgtctgcttctrgagagctcagcaggttcccagcaaataaatataaggcaaagcaaaagggtattatgatcgtcagataagttcatagattctaaggatgctgaacagtgtctgggacgtggtgctattattagtattaatcattg

SEQ ID NO: 631191 - DNA, 566 bp, Homo sapiens
gtcattgggttcacatgagtgtgccagcagggagtgaagtgggggaagggaggggatgctggaaacccaagtggggaggtgaatattgtccaagctactaaccacagagagaaccaggaggaagcaggaggcaattgctttggcttggggagactctaccaagccaaactaactaggttattaggagagagatgatagaacatgacagaaagaacaggaatctctctctttgtgaggtagatcagccaccaccagactgtcaccttccttgtcccatagcatggagatgaatgggagagtcagatcacagatgcacattttggaacagtaagatgatgggatcttctccaagtaggctttgggggtgctgtctttggytttatcagtagcagaaacacccagatactctaaagctggctatggaaaataattaccatgaaaggagtcagccctggcttaaaaggaaagttcatagcaaggaagtccagggtcacctgcagatggggcagtggagggcactgtcccaggaacaaggaaggtttaggaataccgcctgtgcaaggaaa

SEQ ID NO: 631192 - DNA, 393 bp, Homo sapiens
tgccctcagtgttggcaggtaccatccaatcaaccagggtccagactcttctgctgccttggatgtgagaaatccagggttgccagcctttggactccacgatatacaccagcagcccccttggtcctgagcttttgtggactgagttagagaccactgcgtgccctgtttctccaggcccttggaacttgggattgaacttccggttacccggcatcccsggggtttttcagctttgccctgttcatgggacttcccagcccccataatcgtgtgagctcattccccgcataatccccctctcatgtatctgtatacatatcttaccagttctgtcttgctggagaagcttaatacaaatctggtattggggaagtcaaatattccttctta

SEQ ID NO: 631193 - DNA, 515 bp, Homo sapiens
cagggagcaccaggtgtagcacagggccagaggggcagcttggagctggactaaggagcccaggaaaggtttcagagagtcctgggactggctggtgcctgagagggaggctgggccatgggcaggagggggcagccagggctgggctcccgtccgtccttccstgctggggagcccagggaggacccaacacccccaccgacccttgcatccctatactcactcatcatcaaaggatttgccagtatctgcaccaggctcctccatccctgactctgaggtgggtcacagggccatatacattataatgaaatcatatagtaccttgcccaacgtaagtgggcccctaaggtctccacttatggtttgcttctaacctaaccagaaggttgaagtcagggaggacttcctggaggaggaggtatctgagctcagcctgggtcctgagagccatggggagctactgacaggctttaagcagaggaatgacttagaagctttgcattctacacaga

SEQ ID NO: 631194 - DNA, 396 bp, Homo sapiens
tgcactccagtctgtgcgacagagcaagagatcaagacttcatctaaaaaaaaaaaaaaaagacagagagcttagcagagttgcacctcagatcctgcatcgtggttcttatggctgctccattttgcagcagaggaagcttctgcttgagccttgcagtggagcaaggctgcagctgccctctgagagtgtcttctctggagagctgactggccctgctttgcctccgtctcctctcctggcacctgatccatggctgtgcacaaaaacaagaagaagtgagtggaaaggcacgctgggcagagggaacagcgagaacagatgctcagaggcaggaggtggggtgaggttttcagtggagrgagcacagagcccagtgaggtttgtgagcccagg

SEQ ID NO: 631195 - DNA, 529 bp, Homo sapiens
ctggggttcagagcaggtggcctcgggtccctgctcctggcccttctgcctcacacagtcgagcaggggcagggatcacagtgcagggggagtgacacagcgcagcaggsatccaggagggctgggcaggacaggaggagggacagctggggagtgggcacagcacattctgggagctgacaacagcagggacagagcagaggcccaggctgtgctgaactcagtcttggaagtagcaggcagacccagagggcttgggctgctgggatcgataggggtggctgaggcaggcagcagggcctgctgggagctacccaggtgagaagggacagggtcctggagccagagtagcgaaggaaccagcaaagggaagggcctgggcgtggggatgaggggctctcagatgatgccaggcccctggtttggttcattcacaaagacagagccatcctccaaaagaagagttagggcttcaagtgacaagatacaaacctgtaatccgacccggctaagtattttccccaggagt

SEQ ID NO: 631196 - DNA, 567 bp, Homo sapiens
ataatttttgcaaaggtcgcttcaatcagaaggagctggagccaacagtcaaggagcggccagaggaatttgattccagggctggttctgccacttggcagctgtcactatctaagggagacaatgttcccacctacctcagggagtgacctgaaggttaaatcagaccatgatgttctgtctcatgtgcacggatgagggagaggaggcctcaggtcrtgacaactggccagtgtgccccaaagactggacagaaagtaaaagctcagacattcacctggggtccacaacagagacaggcacataataggggtctgagaaatgtttattcagtgcatgaataagttatgttaacatcctgttaatttcagagcatcagttcctagacagtatcacaaatggcaacatgaagagttagggaaaaagaaaacagcatgaatttgcatcgtggggcaatgctttggcgtattgattgtgccttgcttttcctgcagtccttttctgcccctttctttcctttcttgcaaacaaggcaggagctgctctggttgagacagtgagaacttg

SEQ ID NO: 631197 - DNA, 656 bp, Homo sapiens
accaccttggtggccagttgatgccacccaaggaccagcatagggccaaagatcacccgaggtcacctgcctcctccacaaagatgccgtcttaggcagagaaggtggttgggagaaagctttcatattcaaatgagattcctgttatccacccatagataaccagcttaaagcagggtagggctaaaagctaatattttcccccaaccagataatctgctataaacaaataaattgcatcttccagcggggttgcattgtgagatccaggacacaggtgttgtggggagttttgacatgcagggaagtgacccccacatgcagctgcaaagtccttggggctcccccaagaaggcgggccagacacttggcagggacgaggtgggaggcagctcacggctcgggaatctccagggcatgggctcgcacaggtgggaagcacctgtgggcrgctctcaagcccccatctcattggtgcccacggtgggcgtctccccaccttccagctcgggctcctcgcgaagcgcctgttggagcacagtccccagggacctggtgggcagcctgtggctcctccggctgcccaccaggaagtagatgacggggttggcgctgctgcttacggacgaggagaggcgtgacaagctgaagcacag

SEQ ID NO: 631198 - DNA, 559 bp, Homo sapiens
aattccaggacttcgggaggctgagatgggaggatcttgagctcaggagtttgagaccagcctgggaaacttggcatgtgcctgtagtcccagctgctagtggagctgaggtggctgaggctgcagtgagctgagatcaggccactgcactctagcctgggcmagagagtgagatgagaccttgtctcagaaaaagaaaaaaaataattaattaataaaataaaataaaataaaataaataatagataaataaaagtgctcctttctccacagcattcccaaaagggtttttttttttaacttttttgatctttgtcaacctaatgcacatattttaaattttttccaagtgacagaaggaaacttttaagaagggaaccccaaattttgccaatttctgcaaacgaattaattacttctgtttaaggggacttctagatatttattccctttccccctcacctggaaagatttatcttgagaaccaatattgtgacagaattaacatcagctcagagtcacaaatctgggcttgatttgcatgtccaataatgttagc

SEQ ID NO: 631199 - DNA, 559 bp, Homo sapiens
aattccaggacttcgggaggctgagatgggaggatcttgagctcaggagtttgagaccagcctgggaaacttggcatgtgcctgtagtcccagctgctagtggagctgaggtggctgaggctgcagtgagctgagatcaggccactgcactctagcctgggccagagagtgagatgagaccttgtctcagaaaaagaaaaaaaataattaattaataaaataaaataaaataaaataaataatagataaataaaagtgctcctttctccacagcattccmaaaagggtttttttttttaacttttttgatctttgtcaacctaatgcacatattttaaattttttccaagtgacagaaggaaacttttaagaagggaaccccaaattttgccaatttctgcaaacgaattaattacttctgtttaaggggacttctagatatttattccctttccccctcacctggaaagatttatcttgagaaccaatattgtgacagaattaacatcagctcagagtcacaaatctgggcttgatttgcatgtccaataatgttagc

SEQ ID NO: 631200 - DNA, 513 bp, Homo sapiens
gttgactccttacattaaacttgagtattttttctgacattggacttgaatgagctctgttccatgggtaagctttttatgtggtgtttgaggcaatccagtatgagttgatggtatgcattgagtagtggtaaacctctgagctggtagttttcagtgtagaagcaagcactttttttttttttttaacatagccttactaatcaatgataaagttccaaaagggaagtttagggttcaccctgggctgacataraattctaaagactgcttctcagaactcactcatagctctgtatcaagtcttatctggattcatgaagaaatggttatatgatccaaaatgattctaacctctttaaactctggttcgccttcagtgaataatgactataacttgcctatgtaacaacacctatgttaatacttctaaaactaggtaacagaacttccagatgactttgctgtttgaactcccttagccataggagacttgtccttcactgctgttgg

SEQ ID NO: 631201 - DNA, 381 bp, Homo sapiens
aagaaatgaaattgagagaaaacaatacaaaaaatgaacaaaagctggctttttgaaaagataaacaaaattgacaaacttctaggctaagaaaaaagagagaagactcaaataaaatcagaaatgaaaaaggtgacattacaaccaatactgcagaaattcaaagggttattaaaggctggtatgagcaacagtatgccaatacattataaaagctagaaaaaaatgaakaaattcctagtcacatgcaacttatcaagattgaaccatgaagaaattcaaaacctgaacagaccaataagaagtaatgacattgaagccacaatacaaagtctcccagcaaagtaagcacaggaactgatgatttcgctgatgcatgtt

SEQ ID NO: 631202 - DNA, 585 bp, Homo sapiens
ctggtggcagagcaagactccatctcaataaataaataaataaatgtttaaatgcacataaaccttctctgtttatcttcatcaaacaccagcttcatcttagccctaacacattagtcatgagagttagctgcccaaaatcttaaacagttaccataatgaaaggataatcctcattgatgttttagtcagatatggtggaatgagtctacagggcacccatctttcagasagtagctcggagaaccagggccatttattgcaggtctttaatttctatgaaagagcgtgtgagactacagtggaccttttatggtcaggtctggagttagcgtatattacttgccacatccaagtaaatccccatggtaactacattgaattacaagaaatgctttcttccaataggcctttaaaaagaaaaatgatggtaaatatctagccagactctgtaccatctgtacttttaatgaatgaaaatgattcagttaatcattttccttattgatgaggtaatatcttcgttaatttgggcaaggcctctttcatacttgtataactcttcatgtctaccccatttgtttc

SEQ ID NO: 631203 - DNA, 585 bp, Homo sapiens
ctggtggcagagcaagactccatctcaataaataaataaataaatgtttaaatgcacataaaccttctctgtttatcttcatcaaacaccagcttcatcttagccctaacacattagtcatgagagttagctgcccaaaatcttaaacagttaccataatgaaaggataatcctcattgatgttttagtcagatatggtggaatgagtctacagggcacccatctttcagacagtagctcggagaaccagggccatttattgcaggtctttaatttctatgaaagagcgtgtgagactacagtggaccttttatggtcaggtctggagttagcgtatattacttgccacatccaagtaaatccccatggtaactacattgaattacaagaaatgctttcttccaataggcctttaaaaagaaaaatgatggtaaatatctagccagactctgtaccatctgtacttttaatgaatgaaaatgattcagttaatcattttccttatygatgaggtaatatcttcgttaatttgggcaaggcctctttcatacttgtataactcttcatgtctaccccatttgtttc

SEQ ID NO: 631204 - DNA, 571 bp, Homo sapiens
aagtcagggtcacagcctgaatggagcttttactttaatatgagagaggagaactaatggacatgtttaaatctaagtgttggaaattataaaagtatagaaagaatgttaatgaagacaagaaaaatacattttaccttattttactgaaacaggagaggactaggagctagttaatcagagagaatgaataaaacatctcttaagacatggtcaatgacatatctgatggaacttagtcccagaaggaagcacagctccttcaaaaggagatttgaaataagaagcctgaaaatcttcctgtgagttaacgttcaacagaaggtggcaggaagaaataaatatttcccacagagatgaacccattgcagagacaatagcacaggcatcccaatagaatagtgaaaatattggcatagcattttttttaaaaaggaaatgttgaaattcagatggaactgaatgtcatttctagactgtatctaaayatatataaagaatatatagagagaatatatatatatatatagtgtaattcttttgggtcaactgaattctcagatgctatctg

SEQ ID NO: 631205 - DNA, 600 bp, Homo sapiens
cctttgtgaggtaagtttcatgcagtgtgtgaggaatgttaaaatagaggagacataaatccatttcttatttcaaatgatacaacatgttgaaggaaaatatttgggggataaaagatgataaatccataaagagaattgctatttttaaaagtggtaaaagggttatgaaaaggctgacacagaattaattacacaatttctgtttataacatcattctaccaggctcatcagtggagacttatgctragaacttcaattatagtataggtttagactcaaagtttcttcatttgtttccattttaattgagctaatttataaacagcaaatcatatgaatgtacacagatcaatgaatattaccagttattaatatctagctaccactcagatcaaggtatagaaaaaattctaaaacactgggaaatgatcacaagttcagcaagatgacgtaacagaaaatcctacccctcaaccgcacacagaaacactgattaaataatgactggacaaaaatacttctatgagaatttcaaaactgagacaagacattgtaatgccccagatgagcacgaaaccaaaaacagttgcactgaa

SEQ ID NO: 631206 - DNA, 521 bp, Homo sapiens
atgtaagacctaaaactatgataatactagaagaaagcattgaggaaatcctttaggacattgctattagcaaagttttcttgagtaaaaagtcaaaagcacaggcaaacaaagcaaaaaaaatgacaaatggaattacatcaagctaaaaatcttctgcacaacaaaggaaaacaatcaacaaagtggagaaacaacctacagaatagaaaaaaaattgcaaactaytcaaccgacaagggattaataaatcaaacctataaggaacataaacaactcagtagcaaaaaaacaaataagcttatttttaaatgggcacagatacctgaatagacatttcttaaaataagatatacaaatgccccacaagtataaaaaatgctcaaaacagttaatcacccgaaaaaatgtaaatttaaacccccataagatattatttcaccccagttaaaatattatccaaaagaccaaaaaaaaaatgctggggaagatgcatatagagggggatgtttgcacactgt

SEQ ID NO: 631207 - DNA, 621 bp, Homo sapiens
accatgacaatgctcctgctcatttctgtcatcaaaaaagaattttgtgagagtttcaatgggaaattattaggcatccaccttaccatcctgatttagcttcttctgacttcttttttgttgcctaatcttagaaaatatttgagaggcatccattttcctcagttaataaggtggraaaaaaaaaaaacactgcatcgccatgtttacattctcaggacctcaattctctatagaagggccaaatggctggtatcatctctcacaaaagtgtcttggatttgacagagtctatgttaaaaaaataacatttatatttttatttttattttttaaatgccattttttataactccttcaagtccgcttgtataaacatttaatatataaaatttttggcaccagaaatctcttataaattgaaagataatgtaatcaatagttttaattgaccctttggaaatgaattcacaaaactgatgacactggtttcctttggtgataaaattttattgttttttctttgcattctttctggctttatattttaaacaactaataggaatcatttaaaaatataaacatcaaaaactaaaggataattgatataagtgatttcaa

SEQ ID NO: 631208 - DNA, 541 bp, Homo sapiens
agtagtttgcaaatattttctcccattctgcaggctgtctctttaccttgttgattatatcttttactgtgcagaagctttttaacatgatgtgatcccatttatccagttttactttgtctgcctgtgcttstgcttggcatattactcaagaaatctttgcccagaccaatgacctggagagtttccccagtgctttgttatagtagatgtatagtttgcaatcttagatgtaagcatttaatccattttgatttgattttttatatggtgagagcttagtttcattctcctgcaaatggatatccagttttctcagcaccatttattgaagaaattgtcttttccctgaagtattttcttagtacctttgtcaaaaatcagttcactgtagatgtagggatttatttctggcttgtctactctgttccattggtctgtgtctttatgccagtaccatgctgttttggtagttacagctctgtagtataatttagagccaggtaacatgattcctccagttttattctttttactcaga

SEQ ID NO: 631209 - DNA, 541 bp, Homo sapiens
agtagtttgcaaatattttctcccattctgcaggctgtctctttaccttgttgattatatcttttactgtgcagaagctttttaacatgatgtgatcccatttatccagttttactttgtctgcctgtgcttctgcttggcatattactcaagaaatctttgcccagaccaatgacctggagagtttccccagtgctttgttatagtagatgtatagtttgcaatcttagatgtaagcatttaatccattttgatttgattttttatatggtgagagcttagtttcattctcctgcaaatggatatccagttttctcagcaccatttattgaagaaattgtcttttccctgaagtattttcttagtacctttktcaaaaatcagttcactgtagatgtagggatttatttctggcttgtctactctgttccattggtctgtgtctttatgccagtaccatgctgttttggtagttacagctctgtagtataatttagagccaggtaacatgattcctccagttttattctttttactcaga

SEQ ID NO: 631210 - DNA, 559 bp, Homo sapiens
gggatgtttttaacatatcttagtttcagttcctactctccagctatgctgcagccttgaaaaaaaaataacagctaacattcttggtactagagggaggaggacagagcttgagttatttcaaaacctcattcacaaaaagctgtcattattatacctttctgctggctcccctaagaccctatttggaaggctgtctctatttgacctgactcaaagttgcctagtgtgagaaggctcccctcataaggcatttgtcaaacatatttactgacaaatgttttgaggtcacagctgtctgaagtgatggataacaatttgggaaaataatataattaacaaagagttgaaaattagaagctgaggaacaaaatacagttgacccttgaacagtgcagagtgttgggggcrccaacaccccatgcactcaaaaatctgcatataaattttgactctaaaaactgaactacttatagcctactcttggctggcagccttaacaataacataaacagttattaacacatattctgtgtgttatatgcattatatactatat

SEQ ID NO: 631211 - DNA, 615 bp, Homo sapiens
ggccatgagtgcacatgccaaggctatcaaggccctcataaagcccaaggaagttaagctcaagatcccaaagagtgtcagcaacaagctcrattgacttgcctacattgcccacctcaagcttgggaagtaggctcttgcccatgttgtcaaggggctcgggcagtgccagccaaaggccaagggtcaaaccaaggcccaggctgcagctccagcttcagttccagctcaggctcccaaaggtgcccaagcccctacaaagacttcagagtggatatctctgtctaccaaggtgaggacagaaggaatggtgcaacctccccaataggctgccatctgcatggggctggggtcctctggtgctatttgtacaagtaaacctgaaaaaaaaaatctgtcagcagagaattctacatctgcccatataaaaaaaacaaaaccgggtcttccattccaagatggtcgaataggaacagctctggtctgcagatcccagtgtgatcgatgcagaagatgggtgatttctgcatttccaactgaggtaccttgttcatatcactgggactgcttggacagtgggtgcagctcatggagggtgagctgaagcagggcgca

SEQ ID NO: 631212 - DNA, 631 bp, Homo sapiens
cccaaaggtgcccaagcccctacaaagacttcagagtggatatctctgtctaccaaggtgaggacagaaggaatggtgcaacctccccaataggctgccatctgcatggggctggggtcctctggtgctatttgtacaagtaaacctgaaaaaaaaaatctgtcagcagagaattctacatctgcccatataaaaaaaacaaaaccgggtcttccattccaagatggtcgaataggaacagctctggtctgcagatcccagtgtgatcgatgcagaagatgggtgatttctgcatttccaactgaggtaccttgttcatatcactgggactgcttggacagtgggtgcagctcayggagggtgagctgaagcagggcgcagtgttgcctcacctgggaagtgcaaggggttgggggatttccctttcctagccaaaggaagccatgacagactgtacctggaaaaatgggacactcctgcctaaatactgtgcttttcccaaggtcttagcaaccagcagaccaggagatactctcccatgcctggctcactgggtcccatgcccacggagccttgctcactgctagcacagcagtctgagatcgacctgcaaggcagtagcctcatgggg

SEQ ID NO: 631213 - DNA, 515 bp, Homo sapiens
atagtctttaaaatatttcacagagaagggatttccttatgttgccaggctgatcttgaactcctggatgcaagcaatcctcctgccttggcctcccaaaatttgggattaaaggcatgcaccactgcacctagcctaaaatctgtgtattgttccattttcacactgctaataaagacataacggagactggggaaaaaagaagtttaacggacttacagttctgcatggcgggggaggcctcacaatcatggcagaatgcaaggaagtgcaagtcacatcttacatggttggcagcaggcaaagacagagagcttgtgcagtgaaactcctctttataaacccatcagatcttgtgagtcttattcactatcagcatgagaagactacgtgagtatcatgagcartatgagaaagacccaaccccatcattcaattacctcccactgagtccctcccatgacatttgggaactgtgggagttacaattcaagatgagattcgggtagggacac

SEQ ID NO: 631214 - DNA, 605 bp, Homo sapiens
tgtagtgttaaaaaagacaatacagaacaacaaacaaaacaaaataaaaaattacaggaccacatagattcactgttgaattctacaaaaagtttaaagaagaaataatttcaattctacacacattctttcagagaagaaagtcgtttgaaactaatctgtgaggccataattcactctgatataaaaatgagatgaaaatatttcaagaaaaggaaactacaaaccagtaactcatgaatatgaatgtgaaatatttcagtataattttagaaaactgttatggaataaatgcttgggtgctcccaaaactcacatgctgaaactctaaccccacaaagtgatggtattaggaggtggagcctttgatagagaattagttcatgaggattctgccctcacatatgggattagagcccttataagaagagasaaaagagcttgctttgtctgttccctctcttggccatatgaggatacaagaagacaactgtctgtgaacctggaagagtgctctcaccggacatcagatctgcttctgccttgatcttggacttttctgcatccagaattgtgagaaataaattttgcttgttgtttaaacc

SEQ ID NO: 631215 - DNA, 446 bp, Homo sapiens
ggtgaaatatactactataatacataaaagcactatttcctttctctttgtttcttatcctaatttccctattttaaaaaatctttaaagccctgtcattggtatgacttgaactgaagcagaactacacttagcaaaagtcaatgtttaaactcaacattccactttcctttaactaagaatagtttttattaacttttagtaaaactcagtcctagtccaaaaaaagccctgctctctgatctttgtacaagaacatcataaagcaattcactttggattttctaatatcccatttctragaagaatggcagactattgaacaggtgtattttaggtcacgtggggactgcatccacctgaaaatccaccgttgacttatcaggaaactcagagatcaggatctttcacagagtagtcttttaagaagattcagttgtcaacag

SEQ ID NO: 631216 - DNA, 621 bp, Homo sapiens
tggggatcacctgttcagtctcaatgggctttgatgtgctcctggatcaagtgggtggcatggggagattccagatttgtctgatagctttcttttgcatcaccaacatcctactgttccctaatattgtgttggagaacttcactgcattcacccctagtcatcgctgctgggtccccctcctggacaatgacastgtgtctgacaatgataccgggaccctcagcaaggatgacctcctgagaatctccatcccactggactcaaacctgaggccacagaagtgtcagcgctttatccatccccagtggcagctccttcacctgaacgggaccttccccaacacaaatgagccagacacggagccctgtgtggatggctgggtgtacgacagaagctctttcctctccaccatcgtgactgagataagaggccccatgtaaatcttctgtttatatgattaaagtgtttggagttaacacaaaaaaattgacttgctttatacctttagtccttagatgggacctgcagtcagctcattcttcattcctttagcaggtggcagcacctgattatctattaatactctacgatacagccaagtgtattagtattatattg

SEQ ID NO: 631217 - DNA, 483 bp, Homo sapiens
tcctactgttccctaatattgtgttggagaacttcactgcattcacccctagtcatcgctgctgggtccccctcctggacaatgacactgtgtctgacaatgataccgggaccctcagcaaggatgacctcctgagaatctccatcccactggactcaaacctgaggccacagaagtgtcagcgctttatccatccccagtggcagctccttcacctgaacgggaccttccccaacacaaatgagccagacacggagccctgtgtggatggctgggtgtacgacagaagctctttcctctccaccatcgtgactgagrtaagaggccccatgtaaatcttctgtttatatgattaaagtgtttggagttaacacaaaaaaattgacttgctttatacctttagtccttagatgggacctgcagtcagctcattcttcattcctttagcaggtggcagcacctgattatctattaatactctac

SEQ ID NO: 631218 - DNA, 531 bp, Homo sapiens
atctttattaatcaaaataggaaccattacaatcaacacatttttggcaatgagaaataagtttgttaattctgtaacataaatatccacgctttgggatttgacaaatttttctgcattctgctggttgtgaaagtgtttctcctacaaaatgttgttgagatacttagttttggttgtttttgttttttgctttttgttttttgagggaggccagagttttattactactcaaattagtctccctgagcattcggggagcagagtttttaaggataacttggtggttggggggcagccagtgagccaagagtgctgamtgatcagggctgaaatcatagggagtcaaagctgccttcttgtgctgagtcacttcctaagtgggggtcacaagatcagatgagccagtttatcgatctgggtggtgacagctgatccatcaagtgcgggatctgcaaaatatctcaagcactgatcttaggagcagtttagggagggtcagaatcttgtagcctccagctgtgtgactac

SEQ ID NO: 631219 - DNA, 490 bp, Homo sapiens
gagttttattactactcaaattagtctccctgagcattcggggagcagagtttttaaggataacttggtggttggggggcagccagtgagccaagagtgctgactratcagggctgaaatcatagggagtcaaagctgccttcttgtgctgagtcacttcctaagtgggggtcacaagatcagatgagccagtttatcgatctgggtggtgacagctgatccatcaagtgcgggatctgcaaaatatctcaagcactgatcttaggagcagtttagggagggtcagaatcttgtagcctccagctgtgtgactactaaatgataatttctaatcctgtggctaacgttaatctagtccccaggcaagaaggaggtctgctttgggaaaggctgtctttgttcaaactataaactacaaactaagtttctcccaaagttagttcagcctatgcccaggaatgcacaaggacagcttggaggtcagaagcaa

SEQ ID NO: 631220 - DNA, 490 bp, Homo sapiens
gagttttattactactcaaattagtctccctgagcattcggggagcagagtttttaaggataacttggtggttggggggcagccagtgagccaagagtgctgactgatcagggctgaaatcatagggagtcaaagctgccttcttgtgctgagtcacttcytaagtgggggtcacaagatcagatgagccagtttatcgatctgggtggtgacagctgatccatcaagtgcgggatctgcaaaatatctcaagcactgatcttaggagcagtttagggagggtcagaatcttgtagcctccagctgtgtgactactaaatgataatttctaatcctgtggctaacgttaatctagtccccaggcaagaaggaggtctgctttgggaaaggctgtctttgttcaaactataaactacaaactaagtttctcccaaagttagttcagcctatgcccaggaatgcacaaggacagcttggaggtcagaagcaa

SEQ ID NO: 631221 - DNA, 490 bp, Homo sapiens
gagttttattactactcaaattagtctccctgagcattcggggagcagagtttttaaggataacttggtggttggggggcagccagtgagccaagagtgctgactgatcagggctgaaatcatagggagtcaaagctgccttcttgtgctgagtcacttcctaagtgggggtcacaagatcagatgagccagtttatcgatctgggtggtgacagctgatccatcaagtgcgggatctgcaaaatatctcaagcactratcttaggagcagtttagggagggtcagaatcttgtagcctccagctgtgtgactactaaatgataatttctaatcctgtggctaacgttaatctagtccccaggcaagaaggaggtctgctttgggaaaggctgtctttgttcaaactataaactacaaactaagtttctcccaaagttagttcagcctatgcccaggaatgcacaaggacagcttggaggtcagaagcaa

SEQ ID NO: 631222 - DNA, 591 bp, Homo sapiens
aaggacataaccaaaaaagaaaactacagaccaatatccctgaagaatataaatgcaaaaatccttaatgaaatactagcaaactgaatacaacagcatataaaaaagataatccactatgattaagtgggttttataccagggatgcagrgatggtttgacatatgcaagtcaataaatatggtacactacacaaagagaatttaaaagaaaaatcacaggatcaaggagagctggcaagatggccaaataggaacagcactggtctgcagatcccagcgagatccacacagaaggcaggtgatttctgcatttccagctgaggcacccagttcatctcatcgggactggttggacagtgggtgcagcccacagagggcgagctgaagcagggtggggcacgcaaacagggtctggagtgcatgcaaacagggtctgcagtggacctccagcaaactccacaagatctgcagcagagaggcctgactgttagaaggaaactaacaaacatgaaggaggagtatcaaaaccaacaaaaaggatgtccacttagagaccccatccgaaggtcaccaacatcaaagaccaaag

SEQ ID NO: 631223 - DNA, 535 bp, Homo sapiens
cccttccaaactatccttctattctccatctgagaaacctccttgaaatcttcctgattraggagaagcctcccaaaccaggactcttcctactagttagaaagaaccaaccgagacctcctcaggagccaaacagacaccctgcaatggagctacagacacagacaccctgtggtggagctacaaacagacaccctgcaatggggctacagacatcccaccacagggctacagaatccatcgagagaaggaaggaggtgttggcagtgtctaggatactcaccaatgcagacacaccacattgaggctacagacagacaccctctgatagagctacagttaagggacatctccccatgactatgtctccattgcaattaaacccatgtacattggattggcagctccccaccagtagagagagtaccagagtcagccaccagtccaagagaactaggcgaccacttgggctggcttctggatccattgctgaagagggggccactgaaccatgggcaggtagccacaagggcaa

SEQ ID NO: 631224 - DNA, 535 bp, Homo sapiens
cccttccaaactatccttctattctccatctgagaaacctccttgaaatcttcctgattaaggagaagcctcccaaaccaggactcttcctactagttagaaagaaccaaccgagacctcctcaggagccaaacagacaccctgcaatggagctacagacacagacaccctgtggtggagctacaaacagacaccctgcaatggggctacagacaycccaccacagggctacagaatccatcgagagaaggaaggaggtgttggcagtgtctaggatactcaccaatgcagacacaccacattgaggctacagacagacaccctctgatagagctacagttaagggacatctccccatgactatgtctccattgcaattaaacccatgtacattggattggcagctccccaccagtagagagagtaccagagtcagccaccagtccaagagaactaggcgaccacttgggctggcttctggatccattgctgaagagggggccactgaaccatgggcaggtagccacaagggcaa

SEQ ID NO: 631225 - DNA, 557 bp, Homo sapiens
tggtggataaggcacaacttcgtagccgaatttgttcaacttttgaagcattggttgtatgatgtgctgttggatgttgtcatggagaagaattgggccctttttattgaccagtgccagttgcaggtgttgcagttttcagtgcatctcatcgawgtgctgagcatacttctcagatgtaatggtttcactgggattcagaaagctgtagtggatcagaccagcgacagacaaccaaacagtgaccatgacctttttttcgtgcaagtttcaccttggaaagtgctttggagctgcttctcaatccagtcactgagctgttcattgccagttgtcatataaaatctacttttcatcacacattacaatctgattgaggaatggtttgttgttgtgtagaataagatgacacttcaaaacaatgatgttttctatttgcagtcagctcatgaggcacccacttatcgagctttttcacctttccaatttgtcccaaatgccaaatgactgtagaatggtcaacgctgagttctttggcaacttcttgcgtagttgta

SEQ ID NO: 631226 - DNA, 557 bp, Homo sapiens
tggtggataaggcacaacttcgtagccgaatttgttcaacttttgaagcattggttgtatgatgtgctgttggatgttgtcatggagaagaattgggccctttttattgaccagtgccagttgcaggtgttgcagttttcagtgcatctcatcgaagtgctgagcatacttctcagatgtaatggtttcactgggattcagaaagctgtagtggatcagaccagcgacagacaaccaaacagtgaccatgacctttttttcgtgcaagtttcaccttggaaagtgctttggagctgcttctcaatccagtcactgagctgttcattgccagttgtcatataaaatctacttttcatcacacattacratctgattgaggaatggtttgttgttgtgtagaataagatgacacttcaaaacaatgatgttttctatttgcagtcagctcatgaggcacccacttatcgagctttttcacctttccaatttgtcccaaatgccaaatgactgtagaatggtcaacgctgagttctttggcaacttcttgcgtagttgta

SEQ ID NO: 631227 - DNA, 531 bp, Homo sapiens
ctggaggctacaagattctgaccctccctaaactgctcctaagaacagtgcttgagatattttgcagacmctgcacttgatggatcagctgtcaccaccctgattaataaactggctcatctggtcttgtggcccccattcagggaactgattcagcaaaagaagatagccttgatgccctatgatttcatctccgacccgacccatcagcactcctggctcactggcttcttcccacccactaagttgtccttaaaaactgtgctcccagaatgctcagagggactgatttgagtaataataaaactctagtctcccacatagctggctgtgtatgagttactctctctatttcaattcccctgtcttgataaattggctctgtctaggcaacatgcaaggtgatcccattgggcggttacatgctgtcctgatttttggtcttatgaaagttttttttttctatgtagatagcttttcacttggtgtccctgcaggagggataacgggtggaactttctatgctgcatc

SEQ ID NO: 631228 - DNA, 564 bp, Homo sapiens
ctatttcaattcccctgtcttgataaattggctctgtctaggcaacatgcaaggtgatcccattgggcggttacatgctgtcctgatttttggtcttatgaaagttttttttttctatgtagatagcttttcacttggtgtccctgcaggagggataacgggtggaactttctatgctgcatcttgatctacctstcccctagaatacttattttgacatatggagaatatatatcttttaaagcatatatggtgcagtttcctaaagtgaaccacattacatcaaatagaaatttttaaacaaatatatattttaaaatgttttatttttaatttttgtggctacatagtagatggatatatttatggggtgtatgagatgttctgatataggtatgcaatgtgtaattatcttgtcatggagaatggggtatccatcttctcagtcatttatcctttgtgttacaaacaatccagttatactcctttagttattttaaaatgtacaattaaattattttgactacagcaccctgttgtgttatcaaatactggatattaata

SEQ ID NO: 631229 - DNA, 622 bp, Homo sapiens
ggttaatccctaagacaatggggaaaatgtctccagggcatgtcagagacctttgtgacagcccttcctatcacrggcctggaggcctaggaggtccaggtgcccctgctgtgtgcagccttagtgacttggtgccctgtgtctcagccactctagccatggctaaaaggggccaaggtacagatcaggctgtggcttcagagggtgcaagccccaagccttgacagcttccatgtggtgttgagcctacaggtgcaaagaagtcaagaattgaggtttgggaacctccacctagatttcagaggatgtatggaaatgcctggatgcccaggtagaagtttgctgcaggggtggggtcctcatggagaacctctgcttgggcggtgtgaaaggaagatgtggggttgaagtccatacacagagtctccatcggagactgcttagtggagctgtgagaagagggtcttcgacctccagaccccagaattgtaaaggcattgacagcttgcactgcacacctggaaaagctgcagacactcaatgccaggtcacaaaagcagccaggagggaggctgtaccctgcaaagccacagaagcagagctgcccaagagcatggaaacc

SEQ ID NO: 631230 - DNA, 622 bp, Homo sapiens
aaaagcagccaggagggaggctgtaccctgcaaagccacagaagcagagctgcccaagagcatggaaacccaccttttgcatcattgtgacccaaatgtgagacatgcagtcaaaggagataactttggagctttaagattggacttccctgctggattttggaattgtatggggcctttagtaaaactgctatggagaacagtttggaggttcctcaaaaaaattaaaagtaaagctaacatttgacccaacagttccactgcaccattgtattagtccattttcaagctgctgataaagacatacctgagactggataatttataaagaaaaaaggtttaatggactcacagctccatgtggctggtgaggcctcacaatcatggtggaagrcgattcccatgtagtcagtgccttttatctaggtacagcctcatccttttgttttggtcaatttctcccatttggaatggatgtatttatccaatgcctgtacccccattgtatctaggaagtaaccaatttcttttgattttgcaaggtcataggtggaaaggacttgccttgtctcagatgagactttggactgtagacttttgagttaatgctgaaatgagttaa

SEQ ID NO: 631231 - DNA, 542 bp, Homo sapiens
cattgaccaaagggattttggaaaaggcaagagaagcacagaaaagttttagaaccttttctcattcttcattacttaaamaattcctttacttatcacttcttttccccttttccaacgctttttttcccccgtgaaaattagatagactgaatctcacatgtgatacaaaaggacttctcatctgtgggaggggctcttattttctatacagtctctcacaaattcttcagtgtcctgggagtcaggcctgtaagcactggcaatcccagacagctaacaggtacactcactgggctgagggctccccagggatgagaagatggtgtttggatccctgcatgtttgtagaataccttcaagagtatgcatgtcataccagggcaggaagggcagaggtcacctaattttggtcttttcaccacaaattaacctcctggacaggctgggcagagatggtctgtgtgatctagtgaggctcaggggatgtatgaggtcactgtggaagggatgaggatacaccaaaggcaaaggcactgact

SEQ ID NO: 631232 - DNA, 583 bp, Homo sapiens
gttgagacaggtccattttgagaatgacagagcacacataaacttttgtacctgattatggaaggaattagttcattttcttgggcagtagaacaggtaatgccaagagaagcagctcccacacccagggttgccaaaaccacacgcagggtctgcatttctggagaaaggaagaccacagggcctcaggaaatctgagctgwaggaatcagcatctcccaaggtagaagtgaaaaggactgctttggaggtgtttccaggggtaaaatgtactgtaggaaaactgcatagaggcaaagaatgtgcagtggctaatagctgagaaatgtgattggcctacatattgtgacttaaatagtgaataaaaggatctgagtgatgcttcaattctcactatatatcagggtatgccatagcagaaaagggaacattagagctaaagagtttttttttggtctcacttatctatctgggaacacctctgccctccttgcagaaaacaggagtgtcatgtgggcaatactagggagtgtaagactcatccatgtcctcatagattttaaaacccagatatatacacaat

SEQ ID NO: 631233 - DNA, 391 bp, Homo sapiens
ccaatgtagccacatggcatcaaaaatcactgcaaaaaaattcacagtaatgaaaatatacaattaaaaataaaaatgtactgatrtcagtcaaactcacagtaaagatctaagaagccaaaatttccatttgccacccttacaatcaggaatgtttactaaaatgtacaacttattgggtacagattgtatattcatggcattcattctgtagatggtcttgtgtagcaaatctagattagaataagaaaacctatttttatattatgtatatttaatggtgtctaacttcattatggttttattttttggaataagaggtagtcgatagagacagctggcaagatggccgaataggaagagctctggtctgcagctcccagcgagagca

SEQ ID NO: 631234 - DNA, 549 bp, Homo sapiens
gccgaataggaagagctctggtctgcagctcccagcgagagcaatgcggaaggtgagtgatttctgcatttccaactgaggtacccggttcatctcactgggactggttagacagygggtgggtgcagcccacggagggtaagctgaagcagggtggggcatcacctcacccaggaagtccaaagggccagggaacttcctcacctacccaaggaagccatagggactgtgctatccagcccagaaattatgcttttcccatagtttttgcaacacgcagaccaggagattcccttgtgtgccaatgctaccagggccctgggtttcaagtgcaaaactaggtggctgtttggggagacactgagctagctgcaggagttttttttttttcccccagtgggacctggaacctcagtgagacagaaccattcactctcctggagaaggggctgatgccagaaagccaagtggtctcgctcagcaggtcccactcccatggagcccagcaagctaagaaccactggcttgaaattctcactgccagcacat

SEQ ID NO: 631235 - DNA, 613 bp, Homo sapiens
tagcacagtagggtgactgcggtcaataataattgtatattttaaagtaacttaaagaatgtagttggattatttataactcaaaggataaatgcttgagggcatggataccccattctccatgatgtgtttatttcacattgcatgcctgtatcaaaacatccatgtaccccataaatatatacacctaaaatgtacctacaaaaattttttaaaataatgaataaataacagacacagagatcaatggaacaaaacagaaagcccagaagtaaatgaatgcatttatagccaacgcattttttacaaaggcatgaagaatattaattaaggcaaggacattctcttccataaattatgctgggaaagccggatattcaaatgcagaaaaatgaaactagatccctatctctcaccatatatgaaaatcaaatcaaaatcagttaagaattaaaattatgaaactactggaagactaaagctatgaaactaaaactaaagactaaaacaatgaaactgctgaaataaaacaytggggaatgccccaggactttggaatcagcaaaggtattttgtgtaagaaatcagcatggacaaccaaagtaaaaataga

SEQ ID NO: 631236 - DNA, 463 bp, Homo sapiens
tctcatgttgaaatttgaccccaattatcggaggtgagcccactgggaggtatttgggtartggaggcagatctctcatgaatagattaatgctctctcttgaaggtgggtgagttatcaatctattagttcccttaagaactggctattaaaaaatgtctggcatctccccaactgccctcttgctacctctcttgccatgtgacctccacaataccctggcttccctccaccttctgcagtggaaacagcctgaagcccacagttgatgtagatgctgatgccacaatccttataccgtctgcagaaccatgagccaaataagcctcttttctttacaaattacatagcatcaggtattcctttatagcaacatgcaactgactaagatagaagcattagaaaataaattaaggaagtgagtacatgtaaacaagagaaattgttaaagaacttagccctc

SEQ ID NO: 631237 - DNA, 591 bp, Homo sapiens
ctgtgtcctggctttccttgcttccccaaaagataggtaaggttctgattccattgattcactggcaggtgtattcagagatgagggcagcccttcctggtgcatcttcctatgcaggcttataggggaggcctcagtttttacagtagtattgccttaccaaagcttcccatgtccttcagtatacagtttgtttccactaagaaaacatggatgttaaaactagtcttgctgccatgtaatactgaaaggtgtcagtgagatcaaaggaaagaactgagcacagtagcaagtcaatgtaagtgtcctaaagaaactatataaagccagcaaaacaatcaataatgctggaaggaaatgagagataaatagatgaacataacagcctataggcacataaaacagagagatagctgtggtggtgcacaataggaattcaacctcagcaagagtgagtagacttcacctctcttccatttgaataagacataaacttctcatgctgacmttacagtacctgggcttcttttgtccaaatgattgtagaatctgtgaaacagaagaagcctgggtgccatgagggtggaatga

SEQ ID NO: 631238 - DNA, 603 bp, Homo sapiens
gtccatgttacattttccctgtaaaccaaggagggtaatacccatctcacggggttgttgtgaggaataaataacatgcacagaaatcacccagcccagtgtctggcacataggaaatgacaatatattgctagtgatcattattgtccttactaatgcttttttctctgcatgcttctttacttactcattactctagagatacatcactattttgacctatggaacattccttcttattcctttttgtgtctayacttggtcaccatgatacttactaatttcctctcctttaaattttctgtgtttcatgggagatttgggggatggggcacaatggtttcagcctctcctcttccagccatcttgactctagataggccatcgttgtttctgagcataaaaacaatcatttaatttatgagatgaaaataagtcatttactgatgagttaatgggtgcagcgcaccagcatggcacatgtatacatatgtaactaacctgcacgttgtgcacatgtaccctaaaacttaaagtataataataataaaataaaagaaaagaaaaagaaaataagtcatttattaaagtgagtaagagatt

SEQ ID NO: 631239 - DNA, 603 bp, Homo sapiens
gtccatgttacattttccctgtaaaccaaggagggtaatacccatctcacggggttgttgtgaggaataaataacatgcacagaaatcacccagcccagtgtctggcacataggaaatgacaatatattgctagtgatcattattgtccttactaatgcttttttctctgcatgcttctttacttactcattactctagagatacatcactattttgacctatggaacattccttcttattcctttttgtgtctatacttggtcaccatgrtacttactaatttcctctcctttaaattttctgtgtttcatgggagatttgggggatggggcacaatggtttcagcctctcctcttccagccatcttgactctagataggccatcgttgtttctgagcataaaaacaatcatttaatttatgagatgaaaataagtcatttactgatgagttaatgggtgcagcgcaccagcatggcacatgtatacatatgtaactaacctgcacgttgtgcacatgtaccctaaaacttaaagtataataataataaaataaaagaaaagaaaaagaaaataagtcatttattaaagtgagtaagagatt

SEQ ID NO: 631240 - DNA, 536 bp, Homo sapiens
tctggcacataggaaatgacaatatattgctagtgatcattattgtccttactaatgcttttttctctgcatgcttctttacttactcattactctagagatacatcactattttgacctatggaacattccttcttattcctttttgtgtctatacttggtcaccatgatacttactaatttcctctcctttaaattttctgtgtttcatgggagatttgggggatggggyacaatggtttcagcctctcctcttccagccatcttgactctagataggccatcgttgtttctgagcataaaaacaatcatttaatttatgagatgaaaataagtcatttactgatgagttaatgggtgcagcgcaccagcatggcacatgtatacatatgtaactaacctgcacgttgtgcacatgtaccctaaaacttaaagtataataataataaaataaaagaaaagaaaaagaaaataagtcatttattaaagtgagtaagagattttcctttagactaccatggtccatattttggctc

SEQ ID NO: 631241 - DNA, 505 bp, Homo sapiens
tatggcaggcaggtgtccagatgggcaatgcctgctgggagctctactgcctgaaacattagactcagcttgatggacagatgcccagtgacaaggtcattggtggagaggatgacttcttcaccaccttcttgtgtgaaaccggtgctggaaaacakgtgccccagccagattttgtggatctggagcctgtggtcattgatgagatctgatgtcccaaactgacagctcttccacccagagcaactcattactgggaaagaggatgctgccaacaactatgcctgtagtcactataccattggccaggggatcactgacctggggatagaccagatctgcaagcttctgaccactgcacagaacctcaggacttcctggtgttccacagctttgttgggggcactggctctgacttcacctcactccgcatggagtggctttctgttgactacggcaagaaatccaagctggaattctttatctactcagcccccacagctgt

SEQ ID NO: 631242 - DNA, 481 bp, Homo sapiens
ctgttgactacggcaagaaatccaagctggaattctttatctactcagcccccacagctgtctataattgtggtccagctctaaaatttcatcctgatcactcacactaccctggagcactcagactgtgccttcatggtggacaatgaagccatctatgacatttgccgctgcaacctggacatcgagcatccaacctcagccaacctcaactgccacattaccaaatcatctcctctrtcacatcttctctgcactttgatgggcccctcaatgtggacctgatgaagttccagaccaacctcacaccttaccctcacatccacttcccccggccacctactcactcatcatctctgtagagaaggtataccatgaacagctgtcggtggccaagatcctcaaagcctgctttgagcttaccaaccagatggagaagtgtgacccccggcatagcaagtacatgggctgctgcctgctg

SEQ ID NO: 631243 - DNA, 580 bp, Homo sapiens
agatgtgtggccttatttgtgggctattttgttccattggtctatgtgcctatttttgtaccagtaccatgctgttttggttactgtagtcttgtagtatagtttraagttgggtaacatgatgcctcaagctttgttcttttcgcttaggattaccttggctattcaggctctttttttggttccatatgaattttaaaatagtttcttctagttctgtgaagaatgtcatcgatagttagataggaatagcattaaatctgtaaattgctttgggcagtatagccattttaataatactgattcttcctatgagcaggggatttttttccaagggccaaatgtcccatgtttatttacatatgaaatgtgtttcatacaattatgatggatggagtacataacacctgacagcagcaagactgttcgaggaactgaattttgactacagtgtatcatgcaagtatctatatatacacaaaagaattccttttcttaaaaaaagagtacaaaacatgttcagggataaatacaagatataaaatgcaaaagaaaacacaaaacaaaaccaaaaaataga

SEQ ID NO: 631244 - DNA, 540 bp, Homo sapiens
agatcttacatttaggtctctaatccatcttcagttaatttatatatatggtgaaaagttttggttcagtttcattcttctgtatatggctatccaattttcccagcaccatttattgaataggatgtcctttccccaatgtatatttttgctgactttgtcaaagatcaattgattgtaagtatgtggcttatttctgggtttttcattctgttacattgatctatgtgcctattttttgtaccagtaccatgctgttttggttactatagcattgtygtataatttgaagtcaggtaatgtgatgcctccagcgttattctttttgcttaggatttctttggctatttgggctcctttttggttccgtatgaattataggattgttggtagaaaatgacattggtaattcgatagatattacattgaatctgtaggttgctttgggcagtataatcattttaacaatattggttcttctaatccatgagcatgggatgtttttcaatttgcttgtgttgtctatgacttctttcatca

SEQ ID NO: 631245 - DNA, 540 bp, Homo sapiens
agatcttacatttaggtctctaatccatcttcagttaatttatatatatggtgaaaagttttggttcagtttcattcttctgtatatggctatccaattttcccagcaccatttattgaataggatgtcctttccccaatgtatatttttgctgactttgtcaaagatcaattgattgtaagtatgtggcttatttctgggtttttcattctgttacattgatctatgtgcctattttttgtaccagtaccatgctgttttggttactatagcattgttgtataatttgaagtcaggtaatgtgatgcctccagcgttattctttttgcttaggatttctttggcyatttgggctcctttttggttccgtatgaattataggattgttggtagaaaatgacattggtaattcgatagatattacattgaatctgtaggttgctttgggcagtataatcattttaacaatattggttcttctaatccatgagcatgggatgtttttcaatttgcttgtgttgtctatgacttctttcatca

SEQ ID NO: 631246 - DNA, 599 bp, Homo sapiens
attgaaaaaaaagagtgagttgcctgtgggtttgtcatatattgcttttattatgttgaagaatattccttctatggctagtttcttgtggatttttactrtaaagggatgctaaattttacagaatttttttgcatctattgagatgaccatttggttttgtccttaatgctgtttatgtgatgtatcacatttattgatttgtgtatattgaatcattcttgcatccctgggaaaacctcacctgaccagggtgtgttatcttttggatgtgctgtgggatttgatttgacagtattttgttgaggattttgcatcctatgttcatcagggatattggtctgtagttttcttgttttattgtccttgtctggttttggtaccagtatgatactggcttcatagaatgagttagggagaattccctcttcctcaattttttggagtagtttcaggagaattgacgttagttctttgtatgtttggcagatttggctgtgaatatgtctggcccagggctttttattttccccttttggagatttttcgttattattggttcagtcttgctacttattattgatttgttcagaagtttt

SEQ ID NO: 631247 - DNA, 599 bp, Homo sapiens
attgaaaaaaaagagtgagttgcctgtgggtttgtcatatattgcttttattatgttgaagaatattccttctatggctagtttcttgtggatttttactataaagggatgctaaattttacagaatttttttgcatctattgagatgaccatttggttttgtccttaatgctgtttatgtgatgtatcacatttattgatttgtgtatattgaatcattcttgcatccctgggaaaacctcacctgaccagggtgtrttatcttttggatgtgctgtgggatttgatttgacagtattttgttgaggattttgcatcctatgttcatcagggatattggtctgtagttttcttgttttattgtccttgtctggttttggtaccagtatgatactggcttcatagaatgagttagggagaattccctcttcctcaattttttggagtagtttcaggagaattgacgttagttctttgtatgtttggcagatttggctgtgaatatgtctggcccagggctttttattttccccttttggagatttttcgttattattggttcagtcttgctacttattattgatttgttcagaagtttt

SEQ ID NO: 631248 - DNA, 599 bp, Homo sapiens
attgaaaaaaaagagtgagttgcctgtgggtttgtcatatattgcttttattatgttgaagaatattccttctatggctagtttcttgtggatttttactataaagggatgctaaattttacagaatttttttgcatctattgagatgaccatttggttttgtccttaatgctgtttatgtgatgtatcacatttattgatttgtgtatattgaatcattcttgcatccctgggaaaacctcacctgaccagggtgtgttatcttttggatgtgctgtgggatttgatttgacagtattttgttgaggattttgcatcctatgttcatcagggatattggtctgtagttttcttgttttattgtccttgtctggttttggtaccagtaygatactggcttcatagaatgagttagggagaattccctcttcctcaattttttggagtagtttcaggagaattgacgttagttctttgtatgtttggcagatttggctgtgaatatgtctggcccagggctttttattttccccttttggagatttttcgttattattggttcagtcttgctacttattattgatttgttcagaagtttt

SEQ ID NO: 631249 - DNA, 578 bp, Homo sapiens
tcattcttgcatccctgggaaaacctcacctgaccagggtgtgttatcttttggatgtgctgtgggatttgatttgacagtattttgttgaggattttgcatcctatgttcatcagggatattggtctgtagttttcttgttttattgtccttgtctggttttggtaccagtatgatactggcttcatagaatgagttagggagaattccctcttcctcaattttttggagtagtytcaggagaattgacgttagttctttgtatgtttggcagatttggctgtgaatatgtctggcccagggctttttattttccccttttggagatttttcgttattattggttcagtcttgctacttattattgatttgttcagaagttttatttcttcctggttccatctcaggaggccatatgtttccaggaatttattcattttctgtatgtcttctagtttatgagcacatagttgttcataatagtctctgatggtcttattttcttctgctaactttaaattttatttgatcttggtttttctagatgcttgagttgtgaaattaggttgttaatttgt

SEQ ID NO: 631250 - DNA, 578 bp, Homo sapiens
tcattcttgcatccctgggaaaacctcacctgaccagggtgtgttatcttttggatgtgctgtgggatttgatttgacagtattttgttgaggattttgcatcctatgttcatcagggatattggtctgtagttttcttgttttattgtccttgtctggttttggtaccagtatgatactggcttcatagaatgagttagggagaattccctcttcctcaattttttggagtagtttcaggagaattgacgttagttctttgtatgtttggcagatttggctgtgaatatgtctggcccagggctttttattttccccttttggagatttttcgttattattggttcagtcttgctacttattattgatttgttcagaagttttatttcttcctggttcmatctcaggaggccatatgtttccaggaatttattcattttctgtatgtcttctagtttatgagcacatagttgttcataatagtctctgatggtcttattttcttctgctaactttaaattttatttgatcttggtttttctagatgcttgagttgtgaaattaggttgttaatttgt

SEQ ID NO: 631251 - DNA, 606 bp, Homo sapiens
agactgctaagtgaagtcaaaggtagagctcatatgttacctacatgatgagggaagccttcttagaaagattgtgggggttttatatatttttaaaatttttgtacctgaagtctttaattgtttttatgtgcttttaattataatacccaaaaaatgtgtataaggtaatgcattaaaggaacttagtggtccgagaggaaaaggaataaagacttgtagacatgtggatatatattttggaaggttaggaggtgagagagagacagatgcatttgaaaagttgaaataagtttagtatttttagaatatgagctaccagaaaagagtacctgcagatgaagctggagagggaggcaggacctgcctagcagaggattgtgtacaccatatgtaggagtttggagtcagtttctactaaagagttgaaactcttctcaagctctgctgtactgctttctttctcttccagtgggacctggtatgtgaatctcagtcactaaaatcaatggttcaatccctatttatggctgggtcactkctgggaggtctaatatatggccatctttcagacaggtgagtgtcatctcactttctttggggctg

SEQ ID NO: 631252 - DNA, 581 bp, Homo sapiens
gctggtgttactgctagaccaaggagccctctggtggccctgtccaggcatgacagaaggctcacactcttgtcttctggtcacttctcaccgtgacccttcagctcctatctctctatggcctggtttctcctaagttataattgtagagtgatgattattataatattggaataaagagtaattgctacaaactaatgattaataatattcatatataatcatatctatcatctatatctagtataactcttcttattttatatattttctttattatactggaacagctcctgctctcagtctcttgcgtcggtgcctgggtggmttgccgcccacactaattaaactaaagagcttctgcacagcaaaagtaactatcatcagagtgaacaggcaacctacagaatgggagaaaatttttgtagtctatccatctgacaaacagctaatatccagaatctaaaaagaacttaaacaaatttacaaaaaaaaatcaaaaagtgggcaaaggatatgaacaacatttctcaaaagaagacatttatgcagaaaacagacatatgaaaaaatgttcatca

SEQ ID NO: 631253 - DNA, 579 bp, Homo sapiens
gacaaaggagaatgtggcagcgggggaggtgactccaaggttagcctcaatgtcaccaaaagcgggtaaacagtatgtaaagtaataggtgcatctgctgggagacttatggtttggacctcctaataccagtcgaattgctagtccagtcccttcgcaaacttacgtatgcagttactgtcaatgcaaaaatatttgcaaccattatcaatttagtgacacactaacaaacctaatgaaaatagtcactgaaaatctctgcctttgaagaagttgtggatcagacgttataagtctatgaatctcaattttggaaagtaggaagggatgttaagtttctgaaacagcaagttagagaagagaggggagrgagcagggcggtaagcctgtcttgttttttttcaccattactttaccagaacttctaccaaatattgcttagtatcagcaataacctgactccacatagacctgtctagggtgcccactaaaaagttttctccatctaaactctcaggttctattcaagttaaataacaaatcaaaggctgtcatatgaactacacattttttgccttc

SEQ ID NO: 631254 - DNA, 572 bp, Homo sapiens
ggttatatcctctggtcttgttaatgactgtggcttcactgtctaagaaccatatatattattctggcctcaccctcctttctggatttctgacctgcaaatctcagtgatccctcaagtctattctcagtacctccagaaggagctgttttttctgtctgtgaggttaggtaagagaaaataacatccttttatgggctcttcccttagtgtttttaaaagtctgttttcctttcattatatccgtcagccaatgctacagtgcaagagacaaaataattacgctyattattcagattgctatcattcctgtggaaaaattctatttaacgtttctaaatccattatctttgtcatgctccactacatttgcattatgcatgccaaaaatattttaatattgtaatgtcttctaaaatttaaagtaggtatacagcattattaaatacaaaaaagagtatgtttaaaacatgagatcaattcaaagttaatggacattcctaaaatgtggagcaacttttgttcatctacaccctttgaaactaagtagtatgaggaatatttgcataatc

SEQ ID NO: 631255 - DNA, 473 bp, Homo sapiens
atcttagttgtttctgaatcagtttggtatatctgtatttttttacttattttcatatgaaaaggaaattattttatgttagaattttacattttagaatgctaccacattgtactgtattaatgtacatgctaattwtttgtaatattaatcttgcttatgttcaaagtatctgagaaaattggtttaggtagtttatgcaactttagtttttgtagtacagtaaatggaaaagttaatcaaaggcattttttagagcaaaattgcactatgcaagtgcattgccaatctttggagagcatgtatatattatagttgactgtatagttatgtatgtattgttgggtcttgaaagtgaaattatagattcaaagtcatttatccacttaattttttaatgcttggggagtatttgttttcagtgaattttcattataatatttaattctgtttcttttcaaaggcaataatgg

SEQ ID NO: 631256 - DNA, 473 bp, Homo sapiens
atcttagttgtttctgaatcagtttggtatatctgtatttttttacttattttcatatgaaaaggaaattattttatgttagaattttacattttagaatgctaccacattgtactgtattaatgtacatgctaattatttgtaatattaatcttgcttatgttcaaagtatctgagaaaattggtttaggtagtttatgcaactttagtttttgtagtacagtaaatggaaaagttaatcaaaggcattttttagagcraaattgcactatgcaagtgcattgccaatctttggagagcatgtatatattatagttgactgtatagttatgtatgtattgttgggtcttgaaagtgaaattatagattcaaagtcatttatccacttaattttttaatgcttggggagtatttgttttcagtgaattttcattataatatttaattctgtttcttttcaaaggcaataatgg

SEQ ID NO: 631257 - DNA, 599 bp, Homo sapiens
gacctttttcccactcaggcaggggaataatgcccaaagctatttacattgcacacgcaacttacttcatttctctgttagtggaatgtggggttttgcatatgctatgagaackaaaattagcatttagacgtccatgttaaccatgttaacatgtagtaaaacatttcaattctataaaataattaatttattaaaatgtatctcagaaaaaaatatattgtctgaatttattgttattgcaaataaaagaagtggagaaaggtgaatgccaggattctcattttcttgcctctcctttcccaggtgttctgggtttctgagtggctttaatggtctcaggggtactaaaagtgtggtggtgaaggtggaggattatcaaaaggggcttctgtagctggggtatgtccagcaacatagatttcaaggtggaaaactaggtctgaaatgaatatagtgacaaccagtcttcaggtgagtcacaatggagagagatctccaggtcctgactgagctaagaacagaccaaatgtccatgggccacagatgacagtagcagaagttagccaaatctgcagggccaggaaattcccaaccct

SEQ ID NO: 631258 - DNA, 599 bp, Homo sapiens
gacctttttcccactcaggcaggggaataatgcccaaagctatttacattgcacacgcaacttacttcatttctctgttagtggaatgtggggttttgcatatgctatgagaacgaaaattagcatttagacgtccatgttaaccatgttaacatgtagtaaaacatttcaattctataaaataattaatttattaaaatgtatctcagaaaaaaatatattgtctgaatttattgttattgcaaataaaagaagtggagaaaggtgaatgccaggattctcattttcttgcctctcctttcccaggtgttctgggtttctgagtggctttaatggtctcaggggtactaaaagtgtggtggtgaaggtggaggattatcaaaaggggcttctgtagctggggtatgtccagcaacatagatttcaaggtggaaaactaggtstgaaatgaatatagtgacaaccagtcttcaggtgagtcacaatggagagagatctccaggtcctgactgagctaagaacagaccaaatgtccatgggccacagatgacagtagcagaagttagccaaatctgcagggccaggaaattcccaaccct

SEQ ID NO: 631259 - DNA, 599 bp, Homo sapiens
gacctttttcccactcaggcaggggaataatgcccaaagctatttacattgcacacgcaacttacttcatttctctgttagtggaatgtggggttttgcatatgctatgagaacgaaaattagcatttagacgtccatgttaaccatgttaacatgtagtaaaacatttcaattctataaaataattaatttattaaaatgtatctcagaaaaaaatatattgtctgaatttattgttattgcaaataaaagaagtggagaaaggtgaatgccaggattctcattttcttgcctctcctttcccaggtgttctgggtttctgagtggctttaatggtctcaggggtactaaaagtgtggtggtgaaggtggaggattatcaaaaggggcttctgtagctggggtatgtccagcaacatagatttcaaggtggaaaactaggtctgaaatgaatatagtgacaaccagtcttcaggtgagtcacaatggagagagatctccaggtcctgactgagctaagaacagaccaaatgtccatgggccrcagatgacagtagcagaagttagccaaatctgcagggccaggaaattcccaaccct

SEQ ID NO: 631260 - DNA, 617 bp, Homo sapiens
gtatatacccaaaggaatataagttgttctgttataaagacacatgcatgtgtatatttattttagcattattcacaayagtaaagacgtggaatcaacctaaatgctcatcaatggcagactggataaacaaaatgtggtacatatacaacatggaatactataaaaccataaaaaagaacgagatcatgtcctctacagggacatggatggagccggaggctattatccttagcaaactgaatcaagaacagaaaacaaaatacagcatgttctcacttataagtgggagctaaatgatgagaacacttggacacatagaagggaacaacacccactggggcctatcagagggagtaggaggaggcagaggatcagaaaaaataactaatgggtactaggcttgatacctgggtgataaaataatctgtaccacaaacccccatgacacacatttacctatgtaacgaatcagcacatcttgcacatatacccctgaacttaaaagtttaaaaaaagaaatatgcaaaaagaaaaaacaatgttatatgagtctaacaattccataagaaatgtataaaaccaatgaagttcaaatttaaaaaatggcagccagt

SEQ ID NO: 631261 - DNA, 617 bp, Homo sapiens
gtatatacccaaaggaatataagttgttctgttataaagacacatgcatgtgtatatttattttagcattattcacaacagtaaagacgtggaatcaacctaaatgctcatcaatgrcagactggataaacaaaatgtggtacatatacaacatggaatactataaaaccataaaaaagaacgagatcatgtcctctacagggacatggatggagccggaggctattatccttagcaaactgaatcaagaacagaaaacaaaatacagcatgttctcacttataagtgggagctaaatgatgagaacacttggacacatagaagggaacaacacccactggggcctatcagagggagtaggaggaggcagaggatcagaaaaaataactaatgggtactaggcttgatacctgggtgataaaataatctgtaccacaaacccccatgacacacatttacctatgtaacgaatcagcacatcttgcacatatacccctgaacttaaaagtttaaaaaaagaaatatgcaaaaagaaaaaacaatgttatatgagtctaacaattccataagaaatgtataaaaccaatgaagttcaaatttaaaaaatggcagccagt

SEQ ID NO: 631262 - DNA, 617 bp, Homo sapiens
gtatatacccaaaggaatataagttgttctgttataaagacacatgcatgtgtatatttattttagcattattcacaacagtaaagacgtggaatcaacctaaatgctcatcaatggcagactggataaacaaaatgtggtacatatacaacatggaatactataaaaccataaaaaagaacgagatcatgtcctctacagggacatggatggagccggaggctattatccttagcaaactgaatcaagaacagaaaacaaaatacagcatgttctcacttataagtgggagctaaatgatgasaacacttggacacatagaagggaacaacacccactggggcctatcagagggagtaggaggaggcagaggatcagaaaaaataactaatgggtactaggcttgatacctgggtgataaaataatctgtaccacaaacccccatgacacacatttacctatgtaacgaatcagcacatcttgcacatatacccctgaacttaaaagtttaaaaaaagaaatatgcaaaaagaaaaaacaatgttatatgagtctaacaattccataagaaatgtataaaaccaatgaagttcaaatttaaaaaatggcagccagt

SEQ ID NO: 631263 - DNA, 617 bp, Homo sapiens
gtatatacccaaaggaatataagttgttctgttataaagacacatgcatgtgtatatttattttagcattattcacaacagtaaagacgtggaatcaacctaaatgctcatcaatggcagactggataaacaaaatgtggtacatatacaacatggaatactataaaaccataaaaaagaacgagatcatgtcctctacagggacatggatggagccggaggctattatccttagcaaactgaatcaagaacagaaaacaaaatacagcatgttctcacttataagtgggagctaaatgatgagaacacttggacacatagaagggaacaacacccactggggcctatcagagggrgtaggaggaggcagaggatcagaaaaaataactaatgggtactaggcttgatacctgggtgataaaataatctgtaccacaaacccccatgacacacatttacctatgtaacgaatcagcacatcttgcacatatacccctgaacttaaaagtttaaaaaaagaaatatgcaaaaagaaaaaacaatgttatatgagtctaacaattccataagaaatgtataaaaccaatgaagttcaaatttaaaaaatggcagccagt

SEQ ID NO: 631264 - DNA, 494 bp, Homo sapiens
aacgaatcagcacatcttgcacatatacccctgaacttaaaagtttaaaaaaagaaatatgcaaaaagaaaaaacaatgttatatgagtctaacaattccataagaaatgtataaaaccaatgaagttcaaatttaaaaaatggcagccagtgaattgtatctttgttgtttcttcaccttttacaatatgtctttactgtttgctatggagtctgttgaaatctgtgctgttttgtgaattgcttggaccaacagaatgcaatagtagtggtatctgggacttccagggccaggccttgagaccctgtagctctgttttcagttagagggaagccaaccaccatggaaagaagtccaggccatcctgctgaggagaggggccctagaacagtgctttccaatagattcctgttataatggaagtactytacattgtccagtgtggtagccactagccacatgtggctattgggcactccaaacataacttgta

SEQ ID NO: 631265 - DNA, 548 bp, Homo sapiens
gggtcttgctatgttgcccaggctagtctcgaatgcctggcctcaagcaatcatcccacgttggcctcccaaaggattgagattacaggcgtgasccaccatgcctgtcctagatgatttatttttgaagcaagtctgaggagcattgcctaacactgcatgcatggtagacatttacaaaagtattggttggagcttcaatatttcatttatcaatgaaagaaatgtagatgctttaaactattgaatagttttctttgtaaaaattcttagaaacaagggtgcatattaatttgttcttgtaaaagaaattgaatggaagaatactgtgataatattttactccttcaggaatactgaattcaaaaggtgaatattgttcgtaaaagaaacacaaaatttactgatttgttaaaaggttgttttaaaaggagctataaatagtttgaattccaattaatgtttaataacataaaagggtggttaatctctaaaaggaaaaacattaaaggctaattggatttttaaatctgaaaagcccacaggga

SEQ ID NO: 631266 - DNA, 549 bp, Homo sapiens
agcaaattcgagcgttttcttattcgagttcaaaatgggttgtaaagcagcaaagacaactcgcaatatcagcaacacatatggcccaggaactgctaatgaatgtacagtgcagtggtggttcaagaagttttgcaaaggagacgagagccttgaagatgaggagtgtaccggccagccattggaagttgacaacgaccaattgagagcaaccatcgaaccctcttaaaactccacaagaagttgccgaagaactcaacgtcgaccatgctacagtcattcagcatttgaagaaaatkggaaaggtgaaaaatctcagtaagtgggtgcctcatgagctaactgaaaataaaaagtttttaaaagtgtcttctcttattttacgcaaaaacaacaaaccgtttcttgatcggattgtgatgtgagacgaaaagtggattttatatgttaactggtgatgaccagctcagtggctggatcaacaagaagctccaaaacacttcccaaagccaaacttgcaaaacaaaaaggtcccggtcactgtttggt

SEQ ID NO: 631267 - DNA, 614 bp, Homo sapiens
gaattcaacatgacatctgaaactgtatcaggaggtaagacttccccctcagacaaatggggctgcctctgccagtaggaaagtttcagggaaatgtaaaaggcttaagcttctcagcctttcctgtggcgatccaaatgttcccatctcatttctgaaggccccacttcttccataccaatgcccttaccttagcatgtgagacccagtactggccagtaattggtattacaactcagcagcccttacaataaaagctctaggtttgagtcttagctatatctacaaaatacaagatattcccctagagttgccatagattttgtgatgctttgtttttttcccaatttttccctttgctttcaatttgtcctttyccctgtgtatatgctctagacattcaaaagagccagtcctcctaacgatctctgtaatctctaccatgaccatagtgactatgtgccacagccccttgatcttccaacactgtactccacttgtattccatgactccatgacattactagtaatgatgtaagcaattgtgacatcaccacttgccaccaatgataagcatccattttccctgacaaggaagttatttgtatatacat

SEQ ID NO: 631268 - DNA, 587 bp, Homo sapiens
ccctcccccacctctatttgcaaaacccgatcaaggaaaagacagcctggccaacaaggtacatagaagtcagcttcctgcggtagtgaagggtgaaagatagtggatttagaggggaaaagaacaactagtttagcaggcttcttgctcatgcaacactggaaaaagcatgaagagctttaaagggtgctaagtaacaaccgaaaacactcatggaactatcaggagcatcaaatttatgggatttcacttgcctattgctgaaggcttctaggatagtaaaaaagtggtcttacacctgcaacacggtcagtyccctaaaggtgacctgcagaggggtataccacaccaagatttgggctctactgcttaagtactcaacaaatgttacttttttccccttctaatgctggctcctttccaatgttttttcattcaaaatgaaaaacattcaaaatgaaattcgttttcattcaaaaatgaccctaaaagaacagcaactatgtactcgtgggcaggaaaattcctctgaagccccacacctttttacttaaaatacaggcaaatttgcatgctacttacaatgt

SEQ ID NO: 631269 - DNA, 607 bp, Homo sapiens
atattgtggcataacatcagtttcaattattcagccacaatgtttttatactttcttatcctattacctggtaagcaagtgggggaagaacttagggtcaaagactcttagatttcatataattgtgattctgcagaagtatttatttaaggaaaacgtatgttttaatgaaaactacatgcattccattatttttagtaaatcaacatgaaagaatgtagcatgatcaatatatatgcatcgttacttccacaaaagtagctcaggcaacacaccaaacctttgatagattaatcaaggattacgagttctccatagattatcttccttaaaaagggatggcatgttaaaattgacacctgttatctgaagatgttctgacccaggttactcgtccttctgtttttaaatctcagcttcacactccctgcaaaaatacyttttgttttcatagagctttataattgttgaaacatttgcatattcagtacttttcatttccctggacagagcctgtttaggcaacagtggcatgttgggaagactagagtacaattcacaaaattgggttctaggcccacatctaccatttaacctatgttttgag

SEQ ID NO: 631270 - DNA, 582 bp, Homo sapiens
ctagtccctaaattctcatcttttcaggcatttgcaactagaaccacaaaaaatcataaaagcattatcagcaagtatacctattttgcattgctagtgcctttagcataaaaagtaaatttttttcttaaaaagcatgaggaaatttaaaatgaaaccrtgtatccagagtcctaaaacagtcccctaacctttggcttatatctgaagctagtcagaggtaaatagaattgaataggacccaggaaaagttgacttcagattgtctcccagaggaaaaatggcacaggactaaaacaaaaaaaacagttcatttctactaagtgatacagtaataatattgtataagccatagaattagttaaatacatcatttaattttctttccaaattgtccacttttaaaagattatgcttaaatttggctcatataaacaccaaaaattacagagcagcatatttaagtgaaacaataatagtacagttcagcattatagtttttgaaccacttccacatatatatatatttttcacatggtatgttaaaccctcttatgatgtcgttttattatagaggaagga

SEQ ID NO: 631271 - DNA, 620 bp, Homo sapiens
cagtttactttttccccccattttaagcacagctttaccatctctgcaggtatttgtttcagaaaaacaggaaatgctctctctctctatatatatatataggaatttataatgtttcatagataaaagggctggtttgtcaaaatagccatttttagaatatttattaaaaacaatgaatgaagttagagtaccaaggaagaacacaaaggaaaccacatatattatagttggaggaattatatcatgycatatttatatcatccaactttacaacgattaaagttcacaggataaatctaatactaaataaatggtaatagtagtagatggagacaagatatcattgtataacatagaatctgtcataaagtgttttttccctgcacattttcataatggctgttagaataatgattacaacatccctcattttgatgtctctggaatatactttgacaaactgagattccaaagtacatccattatctcacctgatgtcattttacttgatgaagaattttaataagttacccaaagttaaataacaatagcacatgatcttgtatgggttcaggctcattcttggtctccactctccttcatgtctcacagaattc

SEQ ID NO: 631272 - DNA, 620 bp, Homo sapiens
cagtttactttttccccccattttaagcacagctttaccatctctgcaggtatttgtttcagaaaaacaggaaatgctctctctctctatatatatatataggaatttataatgtttcatagataaaagggctggtttgtcaaaatagccatttttagaatatttattaaaaacaatgaatgaagttagagtaccaaggaagaacacaaaggaaaccacatatattatagttggaggaattatatcatgccatatttatatcatccaactttacaacgattaaagttcacaggataaatctaatactaaataaatggtaatagtagtagatggagacaagatatcattgtataacatagaatctgtcataaagtgttttttccctgcacattttcataatggctgttagaataatgattacaacatccctcattttgatgtctctggaatatactttgacaaactgagrttccaaagtacatccattatctcacctgatgtcattttacttgatgaagaattttaataagttacccaaagttaaataacaatagcacatgatcttgtatgggttcaggctcattcttggtctccactctccttcatgtctcacagaattc

SEQ ID NO: 631273 - DNA, 526 bp, Homo sapiens
tatgttattttccacgtgaagaactcctgtaaaccttgccgttttgaaactcagtgaggcaggcgtcttagacaagctgaaaaacaaatggtggtacgataaaggtgaatgtggacccaaggactctggaagcaaggtcagtcgctgcagttcggggcctcctcttgtgttcacaaagcagtaaacgggagcaattgtcaaaagtatatggaaaccataaaaactgaacattatacactcaaccactgcctaaattaaaagctaatgtcataaatttcaaccatagggatggtcttyccaggaaactgcaacctgctccccaatattaagacttttaaattaaattaaaactgcaaaaattcttaaataataaaattccttttacattattctcaaacttacgtaccactcataaaagtagtgttttttggggtagtttttttgtttgttttggaggcaaagacttcatgaaatcatgttatttcaagaactgatatattctcaaaacaagaaatcagtagtaaac

SEQ ID NO: 631274 - DNA, 559 bp, Homo sapiens
aaatcacagatgaagtgcaggtctaccacagcaacaggtctgaatgggaagaagtttcaccaatgcctagagccttaacagaattttactgccaggtgattcagtttaataaatacagagacccatggttttctaatctatgtgcttgaacattctaaaacgagtccagttctagtaacctaaagtaaatttgttaaccaaaatgataggtaaaaagatctatacatcttaatgaaataaaacattcctgcttttagttattatgtatgtacaccatatatgaataaacagtttccaaaaacttaaaatacaaaatatattttaccaaaaattatactgaatataatttaacyttggggaatccagaatacttagtattttcacatgaaactacaaatcatagactctgacactttgatttttaaagtactctgtccataaaagatttgtactgtttagatgggagaaacctctagagagagtaaaaatgaattacactgtatcttatatgaagtaaaaaataaatcagaggtgagaatattgttactgcgggtatgag

SEQ ID NO: 631275 - DNA, 598 bp, Homo sapiens
gaattcaaagtacaacaaatcttcctgatataacaaatgtccatgtaaacatcaaattctaacacataaagagctcactaacaatgttgtgacaatttccttcttttgtatgactgcttcagtggagagtccgtatgcctggcatcttaaaattcaggataaataaattaagaataaataatgtgattcaaatatatcctgtacttttcattaaagaagtcagtgagagagaaagtcaaaattaggttatatcagacaatcagtcaacaaaatatgccatgagctaaaagtttartgcttaagtttctggatttgatgaccattataatatatttatctacataaatagatattatgttttgatgttaaaatgaattacttagtttgaatgagtcttttcatgtaagttcctaatcacatagccactattgttcctgctcagaaaacaataacctctaacaaaaatgtatcctttggaaaggattttctttcattacatgctctaacaatccaactttaaggatttgcaaggcttctaaacacgtttgtaacaaaatggtagacctgtattactggaagacgatgactattttttggc

SEQ ID NO: 631276 - DNA, 541 bp, Homo sapiens
aaagtttgttaatactgattcaccattcttgtccccattactgaggtaaataaacagagtcaagtggtggacaggttctgaacagaactgatagtgtctggttatgatggggatagctagttatcttactttctcactgcactcatcaaaaaaacaccacccaccatgaacaaaatccaaaattataaaatacaacttgtatttttccaaaaattacaagtttcttttgatctactttggcaaaagtatagacatgcttctttgacaaacatgtctatacttactgacaaagtcataagtaacaatctgtaagatcaawctgatcattacattttaaagagcatatttcataattacttcctattttatgggagagttcctccaagaatatccagcaaggatgcaccattcctccagaatattccaccatttatttaccaaatcttttttgtctgttacattctaggcactgtgttattcacaacagtaaacaagaaaagccccacccacataaaatatgtgggaagtgctgtcagaggaa

SEQ ID NO: 631277 - DNA, 501 bp, Homo sapiens
tgttgtaagggactagtatatagtaactcatttaatctttataaatcccttgaggcagacacaattagtgaccgaattttgtagatgacaaactgggtgtagagctgtctagtaatttggacaaggaatacaggtsgtaagtgacagagccaggatctgactctggagcctgcacttctaacctctacacatagagacagaactatcatcatcactgaattaggctacagtgtgcatttttgttttgttttggtatgttttcattttttcctattacataaataacagaatggtgacatatttatcaaacagttgatttttttttctagcttatctctaagagtaaattattttctttgggaaggttgggtgtgctgtgttgctaattttgtccccactggatgtccttgaagtctctattttgaccttggcccttattagatcttgggctggaatgagtgactgagatccctgagctctccctagtggttaaagtgtata

SEQ ID NO: 631278 - DNA, 538 bp, Homo sapiens
gaattctcaggtcatatgtttgtttcttttattacaaatgtcattttcagccttgcatgatacatcattrtcatctacattttgttctcttgagaactgaacatatatccaaatcatccttatatttgtcatcgtagtttgcataacaccttgcgtacattggatattcaagtatgtgtcacactgaagtgagtgagtgactgtgaacatatgttctaagatcatatttgaaacagatttaagtccttttgattatctcattaattgtgaacacattacagtggaggctctggtgtcacctagggacaactgcagaacaaaggcactcgtttctctagtttggagtgtttagctctagtgctggctcatagcagagccccttcccaggagccacctcacccaaggctatgacccttcactgaggacagctggcattcaatgactggttaaggtggggctcaaatgacctgctctcctccctacatttgagacatctctaaagagtcttccagctttgaagttccccatgagatttact

SEQ ID NO: 631279 - DNA, 617 bp, Homo sapiens
ccagttaagtttcttctattcaaatctccaacttctatctcagaatctgtttcctggagaactaaatccaaaagacatatttatcttcactggattattttctagaatactttggcctcattcagatgtgacttggaataggtttgaatcctgcctttattgtttactaggtctgtgaaattggaatgttarttatgttcttctaccagttacaattatgttcagtggcatataatgaaaaccctaaatcaatgctggctaaattatattaagaacatctttctctctcatacaggagaagacaagaagtatggtacagaatccttatgattgggcataaaccagctctgatcctctaaggtgtggtctttgccttaaagatcccaaatagctgctggagttccagcctcacatgcactaacagaatggagaaagcaaagaatggcatgatcccacctttaaagaacacttcccagaattttctaaaaatctttctttatattatcattgactagaacatagtcatatgtcgacacctaactatgtctaaaaaatgtagtctttcaatcacacccatggcaaaagttttgttctttataaaatggtttgctataaag

SEQ ID NO: 631280 - DNA, 621 bp, Homo sapiens
ttatacacgggctagaggagatagtgtctgatttaattagtgcccacagattggtttgaccaggtgtgacatttacatagcatgcagggaagctggctaccccaccctaatcttattatgccaatgggctttcggcttgactggcaccatgttgtctgctccttactgtacacgtggctggcaaagagaagggaagatgaagccaccattttgatcatgcctagtcccagagagctttatcctattggcacaactgccagcattcaccctggcaagcttccagcttgcttgtctatgtctgcagctcgattttacaggctgctctttgttagaaaagaaaataatctggggsctccttttcattaaaaggagaaccttaccaaggactttcttacctttactatctgcctaagtaatttctttttaactcctatatcactctcttttctggtttaaactccctaacccctatgtatgatgtgactggcagcagtagctcatccagagcaaattcacacaagttttaggtgactcagaccctctttcttactctaagttttcccatgaagacagccagaactcctgctctggctgctccttcccaaatcaggtgacctcaaa

SEQ ID NO: 631281 - DNA, 486 bp, Homo sapiens
cccaaacccctttggggcaaacatttactttccaagatgggtacctgcttaatatttacctaacctttgaattcatgtttccttctaatagcccttttctcctgtgaaagctacctaaatctttaaccaataacttgcacctatatagtcctatttcaggggtttcaacacagcccatacttactcaaacaagtcctagcaaaaaatctgagcaatctcttgagggggggtgacttctatagtacgtagataacctcctcatttgctccaccttcacagagctcacacagcatcatgyggtacaaaccttaacttcctaacaaaaggaaaataatttttgtctaatttaaaggttacttaaaggctatatataaaacaagttaaagggaatcaggaaataagagagacataaaaaatgttataaaggtaaagtgatattcttggtaaaaaaggttataaataagagattttatatgagaaagaatc

SEQ ID NO: 631282 - DNA, 616 bp, Homo sapiens
ttttataagtgtttctttaagcaacttcttagtatcatatctcagaagttcaatttttgtagtgttctgctactttcagctttttctcccctggataaggcctaagataataaatctcttcagtttttgtcagctcctgtaactttttcctctaattctaactgttattatggcttaaggctaaaatgttccatcttgaaggtcaaaaaattaagcaattttttcctctaacataattctgtaccrtggcttttcttgatatgtctaagttctcaatgtaataaaaagtaaacttctcgtgttgttcctaagagtcatgtcttcccctgctatactcataaccatgaacacattcttcctgtgtctaatgaaattgaaacattttttaatcaagtttaacttccaggttatctaaatgggcttccgataagggaaaaacagccacactgcaaaagacttttttgccttttcggtaactgggttaagaaacaaacttttatcttctagaattcagcagtttcaccttcaaatgatgctgcaaacagaatatcagtcccccccaattatgcctgctacctttgcaaatctctcctagattcagctggacacagttttg

SEQ ID NO: 631283 - DNA, 638 bp, Homo sapiens
tggaaggttagacatccaccccaataccaaagatttgtcattgttgttctgtcaggggaagaatgtagagtcctgataagataaataagcaacaacaaggaaggtgccccatgtttggaagggccccaggtggggaagaacaatgaacaattgttctgagaggtgactaattacaaacaacccatggacacaatgacctccttccatacatagccccaacagcaccacctggttctgcatgcagccccctctagcaagaccctataaaacttccctccagcccccrtctctttgcagatagccccttctctgctgtgctgcctgttgcaatcttgcaacatatttttttactttctgtaataaatctgcctttctttacccatgactgtcttggtaaattcctttattgccaacaacatcagccctagctagtcacaacctgtgacatcttttcccactagaacgtttatctccatgcaagcagggactttattgacggctgcctccccagagaccaaaacaatgcctgtaatattgaaggtacccagtaagtatattctgaacaaataagtaaataggttcagaagctacacatgctagaatcttaaggtcttgagctgggaaaactgagaaatgga

SEQ ID NO: 631284 - DNA, 379 bp, Homo sapiens
gcttgcttgggacttagcctctataataaatgtttttggagaaccctgactaacacagtatggaagcaattactggatttctatagctctttaaaaatttattagagctggcatgtagtaaaatgctttatagatatttacatgtcagataggaacatktagtgaaaagagtatgagctttgccaatataagcttcagaacccattcatttatttgttcaaaatatatttattgggcaccttcaatatttcatatctgagttccaattaactctaccatttactatgtatcatttgacaataaatttgaattttctgcatgcccaatttcacatctgtataatagggtaactaccataatggtcattatgggtcatgtg

SEQ ID NO: 631285 - DNA, 582 bp, Homo sapiens
tataagcatatgctttgtgtgcctatggaaacttcagttttcctgacttactttccttgaattagtttctgtttctctttctataccctttcccatccctttatcattttcttgttttgagttcatatttttacctcctcctatttgttaggcacagtgccaggtattgaagatcctgtttttagagcagatgggcgactatctcctaggtccttagaggtggggcagattgtagaaggaaaaagccaagttttgaccaataattctttcacttgtcctgcaacatagggtactaagaagcagcatattggggctggtttaatgatgtgtgtaaatcactttgcttcagttttttatattgtggcttataaacatggtacctcatgaatatttttagtcacctctagagraaagctgaatgcttgcccaagctattggataatttgaattacataggaatgttaggccagagtattaattaaatgtgatcctctaaaattatttaagtgttctaggctcagcatggtggctcacacctgtaatcctagcactttaggaggctaaggcaggaggatcacctga

SEQ ID NO: 631286 - DNA, 593 bp, Homo sapiens
actgcacccggccaattatgtattttttaaaatattctcaacaacacaactagatagatatagtttatctgcagtttacaaatgatgaaaataataaaaaattagaagttatttacctcaaatatgtcacaagtaaatgctgaaccarcactggaactcaagcctgattctaatgccctactttttctttcatttcgcattgttaaaataaaagctttagataaataaaatttaacggagtttgagcaaagaacaattcatgaatcaggtagcattcaaaactgaaggaggttcagagagctccactccagcagtgtgaccagcaagcttttataggttgaacatggaaacaaagtagagaaattacctgattgactatggctaggcatttgccttatttggatattgtctgatggaagttccctatttgtaaccagcaggttggttggctgtttgtgattggctaaggcttgtttttggtttttggtttttaagtcagttacaataaatgtttccaagttaagtttcagttctcttacataagagggctggctacagagggtaacctcaggctaatagccatcttatttaac

SEQ ID NO: 631287 - DNA, 578 bp, Homo sapiens
tgcaacttttatgtttagagctgaatttgcagttcatgatattcacaattatctgatctttacctatcttggatttctgacctcatgtttaaaaaatctttcttaattaagatatatgtgattttcctttctacttttaaatagcccaacttggaaaagtgcttgcctttttcttcttcactaaagccataactaattaatgcaatctaacactgatctttttcaaccaattatcttgtaaaagtctaacctcagaaggcatatagtctatggtccaagatcagcattttaacagctactttgttaccagaagagaatggattggaaaggagggggattgtgttgggcatatactcaaaactrtgttagaaataatacctcttatgtatagtaataatattaatcatgtagtgaaatcctatataagctatttatacaacttgtacattttgctatttaacacaattatatagccttcaatgttagcccttatgaaaaatatacttttattccaatgagctcaacatttatgaaaattcaaaaggaatttaatattaaatgtcaggaaaacaaatgtt

SEQ ID NO: 631288 - DNA, 525 bp, Homo sapiens
ttgttgttttcatcacctcagactttaagggcattaggtttgtagccataatgacctgcasgtgtatttcagacctcttgttctcaacagaaaaaatccttcgcttttaagtcatgtcttgttgtctgctcagatagaacttttaaaggatgattaagaaatttgagctaacttgcccagctcaactttccttccagttttcaattttagtgtagaagcaaagtttatttatttatgtgtttgtttatccactcaccatttattatctaatgtatgtgagctatgttttaatcactgagtataaagataaataaaatggtctctgtactcaaggagttcataatctcttaatggtgatatacatataggtaaataagtttaataaagtgttactgatgtcattataagaacatatgcacagtatggttgaaaacaaagaagcaggtcaactctcgctgggtgggaatagagtcctgagggagctacatgaaggagtttatatttaacctgatcttgaaagtgtta

SEQ ID NO: 631289 - DNA, 535 bp, Homo sapiens
ggaagcagcagcaaaggctcggaggtaggaaaaagaacattggctctctgtgttggatgtgggtgggttaggcggaagacttagcttctaaggttcgtgagttatctgcaaggagggctacagtgagatgtgaatggtaggtagggtggtggtcatcaacaatttattaggctaagggatttgaattttattctatacatgatgggaagccattgggaagatttaaagtaatggattactcggatggttaataaagctagaatttcatgagtcaaaaaagggagatttagtggaactgttagtacagatgcttcatccttcttatgtacgtgttatctgcagataagtaaggtaaatttaaaaacttgatgtttcaaaaagaagatgagcttatttattgacagtcaatcctctcattgagagaatcacatagaagtgaccaagtcacctgtttatcattttcytcaaacatgagattggatgttttaaagaacaaccttgtggctccataaaaactttcagaattatttgcaaa

SEQ ID NO: 631290 - DNA, 646 bp, Homo sapiens
tttagttttatcagaggaatggtctaaatcaacacagaaaataattggagtattacttcatttttaaaaatcttcatatgaatgtttaaggctaaaataaaatggattataaaaataattttctccaaaatagagaattttagtagttaaccttaatttattgaaagacaaatttagttcctcayagacacaaaataaattaaaacaattccttttttcccagcagaatttttaaaaaaatagatgtctctatcttcattcctacatttcaatctggtcctttggtgattaaactaacaacttgatattgtcacattaggaagtacatgcattattttacaccactaatgtggcacttacttggaaatgtaggagtagctaattatttaattagcattcagtaaatgggcagtctaattcttaagaagagttaatactaaaaactcttaagtgtgtggtttacttatgagaactgtttactctccaagtggatcagatcatcacaaaatggaaaagcacgttgttgacctgaaataatatgaacaaattttaagacaataaacactttagtaggctaattagtggtaaaatatgcaacactttttattagttggctaaatgtcattttgcttgcaaatcaattatt

SEQ ID NO: 631291 - DNA, 477 bp, Homo sapiens
taattgcaaatcccgcattcctttctccatcatcagtacctgctgaccacatcgccatctccctttgcagttgctatgacactatttcaggcccttgttactccattgagactaagagttatttayttccctttctcccagttattctttctcctttgcccttttacacacggctccaagattaaccttttggaaattcagctgcaatcccatcactccccagatcagtggctgtggagcacacttacaagattggaaaagcccacataactcacacacaaaaatattcttctaatttcctggaactgttttttcccccatcacctgctaaacatttatataatgataaagacctgttttccatctccccccaaccaatcctgcaatccacaatagttgaagtggtcggggaggcagagcagcatttcttttctctttagttctggtggaaccaatattttttctttatacataaaa

SEQ ID NO: 631292 - DNA, 596 bp, Homo sapiens
ttaggtttctgatcttttaggccacccttggttcttaagtgaatagtgaatgtacagcatgatgcaggcaaatgctcatgttaatatgatgtggcacatgagtacaaatggggacttacaacgtaaatattaaaagagttattaactaaactaacagagtgctatgtaaattacattctatcctcctaccttgttcctagcttcacaatggctgaaagaccaagtttgaatttaggaatccttagttcctctgggttctatgctggaatgtggcagcactggatgtatggcccctaccckctggctgaggcctgcggcctgctccattctttgcataccctgggctctgtcatgtatcacaaagggttttacattcacatgggtggatgacattgtcagcacatccaagctctgtccatcttgtataaatagttgctctggacctagtgaagaccaatgaagtgagcacactctggaagcagttctgggctggttgggagggaattttgcagtcccacatacctggaaggtggtctacaacagggaacgtgtgagatctgtccccttggtcttacccatggaggaaggcaagagcc

SEQ ID NO: 631293 - DNA, 563 bp, Homo sapiens
ttccaatcactgtggaaagcaaagggggaataggcatatcatatggcaagaatgggagcaagaaagacagtgtgtgtgggggggtgctacacacttttagactaccagatatcatatgacctcagagcaaragctcacttatcatcaacaggatgacccaagccattcatgagggatccaaccccataatccaaacacctcccactagggccccctccaacacaggggattataattcaacaagagatttgggcggggacaaatatccaaaccatatcaggtggtgcagaggaagcagcagtagctggcccaggactaggacatctcatggctctctgacagtgggcaggtggagaaatggactggaggcaggattcaagtttccactaaccaagcacaaggaaagcttatctagaaaaagggattataagaaaacctaaaatatcttttcaggagcctctgacgaagaaaagttctgcctctaacccagcaggtgcaataacaagtaataagagtaggactgataacagaggttatagaagtgtcaaggctattagcaacac

SEQ ID NO: 631294 - DNA, 563 bp, Homo sapiens
ttccaatcactgtggaaagcaaagggggaataggcatatcatatggcaagaatgggagcaagaaagacagtgtgtgtgggggggtgctacacacttttagactaccagatatcatatgacctcagagcaagagctcacttatcatcaacaggatgacccaagccattcatgagggatccaaccccataatccaaacacctcccactagggccccctccaacacaggggattataattcaacmagagatttgggcggggacaaatatccaaaccatatcaggtggtgcagaggaagcagcagtagctggcccaggactaggacatctcatggctctctgacagtgggcaggtggagaaatggactggaggcaggattcaagtttccactaaccaagcacaaggaaagcttatctagaaaaagggattataagaaaacctaaaatatcttttcaggagcctctgacgaagaaaagttctgcctctaacccagcaggtgcaataacaagtaataagagtaggactgataacagaggttatagaagtgtcaaggctattagcaacac

SEQ ID NO: 631295 - DNA, 610 bp, Homo sapiens
taggtggttgtatatcttgccccagggcacacaactagtaagaagatgagcttagaatagaacctattttcttgaaactccattgtctctctatgaaaatttttactaactagattattaaattgactagaacactcaattccaagatatcatgcttggaagtagcacagttttgatactttatttggtcaatattttctattttattactagaagaaatacacatttagcctttgttcaacattataaggttattatcgctgggaattataattgaaaagggagcccttccttcattaaccagaatgcctccaagtttgagagtgacccaactacattattgaccaattttgcagagtctstctgctgactgtaaattaaaatatgcttgctctatagaaataaaaacagccaatattattttactgcttttttaatttctccttagcttttctattatttaaagaagcagaattgatttttatttcctgtttcaaattactttagtcaagaaacaatgagccatagaattcctgtaaggctttgtgatttgttcaaatgattggaaaatcattttgatcatttaaaaaatgtagggatgctttctaat

SEQ ID NO: 631296 - DNA, 574 bp, Homo sapiens
tggtgtagcattacttctgctggttttttgttgttgggtttgtttgtttgtttttctttttgttttggtcaagatagtcacaggacctgtgcagattcaagaaagagaagtagactcctcttgattggggagtggcaaagccactttgcaggagaacactgagggggatgggagatattgcagccattttcgcaatatataatcttccacraactcaaacctctttgaatcgacatccaatgatgtctccactacacaaaactgcttgataggaaaaacaacaacaactaatcaatcaatgcatgagattttaaacatgtatattaatggctaaaatatttctatctgattaaacttctaattcagccatgaataggcaatatcttatactgctcttacgaaccaagctcacttaattatgcatagagaaatggtcaaaactcaccttttatatagcctctactataagtccttgtgttgctgtgaacctgacacctatttgtataactaggcccagcttgctacccaaccagatcttcaactgtctgctcttccttcaccagttcccacataa

SEQ ID NO: 631297 - DNA, 574 bp, Homo sapiens
tggtgtagcattacttctgctggttttttgttgttgggtttgtttgtttgtttttctttttgttttggtcaagatagtcacaggacctgtgcagattcaagaaagagaagtagactcctcttgattggggagtggcaaagccactttgcaggagaacactgagggggatgggagatattgcagccattttcgcaatatataatcttccacaaactcaaacctctttgaatcgacatccaatgatgtctccactacacaaaactgcttgataggaaaaacaacaacaactaatcaatcaatgcatgagattttaaacatrtatattaatggctaaaatatttctatctgattaaacttctaattcagccatgaataggcaatatcttatactgctcttacgaaccaagctcacttaattatgcatagagaaatggtcaaaactcaccttttatatagcctctactataagtccttgtgttgctgtgaacctgacacctatttgtataactaggcccagcttgctacccaaccagatcttcaactgtctgctcttccttcaccagttcccacataa

SEQ ID NO: 631298 - DNA, 584 bp, Homo sapiens
tgttggggtaatgggatccgaatattcagctatttgaactagattaccctacggagacacttctactcctgtgtgtctagtgattcccatcttaatctttggaatatctgttgtcagttctctataaagcttttggaaaatacagcatgtaagcacatcacagccacatatttatctggtaaggtaactaatacctagattcaattgtaacrattgtcatttgtgtaaggtgcaataatggtatagtattccttatcttatagagatacacttggaaagattatagatgaaataaaaaataaaagctcaaacccaagtgtcccaagaaaaagaataattttacagtgatctacctaatgagtgtgatcatctcttgagaataaacatgttaaatactttttttcctacctcccttcaacccctctttatagttctttatcttatgccacagtgggattttgtctccaattcattatacaagacttgcaggaagaatgattacgcgctgtttctcaaagtttggtttcctactgtttgcactggaggtgttccaaaccaagggctatttttttagttcttacaag

SEQ ID NO: 631299 - DNA, 617 bp, Homo sapiens
tggaggtgttccaaaccaagggctatttttttagttcttacaagtctatttcaaagactaattttttgtattgataaggacaaattctgagtaaccttctaagggagtcctttaagggataataaaatttgatgctcataaactgaaactaacatatcatgaggtcacttagaatcagactgcacaaaatgcttgacaacactcaaagtccctctgcgtaaatggatatgcakatcattagaatccccaaaattttccagagaaaaactaattattactgaatcatccatgttgatttaacctggttggggtttttgattcttattaattaatgtatttgtacaatttttacttttgctttttttttggtctttttatgattgctatttctcattattatttttagttttttcctcttcaatatgattggagttcttttgctcactagaaaataaagatagctgtagtgggtgagctaagagtttgtaactcaatgttacgtgggctaaatccaaagcatctcagaaccattgctctttgaaagctcgtttcccttaaatagatctggaagttgtattagtttcctattgctgctgtaacaaatcaacacaaacata

SEQ ID NO: 631300 - DNA, 567 bp, Homo sapiens
gtgagggtggggtatgcaagaaagggaagagtaaaggaaactccaagatttttaactcaagcatctgaaaaaatagaatttatttttaccatggagacataactgtggaattaacagattttaaggaaatgaagatttcattttgggacataatgtatttgagatactttttagacgtccaagtgaagatgtcaaatagagagatatatgagcctagagttcaggggagagctctggaccagagacatagatttggtgataatcaatgtataaatgtatttaaagagaatgagtgtagaaagagtagagatctgaggactggatctaggacctgccaacatttagggtttggggagataaatggaattagcmaaggagactgagaaaaactgaccaatgagaaaaaaaaaaacttgaagtagtatcctaaaagtgaagatgctgtatcaaaaagaaagcatttacagtgagttaaatgctgctgataggtcaagtaagatgaggactgagaactgcccaaaggacttagcaacatggaagtctttggtgactttgaaaaaagaagta

SEQ ID NO: 631301 - DNA, 609 bp, Homo sapiens
tgagagcaatcagctgggaaggacaagtacagaaaargcagagggtaaatggatttaggggtctgaaagtcaatgaggagcaagtatacctaaggagtggaatagtgaaataaagttgagaagtgaagatttggaggaggtttgtaactggagtgttgtaagccatattaaggactttatacttgaacctacaggataagagagagctaaaaccctgtttttcagggaagacaatggcacaatttaatttggtttgcaagaaagacagttctggaaagtatgaacaggacagactgaaaattgtattggtggatatacagaccatgtgttggtacctataatgtcttcttagaatcaggacatatagttcaccctgtaaaacgaaactggcaaataaaaagtttcctaaagaaatgttgaaaaatctgaacccatcatgagttcccattaagcttatctaactggctttcttaattttcctaggtacctcacataaatgaactcttgtgctctgaaagaaaagtttgttcttgccctgcctcaaggtcagcagaaagaaaatattctcttacaacatggcatgtaagaaatagagaaaagaggaaagaa

SEQ ID NO: 631302 - DNA, 496 bp, Homo sapiens
ttatctgggtgagtggaccaggaatgattgtggggcagcactacaaaccatttaatattgggtcatgaattgaaatgagagcaatcagctgggaaggacaagtacagaaaaggcagagggtaaatggatttaggggtctgaaagtcaatgaggagcaagtatacctaaggagtggaatagtgaaataaagttgagaagtgaagatttggaggaggtttgtaactggagtgttgtaagccatattaaggactttatacttgaacctacaggataagagagagctaaaaccctgtttttcagggaagacaatggcacaatttaatttggtttgcaagaaagacagttctggaaagtatgaacaggacagactgaaaattgtattggtggatatacagaccatgtgktggtacctataatgtcttcttagaatcaggacatatagttcaccctgtaaaacgaaactggcaaataaaaagtttcctaaagaaatgttgaa

SEQ ID NO: 631303 - DNA, 579 bp, Homo sapiens
gacaaaggagaatgtggcagcgggggaggtgactccaaggttagcctcaatgtcaccaaaagcgggtaaacagtatgtaaagtaataggtgcatctgctgggagacttatggtttggacctcctaataccagtcgaattgctagtccagtcccttcgcaaacttacgtatgcarttactgtcaatgcaaaaatatttgcaaccattatcaatttagtgacacactaacaaacctaatgaaaatagtcactgaaaatctctgcctttgaagaagttgtggatcagacgttataagtctatgaatctcaattttggaaagtaggaagggatgttaagtttctgaaacagcaagttagagaagagaggggagggagcagggcggtaagcctgtcttgttttttttcaccattactttaccagaacttctaccaaatattgcttagtatcagcaataacctgactccacatagacctgtctagggtgcccactaaaaagttttctccatctaaactctcaggttctattcaagttaaataacaaatcaaaggctgtcatatgaactacacattttttgccttc

SEQ ID NO: 631304 - DNA, 579 bp, Homo sapiens
gacaaaggagaatgtggcagcgggggaggtgactccaaggttagcctcaatgtcaccaaaagcgggtaaacagtatgtaaagtaataggtgcatctgctgggagacttatggtttggacctcctaataccagtcgaattgctagtccagtcccttcgcaaacttacgtatgcagttactgtcaatgcaaaaatatttgcaaccattatcartttagtgacacactaacaaacctaatgaaaatagtcactgaaaatctctgcctttgaagaagttgtggatcagacgttataagtctatgaatctcaattttggaaagtaggaagggatgttaagtttctgaaacagcaagttagagaagagaggggagggagcagggcggtaagcctgtcttgttttttttcaccattactttaccagaacttctaccaaatattgcttagtatcagcaataacctgactccacatagacctgtctagggtgcccactaaaaagttttctccatctaaactctcaggttctattcaagttaaataacaaatcaaaggctgtcatatgaactacacattttttgccttc

SEQ ID NO: 631305 - DNA, 579 bp, Homo sapiens
gacaaaggagaatgtggcagcgggggaggtgactccaaggttagcctcaatgtcaccaaaagcgggtaaacagtatgtaaagtaataggtgcatctgctgggagacttatggtttggacctcctaataccagtcgaattgctagtccagtcccttcgcaaacttacgtatgcagttactgtcaatgcaaaaatatttgcaaccattatcaatttagtgacacactaacaaacctaatgaaaatagtcactgaaaatctctgcctttgaagaagttgtggatcagacgttataagyctatgaatctcaattttggaaagtaggaagggatgttaagtttctgaaacagcaagttagagaagagaggggagggagcagggcggtaagcctgtcttgttttttttcaccattactttaccagaacttctaccaaatattgcttagtatcagcaataacctgactccacatagacctgtctagggtgcccactaaaaagttttctccatctaaactctcaggttctattcaagttaaataacaaatcaaaggctgtcatatgaactacacattttttgccttc

SEQ ID NO: 631306 - DNA, 572 bp, Homo sapiens
ttttcagcattatcaatgctccactaagttttcaatttaacttgtagctgtgttattacttttcttcccaaattattcattccagtagacaagcacaaggctctttttgcttcattggatttgtgcactcatttccaaaggcagaatttgggctagattgctctacatatatatgcaaaaagtttttagaaaagatattgaatttttactccagtttgcctatgcgatgacaagtaagatttgcattaaatggtactattgatcaggaatttaatattaaaataaggagagaaaaatttttgtaagtggaaagacaattcagacccagcatgatttgcaatgagcacttgaaaactactttgataaggaaggatttagtgtctttggtttgggttttagatgacatatatgtaattaagttagtgtggaaacctttgtatttcatattccaagttgagtcaaggagagctgaacaagttamacagatacttgtctggattccagcaattgtctctaaattgcatgttcattggaatttgcatgattaatttctagttgagacatggatctga

SEQ ID NO: 631307 - DNA, 529 bp, Homo sapiens
agaaagaaaaatttggcattattattatttttaagacagggtctcacattattattattattattattattatttttgagacaggktctcactctatcacccaggctgaagtgaagtggcacaatcacggctcactgcagccttgatttccctgggctcaggtgatcctcccatctcagccatctgagtagctgggactaaagttctgtgccaccacacgcagctaatttttgtattttttgtagagactgggttttgccgtgttgcccagactgatctcaaactctgggccccaagcaatcctcccatcttgacctcccaaagtactgggattacaggcatgacccactgtgccgggcctgaaaatttggcattatagttttaattttaaaaagtaaatcattttaatcagccattatatttcatggattacctttataataataagaaaagtaacagaattctatattctggaaccagaaggaaaaaaggccaggggagaagactctgcttaaattagaactgctgg

SEQ ID NO: 631308 - DNA, 427 bp, Homo sapiens
gcagcacccaaagaaaatttggccacccaatttattctgccagccaggagtagtataacaatagccaacctgctgaaatattcatttgggccacatttgcttgaatgtagtgatattgcctctgccagtaacatttcctgcatattttccccccacctcagggccaagatagggacttccagccaaggccccagcaaaaagaagccccctgtggaaaccaggagagtaagtactaaaatggagccttagtactaaaatggagccttcaaggctattagctattcctgttctgttacaagtcmggattccggttaccagcacatcttggtttttcgtgcagattgaattgactgaactcattcttgggtttcactgtctgcagaataacattcaactattatgcccttgccacaacgcatcccaaagt

SEQ ID NO: 631309 - DNA, 428 bp, Homo sapiens
catttagattgtgccagacttcatagttttaaaaaactagccttttattcwtatagaaacagttttatatgcactgtagaaatccaaaattgaaataagtaaaaaatgaggcaataatcacaccacccagacattatgacacttacatttttcatggacatttttctgagtcttttttcttaacatgcacatacacaaatttataagtgttcttttaactaaaataaaaatcataacataatattgttttatattgtgctcgttttaagaaacaactcctactatttcatttgagaaaattttgatctctttaacccagaccacgtatagattgcctgattgtattattattcttatatatttcttaggaattcagcaaaacttgcatattgtcttgataatggattctgcaaattcaaacttcatga

SEQ ID NO: 631310 - DNA, 643 bp, Homo sapiens
agggcatggtcactcatgctgtaatcctagctctttgggaagccgagtgggaagattgcttgagcccatgagtttaaggaccagcctgggcaatatagtgagaccttatctctacaaaaaaagtaaaaattagytgagtgtggtggcacgtgcctatagtcccagctactcaggaggctgaggtaggaggattgcttgagtttgagaggcagaggttgcacaacgagctgaaatcatgccactgctctccagcctgagtgacagagcaagactctcaaaaaaaaaaaattcaattttatctgttaaacatgtcttcttggaagtctctcgggcattacaatttgaaacaggttcaaaactgaacttatgagttttctttcctgtatttctttcctcagattatggtactataatatacactaattatttaagacagaacttataaattatattatactgagacttttgttaccttatcccttaatgtaatgagtcattaaattctgtcaattttatttccctgactatgcctcaaatatgtttccccatctccctcttggtaactgttaccttgtcaactaggcactaatctaatgcctcttttatgaaaattaactttaatattcatcagactaatgtatat

SEQ ID NO: 631311 - DNA, 643 bp, Homo sapiens
agggcatggtcactcatgctgtaatcctagctctttgggaagccgagtgggaagattgcttgagcccatgagtttaaggaccagcctgggcaatatagtgagaccttatctctacaaaaaaagtaaaaattagttgagtgtggtggcacgtgcctatagtcccagctactcaggaggctgaggtaggaggattgcttgagtttgagaggcagaggttgcacaaygagctgaaatcatgccactgctctccagcctgagtgacagagcaagactctcaaaaaaaaaaaattcaattttatctgttaaacatgtcttcttggaagtctctcgggcattacaatttgaaacaggttcaaaactgaacttatgagttttctttcctgtatttctttcctcagattatggtactataatatacactaattatttaagacagaacttataaattatattatactgagacttttgttaccttatcccttaatgtaatgagtcattaaattctgtcaattttatttccctgactatgcctcaaatatgtttccccatctccctcttggtaactgttaccttgtcaactaggcactaatctaatgcctcttttatgaaaattaactttaatattcatcagactaatgtatat

SEQ ID NO: 631312 - DNA, 643 bp, Homo sapiens
agggcatggtcactcatgctgtaatcctagctctttgggaagccgagtgggaagattgcttgagcccatgagtttaaggaccagcctgggcaatatagtgagaccttatctctacaaaaaaagtaaaaattagttgagtgtggtggcacgtgcctatagtcccagctactcaggaggctgaggtaggaggattgcttgagtttgagaggcagaggttgcacaacgagctgaaatcatgccactgctctccagcctgagtgacagagcaagactctcaaaaaaaaaaaattcaattttatctgttaaacatgtcttcttggaagtctctcgggcattacaatttgaaacaggttcaaaactgaacttatgagttttctttcctgtatttctttcctcagattatggtactataatatacactaattatttaagacagaacttataaattatattatactgagacttttgttaccttatcccttaatgtaatgagtcattaaattctgtcaattttatttccctgactatgcctcaaatatgtttccccatctccmtcttggtaactgttaccttgtcaactaggcactaatctaatgcctcttttatgaaaattaactttaatattcatcagactaatgtatat

SEQ ID NO: 631313 - DNA, 642 bp, Homo sapiens
gatatctgcttatgaaactgtatttgcttatttacagtagtggcaaaattccagtcacagtgagaatatactttttagaatgatcagttatgaaattattgattataaaattatttttatttaattttagtttttwtttgaaaaagctaagaatccttgctaccccactatgtcatgaaggcattttactagttttatgccaaataaaatatttttattattgtatgtttttaaatgacattgtgattattttctaattcaatccaaattgtaatttcctttacttcatatagtctcaccatttcaagtgagcttttcccagtgtgccattgcaatcagttaatggttgatgtgtgtcaaaatgttgtcttggaaatcatttcttctaaagatttctgtattatttttgtctcttagtctggaatgaatcctagaagaaaagtacaatcaatactgactttttttgtattaaaggtttttaacttatgatatgggacttatactctttcatagtgatattctttttatgttttagatacctgaaatgttattcagtgaaacaggtggtggagaaaaatacaatgataaaaaacgaaaagaagaaaagaaaaaaaattcaggtagtattttgataaaatcagt

SEQ ID NO: 631314 - DNA, 642 bp, Homo sapiens
gatatctgcttatgaaactgtatttgcttatttacagtagtggcaaaattccagtcacagtgagaatatactttttagaatgatcagttatgaaattattgattataaaattatttttatttaattttagtttttttttgaaaaagctaagaatccttgctaccccactrtgtcatgaaggcattttactagttttatgccaaataaaatatttttattattgtatgtttttaaatgacattgtgattattttctaattcaatccaaattgtaatttcctttacttcatatagtctcaccatttcaagtgagcttttcccagtgtgccattgcaatcagttaatggttgatgtgtgtcaaaatgttgtcttggaaatcatttcttctaaagatttctgtattatttttgtctcttagtctggaatgaatcctagaagaaaagtacaatcaatactgactttttttgtattaaaggtttttaacttatgatatgggacttatactctttcatagtgatattctttttatgttttagatacctgaaatgttattcagtgaaacaggtggtggagaaaaatacaatgataaaaaacgaaaagaagaaaagaaaaaaaattcaggtagtattttgataaaatcagt

SEQ ID NO: 631315 - DNA, 634 bp, Homo sapiens
tttttaaaagacacacaaatggccaacggtatatgaaaaaatgttcaacatcactaatcacccttygatcattacacattcttgtatgaatcaaaatatcacatgtaccccataaatatcaataaaattatcattatatataacattttaaaataaatccataagacttaaaaaaaagcatcatagaaaagctaaacagataaatacatatttgatagtttaaacactgaacttaataaaaaacactttttaccattacattagatgggagagaaaatagcaagcaaggggtaactcactaaaccttttctaattttagtctcactgatggggaaaaaggactcaagagtcactgttttttatagtagacatgacttggttttgtctgtctaatattcatttttcttgtaagagactttctcacatatggttctggtgggctgtcattcacttgccttacctgcatttggagtagacatttcaccctggcctggccattatggtaccccatcctactgtgcaaacagcagaataatgaacccagggtatgtacatgaaaaaaattctttaccttctatcatgtttttgtcacctaacaaatcagaagatttggggaaagagtaatggcaaaaaa

SEQ ID NO: 631316 - DNA, 634 bp, Homo sapiens
tttttaaaagacacacaaatggccaacggtatatgaaaaaatgttcaacatcactaatcaccctttgatcattacacattcttgtatgaatcaaaatatcacatgtaccccataaatatcaataaaattatcattatatataacattttaaaataaatccataagacttaaaaaaaagcatcatagaaaagctaaacagataaatacatatttgatagtttaaacactgaacttaataaaaaacactttttaccattacattagatgggagagaaaatagcaagcaaggggtaactcactaaaccttttctaattttagtctcactgatkgggaaaaaggactcaagagtcactgttttttatagtagacatgacttggttttgtctgtctaatattcatttttcttgtaagagactttctcacatatggttctggtgggctgtcattcacttgccttacctgcatttggagtagacatttcaccctggcctggccattatggtaccccatcctactgtgcaaacagcagaataatgaacccagggtatgtacatgaaaaaaattctttaccttctatcatgtttttgtcacctaacaaatcagaagatttggggaaagagtaatggcaaaaaa

SEQ ID NO: 631317 - DNA, 634 bp, Homo sapiens
tttttaaaagacacacaaatggccaacggtatatgaaaaaatgttcaacatcactaatcaccctttgatcattacacattcttgtatgaatcaaaatatcacatgtaccccataaatatcaataaaattatcattatatataacattttaaaataaatccataagacttaaaaaaaagcatcatagaaaagctaaacagataaatacatatttgatagtttaaacactgaacttaataaaaaacactttttaccattacattagatgggagagaaaatagcaagcaaggggtaactcactaaaccttttctaattttagtctcactgatggggaaaaargactcaagagtcactgttttttatagtagacatgacttggttttgtctgtctaatattcatttttcttgtaagagactttctcacatatggttctggtgggctgtcattcacttgccttacctgcatttggagtagacatttcaccctggcctggccattatggtaccccatcctactgtgcaaacagcagaataatgaacccagggtatgtacatgaaaaaaattctttaccttctatcatgtttttgtcacctaacaaatcagaagatttggggaaagagtaatggcaaaaaa

SEQ ID NO: 631318 - DNA, 634 bp, Homo sapiens
tttttaaaagacacacaaatggccaacggtatatgaaaaaatgttcaacatcactaatcaccctttgatcattacacattcttgtatgaatcaaaatatcacatgtaccccataaatatcaataaaattatcattatatataacattttaaaataaatccataagacttaaaaaaaagcatcatagaaaagctaaacagataaatacatatttgatagtttaaacactgaacttaataaaaaacactttttaccattacattagatgggagagaaaatagcaagcaaggggtaactcactaaaccttttctaattttagtctcactgatggggaaaaaggactcaagagtcactgttttttatagtagacatgacttggttttgtctgtctaatattcatttttcttgtaagagactttctcacatatggttctggtgggctgtcattcacttgccttacctgcatttkgagtagacatttcaccctggcctggccattatggtaccccatcctactgtgcaaacagcagaataatgaacccagggtatgtacatgaaaaaaattctttaccttctatcatgtttttgtcacctaacaaatcagaagatttggggaaagagtaatggcaaaaaa

SEQ ID NO: 631319 - DNA, 571 bp, Homo sapiens
tggaatatatttataccttagtgtataaataaatatccactatgtcattatctcctatatatactttaatttacttgcataaatgatcatttagagaaaaatatttgagataaaatgttacattaatgataaaataggtttagtttatgtaaagttttcttggaactaagatgatttacttttgggatatttacttggaagaattttaaaatgtcacacactctggagtatgtgaaaacttatcacaattttttcctcttaaggtttttcattgggcacgagaatctcctccagactttcacaaacctatggatacctactatgactctactaggggtcgrttagcaacatatgtgcttaagaagccagaagacttgactgctgatgatttcagtaacggcttaactcttccagtcattcagactcctgacatgcaacgaggtctagatatttcaaaccatggttaagttctgatactaaacagccctttattctggtaggaccagaaggatgtggcaaagggtaagaaaaatattggcaaaggtatatgttgtggatttattcctgccgc

SEQ ID NO: 631320 - DNA, 567 bp, Homo sapiens
caatatgtgtaaagttgtgacaatatgtgtaaaatgttgtttatcaggaaagctcagtagagacctagtacccatagtttactgggggttgattacgtaagcacactctccctagcacattacaaaattctagacyccctgaaggaaagcaggtgtagcataaaccatattgtttgtacaaacagtttaggcacagtgagccacttttttgagttctgaggatggtgagaactctcccaaaatctaagttcccaggtgctggttatgggccaactttacaagtagccctttctaaagagtctcaggattgctatgttaattcttttctgcataggaacccagcccagtcttggatgattagaaggctatgccttgaaacttaaagagcatatcatgcaaagtgtatacacatacatatgtagacgtgtacatatacgtacgtgaatgtatgccacatacgttgctagcacagcaaactttaaatagaaaattgatgttattggggcaacgcagagaaatagcaaagcatgcactattctctgataacctattgtccctcacattgat

SEQ ID NO: 631321 - DNA, 567 bp, Homo sapiens
caatatgtgtaaagttgtgacaatatgtgtaaaatgttgtttatcaggaaagctcagtagagacctagtacccatagtttactgggggttgattacgtaagcacactctccctagcacattacaaaattctagactccctgaaggaaagcaggtgtagcataaaccatattgtttgtacaaacagtttaggcacagtgagccacttttttgagttctgaggatggtgagaactctcccaaaakctaagttcccaggtgctggttatgggccaactttacaagtagccctttctaaagagtctcaggattgctatgttaattcttttctgcataggaacccagcccagtcttggatgattagaaggctatgccttgaaacttaaagagcatatcatgcaaagtgtatacacatacatatgtagacgtgtacatatacgtacgtgaatgtatgccacatacgttgctagcacagcaaactttaaatagaaaattgatgttattggggcaacgcagagaaatagcaaagcatgcactattctctgataacctattgtccctcacattgat

SEQ ID NO: 631322 - DNA, 554 bp, Homo sapiens
accatatttcccaagtctgtgcgtagccaaccaacttttaatgttgattttctgaactgtattttaaaattgatgttgctctttgttatttcattcctatcacttctccaaattttatttggtcttttctagatttttgaaatggaaaatcaaaatattgatagtcttttcttttttctaatatatgcatttatgtctatcaattttcctttaagcccttcttcagcttcctacccaagtttcagtttcttttttcaacttataaattccttagtattttgtttaattttcaggtggttggagattttctagttacatatttgttattgatatgtagcttatctccatttagtcatagaacttattgtaaagtattttaattttttgaattctgttgagccttctttctgatctggcatttggttattttttataaatgttctatggaacttgaaaattgtatgaattttgctcttgcttcatttaatyttctgtacaggttaattaatagtgtcaagtttgttaattgtgatgttcaaatctatgccctaatt

SEQ ID NO: 631323 - DNA, 449 bp, Homo sapiens
tcagcgtaacattaaactacctgctaggtttctctcatgctgaatttgctcttgtgttggtgacagcagtatggcaacagtagactcttgaaatagagagagactaggattattaatattcacatcacattgaactgaaagcaagttgacctggaacagaaacatgattgacttattttgtagcaggaaatttagactgttaataaactaaaacacataaagaaagctgtctagacctttcagtttatattattagctattccattgttttttcttcaagagatcaaaagtttttatttcagttacctatttcaggcaattataggataaattgtatattwtgttccctaaaacttatgtttataataaaacaatttttatatctaagtacctttatgtattgtttcttcatttactttataatttagaataggtacaaaataatggaa

SEQ ID NO: 631324 - DNA, 588 bp, Homo sapiens
accaatttgtccaatatggacaaataaccactagccactttacggctatttaaatttaaattattaaagataaataaaattttaaattcaattcctcrgtcatattacaaacattgcaagtgctcagtaactgcatatgactattggctaccatactggataaacacagagcacagaacatttccataatctcatgaagttccattaaacagcactgttctaaaacctggaaatggaaagctgcatctttattgaccacaacatttcatattacaccttgaacatggttttgcaatgaatatttgttgcattaaatcaactctcatatctctgtataagttgtattagaaatggaaaccatctctttaattttgtaaaattagaatttaaaaattgatagatcatgcttatttttcaagtcctttattctttgttgatgtataagaaaataagactgttactcatggcctagagtcaattaaaccttaattaaggatcagtataagtaacagcatggtaaccaacattaattcattctcaacaatgactctataatgaaaaatgtcattctgttttatttaaaattaa

SEQ ID NO: 631325 - DNA, 596 bp, Homo sapiens
actgggaatcaaagtagcattagactttttaaaagcaacactgaactctagaggagagtacagcaggggttctcaaacttcagtgtacaccaaaattaccygtcaaaacagagattgcgagggcttactgtcccctccccctcaatatatctgaatcagaatcagttagtttgggtggagtttaaaaatctgcacttttaacaagttccaaagtgatgctgatgctgctggtctaggaaccaaattttgagaattactgcaatagaataaggccttcaaaattgtgagctaaaactatttctagtctagtatttaaacacaacccaattattgatcacatacaataatatattatagacacttttagacatgcaaatctcaaaatatgttccagcccatatactctttctaccatggaagatgtgttctagaaacctgaagaactaaaggaaggaagagaaagacaggaattcataataaaagaatacaataggtaatctctagaacaatgctgaagagaagccccaagacaacagccttaagcagcaggcctaaagctaagaaaaaataaatagaacacacagatcaatgaagat

SEQ ID NO: 631326 - DNA, 596 bp, Homo sapiens
actgggaatcaaagtagcattagactttttaaaagcaacactgaactctagaggagagtacagcaggggttctcaaacttcagtgtacaccaaaattacctgtcaaaacagagattgcgagggcttactgtcccctccccctcaatatatctgaatcagaatcagttagtttgggtggagtttaaaaatctgcacttttaacaagttccaaagtgatgctgatgctgctggtctaggaaccaaattttgagaattactgcaatagaataaggccttcaaaattgtgagctaaaactatttctagtctagtatttaaacacaacccaattattgatcacatacaataatatattatagacacttttagacatgcaaatctcaaaatatgttccagcycatatactctttctaccatggaagatgtgttctagaaacctgaagaactaaaggaaggaagagaaagacaggaattcataataaaagaatacaataggtaatctctagaacaatgctgaagagaagccccaagacaacagccttaagcagcaggcctaaagctaagaaaaaataaatagaacacacagatcaatgaagat

SEQ ID NO: 631327 - DNA, 564 bp, Homo sapiens
aacagacaacccacagagtaggagaaaatcttcacaatctatacatccaacaaaggactaatatccagaatctacaacaaactcttacaattcagcaagaaaaaaacaaacgactccatcaaaaagtgggctaagaacatgaatagacaattctcaaaagaagatacacaaatggccaacaagcatatggaaaaatgctcaacatcattaattatcagagaaatgcaaatcaaaaccacaatccagtaccacctcactcttgcaagaatggccataataaaaaaattaaaaaaktatagatgttggcagggatgcagtgaaaagggaacacttttacacttttggtaggaatgtaaaccagtacaaccactgtggaaaacagtgtggagattccttaaagaactaaaagtagatctactctttgatccagtaattctactactaggtatctacccagaggaaaagaaggcattatatggaaaagacacttgcacacgcatgtttgtagcagcacaaattgcaatggcaaaaatatggaaccaacccaatgcccatcattcagcc

SEQ ID NO: 631328 - DNA, 583 bp, Homo sapiens
ttgtttcggaataaatagctttatttccttcccttcatcaagtacaagatcgttgtgaagtattatcaatatcttcaacttttcagaatttgatctgaggagatttctttgtactgaaagtgagcagttaatttggaaaagtgaaggcctaccatcagatgacctttccatagaaaatgctcttgtaatattacaggtagttaatttattttaatttttttattagaaatgttttattgtcaagcttgctgtagaaattgtgttcttcgtattcttagtctttcacagttacccttttcttactaaaataaaaatattttrctaatgaaaacccatcaatgattcagttagtgagtgtaagactttctgtataatttattttttaccttaatataaaagtataaagtggcattcttttgatggcaaaatattctaaattgtatttcctaatagtaatagaaatattttagggatacccaattcattggttatatagtttcttcatgagtacagactagaatatatgacttcataaattttatgtttttatttcattttattttgccaaacaaaattagcaaaa

SEQ ID NO: 631329 - DNA, 583 bp, Homo sapiens
ttgtttcggaataaatagctttatttccttcccttcatcaagtacaagatcgttgtgaagtattatcaatatcttcaacttttcagaatttgatctgaggagatttctttgtactgaaagtgagcagttaatttggaaaagtgaaggcctaccatcagatgacctttccatagaaaatgctcttgtaatattacaggtagttaatttattttaatttttttattagaaatgttttattgtcaagcttgctgtagaaattgtgttcttcgtattcttagtctttcacagttacccttttcttactaaaataaaaatattttgmtaatgaaaacccatcaatgattcagttagtgagtgtaagactttctgtataatttattttttaccttaatataaaagtataaagtggcattcttttgatggcaaaatattctaaattgtatttcctaatagtaatagaaatattttagggatacccaattcattggttatatagtttcttcatgagtacagactagaatatatgacttcataaattttatgtttttatttcattttattttgccaaacaaaattagcaaaa

SEQ ID NO: 631330 - DNA, 555 bp, Homo sapiens
tttcccattaacttggtttacttttcttgatatggaaattggaagatgatttttacttcttgataatgtgatttttctrttctttctgtcaatagtttatatttcataataaatattagtattccttttcctctcagtaatccttctctctgcctacacactatttccttattcttattttttaactccatagtctcaaagaaagcatgaacattaaacatgctcctctttatgtagcataaactgtattataagatttatattttaggtgctgttcattacttgataatttgttctgttttattagacctattaatcagctgactatgcttcagctcactgtattggtaacttaccggtagagaagttgctgaccactaattgaatagttttgctttctattaatttgattttgcctgtttttaaatttacttttaaaattttttttattattttcacaatggaatcacaaatatgaaactctaaatgcttatgtaaataaatgtattacattatagccaactatatgctttttattatatttgttattccctc

SEQ ID NO: 631331 - DNA, 555 bp, Homo sapiens
tttcccattaacttggtttacttttcttgatatggaaattggaagatgatttttacttcttgataatgtgatttttctattctttctgtcaatagtttatatttcataataaatattagtattccttttcctctcagtaatccttctctctgcctacacactatttccttattcttattttttaactccatagtctcaaagaaagcatgaacattaaacatgctcctctttatgtagcataaactgtattataagattyatattttaggtgctgttcattacttgataatttgttctgttttattagacctattaatcagctgactatgcttcagctcactgtattggtaacttaccggtagagaagttgctgaccactaattgaatagttttgctttctattaatttgattttgcctgtttttaaatttacttttaaaattttttttattattttcacaatggaatcacaaatatgaaactctaaatgcttatgtaaataaatgtattacattatagccaactatatgctttttattatatttgttattccctc

SEQ ID NO: 631332 - DNA, 555 bp, Homo sapiens
tttcccattaacttggtttacttttcttgatatggaaattggaagatgatttttacttcttgataatgtgatttttctattctttctgtcaatagtttatatttcataataaatattagtattccttttcctctcagtaatccttctctctgcctacacactatttccttattcttattttttaactccatagtctcaaagaaagcatgaacattaaacatgctcctctttatgtagcataaactgtattataagatttatattttaggtgctgttcattacttgataatttgttctgttttattagacctattaatcagctgactatgcttcagctcactgtattggtaacttaccggtagagaagttgctgaccactaattgaatagttttgctttctattaatttgattttgcctgtttttaaatttacttttaaaattttttttattattttcacaatggaatcacaaatatgaaactctaaatgcttatgtaaataaatgtattacattatagcmaactatatgctttttattatatttgttattccctc

SEQ ID NO: 631333 - DNA, 546 bp, Homo sapiens
tgaaaacctgggagatttgctaatcatatttggttaagagtttgttttttttcctstcttgtagttttgttggatatacacagagggacagagcttaaattttagcaactgggctagagcaggtataccagcaaaggaaaagttgaaactctggaagctttatgattgttagcagagtagatgtgtctgttgccatgcactgagaggcagattctcactctagcttcagtgaattttgatgctattttcaatactggagaatgctctacagattgaaaaaaaaagctggaacacagagttatttaagtacgcaatgatgagaggctaagattgcagcttttgcctttttattacaaatgatatatttttaaggttaagaagtgattcataaatattcattgtttatcaatcattgttattttaactttttattattttatatataatcaagtgagtggaaaaatacattttttttcactttgaaacaaaattagttttgttggatgaagcaatctaagcccccaaataatacatttcatcctgatg

SEQ ID NO: 631334 - DNA, 591 bp, Homo sapiens
actaactagcaatagattgcatcacatggaattgtaacttttcaatttcaaattatcttccacctggaagccagggcccatgccttaccatgtgcatgtccatacagcctagcaaaatgtttattcctggttaggttgcaacattttattggatattgagtacataaatcagttgattgaaaacctgggagatttgctaatcatatttggttaagagtttgttttttttcctctcttgtagttttgttggatatacacagagggacagagcttaaattttagcaactgggctagagcaggtataccagcaaaggaaaagttgaaactctggaagctttatgattgttagcagagtagatgtgtctgttgccatgcactgagaggcagattctcactctagcttcagtgaattttgatgctattttcaatactggagaatgctctacagattgaaaaaaaaagctggaacacagagttatttaagtaygcaatgatgagaggctaagattgcagcttttgcctttttattacaaatgatatatttttaaggttaagaagtgattcataaatattcattgtttatcaatcatt

SEQ ID NO: 631335 - DNA, 667 bp, Homo sapiens
ccatgcccagatcctgaaatgcataatttcttaaacaatcataataaaacatattaaacacttaaacagcccaggcacagctcatggattccttcttttattaacctcctgttccaattggaaggtatctctattctgagtttgtatagcatttaatttgcactttctttatgccatwaacctagaattgcaagccttagaagttacacaacttggtatttaagctatctcttcagacagtgctttctacaaaataccaaacagaaatatctgctatttataattaagcaaaattattaacttatgagatgcacagttattctcctgggtctttgctggataataaaattagctacagtcttagaaatatcgcttctcagaacagcgcagagaaaaaagtagcagatactcaatgtgtattactaatgtcactagccagagagtacacaaagcacacataatgccgaatattttcctttataaacacatggtaatcaaaacaccaaatattttcctttataaacacatggtaatcaacagtgttatcctttacatagtgtttactttttgatatttcaaacaactcttttaaggtcaaaataattgacagattttttaacaataaaaatggctgtcttcattaagtaaatatttatattaattttgt

SEQ ID NO: 631336 - DNA, 667 bp, Homo sapiens
ccatgcccagatcctgaaatgcataatttcttaaacaatcataataaaacatattaaacacttaaacagcccaggcacagctcatggattccttcttttattaacctcctgttccaattggaaggtatctctattctgagtttgtatagcatttaatttgcactttctttatgccattaacctagaattgcaagccttagaagttacacaacttggtatttaagctatctcttcagacagtgctttctacaaaataccaaacagaaatatctgctatttataattaagcaaaattattaacttatgagatgcacagttattctcctgggtctttgctggataataaaattagctacagtcttagaaatatcgcttctcagaacagcgcagagaaaaaagtagcagatactcaatgtgtattactaatgtcactagccagagagtacacaaagcacacatartgccgaatattttcctttataaacacatggtaatcaaaacaccaaatattttcctttataaacacatggtaatcaacagtgttatcctttacatagtgtttactttttgatatttcaaacaactcttttaaggtcaaaataattgacagattttttaacaataaaaatggctgtcttcattaagtaaatatttatattaattttgt

SEQ ID NO: 631337 - DNA, 625 bp, Homo sapiens
tggtggtggaggtggagaaatttttgcttcatgttttaaagtatgcattcttctcactgcagttagacttggtcatgtttttttctggctgctttaacccattattctccatttttgcctgtataaggatttgagatcacatatcctgaatcagtgtggaatatattttttctttatgttatttacatcacattagaagctataaattcttagagtttattacggtataggtccaattttaggcttattatgtaactgcagaatatgataaaatatttacagaaaaaaacaaaaatatttttctcatatttttcctgatactttcattttctaggctaattgtactcaatttataatatcattgcattttagtgtttattagagagaaaagcattttaaacagtaggataatttagctaacattcatagaacacagagatttgaacagtattatttttcagtgatataataatttaagataccrtttaatctaaaattcttgagttagatagatgatgattgcatttagaaataattgaaacttaggcaaaaatatcctttatcatgattaggaaatcttagataaaaaacgtttaaaatatatttattttcaaataggtattga

SEQ ID NO: 631338 - DNA, 563 bp, Homo sapiens
ttgttgtattagttttacttttatagttctgaggtggattactgccctgtgtacagaccttatgtaactcaaaaatgcttttcaaaagtaaaattttccttttggtcttttctgaagatcagtgatatgttttaacataatttcttggggttctctaacaccttctggtatttgacaatagatatttcgggatcgaatttggttgaaatgagaatggatcggggcgatgagcctagtcttagccccctgggtaagctttggagatatgtaggtcttagagcagcacrgtttcaaaaccactgttgtaacttaacattgaaatattaatttggaatactgatttatttcagctttcttcttatatgccattttttttagttacccagaaagagagcagttacaacgatttatggagcatatttggaaccagttctacataaaaatctgaagaatcattctatttggggttcttcatcaaaaatttatcttttagcaggatctatggtacaagtgtatgaacaggtagatatgcatctaaatcgtagctttcatgtctattagta

SEQ ID NO: 631339 - DNA, 467 bp, Homo sapiens
taaaaacagaataaaactttaagaggkctataaaatgttgaaattcttctaaaataacataagttgccataaacatcaaatgaatgacagttaatatgggtttgctttaattggttatttttatatgtataataatattcatattgttaactttccctacagacacttgccacatctcaaggcaatattttggaaaataaggatttgattgagtctttgaatcagacaaaagcaagcagtgcacttattcaagagtcacttaaagaatcttacaaactccaaatttcccttgatcaagtaattatttccttctttgtaatttcgtattatgttttcttgaacatttaggttaatatgatagaaaatgtagaatcaggtcctcaggggaaagatgatgtgaaaagaaaaaagctattcaaaaacatcagaacattgggtttgattctagttattgtagagagggaatt

SEQ ID NO: 631340 - DNA, 654 bp, Homo sapiens
aaacttttgtggcttagaggcatttattatctcatgctttctgtgactcagaaatccaagcacaccttaactcaattcctctggatcagggtctctcatgaagttacagtcaagctaccagctggggctgtggtctcctctgaaggtttgactgggaaaggatctatttccaagcttactcacatggctactggcagacctggccctgtccacagaactgtgtcataacatgggagctgacttctcccaaggcaaccaagtcaagagacagtaagatcgggccagtgaacccaagatggaaggcaccaccttttatgatctaatctccaaaatgatacttcttcaactctactcactagaaccacattctattcactagaaccaagtcactaaatcagggcaggtgattacacaaagcatgaatcctagaaggtgggagtcaccaggggccatatgagatgcattgtaggacagtgggggaaygataaactattaaataagtgatcctgggacaattggctatttgtgttttttaaaagtagaagggaattgaattcttaccttggtcatgagcaagaaccaattccaggtggattaaagatttaaaagcgaaaaaataaaaataaaattaaaggcaaattaaaggtaatatgt

SEQ ID NO: 631341 - DNA, 296 bp, Homo sapiens
tctattatcacatatatctgggtgtgaatcaagggcctgaaaatataatggctggagcagaattacgagcagaagataataggcctagttaaattcaatgaacgttgaaaattatttgagcagtgtatttcacttgcaayatttcactgaccttaaagcttactcctaatttcacagggctcagtgaactagctttgtttgttgctgactcactgggtcctctctcgaatggtctccatggaaaccaaatgcagagaggaaaggaaagcacaggaaggtagcctaacaatttcaag

SEQ ID NO: 631342 - DNA, 594 bp, Homo sapiens
tagtatctgctgcaaaacaggaatttaataaataccgactgaattacttctctagcatgtctatgggaaagagatttgaggatatctgtgccgatctttggccaaatcgacgtagagaaaaacgtttagatagatagatagatagacagacagacagacagatatagatatacatatacacttgctcgtctgccttcttacttctcctrccaatcataaatatctttctcgagctagatagtatctcatttctattacttcccaggaaatttgcttttgaaaacagaatgtgggatttgagaggaaattcattcttaaatggcagaatttcaggcatgaaaatatattttgaaatcagtgctctaactgccctgatggagcagcctccttcatggaaacgttcaggttgactcgctgtgtgcatgttgagctcctctccatagtgagaatgttagcgagatccctggtctggatcctctttagggaatgctggatgctgtattgttcccatcatagactgtcatgcctcaggtctcccagggcctcccaaactgagggttcagagaagaaattcttgaataaagtgaataaaca

SEQ ID NO: 631343 - DNA, 552 bp, Homo sapiens
ctgctttgctctgtactggattctgcagtggtttcttttcttgtttgtaacttttcatttttacagatttaagaggcacaagtgcatttttgttacatggatatattttgttacatggatatattgccaagtactgaagcctgggtttatagcatactcatcacccaaatggtgtacatcgcacccaataagtaatttttcttccctcaccaccccctcccacccaaatcgacttttagagttattctactctgtacgcccacgtgtgctcattgtttagctcccacttataagttagaagactgcagtgcaggttctaattgcagatgcctctcatttaataattttaccaagaagccttgcacgactagtcttgtagctgccattcttcatatttaccattaaatagcataaattatatatgctctaaaaggacaaatgtaaatacttaatgtctttataacaaggtctcatccaaatttcttatattcatctaatacaatttggttayggtaactctccaaaagttatttataattctgtaagacatat

SEQ ID NO: 631344 - DNA, 282 bp, Homo sapiens
tataaattatagatcaacccatatattctattacctaagatgattccctttctctctctctctctctctgtctytctcatttttcctgtagattgtgaagggaggaaggcagtgaaagccaagataaaaagtgaagggcaaaatgtgtgcacttacatggcaaacagagaacataattggctgttacttgtgaatgttgtcttcctttccttccccagcagaaggaaggtttgtgcctaaatccccatcagcctagagtctacaagtagatgacttgaattc

SEQ ID NO: 631345 - DNA, 619 bp, Homo sapiens
acttgaattcttttttttttcaatcactttcaaatagaatgccacaaatctaaatatkcacagctgccttacagtaatttcctgtctaactctaggaactgcaatcattcctcaatacaggacattttaaataaccttggtcttccctggggtattaatccctcaactcaaggaactttttaagcaagggagcaattaactacttggtataattacaccttagaaatgaatgagagaagagaagagagagagggagagagcgagaaagagagagagagcctgattattatcatttcctttgtaaaatatacctctgtggaagaatatttttaaacattcctttgacatatatatcacacatatttattgtgtatttttatatttactgcttttcatatgtatatactattttttaataaataaattataccttattttgctacatagtattgacagaattgactattgcaagcaacagtaactggggtagcttagagaactaaagaaactaatggaaaactaggcccaggaacggtggaaagtagggcagctggagggaacttagctgttagaattcatggagcaacctcagggcaccgccatcagccagttctacctc

SEQ ID NO: 631346 - DNA, 533 bp, Homo sapiens
gaattcttttttttttcaatcactttcaaatagaatgccacaaatctaaatatgcacagctgccttacagtaatttcctgtctaactctaggaactgcaatcattcctcaatacaggacattttaaataaccttggtcttccctggggtattaatccctcaactyaaggaactttttaagcaagggagcaattaactacttggtataattacaccttagaaatgaatgagagaagagaagagagagagggagagagcgagaaagagagagagagcctgattattatcatttcctttgtaaaatatacctctgtggaagaatatttttaaacattcctttgacatatatatcacacatatttattgtgtatttttatatttactgcttttcatatgtatatactattttttaataaataaattataccttattttgctacatagtattgacagaattgactattgcaagcaacagtaactggggtagcttagagaactaaagaaactaatggaaaactaggcccaggaacggtg

SEQ ID NO: 631347 - DNA, 619 bp, Homo sapiens
acttgaattcttttttttttcaatcactttcaaatagaatgccacaaatctaaatatgcacagctgccttacagtaatttcctgtctaactctaggaactgcaatcattcctcaatacaggacattttaaataaccttggtcttccctggggtattaatccctcaactcaaggaactttttaagcaagggagcaattaactacttggtataattacaccttagaaatgaatgagagaagagaagagagagagggagagagcgagaaagagagagagagcctgattattatcatttcctttgtaaaatatacytctgtggaagaatatttttaaacattcctttgacatatatatcacacatatttattgtgtatttttatatttactgcttttcatatgtatatactattttttaataaataaattataccttattttgctacatagtattgacagaattgactattgcaagcaacagtaactggggtagcttagagaactaaagaaactaatggaaaactaggcccaggaacggtggaaagtagggcagctggagggaacttagctgttagaattcatggagcaacctcagggcaccgccatcagccagttctacctc

SEQ ID NO: 631348 - DNA, 301 bp, Homo sapiens
ttttttttgaggggggtgtggaaggccaaatgtttatttctaaagtttcatcaaatttgctgtattgtgcatagctgcatgaagatctgagacagattcccatctacatccacaaactaattgtgtggcttaaagaaaattacctaacatccctaaatctcatttcatcttctgtaaaatgatctcayagaactcataggtaaattacattagataatatataaaaagcaattacgcagtgcctggtgaggaataaggactcaatgaatggtaacttattactctaggcagatcttctgaa

SEQ ID NO: 631349 - DNA, 566 bp, Homo sapiens
ttcagtatagaatacaatattattattaacaatatggggacaatactgtacagcagatctctagactcatcttgcattactaaaactttagagccattgattagtaactcggtctccctgtcttccctgcccacccatgacaaccatcattttgcgcacagcttctatgaatttgactgttttattttaagggaaagaggtaactgtataggctgagaacatgtaactgccrctgggatatgacagtgcttgaatacaaaggctcttgtgaatcatccaagaaggatgttttcattttcagtttttacttttttgatatatatatttttgatattcccaaatatcaaaacaaataattgcccttatctctacttacaattcctggtcaatttctctgatcctctttataagtaatagttattgattgataattttagcctctaaaaatatggaagtggtaagatagatgaatatcatccatatatacacaggaagtactgaaggaattgagttcaggttctgttagacttccagatccctgagagtagtacctataatttgtcatt

SEQ ID NO: 631350 - DNA, 566 bp, Homo sapiens
ttcagtatagaatacaatattattattaacaatatggggacaatactgtacagcagatctctagactcatcttgcattactaaaactttagagccattgattagtaactcggtctccctgtcttccctgcccacccatgacaaccatcattttgcgcacagcttctatgaatttgactgttttattttaagggaaagaggtaactgtataggctgagaacatgtaactgccgctgggatatgacagtgcttgaatacaaaggctcttgtgaatcatccaagaaggatgttttcrttttcagtttttacttttttgatatatatatttttgatattcccaaatatcaaaacaaataattgcccttatctctacttacaattcctggtcaatttctctgatcctctttataagtaatagttattgattgataattttagcctctaaaaatatggaagtggtaagatagatgaatatcatccatatatacacaggaagtactgaaggaattgagttcaggttctgttagacttccagatccctgagagtagtacctataatttgtcatt

SEQ ID NO: 631351 - DNA, 510 bp, Homo sapiens
gcatatttttaaattcactctatctatccattcattcatgataagtttctgctgagcccaggttgtctgtgatatcttcaaacacttaatttccaagttatcggtgatcatatgaaaattatacctattaattataattgttatcaccaatatgtaataaatgcttataagatttgtgcacgtctgagcatttgttatttgagcttttgaaatctattctccagtatctatagyggattgcaatcacaagacctaagcgtatatacaaccactgggatttgtatgtatttattcattaaacaaataacttcatgacttttaaaaacttactttcttaaaggtttacaattttaagagcacataaagggctcaagtatgataaaaacggcaggaagttttaggtgaattgctatggaaacatcagaggagagagaacaagcagaactggacacttaaaactccatgatgatagagaacattgaagaaagagaataacagaaatgagacaat

SEQ ID NO: 631352 - DNA, 510 bp, Homo sapiens
gcatatttttaaattcactctatctatccattcattcatgataagtttctgctgagcccaggttgtctgtgatatcttcaaacacttaatttccaagttatcggtgatcatatgaaaattatacctattaattataattgttatcaccaatatgtaataaatgcttataagatttgtgcacgtctgagcatttgttatttgagcttttgaaatctattctccagtatctatagtggattgcaatcacaagacctaagcgtatatacaaccactgggatttgtatgtatttattcattaaacaaataacttcatgmcttttaaaaacttactttcttaaaggtttacaattttaagagcacataaagggctcaagtatgataaaaacggcaggaagttttaggtgaattgctatggaaacatcagaggagagagaacaagcagaactggacacttaaaactccatgatgatagagaacattgaagaaagagaataacagaaatgagacaat

SEQ ID NO: 631353 - DNA, 582 bp, Homo sapiens
ccacaccagctttaagggaggctaggcaatgtttttattctgaatggtcatagacattgtgaaacttggggttcctgttagtataaaaaagaaggtgagaatcaaccttgaggaatgcctggcaacactaagacagacttttaagtgaagatatctcatctwtatcggtttaattgtgtatattgtgctaggttatgggaattttcacatagttgttttttcaacaaccagcaacttctgtgtgtttcctgattcagtgccctctaaccacgctgcatgcctggtctgtggcagacttttagtgctaagctctaagcccagcaggatcagatgatgaactctgcccacgtttccagctcctcccttttgttgctcagatgtttcggccaatggaaagaaggcacagtcacaaggaacaataccagacatgatttctctccagagaaaaggataatttcctctcataattagttcagtacatgtaaaaaacatggttgtagggcctagtactgataaaatagaatttgtgcttatattatgctttactatatatgcatatattacatgcatgtaactgtatat

SEQ ID NO: 631354 - DNA, 562 bp, Homo sapiens
cagatgatgaactctgcccacgtttccagctcctcccttttgttgctcagatgtttcggccaatggaaagaaggcacagtcacaaggaacaataccagacatgatttctctccagagaaaaggataatttcctctcataattagttcagtacatgtaaaaaacatggttgtagggcctagtactgataaaatagaatttgtgcttatattatgctttactatatatgcatatattacatgcatgtaactgtatatacatgcatgggtgtacatatatacacatatatacatctatgcatgcacatccatgtatataaatgtgtatgtgggtgtatatatataaagtatataaatgtgtgtgtgtgtgtgtgtgtgtgtrtatatatatatatatatatatatatataaaacttttatagccactaagattcattagatctcacaaaaacaatcagtggaggtttgtcattatccccgtttcagatgagagaacaaataacttggggagagttatttgtatataacaaatatctcacaaaaacaagtatataaccagtatata

SEQ ID NO: 631355 - DNA, 529 bp, Homo sapiens
accctgaaaacagaaggcacactaaattttattttttcctgcaaaggcatttagtcacaaatggcaaatagttaagtgatacctgcccaaataatctctcactgctctcccygcacatataaagactgagaagtatgttgcctctccctggaaaatactcctcagccattcttaatacggaaaaaacaacacaacattttcaatcttcaacaccttttctgtaaggtcctttcttcaaatgaggaaaatgcactccagattttctgctgtattgtacatcttgatcatagcttaatgatgggacgttctagttagctgtatgtctgtttctccagcagactctgatttctgtgcagctggggtcatatctttttcattttgcattcctcgcccttgcacagagttattcatcaaacaactctgaatgagtgaagatttgaaaaggaatcagatctcatcttttatctttacaaatttgtctgtttttactgactgtgcagctacaccagtacactgaggcatgggaagg

SEQ ID NO: 631356 - DNA, 529 bp, Homo sapiens
accctgaaaacagaaggcacactaaattttattttttcctgcaaaggcatttagtcacaaatggcaaatagttaagtgatacctgcccaaataatctctcactgctctccctgcacatataaagactgagaagtatgttgcctctccctggaaaatactcctcagccattcttaatacggaaaaaacaacacaacattttcaatcttcaacaccttttctgtaaggtcctttcttcaaatgaggaaaatgcactccagattttctgctgtattgtacatcttgatcatagcttaatgatggkacgttctagttagctgtatgtctgtttctccagcagactctgatttctgtgcagctggggtcatatctttttcattttgcattcctcgcccttgcacagagttattcatcaaacaactctgaatgagtgaagatttgaaaaggaatcagatctcatcttttatctttacaaatttgtctgtttttactgactgtgcagctacaccagtacactgaggcatgggaagg

SEQ ID NO: 631357 - DNA, 473 bp, Homo sapiens
tctggcaaaactatgaactataatgaarggtttttttctctttttccataagttattggggtacaggtagtatttagctacataagtacgttatttagtggtgatttgtgagattttggtgcacccatgacctgagcagtatacactgcaccatatttgtagtcttttaccccttgccccctcccactctttcccccaagtccacaaagtccattgtatcattcctgtgcctttgcatcttcatagcttagttccctctattttatatatcttaaacttaattctttaagcactttcctttaatgtgcatatcctgtaattatttgcaaaaaaatattttattaaataacattgttgaatagatttaagattacatactcttcagattacatctttctggacttgaaaggtcgaagatctttaactctaataagagaggctgttctggttcttcttgttcttatagtcatttc

SEQ ID NO: 631358 - DNA, 473 bp, Homo sapiens
tctggcaaaactatgaactataatgaaaggtttttttctctttttccataagttattggggtacaggtagtatttagctacataagtacgttatttagtggtgatttgtgagattttggtgcacccatgacctgagcagtatacactgcaccatatttgtagtcttttaccccttgccccctcccactctttcccccaagtccacaaagtccattgtatcattcctrtgcctttgcatcttcatagcttagttccctctattttatatatcttaaacttaattctttaagcactttcctttaatgtgcatatcctgtaattatttgcaaaaaaatattttattaaataacattgttgaatagatttaagattacatactcttcagattacatctttctggacttgaaaggtcgaagatctttaactctaataagagaggctgttctggttcttcttgttcttatagtcatttc

SEQ ID NO: 631359 - DNA, 473 bp, Homo sapiens
tctggcaaaactatgaactataatgaaaggtttttttctctttttccataagttattggggtacaggtagtatttagctacataagtacgttatttagtggtgatttgtgagattttggtgcacccatgacctgagcagtatacactgcaccatatttgtagtcttttaccccttgccccctcccactctttcccccaagtccacaaagtccattgtatcattcctgtgcctttgcatcttcatagcttagttccctctattttatatatcttaaacttaattctttaagcactttcctttaatgtgcatatcctgtaattatttgcaaaaaaatattttattaaataacatygttgaatagatttaagattacatactcttcagattacatctttctggacttgaaaggtcgaagatctttaactctaataagagaggctgttctggttcttcttgttcttatagtcatttc

SEQ ID NO: 631360 - DNA, 597 bp, Homo sapiens
tgacaagattatggcatcaaaatataatgagataggctgggcacggtggctcatgcctgtaatcccagcactttgggaggcsgaggcaggtagatcacttgaggccaggagttccagaccagcctggccaacatggtgaaaccccatctctactaaaaatgcaaaaaatagcctggcatggtggcacatgcctgtaatgccagcaactcggaggctgaggtcggaaaattgcttaaactaggggagcagaggttgcagtgagccgagatcataccactgcactccagcctgggtgacagcgtgagagtctgtctcaataataataataataatcatcatcatcataagataaagcatcagaggaacaaacagagacagagagacacttatttagctcatgttctgtttcctagggaaaaaaaatcccactggaaagtttactacttgtgaggaaatttgcattatatttgcatcatctttgttttagtctgcttaatttaattcctttttttttcctgctccaggtattcaagtaagtcatgacatagtctagcaacaactgattcatcaactaatccttcagcaaaattttctatt

SEQ ID NO: 631361 - DNA, 597 bp, Homo sapiens
tgacaagattatggcatcaaaatataatgagataggctgggcacggtggctcatgcctgtaatcccagcactttgggaggcggaggcaggtagatcacttgaggccaggagttccagaccagcctggccaacatggtgaaaccccatctctactaaaaatgcaaaaaatagcctggcatggtggcacatgcctgtaatgccagcaactcggaggctgaggtcggaaaattgcttaaactaggggrgcagaggttgcagtgagccgagatcataccactgcactccagcctgggtgacagcgtgagagtctgtctcaataataataataataatcatcatcatcataagataaagcatcagaggaacaaacagagacagagagacacttatttagctcatgttctgtttcctagggaaaaaaaatcccactggaaagtttactacttgtgaggaaatttgcattatatttgcatcatctttgttttagtctgcttaatttaattcctttttttttcctgctccaggtattcaagtaagtcatgacatagtctagcaacaactgattcatcaactaatccttcagcaaaattttctatt

SEQ ID NO: 631362 - DNA, 583 bp, Homo sapiens
ttataatctttgttcttaatattcaaaacaagtagctatttcacattttttatttttaaaagcaaaaaataataatactttcaatcatagagtctctgtatgcagttgaagttgttactaacttaaaatagatggttataaatacaagctatttttatgaaagccttaagataaccacaaagaaaagtctcaaaacataaagagaaaataatcaaagcaaattgctaccaaaaaaaaatcaaatacaggaagaaagcaagagaagaacaagccaactacaaaacaaacagaaatcaattaaaatggcagtgataagtcctcacttatcaatagttattttaaatgtaaatgaaataaattctccaatcaaaagacagagtgatcatttttatttgtctattgtacctcagtaaagcagaaaacatgcttgtaagcttaagcgtctttaccctaaaaatccactgaatgttaaactgttaattacagtacctcaaaaaagaattaaagtgagtgaatggatttyacagtacataaactacacttcactaagctgttttttttttaaagtgaaataaagactaaa

SEQ ID NO: 631363 - DNA, 574 bp, Homo sapiens
aaaagtgaagggatggagaaagatacaccctgccaaaaccaatcagcagaaagctgcagtagttacgtaaatttcagacaaagccaacttcagaacaacaacaacaaaaatcaggaataaagttgagcattaaataatgataaaagagtcaattttccaaggatgtatgataattttaaatgtatatgcacttaggagaatatcaaaatatatgaggtaaaaactgataaaatacacagttcactgcatgggttttttttttkggttttctcctggtcaatcagatactccagaaagcagatggactgtttttaaggaaggaattgctgtgagttgggagaggaagagcagatgctcagtgaccctgagtgggactgtgttagagttggggaagacggaggatggatttcattagtaagtctgtgtagaacagagaaccctccaggggagctcctggcctgtttgagtggaagaatcttgagggaatggtatctgccacttttcctgtggccaagtctgctgctgtgggggaaacaagcactagataaaggcaactaatgggagatgagaacag

SEQ ID NO: 631364 - DNA, 558 bp, Homo sapiens
catatcaaatagggtcatttccaccaggatagggtatatgagacacaagggtcaggaacgattacggggagctcctttcttcctaatgcggtaagtgctccaggttcaggtcccaggcaaagctcccattaagcccacccttccctttactgcactagatcagggcctgacttagaggacacataggttcagggtaggactaaggattgcattatagacttcttaaggtgtttcatgattaaagaggaacatctctctccaacagttatagttcaacccaagtctttcaggcagtggaagaaaagacatgtaggttgtacaggctagcaaagcccaagaagaatgaatcaggaaggtccccaacagtgtcacctctcacagtggacccctgcagtctctstctttgtgatcttgacattacattgatccagatgttggctttcaacttccctctaactcctcctacgcaagcttaccagtatggccctgataagtatataagatagaaagtgaacagacaaagataatgcagaaaattctctaattcaagcattctct

SEQ ID NO: 631365 - DNA, 558 bp, Homo sapiens
catatcaaatagggtcatttccaccaggatagggtatatgagacacaagggtcaggaacgattacggggagctcctttcttcctaatgcggtaagtgctccaggttcaggtcccaggcaaagctcccattaagcccacccttccctttactgcactagatcagggcctgacttagaggacacataggttcagggtaggactaaggattgcattatagacttcttaaggtgtttcatgattaaagaggaacatctctctccaacagttatagttcaacccaagtctttcaggcagtggaagaaaagacatgtaggttgtacaggctagcaaagcccaagaagaatgaatcaggaaggtccccaacagtgtcacctctcacagtggacccctgcagtctctgtctttgtgatcttgacattacattgatccagatgttggctttcaacttccctctaactcctcctacrcaagcttaccagtatggccctgataagtatataagatagaaagtgaacagacaaagataatgcagaaaattctctaattcaagcattctct

SEQ ID NO: 631366 - DNA, 566 bp, Homo sapiens
tgaagcaggatggtggaggcaggtgacaatgggactctcttgtggtcaccttccgccaggccagggaaggggaaggagacaggccttaggattgtgctcctacctgcatgggcacgcatccaggccacggccttcctttccagaagctcccattcacacttcaagtccttaccattgctrtgcagccagatcacggccaggatggtggcccagcctgaggaatccacaagctgcacagtagatagagagctccagttggcacaggaagtccctcaaaaggatgcaaaaagcttcactccctcctcacttagcatccttctaaatgtcactagatggagttacctggtctctctttacctccagatactacttgcaaggcataatgccaggccttaaacctcagggcagcaatccattgagtctcgaaatagaaaatcctaagttttaaatccagtgtaaccaccaggacggttctggaaacccctaagacaaggccagctctagtaagagaaacacaggcaaaactgctttatagtttataaagaaccttcataagttttttttaa

SEQ ID NO: 631367 - DNA, 618 bp, Homo sapiens
ttctggaatgcaatttatccttatcagcatatttaaatacatctgaaacaactaggtggttcctagtaacaacactttacctatcctgacttcagttaacttttgccaatgtctggaccactttcatcggtatgaagaggagcaataatgaggttattawtgggggttctcaagacagatactcttagaactgaatctggctctgccactgatgggctaggtaaactcagacacatttttagacctccctgaacttcagtttcttcatctataaacagcaacacaaatgggatctaccttattaaattaatgtgtgaaataaataagctcatgaatattaactgcttagcacagtgcttggcacagagtaattgctcactaagtattagttacataaccaagatgattggcagggaatacgattaaagtggaagaggatttttgctttccctttgtcatccaccagcaaaaaaaaccccatcaattcctactagcttccccattaatcccttgatctttctgctctaacatgactggaaaaaccttcagcctctatttattacaaattaatttagtctatgaccccctatattttccttcctcaggtaggtcctgaat

SEQ ID NO: 631368 - DNA, 607 bp, Homo sapiens
agtttgtgcttcagtgcatttaatatccttttccgcagcctcaccatccttagctcttacatcttcatcgttgccagcatcctctgcattcgctccactgagggcaggtccaaaaccttcagcacttgcagctcccacatctcggctgtttctgttttctttgggtctgcagcattcatgtacctgcagccatcatccgtcagctccatggaccaggggagtgtcttctgtgttttatgctactgttgtgcccatgctgaacccccaatctacagcctgaggaataaagatgtcaaagttgccttaattaagttccttgaaaaaagaagtttcctgtgaaagttgccttaaataagctccttgaaaaaagaagtttcctatgaaggggggtattttgctttagcaaaaacttttaatttctggaaaaggtttgataaggaaacaatctagagacagtaaggtatgtccacaagtaatgagatggctgctactacttggttatttggaagaaagatgccaaggrtaaggctgaattcataggatcagttacatgttgggagcatttatgggatgccacagagttcatccactcagagtaacacgtatc

SEQ ID NO: 631369 - DNA, 594 bp, Homo sapiens
cctcctccccagcccctccccacagcagtggcaggcaagagtggtgacatggggccagggtcaggagccacagagtctctaggcctaggggtgggtcttacctggtcatgcaaaggtgggggtggctcagttgcctgccttggagacatgggggacaggggtcccaccaccgttattgctgcccctgcagcctctcctgccacaaccgctggcctccccactgcagctggcaccatggtagcggcrgttctggatggcctacttttgccatcaatataacgtttaacaaaacatgaaatataattttacttccaaaataatttagttttatataagtacaaaaataacttctgtaacacatatgtctttattgttcctcaatatcattcttattttttgatgaaaaaagtcatcaactctccttgttaggcttactaggaactcctcagggtcttggcaatatctatcatattttaacttggggactgaatgaaagcattttcttcttcattgatctgaaaggaaacagccctcaagttaaaacatttcaagcattactgttttatgaatacatcatgatatcaaaatatcatt

SEQ ID NO: 631370 - DNA, 520 bp, Homo sapiens
tagagggagatcattatcattgtttgttccctatcagactcttactcttacccagcatataaaatcctcacatcagccaccctttgcagagtgccagatggctttaggcatcagctttgtcagagatcaggatgaatgactcaaaataattgccaaggagacttttgggctatgacctcctcgtaccatcagattcatttttccctccagagcaatggagaagaaaaatgtacaaccctggaccctggcagaaaggatgggtatgtatgagtcccagtctttgactttaaaatcttggagtctcctgttccagcttctttcgcagtgcaaagagagatgcacayagctattcatctgtctctccctgtccttattctcacattcacatgccttgatgagcagtggttcccttgtcatctacttgttctctgcaatatacatttatgacaaacacttctgtgtttactcatttcaattcaggcagtaagagggtttttattcagttattttgaatccatat

SEQ ID NO: 631371 - DNA, 572 bp, Homo sapiens
ctagaagctttatagcttaattttctctgtatctatgacccatctcaaattaatttttgtttgtggtctggagtaaagattgatgttcattttgtccccatgtgaatattcarttgtttcagcataatttgtttaagagacatcttttcctactgagctgctatgaggtttcagtcgaagaatgatgggtggggctactttggactttctcttctatttctttgatctgtctattcttatgtcaatttcacattgcattgattatggcaactttacagataatctttttttcctttgtcggtttaaaaacattttattttataggcatacaattttaattgcctatatttcaggtgtataacatcatgttttgttatccttgtacgtaaacacagtgaaatgatgactacagtgaagcaaatcaacatttcttcacatttacttttgtttgtgtaaaaggacctgaaatctaccatcttggcaaatttacaggataaaatatgtgatatgcacattagtcttatttatcctacataactgcaactttgtaccctttgacctacatctcctca

SEQ ID NO: 631372 - DNA, 572 bp, Homo sapiens
ctagaagctttatagcttaattttctctgtatctatgacccatctcaaattaatttttgtttgtggtctggagtaaagattgatgttcattttgtccccatgtgaatattcagttgtttcagcataatttgtttaagagacatcttttcctactgagctgctatgaggtttcagtcgaagaatgatgggtggggctactttggactttctcttctatttctttgatctgtctattcttatgtcaatttcacattgcattgattatggcaactttacagataatctttttttcctttgtcggtttaaaaacattttattttataggcatacaattttaattgcctatatttmaggtgtataacatcatgttttgttatccttgtacgtaaacacagtgaaatgatgactacagtgaagcaaatcaacatttcttcacatttacttttgtttgtgtaaaaggacctgaaatctaccatcttggcaaatttacaggataaaatatgtgatatgcacattagtcttatttatcctacataactgcaactttgtaccctttgacctacatctcctca

SEQ ID NO: 631373 - DNA, 543 bp, Homo sapiens
ctccttaactatgtctactttttaaatttattttttttctctgataagacacacaagaaacattttaaacatcttaacattttaaagtatatgtctgctcaaggccctccatatagtacctgggtatcactgctggttactcagggcccaagggctcttcagttagcaggtgatgaatgctgccaggactgggtcctttcctttaatgcartgggtttccttctggcccagtgtgtgtctagaaatgttgtctgggagctatggcctagaacagaggcttcccctctctgacgggtgccctctcttgctatggctgaggtgacatccaagatgcaagacagagtcctccccactcttccatttcctctcctcaggtggaaggaaggggtctcttttggagccattagctgtgcaacctgaggttaggggaggggtgatgccagcactctcttggctgccctggctggtgtctcagtatgtcatgcgtccccctgttccactgtctctgggcctagtttagcactgggtgttgcctaagagttg

SEQ ID NO: 631374 - DNA, 526 bp, Homo sapiens
agacaagaggtatttgtgaggatacccagagagtgcagatgaatgagggaaagtgaggtggcagtcactaccaagggctcgacatctacattttcagtgattcctcattgaaatgattcctcaytccttactttacaactattgtaaagtaagtgttatgttctgactatctactactgcataacaaaccacccaaacagtagcttaaagcaataactatcttttattttgctcttaaatcttggagttgcctgagcttggctaggcagttctgacttgggagggtctgtctcatagttgtagccagggagtagttgggactgaatttatccttaaagcttcttcagtacatgtctggagcttgggctgcaaagacaaagacagctagggctcttgggcatctcacttgttgtctgatgtctctccagggtagccagggatctcacgcagcagcagaaggctcccaaagcaggtatcctgagagaaaccagcagaagccaaaggcctttcctaagccacccttgga

SEQ ID NO: 631375 - DNA, 630 bp, Homo sapiens
gcactgcttaattgctagcattttgcaaaccactgccttattggctagaagggcaataatatcaaaaagacctcctggtgacttcacagttgggaaaaatagatgctcctaagtcatcccttctaccctcctctaagtaacaaacacctttctcccctggggaaatttcttctttcatttgctgtaaagtgacttctgctgaagtgtgtgtttttgaagtggaaaattgaaagcacatgattcattccaaaagcaaactgttagttcacagctgagaaatcactttgctattggtccaaagrgttgcttctcaggtttgaggggggcaaatttgtaactccactttcaccctctccgactacagaaccactccattgacagaccaagagccagagaaatgaagatcgaaatagcacctttattcctgataatgttaaattagagggggtggcttgtgtcagaccagaatgacctgctactctacccctgagctgatctgatcccccaaaacttcaggcttccccagtcggggcagagccagccccacgaatcttaccacatggctgacagcagagcttgtgtgttctcccagggcaggcatataccaaaagagagggagagggaggggaa

SEQ ID NO: 631376 - DNA, 500 bp, Homo sapiens
tggcaaaaaacaacaatttgggcacttctggacacattacaccttaaccataacttattttttttctggcctatcagagcaaactcagtggagttaacgaggctgaataaacatggtagaggagtgaaaaccaccttcttgtcttttccatggaaaactaaggcaatcaggtgcattgggccatatgytacaggagcaaacatccacagggttggaggtagtaccaggtccagtttgaagcccagggcagcctctccacttcgtcagcccagcagactgaaatcctctgccaaccaccagaggggatgcttggagtcttgtacttgctgcccccacaccaatttacaaaactgccttagtcttcctagtcaggtctgcatcatgagccagcaaaggaggctaccagaaaagggacttcctgcagctaggaatagaactgacacagtgaagtcttgcaaagctcctgaagagaggaaaccttcctggcactagctgatgct

SEQ ID NO: 631377 - DNA, 515 bp, Homo sapiens
tgccactggctcatttattccacacatatttattgcaagctttttatgtgtcaggcttgttctaagcactagagtatagtagtgaacaaaacaaagcccttgcccttatggagtttatattctagtggaaagagagagacaataagccagaaatcagtgaatattgtgcccaggtagtgctaaaggctatggagaaaaataaaatggaataaaaagacagaaaaaaacactcgrggtgggagaggtgtgctattttatataggatggttagagaaggccttatgaaaaggtaacaaaaccttgctatgcatataaccaggaaaggagcattttagcaggaaaaaatgtaaaatagaaagggcacagccaaagctgtggccgaagtgcagtgaacaagcgggaggactgagagaggaggtcagaggggtcagagggatcagaagggcctgatcatctaggacgctttaggctggcataggtcgttctgagtgagccgtcggagagctttaagcgga

SEQ ID NO: 631378 - DNA, 603 bp, Homo sapiens
gcagatattaattgggcaactactatgtgtctctgctcaaccctagaacacactggtgaacataaccaatatagaactagcactcaaattgctcactatctactatggggtatggggagctgataagtaaataggcaaaaattacagggagcgggggaaaaataacttacgttaaagcttaggcagaacttctgaaattggagagctctcttctctttagcaatataccttgatgggcatatgatgaaaagataaggctcagggcctggcctgccaggaggagagtgagtcaaggtattgcttttcattgtaaaraggaaatgttaattcccttgagtagacttactaggaagagtcaagaggcagtaatggatataaatagagaacatcatgagaattggggaaaatgaaagaacccattacccagaagaggcaaaagttagagaagttgatggtgatgggaatatccaaaggacttttaagaccaagctagtatttgttttaagttctttgctgtgtgctacccctctgcctttccttatatcacttaagtaaaatatatcatacaaaatagctgtcgttagtgttttgtggaaattgttg

SEQ ID NO: 631379 - DNA, 603 bp, Homo sapiens
gcagatattaattgggcaactactatgtgtctctgctcaaccctagaacacactggtgaacataaccaatatagaactagcactcaaattgctcactatctactatggggtatggggagctgataagtaaataggcaaaaattacagggagcgggggaaaaataacttacgttaaagcttaggcagaacttctgaaattggagagctctcttctctttagcaatataccttgatgggcatatgatgaaaagataaggctcagggcctggcctgccaggaggagagtgagtcaaggtattgcttttcattgtaaagaggaaatgttaattcccttgagtagacttactaggaagagtcaagaggcagtaatggatataaatagagaacatcatgagaattggggaaaatgaaagaacccattacccagaagaggcaaaagttagagaagttgatggtgatgggaatatccaaaggacttttaagaccaagctagtatttgttttaagttctttgctgtgtgctacccctctgcctttccttatatcacttaagtaaaatatrtcatacaaaatagctgtcgttagtgttttgtggaaattgttg

SEQ ID NO: 631380 - DNA, 561 bp, Homo sapiens
gcagcagaatacaacatccccttgtacgttgcaggcatacagtaaacattgagcagaaaaaaaaaaaaatctcaacatacccagaagatgaaacagctggtgttcatcagsgcattccagtggaaaattcatgaaactgcaaaaaattctgtttaattctcactgtcacctcttgccccttggcagtaactcttgaagaataatgacatgaaagatatattcagtttagagttttcctcactctttaccaacactccccaaattaagagtttttctgcccttcttcttccttctgatacagggcagaagcagagttgtgtagtaaaataaaacactgatagagttaggaaggtcgggattctacctctagcttgctggtaataattatataattttgggcaagtaacttttgattctctggtctctctccattatatcaccaatgagactattgttatgttgggaccagtattcacttatacactgctggtggaaatgtaaattagtttagccactgtggaaagtagtctggagagttctcaaagaacttaaaatagaact

SEQ ID NO: 631381 - DNA, 471 bp, Homo sapiens
acacaaaaaataaaaataaataaatccagcatctaagaacagatttgaaaatttttgagcttagataagtatattcaagaaaaagcaaggagggtattacacaatattctgctacatttatcagtcttaggatgtcatggttaattcagaaatatcagaattattagaaattttctttggtaacttgcccaacttctttatatttctgtaaatgtatctatgtagatggttaagcatcttgatttaaaagataaacggtttcatcaatcmcatagaagtttcattcacataatttcaaacattcaggtatttggaaatctattgatattaaatgatgaggttttcttctgatgattccttttgtcctccctgaccatcctgattgggaaatccccatttcaggcatttgtggaaagagggctgtggcagaactccagagaacaagggagtcaattcttagcttttgaattc

SEQ ID NO: 631382 - DNA, 547 bp, Homo sapiens
cccatcttcgtggactacctagtccaggcattgtaatttctcacctgaactactgcagttgcccctaactggtctttctgctccatttttgccaatatgtaatcagctctctaaacagcagcctcaaaattctttaatgtcttttcactgcagttgggataaaattaaaattctctaccacaggtgctgggccctaatagcatctctgacctcatcaactgttttctcttcccttayccctttccagctgcatctgcctcctttccattcctcatccccaccaattttgttctcatcttaaggctcttctgggactcttcctccaaatcctgtcattgctgtctcattaacattctaatctcagctcaaatgtttcctcctcagaaagctgtccctgaccacccaatctaaagaaatctttcacctgactcactctatgctatgccacccttttaaatttttcttcatgagtgttttcactatctagaataatcatttttatttgtatgtttttcattatatctctctcattaaagtaaaaactcta

SEQ ID NO: 631383 - DNA, 636 bp, Homo sapiens
atgaaaagttattcagccacaaaaagaataaagtaccacaataagaatgcacctcaaaaacatgctaagtgaaagaagcctgacataaaaggttacayattgtatgatgctactgacatgaattatccagaataaataaatacatagaaatagatagattggcaggtgccaagggttgcaggatagggggaatagggagtaacagcttaatgtatatagggcttcattttggggtgataaaaatgtttcaaaagacgatagaggtagtgtttgtgcaacattgtggatgtactaaatgccactgaattttcactttaaaattataaattttatattatgtaaattttactttaaaaccggtaagaaataaacaggtcttcacttatgtagttttttaattacaggaaatatattttgatataattctatcttctttaaaatccttgtcatatggaatttatggttacaactcttaaattgaaagttaacactctcctgtagatttgaaagaatcctggggtatatcaggaacatgttgattctttgacatgtatatacctgctcatcctgtacatctactatttataatacctatttcagtcttgaagcctgcaacttttcaattctatcaccccc

SEQ ID NO: 631384 - DNA, 584 bp, Homo sapiens
tttacccggtcaaatacaaacttctgtagtgacaatgaccatattttctgaactgcaaataaagatccatggtctcacaaatacaactgttcctaagggggaaacakgactcaatattttaaattgtgactgctctagaaaaatgtgggacatatggtgaccatacccatggttctcaaagccagatgctgactggctccaagagaagaaaaccaaaacaatcagaaatcccttctatttgccaaaacaaatcttgtgtctctcccggtgttattcctgtagctatctttgtttgaattgggcctgttcaccagttccatttctgctaccatctcaggggaggagggaaagaaaatagcttcacgttcactcatgttagcatggaattctttttttgggtgaattttaggagaaaaggaaatttgaaaaccttttttattttgtgttgttttttctttctttttttatttagagagtcttcaactatacttttccttctggtccttcaataatgaataacagtaataataatgttgctattattattaaatgcattctatgtaatgggcattcatcatgcatat

SEQ ID NO: 631385 - DNA, 586 bp, Homo sapiens
ttacatttttcttcccttcaaaaagatgatagaagagtgaagatgagtaaaagtgctatgagatgtctttgtatccactgtattttataaaacaatttataaatttcagttctttattattagtgataatgagttttaaacatataattgatcatgccacttaattggcaagccattgtttagctggccttggcaagcacccttgtgctctgagtggctttggcatacatttctcattgaagaccatttctagctatgatttttgcttttaggaataaatagactggtagtagaaaattgtaaactgtagacagaattaggttttcattttgagaagggggtaacgtaaacattgggaagggccaaataagtgcaaatgagtatttcttaagtgtgcacctcttatcccacccctttccagagattccaatacagttttcctggaagtgccctttccctaagccctctggctctgaattactgttttggaaggtattaccaagccattttkttctttcactgacatttaggattaaaattcgagttaattcagctgcctgcttcttcagctttgagtgaatgatgc

SEQ ID NO: 631386 - DNA, 544 bp, Homo sapiens
cctctggctctgaattactgttttggaaggtattaccaagccatttttttctttcactgacatttaggattaaaattcgagttaattcagctgcctgcttcttcagctttgagtgaatgatgccaagatagattttttcttaggttaggtgatgtgtgaccatttagagaaaggaagagtagatgagttgaagcacataggtgtaacttgatatagtctcctccagggaaaatgtcctgcttgaagcatttatagaatggaatcttttcaaggttgagaagggcactgtcatctatgtgtggtattggcaaatctwcctgatgggtccaaatgttgcatcgtaggaaaatctaatcatagataaaatacattttcctactggaagaattttaatgttgtattagttggctcttttggctgcaatgacagtactaaaacttgaattaatatttaaagggaattaattttgttcattaaatcaaagagattatttaacaaccaaattatgggaagaacaaggatgtcagtagtcactagacaagac

SEQ ID NO: 631387 - DNA, 544 bp, Homo sapiens
cctctggctctgaattactgttttggaaggtattaccaagccatttttttctttcactgacatttaggattaaaattcgagttaattcagctgcctgcttcttcagctttgagtgaatgatgccaagatagattttttcttaggttaggtgatgtgtgaccatttagagaaaggaagagtagatgagttgaagcacataggtgtaacttgatatagtctcctccagggaaaatgtcctgcttgaagcatttatagaatggaatcttttcaaggttgagaagggcactgtcatctatgtgtggtattggcaaatctacctgatgggtccaaatgttgcatcgtaggaaaatctaatcatagataaaatacattttcctactggaagaatttkaatgttgtattagttggctcttttggctgcaatgacagtactaaaacttgaattaatatttaaagggaattaattttgttcattaaatcaaagagattatttaacaaccaaattatgggaagaacaaggatgtcagtagtcactagacaagac

SEQ ID NO: 631388 - DNA, 441 bp, Homo sapiens
gaattcccagcttgccacacaattttgtttaccacagaatccagacaggtttctgccgaactttgggttgaagggtagatgtgatactcatcccttcacagttaacccactggagcatgtggttgttaaagaagaataaattctaaaacaaattcatatyttctcacatatgacaaggttcagacaccatgtaactgaatagaaatcaccttggaaaatattgcatgcactgataggagttccccagaaaagctgcaatgtaaaaggcaataggcattgaaacaggcaagcaggagacaaatctcaccatttcttcctaggcttcagtatgagaagtagtggttgacatgcacagtcgcagtctttcttcaaggagcatctggcccacgtttctgccatggagaacaggtgtgacctaagtgcagagccctgagcagctga

SEQ ID NO: 631389 - DNA, 656 bp, Homo sapiens
ttgggttgaagggtagatgtgatactcatcccttcacagttaacccactggagcatgtggttgttaaagaagaataaattctaaaacaaattcatattttctcacatatgacaaggttcagacaccatgtaactgaatagaaatcaccttggaaaatattgcatgcactgataggagttccccagaaaagctgcaatgtaaaaggcaataggcattgaaacaggcaagcaggagacaaatctcaccatttcttcctaggcttcagtatgagaagtagtggttgacatgcacagtcgcagtctttcttcaaggagcatctggcccacgtttctgccatggagaasaggtgtgacctaagtgcagagccctgagcagctgacttctgcttggaattctaaactaatggtattcatttgtttttactattacctttggcagagatgagaagtccaaaggctatagatgtgaggcaaatgacaaaaatctgatgtagacaggatgaaggaaaaccccatctacagcagagagcttctactcatctccagtaggttatttgcttcggggtatttagctccaagcagctctattctttcttgtaaaagaacctataaattcaacttttacaaacactgattaaatattccacccatcacccc

SEQ ID NO: 631390 - DNA, 570 bp, Homo sapiens
agtcctctcctctcttagtctctagcagcaccaggaaggaaaaaaattaggttagtttggcatattttttcttagggggtttatgctgttttcaagcaatcagcactttctttgcttaggctatcaacacatctatttaataattcattttagaattttgccagaaattaatagcaatctcattggcctacctctcctgagatccttctattactttttaaagttaagatagcatatgcctgtaaatttttgaaatctttcctattctcataattattaaaactatagcttgtatcaatggaacaaaattgaaggaaaagctaaaatgtataggaacatcatccagatcraaatgatcttgacaagttaaaacagtgaactcaattacatgaaattttatacgttttaaaaagtatatcttctaaatatatattaaatgtataaattatatatttatagagtatattatataatatactcctagatttaagcaaaaaaacaaatgaaaaaattatgaaaagaaataaaaaacattgctcgatggccaatcgagcaggttttacaggcatc

SEQ ID NO: 631391 - DNA, 584 bp, Homo sapiens
tttctaagacacagaaaccctaagaacagggtaattattgttgggaataaagtttttgatgttgcaaaaaaaaaaaaaaaagaagaattaaaatgggaacaaatgatctctcagcaaggcaagctttactttctgcagaaagggtgctactcaacagctctccagtcacgagagcacaccaaacmaaggagacaaagttatttataacctgatgagtctaccctattctgtgtccagtttccattggctggaataggacctcacattttacactttatctggttggctattagtttaaaactttttttaactgggtaaggggaacagaacaaagaaagaaaaggaagttgcccagggatagttaaagaagcatctccaaataaggaatggcatgcgctatgggctggggcttgtctagttctgtccaggcatgccagagcaagctaggacagctgatttggaatatatatatatatatatactaatagtggatagcaatcttatagtaggaaattataactttttataatctttgaagaactttcccatttctcacaatctttaaagaccatggctcaatcaat

SEQ ID NO: 631392 - DNA, 553 bp, Homo sapiens
cactgactgcactttaaatgtatgaccaccaaccactactttgcactttttataatggtactattagccttggatgatggctaatcacataccaaatgaatttcacccattctaggaacaatggagcagtgagtggaaggaagctggtgagaaagcactttcattggtttgtatggcagaagacacccagcttcatttgtgcctaaactgaaagtgagctgatttggctttcatcttccaagggtcccaaggttgcagcaagcctcaaaaaaaaaaaaaaaaaaaagtaactatggagaaacaygctctcttgttagcataaaataattagctaagtacaaaggggaagcaaaccaaatggtggaggagttcctgttgtttacctcctttccaattctggatgatagtttccaaagcacaggaaggcagtttgcccccaagaattttcaaaccacataaaccattccaattccctttgatatgccccagctacccagcattttcgaagaatgcagctcagcttcctttgcttctagaagttatgaagcacagt

SEQ ID NO: 631393 - DNA, 563 bp, Homo sapiens
atatttttgagtgaatgaattaccatttgaattttagaaagatcactctggtgcagtgtggggaatgttttggagaagaacaggattggaaatgaagagactagttagaaggctctagaagtaactcaagataagaggtgttgatgtccctaacccagttgtggatattaggatgaatagaattggaaaaacacacacacatctactgttgtgtttgtcacactatgttataatatttttcctatgggcccatctcccataacaactatgacatccttgagaataagccattacttcctcaccacattattctcaatgcctaaaattggcatatggtagccatttgaaaaagatttattgaattaactgattaatgcgtgaaaggattataatttgtaattctcacaacgaccttatgagatttctttattkggttgagaaaactaagtcttggagagattaaataacttggaataaaatctgagcatccacattgtccacaaaacccaaaatgatctggcctctccaacatcacctatgcaacattcactctcattcactcc

SEQ ID NO: 631394 - DNA, 365 bp, Homo sapiens
tgcctgagcccaggagttcaaggatgcagtaagctaggcgcaaatgcactcctgcctgggtgacagagcaagactctgtcttcaaaagaaaaaaaaaaggaaaagaataatgccttattaaagagaaagtacggttctttgaaaattttttatttcattttaagaagttctkggcagtattaaagtttctgatctatcttagtcatactaggaacatgaatcaccacataccttcttcttgcgtgtgtgtgtgtgtctgtgtgttgtatttgtgtgtgtgtacaatcttgagaatcagaacaacattttggccaaagactgactgcataaatgatggtggccccataagattataatggagttgc

SEQ ID NO: 631395 - DNA, 534 bp, Homo sapiens
ccaaagactgactgcataaatgatggtggccccataagattataatggagttgcaacattcctagcacctagcgacastgtagctttagtaagatcgtagcagaaggcattactcatgtgtttgtggtgatgctcatgtaaacaaacttactgtgttgctagtcatataaaagtagaacacatacagttatgtatagcatacaacacttgataaggataataaacaactatgttgttactggtttatgtatttgctatactgtaattttaattattattttagagtacccttcttctacttacaaaaaaatttaaaaagttaattgtaaaacagcctcaggcaagtacttcaggagatattctagaagaaggcattgttatcatgggagatgacagcttcatgtatgttagcgcccctagagacaacccaatggaaaaagatgtgaaagtggaagacagtgatgttatttttaaccctgatcctgtgtgggcctatgctaatgtgcgtgtttgtgtcttagttttctaacaaca

SEQ ID NO: 631396 - DNA, 376 bp, Homo sapiens
attgtaatagcaagtatatgtgtatgtgacatcacattagtgttgatgaaaaaagccagactctgtraaatatttattctgagccaaatatgaacgatgacagctcagagtactgtctcaagaggtcctgagaacttgtgcccaaggtggtcaggttacagcttggttttatatattttagggagacagaatgtattagtccgtcttcacactgccaataaagacatacctgagactgggtaatttacaaaagaaagaagtttattggacttacagttccacatggctggggaggcctcacaatcatggtggaagccaaggaggagcaagtcacatcttatgtgatggcagtaggcaaagagagagcttgtgcaga

SEQ ID NO: 631397 - DNA, 630 bp, Homo sapiens
atgtcaaatagtatgtctgtaaaggagaaatgagatggtagctcatggaagagaggagcttgaggttaataccagggatcttttttttagtggtgtaaaatgtccatttattttctcacagatctgtatattactcaactgtgttctctgctgggggtctctcaaggctgaaatcagggtgttagactggctcttatatgcaggatctggggaagactacatttccaggttctttcaggttgtcataattcagttcctcatagtttctcatgtttacaggactgaggttcctgtttgctggttgagcccaccctacagaggccacatgaattcttcattctgcagactcctccatcttcaaagccacagcgtgttgaatcccttttatgcttcacatctctctgacttgctcttttagctttaataattaaaaaacacctccaaattgtgatttcacataaaattcgccattctaacygcttttcagtgtgcagttcagaagtgttaagtatattcatgttcttgtgcaaccaatctccagaactttctcatgttgcaaaactgaacctctgttacctgtgaataacaattcctcgtttctttctcctcccagcccctgacaaccgtcat

SEQ ID NO: 631398 - DNA, 506 bp, Homo sapiens
gaagtttgttggcattgtagaatgtagttaatattaagatgtactattgaaagtaggatgagcctggcatggtggtgtacacttgtagtcccagctactcgggaggctgaagcaggaggatcccttgagcccaggaatttgaggttatagtgagcaagctmtgattgtaccactgcactccagcctgagtgacaaagtgagaccctgtctttaaaaagaaaattaggataaactaaagtaaaaatgattcgtggattaaagtaatgggtattcatagaaacataaattgtctcaattacctggtttaaattttatctacttactggcttagaatgacattgggtggatttcctggaagactgaatcttcaatgtggattttcagtggatttttagtaaaagggtattccatgagaaagaaagaaggaacagagctgggagtctgatctgacgagatatggcttcaaagctttaaaagctggcaagcatgatggtgaactcaaccag

SEQ ID NO: 631399 - DNA, 520 bp, Homo sapiens
tagtcccagctactcgggaggctgaagcaggaggatcccttgagcccaggaatttgaggttatagtgagcaagctctgaytgtaccactgcactccagcctgagtgacaaagtgagaccctgtctttaaaaagaaaattaggataaactaaagtaaaaatgattcgtggattaaagtaatgggtattcatagaaacataaattgtctcaattacctggtttaaattttatctacttactggcttagaatgacattgggtggatttcctggaagactgaatcttcaatgtggattttcagtggatttttagtaaaagggtattccatgagaaagaaagaaggaacagagctgggagtctgatctgacgagatatggcttcaaagctttaaaagctggcaagcatgatggtgaactcaaccagaatgactaactgtgatcccacatagccaaccacaggcagcctgagcaccaggggaaatttccagagaagacacaaaacagcctcatttagactgaggct

SEQ ID NO: 631400 - DNA, 588 bp, Homo sapiens
gtcacaagatatcaacggcctgatttctatcagggctatctgacactaaagttcaacattcccttcctgaccaccacccgcacaccccaacagtacaacatatggacacaacctttgtagatatgctacctgcttgcctgcaayatgagttttacaccataaaattaggtacagttaatggtaattattaaacagatggactactctaaacagcaaatacttagcaagaattccacttgaaagcaacccctgccttaccctttttatacaagaagtcttttttagaaataaggaaaaggatagaatttgacccaatatctatctgcatgttatttgccagttttagctccatgaataccacccagcagtactcaatatatgtctatttaagactatcaattgatagtaattaatccagaaccaacaaacctatgaattcattcaccctgaaataccgaggcatgttatttccagtagcactgcactggtttttgctagaaccctagccaagttacttttcctctttgtctttcaatgcctttacctaaaggaggattttaagttcataaatctcctccaattctgact

SEQ ID NO: 631401 - DNA, 535 bp, Homo sapiens
catgcacggagcagccactcccagttgattgagattgtcaattgggttgaaatctatttaccatacaggctttagatactttagtatagataggtacttcagcacaattgccatattttgactattctgcctttagttgtcytattatagcttttcttagttatgtttttgttgttgttgtttgtttgtttttgttttccctcaaaggttcaacatacaaatttagggtcattgccatcaaccattatggtgagagttttcggagttcagcatctcgtccttatcaagtggttgggttccccaatcgcttttccagccgtccaataactggacctcacattgcatacacagaggctgtcagcgatactcagatcatgctaaagtggacggtcagtacacatcttctggaatgagattttgtggtttggtcatgttaacaatcaatttaatattctcatgacacaatacagtaaacagcaaattttgaacttttaattgaggggaagtgcaagggcaccaatatttgtctaaataa

SEQ ID NO: 631402 - DNA, 478 bp, Homo sapiens
ctaatttttttggttttagtaaagacaggatttcaccatgtgttggcccaggctggtctcgaactcctgagctcaggcaatccacccgcctcagcctcccaaagtgctgggattacaagcatgagccaccacatctcggcccattttcttttttttttttttaccaaccgtcaggctccatgactttggggactgtgtgtaccctctagagctcatgaggcccatcccctgcctccatgcatgaggatggcwtagagaagactggtccttattcaactcttccctctcacttgtcagtgtcttggctcctgaccacaaggtatggaacctttagggccccctccagacacagaatccagctttgtcatcctctaacacagaaaacatttcaggacttctttgggatgttcgacccacctggatgtgtcctggaaccctactacctgtctgcagcaggaagtcaaacagaaggcagcca

SEQ ID NO: 631403 - DNA, 478 bp, Homo sapiens
ctaatttttttggttttagtaaagacaggatttcaccatgtgttggcccaggctggtctcgaactcctgagctcaggcaatccacccgcctcagcctcccaaagtgctgggattacaagcatgagccaccacatctcggcccattttcttttttttttttttaccaaccgtcaggctccatgactttggggactgtgtgtaccctctagagctcatgaggcccatcccctgcctccatgcatgaggatggcttagagaagactggtccttattcaactcttccctctcacttgtcagtgtcttggctcctgaccacaasgtatggaacctttagggccccctccagacacagaatccagctttgtcatcctctaacacagaaaacatttcaggacttctttgggatgttcgacccacctggatgtgtcctggaaccctactacctgtctgcagcaggaagtcaaacagaaggcagcca

SEQ ID NO: 631404 - DNA, 607 bp, Homo sapiens
cggatcttggacccttatgtacactgctgtatgttactcttacaattctgtgctcttctgtgagttcaggtaagagtagaattggggagrgggtggtttggcctttactcatcttaatcctataaaacataaatttgtacttcaatgctttgtgataatggtgctatctaaagatgtttctaagattggtttgaccaactacatgatttaaaaactcgataaattaagcaatttaaggatctcttggtagtgctttgggcattagcaggccttcctgtcctggcccttataatttatccctttcattttttaaaaaaaaatacatattttccaatcatgctttttttaaataaggggatatgtcactaatttctgaacttggaaagaacaggaataaaatgcggactaaatataccaaagagaagttttagaatcagcatgatactgtgttcaactgggagtgagagaacttggttcaaatcccaggtctgccactttctcttatgagcttgcctaatttattgtctacctctttgggttactgaaaagcataaatgtgtttgttgttaaatgtgtatgtaagccccatgcctaagacatggttcac

SEQ ID NO: 631405 - DNA, 543 bp, Homo sapiens
ctgaattcttattcattgaaaaatagcaaactgtatgataactccctactaaccagaatattttattagctagttcacctactatgctgcagtttattgtactatatcaccttcattaaaatccacttctatatcactctcagtgtgtgaatcatatattgaggtgcctcggcctctttctgggataaagacgcgagtcccggagacataagttagatctcatgacttaaatgttgggccgggcactgtggctcacacctgtaatcccagcactttgggaggctgaggtggtggatcactcaaggtcaggagttcgagaccagcctggccaatcatggtgaaaccccatctctactaaaaatacaaaaattagccaggcgtgcatgtagttccagctactcagggggctgaggcargagaattgcttgagcctgggagggagaggttgcagtgagctgagattgtgccactgcactccagcctgggtgacagaatgagactccatctcaagacgactaccacggaaacttaaaatgttttaat

SEQ ID NO: 631406 - DNA, 511 bp, Homo sapiens
acaataaccagcctagcctgggtgcggtggcttacgcctataatcccaacactatggtaggctgaggcgggaggaytgcttgagcccaggagtttgagatcagcctgggcagcatagtgggaccttgtctctgcaaaaacttaaaaagttagcagggcatgttggcgtgtgcctgtggttccagctacttgggagtctaaggagggaggatcacttgaacccaggaggttgaggctgaacagagtgagctgtgttcatgccactgcattccagtttgggcaacagagtgagagcctatctcaaaatcaaaaacaaaataaccagtctaaaatccttcagagacaattaacatgccagtcatacccaaaatgttagctgggggaaatcctactcataataaagttttgagaggtagtttggaaaactagtttagaaagaaatcacataaccactaatgtgtccaaaagatctgtcatttggagagttacacagactacaaagaagggaacag

SEQ ID NO: 631407 - DNA, 511 bp, Homo sapiens
acaataaccagcctagcctgggtgcggtggcttacgcctataatcccaacactatggtaggctgaggcgggaggattgcttgagcccaggagtttgagatcagcctgggcagcatagtgggaccttgtctctgcaaaaamttaaaaagttagcagggcatgttggcgtgtgcctgtggttccagctacttgggagtctaaggagggaggatcacttgaacccaggaggttgaggctgaacagagtgagctgtgttcatgccactgcattccagtttgggcaacagagtgagagcctatctcaaaatcaaaaacaaaataaccagtctaaaatccttcagagacaattaacatgccagtcatacccaaaatgttagctgggggaaatcctactcataataaagttttgagaggtagtttggaaaactagtttagaaagaaatcacataaccactaatgtgtccaaaagatctgtcatttggagagttacacagactacaaagaagggaacag

SEQ ID NO: 631408 - DNA, 577 bp, Homo sapiens
accctgaggtctctaagacacttccagggggtacaggaggccacaactattttcatgataatactgtggcattatttgcctttttcagcatgttgacttttgcactgaaagtacaagagcaacagtggataaagctgctggtgcctcagcacaaatgcccccaatgtcccagaggtcattgtgttgtttaccatctcatgagtgaaataagaagataaaagggctggrcacagtggcacacccctgtagtcccagctacttaagaggctggggcatgcgggtcacttgagcctaggagctggctggaatgagctgtttgtgccagtgcactccagcctgggtgacagagcaagactccgacccaaacaagggagagaaagccagttttgcttaagaatgttcttaagaaagcagtaaaacgtgttaatttattatatctcaaccttgagtctgcatctttttcatattttgtgtgatgagatgggacgtgtacactgagcacttctgccttgcagcaaagttcgatgtctgtctctaagactagagcctgtgtgaggtggagctactgagttgtgaa

SEQ ID NO: 631409 - DNA, 581 bp, Homo sapiens
tgtacagcaacccataaagcctaaaatatttaccttctgacctattataaaaagagcctgctgacctctgctcgccttacatgacatcattctagataggactctgggtaattgagttatttgtattggatttagacagaataggactgtaagtctgggaatgttatataagatgtttggccccagaggtgcattgcatcagtcattacccagtgggttactcaggagtattaaaaagtaastgttaaaaagcaacaagtatgagctgggtgccgtggctcacacctgtaatcctagcactttgggaggctgaggtgggtggatcgcttgagctcaggagttcgagaccagcctggccaacataatgaaaccctgtctctcagaaatacaaaaattagccaggtgtggcggcgcatgcctgtagtcccagctacttgggaggctgaggtgggaggatggcttgagctggggaggccgaggttgcagtgagctgagatcatgccactgtactccagcctaggcaacagagccagactctgtctcaaaaaaaaaaaaaaaaaaaaaagccacaagtctggacc

SEQ ID NO: 631410 - DNA, 447 bp, Homo sapiens
ttctacaacaaaaatacgcagaaattttgattgagaatgtattgaatctacagatgaatttgtagaaaattgattatgtttatgatactgagatttccaatccacgagcctatttatactaatattttgtagttttcagtatgtaagttttacatacattttgttaaatttatccctagtacttcatgtatttggatgatatggcaagtggaatactatacttaaawttttttttccagttatctgttattttggtattctgaccaaaacataaatggttttcttgatatactgaccttgtattcttacagtagtgagatcctactgtatctcgctaaactcacttaccagtcctagtagcctctctatttttattttttagagacagggtctcactctgttgcccaggctggagggcagtggtgctatcatagctcactgcagcct

SEQ ID NO: 631411 - DNA, 433 bp, Homo sapiens
gaattcttacagctattgtattctagttcaagagtcttcaatcagaaaaaaattgaaaatggccccaatagtccttgaaaattgttacatttttactgtagttccaaactatgaaactgtttgactgcagtttcaaactcaattcctatggttatgagrtttctaacctcgcccttctccctacagcccctttccccaccatctgtttctggctactttctagtttttcttccagttgtcccctgtggcaactgtactagttttgcttgtttttctatttatggtttaaaaaaaaaaagttttatttctcagtctttcctctcatttactcttctgctacttattttattcctcctggaaaaatgacaaatttgtatcaagttttctttccaaagttgtgtcttctctgctgcttccccggttgctggcttct

SEQ ID NO: 631412 - DNA, 564 bp, Homo sapiens
aagcatacaattttagctatgaagcattaacctcccccaaatggtctatttattcttgaggctaaaggcctgcttactttgcagaataattttcttttctacacagattttttaaatagatgagaataaagaactagcaggcaactcagggtgcaggaaaatctttggggtggctagaggtgtgggatttgtggattttaaaaggttatgataaaataaaacaaaatcttttaaaaatgtttcccttaaatgtagaagaaaaaagtatattttaaaaatgtataaacatttcatttaaaaatgtcttgccacattgatggcttcattctatcattaatttctcaaagacmcaaagatatttgcccagagagggcaagcttcattattaactatatttgtgatcgcttctagtttggggagtagacttcttgtcagatctgattagatagtctcagctgttaggttgggactgagagctcatactaggagcattaattttgctattttctgttggttatttgtgcttgaattattgtctttattcatcttcactgtagggaattc

SEQ ID NO: 631413 - DNA, 518 bp, Homo sapiens
tcttgaaaaccatccacagacatgcatatgtgcagaacataataaagaattaatgggagctgtgacaggaattaattacatcttaaaactacattggcggcagagcgcggtggctcatgcctataatcccagcattttgggaggccaaagcgggtggatcgcttgaggtcaggagttcaagaccagcctggccaacatggtgaaaccrcgtctctactaaaaatacaaaaattagccgggtgtggtggcgtgcgcctgtaatcccagctactcgggaggctgaggcaggaaaattgcttgaacccaggaggcggagattgcaccgctgcactccagcctgggtgataaagcaagactctgtctcaaaaaaaaaaacctacatcggtttcagttacctgttagttttggcctttttctactttttcagttgcctttttaacaaagagagtaaatttcaagtgtctcaccacaaaaaatgtaatgagatgatagatatgttaattagcttgatttaatct

SEQ ID NO: 631414 - DNA, 602 bp, Homo sapiens
gcccattgccctcaagctgttgtccgagatcctctgggagctggatcacgtacatcccagctctcccgccccttggctttccctcagcttttcagggccaactctttggccacttcactgtttgttaagctcttcccgcagagcatgagcaatatacccgaaagccaygggcactcaataaatgttagtttgaatttcattcatttactcattggaattttcacttttgtactgaagtgaggaaagcacgctgattttccaggctgttctgtctgtctctgtgggatggtggagctggctttcctgtccaacctgagaggaacgtactgtctctctctcctctgcctctccaacaccctgggtgttttgcttttatagaattgtcacactgtttttcaactttctgtttttactgtccttttccttgctagactacaagctccttgtggacagggaggtcatatggcttgctgtgaaaataagttcttgactcatgttcactttttccactgccatatctcccactctcatttcttctgtactgcacggtcagtcttattttgtatttggctctatgaaggaataaataaaataaattgaaa

SEQ ID NO: 631415 - DNA, 390 bp, Homo sapiens
ttagaaggtagaatcaactggacttgctgattgaatgggaaaagtgaagggaaggaaaataaccattagttctaattgtctgtcccccaaacaggaaacaaagataacaattagatctcattatctgtcccccaaacaggaaacaccaaaaatggctttgggtggcagaagaagcctgtgcaaatgctatttaactcattattcacagaatattcattaaataactatgctaaatgttttatatagaaaatgaaaaattactgtttctttttaaagtcaagtagctttgttttaaaggagacccacttrttaatgttctatttgctgttacttagacaatctgtgtttagcaaatcatagctgtgtgtgtgatgttctgagccactattg

SEQ ID NO: 631416 - DNA, 545 bp, Homo sapiens
tgtccctagtcctctataattgctatacacttggtacggagagctaatatgtcaaaaatgtaagtatatgggtgtaatatgaggagatttctcaaaaaaaaatcatgagctctctctgggctggctctgttttgacaaaccagctgcaactgaaagctcctctctcttccagcaaagaggttgcatcccagcttagcttcccttaaaaccagagatttcctcccccagggcaacatcccacagaccttagggcctccaggtgcagggagctggtgcttccactcagctcccaaaccgctggcagccaagccagmctgcctggctgcaatgtggtctgatcagatcttcaccccttggccaaggttgctttcaggctttccctaaaagaaagaacaacagggggcaggactctctccagctgaactcagacctacaccacgaggccctggtgtgccttgtgagcatgggaagtacttgaaccttcttctgttgctgacccttgctttagaaattttcctagtaaagctgattccaaaacttatgcc

SEQ ID NO: 631417 - DNA, 576 bp, Homo sapiens
tggatgatataactcttagtaccatatagcttgaggctgtagatgtccctagtcctctataattgctatacacttggtacggagagctaatatgtcaaaaatgtaagtatatgggtgtaatatgaggagatttctcaaaaaaaaatcatgagctctctctgggctggctctgttttgacaaaccagctgcaactgaaagctcctctctcttccagcaaagaggttgcatcccagcttagcttcccttaaaaccagagatttcctcccccagggcaacatcccacagaccttagggcctccaggtgcagggagctggtgcttccactcagctcccaaaccgctggcagccaagccagactgcctggctgcaatgtggtctgatcagatcttcaccccttggccaaggttgctttcaggctttccctaaaagaaagaacaacagggggcaggactctctccagctgaactcagacctacaccacgaggccctggtgtgccttgtgagcatgggaagtacttgaaccttcttctgttgctgacycttgctttagaaattttcctagtaaagctgattcc

SEQ ID NO: 631418 - DNA, 501 bp, Homo sapiens
ccaaaatggaaggcgggacaagggcggcctggctggggcgaggggctggtctgggtccctgggaaccccttgccttgtgggcttcggtctccagtgaggagctaggcagccgggctgcggggccgccggactgtggggtcctccgcgcagcgagctgggaggagcggtcggctgggctgttgagctgcgcctcctccaactgctgggaaactccgcacttcaatattggagcatctctttcccgggcaggtagaattggacagccgagtgggagtgacagctgacagctgacggggctgttaaaagcagagcagtggagtgtggtggtggggtgagctgttgtgggtgcttttttttgttttccaagtgtgggtacgggctgttctgactcagtgtttmtgctcaacctctaagcggcgagttcggtaacacatcttatgaatatttcaggaacgacctcacgggctcacttgcttcagatcaagtttaatgaatatgttt

SEQ ID NO: 631419 - DNA, 471 bp, Homo sapiens
cggctgggctgttgagctgcgcctcctccaactgctgggaaactccgcacttcaatattggagcatctctttcccgggcaggtagaattggacagccgagtgggagtgacagctgacagctgacggggctgttaaaagcagagcagtggagtgtggtggtggggtgagctgttgtgggtgcttttttttgttttccaagtgtgggtacgggctgttctgactcagtgtttctgctcaacctctaagcrgcgagttcggtaacacatcttatgaatatttcaggaacgacctcacgggctcacttgcttcagatcaagtttaatgaatatgtttgtcagcctttctgctctgcacagtgccctgagctttccacatttcatccctttcccccaccacctaggaaaatacgctgctaacccccagtgggccgtagattggtactatcaattgagtctgtcatttggagagacc

SEQ ID NO: 631420 - DNA, 645 bp, Homo sapiens
ttacaggttggtgtttgccttatttgaacactgttcaaacagttggctacatttgattggccaaaactcagcgattggcacaggtgtgggctatggttggtttactcctccacttgttcacgatgtacagaaaaacctttaggctgaacttaaatatgtaaggaggcagctttaggctaaacttgattaacacttccctttagaaaccagagtggtttctaaagaatatgggggcattggagtatgacctgaaatcaaaactacaaaacagcatttattttgttgagatttacgtgataattaataaaacaccaaacagagattagctgttaagtgattattcatttatcttcttctcctgagttacaagccttcatttcccattatctgctgcccatccatgtctcawtatctccagaaaaaggtgaatacatatacaattttgtgtgacatcctttgtatacagacccttatcttttcttggaatattgcatagaccatttcttctaaggaagatgattccccaaaagattttcaggtacactgagaccttgttttatttattatgtaaccacaatgtcttccatagtcttgtaatactagaaatttaataaatgttgagctgaaaaggaatttttatttgaa

SEQ ID NO: 631421 - DNA, 428 bp, Homo sapiens
ttttcatattaatataatattcaggaaattgctcaaagatgatctatttaatagaagcacaattcttattaaatctccacatggacaactgtagaacctggctaaaatttgcctcgaagtctgactttttctaaagctaaatggcaatggtatgacttaaaaataagggatttctgaggccaagatgggaggattgcttgaagccaggagtacaaaaccagcctgggcaacaaagcaagatcctatctctaccaaaacaaaacaaaaccaaaacccacaagggatttctttatgcaggttacttgaaattataggtaatactgggctcttagggattatatagcaccccccaggtgktcatatcagaattaccttagaaagatgtgtggaagagaatgaggatgaggacaacagaaaaagcccttaag

SEQ ID NO: 631422 - DNA, 595 bp, Homo sapiens
ttcataatgaaactaataatttatttatctcacagctgttttttgacttaacagatatcatcagtgacatcagaaactctgttccctaaatcttttttactttaccagttggcattatcaatatttaaaatgtgaattaatcaatctttggaatgaatttactgtacatttcttactttttcctttaaaagaataggaatattccgctcttcagaatttggaagccagattttctgaagattccatattccataaacactgacatgttaatttcagatttcctttgctttataatccactgaaatgarcaaaaacttaaataattgcttttagttgagaagctcaattgtacattctcttaaaatgataaacatttatcaaagctatttaaattaaaatgcctattatgtacatcattagtcataattttaaaagcctttattaaaatactttacatagaattttgactttcatattctgtctcatggataatgtatatgtagcccaatatgtgaatccaatatattaaaatcaagacttatgaaacagatgggttgagttatagtttttacttcactaaagagttttatgctgt

SEQ ID NO: 631423 - DNA, 559 bp, Homo sapiens
ctattcctttaaactgtagataacctggaatatttaaaatagaggcagaattatcaaatttttatatatacacaatccctctagcacacatttatcagctagaatattgagtaatctttatgggtgaggggcagaaatgagatctggaatgtagtgtcatagctgggttgatcagctacatccaaagaatgttcataggtatggaagccaacatagaagctggtttctgttggtctaccttacagctctttatttgaccatgacatttctacaattttatcaaggactcagatgtacatagatcataatgcaaagctcaaagcaatagagaatttggatgacaatcaggattaaatttgaaatctcttagcccagaacaagcactggaactaagattatattttaaaaggatggatgtgaagttcatttaggttctaaaatcacttgctaaggacatagtgtagaagtcctagtttaccaacagtttggttttcaaaaaatagttttagttcacttgagcrttagcaagcagtacagaagaaattaatgctatactttg

SEQ ID NO: 631424 - DNA, 579 bp, Homo sapiens
tgtgttagttattccctaggtaattaatcaatctaactaaaaataggtgcatctgctctgtaactagcactaggttaaattaaagagcctgtttccaggtattctttaataatctaagatcatatttgaaattctagttcaaaatgatgatatgtattttgagtagccataaaataggcttgtgtccaagtcctaaaaataaaattgcacagcacacctaatcaaattagwcaacgatggaagatgaacatgtgtttgttctgagtgtactctacgtgtactctgtcattactctgcattgtgttttgacttttcaaagtatttgtttatagcatacagtggacaactgtcattctttttcaacaatgccatctgaatctcttttccatgttgagggttgtattagtgaaggttctccagaaaaaaggagatatatttatattaagagacttattatgaggaattggcttacttgactatggaggctgagaagtcctacaatctgctgtctgcaactagagacccaggaaatctggtggtgtaattccagtccaagggcaagaaaagactaatggccca

SEQ ID NO: 631425 - DNA, 523 bp, Homo sapiens
ctcgatggcttgacaatgcccacccacactgggaaggggaaatgacttactgaggccaccaattcaaatgcttatctcattcagaaacaccctcataggtgcacccagaaataatgtttaatctgggcactctttgatcagtcaaggagacacagagaattcaccatcacaggggctctcttacatgatgaggcagagcccactcccctctctaggagatgaaagtgccagatgsttcctttccccaaacctccttgcacctgggcctgggcccatgatccaaactctgccccagtggcagattttccagttggcagtgccccttgaccagtgctggagcgtcagtggggccactccagtctgtgcctggtggtggcagtagaggtgtctttactgggccagttctgtgtcagcatttcaagtgttatttttggctacatagcctccatacccagttctctagcccacctggagattttgtgagttgccttcagaacaaattccatttctgcttaagttggca

SEQ ID NO: 631426 - DNA, 578 bp, Homo sapiens
tctagctgaggatttgtgtaaaaaatattcttaccattttcaatgcrgtgttcagaaaagccatatctgacccttaattatttttggtcctaaacgaaggattcataataccgtatcaaatgatttggacgttctgttagctaatgagcatacatcacgttgaaccatgtcaacatttgtttactcaagctcttccacattcctattaaatatttcccacccatcttcatctaatgtcaaagccaacacacacatctgtaatgtgtggcctgatggatactgtcctagaatggcttaggtttgggaattcctctacttgttggaggcaatgctctggttcctcaagccttagtttcttcttcttcttcttcttttttttttttaaaagtgtggttaaagtcaaggtttaaaggccctggatctcaaaacgtgactggtgcctccatgtgggctaaaatcacagccccatggaatcttcttaaaaggtaagttttgtgtatatcaaaggaacacttacacatcatttaaaacattgtatggctacaagacttatatgggaaaaactcattccctaatct

SEQ ID NO: 631427 - DNA, 578 bp, Homo sapiens
tctagctgaggatttgtgtaaaaaatattcttaccattttcaatgcggtgttcagaaaagccatatctgacccttaattatttttggtcctaaacgaaggattcataataccgtatcaaatgatttggacgttctgttagctaatgagcatacatcacgttgaaccatgtcaacatttgtttactcaagctcttccacattcctattaaatatttcccacccatcttcatctaatgtcaaagccaacacacacatctgtaatgtgtggcctgatggatactgtcctagaatggcttaggtttgggaattcctctacttgttggaggcaatgctctggttcctcaagccttagtttcttcttcttcttcttcttttttttttttwaaagtgtggttaaagtcaaggtttaaaggccctggatctcaaaacgtgactggtgcctccatgtgggctaaaatcacagccccatggaatcttcttaaaaggtaagttttgtgtatatcaaaggaacacttacacatcatttaaaacattgtatggctacaagacttatatgggaaaaactcattccctaatct

SEQ ID NO: 631428 - DNA, 578 bp, Homo sapiens
tctagctgaggatttgtgtaaaaaatattcttaccattttcaatgcggtgttcagaaaagccatatctgacccttaattatttttggtcctaaacgaaggattcataataccgtatcaaatgatttggacgttctgttagctaatgagcatacatcacgttgaaccatgtcaacatttgtttactcaagctcttccacattcctattaaatatttcccacccatcttcatctaatgtcaaagccaacacacacatctgtaatgtgtggcctgatggatactgtcctagaatggcttaggtttgggaattcctctacttgttggaggcaatgctctggttcctcaagccttagtttcttcttcttcttcttcttttttttttttaaaagtgtggttaaagtcaaggtttaaaggccctggatctcaaracgtgactggtgcctccatgtgggctaaaatcacagccccatggaatcttcttaaaaggtaagttttgtgtatatcaaaggaacacttacacatcatttaaaacattgtatggctacaagacttatatgggaaaaactcattccctaatct

SEQ ID NO: 631429 - DNA, 585 bp, Homo sapiens
ttactcaagctcttccacattcctattaaatatttcccacccatcttcatctaatgtcaaagccaacacacacatctgtaatgtgtggcctgatggatactgtcctagaatggcttaggtttgggaattcctctacttgttggaggcaatgctctggttcctcaagccttagtttcttcttcttcttcttcttttttttttttaaaagtgtggttaaagtcaaggtttaaaggccctggatctcaaaacgtgactggtgcctccatgtgggctaaaatcacagccccatggaatcttcttaaaaggtaagttttgtgtatatcaaaggaacacttacacatcatttaaaacattgtatggctacaagacttatatgggaaaaactcattccctaatctgtcttaactccagattkgtctttctcaggaataccattttaattcttttaactgtttatactgctgtttcttagtatattaaaagtatcagatttattgattttccactacagaagtgaaaatttaactttcatatctaatccctctctcttatacatgtttctcctttctcaattctcccaatatc

SEQ ID NO: 631430 - DNA, 453 bp, Homo sapiens
aggccctggatctcaaaacgtgactggtgcctccatgtgggctaaaatcacagccccatggaatcttcttaaaaggtaagttttgtgtatatcaaaggaacacttacacatcatttaaaacattgtatggctacaagacttatatgggaaaaactcattccctaatctgtcttaactccagattggtctttctcaggaataccattttaattcttttaactgtttatactgctgtttcttagtatattaaaagtatcagatttattgattttccactacagaagtgaaaatttaactttcatatctaatccctctctcttatacatgtttctcctttytcaattctcccaatatcactatttttgattaaatattcaacatttattttgacagtgtaaattttatttatagcttttttttgcacaacttttggttttctcaagaattagtaat

SEQ ID NO: 631431 - DNA, 616 bp, Homo sapiens
tattgattttccactacagaagtgaaaatttaactttcatatctaatccctctctcttatacatgtttctcctttctcaattctcccaatatcactatttttgattaaatattcaacatttattttgacagtgtaaattttatttatagcttttttttgcacaacttttkgttttctcaagaattagtaattctaattttttcttattttctattaatgtctattaattttttctttttttttttttttttgagatggagttctcactctgtcgcccaggctggagtgcaggatgatcttggcttactgcaacctctgtctcctaagttcaagcaattctcctgcctcagcctcccgagtagctgggattacaggcgcgtgccaccatgcctggctaatttttgtatttttagtatagatggggttttgccacgttgcccaatctagtcttgaacttctgggctcaaacgatccacctgcctcggcctcccaaactgctgggattacaggtgtgagccatcaagcccagcctattaatcttattttctattaatttttttattatctattaatgaatatcccaaatttatccccaaaccaacagagttgtgaatat

SEQ ID NO: 631432 - DNA, 275 bp, Homo sapiens
ttcaagcaattctcctgcctcagcctcccgagtagctgggatyacaggcgcgtgccaccatgcctggctaatttttgtatttttagtatagatggggttttgccacgttgcccaatctagtcttgaacttctgggctcaaacgatccacctgcctcggcctcccaaactgctgggattacaggtgtgagccatcaagcccagcctattaatcttattttctattaatttttttattatctattaatgaatatcccaaatttatccccaaaccaac

SEQ ID NO: 631433 - DNA, 275 bp, Homo sapiens
ttcaagcaattctcctgcctcagcctcccgagtagctgggattacaggcrcgtgccaccatgcctggctaatttttgtatttttagtatagatggggttttgccacgttgcccaatctagtcttgaacttctgggctcaaacgatccacctgcctcggcctcccaaactgctgggattacaggtgtgagccatcaagcccagcctattaatcttattttctattaatttttttattatctattaatgaatatcccaaatttatccccaaaccaac

SEQ ID NO: 631434 - DNA, 615 bp, Homo sapiens
attttgtttttccttaagggcacataaaataatggtgaattctaccattgatggcactgatgaaataccattgaaaagaataaaataatattcactcagcaaacatctgtcaagccatgcataattatagctctaaagtgtgttaaaaactacttttttgctttaccttatgaattgttgcagacgcccagtctaaatggtcgaattcctttaaatgaatgctattacctcttctgcacagtcagggttagcattgccttaagagcagagtaccctgcttgcctccaagctgctggaaatgccccaatttgcctgaactttcctgtcagatgtttctagataaatgttttcactatgttctgattgtataaaagcaaacattttgccaaaagcatcagattatattggcaaaattatgtccatttaatttttatgcaaacataagtttattattttatcatggttttattgtkaaatttaaactaaaatataacattgagaatttacaaaattcagatgattttgggggcaaaacagataaatatatgtattttaaaatctccttattcttttgtagctgagagatgaattttctttcttttttttttttttttt

SEQ ID NO: 631435 - DNA, 576 bp, Homo sapiens
accttaacagatatcaaacagaactccaattagtgaaacaaaaagactggaataaaaatgatagtggtggaaatgggaggtccaaatatacagctaattgatgaccattctgaatctggatgtttctgtaatatcacacatttaaaactggaaagtatcccataaacacagacagtcttttagggggagctgcaaataagatgttctaagatatctctcattaccgtatatactatattgtgatgtcccaggtagcagaaggataggcaattttytttctgcttctttatacttttcaacatggattacttttacaatcagaaaataaaatcccccccaaaaaaaatcaaaataatttttttttgagatggagtttcgctcttgttgcccaggctggagtgcaatggcgtgatctcagctcatggcaacctccacgtcctgggttcaagcaattctcctgcctcagcctcctaagtagctaggattacaggcatgagccaacacgcctggctaatttttaatttttattagagatggggtttctccatgttggtcaggctggtctcgaactcccat

SEQ ID NO: 631436 - DNA, 704 bp, Homo sapiens
tcttgggtagctacaggtgttctgctataaatatgaagatgggtacatgatcattgggatcacgattcattcttaagtgattaattcaaagctccggggtagatatgtgaaataaactagtaatgcaaaccctcattattaaattttgaaaaacacaattaggcaggagggttccaaaataagccatgtgcctaataaatatatgttgactggtgggactagcttkgtaaaggcaggttgtatcttattcacctctgtactgtcaactacttgtcccatgcctggcacaaataggtgcttaaagaatgtttgttaaagtaaaaggagctgctaacctgcttcctcattttgtttcacaataactgaacctcccaacttaagtctatgaaaagaaaacacccagaagaatcattttttaaaagataattgtatgataatacctttttccacaaaattcaaatacagagtgatcttttgtcctaaatcatccactacttcttttccattgagggtaacataggctctcttagattcttctgtagttctgtatcttgcaaatgagtacggcttgttaggtggcattaagagagcatccaccagtccacatttctctaaaaccgggagcagctggttccgactcacaccattacccaaaccaccattggcaacaaccaggctcttaaaaaacaaacaaacaaacaaaa

SEQ ID NO: 631437 - DNA, 528 bp, Homo sapiens
gccataaatttgtacaaaggagcctaaaattataatacatccgatatggtttggcgtgtccccacccaaatctcatcttgaattttagctcccataattcccacattttgtgggagggacccactgggaaataattgaatcatgggggccatttcccctataatgttctcgtggtagtgaataagtctcatgagatctgatggttttataaggggtttcccctttcgcttggctctcattctttcttgcctgccgccatgtaagccaggactttygccttctgccacgactgtgaggcctccccggccacgtggaactgtgggttcattaaacctctttctctttaaaaaattacccagtctcgggtatgtctttatcagcagcatgacaacagactaatacaatatcattaaaacaatatttgctctcccctggaaagataaaatataattagaggtccatctacaattttattcttttcctttaagaatatggagaaaaaagaaagcctaaataaaatgctacttt

SEQ ID NO: 631438 - DNA, 528 bp, Homo sapiens
gccataaatttgtacaaaggagcctaaaattataatacatccgatatggtttggcgtgtccccacccaaatctcatcttgaattttagctcccataattcccacattttgtgggagggacccactgggaaataattgaatcatgggggccatttcccctataatgttctcgtggtagtgaataagtctcatgagatctgatggttttataaggggtttcccctttcgcttggctctcattctttcttgcctgccgccatgtaagccaggacttttgccttctgccacgaytgtgaggcctccccggccacgtggaactgtgggttcattaaacctctttctctttaaaaaattacccagtctcgggtatgtctttatcagcagcatgacaacagactaatacaatatcattaaaacaatatttgctctcccctggaaagataaaatataattagaggtccatctacaattttattcttttcctttaagaatatggagaaaaaagaaagcctaaataaaatgctacttt

SEQ ID NO: 631439 - DNA, 639 bp, Homo sapiens
ctacagtagtgccttctatactggcgctaaagaaataccagataaagtgatctgacaagtaaaaaagggactttaaaaggggactttatttctctgtacattcaacaaaatctcttatctcctttattccgaagaccatagaaaacaatcaagtcagaggcttgtgggagccccctatgtcattttcattgagttaatatgtaaagtgcttaggatagtgcctggcacatagtaagagcatgtatgttagttatttttatccctttttattaccttcaggtaattttattattatatttgggctacaaccaatttttaggacctaaacatgtgtaatctctctagatatgtgtcttatttatagtaggcactcaagaaatcttattgaattgaagtaaaggaagttaatcctggtgaagtcataaataacgttttcgagtttcagagatgcttcatagaagaaatgccctttygagagtaaaaaagcaaagaacaggtgttctaaacacagctgttatgtggaatttcaagagctgaaaagtcaaaactttcatgggcacattgctccaggctgctctatattgtgattagtacacttcaatacatgatgccatgaaatgtaaagccacagacttttat

SEQ ID NO: 631440 - DNA, 602 bp, Homo sapiens
gcacaaataagccttagtgtttatgtttattgtgaggtaaatagtagaaagattaagtcaaatcatacaatcctcatgtggggtataaatgtggattttttkcattagaaaatattttggaataaaacaacctcacaaatttgccatacataccagaataagaaacttgttaaaatgttgtaatgcctaataactattgttagaatgtattagtcgtgtcctttcaatagtttaatatgaccaagccatctgtttgaaatgtaattttgcctgagattttgtctctagttttttaattcttctaaactaaacgtccagcagaattctcttaaataactagggcctgattcaaagttttcactatatccacgttgtttgccaagtacttactgtctatggacaggtttaccatgataaagaacataacatgcaaaaacagaccattattttaatgaagattgtatgtgaaatcagaattatttaggctatctgtatatctattcatgaaaatacagaacagctttaagattttttattactgattactgaccctcttctacaccttcccctttttccccaagtggatagatatttttttctca

SEQ ID NO: 631441 - DNA, 604 bp, Homo sapiens
cttgtccattgctcaatctaccctttgctaaaggaagacatttctaggtgaggacatttatagtcaaataaattctaaatgataatgttcagtaacagatcttctgagcaaggaaatatatccacctgtctggaaaagactcaaattctgtgtcacttgtaatgggccagtatggagtctaagctgatgacaaagcatctcctagctcttccccttcctcttcagctctccggctgtaactctggggaggctgtagaggcacaacattctcctctctggattcttcactcattacctgtaaatgctacatcacatgatctcagtttcttcaaataccctctctgttgactgcatgttaatctgttcaataggtatttttatcccaaaataatgcaggacccagaggtggagaaatctgtggatttgtggtggaagagaaatyatgaaaagaaaaactgagccagatcctggtgaagcaattctagggttagcaagaaaaccaattagaaaagaactatagtctaaggagccacatagagttgagaacctgcttacattcattcattcctttcacacttttccttgagtatctattacatattgg

SEQ ID NO: 631442 - DNA, 616 bp, Homo sapiens
atcataacctctcagaactttagttttctcacctatctcataaggacttctagggaattaaatataataatgaatataagtatgcttaggaaactgagagacttgcacagtattattattaatatataactacaacctcttctagttcaaacaacaaaataaatagaaatgcaaactataggctatggaccaaaatagaaagttagcagttcatatcatatgtacctctaatatggatgtaacacatgactgaacaattacagccttaggcaattattagcaaatattaatataatacattaacatgtcagtacatttacattctaataataatagtagttttaggtcacctgagtggcataggatactgtctcaatgccttcatgtctcagcaaagtatgcttggctttaatctgtttccttaagaacttcttctcagttttactgagtttgtaattactttgatggttgctgtccatagcaaactgtaaaaaaamaagacagtaaaaaagtcaaccttaagagtcctgaaggaacaattataatgatgttattcatacattctatagtttatcaatatttctgtgacaattttttaaaaatgcttcatttacct

SEQ ID NO: 631443 - DNA, 533 bp, Homo sapiens
ttatggagaatgaggagctgacttttcactgggaagaattcagcattatttaaaagcccatgcagtgattaatctgtcaacttctgagatgttctrgaatgaaatgctccatgcacagtcccagaagaaattaggttaaccttagagaaaccaggttgtgggaaaaaatggattttgatctacatttaggatacatgatacccaattgctaccatcagatatattaatggtataaatattcagagcaaaaaggaatagagaaaatattcaatgtatgtcaaaaattacatgaaatataaggaataaatgctatttgattagtacacctggctaaaatgtgtattttaaattgaggatagaaatgggatattgggtatgtatccccagaccatccagtctgactttagccatgatgtgcatgaaaagaaaacatgaggctgggcgtggtggctcacgcccgtaatcccagcattttgggaggcctaggcgggcagatcacgaggtcaagagatcgagaccatcctggccaacat

SEQ ID NO: 631444 - DNA, 529 bp, Homo sapiens
agctctgatggttctaaaaaatgttccaatgtggtagctccattaagtgtgctattttactcataggtgatgaattctttacttatgaggtcctaagtaaaatgtgccatacacaaatttcacaactataacgtaaaccaaggcaaggagcaggcaggggagyggtggggggagaaataacacacaaaaaattagcagactctacagtatgattccatttacataaaggtcataatcaaaaagtaagccatatattatttagaaatacatacatagcagtgccaaaaaaaaaagcaaggaaattataaacacaaaattcaggagagaggctatttctgtgggtgaaaggaaaggaaattaacatgaaagtgacacataggagcatcaaagggtgtttcttcagttacatggtaggtgtaggtgtttgttttactattttaaaaactgtatgtgtcatatattttatatctacaattttttaaataacagaatcccaaagaggtctctataatcacaccatccaaatcag

SEQ ID NO: 631445 - DNA, 516 bp, Homo sapiens
ggtgaaaccatctctactaaaaatacagaaattaactgggtgtggtggcacatgcctgtagtcccagttacttaggaagctgaggcaggagaatcgcttgaaccagggagtcagaagttaaggtgagccgagataatgccactgcattccagcctggcaaaagagcgagactccgtctcaaaaacaaaaaaaagaaragaaaagaaaaagaaaacatgggaaaacatggataacaaaacatatctacatgtgatcagaaaaagaaggaacattttttaagtcccagctagaacaaaagcttagggtttcatttttgtaatatattttactaactttaattcagttgatgtgtatagcagagaagtctgaaaacttgtgctgaagatcatttccctcgttgggatttagttattgaggttatattttttaaagttatcagaacatgattaattttggaaattaataaaggaaaattttaaagtcacccatgtaaatcattgcttccaactgttccag

SEQ ID NO: 631446 - DNA, 555 bp, Homo sapiens
atgtggaacagtgatttagaacaccagtgttggaatatctgagttaaaatcccagttctgctacttactaactgtgtcttcttgggcaaattattaaaccattttatttcgccgcagtttcctcatctctaaaaacggcataatactgcaacctacatcatgaattactgtgaggattacttgagttgatgtragttgttaaatatcaataaatgacaggcacctagtgctgcatctggcccacccagcatgacgaggccacaccatggtcctctcggttctctacagccaccaaatgtcatcttgtctctcatctactgagtgacaggatctactggcaacccactgatccgataatccagcatgaagagagatggctggactctccccaggctcttctccctctatggagcagaggggtatctatttaaaagggagccttcaggaggtaggtggtaaatgcaggcctttcaagactttaggacaagctgcaggtgcctgctctatcttgcatgactccagtgatactgggaagattatggtatctctctccat

SEQ ID NO: 631447 - DNA, 555 bp, Homo sapiens
atgtggaacagtgatttagaacaccagtgttggaatatctgagttaaaatcccagttctgctacttactaactgtgtcttcttgggcaaattattaaaccattttatttcgccgcagtttcctcatctctaaaaacggcataatactgcaacctacatcatgaattactgtgaggattacttgagttgatgtaagttgttaaatatcaataaatgacaggcacctagtgctgcatctggcccacccagcatgacgaggccacaccatggtcctctcrgttctctacagccaccaaatgtcatcttgtctctcatctactgagtgacaggatctactggcaacccactgatccgataatccagcatgaagagagatggctggactctccccaggctcttctccctctatggagcagaggggtatctatttaaaagggagccttcaggaggtaggtggtaaatgcaggcctttcaagactttaggacaagctgcaggtgcctgctctatcttgcatgactccagtgatactgggaagattatggtatctctctccat

SEQ ID NO: 631448 - DNA, 547 bp, Homo sapiens
cttcctggcttgcgtgtggccaccttctctctgtgccccacatggtggagagagtaagtcatctggtgtctcttctttacagggcactaatcccatcgtgagggccccttcctcatgacctattacctctcaaagacccctctccacataccatcacgttggtgatcagagcttcaacagatgaattttgggggacccattcaagccatagcattctgtcttagttgattattcagattgtaccttttggcctcttcagaaaaaaagaaaagtatattcatttttctaaaagtaaagaattccttttgggagcaatcgtatgacatttacagtaagttaaatacatytgtaatgtgtaaccatcataaaatactataatggagatattttctctgtttggcccccgtgtgagtcattctgcctgaggtctgtgggattacccattgtgggtgagcatccctaatctgtgtgtcattgtgttatgaccacagaggacacaaggttttcttcccaaggtatcattcagcatttccagggaaactccatg

SEQ ID NO: 631449 - DNA, 604 bp, Homo sapiens
ctatgtttttttcctatacatacatatctatgataaagtttggggtgcaacagcaaaactatatgaatttttttcttcttcacaatttcacaggtaaaaaaattcattctcactgtagatctcagcaactttaatattgcaatttttattctttcgttattaagtcaagagctctcaccttttcacttaacgaaagcacttcccagcttctcctaggcatgttcaaatggccagcatcactacttttgttcttkggagccactgttcagtaaaataagggtcacttgaacacaagcactgcaaaacaaatgacagtcaatctaataaccaagacggctcctatgtgactcatgggtgagtagcgcagacagcatggacatgccagacaacgggatgattcacgtcctgggtgagatggagtaggactgcatgagatttttatcatgccattcagaagggcatgcaatttaaaacttacgtgtatttctgagatttgccatttactatttctggactgcggttaagcacaggtaactaaaactgtagaaagtgaaactgcagataagggagactactgtatcgggacaagtttgttaatactcat

SEQ ID NO: 631450 - DNA, 523 bp, Homo sapiens
tcctgagttttacctacacaggtgaggaatgacaaaaacggtgttacccaccctgagccagcagttcctctaggcagtgcttctctctctctgtagggccccgctctcatcagttcttctaacatgtcagccagtactgctttctccctctgacagccatttcttctgtcattgccctcctcttttctcctcccatcatttgtctgatagcaatgtaatacaaaagggtgaaagaaaaatgttaacttttggaattgcagctataccatttactgtacaattcccttaaaccctcgattctcaatctctgcatttgtaaaatgaagattatatttgtgcataccaaggtttgttgatagcataacaatatgagaaagtgcttggcacaggacaggcattcyatttagtcttgccatctcaaaaccctttgtaaaaatctccccattgtgtagaaggcattgttgccgctacagtgaccccctttttcctctcaccctttctacaggagataggagtaaagatg

SEQ ID NO: 631451 - DNA, 464 bp, Homo sapiens
ctgaagtggctaaatacacacacacacacacacacacacacacacacacgcacaagtgatgtggtgaggggagaaaaatggccagcaaaagaaaaaaaaaagaggaaagattttttattttgactatttatttaacatagtatttacacaaccaggccaccttttgctagccaggccagactgaaagagcmatggctgtacttccgatagcagcaatttgtcctagctgaaatatggtaatgagattttaaaagatgtttttaaaggatctcaatggttaaagtcagcttaattaaaagctaacatccaagatgtgtttgtatgtgtgtgtgtgtatgtttgtatttaaaaagccttcatatttttgtttttatttttctctcctaagacctagtcctttttttttttgagcaaaagttttttttcttctcagttgactgaattctcttttcttcacttacttc

SEQ ID NO: 631452 - DNA, 587 bp, Homo sapiens
tttgtatttaaaaagccttcatatttttgtttttatttttctctcctaagacctagtcctttttttttttgagcaaaagttttttttcttctcagttgactgaattctcttttcttcacttacttctgctgtctctcccttctcttgcaccctctgctgcataaggaacctaaaatagtttataatagctggagtyccttaaagaaaatggagaaggcacgagactccctttgggagagaaatcggtttttccttatggaaccccaagagtgtaaacagacaagtttatcttagatcttaaagataaacttgcttgcttttgtattgcattacctgatttattgaataaaatagttatgcaacagaggttattctggatttttaaagaagagtgtagtctggacacttagaaatgtctttgttaaaaaaaaatttttttaagtgcactgtaaaaacatcatgtggcctagcctcataattctccctttttggaaaccgaggattcagtgtgggctctgcccagagctcagaaatccagttaaaagttaggtagtccctagctaaataaaattggtctccttatataa

SEQ ID NO: 631453 - DNA, 469 bp, Homo sapiens
atacttacattgcatcaattatataatgtaaacttttcctgttttgtatgtgagacataggtagaggctcaaactttatcatatataaatgtatgaattaattcatagcttgtattttgtactttgaatttattattatttttgctaattctayttctaactcatagaaatatctctcaaagatgaaataacccttactaggccactgaccatccaaccccataatgaatccttctcattagcactctcaccgcatatgcatccagccattgcttggatgacttcagtgattagtaaattactatcttgctttaccactggctggatgaaaaactcttatcttgagtggaaaactctgttatgtaacttccaaatacatgttcacgtactgattttatggatcaaatactaaccttttcaccatgacagcccttcaaacacctttatgttctagatatcctccttgccc

SEQ ID NO: 631454 - DNA, 469 bp, Homo sapiens
atacttacattgcatcaattatataatgtaaacttttcctgttttgtatgtgagacataggtagaggctcaaactttatcatatataaatgtatgaattaattcatagcttgtattttgtactttgaatttattattatttttgctaattctatttctaactcatagaaatatctctcaaagatgaaataacccttactaggccactgaccatccaaccccataatraatccttctcattagcactctcaccgcatatgcatccagccattgcttggatgacttcagtgattagtaaattactatcttgctttaccactggctggatgaaaaactcttatcttgagtggaaaactctgttatgtaacttccaaatacatgttcacgtactgattttatggatcaaatactaaccttttcaccatgacagcccttcaaacacctttatgttctagatatcctccttgccc

SEQ ID NO: 631455 - DNA, 498 bp, Homo sapiens
ggggttgttctctggcaggcaggagtggggggtcacaaggtgctcagcaggggacgttttgagccaggatgagccaggagaaggaatttcacaagataatgtcatcagttaaggcaggaacaggccattttcacttcttttgtggtggactrtcattggttaaggcaggaactggccatctaggtgtgtatgtgcaggtcacaggggatatgatggcttagctgggctcagaggcctgacactattcatgtcagtactccttgtaaccacatgaacttgtttccttgtgattgaactgtagacagaacaggtaactaagattaagtagagtaaaatcagaaaataatttattttttctttaagttctgagtgtcagtgtccttactgaatggtagtattacatgaggtttacatttacttccatctccaagggtcaatttatataaatacggattatcctgagcacctatcacaagatactacctcaacatctgaaaa

SEQ ID NO: 631456 - DNA, 630 bp, Homo sapiens
gatgaaacaataagtacttactatattctagtcctgaagtttattcaagagatataaggtgctcataggctagtaaggaagaaacaaaaaaatcagcctggagtattataataaatgccttaaaataggtgtttgttcgttcattcgttcactcactcattcatcattcaacatatattattgagcatttattctgtaccaggcattgtcacaggtactataaacccaaacgtgtgtgtcctaaagtgtgactgctctaagaaaacctatagtaaaaatatatatatartttttcaaggatttggaactttggtatattttcctttgagtataagctgctgtagacggtaggccatgtgagaccccagcttctattagggttacacatagaacaagatggccctagttgaaaatacttttccataaagtgtactgaggtggggaggaggtggcgaacttcactgctcttctcaactctttcttccctctactcactgctcctcaatccaccaccaagacaaatggtaacaatggattgatcaggtttatttgtttgttttttgagacggggtcttgctctgtcacccaggctggagtgcagtggtgtgatcacaacttactgcagcctca

SEQ ID NO: 631457 - DNA, 604 bp, Homo sapiens
tctcaacttgttttccctttctgaaaaagtgggaataagagcccctactatgcctgcctgtgagtaatgaaaatctttgagtcacacagagccgcattcaatctggctttgctacctactagctatgtgattttaagtaagytaacctccataaatttccgcaaaatgtttattttaacaattctcgatgaaaagagtcaaactccgtaaaatatttgaagagatttattctgagccaaatatgagtgaccatggcccatgacatggcccttagaaggtcctgagaacatgtgcccaaggtggttgtggtgcagcttggttttatacattttagggaggcatgaaatatcaatcaaatacatttgagaaatacattggtttggtctggaaaggtgggataatttgaagctggaaaggggcttccaggctataggtagagttaaacatgttctagtttacaattggttgagtttgtctaaagacctgggattaatagaaagacaatgttcagattaagataaaagactgtggagaccaaggttcttttgaagtctcacagtggctgccttagagacaatagatgacagatgtttcctattgaggc

SEQ ID NO: 631458 - DNA, 558 bp, Homo sapiens
  misc_feature 1, 2, 3, 4, 5, 6, 7, 8, 9, 10, 11, 12, 480: n = A,T,C or G
nnnnnnnnnnnngagtctggtcttgaggtttttctggttggtagggttttwattaatgactcaatttcagaactcattataggtctgttcagggattaaatttctccctggctcaatattaggaagttgtatgtatccaggaatttatttcttctagattttcttttttttgtttgtttgtcttttgtttttgagatggagtctcactttgccacccaggctggaggtgcagtggtgtgatctcggctcactgcaagctttttttttttttttttttccacctcctgggttcatgccattctcctgcctcagcttcccaagtagttggaattgatcactatttttattgtgctgtggttccaaaatgaggttggtatgatttcagttttgaaaaatttggtgaggattgttttatgcccgagtgtggttgatttagagtatatgacatgtgcagatcagaggaatgtatattctgctgtntttggttggagcattctgcagatgtctattaggtctgtttggtcagtgttgagtcagatcttgaatatctttgtagtg

SEQ ID NO: 631459 - DNA, 651 bp, Homo sapiens
  misc_feature 426: n = A,T,C or G
aatgactcaatttcagaactcattataggtctgttcagggattaaatttctccctggctcaatattaggaagttgtatgtatccaggaatttatttcttctagattttcttttttttgtttgtttgtcttttgtttttgagatggagtctcactttgccacccaggctggaggtgcagtggtgtgatctcggctcactgcaagctttttttttttttttttttccacctcctgggttcatgccattctcctgcctcagcttcccaagtagttggaattgatmactatttttattgtgctgtggttccaaaatgaggttggtatgatttcagttttgaaaaatttggtgaggattgttttatgcccgagtgtggttgatttagagtatatgacatgtgcagatcagaggaatgtatattctgctgtntttggttggagcattctgcagatgtctattaggtctgtttggtcagtgttgagtcagatcttgaatatctttgtagtgttcttcctcagtgatctaatactgtcattagggtattgaattctcccactattagtgtgtagttatctaagtctctttgtaggtctccatggacttgctttatgaatctgggtgttcttttgttgtgtgcatatatatttaggacaa

SEQ ID NO: 631460 - DNA, 567 bp, Homo sapiens
ttgaaagtctgttttgtctgaaatttgagtagtagcccctccttttttctttttttctttctttcttttttttttttggtggtkgttgttttgtttgcttggtagatttttctccaccactttactttgaacctgcggtgtcattgtatgtgagatgggtctcctgaagacagcatacagttgggtcttgcttctttattgaacttgctactgtatgccttttaattggggcatttagacaatttacattgaaggttaatattgatatgtgtggatttgatactgtcatgttgttaactgattatgcagacttgattgtgtggttgcttaatattgttactagtgtatgtacttaagtgtgtttttgtggtggccaataatggtcttttctttccatatttagcactcccttacaaactccttgtaaggcaggtctgttggtagcaaattcccttagcatttgcttttcttaaaagaatcttatttcttcttcaggtataaagcttagtttggctggatatgaaactcttggttgaaaattcttttaagaatgctgaatacaggccc

SEQ ID NO: 631461 - DNA, 611 bp, Homo sapiens
ccatttttaaaccatcaaaatctgtggtggttgaaaacaaacagagttgttatttgccatgattgtcataaaaaattatcactatgggaaaaaaaaatggtattgcgagctttctattttgctatactttgggtcaaatgtacgtctctgagaagaactgaatacgtagcatctctctcctttgtggagcctcttaacttctgaaaagaacatggcctttttaaggttatctcagggccctgaggacctcatcatatctaggaaggaaggctctgggctctctggactgtaaagacctgtgtgtaacaatttaggctttcatttttgggggcatttgttccctcattaacatttctgtggatccttagaaaattgcgtaaaattgcacatttaaagatycaagaattagtcaggaaaatgtggcataataggaaaaagtgtagcaggttttagaatcaatgatatgctatatttttagtttaatcacttgtagctttatgatcttttaataggatgcttaagcatcctgagttttatcttcctcatctctaaaatggcaaaagtagtaataccagattcaaggtcctaagacagtgcctaccacagtgatt

SEQ ID NO: 631462 - DNA, 656 bp, Homo sapiens
ctctgtattacgtgggacagtaccaagtatgtgcaacactgtctcagatgtttttttattttactcaaagaacagttgcatgagctggaaggtatgtgagagttcctaagagcagcaaattcatcatagatattcaagtatactctactgaattatctaatgctacctgacttctgtcttacttatgtgtattaggggtcccagatagaggctaaaaatatgtgacacactggtggacaaaggaatccaaacttattttatgtgagaattttggctggaaaagttgagcacctgtgagaagcaccagggtggggaggatcatctggtatctgtttcagatattgattatctaaccaaggcarggatttatttctaaaattataaataaaagaagtgtgtgaagaaaatgaaggacccactgaaaaatagtgcctaagccaccttatatctgtgcctcagtaaataagtaggcataatggggattctcctaatttcttctttgaatacagcttagtgtctctgcctatagcaggaataacagcagatatagtggcatacctaccatctcagtggtttggtgttttgaggtaattgaaagacagctccttcgtcactgacatcagtttcttaaagggggaatagactgcagtaatagt

SEQ ID NO: 631463 - DNA, 656 bp, Homo sapiens
ctctgtattacgtgggacagtaccaagtatgtgcaacactgtctcagatgtttttttattttactcaaagaacagttgcatgagctggaaggtatgtgagagttcctaagagcagcaaattcatcatagatattcaagtatactctactgaattatctaatgctacctgacttctgtcttacttatgtgtattaggggtcccagatagaggctaaaaatatgtgacacactggtggacaaaggaatccaaacttattttatgtgagaattttggctggaaaagttgagcacctgtgagaagcaccagggtggggaggatcatctggtatctgtttcagatattgattatctaaccaaggcaaggatttatttctaaaattataaataaaagaagtgtgtgaagaaaatgaaggacccactgaaaaatagtgcctaagccaccttatatctgtgcctcagtaaataagtaggcataatggggattctcctaatttcttctttgaatacagcttagtgtctctgcctatagcaggaataacagcagatatagtggcatacctaccatctcagtggtttggtgttttgaggtaattgaaagacagctccttygtcactgacatcagtttcttaaagggggaatagactgcagtaatagt

SEQ ID NO: 631464 - DNA, 542 bp, Homo sapiens
acatttaccttcaactgtgtatgtgtgcacagaaatattttaagttgcagtaaagttcagaggaaatataatggaggwgaaaaagaaaccaagggaattggaatgaagagaagaacctcaatgacagtgttatgaaaacaccaggggttcagtctaggtcctgcggctcacctcacagaaagccaatcactgagacaatgagtattgccagggagaaggctttaattggggagatgggagatcactcttaaatccatctccctgaccaactaatagcaggggtttatacagcagggaagaaatgtaactacctacaggaaaacaggaattagggaggggtaaggaagtggagttggtcaataggaagcaggtggtaggttaggcaatcatggtggatgaagggggtctggcctctcattgtccaggtgtggtcatttgataagtttcaggtctttgatactatctgggaggcctgatgattggtttctgagaaagaaactcagataagacaattgaactttctcaagctttaagaccgggag

SEQ ID NO: 631465 - DNA, 542 bp, Homo sapiens
acatttaccttcaactgtgtatgtgtgcacagaaatattttaagttgcagtaaagttcagaggaaatataatggaggagaaaaagaaaccaagggaattggaatgaagagaagaacctcaatgacagtgttatgaaaacaccaggggttcagtctaggtcctgcggctcacctcacagaaagccaatcactgagacaatgagtattgccagggagaaggctttaattggggagatgggagatcactcttaaatccatctccctgaccaactaatagcaggggtttatayagcagggaagaaatgtaactacctacaggaaaacaggaattagggaggggtaaggaagtggagttggtcaataggaagcaggtggtaggttaggcaatcatggtggatgaagggggtctggcctctcattgtccaggtgtggtcatttgataagtttcaggtctttgatactatctgggaggcctgatgattggtttctgagaaagaaactcagataagacaattgaactttctcaagctttaagaccgggag

SEQ ID NO: 631466 - DNA, 590 bp, Homo sapiens
gtaaatcaatgaagggtagccagagccagataatattgagagttcataagtacataagaaacatctcttggggattccaagaaacacttggtagaaattacttgctagtaattgcacaggagagcaagagcttatggtatgcacctaggtgaggtgaacaagggccagtgacatttgaaattttattttggcctytgcacagattggtgtggccaagaagaaattcggtcacatctcctacctgttatcctgtgcgcaaaggaaagaagaatgaatgaaaactatcttttatagccatttaaaaaatagatcatgtgcattgtattgagccaaataacatttcctacaaagctcttcatctaataacttaaagatatgggatcatcatggccaactctgtaagaataatggatgctagcaaaaaataaaataatacaagaaagacatctaaagttataaaagtgtgcaggacaaataattatgatgatatctactatatgagaatatttatataagaaacgctttaaattattttaaatattaataatttttataatttaattgttaaatcactttacagtctaaattct

SEQ ID NO: 631467 - DNA, 408 bp, Homo sapiens
ctaactatgacaattaccacaaaaaagtaagttgattaaattatccacttaagtgatatagaataccagactagctttgaaaaaacaaacctacaatatgctattttcaaaaaaaagcatcgaaagtgtgcaccaggcaaatgcaaaacaaaggaaagcaagcgtaaccttattcatataagctaaaatagatttaaggccaaatgtattagagtaaatagataatgtcactaaataattaataacatttagttcacaagagatagattcaacaagattcaaactttcatccaccaagtgaagtagctcctaactacataaataaaactrgaagagtgcaaggagatattgacagaattgacagattggtcattatagtgggaggttttttttttaaatggagttttg

SEQ ID NO: 631468 - DNA, 386 bp, Homo sapiens
acacctgacacatatactttctgctccccagctccttcagctgtactcactctttgttgagtctcccacaattatcattgttcctggcccagacttccatccggcctcccacattattcctgataccacacctgaccccyatgactgtatctctctgatccacctgacattcaccccatttccccgtatttccttctttcatgttcctcaccctgatcacacttggtttattgatggcagttccaccaggcctaatcgccacacaccagccaaggcaggctatgctatagtagaagccactagcctacctcttagaacctctcatttcctttccatcatggaaatctatcctcaaagaaataacttctcagtgttccatctgctat

SEQ ID NO: 631469 - DNA, 614 bp, Homo sapiens
catacctctttttctctcacttctcacatcatctttacttgatctggccaatagaggttaaaaccaagtctctagaaatattcaagagtgcctaataagaaaatattttttaactttacatgccttactaaaagtagtgatattttattatctattattttatttaaaaatggagagagacattgaggaccggataagttgtagcatggtcaaaatctgtggaaaataagtgaacttagccaggactagaattggagatctctgaatccctgttaggtttctttcatggtatttaaaaacaaaaacaaaaacaaaacaaaacaacagaaaagcgaggtctcactctgccacccaggatggagtgtagtggtgcaatcacagctcattgcagcctcaacttccagggctcaatgaatcctccaatcttggccttccaaaatgttgggattacaggtgtgagccactgcacccagcctcccttcgtggtatatgcaagatacttcatggattgaattttctcccagacatgatcagagttttccttcagtttggcatgatcattgctcatcctggggcaccrtctcagtttctggcacaccaaacaccaccatagt

SEQ ID NO: 631470 - DNA, 569 bp, Homo sapiens
tgaagtaaatctgaagttcatgcagaaagccattgctggccaaactaaagggtttgctggtgagagaacagcaaaaacaaggggtatagaactgtttcacattttaaatctgtgccaaatttactgggaaaaaaaaatgtaaacctgtaacttacctcatctgtacaatttgcaatggctgagtccctcacattgtggtaaaccttgttgtacccttggaatgattgtctactgcaatatagtatatacacagagtacaaaaagggtatagctggaggagaaagggtgaaagattatgaatcccaggcgtttggtcctaggaggaaaaattcctgtcctctctccaaccctgcccaccctcttatgctagatagtaacagcagaaagttatccmagactgctccgcgttcacacgcttcccaccaacaaacctcctcccaaggctatcccacaacctttctgaagtagcttcctggatcaagccccacggggcagcttggaagagaagctgggagggatgaggggctccactagcattccttgtggcttctgagtgtagctgccctggg

SEQ ID NO: 631471 - DNA, 569 bp, Homo sapiens
tgaagtaaatctgaagttcatgcagaaagccattgctggccaaactaaagggtttgctggtgagagaacagcaaaaacaaggggtatagaactgtttcacattttaaatctgtgccaaatttactgggaaaaaaaaatgtaaacctgtaacttacctcatctgtacaatttgcaatggctgagtccctcacattgtggtaaaccttgttgtacccttggaatgattgtctactgcaatatagtatatacacagagtacaaaaagggtatagctggaggagaaagggtgaaagattatgaatcccaggcgtttggtcctaggaggaaaaattcctgtcctctctccaaccctgcccaccctcttatgctagatagtaacagcagaaagttatcccagactgctccgcgttcacacgcttcccaccaacaaacctcctcccaaggctatcccacaacctttctgaagtagcttcctggatcaagccccacggggcagcttggaagagawgctgggagggatgaggggctccactagcattccttgtggcttctgagtgtagctgccctggg

SEQ ID NO: 631472 - DNA, 625 bp, Homo sapiens
ttttttttttttggattgtagcagaagtcctctagctctgactctgaggcctaccatgttggcctacccaaggaatcgaaaccggttttatatgccaagttagaggcaattctgtcaagaaatgatkgtccatgccttataaatgagattgggctataatggctcagtgtatctatcaggccagtagttggtttcaggatgatggtttatttcctggatgactccctaactaaatgtcactgggacctcccaatgggaacacacatttcttcaaacatcctaaattttgagtggtcattccctgttgtgatactagctagctaactatttatctcaatgatcttgaaatccttttcctcttcactggcccctacaaaatgttaactaatcttggagcgtgtaattctaactcctaaattggacctctttagtcatgcacgtctaacttaattcaaggcctctaatgatccctgtatgtgacagctctttctacatgtgatgtcagatccctatatctgatagctctctcaggacttctggaccccttggttctttcactccactaggccccagggtcaagggtcaaaccaatagatgattccatggcagttggcagtcctgacag

SEQ ID NO: 631473 - DNA, 540 bp, Homo sapiens
agcttctcaagttgcagtgttcttccttccccccccccccccccccccccttccatagtcaatacagtcaaggcagattccaaaatctcaccatttaggtgttctggagaaaagtttatatgttcacagccttaactgctgggcatttgagaagtctcagcagtagcagcagggtgatccacacaactagacatgtgggtaagaaagaaacgtaactggcattaagtaatctgtattgccactagatgatggagtgaattgcrgtatttaacaagaatagagtttgaagaaaataatagaagagaaagacacatagagagacatcaggatagagaaaatgtttttggttctcttattcagcttaaggttcccctgcttgttattttccaacttctttcttattgtttaatcaaatctttcaccctattccaattttcacctagagacttctggaccccaggtagaaatgagtctagaagaaatatctgtcctctcaaaacagcttttgctttccaacagatgacctgaagtggtcaggat

SEQ ID NO: 631474 - DNA, 593 bp, Homo sapiens
ctgtggagaggaacagtgaccttgggagtacagtgtagtgtcaaggcagtttgagggcagagagaaacaacatctgatgctagatggccatctaccgaaaccgaagtctcccctttcctaagaagtctttaaaatttcatttgtaattacacttcctaacccaaaaagaagcatgttctctttcaaaaagaatcctcaattttcttaagctgagcagaatttaagctattgtacatacacttccggtttcttccactaaagcattcacctcccagatggctttcggtagttaaaagggatccactgggctttgggtcagggtcttcagccaaattggagagaattgtttctgactctccattgtcccttcatcccactccctggaatctcttttccctaggagtcctctctctcctagagtgcaagttgtctaccagtagctgtacctgcctgaacatccataaatctgacaacgaatgtaaggaatctgagaattctatcgaagatatttcattaccagaaygcactgcaatgcctcgtagcattgtccgtgcacacactgtgaattccctaaacaaaaaagtccaaacacg

SEQ ID NO: 631475 - DNA, 522 bp, Homo sapiens
aatgtaaggaatctgagaattctatcgaagatatttcattaccagaatgcactgcaatgcctcgtagcattgtccgtgcacacactgtgaattccctaaacaaaaaagtccaaacacgtcacgtaacctgggctctgtgatttggcaatctatttcttgcagtatatgctcatctttatggraaaagctttgtgggtgtgtgctgtgtctccaaccatgttgtctctatttggaattatggttggggtttgtaaaaagatctggaagatggttttttaaaaaatcctggcctgctgaacgaatagtttcttctgcaacatttgttgttaatataataaatattatcatataaataatactttctgtattgttaagtctatacatcacaaacacttataatgatatataacagttgtattgtgaaatatttcaaacatacataagaaatacaaaatgatgatcaaacacctatgtacacatcaacccaactttataaaattttaacattatttcctggagaag

SEQ ID NO: 631476 - DNA, 485 bp, Homo sapiens
ttgggggatcttagaccttagattgtatgcagtgaacttctcttatgccttccccaccaataaaattgagggattaggtgaaaaatayggtgtcctttcaagtaaaagataaatggatggaaatggaaacctctaataggaaaacaaacttgtaatatgacagctttagtgcagaaatatttgaagtaagcacatgagttttaaaacagtaagagttggagataatctttcttgaatatgggaaaagaggataaggtgtacaatggtataattattaagttgcaggtgaaaaccacaagaaaggcaagagatacgcagtccttggttaaaagtacacaaactaaagagatgaaagatttcatcacctgagctagctatgtatttgccccacaacctaccaaatagaaaaggaccgctcttaacacagggaattgttgagccaatcgtgatatcctattttccctctcttgagcagcatttccaat

SEQ ID NO: 631477 - DNA, 485 bp, Homo sapiens
ttgggggatcttagaccttagattgtatgcagtgaacttctcttatgccttccccaccaataaaattgagggattaggtgaaaaatatggtgtcctttcaagtaaaagataaatggatggaaatggaaacctctaataggaaaacaaacttgtaatatkacagctttagtgcagaaatatttgaagtaagcacatgagttttaaaacagtaagagttggagataatctttcttgaatatgggaaaagaggataaggtgtacaatggtataattattaagttgcaggtgaaaaccacaagaaaggcaagagatacgcagtccttggttaaaagtacacaaactaaagagatgaaagatttcatcacctgagctagctatgtatttgccccacaacctaccaaatagaaaaggaccgctcttaacacagggaattgttgagccaatcgtgatatcctattttccctctcttgagcagcatttccaat

SEQ ID NO: 631478 - DNA, 552 bp, Homo sapiens
gctatggttacattttgctgcaggtgcacaatatagagatgtcttctgggctccatgcaggttcaagctgtgcctctgcttgttctccaggcagctcccctttccagtccaactttctatgggtgtcatggaaacttcgatagctgtaatctcaggggtctgcatcaggaatgtggtggctgggagttccttcactcaccccttccttargtctggtccatggggctggtcctggtgcctggtgattcagcaggctgccacgcttcttcctccttcaaccacagtgcctccttcaaccacagagccacaattaactctgtattgacttttgatgttttccaccatacaatatgttcaaagtatcaaggttcctctccatgaaagaggtgatttccagccacatctggttggccatcttgcctctctccaagcttagatgttgaaattgaaaatatattgtcagttgtgttttaaatactgagaaagaggtttaagtgactgtttacatagtataaaaagaaaattgatgtagcgtttccaatagccatatat

SEQ ID NO: 631479 - DNA, 550 bp, Homo sapiens
ctgccaggttgtccgtgcacttgccgttggggagacagaactcgtcactggcgttggcattgtagaagccgcacaagccccctgtgcaattgaagtatgtggtggacagccggatgtacaatagacctatgtctgagtactggacagtcaccacgcccttggactccactgtcgtactgtttttgtttcgataaatttccagcttccccgaaggatggaaaaaaggcaattccacttcctgaccattcaactgaaaaatcaagtcattcttatcaattccagagacacacagagcactttccatttcctaggctgtgggataaagacacggtctgccctattgctagccttttgagagaggtcaagaagctgatggaacccacamagataccaaccgatttgtcatgggcttctttatttatttctttttggattcccctgattagacccatttgctgtttatttgtgtgttctggacccaaagctagcccaaaacaaacgaaactaaagtgtgagcaaaaatcgtcttagatacgtggctccctcctgc

SEQ ID NO: 631480 - DNA, 615 bp, Homo sapiens
gtgagtgagttctcacaagatctgactgtttaaaagtatgtggcacctcctctgtccccactctctttcttgtttctgctctagccatgtgagatgcccattcctgtttcaccttctgccatgagtaaaagcttcctaagtcctccccagaagccaagccgatgctggtgccatgcttgcacagcctgcggawttgtgaaccaattaaacctcttttctttataaattacccagtctcaggtatttctttatagtagcacaagagtgacctaataaattagtcaaagggaaatgcaactcataaccacaatgagatactgcatcatacccactagaatggctaaaaaggctgacaataccaagtgttggtgagattgtggagcaacgagaattctcatcactgctagtgagagtgtaaaattgtacaaccactttggaagcagcttggtatttttataaatttaaacatacacttacttactttataacccagcgactcaaatcctaggaatttatccaactgaagtgaaacttatatgtccacccaaaactggtacatgaatgtttaaagtagctttattcacagaagccccaaactggaaacgtcccaaacat

SEQ ID NO: 631481 - DNA, 615 bp, Homo sapiens
gtgagtgagttctcacaagatctgactgtttaaaagtatgtggcacctcctctgtccccactctctttcttgtttctgctctagccatgtgagatgcccattcctgtttcaccttctgccatgagtaaaagcttcctaagtcctccccagaagccaagccgatgctggtgccatgcttgcacagcctgcggatttgtgaaccaattaaacctcttttctttataaattaccmagtctcaggtatttctttatagtagcacaagagtgacctaataaattagtcaaagggaaatgcaactcataaccacaatgagatactgcatcatacccactagaatggctaaaaaggctgacaataccaagtgttggtgagattgtggagcaacgagaattctcatcactgctagtgagagtgtaaaattgtacaaccactttggaagcagcttggtatttttataaatttaaacatacacttacttactttataacccagcgactcaaatcctaggaatttatccaactgaagtgaaacttatatgtccacccaaaactggtacatgaatgtttaaagtagctttattcacagaagccccaaactggaaacgtcccaaacat

SEQ ID NO: 631482 - DNA, 615 bp, Homo sapiens
gtgagtgagttctcacaagatctgactgtttaaaagtatgtggcacctcctctgtccccactctctttcttgtttctgctctagccatgtgagatgcccattcctgtttcaccttctgccatgagtaaaagcttcctaagtcctccccagaagccaagccgatgctggtgccatgcttgcacagcctgcggatttgtgaaccaattaaacctcttttctttataaattacccagtctcaggtatttctttatagtagcacaagagtgacctaataaattagtcaaagggaaatgcaactcataaccacaatgagatactgcatcatacccactagaatggctaaaaaggctgacaataccaagtgttggtgagattgtggagcaackagaattctcatcactgctagtgagagtgtaaaattgtacaaccactttggaagcagcttggtatttttataaatttaaacatacacttacttactttataacccagcgactcaaatcctaggaatttatccaactgaagtgaaacttatatgtccacccaaaactggtacatgaatgtttaaagtagctttattcacagaagccccaaactggaaacgtcccaaacat

SEQ ID NO: 631483 - DNA, 443 bp, Homo sapiens
ttgctgaacgttgttaactgtgctatatgtggcccaaagattcagctgtttttacttagtgttatgccaagaccacatttacctgcatggggcagacttccatccccagctcccttatttccattagtggcatcattcaaattttaaaaattattattaataagtataatcataataattaccatttgttgaatatccacyatgtgccagacactgaactagctgtgataccaagacatagcagttattgaattttaatatgctccaggcacgtatgctttgattgtgtaatctaatttacacttcacagcagcctgatgaaaggttaaggctaagataaagagattatagctcaaaacttcttggctaagatctcacagttattaataactggatacagataaggttcaaaactctggttgactctgaaacatatgcattaa

SEQ ID NO: 631484 - DNA, 443 bp, Homo sapiens
ttgctgaacgttgttaactgtgctatatgtggcccaaagattcagctgtttttacttagtgttatgccaagaccacatttacctgcatggggcagacttccatccccagctcccttatttccattagtggcatcattcaaattttaaaaattattattaataagtataatcataataattaccatttgttgaatatccactatgtgccagacactgaactagctgtgataccaagacatagcagttattgaattttaatatgctccaggcacgtatgctttgattgtgtaatctaatttacacttcacagcagcctgatgaaaggttaaggctaagataaagagattatrgctcaaaacttcttggctaagatctcacagttattaataactggatacagataaggttcaaaactctggttgactctgaaacatatgcattaa

SEQ ID NO: 631485 - DNA, 443 bp, Homo sapiens
ttgctgaacgttgttaactgtgctatatgtggcccaaagattcagctgtttttacttagtgttatgccaagaccacatttacctgcatggggcagacttccatccccagctcccttatttccattagtggcatcattcaaattttaaaaattattattaataagtataatcataataattaccatttgttgaatatccactatgtgccagacactgaactagctgtgataccaagacatagcagttattgaattttaatatgctccaggcacgtatgctttgattgtgtaatctaatttacacttcacagcagcctgatgaaaggttaaggctaagataaagagattatagctcaaaacttcttggctaagatctcacagttattaawaactggatacagataaggttcaaaactctggttgactctgaaacatatgcattaa

SEQ ID NO: 631486 - DNA, 543 bp, Homo sapiens
ttgctgaacgttgttaactgtgctatatgtggcccaaagattcagctgtttttacttagtgttatgccaagaccacatttacctgcatggggcagacttccatccccagctcccttatttccattagtggcatcattcaaattttaaaaattattattaataagtataatcataataattaccatttgttgaatatccactatgtgccagacactgaactagctgtgataccaagacatagcagttattgaattttaatatgctccaggcacgtatgctttgattgtgtaatctaatttacacttcacagcagcctgatgaaaggttaaggctaagataaagagattatagctcaaaacttcttggctaagatctcacagttattaataactggatacagatarggttcaaaactctggttgactctgaaacatatgcattaacactacactatacttgcctttactgtgtgcctcaccgcatgcaatgatgaatggtcccgtgaaagttatcatccagcagagggaagcagacctgcaaaca

SEQ ID NO: 631487 - DNA, 563 bp, Homo sapiens
gtacagttcattttcctgtgtggggtaggatacggattaagtgttttgttttggcgtatgggtgccagttactccagcaatattcactggtaagactatcctttttctattgaattgattttatacctttgtcagaaataaactaatcatataggtggcccgtatttctgtattctgtgtttattgacccatgtctgtgtccttttgccagtaccacaccatcttgattactatagccttatggtaactgttcaattaaggtagtgtgggtcctccaactttgatctttttcagcatgatttaagctgttctaattccttgccttacatataaatattaggatatgcttgttgaagtctgtgaaacattcttctgggattttgattagcattgtgttgaatttatagaataatttgtccagaatttacatcttaataatactgagtcttcctgtccatgaacccagtatctctttccatttatttaagtatttttttwaaaaatggtgttgtgtattttccacataaggattctgcacatattttgctacattttatttaagg

SEQ ID NO: 631488 - DNA, 548 bp, Homo sapiens
aagtgtgaataaatacacacttgtaacttcttgatttgaatgacccacctagttatataaaccacatttaaggaccaggatggcctgttaaattaagaatgtttttggcagataaaaggraaatactaggaaccttgttttttctgcctttggttaacatataattaactcagtaacaaatttctatgtgcctacagtcttgaaatttaaataattccactaatactaggttgatccaacgcaaaggttttcaagccttaaagtaattaaatgttatctttttcagtaaaataatgtatttttgcccaattaaaatagggcaatatcggtggatttttgtaccctaaagtattccacaaaggaattcaaaagttagggggagaaaataaagaattctaagtttgtttgttcttaaaaggctcaaaaggtcactatcattctaatatgtctcattagaagttaaaaattattaaataaacctacacataaaagcatacatatatgagtaggtttatgttcttctttagttagtacttttggatatatat

SEQ ID NO: 631489 - DNA, 618 bp, Homo sapiens
gcaaaacaaaacaaaacaacaaaacaaaacaaaacaaaaaaaccccactaaaaatagaactcccacatgatccagcaaggccactactgggtatttatccaaaggaaaggaaattagtatatcaaaagaatacctacacttccatgtttattgcagcactattcacaatagccaagatatggaatcaacctaagtatacatcaatggatgaatggataaagaaaatgtgatatatatacacaagggaatactattcrgccttaaaaagaaatgaaatcctatcatttgcaacaacatggtcagaactggaagtcattatgttaagtgaaataagccaggcagggaaagacaaatatctcaggttctcactcacatgtgggagcttaaaaagttgatttcatggaagtacagagtagactgatagttaccagaggctgggaaagaagctgggatgaagagaggttggttaatggctacaaacgtgcatttagataaaaggaataagttctagtgttcaatagcacagtagggtgactatagttaacaacaatttattgtatatttcaaaatagccagaagacaagatttgaaatgccccacacaaaggaaagatacata

SEQ ID NO: 631490 - DNA, 445 bp, Homo sapiens
atctttgcaataaagctgttaaaatgaattgttataaaatctattgcaataaatgtaaactgtctaatgtaaccagaaagtatttttgtttttaataaagataattattgtggttggtctacagtcttttcttctcattcattcattcattcattcgagaatttttgttgtgtatcactgtttcaggaaatatactaagtggtaagcatacagtggtgagtaaacagaaacttgttgagtctataggctattaggttaacttcttttttatttttatagatgccttgttcattaacctgtggttattgtcattacattctttcatttgcagaattccacattcttcccaawttgaagttcaaagtaaacagcacagaatccccactttgagaataaagcatctgtagttaatgccacatggacgtggggtacctaccaatatatt

SEQ ID NO: 631491 - DNA, 610 bp, Homo sapiens
gaggcgtttttgtagagagccatcttggtgatgaagctgccttcttgggttggaactgtcaggttaattacactaaaacggaaacaattatgagacaggaatccaaaacaatgttacctattcaattacctaccatttttcaggctgagaatgcagagggaaagcaaagcacgtagtagcaaagtctaaggctgtgctgtccaatacagtacctgctagccacatggggcaatttacatttaaatgaaatgaaattaaataaaattaaaaattcaattccgcagccccctgagccacatttcaagtgctgagcagccacatgtagccaccacattaaacagtacagatggaatatttccatcgtcacagagagttctattgaacaatgytggttgaaagcatttaggctcaagaaacgtgaattatgtttttcctagggcatcaaagacaaacgctagcaattttgattatgctaaccttaactgtcaaggaatagaaaaagcaatgtgcacagcccaggagacaccttaccttagcataggcttcacaacagaatccaaggagatcttgatatccagctcataagcacatgaaaattccacattgatcg

SEQ ID NO: 631492 - DNA, 415 bp, Homo sapiens
gaccagtcatccctagaaaaagcaatgctaccagcaaagctgttcttttcactgaaaatggaatycacagaaataaaataattctcttacagcaattctccttctcaatccactcggtgctaaggatcccgaaggagcggcaggcctccccgtaggcggccagggagccgcacagctggaacttcttgtggctgtagcagccgtccaggtagcaggactcgtagaatgggaggggatcgagaagcccatagcagggctggaagaagcccttcatgtcggtgagcttcaggcagtagccatcaccctgcatcttctggatgtgcacattgtcacacatggctgcatactgtgagaactgcagctcgttgcagctgggggcaagaggtctggtcagactgagtgaagcaaaaacagc

SEQ ID NO: 631493 - DNA, 415 bp, Homo sapiens
gaccagtcatccctagaaaaagcaatgctaccagcaaagctgttcttttcactgaaaatggaattcacagaaataaaataattctcttacagcaattctccttctcaatccactcggtgctaaggatcccgaaggagcggcaggcctccccgtaggcggccagggagccgcacagctggaacttcttgtggytgtagcagccgtccaggtagcaggactcgtagaatgggaggggatcgagaagcccatagcagggctggaagaagcccttcatgtcggtgagcttcaggcagtagccatcaccctgcatcttctggatgtgcacattgtcacacatggctgcatactgtgagaactgcagctcgttgcagctgggggcaagaggtctggtcagactgagtgaagcaaaaacagc

SEQ ID NO: 631494 - DNA, 446 bp, Homo sapiens
cacacaaggacatgtgaagacggaggcagagattgaagtcatgtggctccaagccaaggaaagcctggagtcaccagtgcttggaagaggcaaggtaggatcctcctcaaaagccttaggagggtgcacatttctgatgacacygtgattccagacttctgagttctaccactgtgatttgttttgtgtttgtctgaacatgatttcagtaggtgatttaaggcttttgtctaataagtccatctaatatcttggcttcatcagggacagtgtattagttagttctcacgctgctaataaagacatactcaagactgggtaatttacaaagaaaaagaggttgaatggactcagttccacttggctggggaggcctcacaatcatggcagaaggcaaaggaggaaaaggcataccttacttggtggcaggcaagagagcttgtgca

SEQ ID NO: 631495 - DNA, 534 bp, Homo sapiens
aacagtatggggggaccactctcatgattcaattatccccacctggccccacctttaacaggtgggggttattacarttcaaggtgagatttggttggggatacagctaaaccatatcagacagtttctaccaaccactttttccccctgcgtataagccatactttgtttcttttatatcacatatatttttgttattgaaaactggacatttaaaataatttaatggagcagctctggaaagcagattctctccacttctcaaagtttgttgttgttgctgcttgttggtgttgctattcatttgtttggtgacttttctgaatgaattctgtaaagtctgtattctctttcatgtgtggccactgacatttctgcttggttagcttaacagtgcgctaacaattgaacagagatttccttagatgcctggaaccattaagcctctttgcaagagggctctgtgtgtgttagggcatgccttcaatgctcaaccaggtactctgctctattttggcttcacttcttacttgc

SEQ ID NO: 631496 - DNA, 520 bp, Homo sapiens
ctttttgcttaggattgctttggttatttgggcccttttttggttccataagaactttggaattgttttttctaattctgtgaagcatgatgttgagatttaatagagattgcattgaatctatatattgctttgagcagtatggatattttaacaatattgattctttcaatccatgagcatggagtgtttttccatttgtttatgtcttccattattacttttattttcaatctacccttagtaaattttaagtatacaataaagtattgttaattgtactcacattgctgtacattagatgtccagaacatattcatcccacataacagaaactttgcactacttgcctaacatatttgcatttgtctccctccacacccaagatttttttwaagctgaaaaatatttctctgtgtatatatgtgtgtgtgtgtttgtgtgtgtgcatatttgcatgtgtagttccacattttctttattcattaatccattgagggacatttaggttgtgtccata

SEQ ID NO: 631497 - DNA, 396 bp, Homo sapiens
ttctctgacgtatattacaggtaattttctatttctctctctagtttgagggcagtttaggaacaggactgtgtcttccttatctttgttgcctgggagccttaggtgccatctgaacatagagggtgttcattagaggcttggaaatacactgaaataacacataacgtctttgtccttccctcccctgccttgctctgcatgtggcaacacttgcataattggataggattgcctggccttgataaaagatgaggtctgttgggaatagtagatgctgcctttgctgcctctctttcctttctatcccacctmttaggatgtccaagcaactgtgggagcttcctaacttacttggtcctgaatttccacatttgttccccatctgccgatctg

SEQ ID NO: 631498 - DNA, 621 bp, Homo sapiens
aatctcttttccctcctgcgctcctttcctagctcttccggcctcagattactctacccgctcaakctttcctccccgcacaggtgccccggagaggccatggagctgagcagcaagaagaagcttcacgccctgtccctggccgagaagatccaggtgctggaactcctggatgagtccaagatgtcccagtcggaggtggcccggcgcttccaggtttcccagccccagatctcgcgcatctgcaagaataaggagaagctgctggcggactgggtgcagcggcacagccaaccgagagcgcaagcgcaagcgggagtccaagtacagcgggatcgacgaggctctgctctgctggtaccacattgcccgggccaaggcctgggacgtgacggggcccatgctgctccacaaagccaaggagctggccgatatcatgggccaggacttcgtgcccagcatcggctggctggtccgctggaaacgccgaaacaacgtcggctttggggcccgccatgttcttgcgccttcattcccccctgagccacctcccccggggctcacatcccaggctcagctgcctctttccctaaaagacttctctccagaggacgtgtttgg

SEQ ID NO: 631499 - DNA, 586 bp, Homo sapiens
aagcaagaaaatgatattacatacctatttgatacactgaaacagtcttgaatcaccaattgagtatctcttacaaaaactggaatgagaagtggagtaagtacattagactacaaatctgtctcctacactcctaataaaactttttagtggagaacacttttaaagacagcagtagtcttttctcctccatttataaggaccctcaatgtgtttggataaaggagagggagataatgatgtactaggtagagacctcaaaaagaaaaaatgtggcagatctgggaactggtaaatagaggaaatggtatcctctatttagccactttggctaaaaaygccactctttccaatctataatcctaatttcagaacatggcactcatcacacaccatcttgaaatgtaacgattgttgtacctgtgtcattgtccttaccataatagtgtaatgaaaagatgcatgacttagaacctgatcagcctgatttgaatttaaaacaacaagtatctgcattgtcttgagtaacttactgatttctgtgggtcttgtttcctcatatgaaataaggctaacatagttatcc

SEQ ID NO: 631500 - DNA, 455 bp, Homo sapiens
cttcaatgttttataattttccttctagtggtcctttacctccttagttaaatttgttcctaggtattttatatttattgttaatagcattgccttttaaatttctttttcagctagttcattgttcatgtgtagaaatgctactgattttgtatgttgattttgtatcctacaactttatggaattcacttattcattctaagagtatgttggtagggtgtttaggtttatatatttataagatcctgtcatctgcatataggaacaatttgactttcttttttacaatttggatgccatttatttccttctcttgcctaattgctctggctaggacttcccatactatattaaataagagtggtgagartgggcatttttgtcttgttctggctcttagaggaaaaacttccagttttttttttattcagtatgattttagctgtgggtttgt

SEQ ID NO: 631501 - DNA, 536 bp, Homo sapiens
gctccttgcaaatactgactgatggaatttactagcaaaaggatgaatgagagacctgaggagttgctctgtartaatttcttatctaggactgcttttagctgcatatatctggtctgtctacatttttaaaaataaattattctataatttatgggctgccactagactgaataatagatagttatttgattaaacagggctatggagttgcaaaacataaaatgtaagagatcccaaaactcaaaagacttccctctaccagcttgccttctatgcagttagcattacttatccccaaactaaactgcatccaagtgctgcaaaagaagctcaaagaacgatgtctgaaagagtcaggtctcctagatatcttgttgctcgtgtttgttttttgtttgtttgtttgtttgtttgtttttgagacagagtttcgttctcgttgcccaggctggagtgcaatggcgccatctcggctcactgcaacctcggcctcccgggttcaagcgattctcctgcctcagcctctagtaaaa

SEQ ID NO: 631502 - DNA, 595 bp, Homo sapiens
ttgctggaactatataggtgcacaccactgtgtccggctaaatttgtgtatttccatggatgtataatatatttacatatctactatctttcatcaaattttttgtaaaatagactctgaattggagatttgcatacaggaagtttaatggtttatcctctggaacaatrtctgtaagagagggaggaaagcaggaatgttccaagggaaaagttgaagcatggtgagttacaacagaggcatacattgttcagttccacatggaaatttagatcttggatggaccttccaactggtgttgatttgatatcaggagcccctctgtaaccacacattgactagtgactggatataagctgccccttggggagagggctggacatcagacaaggcagatccatggaaattctaagaaagtgactcaaatgtgggctatcagcagccaatcttctatgcatttgatggaataagtgcctctgtcctgaggaggtgaccacaaccttcactacagttcatctctgtgccacatagatttacttccctggtaggatgaccaataggtgggttgtagacccagtgaaaatattctgagtca

SEQ ID NO: 631503 - DNA, 568 bp, Homo sapiens
gaatactatgcagccataaaaaagaatgaaatcatgttctttgcagcaacatggatgaagctggagacccttatcctaagggaaataatgcaggaacagaaaaccmaatactgcatgttctcacttacaagtggcagctaaactctgaatacaaatgaatgcaaagaacaccagagactactagaggttgtagtgtgggatgagagtgagtattgaaaaactacctgtcgggtattatgctcattacctgggtgacaaaataatggcaagcccctgtgacacactattcacccatataacgaatttgcatgtctaccctgtgaatataaaataaaaattggaaagaaaaaagcaaattaggaatagaagagaacttcctaaactgaaaaaccgtatttagtaatatcctacataaaaattatcataatggccaaaccttaagtgctttttccctgagattcaccatgagaccagaatttctgctatttccactttttttttttctgcaacatcatactagtcacaaaattctgcaatgaggaaaaaatgaaaacaaaattcatgaggt

SEQ ID NO: 631504 - DNA, 568 bp, Homo sapiens
gaatactatgcagccataaaaaagaatgaaatcatgttctttgcagcaacatggatgaagctggagacccttatcctaagggaaataatgcaggaacagaaaacccaatactgcatgttctcacttacaagtggcagctaaactctgaatacaaatgaatgcaaagaacaccagagactactagaggttgtagtgtgggatgagagtgagtattgaaaaactacctgtcgggtattatgctcattacctgggtgacaaaataatggcaagcccctgtgacacactattcacccatataacgaatttgcatgtctaccctgtgaatataaaataaaaattggaaagaaaaaagcaaattaggaatagaagagaacttcctaaactgaaaaaccgtatttagtaatatcctacataaaaattatcataatggcmaaaccttaagtgctttttccctgagattcaccatgagaccagaatttctgctatttccactttttttttttctgcaacatcatactagtcacaaaattctgcaatgaggaaaaaatgaaaacaaaattcatgaggt

SEQ ID NO: 631505 - DNA, 568 bp, Homo sapiens
gaatactatgcagccataaaaaagaatgaaatcatgttctttgcagcaacatggatgaagctggagacccttatcctaagggaaataatgcaggaacagaaaacccaatactgcatgttctcacttacaagtggcagctaaactctgaatacaaatgaatgcaaagaacaccagagactactagaggttgtagtgtgggatgagagtgagtattgaaaaactacctgtcgggtattatgctcattacctgggtgacaaaataatggcaagcccctgtgacacactattcacccatataacgaatttgcatgtctaccctgtgaatataaaataaaaattggaaagaaaaaagcaaattaggaatagaagagaacttcctaaactgaaaaaccgtatttagtaatatcctacataaaaattatcataatggccaaaccttaagtgctttttccctgagattcacmatgagaccagaatttctgctatttccactttttttttttctgcaacatcatactagtcacaaaattctgcaatgaggaaaaaatgaaaacaaaattcatgaggt

SEQ ID NO: 631506 - DNA, 568 bp, Homo sapiens
gaatactatgcagccataaaaaagaatgaaatcatgttctttgcagcaacatggatgaagctggagacccttatcctaagggaaataatgcaggaacagaaaacccaatactgcatgttctcacttacaagtggcagctaaactctgaatacaaatgaatgcaaagaacaccagagactactagaggttgtagtgtgggatgagagtgagtattgaaaaactacctgtcgggtattatgctcattacctgggtgacaaaataatggcaagcccctgtgacacactattcacccatataacgaatttgcatgtctaccctgtgaatataaaataaaaattggaaagaaaaaagcaaattaggaatagaagagaacttcctaaactgaaaaaccgtatttagtaatatcctacataaaaattatcataatggccaaaccttaagtgctttttccctgagattcaccatgagacmagaatttctgctatttccactttttttttttctgcaacatcatactagtcacaaaattctgcaatgaggaaaaaatgaaaacaaaattcatgaggt

SEQ ID NO: 631507 - DNA, 562 bp, Homo sapiens
gtttttattgacaaagaagactcatcattttcaaaagaaaaggtcactatatgaaatagtcatggttctgactaaataaagatttataaagacattacagattttatttactgcaattatactgaaagctgtttatcatagaaaacaaacagaaaggattatctccttcaccagtacagcattaagcttttatgaggaaataattgtattttacataatggcatttgtcaatgctaaaggttagcatgtccaaatataagataaatgataacamtttccatttgtgggttttaggtttccaaagagtttccattgcttcttttgatggagcagtctggaggcacagtatcaaggggttttattcaaatattttacagatgagataactgaggtttaaaaaaattcagtgagttacccaaaatcacacactgaaagacctccatcttgaaccaggattctttgtgtcattcccagattgtctcccatgactatagtaacagactaccttaatccttggttcatcactagttacaattttgtatcacaagcaacaaagaggctg

SEQ ID NO: 631508 - DNA, 593 bp, Homo sapiens
attttggttataatatgtctggatgtagatctttttgcttttattttacttagaactcattgagcttgttggatgagtacattaatgtgtttcatcaaatttggaaagttttgagtcattatatctttgatttcctttttccatccctttctctctctcctctccttctcataaatattttaatgtacatttagtgatgttccacatttctctgaggctctttatttttattcattcttttttttctctgttttctttagattgaataatctttactgcyctatcttcaagttccatgatgctctcttctactagctcaaacctatttcagattctactaacctaattccagagaaatatagaaactttatcctactagtgaattatttttatttcatgtattataatttttcaactccagagtttctgtttggttatttttagtactttctatctatattctttattttatagacattttattgtaactttctttaatttgtaaaaccttgtttccttagttctttaaacacatttgaaataggttttttgaagactttgtctgctcattataccatctagaatccctcaaa

SEQ ID NO: 631509 - DNA, 351 bp, Homo sapiens
tactttatacatgcatacacacacacatacatatgcatacatacaccttggccttttctctccaaaagatccactctaccctgaaccctataatttgccctcatatgtgcctacttaaccaaatgcactatctactttctacatccagagccagggagaaacatggtaatctaagaaaatggcatggggctagcacaaacaatcttgtatctaagcatttcccaatgctgatgattacatgccacgtgaaatgtagtccmatcaatgggaatctgatatgggtggttgggttgaccttttggttgtaattgtttcttttgtctaaatctctctgaagtccagtcgatagtt

SEQ ID NO: 631510 - DNA, 470 bp, Homo sapiens
ggccttttctctccaaaagatccactctaccctgaaccctataatttgccctcatatgtgcctacttaaccaaatgcactatctactttctacatccagagccagggagaaacatggtaatctaagaaaatggcatggggctagcacaaacaatcttgtatctaagcatttcccaatgctgatgattacatgccacgtgaaatgtagtcccatcaatgggaatctgatatgggtggttgggttgaccttttggttgtaattgtttcttttgtctaaatctctctgaagtccagtcgatagttgccttcaccctcctttctggttcttagtgactagaagaactcctcacaccctttcgggaataccccccgtataagagctccccacacaagtaaataaaggctctgttttgtaggtctacmaaaccagaattttttcttatttttttttttggataaactctttaagaa

SEQ ID NO: 631511 - DNA, 594 bp, Homo sapiens
ttatttattcttgagggatccatctccataacccaaatacctcccattgggccccacctccaacactgaggaccaaatttcaacatgaggtttgcaaggarcaaatatccaaaccatagcagtcattacgtaaagtctgaaaatatttgttaaatatcagtaaatttagagcagttgttattgaacaatattgttattggtctgttctggatactctaaatgaagaattattttctttagctaattggatatgccggtaataccatgaaacaagcccaactttgcaaactttcagctatgaagaccgcaatattgtctgaagctcctcagaattgatgctttccaaacccagagaggcaggctgaactttgcatagaatatcttatgagtacaaactcttatagtttcatacaacttcacatttttgtttctaggcaaccagaaacacagaaatatggcagcctcatatttgtaatgcagaattctgctgtttcaagattatttattgtaataatttctgccctttatataaacgtatagggttaaattaggccctggctgattaaagaaatgtaaaggactataatttgcttt

SEQ ID NO: 631512 - DNA, 595 bp, Homo sapiens
tgctgtttcaagattatttattgtaataatttctgccctttatataaacgtatagggttaaattaggccctggctgattaaagaaatgtaaaggactataatttgctttccatagggttctaactatgagtcaggcaccatttaaaggataaaactwatgcaagatcccttccctaaaaaatcttacaatataacagggagctctaacactctcataaatatctaaatgaaactgttacaacaaatgttatccatttttactacagctattttctttctttatttatagtaattactgagtgcctattatttatgccaaagactgtatgaggaattaggactcaaacataagtgacgtattattgctgccccctaagcttgcaatctagagaaagaaggaaacaataagaaactgattttacatcatcaaataataaatactatataagatgttcagatacaatatatggcaacacccgaggaagacattcgggccctgttttaaataattccctccacttaaaatgtatttctccactccttactttgcatcgatactcctttaccatcctggtaacttactcactttaaagaa

SEQ ID NO: 631513 - DNA, 515 bp, Homo sapiens
taaataagctcagtttgctgcttttcaagccattcaagaaaacaagactgtttctaaaacaccttgtataaacctgtattttaaaaagtagtaagactaggctattttatcaaatcttcttttcccttttgataacattcttctgagactaaaacttcccttaataggcaccaaaagagatgaacatttttacaatggaactgcttgctaacagaacagaagtcaacaaaggttttattgttgagctttctaaatataaatgcattcctcatcaattaatttatgagacttcctttaatagattaaggattcacagctcctttctcaacatatcctaattacaacaaaggtaataaactaggagacagcagagaaaccatgtytcatttctcaaataatgaagcatatcgagatggtttcttagaaaacaagacaacattcaaggtagactggtagtcatgaaaaaaaacttaagaggaaactaccatgaaaaagttgtgaattaacaaaataaa

SEQ ID NO: 631514 - DNA, 571 bp, Homo sapiens
tactatcacttcagatttataaatacattgatgtattggatttttcttttcattcaaaattcatacacctacaggaatataccacctagactgaaaataacttctcttttggatagtctggaattcacaacaatgacaacacatttagccaaacaagagggcctctaaacaccagataatgcctgggattctgtaggttctcagaactatgtgtaaaaactttatcctcatttttcttataaatgaractggtcaacttccccaaagtccttatgttttttccacacaacgaaaactttccaagttgaaatttctcctcctaataataatgccagttatataggcaaatgtataatctgatattaaaaattaccaaacagaatcccagctactcaggaggctaaggcaggaggatcaggagttcaagatgcacctgggcaacatagtgagaccctgactcaaaaaaaaaacaaaaattatcaaatcgtctcacttgactctgacttttgaaataaactcagaataagaaattctgatttgaccaaaagtttaatacaacagaaagggatca

SEQ ID NO: 631515 - DNA, 544 bp, Homo sapiens
acaaaaaaaagaagaagaaccacatggmtcactttacctcagagctaagctgctgttttatcttttaatagagctccattttttgaataggaaaattagctgctttctatgttaaaaggaactgaacacaatttcagcttcttcatactaggtttggaattatcaagaaaagctcctaagttaccctagctaagctattacataacagtctcatttttaactttccttttctatttgagaaatctgattattttcatgttccttgggttttacaatattaatcattcagtaccatctttattaattttaatagaatttacatggacaccttggttttagtgttagataaaagcaacatatctttcctggcaataggctgccaagcctccagacttaaatcccgagacagaggagagtataccttcccgcagctcccccgaaggacctgatccaccagttcttactgaggtcagcaaacaggatgatcagcagcctttagatctagaaggagtcaagaggaagatggaccaagggaattacacat

SEQ ID NO: 631516 - DNA, 604 bp, Homo sapiens
attatttatttaggttaaacaattaaactgtaagcttaagaggaaagggaccttgtacattcttcaacattatagcctcagacataacagatgctcaataaatgtttggataaatgaatgaataaataaatgaatcagtttcctaaaacttagcaactatctatcatgacctgatgtagcatagttggttcattatgctgtgtctcaaattcaatgatccaggcctttctcctgagtctaccccaaataccatgagactatattggagctctcttgggattatacatggaggatcaataggctggacaaccccactccctcagacagtcagcctggcactgcccttatagagatcctggtcaaacagtagacataggccaagcacggtggctcamgcctgtaatcccagcactttgggaggccgagttgggaggatcacttgaggccaggagtttgagaccagcctgggcaacatggtgagacctcatttccattaaaaataaaaaatttagccatgcatggtgtcatgcacctgcacttcccagctattcatgaggctgaagcgggatgatttcttgagcctgagaagtcaaggctacagtaa

SEQ ID NO: 631517 - DNA, 616 bp, Homo sapiens
gacacagtgaactctctgagcccaatacacagagaaaggaggaaaaaagcaagaattctaagcataactacataggggcctagcacccccgagcttccagcagagcgaaggaagtaggtttttcttttcttccacagagcttggtggtgttgattccrtacagtttttgttcagacaggaagggataaaaatgaatttgggatggaaagggatagactcttttcccactctgttctgctcaaggtgcatccccccaaaataacacccatggtataaataaaagaaacctcaggaacagtgtgactgggcacaagagggaaaaaacaaaaagaccgcaacttgatcccagaaaatggggaacattttttaaaaggaaggttggaatccatcagtgttctattagccatctcctctttcatcctcctctcctttgtcagtatcttccaacccttcatcatcatcatcttcttctttttctttatcatccgtatcaggaaccaagtagagctgtaatgagtttggccaaatatcatctttgatgacctctcctaactctccagcacccgcatcagaatgatcagtgaaccaggtaaaaaagctctccaattcctcactc

SEQ ID NO: 631518 - DNA, 616 bp, Homo sapiens
gacacagtgaactctctgagcccaatacacagagaaaggaggaaaaaagcaagaattctaagcataactacataggggcctagcacccccgagcttccagcagagcgaaggaagtaggtttttcttttcttccacagagcttggtggtgttgattccgtacagttttygttcagacaggaagggataaaaatgaatttgggatggaaagggatagactcttttcccactctgttctgctcaaggtgcatccccccaaaataacacccatggtataaataaaagaaacctcaggaacagtgtgactgggcacaagagggaaaaaacaaaaagaccgcaacttgatcccagaaaatggggaacattttttaaaaggaaggttggaatccatcagtgttctattagccatctcctctttcatcctcctctcctttgtcagtatcttccaacccttcatcatcatcatcttcttctttttctttatcatccgtatcaggaaccaagtagagctgtaatgagtttggccaaatatcatctttgatgacctctcctaactctccagcacccgcatcagaatgatcagtgaaccaggtaaaaaagctctccaattcctcactc

SEQ ID NO: 631519 - DNA, 526 bp, Homo sapiens
gagggctgcctgctatcagaacattcacattcattcaggcccccaatctatctcagggttgcctaccagaaattatttaatcctataaccagtagattctatagtaggcacagggttagtagaaactactagaaaagagcatttgggatgaggattgtgaaaacctatgtatcctagtttgtgttgctttcagaatgttaattttgtattctcttcttctgtaggctttgacaaattacaaaaggctcgtttggatctgtgacacatcgttttggggggaatgctcttctctttgtgggtttttcatcttttattttggaactatgaagacttaaaagagctcagacattttctttttttaactggtgaagagaaaaaggctgaaaagaaggaatataccttttttgttccacttgtttgcactgtgtgctgactgaacattagttgcactaactgctggtttttaaaaratgttttctggggaaaggggacaaggaaggaaaagaaagaagagaaggggagaaac

SEQ ID NO: 631520 - DNA, 449 bp, Homo sapiens
tcatgacatgaaaaatcagtcaatcaatttagccttggacataaatagataatggcttctcattccccgtttacagtggcccctccttctcttgtcttttccaaatacaagaccgcttagatctttatcatcatcctgaggagctgatattcaagattatatgtaagacatggggaacttgaactcagaggggtttttttktgtttgtgtgtgtgtgtgtgtgtgtgtgtgtgtgtgtgtgtgtgtgacaaggtctcactgctgcccagactgagtgctgtggcacagtcacagctcactgtagcatcaacctcctgggctcaagcgatcctcctacctcagcctcctgagtagctgggaccacaggtatgcaccagtatgctcggctaatatttttatattttgtagagacagggctttgccatgttgtccagactggtcttgaattc

SEQ ID NO: 631521 - DNA, 449 bp, Homo sapiens
tcatgacatgaaaaatcagtcaatcaatttagccttggacataaatagataatggcttctcattccccgtttacagtggcccctccttctcttgtcttttccaaatacaagaccgcttagatctttatcatcatcctgaggagctgatattcaagattatatgtaagacatggggaacttgaactcagaggggtttttttttgtttgtgtgtgtgtgtgtgtgtgtgtgtgtgtgtgtgtgtgtgwgacaaggtctcactgctgcccagactgagtgctgtggcacagtcacagctcactgtagcatcaacctcctgggctcaagcgatcctcctacctcagcctcctgagtagctgggaccacaggtatgcaccagtatgctcggctaatatttttatattttgtagagacagggctttgccatgttgtccagactggtcttgaattc

SEQ ID NO: 631522 - DNA, 520 bp, Homo sapiens
gcttccacactcagtctattcaatagattgttctggttgacatatgtgaagaaaatgtagcctccctcataaagtgagggagttaggaaataaagcatttaatagccctttcagacaattgtgtgtattattcttttgtgtacaccaaaactcaacaaatggtagtttcttaaagcttaatttcagaatctgagaccatgtcaatgaatgttttgtactctgttccattaaaattcattgggccatccttcccaatgtgggcaggcatcatacaattcactgagggcctgaacagaacagaaaggcagagggagagtttgctctttctgcctgcctgctcrggctggaacaggaacccgctcctgccctctagctcacacttataccactgaccctcctggcctcaggccttcaggctgtcagccttggactagaacttccactgttggttctgctggtactcaggcctttggactccaactggaactacaccatctgctcccctgggtcttgtgcttgg

SEQ ID NO: 631523 - DNA, 520 bp, Homo sapiens
ctggggaggcctcaagaaatttacaatcatggcagaaagggaaggaaacatgtccttcttcacatgatggcaggaaggagaagtgccaagcgaaaggggaaaagccccttataaaatcatcagatctcctgagaattcactcactatcacgagaacagcatgagggtaaccacgcccatgattaaattacccttcactgggtccctcccatgacacttaggaattatggaaactacaattcaaggtgacatttgggtgggaacatagaactaaaccatatcaagctgttctggaataaatataggtgacaatgtactacttgcaattttttgaaatgggggccagtcttgtgagtctgagcactaaatctgtgggatccaacactawcttcaggtagagaatagaatagaataagtagcagtacgtgcaactagtgtccactggagaattacttgctggtgggaagaatccccccaccgcaccgcccccgccacacacacactttttggtgatcagaggt

SEQ ID NO: 631524 - DNA, 476 bp, Homo sapiens
ttaactttttcatgaaatagacctattcatgtctatatggatctgccacattctttttatgggctacataaaaagatacatcataatttatttaaatgctcccccttgtgayaggcatttaggttgtttccagtttctctctattagcacattgccatgatcgtccttctacacacatttggtcataatacaagaatttctaaggaaaagattcttagaaatactcattaaaatgtagtgaaggctacccaattggtctacactgagcttcctaactttcactctccgctagggtacctgagaatgaccctttccttattcacaacaaagccacatgttatttatctccttgaattttaccaatttcattctgtaaaatatctccttatagtaatttgcaatgaattgatttctagtgaaatcaatcatcctttttatttttattatccacttgtatttttttactgtatatttcc

SEQ ID NO: 631525 - DNA, 476 bp, Homo sapiens
ttaactttttcatgaaatagacctattcatgtctatatggatctgccacattctttttatgggctacataaaaagatacatcataatttatttaaatgctcccccttgtgacaggcatttaggttgtttccagtttctctctattagcacattgccatgatcgtccttctacacacatttggtcataatacaagaatttctaaggaaaagattcttagaaatactcattaaaatgtartgaaggctacccaattggtctacactgagcttcctaactttcactctccgctagggtacctgagaatgaccctttccttattcacaacaaagccacatgttatttatctccttgaattttaccaatttcattctgtaaaatatctccttatagtaatttgcaatgaattgatttctagtgaaatcaatcatcctttttatttttattatccacttgtatttttttactgtatatttcc

SEQ ID NO: 631526 - DNA, 444 bp, Homo sapiens
tttccaggatcattctctgtgattccaaaacagctgccagcctcaagcgacagaggccttggaaaggacttctcccagataaggacagggggcaatgattgcggcattcacaccagaaaagccagtgtgggggttgaagaaycttgtctattcaggtagttccctttgggaaggtcagctctatgctttatactcagcttgatttacagtgattctgccagtgctagatgaggagactcattgcccaggagccctttgaaaccagggtggctggcaagcaagtgtgctcagcaggcagcctacggctggcagctccttccaggcctgccacaccacaaaaagccactctgctcaaggccaccaccttcctggaacagcccccatgtggtgactcaatgatgcagggtctaagcgcatagcaaggttggacagaagtgcaggttg

SEQ ID NO: 631527 - DNA, 603 bp, Homo sapiens
aggggtttttgcccccaaaacaagaaccttatatttggtcatctttgaaaagaatgctcattctgctatttctgtacacagcagcaccaagagcaacccagcccagagaccaactggattaatagataactgtctcagtggggacgtcaccctactatgaatgttttattcttttagcccaaggcaaacagggctaatggtttagttctaaaaactttattttaaaataaaagtacttgggatcattattataatcataatatctgctatttaccaaacgtgtactggtttctaggcatcatgtcagggctgtgcaaggcaggttattaaccccattttacaggtaagtgaaaggaggactaaagagcttgggtaacactgaagaccacttagctaatgaayagatactggatgagacctagagatggagccctgtattaggtattggagcatttgcccacagcgtcagcaaagagaaacaggcacacacatgcatgcactcacacacactcttacacagtcgctgaggcatttagaagaagcagtagctgctgctcagctctgcttccagaactggaagaccctcaaccctactgttctaag

SEQ ID NO: 631528 - DNA, 625 bp, Homo sapiens
tttggaaacactactccaagaggatatgtaactcctgaacttaaccttgggtccagggaacagcttcccaagccaacttccagtaggagccagagggcattgaagcagttgtccatatggtcctttgtcttgttttctggtgtctttacatgctgtaaatccacatggttccctttatttattatttattttgttttactttaagttctgggatacacgtgcagaaggtgcagatttgttacataggtgtacatgtgccatggtggtttgctgcacctatcaacccatgcattagctatttgtcctaatgctctcyctctccttgccccccaccccctgacaggccctagtgtgtgatgttcccctctctgtgtccacgtgttctcattgttcatctcccacttatgagtgagaacatgtggtgtttggttttctgttcatgtgttagtttgatgagaatgatggtttccagcttcatctatgtccctgcaaaggacatgaacttattcttttttatggctgcatagtattccgtggtgtatatgtgccacattttctttatccagtctacaattgatgggcatttggattggttccaagtctttgctattgtgaatagtgctgc

SEQ ID NO: 631529 - DNA, 468 bp, Homo sapiens
ttattagttttctctttccttgttagtttgttagttggtacaattagcattgttatcagtttaaaataatgtgttataaagtgttgtgatggttaatactgagtgtcagcttgattaggttgaaggatacaaagtattgatcctgggtgtgtctgtgagggcgtttccaaagcaggtttacattgcatcagttggctgggaaaggcagaccacaccttattctgggtgggcaccatctaatcagctgccagtgtggctgcaatataagcaggcaggaaaatgtgaaagaagatactgacctakcttcccagcctacgtctttctcccctgctggatgcttcctgtccttgaacatcagactccaagttattcagttttggaactcacactggctcttcttgctcctaagcctgctgatggcctattgtgggacctttggatcatgtcagttaatacttaataaactcg

SEQ ID NO: 631530 - DNA, 550 bp, Homo sapiens
gttatgcaaaataaatgcatttgatactccagattcatcgctcatgagaggcaaggagtttagtgactctgtacataatactttgaccatatgtggagaaccacaraacataatgaagctggttggttgctcctgatttgagtggacaaagtgatgaaaaaaaaatgataaactcagggattctacctcctgccttcagaagcagatactgagcctcaaatctgctaagattgccttgagcgagagtcttataccctgtagaaaaagagctgaatttgtggaaaaacagacacaagcttttatcatgcaagtgtctgacctgcaacaaaaggtgcatgcacagcctagccaggtgtctactgttaaagtgaaggcattgattggaaaagaatgggaccctgccacttggaatggggatgtgtgggagggtcctgatgaagctggggacactgagtttgtaaattctgatgaagcttttttgccagaagcaacagctttcccatccccagaagtggtaaaatccctccctgacccatgctgccatcagcct

SEQ ID NO: 631531 - DNA, 550 bp, Homo sapiens
gttatgcaaaataaatgcatttgatactccagattcatcgctcatgagaggcaaggagtttagtgactctgtacataatactttgaccatatgtggagaaccacagaacataatgaagctggttggttgctcctratttgagtggacaaagtgatgaaaaaaaaatgataaactcagggattctacctcctgccttcagaagcagatactgagcctcaaatctgctaagattgccttgagcgagagtcttataccctgtagaaaaagagctgaatttgtggaaaaacagacacaagcttttatcatgcaagtgtctgacctgcaacaaaaggtgcatgcacagcctagccaggtgtctactgttaaagtgaaggcattgattggaaaagaatgggaccctgccacttggaatggggatgtgtgggagggtcctgatgaagctggggacactgagtttgtaaattctgatgaagcttttttgccagaagcaacagctttcccatccccagaagtggtaaaatccctccctgacccatgctgccatcagcct

SEQ ID NO: 631532 - DNA, 456 bp, Homo sapiens
gacctataactaaagtcccacaggcccctaggggtaaggttggcagtgtgacccatgagaaagtgtgctacactcaaatagaactgcttgagtcctctaatttatataagcagaaatctggagaacagtcatgggaatggatattaagggtatgggaaaatggtggaaggaacttatatttggatcagactgaatttattgatttgagcccactaagtagaaactctgcatttaacgttgcagatcagggagttaaaaaaggttctaatagtttatttgcttggttagctgaaatatggattaaaagatggcccactctgagcgagctggaaatgcctgatctcccttggtttaatgtagaagaagggatccaaaggcttagggagactgggatggtggattggattagtcactttagacytactcatcccagctagaagggtccagaagatacat

SEQ ID NO: 631533 - DNA, 494 bp, Homo sapiens
ttgcttggttagctgaaatatggattaaaagatggcccactctgagcgagctggaaatgcctgatctcccttggtttaatgtagaagaagggatccaaaggcttagggagactgggatggtggattggattagtcactttagacctactcatcccagctagaagggtccagaagatacatccttgaccaatgccttgcaagacaatktgtgagggcagcacctgcatctttgaagagccctgtaattgctcttctctgtacatcagatctaacagtaggaaccacagtctctcaactacaaaatttaaatacaatgggaacaattggatcctgagggggccagggccaagcggccacactaaaccgtcaaagacaaggtgggtgtagctactgcagtggacaacagaggcaaagcggcaatcagaatagtcagactcatatagagctctggcattggctaattaatcatagggttcctagaagtgaaattgata

SEQ ID NO: 631534 - DNA, 539 bp, Homo sapiens
tagacttaatatgcactacagaccaaatggatctaataaatacttgcagaacatttcatccaacgactgtagaatacactttttttttctgtagtacatggatcattcttaaggatagaccatattttaggccacaaaatgagtgttaaaatattcaaaaattgaaatcataccaaatatmttctctgactataatggaatacaaattggaaatcaataacaacaccgggcatggtggctcacacctgtaaccccaacactgtggaaggaagaggtgcatggatcacctgaggtcaggagttcaagaccagcctggccaacatggcaaaaccctgtctctactaaaaatacaaaaattagctgggagtggtggcaggtgccagtagtctcacctacttaggagactgaggcaggagaatcacttgaaccggagaagcagaggtggcagtgagctgggatcatgccactgcactgcaacctggaaaacagagggagactttataaaaaaaaaaaaaatcaataacaagaattttggaaat

SEQ ID NO: 631535 - DNA, 539 bp, Homo sapiens
tagacttaatatgcactacagaccaaatggatctaataaatacttgcagaacatttcatccaacgactgtagaatacactttttttttctgtagtacatggatcattcttaaggatagaccatattttaggccacaaaatgagtgttaaaatattcaaaaattgaaatcataccaaatatattctctgactataatggaatacaaattggaaatcaataacaacaccgggcatggtggctcacacctgtaaccccaacactgtggaaggaagaggtgcatggatcacctgaggtcaggagttcaagaccagcctggccaacatggcaaaaccctgtctctactaaaaatacaaaaattagctgggagtggtggcaggtgccagtagtctcacctacttaggagactgaggcaggagaatcacttgaaccggagaagcagaggtggcagtgagctgggatcatgccactgyactgcaacctggaaaacagagggagactttataaaaaaaaaaaaaatcaataacaagaattttggaaat

SEQ ID NO: 631536 - DNA, 550 bp, Homo sapiens
agagctaatactagcaaaatcaccacctatggttatcacctggttaggcagttttgtcttctagtcactctggtagatgttcaggttagaaatgtactgatcagctgagcgcggtggctcatgcctttaatcagagcactttgggaggctgagatgggcggatcacctgaggtcaggagttcaagatcagcttggccagcagggtgaaaccccatctctacaaccacgcctgtagttgcaactgctcaggaggctgacgcaggagaatcgcttgaacccaggaggcggaggttgcagtgagccgagatcaggccatttcactgcaacccgggtgataaaagcgaaactctgtctcaaacaaaaaagtactgatccatgactgtttctgctacagcgttcatttttcatgctagaaatcctaaagagaaagttttagaaggaatcaccaagttcttagcactccaaataaaagatgcactgacmcgcacttgtgtataggtatcgatccctgttggatggtggtgttagcccattggcagaacatggactt

SEQ ID NO: 631537 - DNA, 615 bp, Homo sapiens
aagcttttgtttttgtagtaagcacaaaacagggtgtgttaaggagaacagaagaaagatggttgcctctttatcgactggtttcagttgtgctgcagagcctcgttggttgatcttacttgtgaaacaacacagcgccacgtttgccgctgtaattaaactcaatggaggaaaagttccctttgaagggaagtgatgtgccttcatcagccagcacctctaaaaatagctttatgtttcaccaacaagtgtaacacatacatcatctaattagatttctttgctcctcttttaatcaccaagaacatcattatcctyttggttcctcattaggaaggtcacacagttcataatcatacttacaaaacctatccagatttcagaacaaaaccgtatcttcttagacttcagatatttcattaatctcactgtgctgtcaacaagctcaacttgcctaggggctttttttttcttttcttttttagtgtggtcaccctaccatctgccattttagtagaatttcagctatatagtttatggttgctggagatcgatgtcatattttcattgtaatcatggaaaggaaaaccagtgacacattccaataccttcatg

SEQ ID NO: 631538 - DNA, 614 bp, Homo sapiens
atctaacaatataagtttgcctttattaaggcctatctatctaacacctctgacaacagaagaaaaggatatgtgacaccacttctttggggggacctaccatgcagcagggaatgaatccattgtactgtctccatcttaaaggagcataaattcgcctttattagaacagatataaatatcaatatatgtctctatcatcaccactggccaaggcttacagaataccttgtccagagacacggtattatacaacagtgctacatatcaaaggacacagaaaagcacatctgagaatagattcattatcatgagtttccctagtcttatctatctatcacccagaagctgccagtctgatataacactgcaatagttagcctrttgaagactcaactaaggtaccagcagtgtggttgctgttctccaggatttgatatgtgttaaatcaatcaccaatatatggttctgtatctccaattgccataattcatggacacaggaagtaagagttggaaacaggaatgcctcctctcactatcatacctgttgcttagttgtagaatttctgctttctgtctcttcaagtttgagccatgctgaggtagaggtcc

SEQ ID NO: 631539 - DNA, 507 bp, Homo sapiens
gttaacggcagaactgggaaggcttaattgatatacaaatggctaatgagaaactgaggtgtaaaaagaagttagtatcmatttctttagaaaagcagatggatgtgtgatggagaaaggggagctggggtttcactggaagagaaaggtgttttagaaatggcaatcagaggaaaggagccgctcctctggggttctttctcatactattccacaagaagcctcagctgaatgaaacccaacccaagtaaaacctaagatgcataaaccttcatctaatggcacacacttttaagaatcaatgtacatcctcgaccccatgtcttctcatacttacccttgttaacgtggtgtgtacttcaagaaatcaagcaacaggaacttagggactcaaatgcccaaactgggcagtatctggtcacccctatttttctgacacttctcttctgctttcgttttcgcctacaccaacaaacaatttagactttgaggctgcagctacatttt

SEQ ID NO: 631540 - DNA, 672 bp, Homo sapiens
tatcatagcaaatgaaaagcccaactaactcaaaagtaaaattacaattggaaaggcacccattgctgcctgctgtatgttgtaaagccttctctatgcaattgctatatcaaattatgctattgaaatcagtcagacactgataaaattgagaccgactttacaagttctgtagatctaattggcctcagcagtgggtccgcagtgactcttgctgctgaacaaaaaatgtgggcttcaatagaaaataataagcagcctggttccatactaacatactgcagccacctctggagataatgcactttaatttagacactgagctccttcatctggccagatgttgaaggaatcttagaaaggtttgtttcctccttccctcctggatgagcacccttgatagtacatttgaaagacctctgggtccagctctgtgcacctrccacccttggtgttcccttttcaaagccatttatacttctttctaaaaatctctacatccctagggtaaaattcctataagtcaccttttcttgcttaagctgttttaaattaggtttccatcacttagagccaaagtagctctgattaaattcacatgccatgtagagggcagtatctaactgagccaagtagaacataatccctgctctaaactgagagccgtgtaga

SEQ ID NO: 631541 - DNA, 607 bp, Homo sapiens
actctgggtgggcagcagaagaggttcgacatctaaatcagctagagtcagtctgagaaagacaccttggctgtgggtctgagtcatagagtaattaacaccagggggtcatcaccgactgagtgcaccaagcgcacaatgctttatttaatgcacgcatgcctaccatgagaaaggtgttgaggataccaccttgagtgactgaaactcagcctctctgtcatgatcaacctctcattactctggaaaaactttatgaagagcaattagtttgtttccatcaattgattcactaacctttccttgggatgatatgctccaccctggccagaaagtatcccttgcatctctctgtccttaggttatttgagagcaggtatggtacctggggcttacatattcagaagaacacaaatgacttacattttgcaggcgatcmaaaagtgactattgaatgggtacacacatatgtatccatcgtatatcgatcctgtagcgtgccagagaaaaaaaaggggaagacagtggagatttgcaaagacaagttcccagatgcaggaagcactctgtctgtacagtgaaggggaaatctgatgtacagagtgaa

SEQ ID NO: 631542 - DNA, 607 bp, Homo sapiens
actctgggtgggcagcagaagaggttcgacatctaaatcagctagagtcagtctgagaaagacaccttggctgtgggtctgagtcatagagtaattaacaccagggggtcatcaccgactgagtgcaccaagcgcacaatgctttatttaatgcacgcatgcctaccatgagaaaggtgttgaggataccaccttgagtgactgaaactcagcctctctgtcatgatcaacctctcattactctggaaaaactttatgaagagcaattagtttgtttccatcaattgattcactaacctttccttgggatgatatgctccaccctggccagaaagtatcccttgcatctctctgtccttaggttatttgagagcaggtatggtacctggggcttacatattcagaagaacacaaatgacttacattttgcaggcgatccaaaagtgactattgaatgggtacacacayatgtatccatcgtatatcgatcctgtagcgtgccagagaaaaaaaaggggaagacagtggagatttgcaaagacaagttcccagatgcaggaagcactctgtctgtacagtgaaggggaaatctgatgtacagagtgaa

SEQ ID NO: 631543 - DNA, 487 bp, Homo sapiens
ccaactctccctaccctatttccctccttgtagcctgcaaagtgggaagcctccttaatcaaagaaggagatcaatgaagtcctttctgcctgtcttttgtttttccttycctgtccccttccttgtgttatttttcttattctatcaaattttcccactccagaatcccttaatggtgagagtaatcctcctggggtgctgaaaatagtttggttttaatgataccttagatgattttgcttcctaagagaaagatttagtaaagtcattgatataaacagagccactagtcccctgcttttccaattctcttccttttcccaacaagctctgctcagctcacctctgctcttcacaccattgcagtctaaatgctttcatcctgggcctctccaggacctcctcctgctccacttagaccatgcttatttgtccctgcacaactggagcctggtgcagtaattacaagctgtggtgaaagggtta

SEQ ID NO: 631544 - DNA, 487 bp, Homo sapiens
ccaactctccctaccctatttccctccttgtagcctgcaaagtgggaagcctccttaatcaaagaaggagatcaatgaagtcctttctgcctgtcttttgtttttcctttcctgtccccttccttgtgttatttttcttattctatcaaattttcccactccagaatcccttaatggtgagagtaatcctcctggggtgctgaaaatagtttggttttaatgataccttrgatgattttgcttcctaagagaaagatttagtaaagtcattgatataaacagagccactagtcccctgcttttccaattctcttccttttcccaacaagctctgctcagctcacctctgctcttcacaccattgcagtctaaatgctttcatcctgggcctctccaggacctcctcctgctccacttagaccatgcttatttgtccctgcacaactggagcctggtgcagtaattacaagctgtggtgaaagggtta

SEQ ID NO: 631545 - DNA, 487 bp, Homo sapiens
ccaactctccctaccctatttccctccttgtagcctgcaaagtgggaagcctccttaatcaaagaaggagatcaatgaagtcctttctgcctgtcttttgtttttcctttcctgtccccttccttgtgttatttttcttattctatcaaattttcccactccagaatcccttaatggtgagagtaatcctcctggggtgctgaaaatagtttggttttaatgataccttagatgattttgcttcctaagagaaagrtttagtaaagtcattgatataaacagagccactagtcccctgcttttccaattctcttccttttcccaacaagctctgctcagctcacctctgctcttcacaccattgcagtctaaatgctttcatcctgggcctctccaggacctcctcctgctccacttagaccatgcttatttgtccctgcacaactggagcctggtgcagtaattacaagctgtggtgaaagggtta

SEQ ID NO: 631546 - DNA, 487 bp, Homo sapiens
ccaactctccctaccctatttccctccttgtagcctgcaaagtgggaagcctccttaatcaaagaaggagatcaatgaagtcctttctgcctgtcttttgtttttcctttcctgtccccttccttgtgttatttttcttattctatcaaattttcccactccagaatcccttaatggtgagagtaatcctcctggggtgctgaaaatagtttggttttaatgataccttagatgattttgcttcctaagagaaagatttagtaaartcattgatataaacagagccactagtcccctgcttttccaattctcttccttttcccaacaagctctgctcagctcacctctgctcttcacaccattgcagtctaaatgctttcatcctgggcctctccaggacctcctcctgctccacttagaccatgcttatttgtccctgcacaactggagcctggtgcagtaattacaagctgtggtgaaagggtta

SEQ ID NO: 631547 - DNA, 600 bp, Homo sapiens
ccagaattttcctgaaccaatcactccagatcagacccatagaatgggagataacacacatggagcaccttgggattactgtttctgtcctggacatccctgctaggcacagcacccagggttgtccccatggatattttagtcagaactgacaactgctattaggtgactccaatatgaaactgggactgagatggctggatttggattgtgtagcagagatctggggctccaaacaagccccatgtttacagctcctttcttctggtgtctcccactaacaataggcactcgctacacatagccaaacctctttcactctccatgaactcacccatgtcytcatgtaatcattctgacaccccttcctcattgctttcctttccttttcctccttcatgcttacttgaaaaaatcccaaccctgatataatccaaaactgcattttctgtaccttctcctgaacagtagaaagctaccggagaaatggacacaatttgctgactggtcttgttttatattcattatcgtaaacctcagggaaccttcagcactacctagaactctttctctgtttctcaaatggatttttaaattgtg

SEQ ID NO: 631548 - DNA, 527 bp, Homo sapiens
aattctccgaattttcagtatgagtgtgtgtgtatgtgtttgtgtgtatgcatgtacgtgtgtgtgtagtatttactctaattatttaattcttcaaaacagatgacacttgttattcctaagactcatctttaaaataacaagaaatagtgatgaaaagaggggtctctagatatagttcacaatgatttctcatcatcctgaccattacaatcaaggatccagaagtgtgcatgcagattttattggacatatttgtgtatttttggctgaattccaagttaattgagtccttctcactctcctctcttgcccctagactctgggcttcatttccaacccctctgtgagaagcctgaggatgtaagaggaagagggcaaagcgtggggttggagcagaaagagtatggggttggaagataggtgagccctggtcccttcccccaagygcctgtgcccaaccaccctcttcagctttgatttcttctgaaggttcactttcagagttgatggaaggtcagacagag

SEQ ID NO: 631549 - DNA, 476 bp, Homo sapiens
attcctttttctctaagtgttcgtattacaatttaacaggcaagaaaaatgaaaataaaatgagaaaatttaaaagacatccagacagttaaaacttgtcagtgagtatctaagtgcgagacatctgcatagacgtgcatcagatgtcttctgtgatgctacaagtaggatctcagagagaagaattgcggttttggctccctgctcactggtcacagggagcaccattctagacatgctctcagcaaaacacagtcagattcgaatactagaggtagcatgtgctctcactgcataccgatgtcttcctattttcctgctgatcagagatagatagagtacagatagtatgaagcaggcagccaagagatgcgtttccacccaaacccagctttggrttgctaggggacctgcagcaggctgctgcacctccaagcctcagtttccccatcgatgacatgaatgttggacaagat

SEQ ID NO: 631550 - DNA, 503 bp, Homo sapiens
cttccatagtttgtatctatttccataactaataaaattatacaattcaaaccaaggccaaacctttatgtggtgtcggctttgtggagctatataggagatatctctattcacactggacttggctggaaaagccctttgtttctgacatgacatgcagattgaaaggctatgrtcctgacaccttggatgtaaggctgttccttcagaatctgaagaaaaaacacagacactccagtataaatacacaaaatgttctacataggttccggtggtttgtgagcttttaaaactcactattgagccccagtgttaagaacccctgctgtgaaatttcaccttggatttgtctcataggctgcttacatttctcaaatataattggtaagaattgtgttctacaggctttaatttttaactaaataaacaacaactagggcatccttctgaatcccccagggagttccatacggactgaatctaatcctttgggaatcaaacct

SEQ ID NO: 631551 - DNA, 555 bp, Homo sapiens
gggagtgggtcatattaagctccagcttcccygtggctggaggtttctggcacatacccagcacgggctggagacagttctccctctagcactactctcatatcaggactgtaaaactctattggaacatcaggattccacagagagtcaagaggagaattcagtagatttatgttgttgctgacatttaagtctatgtaaggacttttttcagtccaattctatttccttatatttctgaatcattttatcttctttctggtccatttgttcctagggtccccaaagaccctcctaaaaattagtgaagcaaaaactgccaccattgaggagaaaattaattacacatggaactggattaaaaaacacccacatgtatttatttattccccactatttactgaggacctaatatacccaggcactcttttccatgctgtggataaaatgctgaccaaaataaaaatgcttcctgctcccaagatgttttcaatctagcagggaagaaagttaataataaaattatatcccacacaaacaatgtgctatacatgg

SEQ ID NO: 631552 - DNA, 555 bp, Homo sapiens
gggagtgggtcatattaagctccagcttccctgtggctggaggtttctggcacatacccarcacgggctggagacagttctccctctagcactactctcatatcaggactgtaaaactctattggaacatcaggattccacagagagtcaagaggagaattcagtagatttatgttgttgctgacatttaagtctatgtaaggacttttttcagtccaattctatttccttatatttctgaatcattttatcttctttctggtccatttgttcctagggtccccaaagaccctcctaaaaattagtgaagcaaaaactgccaccattgaggagaaaattaattacacatggaactggattaaaaaacacccacatgtatttatttattccccactatttactgaggacctaatatacccaggcactcttttccatgctgtggataaaatgctgaccaaaataaaaatgcttcctgctcccaagatgttttcaatctagcagggaagaaagttaataataaaattatatcccacacaaacaatgtgctatacatgg

SEQ ID NO: 631553 - DNA, 540 bp, Homo sapiens
ggcaaagccgaggacccatgctctttcacttgggcctttgtgtgggcgctgctgggatgattagagaatggtttgtacccatcaggagggagaaggggagaagtaggctgatctgccctgggtaagaatgaagtagatatgaatcttacagcctctccgttctgggatgtgattctgtctccttcactccgggtatccagttttaagtgttttctttcttcgcctcccccaggggcactatggcagacaaagttaggaggcagaggccgaggaggcgagtctgttgggccttggtggctgtgctcttggcagacctgttggcactgagtggtatgtaccccagtagagggagcaaatggataaatgatgactgaaggatgcatgatgggaaktgagcttggggctgttggccagaagtctcttgagttgttaggtccaggcctttttgtcttttgccatcttcgtttacccatggaaagtggtatgctttgattagagggagtcccaggaaggtgggcgaagggagagctaactgacaaa

SEQ ID NO: 631554 - DNA, 591 bp, Homo sapiens
tcctctagcttcattccacttacctagccatgcaagacagtcacctggcagcagttcctggacacagctcagagcaatctgttttcctcccctgtcaccttccccatgggtacgacaaccatgtaggttttattaataacatatactttgactggcctcttgcagacagaagtactgtgagtcatgccgtgggcatgtcctctgttgtctgacctaggatgcggtgcagtggctcaccctataatcccagcactttgggaggccgaggtgggtggatcacctgaggtcagtagttcgagaccagcctgaccaacgtggtgaaaccccgtctctactagaaatacaaaaaaattagcygggcttggtggcaggcacctgtagtcccagctactcaggaggctgaggcaggagaatcgcttgaacccaggaggcgaaggttgcagtgagccgcgatcatgccactacacactccagccttggctacagagtgagactctgtctaaaaaaaaaaaaaaaagttatagcatgaggccggggtgtggttgctcacacctgtaatcccagcactttgggaggctaaggcagaaggat

SEQ ID NO: 631555 - DNA, 591 bp, Homo sapiens
tcctctagcttcattccacttacctagccatgcaagacagtcacctggcagcagttcctggacacagctcagagcaatctgttttcctcccctgtcaccttccccatgggtacgacaaccatgtaggttttattaataacatatactttgactggcctcttgcagacagaagtactgtgagtcatgccgtgggcatgtcctctgttgtctgacctaggatgcggtgcagtggctcaccctataatcccagcactttgggaggccgaggtgggtggatcacctgaggtcagtagttcgagaccagcctgaccaacgtggtgaaaccccgtctctactagaaatacaaaaaaattagctrggcttggtggcaggcacctgtagtcccagctactcaggaggctgaggcaggagaatcgcttgaacccaggaggcgaaggttgcagtgagccgcgatcatgccactacacactccagccttggctacagagtgagactctgtctaaaaaaaaaaaaaaaagttatagcatgaggccggggtgtggttgctcacacctgtaatcccagcactttgggaggctaaggcagaaggat

SEQ ID NO: 631556 - DNA, 591 bp, Homo sapiens
tcctctagcttcattccacttacctagccatgcaagacagtcacctggcagcagttcctggacacagctcagagcaatctgttttcctcccctgtcaccttccccatgggtacgacaaccatgtaggttttattaataacatatactttgactggcctcttgcagacagaagtactgtgagtcatgccgtgggcatgtcctctgttgtctgacctaggatgcggtgcagtggctcaccctataatcccagcactttgggaggccgaggtgggtggatcacctgaggtcagtagttcgagaccagcctgaccaacgtggtgaaaccccgtctctactagaaatacaaaaaaattagctgggcttggtggcaggcacctgtagtcccagctactcaggaggctgaggcaggagaatcgcttgaacccaggaggcraaggttgcagtgagccgcgatcatgccactacacactccagccttggctacagagtgagactctgtctaaaaaaaaaaaaaaaagttatagcatgaggccggggtgtggttgctcacacctgtaatcccagcactttgggaggctaaggcagaaggat

SEQ ID NO: 631557 - DNA, 591 bp, Homo sapiens
tcctctagcttcattccacttacctagccatgcaagacagtcacctggcagcagttcctggacacagctcagagcaatctgttttcctcccctgtcaccttccccatgggtacgacaaccatgtaggttttattaataacatatactttgactggcctcttgcagacagaagtactgtgagtcatgccgtgggcatgtcctctgttgtctgacctaggatgcggtgcagtggctcaccctataatcccagcactttgggaggccgaggtgggtggatcacctgaggtcagtagttcgagaccagcctgaccaacgtggtgaaaccccgtctctactagaaatacaaaaaaattagctgggcttggtggcaggcacctgtagtcccagctactcaggaggctgaggcaggagaatcgcttgaacccaggaggcgraggttgcagtgagccgcgatcatgccactacacactccagccttggctacagagtgagactctgtctaaaaaaaaaaaaaaaagttatagcatgaggccggggtgtggttgctcacacctgtaatcccagcactttgggaggctaaggcagaaggat

SEQ ID NO: 631558 - DNA, 623 bp, Homo sapiens
ggctgggatgcaggctggggaccggctggtggctgtggctggggagagcgtggaggggctgggccatgaggagacagtgtccaggatccaggggcagggctcctgtgtctccctcactgtcgtcgaccctgaggcggaccgcttcttcagcatggtgcgtgctgaggggcaggggctagggttggggcaggagtggggcagggctgaggtccgaaagatttgctctccctgccaccttccaggttcgcctgtccccactcctcttcttggagaacacagaggctcccgcctcgccccrgggcagcagctcagcctcactggttgagacagaggacccttcacttgaagacacaagcgtgccttctgtccctcttggctcccgacagtgcttcctgtaccctgggcctggtggcagctatggcttccgactcagttgtgtggccagtgggcctcgtctcttcatctcccaggtgactgatgccccatggatcttgaatcccttcgatcctttgctgcctgatcggtcttcctctgcttccctcccagagcctaaagccagcaaactttcccccggtgtcccctgttctgcatgcccccacaacaccaggtgactccaggaggct

SEQ ID NO: 631559 - DNA, 609 bp, Homo sapiens
caaaggatgtaagattcttcataattccttaatgtaaaacatgagccggttgagtatttcatgtaatcagcagtaggattttgaaaggcatgtagaataaaagtagagttagaccagggaagaagattgtatgctctctccgttttgtgagtttggttgaagtttttgctgactcttgatataggaaaaacctatttttagtatgttttcagccagcagtatacatataatgaacctgataaatcatggtcaaattggtcctggagtcttcgtcttcagcagagttcaatgttatattcaaacatacaataatatttatactgtgataagtaatttccctaatgattaacctagagtgctaagagcaaaatggactaaatattcgtttgaaaacagcctaaattttttttttttttttgaggttgcgtcttgctgtgttgcccaggctgaccaacagggtgagcttcatctctactaaaaatacaaaaattagctgggcttggtggtgcatgcctgtaatcccagctcctcgggaggctgaggcaggagaatcgtttaaacccgcccgggagggtggaggttgcmgtgagcggagatcacgccatggca

SEQ ID NO: 631560 - DNA, 469 bp, Homo sapiens
cagcactgtcacctcccatctccaatccaaggaggctatcagtggcagtggcttccctcctgccctctcatgtccctggccaccccattcctgcagggcctcgccctcttccctggctccagccaggctaccccmcttccctttggcattggggtgggctcagccttccttccctctgttcctcctggccactgctctgccagccctgttctgcccacctcccaatcccagcacatcaaaacagcagtcaagagtgggaaatgcatgttctgagccctgccctgcccctaaataactggatgaatcaggtacctcatctctctttgggccccaattttcacaaataaaaagcaggagcccaatcactgtaaccaactgtgatgaattctgtgatgctaactccatctggtagacctcacatcttggttatactcaatatatacacagtcgaatctttttttaatagact

SEQ ID NO: 631561 - DNA, 549 bp, Homo sapiens
ttgccttcacatctgaggccccactgcctacaaactgaaaatgaaatctgccaaaacgggttggggagctccactcctgaacatagctcgtcccagtcccttctaggcatgaggtccctccacacctgggggagaccctcccccaatctcccaatgccaccttctttgcccctccagtgtcaggttgaagctctgggaatgaacgtttgaagttctaaacaggatttcttcccaagtyctcagtcactcaacggcaaactatgaagtgtccccagcctgtgaggctcctcctgcagccaaaactgggagggggcactgagtctgggcccaggctttcttccaaggctaggacactcgggcccttccgtggctctcccagtgcagccctgggctcagcactgccctcccaatgtcccggaaggaggccgctgtggccctggctccgaggcccaggcccaatccatcttcccagccagtgactcgctctgacaacagggccgagctgccgtggcatttgcctctgatctccgctggccaggcatttgtcag

SEQ ID NO: 631562 - DNA, 591 bp, Homo sapiens
tgctatccctttgactcttcgcaacagccctatgagataagcattattatacctattttacaaaagaggaaactgaggcatgaagagctttgctagtatgcagcaaaactgaacatgaacaaagatctgcctgactccaagctctatcctaagagtcgggggataatatggtattatttcaaatatatgagactccattcctttatctacagtaatggaarttttactattgtaaagagtgagataagaaattgggaaggacacatggccatcaataagttgcagctagtattgttgttcaatactgctaaaagatccctttgaaattgtaccacgaggggctgtggtctgaggagtgggcattttcagagattatttgaaagccaaattcaatttcttttcatgatggcctacttgaaatttattggttacttattgacaatacacatgttattcctttctttgttttgtttgttctaaagtaacatggaaaattattaaaaatgagttcctaagtggaaaagtccttcaaattagagatgaatatgttatttacagttgaaaagtcatgtaatgttgtgatgtgatgtt

SEQ ID NO: 631563 - DNA, 591 bp, Homo sapiens
tgctatccctttgactcttcgcaacagccctatgagataagcattattatacctattttacaaaagaggaaactgaggcatgaagagctttgctagtatgcagcaaaactgaacatgaacaaagatctgcctgactccaagctctatcctaagagtcgggggataatatggtattatttcaaatatatgagactccattcctttatctacagtaatggaaattttactattgtaaagagtgagataagaaattgggaaggacacatggccatcaataagttgcagctagtattgttgttcaatactgctaaaagatccctttgaaattgtaccacraggggctgtggtctgaggagtgggcattttcagagattatttgaaagccaaattcaatttcttttcatgatggcctacttgaaatttattggttacttattgacaatacacatgttattcctttctttgttttgtttgttctaaagtaacatggaaaattattaaaaatgagttcctaagtggaaaagtccttcaaattagagatgaatatgttatttacagttgaaaagtcatgtaatgttgtgatgtgatgtt

SEQ ID NO: 631564 - DNA, 539 bp, Homo sapiens
gtcatctcaaaaataaggataataacagtacttaccttgcagggttgttgtgagatttaaatgagataacccatgtgaaatgctttgagcagtacctagcacatggcaaacaatcattatcgattatgatttattactcagtgccaggcactgtgggcacagtgctgttctcgcatcaccccatccagctctgcaataatcyggagctgagtggtggtatttagacgtgttgtccagatcaaggaagtcacttttcagctgaggccaacgagtgaacatgttcctggagacaaaggaggcagagtttatagacgagttttcctcggtgtggggtggagagcaccaccttctccccatggcggcgggaatgtgatgcctgcaggtcacaggcaggctgcgggtgtgtttgtgggtattgaattctgtctgttaatcgctaaggattaattgttagggataaacacaaggtgtttgtctggctcccagcaagctctaaattaaatgagagagcgtttgaagcaggggtggcagtggcctga

SEQ ID NO: 631565 - DNA, 400 bp, Homo sapiens
  misc_feature 89: n = A,T,C or G
cagatctggcactcttggtatacaccactgaagggctgactctatgactgagagagctgatgattcacttgtgcccccgtctgatctgngacttagaccttctcagcacttcctgccaacccgactaatggccagatgggctgtctaggagaggggcatcgcccaatctgcaggaaacagtaattacaaatcaatgtttgtgggacctgactggggtcgagcctgcagaagctgggtttgtggccagtcgagggatcctgccagcctagggtgccaacgttctagggtgccaacgtggggcagggctgaacaccaatctggccaggcaagcgtcagcaagccagatcctgcactgagcctgagccsaagcccgcgggttgctctccgactagcgctcgtg

SEQ ID NO: 631566 - DNA, 590 bp, Homo sapiens
ggcaaattcccatgaaaacagaattaatccattcatgagggcaaattcctcatgatctaatcacttcttaaagttccatctcttaataccattacaacggtagttaaatctcaacatgaattttggaagggacattcaaaccatcaaaggccttaattaccttaaggaggcaattaagattaaataaggtcacaagcatggaaccctaatccaataggatgagtgtccttatgagaagaggaagcgacaccaccagagctccgtcttcacgcacacacagagaaaaggccatatgagggaacaatgagaaagtagtcatctagaagcccgraagaggtcttaccagaaacaaactttattggcacctcggtctaagactctgaacctctagaactgtgagaaaataaatttctgttgtttaagccactcagtctttggtattctgttttagtagtccaaggaagctaatacattgatatcaaaggagagaacagacactatttttttttatggacatatataccaccacctatgaggtgattttatttataaaaaattatgaatctgaatcacatcaagatttagtgcta

SEQ ID NO: 631567 - DNA, 609 bp, Homo sapiens
gtaaccttggagttaggatggccatggctggggcttgccccttgctaagacgaggcttgtcccttctcaacatttgctaggtggctggagtcaacggtgtggcaggagtgagcttttgcatgatacctgggcagtggggtgcttgccagggggttgacagcatcagtaatgaggtctgctgacgggggccagggttggagaataggaagggactggaaatggagtcttgtaagccctaaagatgaagactttcagtgtgagacagggtgaccagcttgtcctggttctcccrggactcaggttttagcactgaaagtcccatctcctaagaacctcctctccacctcagtcctgggcatactgggatcattggtcaccttaatgttagatgtagatagaacactaatggggaaagagtatgaactttgaagtcagagtcagaccaaggtccaaattaccagctgcataacctgtggcaagtgctgcatcctctctaagcctgttttctcatcagtaaaatgggcttaatagagtactttttttcccacagaaccattgccatgattaggtaaaataatatatgtaagggccctggtcctcccttcctgt

SEQ ID NO: 631568 - DNA, 609 bp, Homo sapiens
gtaaccttggagttaggatggccatggctggggcttgccccttgctaagacgaggcttgtcccttctcaacatttgctaggtggctggagtcaacggtgtggcaggagtgagcttttgcatgatacctgggcagtggggtgcttgccagggggttgacagcatcagtaatgaggtctgctgacgggggccagggttggagaataggaagggactggaaatggagtcttgtaagccctaaagatgaagactttcagtgtgagacagggtgaccagcttgtcctggttctcccaggactcaggttttagcactgraagtcccatctcctaagaacctcctctccacctcagtcctgggcatactgggatcattggtcaccttaatgttagatgtagatagaacactaatggggaaagagtatgaactttgaagtcagagtcagaccaaggtccaaattaccagctgcataacctgtggcaagtgctgcatcctctctaagcctgttttctcatcagtaaaatgggcttaatagagtactttttttcccacagaaccattgccatgattaggtaaaataatatatgtaagggccctggtcctcccttcctgt

SEQ ID NO: 631569 - DNA, 609 bp, Homo sapiens
gtaaccttggagttaggatggccatggctggggcttgccccttgctaagacgaggcttgtcccttctcaacatttgctaggtggctggagtcaacggtgtggcaggagtgagcttttgcatgatacctgggcagtggggtgcttgccagggggttgacagcatcagtaatgaggtctgctgacgggggccagggttggagaataggaagggactggaaatggagtcttgtaagccctaaagatgaagactttcagtgtgagacagggtgaccagcttgtcctggttctcccaggactcaggttttagcactgaaagtsccatctcctaagaacctcctctccacctcagtcctgggcatactgggatcattggtcaccttaatgttagatgtagatagaacactaatggggaaagagtatgaactttgaagtcagagtcagaccaaggtccaaattaccagctgcataacctgtggcaagtgctgcatcctctctaagcctgttttctcatcagtaaaatgggcttaatagagtactttttttcccacagaaccattgccatgattaggtaaaataatatatgtaagggccctggtcctcccttcctgt

SEQ ID NO: 631570 - DNA, 589 bp, Homo sapiens
ctccaatttctttccacctctatctaaaatagagatctgatcatatcactgcctgactttaaacctttcatgactcctcactgtgtgtgtaataagtatctacactcrctgtcacaaccacactggactgctcccagtccccagagcctgccatgccatctcatgcttctctggcttccctctggttgctcccattgctgggactgcccttcttgacatggaagcctgcaactcttcataaacccctccgcgaatgtatctcctcagtgaaggcttcccaaggcccagcaagtgaaccctttacagttgctggattataggatgtcattgattctgagctagactatggatggatgatgtaccatcattttagcaatcataaacaccaccttaaacatatacatcagcggtacggtgtgttccatattcaggaacatggccacctggggcagcatgttggtgctctgtaggcccccagcctgccccgctgtcctgctgtcccggtcttggacagcattatgccacgatcccctttgggtgcactggtcgctgagctctgaggtgtgctccctgggagcaggcggcacct

SEQ ID NO: 631571 - DNA, 512 bp, Homo sapiens
gctctgctgccaggattctctgtggccgtagacacactctttggcgttcctgggcttcaaattcttcctgtcttctttccttcctccacctaatgaaagcccatctgaccttccagtggggacttggggccagctgtgagcttttgggaagggggatgctacggggtaagacagtccatctgccctttccaccctgcaaggccaaagatgtggtctggtcccccgagggaaggctggctgtgtggagtaagcaagggctgtgagggactctccacagcctgacctgaatccccattaaacgcccccctccccaagtcccaagctttcttgcaggaaagatgacttcagccacccacaggcccaaccagcagccagaggcaaacagcagcagctccgcccctggctttccctgggcccactcttttgctgtgatgcatgtcygtccttatcctctgaatcccagccccagcctcagtcctcctaaaccacctttctcacctgtctcgtctttc

SEQ ID NO: 631572 - DNA, 563 bp, Homo sapiens
tttccccaccccaactaatgcttccttccttgccgtgtcgagggaccgcaggcctgactgcactctcttgcaggagggtgtgactgtggctttgggcaatagccacaggsaggtttcatctgtaatcctttcgtagtcagcagactggcctgccaccaccttgagtctaccacttccaagagtgtagggacaaagcagctgttcacagggccaaaaatccatgcagatagaggcacatcattcacccccactcactgagccccactctgcaccagggattcttcgggaggcagtgcgctaccagaccatgcttccttagcattcattctggatttgtagggaggctactacgtgctaagcactgcacagggcctaaatggggagagcaacaggaggttcacaaaacagagcagatcagggatggctgctctggtcttccgggatgtgcagggccaccaaccctttctggccccttcccccgcatgtcctcctgatgctcctccctgcctctgccccgagctctgggccctctctgtcctcctctcctgccagttcacccctga

SEQ ID NO: 631573 - DNA, 563 bp, Homo sapiens
tttccccaccccaactaatgcttccttccttgccgtgtcgagggaccgcaggcctgactgcactctcttgcaggagggtgtgactgtggctttgggcaatagccacaggcaggtttcatctgtaatcctttcgtagtcagcagactggcctgccaccaccttgagtctaccacttccaagwgtgtagggacaaagcagctgttcacagggccaaaaatccatgcagatagaggcacatcattcacccccactcactgagccccactctgcaccagggattcttcgggaggcagtgcgctaccagaccatgcttccttagcattcattctggatttgtagggaggctactacgtgctaagcactgcacagggcctaaatggggagagcaacaggaggttcacaaaacagagcagatcagggatggctgctctggtcttccgggatgtgcagggccaccaaccctttctggccccttcccccgcatgtcctcctgatgctcctccctgcctctgccccgagctctgggccctctctgtcctcctctcctgccagttcacccctga

SEQ ID NO: 631574 - DNA, 573 bp, Homo sapiens
taaatccttccacttagtggtagattttaaagtgctgatcttgatttttggtaggataaacagtcaaaaaaaaaaaaagaattttaaacacagttgataatgttaatttataggcatatagaactttcttcccaaccatgaaggaattcacaatttyccaagcacatatgaaatataatccttttaataactgaccatgtactaggtcataaagcaagtctcaccacgtttcaaggcatctgtacatcatacagaccatgttttgtgaccttggtgcacttaagttagaagtcaataacaaaagcaaataaaaatcactatatatttggatatttaaaacacacacttcttaatgcataggtaaagcaagaaattgtaaggaggtttaaagtatactgagaactaaacaacaatccaactatgatggagtactttcacccccttacagaagctttgaagtgtggttattgattattgtttagttcttagtattatactttaaaagcacttagagggaacattgcagtcttaaatgcttatattggaaaataagaaaagctaaatattaatgaa

SEQ ID NO: 631575 - DNA, 643 bp, Homo sapiens
atagaagaaacccagagattgtttaagggcagaattaagaaaattttaaaacatacaataaaaaggattaatgaaaccaagagttggtttcttcaaaaaaactataagcatygttaaacctctggtgaaactgaccaagaagaaagggagttgtcacaagtaacattaggaatgaaaaaaacaggcataactttatggcaaaacatttgaaagcagaaaagggaaaattcctttaaaaattataactcactaaatttattaaagaagaaatagatatctggagagtgccataaccattaattaattgaatgggccatttaagatcttcccacaaagaaagtcccaagcccggatgattttacaggttagttccaccaaacactcaaagaacagataattcgaatcttctgcaaactcttccagggagctagcaggagagtggacacttgttctgtgaggccagtactgccatccccaaaccaggcaaggttaatacaataaaataaaaactgcagaccaatctcactcatgcacatagatgcaaaaatcctaaaccaaatgtccgtaagcccaatccatctgtttattaaaaaaaaaaaaaaaattggtttcatttcagaaatgcagggatgatttaacactt

SEQ ID NO: 631576 - DNA, 643 bp, Homo sapiens
atagaagaaacccagagattgtttaagggcagaattaagaaaattttaaaacatacaataaaaaggattaatgaaaccaagagttggtttcttcaaaaaaactataagcatcgttaaacctctggtgaaactgaccaagaagaaagggagttgtcacaagtaacattaggaatgaaaaaaacaggcataactttatggcaaaacatttgaaagcagaaaagggaaaattcctttaaaaattataactcactaaatttattaaagaagaaatagatatctggagagtgccataaccattaattaattgaatgggccatttaagatcttcccacaaagaaagtcccaagcccggatgattttacaggttagttccaccaaacactcaaagaacagataattcgaatcttctgcaaactcttccagggagctagcaggagagtggacacttgttctgtgaggccagtactgccatccccaaaccaggcaaggttaatacaataaaataaaaactgcagaccaatctcactcatgcacatagatgcaaaaatcctaaacmaaatgtccgtaagcccaatccatctgtttattaaaaaaaaaaaaaaaattggtttcatttcagaaatgcagggatgatttaacactt

SEQ ID NO: 631577 - DNA, 485 bp, Homo sapiens
accacttttccttctctcctttgttagggctcagagcctccgatggtcccagagctggcctgatcctctgctggtgaggatgactcccagagcctcaggctttctctgggtcagggaaaagagcagcggcagtggagagattgaaattctggtcagtgcccagcytctggagcccagcacctgggaatggctctcgttaacacctggagctccggactggggctttgaggaggagggaaaagggctgcgcccactctttatccaaccttcccttccaggtttagggaaggggctcctcttttgagggaatctggcagtgcctttccctccaccttcctctgcagggttcccagggagatgttagggttttccttctgggcttcctgagcctccatctcttcccctccacacccctagggaggtggctggataaggaaggaaactgccctctctctcccctgcctcagcccagcctgagacttatt

SEQ ID NO: 631578 - DNA, 420 bp, Homo sapiens
tcaaatacttactattaagtacrtttttattgcacaaactactggatggtagtggatgctgctccagcctcatcctgaaaacattaactaattatattgacattatcatttaggctgtatgatgtgtaaagccttttatttttccttttaggttcaaagcagtggcacatgattggccacctgcagccagaaacctcctatgacattaaaatgcaatgcttcaatgaaggaggagaaagtgaatttagcaatgtgatgatctgcgagactaaaggtaggagaatttttgcttttccctggacagtgatagaattccaaccctggattactgcttctgactactgatatattctgggttttgttttgtcttgttttgagacacggtctcactctgtcacccaggctggagtgcagtggtac

SEQ ID NO: 631579 - DNA, 420 bp, Homo sapiens
tcaaatacttactattaagtacatttttattgcacaaactactggatggtagtggatgctgctccagcctcatcctgaaaacattaactaattatattgacattatcatttaggctgtatgatgtgtaaagccttttatttttccttttaggttcaaagcagtggcacatgattggccacctgcagccagaaacctcctatgacattaaaatgcaatgcttcaatgaaggaggagaaagtgaatttagcaatgtgatgatctgcgagactaaaggtaggagaatttttgcttttccctggacagtgatagaattccaaccctggattactgcttctgactactgatatattctgggttttgttttgtcttgttttgagacacggtctcactctgtcacmcaggctggagtgcagtggtac

SEQ ID NO: 631580 - DNA, 586 bp, Homo sapiens
cgatggaatttccggtcctgagaccgagtaatagggaaggaaatatttggggttgagacctccttagagccctgagaacatgctagttaccaagcctttggagaccaagaggtaaagcattctgtgagaactgttgtgtgtgacagcttctctgtttgcttttctcacattattttttactttgatatttaattcttttttcctggttgcagtaaatagactggcagagccagatgaagataaggaagaaccagaccaaaaccaaacagagtaagagaggtagagaactgacttctgaaatattaatataatcaggcacctctcttatgcaaatccatgtaagtgaagattatgcagttggcatttccacttcatctagatcagtgctatccaatattgtagtgaccagccacgtcaatrtgggaacttgaaatgtggccagtccagattgagatgtgcagtaattgtatatataccagattttggagacaagatataaaaagaatgtaaaatatctcattaataatttttattattacatgttgaaatgatatactggatatattgagttaactgaagtgtttca

SEQ ID NO: 631581 - DNA, 590 bp, Homo sapiens
tttctcaaccagccctacctgggcatgtggagcaaaacactcatggcttctgtttcctgattggttaaaaatgtgattgcaatgctcaccctgacactgctcagagctgttgtaagagcgggatggtggattagtaagagcgtataagctgctgtgcagagatgtgaagaaagaggagagctggaatcacatcagggttcagatcttggttctgttcccactacctgagtgacgatgaacaagttactcacccacttcaagtcttagtttttcctctgtgaaatgggactaattgtttattagataatattagaagccaggcacggtggctctcgcctgtaatcccagcactttgggaggccgaggcgggcagatcacttgaggtcaggagtttgagaccagcctggccagtatggtgaaaccctctctctactaaaaatacaaaacttagtcgggtgtggtggcgtgttcctgtagtcccagctactcaggaggctgagccacgagaatcacttgtacctggatggtgggggttgtagtgagccgagaccaygccactgtactccagcctgggcaacagagaaagactc

SEQ ID NO: 631582 - DNA, 590 bp, Homo sapiens
tttctcaaccagccctacctgggcatgtggagcaaaacactcatggcttctgtttcctgattggttaaaaatgtgattgcaatgctcaccctgacactgctcagagctgttgtaagagcgggatggtggattagtaagagcgtataagctgctgtgcagagatgtgaagaaagaggagagctggaatcacatcagggttcagatcttggttctgttcccactacctgagtgacgatgaacaagttactcacccacttcaagtcttagtttttcctctgtgaaatgggactaattgtttattagataatattagaagccaggcacggtggctctcgcctgtaatcccagcactttgggaggccgaggcgggcagatcacttgaggtcaggagtttgagaccagcctggccagtatggtgaaaccctctctctactaaaaatacaaaacttagtcgggtgtggtggcgtgttcctgtagtcccagctactcaggaggctgagccacgagaatcacttgtacctggatggtgggggttgtagtgagccgagaccatgccactrtactccagcctgggcaacagagaaagactc

SEQ ID NO: 631583 - DNA, 582 bp, Homo sapiens
ccctgcccggagccctaggcctggaccagcctggagagtgctctgcagttggacgactctgggcrcggccaggcaggtctggattacccagcaggcgtttatttacctttatcgtcatttattttacaaataccacatagatttctgtgcagattgcttttctcacctaacaaaacattgtgaaaatccctctaatttattctcttttttttaatgagtaaaatgcacataacataaaatttacaatcttagccattttcaagtatatagttcggtagcgttaactatattcacattgttgtgcgacccttctccagaacttcttctcttccaaaactggaattctatatccattaaacaactccccatttcccctccctctccagctcctggtagccacccttctaccttctgtctctgtggttttgactgctctaggtatctcatctaagtggaatcctagagcatttgtccttctgtaatgtattgttttaaaagatgtataacattacattacatgggtatatgtatatcattcaatcaatactaatggttttgccactacaaaaaaatgctatattt

SEQ ID NO: 631584 - DNA, 606 bp, Homo sapiens
cccggagccctaggcctggaccagcctggagagtgctctgcagttggacgactctgggcacggccaggcaggtctggattacccagcaggcgtttatttacctttatcgtcatttattttacaaataccacatagatttctgtgcagattgcttttctcacctaacaaaacattgtgaaaatccctctaatttattctcttttttttaatsagtaaaatgcacataacataaaatttacaatcttagccattttcaagtatatagttcggtagcgttaactatattcacattgttgtgcgacccttctccagaacttcttctcttccaaaactggaattctatatccattaaacaactccccatttcccctccctctccagctcctggtagccacccttctaccttctgtctctgtggttttgactgctctaggtatctcatctaagtggaatcctagagcatttgtccttctgtaatgtattgttttaaaagatgtataacattacattacatgggtatatgtatatcattcaatcaatactaatggttttgccactacaaaaaaatgctatatttttgtatgcatatcctcaaatattaaagct

SEQ ID NO: 631585 - DNA, 531 bp, Homo sapiens
ttactgcagaccagaggattgagggacgtaattcctccctgcattctgcgttctactgggatgcctccagactatctctttgtaccaggagccagagcgtttctcctggtcacaattgcatgggacagggtggacaaaccatctctatattttgtaacagcaaaatgcaaataggtagggatgatttgtgttgctagttcagttaaccaaggaggtgaattttgtaacaataaggatagaaagaggaggttcagcaatggatgtaggcccattcttctgccctgctgcacacagcaaggtaaaattctaaaatgtgccccatactggaaagaatatctgcaatcattaatctaaaggagaaggagatgtatgcacctgcttacactttaacaagtggttggcaatttttagatacatttgaaaggatccttcagtgaaaagtgttctcagagaaagtcaagagggcaggagtcagggtgaacaaagtttccaggacygaactgctcatttcctagatgttccagagtacaa

SEQ ID NO: 631586 - DNA, 573 bp, Homo sapiens
atgcaaagttcagccgatttatgccacttggtttcattccagctcctaaaagatatattcctcctattaggtacrttacagtgacactgtgattggtggaggggagcaaagtacttgtcagcagagtgactattggctgtcactcctgttatcaagctgcctgcttatttgcgattttattttcagatgtgattgacagctggatggctctgacattctcagcacaaacatacagcctgttattatgtttgcattaacattttgataaacacacggtacagcattggaaaagtaattacatgtcatcacttcagtgcttcatcaaagaaaagtttactgtgtaattgctctgtgatttacctaggtagaatgtgttacattccacaaagcctctttctatttaatagtttacatttactctttaaaatacacaatatcccttcccaggggcttctttggtctaaaataaacttggcaatataatttagctttccataaatatacttagattttactgtggagtacttttgcataatagttatttaatgctaagtgtaaacatgcagtgcatta

SEQ ID NO: 631587 - DNA, 573 bp, Homo sapiens
atgcaaagttcagccgatttatgccacttggtttcattccagctcctaaaagatatattcctcctattaggtacgttacagtgacactgtgattggtggaggggagcaaagtacttgtcagcagagtgastattggctgtcactcctgttatcaagctgcctgcttatttgcgattttattttcagatgtgattgacagctggatggctctgacattctcagcacaaacatacagcctgttattatgtttgcattaacattttgataaacacacggtacagcattggaaaagtaattacatgtcatcacttcagtgcttcatcaaagaaaagtttactgtgtaattgctctgtgatttacctaggtagaatgtgttacattccacaaagcctctttctatttaatagtttacatttactctttaaaatacacaatatcccttcccaggggcttctttggtctaaaataaacttggcaatataatttagctttccataaatatacttagattttactgtggagtacttttgcataatagttatttaatgctaagtgtaaacatgcagtgcatta

SEQ ID NO: 631588 - DNA, 573 bp, Homo sapiens
atgcaaagttcagccgatttatgccacttggtttcattccagctcctaaaagatatattcctcctattaggtacgttacagtgacactgtgattggtggaggggagcaaagtacttgtcagcagagtgactattggctgtcactcctgttatcaagctgcctgcttatttgcgattttattttcagatgtgattgacagctggatggctctgacattctcagcacaaacatacagcctgttattatgtttgcattaacattttgataaacacacggtacagcattggaaaagtaattacatgtcatcacttcagtgcttcatcaaagaaaagtttactgtgtaattgctctgtgatttacctaggtagaatgtgttacattccacaaagsctctttctatttaatagtttacatttactctttaaaatacacaatatcccttcccaggggcttctttggtctaaaataaacttggcaatataatttagctttccataaatatacttagattttactgtggagtacttttgcataatagttatttaatgctaagtgtaaacatgcagtgcatta

SEQ ID NO: 631589 - DNA, 297 bp, Homo sapiens
aagcttcagtgtgagaaggaagctcctagctgagccccrccctgccaggcacacatagtacggacccgcagtgatgcctgttgttatcaatgtatggatagtattggtagtttctagtagacttgagctgctgtgggggtctgtgcatgttggattggacttagaggagggtggtaaaaaccagttcagagaaatttgtagatgttaattgcaaactgctttctcttcaccagaagcaatctctcccttctgagatgggcaacatcatctatctccatcaggcccaatgggctgctc

SEQ ID NO: 631590 - DNA, 297 bp, Homo sapiens
aagcttcagtgtgagaaggaagctcctagctgagccccaccctgccaggcacacatagtacggacccgcagtgatgcctgttgttatcaatgtatggatagtattggtagtttctagtagactygagctgctgtgggggtctgtgcatgttggattggacttagaggagggtggtaaaaaccagttcagagaaatttgtagatgttaattgcaaactgctttctcttcaccagaagcaatctctcccttctgagatgggcaacatcatctatctccatcaggcccaatgggctgctc

SEQ ID NO: 631591 - DNA, 310 bp, Homo sapiens
aaagcttcagtgtgagaaggaagctcctagctgagccccaccctgccaggcacacatagtacggacccgcagtgatgcctgttgttatcaatgtatggatagtattggtagtttctagtagacttgagctgctgtgggggtctgtgcatgttggattggacttagaggagggtggtaaaaaccagttsagagaaatttgtagatgttaattgcaaactgctttctcttcaccagaagcaatctctcccttctgagatgggcaacatcatctatctccatcaggcccaatgggctgctccaccttcaagcg

SEQ ID NO: 631592 - DNA, 579 bp, Homo sapiens
gtttgtctttctggatgctctgtcctcccccatcaaagacaagtaattggttctcttaaacatggggcatccagaactgatggagaagtcttttcaagggatcatggaactctgtgctagggagaagacaggcctcagattctgtcaggtagggttctagatggtgctgctgagaggctaccttattttcacaagttccaatgctagcagggactctcctggccaccttaagtggcgtttccaggagaaaggctgctcctctggtaggctgcaagcatcacttcgatttgtgaggtaagacaaaaaggacaggtgaactaggaggatcacaccggtacctttgtgaggagcaagcatctccccttccttcagactgggttgtttagacccaaacttgcccttggtcctcccaaatgctgctatttccctctatatgattgagtcagcatttctactttatatgaaactgatattatagcaaatcttatcaccatgaaygtaatgaatcttcctgccaagttatcatcttgtgtctctcagaggtgtgtcttctttcccaaggtcactctgggcaacttg

SEQ ID NO: 631593 - DNA, 635 bp, Homo sapiens
tgcatcagcctaaattgtcctagtgagttcacttatgtctgggttactgtagatttgggttttgctattactagttgtctcacttatccagataattacctagcttgattgaagcttagtctgttgactaccagaaaacaacacatacrggagaattgatctagataattcagacaccattcatgatgttatttcaattgagcattcttgtgtgacaagaactggtaattattgaaaatttcatctgcataaaaatactagatcttacccacaagtccatttcctcttgtctctcagtgttagactcaccctcagcatcatttttggcagtggcccagcagttatagtaaaaacaaacaaacaaaaaaccctccattgtcttttatttaactggccaaaattgccacctgatctctccagtctcactgtatttgtctgatgctgttagagccttctctgtagtggctgcaagtctgctaataatcagaatcacttgggaagcaattagaagtatacagagatgagtcctaacccagactcatgatcagaaattccagaagtggagctcaggaatctgcattttaaaatcactcaccaggtgattctcaggcagccagcctcgcatggtgcataaa

SEQ ID NO: 631594 - DNA, 593 bp, Homo sapiens
atgaataaggattcctggaatagtacaaaatacttgcaactctcgcagtcttcccagagtgggctggatgaagggtgctatccccaaatcaggggccgtgccctgggaaggatggtaggcctccagggatctatctcagtgtaactaactcctcagtgggctcaaaactttccctcttgttttctagtttttaggttttctagttctgttgtgccctttattcaatgcaagccatcaacaagttccttaaacataaaactctgtgacaytctaaactgcaagacaatgtgacaatgagtatgccagtctgaaaagaacaaaggagcagggttcagaagaactggcctttaccagctctgtcattttccagtggtgtggccttgcagaggtcacttcagttttccaggctttggccaaagaaaggtgggggcaggtggtaccttcccagctcaagtcttctggaatagagcgtacgcccatgaagccctgcacctgttggagcttcatagctgtaatcaaggtattaatctctctgagccttagtttactcattaataaaattggaataatagtattctcaaccatatagttga

SEQ ID NO: 631595 - DNA, 540 bp, Homo sapiens
tctccaggcttcactagttctcattttcaattgccacctgaacactgctactgctattttcttcttgtcttccactctttgctctctccttcacctctcctataactctgcaaaagatctgtgaattggctaagctgaaggactctaccataacctgattccagagaagcaaactgtgaacccttttgaaaacatttgctgcactactcagagcagacgtagtgaccaggaattcaagaccaactttcaatgaagctggaagtgtgcctgtcttggcggatttagaaactggacagccccttcctatcttgaaaccacatttgatttgacagcgtagctaaaaggaaaaggacgaatagtaactgagttgagttttatgtgcacacggaacatataaacacagcttcaagataaagaactttgagtcagattttcacatgtcatgtgtgagaccrtgcagcaaacaatagagagatgggatgggatagctgttgcagactgagatgggattaaaaagggatcccatggcttttcacttag

SEQ ID NO: 631596 - DNA, 417 bp, Homo sapiens
ttttaagctaagggaacagcataagcaaggatacaaaggcatggcatatccagggaaaatcaaatattctttttctggtggaagcttgaagagcaaggagggatggagaggaagatgctggaaagagagwtggtgccagacagaatgaattgatagaacaaatgcaagtatctacagattgtaggggaccttcaaagctgggtaaggatggaggtgtcagataccaagtgaaggtattggggctttgttttacaggcaaagggtagccagtgggcttgctgagaaggggaggagtaaattgtgtaccctatgaagatacaagtggtaatgaatgacaatggtgaagggtgactgtgagaaaaaaaatcgaggaacttgatagggtgctataatagttttggagaacatgagtagggc

SEQ ID NO: 631597 - DNA, 544 bp, Homo sapiens
aatcaacaactcacaaatatattttcattgttactctcagaattagccaccagaatgggtgctaggagtgtgaacgtggaaagaaccaagattcagttasgacacaataaaataattttgagatcacttagaaattttcatcctcagtacttagcaatgagagatggtatacttagatctctgtaccgtggactatcattattcaatttaaattgctacaaagtactattcttacatgattggcctgaaagccttgatgctgagttctagatatttgaagcctaataccacaaacgtacctctctggacaaactgtcacctggatttttagacaaaagaaggaaagcatggcccgttggaccacagcaagaccttcttatttttgcaagctattctattttatttgttcttagtgttcagcctgggacctaggcaggctacagatgttactgctgatggctgcagtgaccagtatcaagtgatttcttatgagaccctgaagaaggaggctgatggccattgggcccactgacagcatattgcc

SEQ ID NO: 631598 - DNA, 544 bp, Homo sapiens
aatcaacaactcacaaatatattttcattgttactctcagaattagccaccagaatgggtgctaggagtgtgaacgtggaaagaaccaagattcagttaggacacaataaaataattttgagatcacttagaaattttcatcctcagtacttagcaatgagagatggtatacttagatctctgtaccgtggactatcattattcaatttaaattgctacaaagtactattcttacatgattggcctgaaagccttgatgctgagttctagatatttgaagcctaataccacaaacgtacctctctggacaaactgtcacctggatttttagacaaaagaaggaaagcatggcccrttggaccacagcaagaccttcttatttttgcaagctattctattttatttgttcttagtgttcagcctgggacctaggcaggctacagatgttactgctgatggctgcagtgaccagtatcaagtgatttcttatgagaccctgaagaaggaggctgatggccattgggcccactgacagcatattgcc

SEQ ID NO: 631599 - DNA, 537 bp, Homo sapiens
actctatgaagcaaaggcaaggaggtatttcttaatctgagaagacatcttgccttttatggcactgttaaaaccacacatttgggtgtcggaggaggtctcagccacacatgctcagggggcttttatcaatgcacccccatccttggagtaggttcctgagcttggtgcctggggaactggggaaggccccygtttctaccaaagagggcctctctccaaggtgcctcccagctctaggcctgaggtttctgttgacagtgcctggaggagccatctgagcttctgtagcacacactcccttgcttgggggccctgctgggatgacagcctttaaacacctcattaatattcaaatctattcaagtcatttcaatttgaattctatgcatattatcagatagaacaaatgcaaatatatacaaattcatccatatgaagaaataaataggggaagctctgcataatgggattataatcattctcaggcttgtctctttcttttaattccccagagcccagagatccagacccagc

SEQ ID NO: 631600 - DNA, 537 bp, Homo sapiens
actctatgaagcaaaggcaaggaggtatttcttaatctgagaagacatcttgccttttatggcactgttaaaaccacacatttgggtgtcggaggaggtctcagccacacatgctcagggggcttttatcaatgcacccccatccttggagtaggttcctgagcttggtgcctggggaactggggaaggcccctgtttctaccaaagagggcctctctccaaggtgcctcccagctctaggcctgargtttctgttgacagtgcctggaggagccatctgagcttctgtagcacacactcccttgcttgggggccctgctgggatgacagcctttaaacacctcattaatattcaaatctattcaagtcatttcaatttgaattctatgcatattatcagatagaacaaatgcaaatatatacaaattcatccatatgaagaaataaataggggaagctctgcataatgggattataatcattctcaggcttgtctctttcttttaattccccagagcccagagatccagacccagc

SEQ ID NO: 631601 - DNA, 376 bp, Homo sapiens
gatcaccattggaatgtgaattttcctgtcaagagtggggcagaataaggaatgtgaccattattctcagctcataaaagaggcctccctccagctgttattcaaaagacaatctaacccattctggcactgggtcaccctgaagactgkcattccccagtcaaggaccagcccaatgcttagttcatgggaccaagctgtcaactgattgcagagcttggctctccatcccaactgttcaataatgctctaattaactacagaaaacttcagaggacccagctaactataattgagagatcaacagaggctgcatgaagttagatgtgcatactaattactgaattatccaacacctgttttggaatgtagcaca

SEQ ID NO: 631602 - DNA, 575 bp, Homo sapiens
ggttctcttagagtgaggcagttttttctatgccatcttcataaaatcatagcaatttagagttggaaaggaccttcagggtcttgtaatctggcctcctcccagtgcagaaatccctgcttgagaattacctccaggccagagttgagatgtgctatctaccaaggggatagytattatagggtcaccttgtaaagaactggttctgttccagggtgaaccaagggattactttcattgttgggcacctgaagctaatgcaagcctaccaagcaaggtacccaaataatccagtctccctagagggggtagcaatagaacttctaatatattaaattgcctttgatttaggaccgtcttcttattttttccaccagcaacatccattgttatgttgacctattaaggtgattacagaaagcgttggtggcccaacatatctcattttcatcattgtcagcctcctgcaactgcaagcttctgaacatgtcataaatccaatagaccaaatgtctccaggagctcagcaaagaggctacagcttttttgtttccacttaggccagggttatgggt

SEQ ID NO: 631603 - DNA, 439 bp, Homo sapiens
tagacagtggtaaaatcatgcttatctgtgagcctcacacttttttagatgaaacatttgttgccaaatagaaaagtgaaacctctttcaaagcccaaagtaccctagaattagacagcasagtggggcatgcctgaggcatacaacctaaggtagctcgggagccagcctgctgccctctgctctgtccttcagctaagtgatactctcttattcagaaaagaagggatgcccagtaaccatgaaagaattacctgctagaaaaaaataaggcagattcagcatttctggctttttctcagttatttctcagagaataactttgatgatgataacgatgatgaggttgacaatgatgattgatatgatcattgtattcacaaacaatgcaaacgaaaattaaatagatcttagggatgctgggattccaggattatct

SEQ ID NO: 631604 - DNA, 509 bp, Homo sapiens
tggcttgggactatggtggtcctgctggcaacctcttggtggtgctgaaagcacctgaaccattatcctatttaagtcacaacttggatgtctaaagccatcatatatgatgtccacatacagatgatgaccccttgaacatgggtttgcaattcccattcatctcccctacatgactgtatgtgttttaagggcagagtttgaaaatcatcccttcctcacttgataacctgaataatattcatggctctggagagcaaaatccttcaaaaactggttttcctccttgaaacaaagaaacaaccagtgagttttcctggaactaatgccatcctagagttygcagctaaagtgacaccagttgtttgccaggtggcttcgggcacaccccaactgcagcatggaatgtctcaagggtcatagggctgggccctgcctctccactcttctcttatgcaggagaatgactaacaccccctaggtgttagttggattctgcactcggattc

SEQ ID NO: 631605 - DNA, 509 bp, Homo sapiens
tggcttgggactatggtggtcctgctggcaacctcttggtggtgctgaaagcacctgaaccattatcctatttaagtcacaacttggatgtctaaagccatcatatatgatgtccacatacagatgatgaccccttgaacatgggtttgcaattcccattcatctcccctacatgactgtatgtgttttaagggcagagtttgaaaatcatcccttcctcacttgataacctgaataatattcatggctctggagagcaaaatccttcaaaaactggttttcctccttgaaacaaagaaacaaccagtgagttttcctggaactaatgccatcctagagttcgcagctaaagtgacaccagttgtttgccaggtggcttcgggcacaccccaactgcagcatggaatgtctcaagggtcatagggcygggccctgcctctccactcttctcttatgcaggagaatgactaacaccccctaggtgttagttggattctgcactcggattc

SEQ ID NO: 631606 - DNA, 439 bp, Homo sapiens
tagacagtggtaaaatcatgcttatctgtgagcctcacacttttttagatgaaacatttgttgccaaatagaaaagtgaaacctctttcaaagcccaaagtaccctagaattagacagcacagtggggcatgcctgaggcatacaacctaaggtagctcgggagccagcctgctgccctctgctctgtccttcagctaagtgatactctcttattcagaaaagaagggatgcccagtaaccatgaaagaattacctgctagaaaaaaataaggcagattcagcatttctggctttttctcagttatttctcagagaataactttgatgatgataacgatgatgaggttgacaatgatgattgatatgatcattgtattcacaaacaatgcaaacgaaamttaaatagatcttagggatgctgggattccaggattatct

SEQ ID NO: 631607 - DNA, 617 bp, Homo sapiens
tttgggatccagttacacttgaaacatcttgacttcacacagccctgcatctgggatctttctcaaagctgaaatgtaaaaaatggaaaagtaagtcgttgtccaagaataaagaatatagtacccatggccatctrtgggcatcatattcctctcccatatgcaaggtctttgaaataaccctatttcctaccactgtccaatctgaatccaagggccttctctattaacttggatttgtggaagagtctttatgtttaaaatacaatacacaaatctcttaacctattgccttttcactcaacattaagttttcaactccaaatgaagtttaattctgcagactctgtcatgtgttgactgtctaattggaagccattccattgccaagcaaccattggttgcatttctgatatctactcaccactgcagctctgtactgaaagatggttgctatgcttttccacttcattagcctccaccgagagatgacatcattgcttctgagaacttccacaatcttggcaaatctccttatctcatttctctagaagatgcctcaaaacctgtcatttgatgaatcgattaattagtttcctgggtcacgatccttgctt

SEQ ID NO: 631608 - DNA, 543 bp, Homo sapiens
agtttaattctgcagactctgtcatgtgttgactgtctaattggaagccattccattgccaagcaaccattggttgcatttctgatatctactcaccactgcagctctgtactgaaagatggttgctatgcttttccacttcattagcctccaccgagagatgacatcattgcttctgagaacttccacaatcttggcaaatctccttatctcatttctctagaagatgcctcaaaacctgtcatttgaygaatcgattaattagtttcctgggtcacgatccttgcttgcttatgcatttgctattttaccccgtggcgtgctatgttgtctttgactttagagaggtgagaccttgcctccccttgtggtgtgtctgtcatgaacccagtcagccttcctcagacctctcctagctattttcccagggatagcccctcatcctggcggtcacgctttgtagatttgcaattctctctgtgcttgaactttgagcccagagtataaactttttaatgcacatgtattgggacatacctgcag

SEQ ID NO: 631609 - DNA, 543 bp, Homo sapiens
agtttaattctgcagactctgtcatgtgttgactgtctaattggaagccattccattgccaagcaaccattggttgcatttctgatatctactcaccactgcagctctgtactgaaagatggttgctatgcttttccacttcattagcctccaccgagagatgacatcattgcttctgagaacttccacaatcttggcaaatctccttatctcatttctctagaagatgcctcaaaacctgtcatttgatraatcgattaattagtttcctgggtcacgatccttgcttgcttatgcatttgctattttaccccgtggcgtgctatgttgtctttgactttagagaggtgagaccttgcctccccttgtggtgtgtctgtcatgaacccagtcagccttcctcagacctctcctagctattttcccagggatagcccctcatcctggcggtcacgctttgtagatttgcaattctctctgtgcttgaactttgagcccagagtataaactttttaatgcacatgtattgggacatacctgcag

SEQ ID NO: 631610 - DNA, 543 bp, Homo sapiens
agtttaattctgcagactctgtcatgtgttgactgtctaattggaagccattccattgccaagcaaccattggttgcatttctgatatctactcaccactgcagctctgtactgaaagatggttgctatgcttttccacttcattagcctccaccgagagatgacatcattgcttctgagaacttccacaatcttggcaaatctccttatctcatttctctagaagatgcctcaaaacctgtcatttgatgaatcgattaattagtttcctgggtcacgatccttgcttgcttatgcatttgctattttaccccgtggygtgctatgttgtctttgactttagagaggtgagaccttgcctccccttgtggtgtgtctgtcatgaacccagtcagccttcctcagacctctcctagctattttcccagggatagcccctcatcctggcggtcacgctttgtagatttgcaattctctctgtgcttgaactttgagcccagagtataaactttttaatgcacatgtattgggacatacctgcag

SEQ ID NO: 631611 - DNA, 543 bp, Homo sapiens
agtttaattctgcagactctgtcatgtgttgactgtctaattggaagccattccattgccaagcaaccattggttgcatttctgatatctactcaccactgcagctctgtactgaaagatggttgctatgcttttccacttcattagcctccaccgagagatgacatcattgcttctgagaacttccacaatcttggcaaatctccttatctcatttctctagaagatgcctcaaaacctgtcatttgatgaatcgattaattagtttcctgggtcacgatccttgcttgcttatgcatttgctattttaccccgtggcgtgctatgttgtctttgactttagagaggtgagaccttgcctccccttgtggtgtgtctgtcaygaacccagtcagccttcctcagacctctcctagctattttcccagggatagcccctcatcctggcggtcacgctttgtagatttgcaattctctctgtgcttgaactttgagcccagagtataaactttttaatgcacatgtattgggacatacctgcag

SEQ ID NO: 631612 - DNA, 582 bp, Homo sapiens
tcgggagaccgggaggcagcccggccatgcttagtcagttcagccctttgttaaaataccggccagagagccgctctccctatcctaacttgcctctcttctctcgcaccccacgcgctccccgacccccaataagtttgctgagggcagagaaggggacgaagtttgagcagcaattccatcatctcagactcgcacgtacacacctttatcctcaggcacttccactccctgcgcgcctcggtgagccaaggctacaccagagagagtgggaacgtcccgcagctcttcgaacttgttgcctctaccactcacgcagtttcctattctcccatgaacggaacccaccacttattgaaaggtcattatttaaatcactgcttcagaatcacatgcatttttttcaaaatccacatgaccaggctcgccccaggacgttatgattcaatagatctgctttttttttggttttgtttttagtagtaagtgttcsatgtaattttactttaacaaaaggaaactgaagctgagcctgaaggaattacagaacttggagtaaatgcttcttcaaaatacgagttt

SEQ ID NO: 631613 - DNA, 585 bp, Homo sapiens
gatggaatttccggtcctgagaccragtaatagggaaggaaatatttggggttgagacctccttagagccctgagaacatgctagttaccaagcctttggagaccaagaggtaaagcattctgtgagaactgttgtgtgtgacagcttctctgtttgcttttctcacattattttttactttgatatttaattcttttttcctggttgcagtaaatagactggcagagccagatgaagataaggaagaaccagaccaaaaccaaacagagtaagagaggtagagaactgacttctgaaatattaatataatcaggcacctctcttatgcaaatccatgtaagtgaagattatgcagttggcatttccacttcatctagatcagtgctatccaatattgtagtgaccagccacgtcaatatgggaacttgaaatgtggccagtccagattgagatgtgcagtaattgtatatataccagattttggagacaagatataaaaagaatgtaaaatatctcattaataatttttattattacatgttgaaatgatatactggatatattgagttaactgaagtgtttca

SEQ ID NO: 631614 - DNA, 626 bp, Homo sapiens
aactctctgggcaagcagatatattctttttatgcgatgagtttccattttgctttgtcaacagaaggtttgacttaaggcctttaccactgtccttcgcctaggcttatggcgtagcttattattttagtggtccagctctacaggcatgattgtttatgtttggaagttgaggtatgaatgatctatctccaaatactagttttaaagctcagctgcaaagtgacttaatttagaaatgcacctttcaggtatgtatttctgatgctactgaccaactataatctgtaagtgtttgattttttttttggacagaaaggaagagttactaaaaggaatctatgcaakgggatttaataggccatctaaaatccaagagatggctctccctatgatgctggcacatccgtgagtttccagggtagtggtattctacttggttatgtttagtttcttattttcagtttatgcccactctctggtattcagtttatgcccagtggtcttctcttttctacagaccccagaacctcatagcacagagccagtctggaacaggaaagacagcggcatttgtgttggcaatgttaagcagagttaatgccttggaattgttcccacaggta

SEQ ID NO: 631615 - DNA, 626 bp, Homo sapiens
aactctctgggcaagcagatatattctttttatgcgatgagtttccattttgctttgtcaacagaaggtttgacttaaggcctttaccactgtccttcgcctaggcttatggcgtagcttattattttagtggtccagctctacaggcatgattgtttatgtttggaagttgaggtatgaatgatctatctccaaatactagttttaaagctcagctgcaaagtgacttaatttagaaatgcacctttcaggtatgtatttctgatgctactgaccaactataatctgtaagtgtttgattttttttttggacagaaaggaagagttactaaaaggaatctatgcaaggggatttaataggccatctaaaatccaagagatggctctccctatgatgctggcacatccgtgagtttccagggtagtggtattctacttggttatgtttagtttcttattttcagtttatgcccactctctkgtattcagtttatgcccagtggtcttctcttttctacagaccccagaacctcatagcacagagccagtctggaacaggaaagacagcggcatttgtgttggcaatgttaagcagagttaatgccttggaattgttcccacaggta

SEQ ID NO: 631616 - DNA, 457 bp, Homo sapiens
tcaaattataatatagagctatagtcaccaaaacagcaaggtactggtataaaaacagacacatacaccaatggaacagaatagagaacccagagaccaatccacatacctacagcraccttattattaataaaggtgtcaagaaccatgccatggggaaaagacagtctttcaatacatggtcttgtggaaacgatatccatatgcagaaaaattaaagtagacgcccatctcttgccatatacaaaaatcaaataaaaatggattaaagacctaaatctaatacctgaaactgtaaaactgctacaagaaaacattggggaaactctccaggacattgtattgaggaaatacttcttgagtaataacccacaagcataggcaatcaaaacaaaaaaaaatggagaaatgggattatatcaagttaaaaatcttctggacagcaaaggacacaatc

SEQ ID NO: 631617 - DNA, 457 bp, Homo sapiens
tcaaattataatatagagctatagtcaccaaaacagcaaggtactggtataaaaacagacacatacaccaatggaacagaatagagaacccagagaccaatccacatacctacagcaaccttattattaataaaggtgtcaagaaccatgccatggggaaaagacagtctttcaatacatggtcttgtggaaacgatatccatatgcagaaaaattaaagtagacgcccatctcttgccatatacaaaamtcaaataaaaatggattaaagacctaaatctaatacctgaaactgtaaaactgctacaagaaaacattggggaaactctccaggacattgtattgaggaaatacttcttgagtaataacccacaagcataggcaatcaaaacaaaaaaaaatggagaaatgggattatatcaagttaaaaatcttctggacagcaaaggacacaatc

SEQ ID NO: 631618 - DNA, 490 bp, Homo sapiens
agatctaaagaaggtaactgacttctctacacatattcttaaccatctgcagttcaaggggctatgagtctcaaaaggaaagcttcagtatgtagagcctgacgttaaatatttaggccacttaataagtgcaagcaagtgaagaatagggcctgaatgaattgagtgaatcgtgcccctacccttgcctcaaactaaacaaaaacacaggaaatttttagggttaattggatactgctgcttacgcattgacacatatgcactatacagtaaactgttatatcaaaaacttgcccaggagaagcctgaccatctcctgtggactcctgaggaagttgatcaggtcgaagagctgaaaaaagactcataaccacccctgttttagccttaccttccctagagaagccattccaccttttgtcaatgtgaacaatggagtagcattaggagtgmttactcgagaacacagaggctgtcggcagcccatggc

SEQ ID NO: 631619 - DNA, 438 bp, Homo sapiens
gtgactaaaaggaaaaacttctgccagcaaaaaataaaaggcaaatgacaaactgagaagaaaaaaataagtgatggtaaagtgcgaccttcctcaatatatatttcatgaatatatacatcagttttaatgaaaaagtaaaaaaaaaaaaaatccagcaaccggagagtcaaakgggcaaagaccaagcttttcaaacaaaaagaaaaaagcttataaaaattttttaaaaaaaattttaaatgctcaattttactcagctgagataaatgcaaagggatatgaactattttccagggaagtgactgcaaagacaaagtttgatagtataccactttggagagggaatagagacacaagctctattaatgtatggtcagtacagcttctttggaggtaaacattttggcaacagctgtcaaaattgaatatacacat

SEQ ID NO: 631620 - DNA, 446 bp, Homo sapiens
aaaagatgtgactaaaaggaaaaacttctgccagcaaaaaataaaaggcaaatgacaaactgagaagaaaaaaataagtgatggtaaagtgcgaccttcctcaatatatatttcatgaatatatacatcagttttaatgaaaaagtaaaaaaaaaaaaaatccagcaaccggagagtcaaaggggcaaagaccaagcttttcaaacaaaaagaaaaaagcttataaaaattttttaaaaaaaattttaaatgctcaattttactcagctgagataaatgcaaagggatatgaactattttccarggaagtgactgcaaagacaaagtttgatagtataccactttggagagggaatagagacacaagctctattaatgtatggtcagtacagcttctttggaggtaaacattttggcaacagctgtcaaaattgaatatacacata

SEQ ID NO: 631621 - DNA, 537 bp, Homo sapiens
tgccctgccacattttaaggccctggaggactgagggagaggtgaagctcaactcctctgcagccctctcccacccccgccctgcatgcatggtgtcacaagcacagctaggctgctttgcttaatcttggggtgctgtgttgggttttgcctttttacatagactcgtcgaaacgctaagtggttgaccgtggagatgatacaggatggccaccaggtgtctttgttaagcggggagctgaccgtggagcagcgagcttccatcattcagaggtttcgggatgggaaagagaaggttctcataacaactaatgtttgygcccgaggtgtgtgttaaaagtcaggtcttgagttctaatttgcatatgataaaatgcattccttttaagtgtacagtttcgcgagtttcgacaaacatgcaatcatgcagctatcactgtcatcaaaatacagagcatctccatctccccagtttcctcacactccttttcagccaatctccctttccatcccatggcccctggcaactactgatca

SEQ ID NO: 631622 - DNA, 548 bp, Homo sapiens
attgacctctggttgagactggtgtacttgaaatgaatgtatcgatctctgtgtagcccatccctcaggatccatgagctccttatacctctggwgttactgaaggagtatgatataacaagttatagggcttttttccccccattagccattcgcaactattgctgttttaattccacaagtaagtagtgtttcctaaaaacgaattgaactatggagaactggggatgtcaagggcagctctatcatcttccttgtactcagtcttctcccaagagtttcccccaaacaggataatctcacacctataatttctctgatgggtgttgttaactgtgactccattcatcatcttttctgtccctgctgtataaatcagctctcctggccttggcttgtatgtgttctattttcgctatctccccataaaattgttacttttggatgctgaaaggggaaggacaactttcttgtttaaaatcatcatcaccatttgtgacagaaaaatcattctctaaaagatacttatatcctagtcacttgagtct

SEQ ID NO: 631623 - DNA, 548 bp, Homo sapiens
attgacctctggttgagactggtgtacttgaaatgaatgtatcgatctctgtgtagcccatccctcaggatccatgagctccttatacctctggagttactgaaggagtatgatataacaagttatagggcttttttcccccyattagccattcgcaactattgctgttttaattccacaagtaagtagtgtttcctaaaaacgaattgaactatggagaactggggatgtcaagggcagctctatcatcttccttgtactcagtcttctcccaagagtttcccccaaacaggataatctcacacctataatttctctgatgggtgttgttaactgtgactccattcatcatcttttctgtccctgctgtataaatcagctctcctggccttggcttgtatgtgttctattttcgctatctccccataaaattgttacttttggatgctgaaaggggaaggacaactttcttgtttaaaatcatcatcaccatttgtgacagaaaaatcattctctaaaagatacttatatcctagtcacttgagtct

SEQ ID NO: 631624 - DNA, 548 bp, Homo sapiens
attgacctctggttgagactggtgtacttgaaatgaatgtatcgatctctgtgtagcccatccctcaggatccatgagctccttatacctctggagttactgaaggagtatgatataacaagttatagggcttttttccccccattagccattcgcaactattgctgttttaattccacaagtaagtagtgtttcctaaaaacgaattgaactatggagaactggggatgtcaagggcagctctatcatcttccttgtactcagtcttctcccaagagtttcccccaaacaggataatctcacacctataatttctctgatgggtgttgttaactgtgactccattcatcatcttttctgtccctgctgtataaatcagctctcctggccttggcttgtatgtgttctattttcgctatctccccataaaattgttacttttggatgctgaaaggggaaggacaactttcttgtttaaaatcatcatcaccatttgtgacagaaaaatcmttctctaaaagatacttatatcctagtcacttgagtct

SEQ ID NO: 631625 - DNA, 586 bp, Homo sapiens
cgtattttttccttcaaaaaatcaatgaagacttgatttctgtcaataattgtatcaagggtgaatatactacctgaattttgtgcatgttacattgtagttgtaaccttttctaattcaggatgaatacgagatggtgtgattgtgcagtgtaccaataaagttcgagaaatttgtaacttttggggggctgtttattaggacatctcattgatatccaggacgggaaaaatatgaagcgagctctgcttctcccatatgtgcgtttttggccctggagagtagatgcactcagaaagcctggagctgcaccccccacctctctctctccctccttctctctctcgcacacactgtagaaagcagccttagcactgtcygtatgacatttgtatatcaaagatctatgctgtttacaaacaatataaaatgtagctgcagcctcaaagtctaaattgtttgttggtgtaggcgaaaacgaaagcagaagagaagtgtcagaaaaataggggtgaccagatactgcccagtttgggcatttgagtccctaagttcctgttgcttgatttcttgaagtacacaccac

SEQ ID NO: 631626 - DNA, 613 bp, Homo sapiens
caccacgagccttgctgatgagggaaagagaagctccatctgggggcatgcgctgcagctgaggcatggaggggtaggcggagcttamgagtggacttgctgaatagaccccaagactaggcttctccagagaaggctaacactctgtgatgtaggatgaaacacccgggtcatttgcatgtcagtgtcccacagggtctgttgtttcgaagataaaaatagtcttagttttatctccatgaattcctctctcccatatgacttactgccttgcctttaccatgagttctccaaccagctggcttgtttcagaaaacttgacctcgcaaattacctgttatattgtcttacaccaatttcttaccctttctgaacttcagtctcatctttaataaaacaatggtaatgatacgcatctcagtagaatagctgtgagaattattccacttctagatgtgaatacgtaagggagtttagcttagtcccagcgtataacaattacttgcaaagtaaacatttgtgttttttttctcttgttcttctctcagccttcttttatgtcctcactttcctgagttgtttgaagatataattcaaatgtgttgaaaattca

SEQ ID NO: 631627 - DNA, 613 bp, Homo sapiens
caccacgagccttgctgatgagggaaagagaagctccatctgggggcatgcgctgcagctgaggcatggaggggtaggcggagcttacgagtggacttgctgaatagaccccaagactaggcttctccagagaaggctaacactctgtgatgtaggatgaaacacccgggtcatttgcatgtcagtgtcccacagggtctgttgtttcgaagataaaaatagtcttagttttatctccatgaattcctctctcccatatgacttactgccttgcctttaccatgagttctccaaccagctggcttgtttcagaaaacttgacctcgcaaattacctgttatattgtcttacaccaatttcttaccctttctgaacttcagtctcatctttaataaaacaatggtaatgatacgcatctcagtagaatagctgtgagaattattccacttctagatgtgaatacgtaagggagtttagcttagtcccagcrtataacaattacttgcaaagtaaacatttgtgttttttttctcttgttcttctctcagccttcttttatgtcctcactttcctgagttgtttgaagatataattcaaatgtgttgaaaattca

SEQ ID NO: 631628 - DNA, 521 bp, Homo sapiens
aacagcttatgaatccttttaggaaagtgaatgccacattctatatataaaccatgacatataaaagaaatatgtaagaaattttttcaaaagggtcagaaccctgactgcatttatgttctttacctgtgattttttttttttttggtcacttactcaatgaatttattttctgtgctccctaggaagagctgttatcctagcaaagaccttatctaattctttgtttkggtacaatgtccaacatgttttctggcatttagcgaatgtctattaatagccacttattcatggaggctccgtgctcgatgtgatcacttgctgtttcacatacagacagaataagggatcctcttctttctatatgaaatcacagatcagcaccaagagggctatcagagtcctgtcactcatccctgtctctagccagtgctgagtttgaactgtgaggatcacagcagcatctcccatggacacctgtgctcaggtcccctggacggtcctgggctctgcagccccaa

SEQ ID NO: 631629 - DNA, 598 bp, Homo sapiens
aatgaaacaattaaaaaaatagaaatacaaggaaaatgagtctctagtattccattaacaacctattcctatatatgcttatataagaatttgttgtttctaaaatattttcacatgaatcatctcaagtgggtttatagcagctccctaaaataggtcagagaaagaatartttgtctatttcacagggagggaaacagatggaaaggttaagtaatgacaaatgaatcacagctaactaaaatggtagctttatgaaaagaacctagttcctgattttcaagtctggagctctttatattatacaaagatggcttccatagcttgaggttggaataggtataatgtaaaatgatatattgaatcaaattctgcttgttatctggggcacccaaggggtgctcactagctttgaacatcacccatactcttgccttgcctttcctaagtccacacctaccttcctatgtctagtctctttctagcttccactcagtattgttctaacaaaagcacagcctccaaatcaaagccacattcatgccattgtccgctgtaggtccctgttgttcctctgtgtcaattaaaataaacctgc

SEQ ID NO: 631630 - DNA, 598 bp, Homo sapiens
aatgaaacaattaaaaaaatagaaatacaaggaaaatgagtctctagtattccattaacaacctattcctatatatgcttatataagaatttgttgtttctaaaatattttcacatgaatcatctcaagtgggtttatagcagctccctaaaataggtcagagaaagaataatttgtctatttcacagggagggaaacagatggaaaggttaagtaatgacaaatgartcacagctaactaaaatggtagctttatgaaaagaacctagttcctgattttcaagtctggagctctttatattatacaaagatggcttccatagcttgaggttggaataggtataatgtaaaatgatatattgaatcaaattctgcttgttatctggggcacccaaggggtgctcactagctttgaacatcacccatactcttgccttgcctttcctaagtccacacctaccttcctatgtctagtctctttctagcttccactcagtattgttctaacaaaagcacagcctccaaatcaaagccacattcatgccattgtccgctgtaggtccctgttgttcctctgtgtcaattaaaataaacctgc

SEQ ID NO: 631631 - DNA, 598 bp, Homo sapiens
aatgaaacaattaaaaaaatagaaatacaaggaaaatgagtctctagtattccattaacaacctattcctatatatgcttatataagaatttgttgtttctaaaatattttcacatgaatcatctcaagtgggtttatagcagctccctaaaataggtcagagaaagaataatttgtctatttcacagggagggaaacagatggaaaggttaagtaatgacaaatgaatcacagctaactaaaatggtagctttatgaaaagaacctagttcctgattttcaagtctggagctctttatattatacaaagatggcttccatagcttgaggttggaataggtataatgtaaaatgatatattgaatcaaattctgcttgttatctggggcacccaaggggtgctcactagctttgaacatcacccatactcttgccttgcctttcctaagtccacacctaccttcctatgtctagtctctttctagcttccactcagtattsttctaacaaaagcacagcctccaaatcaaagccacattcatgccattgtccgctgtaggtccctgttgttcctctgtgtcaattaaaataaacctgc

SEQ ID NO: 631632 - DNA, 598 bp, Homo sapiens
aatgaaacaattaaaaaaatagaaatacaaggaaaatgagtctctagtattccattaacaacctattcctatatatgcttatataagaatttgttgtttctaaaatattttcacatgaatcatctcaagtgggtttatagcagctccctaaaataggtcagagaaagaataatttgtctatttcacagggagggaaacagatggaaaggttaagtaatgacaaatgaatcacagctaactaaaatggtagctttatgaaaagaacctagttcctgattttcaagtctggagctctttatattatacaaagatggcttccatagcttgaggttggaataggtataatgtaaaatgatatattgaatcaaattctgcttgttatctggggcacccaaggggtgctcactagctttgaacatcacccatactcttgccttgcctttcctaagtccacacctaccttcctatgtctagtctctttctagcttccactcagtattgttctaacaaaagyacagcctccaaatcaaagccacattcatgccattgtccgctgtaggtccctgttgttcctctgtgtcaattaaaataaacctgc

SEQ ID NO: 631633 - DNA, 602 bp, Homo sapiens
tctgcaaacttgctgaatttctaacttgctaattgtcttcaactttaaatacyttccattattttacttgaaaaccctccatatatttaaaaatgaataagcaattctatttgctattatctcagaaatatatgcatacatttgataaagtatttcccttttagatatgttttcaaagggtcttcatctgtaaatcaaaatctttacaagtaaattactctatgcaccccaagagattttataatgaaaataaaaaataagtagacaggtaatactctttcctaaagtcaatgattaccttaatacatcagtctatgttccctgtctttgggcattacacctacataccgcacctgagaataaaaaccagcacacactccagaaaaacatatgttcattcccgatgaatttgcttctgtcttgaactttgcctccattcctcatgttggaggttaagagtgctctcctctctcaatcttacatttaaaaacagggacagctttgccctcttctcttagccatatcttgactgttccaagctttccagaatgacagttgcttccaacacagaaggtatgcctagccccagaaggcttcccact

SEQ ID NO: 631634 - DNA, 224 bp, Homo sapiens
ggttctaatagtttatttgcttggttagctgaaatatggattaaaagatggcccactctgagcragctggaaatgcctgatctcccttggtttaatgtagaagaagggatccaaaggcttagggagactgggatggtggattggattagtcactttagacctactcatcccagctagaagggtccagaagatacatccttgaccaatgccttgcaagacaattt

SEQ ID NO: 631635 - DNA, 224 bp, Homo sapiens
ggttctaatagtttatttgcttggttagctgaaatatggattaaaagatggcccactctgagcgagctggaaatgcctgatctcccttggtttaatgtagamgaagggatccaaaggcttagggagactgggatggtggattggattagtcactttagacctactcatcccagctagaagggtccagaagatacatccttgaccaatgccttgcaagacaattt

SEQ ID NO: 631636 - DNA, 224 bp, Homo sapiens
ggttctaatagtttatttgcttggttagctgaaatatggattaaaagatggcccactctgagcgagctggaaatgcctgatctcccttggtttaatgtagaagaagggatccaaaggcttagggagactgggatggtggattggattagtcacwttagacctactcatcccagctagaagggtccagaagatacatccttgaccaatgccttgcaagacaattt

SEQ ID NO: 631637 - DNA, 224 bp, Homo sapiens
ggttctaatagtttatttgcttggttagctgaaatatggattaaaagatggcccactctgagcgagctggaaatgcctgatctcccttggtttaatgtagaagaagggatccaaaggcttagggagactgggatggtggattggattagtcactttagacctactcatcycagctagaagggtccagaagatacatccttgaccaatgccttgcaagacaattt

SEQ ID NO: 631638 - DNA, 530 bp, Homo sapiens
atgacttacattttgcaggcgatcaaaaagtgactattgaatgggtacacacayatgtatccatcgtatatcgatcctgtagcgtgccagagaaaaaaaaggggaagacagtggagatttgcaaagacaagttcccagatgcaggaagcactctgtctgtacagtgaaggggaaatctgatgtacagagtgaaggatgtttggagaaggcacttcaagtcctagctgtattaggagcctgcaggaagttgcagacttatctcccaagcatttttcttccatttcccccactataactattagccctggatgacgagtgagcttactgctgacgttttaattatattaagttttaaccaaatagtgaggctatcctagtttaggcttctagacacggtgatctgtgatctggaagatatttttcaattcgtgtccaatcacttttttttactggagacctatgacttgtgctggaaaactcattgcctttaccaagaagatgcataacaagagttgggatgacttacctca

SEQ ID NO: 631639 - DNA, 628 bp, Homo sapiens
aaaatcttaccagtgtaccattataatgaattgtttcaggacatttacacaaagttaaaatgccttttaaatgatttccaagcttagagaactgtgtgtttaggatcaaataactacattctgggatttcaagcatttataaagacatttgattttaccaaatatataaaagttagacatagttttgtatataatataaatccaaaattatctctaactttaggcaaaattatcatggaacccatgtcttggggaacattattgctctgtttatattaaatttgagttttgcgatatcccttacatatacttaatactctcattattttactttatgatatagagacattctaggttttaatagctgaggtctttataccaagaatattaggctaatttattagcattatctttccctataacaaggcaggagcaaaaatacgtgttctcagtccacaaagtaaaaagcagcaaaagattgaatgatgctcctggtaaaagatccagtctcttatttgataagtgcaatgacataawtaatgttccaaattaagaaaaaaattcagatcattattgtctacatttcggtatatttatacttcaaatttaattgcaatataattaccta

SEQ ID NO: 631640 - DNA, 590 bp, Homo sapiens
aattgtgttggaagaattcttcatatacactagatgtaaattttttgtcaaatatatgtacaagaaatgtttttatccagtctgtgtctccaccgaaggtttttaattttgatgaaggctatgacgagttaagttacaagcctataaaaatgataccttgaattcctaacccctgattcctcagaatgtgaccttatttaggaatagggtctttacagaggtaatcaagttaaaacgaagttactcgtgtggacactgatatattatggcttatatccttattaaaaggaacaacttggacacagatgcatctaggaagagggccatgtgaagatgaaggcagagatcagggtaatatatttacaagtcaagcaatgccagtgattaccagcaaaccatcagcatctaggggaaagacgtggaatggattctccctcagrctcttgaaaggaaccaaccctgctgattccttgatctcagacatctagcctccagagaagtgaggagataaatttctgttatttaaatcacacagttttgagtatttcagtattaatatgaatttatcacttttcttctgttacggttag

SEQ ID NO: 631641 - DNA, 512 bp, Homo sapiens
atgtgaccttatttaggaatagggtctttacagaggtaatcaagttaaaacgaagttactcgtgtggacactgatatattatggcttatatccttattaaaaggaacaacttggacacagatgcatctaggaagagggccatgtgaagatgaaggcagagatcagggtaatatatttacaagtcaagcaatgccagtgattaccagcaaaccatcagcatctaggggaaagacgtggaatggattctccctcagactcttgaaaggaaccaaccctgctgattccttgatctcagacatctagcctccagagaagtgaggagataaatttctgttatttaaatcacacagttttgagwatttcagtattaatatgaatttatcacttttcttctgttacggttagggcttttcttgtcctggcaaagctttgtctttctcaatattactaagatttactcttaaactttcttgtagatcaatattatttttgaatgttatgtagccatattc

SEQ ID NO: 631642 - DNA, 298 bp, Homo sapiens
caatattatttttgaatgttatgtagccatattccatacatttttcctgcttacttggtttcatgtttgaatgtttaatgcctgaggaagctcttgtttcttgtataattcctagacttaatcacagcttttagtaacagtgtaaatatttcaagtggctctgtgcccacctcttcaagtttgacttggggcaagttttatttccaagagggcaagccccactgtccttctggttcccttgctattaagttggaaatggttttaactgatgtttkcataccaattattgaatgctcag

SEQ ID NO: 631643 - DNA, 520 bp, Homo sapiens
gcagcaggtgcagagtggtcatggccttgttgggactctggaccctctttcccccaaggtctgggtatttgttcatccttgctacccctgtccctctccatgtctgaccttcaggggcaatttccagatacaaacttgagtgttgccttctagcaaaacctaattatccaggcacggttaccagccaccctctttctgtagaatttcactttactgccatgaatttcatgtttatctaagagatggatcagggaattaagaaatattgtcttcatcattggatgaccattcttccccccttctagagaggttatgcaatgtaattgagcttgcatttctgtatgtcttatggcagaggaacctgctctaagagccttaccaaggagaytctagccaggaagcaaacaccactgcattattcagatattataaatcatcatctcttttccaatgccactcgcttccagctcagaatgaccaatgaacagagttcatgtcaatgttgctggacacccagctt

SEQ ID NO: 631644 - DNA, 542 bp, Homo sapiens
tagctacttgagtgttcacgcttgccaaaacacatcaaactaaacacttaaggtctgtgcttttggttgtatgtaaattataactcaaaacaaacaaacaaacaaacaaaaaacacaaagaaccgtgaattggaaccccctctctcctacagcactgtgagacctgttagctcctgccccagtcctggactgtcataaacacttatttatgaggtaaatgcatgcaatacaaagtaacttgcttgtcatgagtcgggggacagtgttccctttcatcatttggaatgaaaatttttaatacctagacactaattcttaggtcagtttggacagctctcccgarcagtgatattaagaactaattcttttttattttattttattattattatttttttattattatactttaagttttagggtacatgtgcacaatgtgcaggttagttacatatgtatacatgtgccatgctggtgtgctgcacccactaactcgtcatctagcattaggtatatctcccaatgctatccctctgccctcc

SEQ ID NO: 631645 - DNA, 566 bp, Homo sapiens
gttctatcttctttatacaaaaaccattctacctgattcacagtttggtttactgctattgtaagggcaaactttgccttttaatgaccatgaaatatcaattactgtgtaactatctctgcatggcatgctaggggaatggcagggagaagtatgtcttatctacaggtggtgggttgagtaggatggatggacacaggccaagcagattgcaacttcctccctcctgagtccctcaagcttccccatgtggctgagcccactgcatccaggcttccagcactcaccatacaatgtgatgctggcattggtgttcccaagcttgttcgtggccacacaagtatagttcccataatccttttctgaaacattgaagaaagtcagagtggacatgcggcctttgttttcaatcctcattccatccagaccagtggctaacctgcaagagggaagacattgcyatcaattcattctacaaagaggccctcctcctcaccaaactcttttctccaactaatctcgtccttcaaactcaaaccctaagcacttcagtgtccaacaggagg

SEQ ID NO: 631646 - DNA, 606 bp, Homo sapiens
ctggctaccaatcatctatttatagaaatgtcactgcaaatcagcaccgttctgttagtccaatctgtgcaattccatggaggaaataatgcattggctagtgggagcaatccatttgcctggctaccctcctcaaacctggtcctggtgacagggtcccaaaatgtacccatagatgtgaggttcagagtcattgggaaatctgggtggacccacataagaagtggctgaagggtgcagggtgaaagatccccagactgaagaaatggggtctgaaatagtgacccacatgctcccagcctaggatctgagcgtctctcctgaatgatgctgctcacccccgatggttccagccaccagaygggaacttagacaatttcaagaaagaaactccagagcatgcgccacctgggtctgggttaagccggcatttgctggatggtgctactggatcaaaagcctctaccacagcagacataatgatccaggctagttcatacactaactcttcaaggtgcattacggttatgcaaacactttcttgccctactccctttatttctctataggctaacagaatatcatagtgaaagggattctgagatt

SEQ ID NO: 631647 - DNA, 606 bp, Homo sapiens
ctggctaccaatcatctatttatagaaatgtcactgcaaatcagcaccgttctgttagtccaatctgtgcaattccatggaggaaataatgcattggctagtgggagcaatccatttgcctggctaccctcctcaaacctggtcctggtgacagggtcccaaaatgtacccatagatgtgaggttcagagtcattgggaaatctgggtggacccacataagaagtggctgaagggtgcagggtgaaagatccccagactgaagaaatggggtctgaaatagtgacccacatgctcccagcctaggatctgagcgtctctcctgaatgatgctgctcacccccgatggttccagccaccagatgggaacttagacaatttcaagaaagaaactccagagcatgcgccacctgggtctgggttaagccggcatttgctggatggtgctactggatcaaaagcctctaccacagcagacataatgatccaggctagttcatayactaactcttcaaggtgcattacggttatgcaaacactttcttgccctactccctttatttctctataggctaacagaatatcatagtgaaagggattctgagatt

SEQ ID NO: 631648 - DNA, 420 bp, Homo sapiens
aagaattctgtatctcagatggtatttgaaaataaatttctagggacaacagggaaatcaaaaacaagaacaccagaggaaactttaacctctgacacagttacaacaagcaataattacagcttgatccctagccagaaacataaaactttaaactaaaaatctatttactccagtttcttttaccccagtatatcatgtctggcggtttaaagataaaagtaccaccagcatactataagacgaaaaaaaaaaaaaaccagctggaagaaacagagtaagcatcaraacaggctcagatatcgcagagatgttggaattatcagattgaggatttaaagtaactatgaataatatgctaagagttctaatggaaaaagcagaccacttgcaaggacaaatggggaatgtaagcagaaa

SEQ ID NO: 631649 - DNA, 538 bp, Homo sapiens
gtgcctctatttttagaaggcttagcacctcattgttcatgtttattgtaaaaccaatgaatgttgccatggcaacagatggtccggtctttccctgatgcctgaaagccaaccagggtctgccttacctaccccatgcttgtccttgctagcagctggaggaacttgaacayggcgctttctacctaagagtcatgatgaatggctaccttctgaattttcaaaattcttaaaactggcaccaaacaaacaagttagtgtgtatttcttatatcagagactttaagtctatatgccaccacaagatcagaataacaacagcaaaatgtctctaaggtgcctttcctttctgttctctggggcatcaaggcctatcatgatagatagcaagggcaagaagagagaaatagagataatgcattggtcaccagtcagagctatcccaacctgacatccatgtttgcttatttataaagcataaccattgtaataggtatctttgtgttggagtaataaatttcttcttttttagagaaaa

SEQ ID NO: 631650 - DNA, 385 bp, Homo sapiens
tctcctccccaaagtcccttgaccttttaaataattgccattataccaaccgtatataggaatcggctagaaataacataaataaatgcgaaaccatgtgcctacacgtgctagctagtgttttaccaacaagaatgggtacaatttaaaatcacctttatacaattatcacaatgcactctcacaatgatcttgtaaagtgaataaggatctcctcccctacatattttactgggaaataaaaaacaaaaaactaagacgtaagcaggctgtgacttgctcatgtcagagagaaacagaaccaagaatcaaaccartttgtgagcggaggtctgcttctccacggtgtttgctctctggagacagagggaccatgccactgaat

SEQ ID NO: 631651 - DNA, 545 bp, Homo sapiens
ggggattccctcattctccctttcttttttctagggggcaagtggaatagtagaatcaattatctcttcacaaacrtattttccaggctcactgtgtgtgtgtgtgtgtgtgtgtgtgtgtgtaaatgctcatttaaccttttagtaatgtttcacaaacatatatttctcaattatgtcaaagctccccataagtaaaagaaggaatccctggatttttttttctcatggtgtctcgttgtcactctaaaatggacctaaactaagaggtagaataacaataatgaaacaacaacaacaaatactgcttgtagtgctacccatcttgtttgtacagtgtttgatagctttccactgcattttcctgcatttcatcaacctcactagttgctgtggtataccgatcacaacaaaaatgatgagcatctcagccctgggcatgcatgattcagcataatgcttgcaatggccttatcagggggtagctgtcattgtcctcctttaccaatgaagacacaggcttagagagattgagtaatgtgtcc

SEQ ID NO: 631652 - DNA, 541 bp, Homo sapiens
ttgcttttctgttcatctgtgctgatggaacccccgcataatgtggctctcttggtttccataaggctctcaataaccaccctggaacagaggcagtgtcagggtattaacataaacatgtttttaaagataaaaaagagtgccacttacaatctcatgtataattttaaatgaaagaaagcctgtgattttgggscactgttgagtgaattgtgtgtcagcattctcattttgaacgtgtctcattcagcgatgtctaaatcactttgtgccatcttactaagtagaaacaattcaacaataaccaggcagataaacaaataatcaagcagaccaacaaaaacaaaataaacaacatgtacttaacagtttacttaagtaaagaaaagattcgttctttaggatctgtgaagaactctaaatgtattagaatgactccactttccctaaagagtgttctcccaatcagggctgcctttttcctctgttcccatctatagtcatgtcaccagggatgactgcgcacaagtgaagtggaaaa

SEQ ID NO: 631653 - DNA, 511 bp, Homo sapiens
tataagacaattcagagctgaacagatgttggagtagggattggtgagtatgacacctacaagaaggtcctagtcactaagacacagaggaagagcgatggctcttacytccccaatcaccagaggatgtttcattttggatatgttgaaattgaggtatcactgaacattgacttggatatatcctacatgtagttggaaatactttcactacattcaagggaggggccagggtcagagacaatgaagtgtgcagctcctatacccaaacagcagtgaaaatccaaggaatggatgagacttcccacagagtgggctaagagcttcaagtcaaggacagaaccaacatataaggggttagcacaggagagaaagcatgcacaaggagacaaagccagagcatcacagaacagcaggaagaaaacaagaccaggagagcagagttgcagaagccaaagtgggagagggcttcagaagagacaggcggtggaatggcttgaacacagtagtg

SEQ ID NO: 631654 - DNA, 557 bp, Homo sapiens
taagaataaattttacttcagaggtaaaagacgtctacaagaaaactacaaaacactgacaaaaaaaagttaaagatgtcagaaacaaatggaaaagtatcccatgcctatgaattggatgaattaaaactgttaaaaccaccatactacccaaagcaatctacagattcaatgcaatccctgcgaaaacaccaatggcatttttcacagaaatagaaaaaaaaatcctaaaatttgtatggaactttaaaaaagatattgaatagccaaggcaatcctgagcaaaaagaacaaagcagaggcattacgctactggactcaaaatatattaaaaggctatagtaacaaaaacagcatggtattggcataaaatcagacacataattcaatggagcattatacagaactcagaaataaatccacccatttatggccaactgatttttgacaaagttgccacaaacatacattggagaaagaccacactgttcaataawtggtgctgaaaaaaactggatattcctatgcagaagaatgaaactagaccccatcactca

SEQ ID NO: 631655 - DNA, 485 bp, Homo sapiens
tttgatttcagcaactcaaagagctcttcatttttttcctttctttccttttttcttttccttttctttctttccttgttttctttttttttttcccgtgtggtcagagccctaggagtttctttccccttttaatttaaaagcgatgtgagggtaacaaaaggtttaataactggagagaattcaccagcaggacaccarggcagaaatccacatcctgaaagaaaggcaggcagacaccagatcagcgctggggggaatgtgtcctgcacacactcgtgctcccgcttgactgatggatccagccctccctctgtgccatcagccgggaacgcttacctcgggcagaagtctccctgtcttttgttaggaaaagctacaattggaaacctgcttttctaaagcatttttaacacacagtgtgctcccctgaaatacgcctgtgcctgcaagagtcctgtaagttaattcctgccacccaggga

SEQ ID NO: 631656 - DNA, 485 bp, Homo sapiens
tttgatttcagcaactcaaagagctcttcatttttttcctttctttccttttttcttttccttttctttctttccttgttttctttttttttttcccgtgtggtcagagccctaggagtttctttccccttttaatttaaaagcgatgtgagggtaacaaaaggtttaataactggagagaattcaccagcaggacaccagggcagaaatccacatcctgaaagaaagrcaggcagacaccagatcagcgctggggggaatgtgtcctgcacacactcgtgctcccgcttgactgatggatccagccctccctctgtgccatcagccgggaacgcttacctcgggcagaagtctccctgtcttttgttaggaaaagctacaattggaaacctgcttttctaaagcatttttaacacacagtgtgctcccctgaaatacgcctgtgcctgcaagagtcctgtaagttaattcctgccacccaggga

SEQ ID NO: 631657 - DNA, 554 bp, Homo sapiens
actcgtgctcccgcttgactgatggatccagccctccctctgtgccatcagccgggaacgcttacctcgggcagaagtctccctgtcttttgttaggaaaagctacaattggaaacctgcttttctaaagcatttttaacacacagtgtgctcccctgaaatacgcctgtgcctgcaagagtcctgtaagttaattcctgccacccagggaagtgtcctaattttccctgacttttactgacctactcctcattgtgtacctggctgtctttaagctgggggacagtttgagattggaacagcaaatttcatggragagcctgtcagatgggtatgtatgtgccgatgtaaagccagattgagcctaagagaaagagtgtgagcagaagaaagggaataaaatcctactgcagacagtgatgtggaaagggatgtcgtttctggcactgacactgtgcctggtccagtgccctggctgtgccatcccggcagctctgaggctttctgacagtcctgagaatggagcacaagcccccagggacgtctttggagcc

SEQ ID NO: 631658 - DNA, 556 bp, Homo sapiens
tgatgataaagaagacgtataagaaatttctaaacatgttttttctctttagtggtactaataagggattccttaattgttaaagcgcatacaggaccttatttgccaaaaattgtagcacatttgcttagaattttgagttatttcttaattcctcttctcttgattaatttaatggctcattaattcattttttaaaaaagagaatctaaaaaggttatttagaacaagctaaatccatacacagtagtgaaggtgctgtagcccatcacagagtgggtgggaagaaggggctagaagaaggatctagaagtggtaggagaggatgcrggagccattcagaatacgcatcaggaagaggaagcactgctgagtagcctcaggtttctttcttaggtgacttttcggagaagattagggaatgtagagggatagagagatttgtgaggaagaatatggagttaattttggacttactgtgtttgggatgcttatgagatatctaattggaattgttcatggagcagttcacatacagatctgatgctcagaagtg

SEQ ID NO: 631659 - DNA, 556 bp, Homo sapiens
tgatgataaagaagacgtataagaaatttctaaacatgttttttctctttagtggtactaataagggattccttaattgttaaagcgcatacaggaccttatttgccaaaaattgtagcacatttgcttagaattttgagttatttcttaattcctcttctcttgattaatttaatggctcattaattcattttttaaaaaagagaatctaaaaaggttatttagaacaagctaaatccatacacagtagtgaaggtgctgtagcccatcacagagtgggtgggaagaaggggctagaagaaggatctagaagtggtaggagaggatgcaggagccattcagaatacgcatcaggaagaggaagcactgctgagtagcctcaggtttctttcttaggtgacttttyggagaagattagggaatgtagagggatagagagatttgtgaggaagaatatggagttaattttggacttactgtgtttgggatgcttatgagatatctaattggaattgttcatggagcagttcacatacagatctgatgctcagaagtg

SEQ ID NO: 631660 - DNA, 532 bp, Homo sapiens
tgctatttattcttgctcaatgtggaagggtggttttgagcatttgggaaacacttgacagatcactttctcatttaactattagagtaacactgtgaagtaggctaagttggttattcctggtacatgaggtagaagctgacaccccccaaaaagttgtgacttcastggtttttctgactttagacactctgttctttttatgttgctcgtcacagcaacgtaagtatgaagaacacttttaagttgcctgactctattcgtctctagcatttgcaccaacatttctcagatattcggctgtgttttggtagttatagggatgccaggatgaaaattgtgtgaaagaaaaattcatcctttgtagtaagtagttttcttgtttgcagggttatatatatatatatatacatatatatacgtatacgtataatatatatatacacacacacacagtgtgaggttttttttaaatggattatattttgtgtatgtcatcataatcattttctttgtgtgcgttttgctgcaa

SEQ ID NO: 631661 - DNA, 562 bp, Homo sapiens
caagggacagcatctaggagaggggactttaaatttttaaaaatatattaatgcctcaactgtaaaaactgcctaacagtaagatattaacactacttcaaaatttattctgtaagacacctcaaatacccaccaagccaattaaagataaaagggaagagatcaaaagtcttttacaggtaggagatggtaattagcaacrtggaataatattgtgattggtattaagtgttaaattagatgtgaagttcttagcaattgagacaaaaagggacatataatggttgcatgagtctcattctctgttagaggtagccccatttttaagagacaaactttcctggtacatttcaagaggtatttattatattcaatcttacatgttgtaactgagtaacattttgttactcagtgtgtgtgtgcacatgcacttcagaaacattctttatcaaatgtatggaactatacaatattggttcttgttctttcatgaatgtaaataatttatatagtgctatttcttttctctatttactttaacgttttagggaatgttcttttt

SEQ ID NO: 631662 - DNA, 336 bp, Homo sapiens
aagacaggctacccccactgggcagtaaaacacacgttggaggaaaatctttgtttacccccgaaggtacagtatgaacctttggcctttagtgaacttcatagcctaatctatgctgaacactgtactagtggtatgctgtcgagaattatagaagtatgcraattaaatgaaactgtgactgctaatggttaccatttattgagtacttattttatgtcaggcttttattatattttctttaattctcagctgtatgttatccatatcttatatatgaggaaattttataaatgagtgtcaaagaggtttaagtaacatagtaaggcaccaaaa

SEQ ID NO: 631663 - DNA, 551 bp, Homo sapiens
tttttgttttgaagtgtttctttgcatattttgcctattctcttctcttgataaacctgcaaaaaaggcaagactagtatgattattctcttattatatttaagaaggaaactaaaacataatatgatggccagcatgatccaagtaaacttttttttgggggaaataaaactgtttctttagcgtgaaggcagaatataaattggtagaagctagtaaatggtacttgattcaaaatgagaattttagtgatttatatatgccatgtcattttgtaaaaatggtttaatgatttaatcctttttttttttttttyccaactagatggagttaccatgtggattgacaaaccttggtaacacttgttacatgaatgccacagttcagtgtattcgttctgtgcctgaactcaaagatgcccttaaaaggtaagactgcagtcttttttgggtaagggatgttcacatttggatgagtagtattgttttgttttgctttctttagcatcttaattgagatataattaatttattatacaattcagcatttta

SEQ ID NO: 631664 - DNA, 608 bp, Homo sapiens
cgtgcctgtaatcccagctactcgggaggctgaggcaggagaattgcttgaacctgggaggtggaggttgcagtgagctgagatcgcaccactgcactccagcctgagtgacaagagtaaaactccacctcaaaaaaaaaaaaagaaagaaagaaactatttcacacatataattttatctatttagggccaaatacctctatggattaagatattttatcagtcctattattattatgttgctattatgcttctactttacaaaatgaggaccctggggctcagagtgttaatggacttgctgctgggtagcagagccctaaacctagtcctatctccattccactattttcccactctccttacaatataataataatataattgggagtcataatgtgacctaccgtttcagggcacacagaatcatcttaattagctttaaaagcaaagtggtaccttcaaaaccactcttgtaagacgtcaccaaaaatagcaccactggtcagaaatgttcctttggctcagygttagaagtccacacccagcccaaggccacatcaagtttcctgcctatggaaatgaggttagcagcgagcctgaagtca

SEQ ID NO: 631665 - DNA, 530 bp, Homo sapiens
gatggcgtggtaattactgcttactcatttactgtggttttgggtatttcattctcttcaggtatgccaccaaaaattttagsatttgagaatgggctggagacctatgagttgagaatcattgagccaaaccactagtatgtcaagactaagaggaagcaatattatgggaattgagtgaaaggctgatagattttatgaccctatctgcaaagtttctgctttcatgatcaggagctaggcaaaaacacttctgggcccatccaggccatttcaagaaatagctcataagttgagaattcatctccaaccaactgatctcagaagagagaaatgaaggggtggagggaaagcaatgtttcatctcactgagccttagaccactgtcaacactgtaattatattacgtgcactggctattttggtcatttattgaaataaggtacatgggataatttaaaaactaaattcagtcagtcacttccaaaaacatccagctggtttgtgtgtgcagcaataaagtgtgaaag

SEQ ID NO: 631666 - DNA, 530 bp, Homo sapiens
gatggcgtggtaattactgcttactcatttactgtggttttgggtatttcattctcttcaggtatgccaccaaaaattttaggatttgagaatgggctggagacctatgagttgagaatcattgagccaaaccaytagtatgtcaagactaagaggaagcaatattatgggaattgagtgaaaggctgatagattttatgaccctatctgcaaagtttctgctttcatgatcaggagctaggcaaaaacacttctgggcccatccaggccatttcaagaaatagctcataagttgagaattcatctccaaccaactgatctcagaagagagaaatgaaggggtggagggaaagcaatgtttcatctcactgagccttagaccactgtcaacactgtaattatattacgtgcactggctattttggtcatttattgaaataaggtacatgggataatttaaaaactaaattcagtcagtcacttccaaaaacatccagctggtttgtgtgtgcagcaataaagtgtgaaag

SEQ ID NO: 631667 - DNA, 495 bp, Homo sapiens
caaaaccttgtgaaataatcacagttkagtaattcccccgatgcagatgtgtaccacttattttctaaactgacataaacagctattagaaaagaaacagcttgaaagaaaaacaccaccaaagtccagatgagccttcctgacatctgcagcatagagatgctgagtggctcgaaactaatgaaaatgaagtacagtattctaacacaacacttgctgtgacagtaacttacttaaaatttccattgactaagatagttgaaggtcagtgtcagaatccactccagacagtaatacatctaaatacaaaaagtttgtgtgtgtctgtgttttcccactatactactttgaaggaaatatttccatgcaaacgctgtcctcatgtggtcggaaccagttacttcaaagaagatattccagtggaatataaaataatttgtgttactatggaaagagactaagttaaattatcatattttaatgggtaaaaaaaaa

SEQ ID NO: 631668 - DNA, 476 bp, Homo sapiens
ggtgttttatttactctgcccagattcattgaggaatcactatctatagcagctataaccttactaaatgtaatttttttcacaaaatgtaattcttaaataataagacttggaaattactccttgatccatgggctgcaaaatgaatgttgtgttaacataaaaacattttaatcaacttgtatatcttcatcagagctctggggcaactaggtgcattgtcaatgcacagtaatattttaaagaaatcttttttctgagcagtacatctcaacaatgagcttaaaatgttcagtaaaccatgctgcraacagatgtgctgtcatccaggcaaagacagagtagactcacataattcttaaaggctctaagattctcagagtggtaaatgagcattggcttcatcttaaagtcaccagccgcattagcccctaccaagagagtcagcctgtcctttgaagccaagcattgatatc

SEQ ID NO: 631669 - DNA, 611 bp, Homo sapiens
ttatcttgttcctcctttcctgacatcttttggttaatcaagtattttttagtattctgttttatctagagacttgcctgtgctactatatcttcctggccctcattgacaaattctccctggtggcccccactgagcatccagacaccaaagacaaagatattttttaaatgttgctctgctccccccacagggctcaacactcaagtttcaaggctgcctctccccacygaagactggcttgctggcggcagtggaaggaaggggaaccgaagacaggaggacatggctggccaggccagctctggctgtaacaactgtcatgtgacagaccaagcaatatcaaagaactagagttctcagagcaagaaatgtcactggagcaagaactagcagagggagtcacagatagggaacacccaatagtgagttgtgaaacttttttcagtttctacactatcaataataataataaaaaatccactatactaaattatctttctggttcttttaaattaaaatattatataatcattgtcatataatgaggtgatcaaagaatatgcagccaaaaatgttgggggaggccaagtgcagtggctcatgcctgc

SEQ ID NO: 631670 - DNA, 552 bp, Homo sapiens
catgtcaatacaaaatccaaggcaggggtagggtgcctgctatgcccatagatggctgcagggagtgacagagaccagaaaagggcagcagaaccaactgtctgaaggctcctcctgccctccactcttaaagagccactttggcatccagtcctgccccaagcagaccctgaaggcccatgcctgaattcgccctgggctgggggcaggcaaagaagcccacagaaggccttctaagagttcactgaggatcagaacccagcttccagagaccccctccccgtccccaacaacctggcagtccccagtggggcacacacatgcagcattgagcaccagtcacaccattccccagggtcccctcacaccccatcagcctggrcaggagctagaaacaggtgggggaaggtggagacatcaccagggcctgagcaagatgggctgtgagaaagaggccttagcaagaacagctaaaagcctagcagaaaaatgggcccactgcccaaggtgagtccttggaaagatgccaacacattcaactgtgggtcggga

SEQ ID NO: 631671 - DNA, 645 bp, Homo sapiens
agcctcacttactctcttctgtttcctctcttctatgcctttcttaatgtgattctaggagcagcggtkgtcactccattctctgttgtgcctacttgttagaaatatattaaactaattctgtatttattttcaaaggcatcaagttttattttgttttgaaatcgagtctcactctgtcgctcagactgcaatgcagtggcataatctcagctcattgcaacctccacctccggggctcaagtgatcctcctgcctgagcctccagagtagctgggactacaggacatgtgccaccacgtccggctaattttttgtatttttaatagaaacggggtttcaccatgttggccaggctggtctcaaactccttacctcatatgatccacctgccttggcctcccaaagtgctgggattacaggtgtgagccaccacgcccggccaaaaggcatcaagttttaaaatgactcactacaatggcattagttcttattcttgaaaccagggccatcagacatcatagttccagaagtagggaaggaagtgaaaatgattcagattaattccttagggtcactcttcaagacagtcagagcaagtggtatcatttccaatttacaaccgatgatgtggccaagtggctt

SEQ ID NO: 631672 - DNA, 607 bp, Homo sapiens
gccctcacaggtgacccacatgtcacgtcactccccgagcccctgtggcttctccrtctcctttctctgccctgttatctggcctcatggtttcttctctgctcccatcttctctctccttcccacctgcagatcacctgcctgcctttccccttcatcctgggggcccagccctttcctctgccccagtcccctcccgtctttctcatccaccgacctctctatgctccccaccgtcctcctcctaagccccacctggcatttgtcttctcactgccaaatgagccagcgtgggctcgaggtagccaggagcagggtggtcgcagttctccacagctcctgaccctggcctgagcccccagggagctcccacgcacctcttccttatgaacactgggggcgctggaggctcagcccccgccccacgcatacctggggcaggcttgctttccagcccttgcagactcacgaggggcctcattctgggacacgttggcagctgtggggtcgacacacctcttctgcagggagggctcccgacacttccgtcctctacctgcacagccggcctccattaaacacacgcctcagccggcctggagactcc

SEQ ID NO: 631673 - DNA, 607 bp, Homo sapiens
atgagtgagaaatggtccaccgaggctgagctgctctcagtggagctccttatcgtagtgacaaaactcaggacaaaactccatctgtgttacaaccacctcagggacttttggttacacrcagttgtcagaaataacaggactttggtggaactgcctttctagaaaaggagcagtgaagtgttaaaaccagtctgctttctctcagttgcacagctgtgggctgaccaggtgtcacactgtaggtttttctctctttatagcctgtttccaatatgttttcacaggtgctagcataggagggcagtgttttccagggaggctcgaccatgttcatggaggctgagcgctgggtcttccacagaaaacaactgctctcaaggaaattactcatgactggaggattgttcatgcctgttacccagccttgtccacacacattgctactagtttggggtctagatgaacatgtgggccgcagactggcatcacctgggaacttgcaagaaatgctgactctcagcctctcccccagacctgctgaatgagaagctgattaagcaagattctcaggtgatttgcatgttactgctcagtgttcctcaaa

SEQ ID NO: 631674 - DNA, 478 bp, Homo sapiens
ttacaatttacttctttaaatgtttaacaacattttaaattatgtattgttttctttttgccattcattcatctcttggtggtttggggtgtgatttgtgtttttcccctctcttgacttatctgagaaattctggcactagccaggtttgggatgtttttgttcagacattcttaagttatttggtaagaagaaaggctttgttgcatttttctgctgagaaacaactttctttttctttgtttcaaccctgaacttcctaaaagctctttatttctatagattgttctacaaagctatgcctcaggaggtgagagactagggagcatttttttttkgttcaactagaagtagccacattttcagaaaacaactaataagtttaaaatatgtcaaagataactttacaagagaccgcgtgaacatagatatgtaaaggagagcctagtgctctcaatgcccatatctgcaggcctca

SEQ ID NO: 631675 - DNA, 535 bp, Homo sapiens
tacccctgtacacggcctgcagggggtcatctcctcacggccaaaggccaagtctgctttgtggagattttcctactccccaccccctcctctcctacccccctgtgcaatattaagggatcctcggggaactaagaaaatagaaacacatttaaattcttttctgcttctgtccccttgcattcagatgactgactcatgcttgcctcatctcccggtctctaactttgggctctagccccaaggggcagggacgatgtctttgttctagctccatttttgtgccagatcctcagacactgggattcttggtctgattccccatctgcctccacccagccccaccaccgggatacagtccttcctatcagcttctcargagccagtgtctacccaagatgggatgtttaggaggaaaaaaccaatcccaaagcaaaactcaaagcaagcttgtttgtctgcattcaggcctgtatcaaggagttgcatggcaccaggtttgcccaaatccagagtccttcaaggatgtctggca

SEQ ID NO: 631676 - DNA, 535 bp, Homo sapiens
tacccctgtacacggcctgcagggggtcatctcctcacggccaaaggccaagtctgctttgtggagattttcctactccccaccccctcctctcctacccccctgtgcaatattaagggatcctcggggaactaagaaaatagaaacacatttaaattcttttctgcttctgtccccttgcattcagatgactgactcatgcttgcctcatctcccggtctctaactttgggctctagccccaaggggcagggacgatgtctttgttctagctccatttttgtgccagatcctcagacactgggattcttggtctgattccccatctgcctccacccagccccaccaccgggatacagtccttcctatcagcttctcaggagccagtgtctacccaagatgggatgtttaggaggaaaaaaccaatcccaaagcaaaactcaaagcaagcttgtttgtctgcattcargcctgtatcaaggagttgcatggcaccaggtttgcccaaatccagagtccttcaaggatgtctggca

SEQ ID NO: 631677 - DNA, 668 bp, Homo sapiens
agatatctgcccatctcagaatgagcctgctgtgtggctttgagctttggcatgcagaggacagggtctgcaccgtccctgatctggtcacaccccctactcagtcttccgccgccatcaagctctgagtgagcctggccatgcatctgtcacacctagagggcagcctgggccagagacacaaacagcctgtagccagctgagtgctgagggagagggggaaaaaaacaccaaaaaggtgagacagtgggcctaagcacaggggatgggggcatggtgaagccatttcctgccacccacatggagccccttctgtgtggcagacactcatccaggatcttaggatagagcagtggaataacaaagatccctgccctcatggggcttatgatccagcaggaagagacagacaatgagtcataataaacaagtaaattagatactgtgtttgtgtatcartgccacgtcagaaatgctaaggggcataggtacaaatacacggtttgagagaagaaataagacctagtgttagatatagatcaatagggtcactggagtttacagtaatccattgtatatttcagaatagctagaagagaaacattcaactgtttctgacataaagaaaagacaaatattcaaggtgatgaatatcctcaattcactga

SEQ ID NO: 631678 - DNA, 668 bp, Homo sapiens
agatatctgcccatctcagaatgagcctgctgtgtggctttgagctttggcatgcagaggacagggtctgcaccgtccctgatctggtcacaccccctactcagtcttccgccgccatcaagctctgagtgagcctggccatgcatctgtcacacctagagggcagcctgggccagagacacaaacagcctgtagccagctgagtgctgagggagagggggaaaaaaacaccaaaaaggtgagacagtgggcctaagcacaggggatgggggcatggtgaagccatttcctgccacccacatggagccccttctgtgtggcagacactcatccaggatcttaggatagagcagtggaataacaaagatccctgccctcatggggcttatgatccagcaggaagagacagacaatgagtcataataaacaagtaaattagatactgtgtttgtgtatcagtgccacgtcagaaatgctaaggggcataggtacaaatacacggtttgagagaagaaataagacctagtgttagatatagatcaatagggtcactrgagtttacagtaatccattgtatatttcagaatagctagaagagaaacattcaactgtttctgacataaagaaaagacaaatattcaaggtgatgaatatcctcaattcactga

SEQ ID NO: 631679 - DNA, 427 bp, Homo sapiens
ccacactgacttccacaatggttgaactagtttacggtcccactaacagtgtaamagtgttcttatttctccacatcctctccagcacctgttgtttcctgactttttaatgattgccattctaactggtgtgagatggtatctcattgtggttttgatttgcatttctctgatggccagtgatggtgagcattttttcatgtgttttttggctgcataaatgtcttcttttgagaagtgtctgttcatgtccttcacccactttttgatggggtggtttgtttttttcttgtaaatttgtttgagttcattgtagattctggatactagccctttgtcagatgagtaggttgtgaaaattttctcccattttgtaggttgcctgttcactctgatggtagtttcttttgctgtgcagaagctcttt

SEQ ID NO: 631680 - DNA, 427 bp, Homo sapiens
ccacactgacttccacaatggttgaactagtttacggtcccactaacagtgtaaaagtgttcttatttctccacatcctctccagcacctgttgtttcctgactttttaatgattgccattctaactggtgtgagatggtatctcattgtggttttgatttgcatttctctgatggccagtgatggtgagcattttttcatgtgttttttggctgcataaatgtcttcttttgagaagtgtctgttcatgtccttcacccactttttgatggggtggtttgtttttttcttgtaaatttgtttgagttcattgtagattctggayactagccctttgtcagatgagtaggttgtgaaaattttctcccattttgtaggttgcctgttcactctgatggtagtttcttttgctgtgcagaagctcttt

SEQ ID NO: 631681 - DNA, 560 bp, Homo sapiens
cccctgtagtcccagctactaaggaggctgaggcagggaaatcacttgaacccgggarggggaggttgcagtgagctaagatcgtgccactgcactccagcctggtgacagagcgagactctgtctcaaaaaaaaaaaaaagaagaggaccagaggcagggggaaaactgggtccccatcttcatttgagaacactccccgtcctgcgcgtctactctttagcaaggagccaagagaagaggtgactggccccattttaaagctggacaaagtaaggcctggcgagtttgagggcctcaactggacccccagtgcagcagaaacagctctgcagtccaagtccccaaccattctctgtgaccctcacccctaccccttgcacacatactgttcggcccagttctgctccctgtgtactggagcagtggacagccagggtcccatgggccccagctcccctggcacctccccactggctcttggcgctgaagctgattgcttccatgcaatctgaattaatctcatgcttcaggtggagcttggctaatcaggagagacaa

SEQ ID NO: 631682 - DNA, 560 bp, Homo sapiens
cccctgtagtcccagctactaaggaggctgaggcagggaaatcacttgaacccgggagggggaggttgcagtgagctaagatcgtgccactgcactccagcctggtgacagagcgagactctgtctcaaaaaaaaaaaaaagaagaggaccagaggcagggggaaaactgggtccccatcttcatttgagaacactccccgtcctgcgcgtctactctttagcaaggagccaagagaagaggtgactggccccattttaaagctggacaaagtaaggcctggcgagwttgagggcctcaactggacccccagtgcagcagaaacagctctgcagtccaagtccccaaccattctctgtgaccctcacccctaccccttgcacacatactgttcggcccagttctgctccctgtgtactggagcagtggacagccagggtcccatgggccccagctcccctggcacctccccactggctcttggcgctgaagctgattgcttccatgcaatctgaattaatctcatgcttcaggtggagcttggctaatcaggagagacaa

SEQ ID NO: 631683 - DNA, 515 bp, Homo sapiens
gccccgctgtgtataactcacaccacactgagcaccctgtctcttcatcacctcttttgtgtctgtctccctttccctctggactgtgggccacttgagagcagggtgacgtctctcagcytcataggcctaccatgaccggagtcattactgatggtctaactggcttagcaagccatttacaggctccaaactgacctctccttgatctctatgggctaggggctctgtatgggggctcaggctccctgtatagcttggtaccccaagtgaggaagcctgcaggagagaggaagattgcaagctcatgtgggccgagtgcagccaaagcataaatgaccgcatgcttgcttctccctactcgtttcccagagcctctgcctgctctccaggaaatgtcagtgcacattgagtcaggtggcctcctgctcatcccagtcgccagccggagctcccagtgctctgctagccaccgtctcctcactgctcctgtgtgggcttggcacaggttaggt

SEQ ID NO: 631684 - DNA, 515 bp, Homo sapiens
gccccgctgtgtataactcacaccacactgagcaccctgtctcttcatcacctcttttgtgtctgtctccctttccctctggactgtgggccacttgagagcagggtgacgtctctcagcctcataggcctaccatgaccggagtcattactgatggtctaactggcttagcaagccatttacaggctccaaactgacctctccttgatctctatgggctaggggctctgtatgggggctcaggctccctgtatagcttggtaccccaagtgaggaagcctgcaggagagaggaagattgcaagctcatgtgsgccgagtgcagccaaagcataaatgaccgcatgcttgcttctccctactcgtttcccagagcctctgcctgctctccaggaaatgtcagtgcacattgagtcaggtggcctcctgctcatcccagtcgccagccggagctcccagtgctctgctagccaccgtctcctcactgctcctgtgtgggcttggcacaggttaggt

SEQ ID NO: 631685 - DNA, 374 bp, Homo sapiens
tgctagtctctggctccctcatcccgggctcctgggacaatcaagccacttggtttcctatctcatctgccactggagccctcacagagaagctagaactagtaggaaaggcaggcagagagcaagattcaacgaggggaaagatgtctgtgaacaaacgggcttggcccgccccatctgagcatgaataaataaacaacagcaatgatgagctggccgccttgccacacagctctgccggccgagagagaattccttcaaaagaatggagcctcrtgccagttcattatttatgagcagggcccaccaaggtggggcctctgttgtttgttgcaatttaacacaggcctcggtggagagggagggaggggcag

SEQ ID NO: 631686 - DNA, 552 bp, Homo sapiens
aggtccacacttaatccatcctacaccaatgttcacccttcttctacacttctaaaaaaatgcttctacatagcataatgcaatgaaaaataccttgtccaactaaaaaacatgcttatcctttgccctaatatttaaaaagcagtaaactcaaagtctcactgttatttattgtttccattccaagaccaggatctctgagtaatgttcatgcttctccggttctatactgataaccttctattcaatatcacataatcttggattaatttgtgaatttaaccagaatgaacaaacataaggtagtgggagatgggggataaaggaaagaaaagaaggcagttcaactgtctaggatatttattattttcaatggcaaaactcgcaattacttttgcaccaacctacaatasaagaaaatattgggagatgcggctgtccttatttctccaaatccccatgaaacttgtggcaggctgaaaaatgattcttcaaagatatgtccacatcctaatccttggaacctgtatatgttacttactgtatttgaat

SEQ ID NO: 631687 - DNA, 597 bp, Homo sapiens
tagtcatggggctagtgaaaatgtgtgccttttatcttcattttataactgcctatactgtttgaatgctttaccatatgtgtgtmtcttgtagttgtttgataaatttttaaatgtctttaaggaattttaaaaattgccattgcataagaaagggaaatagagtccactttcagtgactttttggccagaagagtccaccaatcccagtggcctactgaagccaacttacactccgttacaggagtctattgttaaattttcaggaattttgcaaaccagttcacatcacataggcagcttgaaattggccatggttggagtatttacatctgaaaatcagcaaatgattaaagtcatgtcttcttcccacctggagagccagttgttaaacatgggtcagcacctcactgaacgtttcttaaagttgcatcaataaagtgttagctgtagtgggaaatcccttctctcactacaatttattgaacttaagttacagcatggtgtgtcagttatgtagaccatgaccatatttttatagcaaaataccaagacatacaccattgacaaagatataggggcaaaaggaaagaatat

SEQ ID NO: 631688 - DNA, 551 bp, Homo sapiens
acttggaagtcccaaactgaactgaactcacaatcacctaaatttactggggaaaattatgctaattatctcaattatttgaggaagataccaaccaattagctaaaaggcaagcctaagattacaaaattctcattgacatggaaataggctgcatgtgtaaagtgttttttgtttaacacaggcacctatggaggatctattatgatatcacggatgttgagtttgaattaattgcttcattctggccatctctgccagctgatctgcaagctgcataygagaaccccagagataagattctggtttttaaaggtaacctggcccatcccgattcctcttctccctctggctgcctgaactaaccagtggatattttggtgtaagaaataaaatcttcatgcatgagccaaggcgcagggcttttgctctcatcttaggttcctgtcgtaaagaatataaataaccaggattctctgtggctgtgaagataaacacaatcctagttgcacagggactaaaataaacctgtgtgataaaaactaaaaaag

SEQ ID NO: 631689 - DNA, 564 bp, Homo sapiens
caaaccatggacaaagggttcccgcagagagtggtaaaacactttcctggaatcagtatccgtgttgatgctgctttccagtacaaaggtaagcatggatgtctcacttattgggatacttgagagactgtgttgactgtgaaaaaagacagcacaaaaacttaaatgcttttattttaatgcaattttgctaytcttaagtatatacaataataaacattaaccccacaaacattatcacaaactgaatccataaatcctgaattatactctctgttatactatctcaaatctatgtaaaaagtaccaaatccattttactcatcattgataagtaaagacaccccctaaagtgtgcgaagtgactaagcacatgaacaaaacaatgattctcaaactttaatgtatgtaccttaatgtacatagcttggggtttgtgtgtgaaacaaagtatttgaggcagaattgtgagtgatacctaagaatctgcagttttaaaagaacctcaggcaatgtaatgaatacaatccagcaactatatcatccaagacaatgacctagacc

SEQ ID NO: 631690 - DNA, 574 bp, Homo sapiens
ttccagttccagtttcttagcttcttggtaaaagtactaggctttcccctcccaggagttcgtaggtagaaggagaactgttaacactctagtctccccgtctcccgggaggcaaacacaggggctaaggctcttgttttatcctctttcatgggtaatactgtgaaggaagggcaggatttccagcccaactgttgtagccatgagtgagaagaatgtcaattgagaagtgagaagaaagcgtcagtgtacaggggatgtagactgctaagcaatgcattgtgaccaagcaccacatgcctgagacaaagcagcttcaaagtctccctggctatctgtgaaaactccagacacaagcaggattttgcagcttgagagagctgcctacacgttctctggactccattggagctgctatggtcaacgtgctattataagggattcatgcttcactcccagaagggcccttgatgacatctgtcccactttcttgcatcattcatcaggcagtgaaagytaaataacatgtctgtgatcccacagcttctcaaatagagtctaaaactcagaccca

SEQ ID NO: 631691 - DNA, 539 bp, Homo sapiens
gcgtatgttcccagaatccaaaagtaaaaaggcaaattgctagatgggtggagactggggtaaggtggcagtggctacagcaggagctcacaacgttaggcagttagttatgtgattctgttatttgtcctcctttacctttccaatgacacacaccttattaatgcatcactggctatggggtctgtaatcaggccagtaagagctatgtgatttggaacaaattatttacttctctaagcctcagcttttcccaactgcaaaatgggaataataattatagaattamtgttacgagaattgagataatctagataaagatcttagcacaatgtctagttcatcaaaagcaatcatttaataattggtataatattagaataatttgtatttttatgttgcttctaaatccctaaggacctgccccatgtagtggtgctatccatcttgttacttggtgccaggtaataagaaatctgggttctagtgcagttctcctgctgatgagctctgtgttcttggatgacttgctgcatctt

SEQ ID NO: 631692 - DNA, 580 bp, Homo sapiens
ataaatgcaaattttgaaaaattattgcaatatcctattcctttcctgaaaccaaaaagcaatgattastatatgtttgtacattcattcattctttttttttaacaaacttgattaagtaacattttttagaatacagtcttcaaacagcttacaatttagttgaatgaatctaatctgtggttttcttttttcttcttctgagacacatgttttgtctatctcacagtacatgccagaaattctgtttgcctgtgtgtattagtccattctcacactgctataaaggaatacccgagactgggtaatttataaaggaaagaggcttagttgactcacagttttacatggctggggaggcctcaggaaacttagaatcatggtgcaaggcaaaggggaagcaggcaccttcttgacaaggcagcaggagagagaagatcaatggaggaactttcaaacacctataaaaccatcatatcttgtgagaactcactcattgtcatgagaacagcatgacggaaccacccccatgatccaatcccctccctccctcaacacatggggattacaattcgagatg

SEQ ID NO: 631693 - DNA, 580 bp, Homo sapiens
ataaatgcaaattttgaaaaattattgcaatatcctattcctttcctgaaaccaaaaagcaatgattagtatatgtttgtacattcattcattctttttttttaacaaacttgattaagtaacattttttagaatacagtcttcaaasagcttacaatttagttgaatgaatctaatctgtggttttcttttttcttcttctgagacacatgttttgtctatctcacagtacatgccagaaattctgtttgcctgtgtgtattagtccattctcacactgctataaaggaatacccgagactgggtaatttataaaggaaagaggcttagttgactcacagttttacatggctggggaggcctcaggaaacttagaatcatggtgcaaggcaaaggggaagcaggcaccttcttgacaaggcagcaggagagagaagatcaatggaggaactttcaaacacctataaaaccatcatatcttgtgagaactcactcattgtcatgagaacagcatgacggaaccacccccatgatccaatcccctccctccctcaacacatggggattacaattcgagatg

SEQ ID NO: 631694 - DNA, 622 bp, Homo sapiens
tttacataagtcacaaacctaggagtcataatggaaaaatagacaaatttgaccaaataaaaatttaaatttctacatgtcagaaaatactataggaataaaatgacaagatggcagatagaaggcaggactagcttgcagctcccacttggacagacagagcagcgtgtggagacttatgtcgtgaacttttgctccaagaactacagcaggaacatactaagaaagccaagagaatycacagaccctttgaagggactggatctctgctgcagactccctgagatgccaaaaaactgtgagtcggcttgctttttcagcaaggaggctcgtggtctggggcaagttctcagccctggtcactggctgcctggaaatagactcagtgctgttgcagggcatggtgggagtgagactggtctttaggactgctagctgcatgggagtggggtgaggcctgtgactgccagctttcccccacttcccagatgacctgtatgactgagcagatgcagccataatctccttgggaacataactccattgcctagggaccacacccccattccccacagcagctgcagcaagccctgcccaaggaaagtctaagctcggacacatc

SEQ ID NO: 631695 - DNA, 580 bp, Homo sapiens
ataaatgcaaattttgaaaaattattgcaatatcctattcctttcctgaaaccaaaaagcaatgattagtatatgtttgtacattcattcattctttttttttaacaaacttgattaagtaacattttttagaatacagtcttcaaacagcttacaatttagttgaatgaatctaatctgtggttttcttttttcttcttctgagacacatgttttgtctatctcacagtacatgccagaaattctgtttgcmtgtgtgtattagtccattctcacactgctataaaggaatacccgagactgggtaatttataaaggaaagaggcttagttgactcacagttttacatggctggggaggcctcaggaaacttagaatcatggtgcaaggcaaaggggaagcaggcaccttcttgacaaggcagcaggagagagaagatcaatggaggaactttcaaacacctataaaaccatcatatcttgtgagaactcactcattgtcatgagaacagcatgacggaaccacccccatgatccaatcccctccctccctcaacacatggggattacaattcgagatg

SEQ ID NO: 631696 - DNA, 580 bp, Homo sapiens
ataaatgcaaattttgaaaaattattgcaatatcctattcctttcctgaaaccaaaaagcaatgattagtatatgtttgtacattcattcattctttttttttaacaaacttgattaagtaacattttttagaatacagtcttcaaacagcttacaatttagttgaatgaatctaatctgtggttttcttttttcttcttctgagacacatgttttgtctatctcacagtacatgccagaaattctgtttgcctgtgtgtattagtccattctcacactgctataaaggaatacccgagactgggtaatttataaaggaaagaggcttagttgactcacagttttacatggctggggaggcctcaggaaacttagaatcatggtgcaaggcaaaggggaagcaggcaccttcttgacaaggcagcaggagagagaagatcaatggaggaactttcaaacacctataaaaccatcatatcttgtgagaactcactcattgtcatgagaacagcatgacggaaccacccccatgatccaatcmcctccctccctcaacacatggggattacaattcgagatg

SEQ ID NO: 631697 - DNA, 623 bp, Homo sapiens
actcccaggtgtcttccaacttccattaccacaaacaagactgcagtgaacatctttggcatgatttgtacatgtccccttatggatctacatgagaatttctttgatagatacatctgggagcaggattgctgtaggaaaaagaatagtcatgtctttttagaatatttaaaattggggccaggtgcaatggctcacgcctgtaatcccagcattttgggaggctgaggtgggcagatcactcgaggtcaggagttcaagaccagcctggtcattgtggtgaaatcacctctctactgaaaatacaaaaattagccaagtgtggtggtgggcatctgtaatctcagctacttgagaggctgaggcaggagaattgcttgaacttgggaggcagaggttgcagtgagccaagatcgcgtcactgcactccagcctgggcaacagagtgagactccatcccccccccaaaaaaaatttaaaattggaaatttggaaagcctaaaaargaagaaaaaaatccccaccatccaaagacaataactgggaagcactgtagtgcatttcttcttaaactttttttcttttagggcagcaatagaggctcagtccctcacaccttcttt

SEQ ID NO: 631698 - DNA, 614 bp, Homo sapiens
agagtccctgtgagcaagtagttagaagagaagccagcccagcagtggagcagcctcagatggagggctggctcatgttggctccctcatcacccacagcttagcaccagctcttctctgtttctgagctttctaagatgctctaggaattctctactggagagagacaaatcctacccttattgctctctttctccatgttttaacttccatgagcatagtgccgttcacaactggagacttaaaaccttcccaggatctcacttcctatcaaataaagcccaacctcttttgcctggccttcaagacctcctccacttggctccagcagatatttgagtgcttgccttttaacatgaatccttcagtccagccagtctacatgctgcctcacaaacacactgatgcatttttgtatatgcctacttttaaaaaaagccataattgtagagtacctacaacatactaggcaatctaatgttatgcaatcctcataacatttttcygaagttttattaacaatatttttatagtaaagtgactgatgcccatagattttgaatagctggtacttggtccctcaactagtaagtgacagattggggtcaaaccca

SEQ ID NO: 631699 - DNA, 605 bp, Homo sapiens
atagacctctaaatataagaaataaaattataaaacttgcaaaaaatattttttaaaaaaattttgggactttggactaagcaaagatttcttaggtagaacataaaaactattaaccattaaaaaatgaatgaattaaactttaacatttaaaacctttgctttcaaaaaacaatattgaaagaataaaaagttggctgggcacagtggctcctgcctgtaatcccagcactttgggaggcyaagacaggaagattgcgtgaggccagaagttcaagactagcccagccaacatagcaagaccctatttctatataaaacatataattaaataaaattttttttccaggcgtggtggctcacacctgtaatcccagcactttgggaagctgaggtgggcggatcatgaggtcaggagattgcgaccatcctggctaacatggtgaaaccctgtgtctactaaaaatacgaaaattaactgggcttggtggtgcgcgcctgcagtcccagtactcggggggctgaggcaggagaatcgcttgaaccagggaggtggaggttgcagtgagccaagatcgcgtaactgcattccagcctcatgacag

SEQ ID NO: 631700 - DNA, 605 bp, Homo sapiens
atagacctctaaatataagaaataaaattataaaacttgcaaaaaatattttttaaaaaaattttgggactttggactaagcaaagatttcttaggtagaacataaaaactattaaccattaaaaaatgaatgaattaaactttaacatttaaaacctttgctttcaaaaaacaatattgaaagaataaaaagttggctgggcacagtggctcctgcctgtaatcccagcactttgggaggccaagacaggaagattgcgtgaggccagaagttcaagactagcccagccaacatagcaagaccctatttctatataaaacatataattaaataaaattttttttccaggygtggtggctcacacctgtaatcccagcactttgggaagctgaggtgggcggatcatgaggtcaggagattgcgaccatcctggctaacatggtgaaaccctgtgtctactaaaaatacgaaaattaactgggcttggtggtgcgcgcctgcagtcccagtactcggggggctgaggcaggagaatcgcttgaaccagggaggtggaggttgcagtgagccaagatcgcgtaactgcattccagcctcatgacag

SEQ ID NO: 631701 - DNA, 471 bp, Homo sapiens
tggtggtacatgcctgtagtcccagctactcaggaggctgagacaggaggatcgcttgagcctggaaggtcaaggcagtggtgagccatgatggcaccactacacttcagcctgggcaacagtgagaccccatctcaaaaaaaaaacaaaaacacaacaaagaaaaaataaataacaacataaatgcatgtgtatgtgtatgtgaaacagagagagagaggaacacctaaataagttatgtgtccatakgcctgaccagtatagtgtcatctacaaccagtaaaaacctcttagtaatattatttatgaaataatactttttctagctacgacgaaaggaaaaggaaaatggaaaaagactatccaaagaatactgaagaagaattttcaggagtaaatggccaaatcgatgctgctgtagaattaaatggtaagtgtttccactgaaaactttcttcatgaaaactatca

SEQ ID NO: 631702 - DNA, 508 bp, Homo sapiens
tgtcttcttaccctcagacaaccacactagctccccagcaatagttcttaccagattraagtggctaaaatgacagacataaaattcagaatctggatgacaaagaagctcaaaaagatataggagaagattgaaacccaatcaagaaaaccagtaaaacaatccaagagttgaaagatgacatatcaattttaacaaagcatcaaactaaacctctagaaatgaaaaattcactacaggaatttcataatgaaatcagaagcattaataacagaatagacgaagctgaggaaagagtctcagagctcaaagactgctccttcaaaccaacacaggcagacaacaattttttaaaaaatttaaacatgaacaaaacctctgagaaatatgggattatgtaaagagaccaaacctacaactcattggcattcctcaaagagttggagagagaggaagcagcttggaaaacatatttgaggatgttgtccacaaaaatttccccaacctt

SEQ ID NO: 631703 - DNA, 644 bp, Homo sapiens
aaacctacaactcattggcattcctcaaagagttggagagagaggaagcagcttggaaaacatatttgaggatgttgtccacaaaaatttccccaaccttgctagagaggtcaacaggcaaattcagaaaattcatagaacccctgcaagatacactagatggtgaacaacaattcccaagacacatagtcgtcagattctccaaggtcaacatgaaagaaaaaatcttaaaggcagctagaaagaaagggaaagtcaggwacaaagggaaccctgtcacactaacagcaggcctttcagcagagaccttacgagccaaaatagattagggccctgtattcagcatccttaagggaaaaaaaattctaggctgggtgttgtagcttatggctgtaatcccagcacattgggaggccaatgcaggaggatcacttgagcccagaaattttggactagcctgggcaactaggtcagacccacatctctacaaaaaataaaaaattagccaggtgtgtggcatgtactgcagtcccagctactcaggatgctgatgtgggaggatcacttgagcccagcatgttgaggctacagtgagctgagatcacaccactgcactgcagcctgagcaacagagtaagattatg

SEQ ID NO: 631704 - DNA, 644 bp, Homo sapiens
aaacctacaactcattggcattcctcaaagagttggagagagaggaagcagcttggaaaacatatttgaggatgttgtccacaaaaatttccccaaccttgctagagaggtcaacaggcaaattcagaaaattcatagaacccctgcaagatacactagatggtgaacaacaattcccaagacacatagtcgtcagattctccaaggtcaacatgaaagaaaaaatcttaaaggcagctagaaagaaagggaaagtcaggtacaaagggaaccctgtcacrctaacagcaggcctttcagcagagaccttacgagccaaaatagattagggccctgtattcagcatccttaagggaaaaaaaattctaggctgggtgttgtagcttatggctgtaatcccagcacattgggaggccaatgcaggaggatcacttgagcccagaaattttggactagcctgggcaactaggtcagacccacatctctacaaaaaataaaaaattagccaggtgtgtggcatgtactgcagtcccagctactcaggatgctgatgtgggaggatcacttgagcccagcatgttgaggctacagtgagctgagatcacaccactgcactgcagcctgagcaacagagtaagattatg

SEQ ID NO: 631705 - DNA, 603 bp, Homo sapiens
gctttgtaactagctgctttttaactctaaagttcccaatgtccccacaattttccatattccaagatgaccttgatggaagtgttcaatacaccctcataaagtkgctacttctactatgatcagagcagtcttcattatttatacattcattcatacacccataatgtctgaggggccactgtgtgcccggaactatacaaggtgtcctatggaccccaaagttgtactagaaaagtgtaagccttcagaggttcatgatcctgtgtggtacacaaggccagcccacatacctgccatataaggcagaagatgttttgtgttgtaccagtggcagaagtcatctgttgcttgaggattgaaagaagactctagggaggtggtaattttgagttagcaattaaaggacagtatatggattcatagcccatagaggctctaattcaaagcatgaacttcctcttctaactcttgcccagctgcaaaggaatcagaccttaatccttatatttgacttatttcttcaaaccaagtaagtttattttatttttctcaatgggtctgcctggcattcaaggtgttttactactgttccgacaaaaa

SEQ ID NO: 631706 - DNA, 587 bp, Homo sapiens
cagtggcagaagtcatctgttgcttgaggattgaaagaagactctagggaggtggtaattttgagttagcaattaaaggacagtatatggattcatagcccatagaggctctaattcaaagcatgaacttcctcttctaactcttgcccagctgcaaaggaatcagaccttaatccttatatttgacttatttcttcaaaccaagtaagtttattttatttttctcaatgggtctgcctggcattcaaggtgttttactactgttccgacaaaaatatcaaactgtactatattaacaggtagcaatgtaggcctcaaagaaaagagcaagctcaatagatttttgggtcccccattcttttgttctgtcattggcaatagttaccttgggtctggtgtctagcttccagagtcacaggaaagcacaggttgtagtggtcctgatggatagtatacaaggacacagatcattccygaccatgtatctccagataatcggtctagatcagctttgcactttctgtgaaactaaaagtctgtcacacaaaatggtccatggccactcactgctcagtcagaacaggtga

SEQ ID NO: 631707 - DNA, 534 bp, Homo sapiens
ttttgggtcccccattcttttgttctgtcattggcaatagttaccttgggtctggtgtctagcttccagagtcacaggaaagcacaggttgtagtggtcctgatggatagtatacaaggacacagatcattcctgaccatgtatctccagataatcggtctagatcagctttgcactttctgtgaaactaaaagtctgtcacacaaaatggtccatggccactcactgctcagtcagaacaggtgatgcaactgtttttccaagtgccagtgaaaagggcgaaagtcagtactggctgaggttcaggcagcagcaggcaaaatctgggattggctgctgccattgccacatgacttagcatcacaagcagacaagaaattgaaggaggtaagataacattgtcacccaagcaagagaggaaaggaatgaaccatgyctgttgtgtatcttctgctgagacatgtttcaatatttctttggtattagtctgaagacactgcgggtgtgtttcatcaaacagttacaggaaatatc

SEQ ID NO: 631708 - DNA, 636 bp, Homo sapiens
gctctgtcataaaaatgaaatatacccttgtatataggacacagaagctgccctccagggcttcacagtctaagggacacatagacaattaaatggcaactaaaatcagtaggatcagtactgagataaaggaaactatggcaatgtaataggtcctcacagaagaaagtccaacccagacccacaggtcagcagaggaagctatgtcaagcctgagaactggaggctcagcaggaactaagaagacaaagtagggtgaagagggtgaataggagtgttctgaacagaatagctcaatccaacataaggaatagaattgtagaagacaaggctaaaatggygaataggattcagattacagagggtcttgaaagccagaataaagatctggacttcatttagaaaatctgagcttgaattatttttcccaacagtcatttttccagttccttgtccaaaagcacacacagtgatatagccagccaggcaaggggcagcaacaaaggcaagagcagaaaagtgtcaaagaccatgacataattctttgcccttttacgtttgcttcatgcaaacatcactaggcaaatttccatcagggaagctgaggttttccttaggctccatgcacttagttgc

SEQ ID NO: 631709 - DNA, 499 bp, Homo sapiens
ggctaaaatggcgaataggattcagattacagagggtcttgaaagccagaataaagatctggacttcatttagaaaatctgagcttgaattatttttcccaacagtcatttttccagttccttgtccaaaagcacacacagtgatatagccagccaggcaaggggcagcaacaaaggcaagagcagaaaagtgtcaaagaccatgacataattctttgcccttttacgtttgcttcatgcaaacatcactaggcaaatttccatcagggaagctgaggttttccttaggctccatgcacttagttgcaaagccagggatggactttatgtatgtatgtatgtatktatttatttattttttgagaccgggtctcactctgtcacccaggctggagtgcagtggtgcgatctcggctcactacaacctatgcctattggactcaagcaattctcctacctcagcctcccaaatagcttggactacaggcacaggtcacct

SEQ ID NO: 631710 - DNA, 578 bp, Homo sapiens
cctggataagacctggagggataagggaagttacatgaaggaaataactttagaggggagtcctggggaataaataggatagttaagccargagaaagtggaagagatatgttattagcaaagagacaaaggtatgaagacatagagattagaaagaacctgacacagatgaaaaatgccagcgatttaacatagttagcttgcagaatatgaaaataaaatataaggctgaaaataggcagggactagaccatggaaggtcatgtgaaggtgtttggactttatcctatagcaatacagaacctctgaagaatagaagtaggagcaacatgatcacatatactgtagtctagcaacaaccccaaactggtggcttctttttttttttaatattatccatttctgagacaccggtttcaagccattttcttaccctaggctatatttttccatgatgtgactagtaccaattaaagttatgtgccatttaatcatatttgggtcaactatggactatggatatgacagtggtcccattcgattatgatggagctgaaaatttcctatcacctagtgat

SEQ ID NO: 631711 - DNA, 578 bp, Homo sapiens
cctggataagacctggagggataagggaagttacatgaaggaaataactttagaggggagtcctggggaataaataggatagttaagccaggagaaagtggaagagatatgttattagcaaagagacaaaggtatgaagacatagagattagaaagaacctgacacagatgaaaaatgccagcgatttaacatagttagcttgcagaatatgaaaataaaatataaggctgaaaataggcagggactagaccatggaaggtcatgtgaaggtgtttggactttatcctatagcaatacagaacctctgaagaatagaagtaggagcaacatgatcacatatactgtagtctagcaacaaccccaaactggtggcttctttttttttttaatattatccatttctgagacaccggtttcaagccattttcttaccctaggctatatttttccatgatgtgactagtaccaattaaagttatgtgccatttaatcatatttkggtcaactatggactatggatatgacagtggtcccattcgattatgatggagctgaaaatttcctatcacctagtgat

SEQ ID NO: 631712 - DNA, 585 bp, Homo sapiens
aatcttttattgatgattcaagaaatgcattccatttgagggttataaaggtgaacaggtcaactttcttgaccttagggaactcacagtcctttaaggagagacagacatgcaaacagacagctgtagctctgtgtgaaaagtgcaaaagcatagctctaagcagtgaactgtgggaccacagttcacatggacagagctaccaagtggcccagggaccagcagtaacatctgagcctgattcgaaggcaaagcagaagcagttccactcttagccccaagctcccctcactccttccctgccctctttcttccctcccctaatcctctggcttcatcccttataaaccaaggggacacacccarccagaacctctgtccctccctgctgtgctcagggtacggagtctggaattccctctcccacagccagacctgattctgggagccagcgcagacttcctccccaggttggtccaaccaagggcaaactatgtatggtacctgcccctcagcctgaggtaggggtggatggtgcctgcctgcgtgggcctcatgcatgacagatgggtgcaggtcagaaaa

SEQ ID NO: 631713 - DNA, 608 bp, Homo sapiens
catgtagtagattctcaaatgttggtcaagtttgttttctttccttgtccctattcttgttctgtagcacaaatacgtgtgatattacagttaggagagcaccagaaattgcactcatttttgcttatgggcagttactttttcctggatatatattcttaaaaattgacctgtaggagaggacaagattcaactataaaaataatyctatttcaaattcagtggaaaatctaaaaacacagttttcaaagcatatatgttgaatattagaattatattaaagatttataactcaaaaagtaggtgatatcactcatcctttaagatttaaataaacttgatttccaaaatccaaaatcttatggagtttctaatgctccccatcaaacaattagagggaaaaatcttattaatatcctttggcaaacccacctccaaaatcgtctccccacagtgacctccccacagatgccaaccttctgctcttctgtctgacccctcccttctttgacctctgggaggaacccaagttcctgtttctttatctttctttttaaatgtaaactagttatgtaaacctgtttattgtctcatttaaacatgtcatt

SEQ ID NO: 631714 - DNA, 570 bp, Homo sapiens
acatttttctgccttcaggtgtcatcgtcacaccagtaattgctgaaaggctcacccttttttcarttccagtgagcctccgtttttaaagctagcccttcctctttaagaatgtattattttgggctgggggcagtggctcacgcctgtaatccgagcactttgggaggctgaggagggcggatcacctgaggtcagcagttcaagaccagcctggccaacatggtgaaaccccgtctccaccaaaaatataaaaattagcccggcgtggtggcgggcacctataatcccagctactcaggaggctgaggcaggagaatcaattgaacctgggaggcagtggttgcagtgagcagagatcatgccattgcactccagcctgggcgacaagagcaaaactccctttccaaaaaaaaaaaaaagaaagaaaagaaaaagaaaaaagaaaagaatgcattattctgagggaaaaaaaaaccttccccattagccctggggaaatcctgaggagctttgaataagaattagcaaacttcaaaactccacatttctattttttataattgaaaa

SEQ ID NO: 631715 - DNA, 570 bp, Homo sapiens
acatttttctgccttcaggtgtcatcgtcacaccagtaattgctgaaaggctcacccttttttcaattccagtgagcctccgtttttaaagctagcccttcctctttaagaatgtattattttgggctgggggcagtggctcacgcctgtaatccgagcactttgggaggctgaggagggcggatcacctgaggtcagcagttcaagaccagcctggccaacatggtgaaaccccgtctccaccaaaaatataaaaattagcccggcgtggtggcgggcacctataatcccagctactcaggaggctgaggcaggagartcaattgaacctgggaggcagtggttgcagtgagcagagatcatgccattgcactccagcctgggcgacaagagcaaaactccctttccaaaaaaaaaaaaaagaaagaaaagaaaaagaaaaaagaaaagaatgcattattctgagggaaaaaaaaaccttccccattagccctggggaaatcctgaggagctttgaataagaattagcaaacttcaaaactccacatttctattttttataattgaaaa

SEQ ID NO: 631716 - DNA, 632 bp, Homo sapiens
gtcttgggtagtatctttatagcagtgtgaaaatggactaatacaatcataaagccatatttggttttaatcttgagattwataaattatttttgctcaatttttctggattatactgttcaattttgttagtaataaatagtgaaagcatttattttcaaagttatttgatttgttcatttttttggatgaatcgagttcataattttggattttctgaactatttttaggaacttagaaacaaaaagaataaagtaggaagtgttcagctgcacaaatgtataaaaatgaaatgaagaatagctgagtctaaaacccctcaggaaataagatagtagggtttcaaaaaattcacatataaaaatgcatcataaaatataaggttcttcaaataaatgtgttctcagaaatctcggtgggttaaaaaaaatctctcaagatggatttcagttaagatgtcaaccctgtcatatttcacataagaactgcttttgtagtaaattgttagtctcattcattcaatagatatttattcaatgtctgctgtaagttagactcaatgttgaggcatatttgtttatccaaagaatatctattgattgcctactatgttttaggcactgttacagga

SEQ ID NO: 631717 - DNA, 468 bp, Homo sapiens
gaattcatccaaaaatcaattaatgtaatgtcccatatcaatagaataaaaacaaaaatcatatgatcatctcagtagatacagtaaaagcatttggcaaaattcaacattatttcatgataaaaaaacattcagcaacctaggaataaaacctaggaataaaaataaccgttttcaaatcaataaagagcgtctatgaaaacccacagctgatggcatagtcagtggtgaaagactggatgcattcctcctaacatcaaaaacaaaacaaaaatttctgctctcatctctccattcacattgtactggaggtcctaaccaagagaattaagcaagaacgaatgaaataaaaattatccagataggagagaaagtaaaactatttctttttgcatatggtattatcttttatatagaaaaaccctasagaatactctaaaaaaacttttagaactaataaatgagttc

SEQ ID NO: 631718 - DNA, 588 bp, Homo sapiens
atatcttacgattataataatgactacataagaaattaaaatataattgtgttatgtatgtatacataataacaatcatttattcagtacttttcactttccaggcattgtgccaagcatttacacacactttctcatttaattcacacaacttgatacagtaggtattaatatcctcacttcataaatgaagaaactaaagtttagaaaagttaaataacttacccaagatcacacagctatagtgcctacctatcttgcatatatctaaataatcaaaaagataaataaattagttaactaaaatgtcccatcaccatacataaactgacttatccaaacagtagatgttcttggaaagagtttgctgatactattgtcttttacagaaacatcacctgtgtctccaacacaccaataattcttcctcaaaatggaatgctacytttatttagattctggttaattataaatgaatcacaactagtgaattgtttccttgaaatttgtcccaaaatttttagggaaaggtttataaaacaaaattgaggtttcaacctcataatttaaccatcatgtgggtcttga

SEQ ID NO: 631719 - DNA, 563 bp, Homo sapiens
ttgctgatactattgtcttttacagaaacatcacctgtgtctccaacacaccaataattcttcctcaaaatggaatgctacctttatttagattctggttaattataaatgaatcacaactagtgaattgtttccttgaaatttgtcccaaaatttttagggaaaggtttataaaacaaaattgaggtttcaacctcataatttaaccatcatgtgggtcttgagacatttattgacataagtacttcagaattacaaaatagagagatctagggctctgactgttaaagattaaaataaaattacttaagaagtttaatgaatgcaaaatccctttttatttgctgggaacactgagcaggaagttctgtggttgtttcattgtgtgctcatgaattactatgattatgtggtttaagacaatttatttttatttatatatgcttctttgaaatcactgctrctcacattgccctttattcatcatttttcttatctaaaaatataaatctttatgtttagtgacttcttaattcaattaaaatcctttgtctcaaaatttt

SEQ ID NO: 631720 - DNA, 594 bp, Homo sapiens
aagaattgttttatacttcataaacaaaataatcataccaacagattataatctgtgaccaaggttcacccggcaaatgactcctggcctctgcttttctgtgtcagtacctggaactgtgggtgagaggcgtcctccaacagacyggtctctgcctttcttttctgcccacctcctgttggctgcccccaaactgccttgtacatagaaatatcttcagttttcttagaagagatgctcttcttgaacatatccttacctcatcacctcgtctgcttggaatttcccccttcccactacctgtcactctccttccttctcactgcacccttcttgcaggtgagttctaattccattagcaatcagccctcaactaaagccccatccccatggaaagtccgccctggcccctactttcctccattttactctcattctcagctgcccaggcagagatgggctttccctcttctgccctcatttggacctttaaatacctttcttttttttactaattacactgtaaggtattttgagtgtatatctgagtctctccctggagattctaagactctggttaaggacaggttttat

SEQ ID NO: 631721 - DNA, 594 bp, Homo sapiens
aagaattgttttatacttcataaacaaaataatcataccaacagattataatctgtgaccaaggttcacccggcaaatgactcctggcctctgcttttctgtgtcagtacctggaactgtgggtgagaggcgtcctccaacagaccggtctctgcctttcttttctgcccacctcctgttggctgcccccaaactgccttgtacatagaaatatcttcagttttcttagaagagatgctcttcttgaacatmtccttacctcatcacctcgtctgcttggaatttcccccttcccactacctgtcactctccttccttctcactgcacccttcttgcaggtgagttctaattccattagcaatcagccctcaactaaagccccatccccatggaaagtccgccctggcccctactttcctccattttactctcattctcagctgcccaggcagagatgggctttccctcttctgccctcatttggacctttaaatacctttcttttttttactaattacactgtaaggtattttgagtgtatatctgagtctctccctggagattctaagactctggttaaggacaggttttat

SEQ ID NO: 631722 - DNA, 594 bp, Homo sapiens
aagaattgttttatacttcataaacaaaataatcataccaacagattataatctgtgaccaaggttcacccggcaaatgactcctggcctctgcttttctgtgtcagtacctggaactgtgggtgagaggcgtcctccaacagaccggtctctgcctttcttttctgcccacctcctgttggctgcccccaaactgccttgtacatagaaatatcttcagttttcttagaagagatgctcttcttgaacatatccttacctcatcacctcgtctgcttggaatttcccccttcccactmcctgtcactctccttccttctcactgcacccttcttgcaggtgagttctaattccattagcaatcagccctcaactaaagccccatccccatggaaagtccgccctggcccctactttcctccattttactctcattctcagctgcccaggcagagatgggctttccctcttctgccctcatttggacctttaaatacctttcttttttttactaattacactgtaaggtattttgagtgtatatctgagtctctccctggagattctaagactctggttaaggacaggttttat

SEQ ID NO: 631723 - DNA, 610 bp, Homo sapiens
caggggttgagtccagacctcattaccaagaatgctgcccagaggtgcttcaatcccatcccagcctctgcgctcatcaagcagggaacaaaaaagatacaggccttcacacttctcctagctggggacactgatgattccatgaaaatgtgagctcacaggggaaataagtgagacatccgaggagaacaagwtgtgcaaaagaaaattcacttactgaaaacgtatatctgaacacacagcatttacaaaaatttgtaatcatatggtaagtcagaagacaaatttaggtaagtctcaacaaatttaaaaaagcttgtatcattcagaccacattctcaaactataatgcaattaaattagaagttaattaaaaaattaattgaaaaaactgccttatttgaaaactttattaagggaacttgctactcactttctctataggacgtgatgagataacaaacagaactgtttttactgtaagaataaaacagatgtttttaaatctcaaaaattcttttatccttcttagtaagttcctaagctacttattaaagtattaataagttcttaggctacttattactgtattaataagtaatacttatta

SEQ ID NO: 631724 - DNA, 610 bp, Homo sapiens
caggggttgagtccagacctcattaccaagaatgctgcccagaggtgcttcaatcccatcccagcctctgcgctcatcaagcagggaacaaaaaagatacaggccttcacacttctcctagctggggacactgatgattccatgaaaatgtgagctcacaggggaaataagtgagacatccgaggagaacaagttgtgcaaaagaaaattcacttactgaaaacgtatatctgaacacacagcatttacaaaaatttgtaatcatatggtaagtcaraagacaaatttaggtaagtctcaacaaatttaaaaaagcttgtatcattcagaccacattctcaaactataatgcaattaaattagaagttaattaaaaaattaattgaaaaaactgccttatttgaaaactttattaagggaacttgctactcactttctctataggacgtgatgagataacaaacagaactgtttttactgtaagaataaaacagatgtttttaaatctcaaaaattcttttatccttcttagtaagttcctaagctacttattaaagtattaataagttcttaggctacttattactgtattaataagtaatacttatta

SEQ ID NO: 631725 - DNA, 587 bp, Homo sapiens
agtctgctttcttgcctctcattcttaagcagattgcacaacacaaagtcaccaaatatttttgaaaagattgcagtgtgaaaaacagagaccaaaggagagactttgaggaactagagacaattgtaggagcaaaagaaaatgtcgaaataaactaaagtatacttaacattaacattctttaaaaataagaagagactgggtacagtggtttgtgcctgtaatcccaacacttttggaaggctgaggcagaaggactgcttgaggctcagcattcaagaccagcctgggcaacatagtgagaccttgtccctacaaaaaaataaaaataaaaatattagctgggcatggtggcatgcaactatagtcccagctactcgggaggctgtggcaggaggatcactcgaacccaggagtttgaggctgcagtgagtcatgactgtgtcaccgcattcragcttgggtgacagagtatgccttcttttgtttatttaaacaaacaaataaataaatataagaattaaatataagaatataattttggatgtaaaatatgtcttatttatttaataatttcttatttattt

SEQ ID NO: 631726 - DNA, 597 bp, Homo sapiens
ccagctctgcttccttgccttcccattctatagaagaatctccagctaagattctcatggcagcacataaaagcaagattagtggcagaaactcatggtacttctcctactttcacgaaaaaaaaaatatgtcatacctactcatattccactgaccaaagcatataccgtggccaaactccaaatcaatgaggcaggaatgtataatttcctaagggaaaggacaatggaggggtgttaacaatcataaacagaaatacaatctaccacaatcatcagatatcagcatcttcatattattttgtacagggtgctggtaaggaaaggagagaagtatgatagaaaataaagctggctaggggaacacacagccagagcatctctgaaaatcartacaattttttgaatatatttgaagctttttggcccacagtgccctacttcccatctgtcctgcttggttttctgctttttccttctatgagacaattacctgacctccaggcataagtttgaaaagctggggcttttgccacatgttacaatatgtggtaatttggatttgaattataaataggaaaaatgagtttatgttac

SEQ ID NO: 631727 - DNA, 629 bp, Homo sapiens
aaatatcctgtgttcctgccctattcattcatgcatttttcaacaaatatttgctgtgctctgtgtctactctggagacgcacagattcataagaaaaggtacctgccttttaggatatcctgtcaatagactgttagaatagattctaatttgtttgagataaccaccagagttcactcttggagcccaggacagcaatctttgatccagccttgggtcagggaagggagggagaaagagatggtggtgagtgccctcaagccaagagtctatctcacaacattgctagaccatgcagaatatatgaaaaaaaaatatatatatatrtatatataacctgtaaaggcataattacaaataagcattatatcttggtatgtttttctgtatggagaaaatgtaatacagaataagttgaatagttaatatctgaggtgatcttcaaaatggtgaagaaggtaaagaatgggagaaggacatactaaggaaaatgtattttccggtaataaacagaggaaagtatttatgtcttaaagtggtcttgttggctaggaaattggaagagggtgatgttaccctgtaacctggtagggcttttcctctcagggcttaattataactgagtagg

SEQ ID NO: 631728 - DNA, 626 bp, Homo sapiens
ctctaaaacaaaggcagctggatagatcaagcccatttgcaccaccaccagagacaattcacagtggttgcctacctggacccctgagtgtcttcccatagaaaggacagctgttcataactgcttcttggtacaggaagtatgttgaggaaaaagggagctcaaagagctggattacctaacgcaactagaatttaatttcgacagagtcacaratttttgctttttttaaactactgtatttctagcacttaaaatttagtgattagcatataacacgctagataaacattctgttggatgaatgaataatggtgcttcccactaggaaggaactttagtctttatagtgtcacagaggatatatatgccaatcgaccacccaggaagtcccaggaccaggaacaaagtctgctggagatcatccaggagatattctaggttcaggtgggtaactgatctcatccttggaagtcaaatataatgggaaggctaggcaagtgccaatttcacaggtaggttctgaagtccaaaaactcacatggttaggaagagtagcttgaatgagcagtgaaggcaatttcagcacctgtgtctgagactttttttttctctgcctgctggac

SEQ ID NO: 631729 - DNA, 588 bp, Homo sapiens
ctattttgctgcaggccagttccagtagacagcaaacctatcaaataaagagttacagaaaatacatttttgcataacttcccctttgaaaatgcagtaccttgattttcctgtttaaaaacatgttacaaaacacacaaatcatagccactatgagtagctttatgcattaacacctaattcatcaacacactgaaatcaaacctttgggtttctttgtttaattcatgartttctctccatcctattcattacacagcctttctccttcactaataatatctacctcatggggctttattctgtaggatgctgagttggtcccattatataaaaacaaatattttctgctgagtatcatagttcattttaatggtctattaccacctttttgaaaatgggatatttgtacatggtgacactctataaagaaactgttactagggaattagtcgtatgttcctttcatcagagaatccttaatggtcatattcaagagctctaaggtttgtggaacttctgagtgcatggcagtactcaagatccaggaagaaaacaaagaacaaacctgcaaagaaaaatggcccc

SEQ ID NO: 631730 - DNA, 588 bp, Homo sapiens
ctattttgctgcaggccagttccagtagacagcaaacctatcaaataaagagttacagaaaatacatttttgcataacttcccctttgaaaatgcagtaccttgattttcctgtttaaaaacatgttacaaaacacacaaatcatagccactatgagtagctttatgcattaacacctaattcatcaacacactgaaatcaaacctttgggtttctttgtttaattcatgagtttctctccatcctattcattacacagyctttctccttcactaataatatctacctcatggggctttattctgtaggatgctgagttggtcccattatataaaaacaaatattttctgctgagtatcatagttcattttaatggtctattaccacctttttgaaaatgggatatttgtacatggtgacactctataaagaaactgttactagggaattagtcgtatgttcctttcatcagagaatccttaatggtcatattcaagagctctaaggtttgtggaacttctgagtgcatggcagtactcaagatccaggaagaaaacaaagaacaaacctgcaaagaaaaatggcccc

SEQ ID NO: 631731 - DNA, 539 bp, Homo sapiens
gaggcactgtggcactgtctttgtgttgttataagggaatacttgaggctgaatgatttataaagaaaaaaatttttatttggctcatggttctgcaggctgtacaagaagcatgacaggagcatctgcttctggtgagggcttgacattgtgtgtctgtgtgtgtgagatatatatatatatacacacacatgtatatatakagagagagagaaggagagagagagaaagccagagtgagcgagacagggcgggggttgagggaggtatgccaagctcttttcaataaccagttctagcaagaactaagaatgagaactcactaattaccaaaaggaaggcacccagcagtgcatgagcgatccaacctaatgctccaaacacttcccaccagcccccacctccaacattgggtatcaaatttcaacatgagatgcggaggagacaaacatccaaactataacggatacaatagagaaaaatgaaataaaatgaaagtcaagaagctacagtcttccccttagatttcaatttctcgc

SEQ ID NO: 631732 - DNA, 539 bp, Homo sapiens
gaggcactgtggcactgtctttgtgttgttataagggaatacttgaggctgaatgatttataaagaaaaaaatttttatttggctcatggttctgcaggctgtacaagaagcatgacaggagcatctgcttctggtgagggcttgacattgtgtgtctgtgtgtgtgagatatatatatatatacacacacatgtatatatagagagagagagaaggagagagagagaaagccagagtgagcgagacagggcgggggttgagggaggtatgccaagctcttttcaataaccagttctagcaagaactaagaatgagaactcactaattaccaaaaggaaggcacccagcagtgcatgagcgatccaaccyaatgctccaaacacttcccaccagcccccacctccaacattgggtatcaaatttcaacatgagatgcggaggagacaaacatccaaactataacggatacaatagagaaaaatgaaataaaatgaaagtcaagaagctacagtcttccccttagatttcaatttctcgc

SEQ ID NO: 631733 - DNA, 492 bp, Homo sapiens
tgggaagcactagcattcattctgaatccatttaactatgatacaaacaccctagaatgcaggtgccctttgcactagtggtaaaatcagcctttggtaatcaaggtatcagaaccagcctgtttcttcttctatgaagggggtttcttcttctatgcatctccaagttcctttttagtattaatacgcattagcattctaaatgacctctattctcaagtgcttataatcaaaagtgccaaataagatgacttgggtataagagcatagkttttgtaggcagtaagatcttgttcataatctagttcctgtttttactagctatgttaccttgggtaagttacctaaggtttctaggcctcattttcttcatctgtaaaaggggctaataattcctactttatggcattattgtgagaatgaattgaagtatgctaagtactaagcaccataactatcacatggtaagtgcccagtaaatggtagatgtaa

SEQ ID NO: 631734 - DNA, 546 bp, Homo sapiens
aggagctcagatttttatcctgaatgtatgggacactgaaggtgtttacaaagccggtgataagatctggttagctcaattagctaattttagtggcagtgagataaaatggattttaaaggaatccagcttagagcacggcagccaatcataggagtatatcagtacattagcagagagctgacgatgcttctagccagggaagttttatagacagagtcattgtgaggarggatgatctcaaagacatattgacagggtgtagttggataaacttgcatctacccagttggctgggtagatgctggttaatggcagaaaaacaagcaatgggaaaagtcagataatgcccaggtctctggcttgggcaagtgtggagatggtggttccagtcactgagataggcaacaaaggagcaagagcaccttttaagaaagaatggtaggatattctataattgaggtgccaagagcacacggagatgatgatcaatggtcagaaaatgtggaatgctatggacctctgaaactttcactgtgatagcag

SEQ ID NO: 631735 - DNA, 480 bp, Homo sapiens
tgtctggctaatttttgtatttttagtagagacggggtttcgccacctagcacaggatagtctcgaactcctgtcctcaagtgatccatccgccttggcctcccaaaatgctgggattacaggcgtgagccaacgtactcagccagaggttggttggcgtttctgatctggtgtcacaggaacacagaagtaccaccaagatccatgcactggttacttatcacgtatggttcctttctttgtttctacctgactccaggtggyctagccatgccatttcctctagtgtttcctgtgaggtaaaaccaaagtggccttcctgagaagcatcttggaatgctagggatgctatatgactgcctccagttctcatttgcccatgtggaaactgggcccaggaagatattctcactctgaatttgtgctgacttgggggagtgggaggagcagcacagttagattaaggccagtcttcttacc

SEQ ID NO: 631736 - DNA, 511 bp, Homo sapiens
aatgccactgcactacagcctgggcaacagagcaagactctgtctcaaaaaaaaaaaaaaacttcatcatatgaaatttaacgtggaaatagtagttatgttggtgtcaataatactttatcgaatgatatatttattgcatatgtcacatttgatgatcattctagtgatcatcaaatcactagagatatagagatatttaaaatatagctcctgccttcaaggatttaataggcttgtaggggaagctcacgtgaatacaactaaatataatccatagcaatgtgttacatgatctgggtcctattctcataagcaccarttttgttatcagacccatctccaatataaatttgaggtagagcatcaaagcctgtcctggaagccttataatctgacatttgaacatgagtaataatcaatcatttatcaacaattatgtattgagcacatactatgttctaggtattgtgctgtttttctaagggttggaaaccttcattcaggggca

SEQ ID NO: 631737 - DNA, 577 bp, Homo sapiens
ccctttgatgacagagaatatgcctgggttataacttgtactactaatgtgtgaagagaggatgtcccatcattagacatccgctggataacatttttcatttcagggtccagcacagcgcttatcatatgtgcatgcagtaaaggtttgatgattctaatgaagtgaaacccacagtataattcagcaggaactgactataacctttatattaatatttgctttttttccttttttttttttaagtgtaaaatcttgtgctctgaggttgttattttttgaaccaaagttgaccttccaggccatkggtttctagaatagagttttttttttctttttacattatgaagctttggattctggttatttctgtcagactgaaacatccaagtaattcatactgcgcctgtcttctgggtgatgagaagtctgcagaagttatgctggccccctgcctggctctgacaaagataaagtaaatgccaaagaattaaagtccaaggaagttgtcaagaagttactttcttctgtttaccctcatacattttcttaattgccagcttctataaacaactgg

SEQ ID NO: 631738 - DNA, 557 bp, Homo sapiens
agctatgtaagttaagagcagctaccatgtactggggcttaccacaggaatgtgttgttcagtatatctgtctagtcttcctgacaaccctttaggttaggggttaataccatctagttacaggtaagcaaacaggggtttggataatgtaaatgacttacacaaagccacatctagcaccagagccagaatctgtttccaaactcggatgttttgctctctttctaccaaccatctgtgaggcatagtgccaggcacccaggtggcacccaaagagtgctagttttacccacttcctacccccacacccttcttatcacatttgkttttgtcttccataagcaattttgcagctgtgccagccagccacatgctgatttttttttttttttggtctttctgcaattttgacagcctcagttaaaaacaaaaaaacaaacaaacaataaaacatccatcagtcttgtcattcatacttctggaacaacataaatactacttctggggtttcctggagtctcaaagacatcaaggtggggaaggggcagacacttctt

SEQ ID NO: 631739 - DNA, 592 bp, Homo sapiens
tggtggcacgcacctttagtcccagttagtctggaggcaaaggtaggaggatcgcttgagcctgggaggtggaggttacaatgaacagagatcacaccactgtgcttcagaaatagaactttttctaccataactatatattcaagataggtatgagacccccaaaataaatataaaatgagtatcttctcaaatctccattttacaaagtgctgctgtaattttttcaacgacctacattttgtgwtctactttttgcatgaaaggtcatctacatgatcccaaataactttcatagcagcagttgatataaatgctgagtttatattttggaaaggtgcccaaatcctgaggtaggaggtttgctttaaaccagtaatgatcacatgatgtttcaggctctgttactaaataatactttatacccagttgtatccatggaaacctgcaacagttccataattgcagtaggctctaaactagtccctctgtggcaggtctccagtttatcactcacactgctgtcaaagtgatttttctgtaagacaaatatagcatgtcttttcctattttatacctcataaatcccaaa

SEQ ID NO: 631740 - DNA, 620 bp, Homo sapiens
cctatgcaatttaggtaggaaaagctttgtatatacaaagctgcaggagttggctttagtttactataagtattatttttcaggactttgctgtgttacttggatgaattggttactstaagtttgaaagtcattgaggaaattttagtggtaatttaggagtaaggtttggtaaattcaagctcctgtagaaacttataaagaaatcaacctgtcttttttttttacacacacacacacacacacacacactctacatatacacacacacacacactctacatatacacacacacacacacacgcgtgcgtatatatacatatatacgtatgcatgtgtgtgtgtgtgtatatatatatataaaacatatccacacacacatacacacatgcatacatatatatacatatatacgtatggatgtgtgtatgtgtgtgtgtgtatatataacatatccacacatgtacagtttcattctttgacaaaaatggacatttttacttcctctaataggaactggcatttattcaacaaactcgtatagaatttattgtatgcaggtaatgttctaagcattttacaaatattgaactaatatataatcttcataatctgatga

SEQ ID NO: 631741 - DNA, 620 bp, Homo sapiens
ctgtgtgtgactctaacacctggttccccagatcagtttccccagagggaaaagtgatcagaagtaaaaattttgtttattttttaaatgtaaaaaaattttccaaatcaatagttgtttttttttgkttttttttttttgtttgtttgttttgagacagagtcttactctgtcacccaggctggagtgcagtggcctgatcgcagctcactgcaacctccacctcctgggttcaagcaattctcctgcctcagcctcctgagtagctggaattacatgcgtgcaccaccacgcttggctaatttttgcatttttagtagagatggggtttcaccacgttggtcaggctggtcttgaactcctgacctcatgatcgtcacgccttggcctcccaaagtgctttgattccaggtgtgagctaccatgcctggccatcaataggtcttttattgtattgtttatatatcacaaataggtcttaggaatcatccagcatcttgtttctgtagctgggcaactcttagaccttattcatcatcctgcagaactgttcctttttcagacacatagataccatccaaaagttttctgatatctttgtttttaactgttgtggcttg

SEQ ID NO: 631742 - DNA, 561 bp, Homo sapiens
ctcatgactccatgagtagaagacagaagccccatgtttggcacctcttctggaccttgcccaatggacacctttctttggctgattttaatgtctatttttttcctttaataaactgtagtcgtgaatataacagctttcactgagttctgtgagtctttctagtgaatgataaaagttgaaggtaaccttgggaatcccccaaacttgcaattgatatcagaaaggagggtggtcttatatgaactgtgggccctcatatacctcatagttggtttagcatcttatagagacattattgaaaatcaacatccaaatgataattcccagggtgagaaattyggaaaaagagtgaaggatagtcattcagtaacttacttgatttcaccctttttattcttaggatctgtgatatctgcatgtaagttttgtttcttgctccagataatcataaaagcactgtcatgccccaaagagatagtagagcttctagcatctctagatatctggaaaacatcaagagattttggatccagaagtttattggtagtcaagagatat

SEQ ID NO: 631743 - DNA, 566 bp, Homo sapiens
tactgtgttcggatattttgaatgtgtaattgggccgggagtggtggcttatgctgtaatcccagcactttaggaggctgaggcaggcagatgacctgatgtcaggacttcaagaccagcctggccaacatggcaaaaccctgtctctaccaaaaatacgaaaattagcgggcgtggtggcgggcatctgtaatcccagctactagggagactggggcaggagaatcacttgaacctgggaggcagaggttgcagtgagctgagattgtgcctctgcactccagcctgggtgacagagtgagactccatctcaaaaataaaataaaataaaataaaataaaataaaataaaatrtgtaattgatgagccacttggcttccaaaaagagcatataaatatagcaggtgtggaggagaaaatgcttctagagcactgcttagaaaaccttgggccgtagttgggtcttgctgctcctgtacatgttcctcttgcatagctcttccctgctagtgcagagctaactttgtgtttccctaccttcagccttgttgctgattttataagca

SEQ ID NO: 631744 - DNA, 537 bp, Homo sapiens
tgagttctttctttatattttcagaatgaggaatactattgaggttttaaaaatatctttattcagcattcatgtgtctgcttctgtaaaataatggtttattgctgtgtgcttacacctatattgtattatctttttcttattgatttttaagagttctttatatcttctggatactatccactattcatcatagatgtcttctcccactttgtagattaagttattcattttaatatgatcaaaattattctttctttatagttgacacattttctgtcttatttaagcaatattttcctatcccaagatcataaagatataaaactgtaaaatttttatatttaagtatttaatgagtctggtgttgattattttgtattcttattttccaaataactaaatatttctcatagcaacatgtgttgaataacacttctttcttctycccttacttatctgcaatgctcactttgtcctatatcatatttctatactatgtgagcctgtttctatgttctgtattctgtttcatgg

SEQ ID NO: 631745 - DNA, 573 bp, Homo sapiens
gactttgtttatcataacagctttgttaaatagacagggaaatattttaaagatcaacaaacaggtaaaaaatgtatatatatttgtcattcactatttagcacctacttgtctgactccaagacaactggtctccctractacagttcactttactgacagaaagattgttctaaatgcagatttaatctgctttctctattatgtaaaacctatttctctctgttggtattagttaaaattcagacactataatatttgcctataggcaagtcatggtctagcttctccttgtctgtctgaccttgactttaattgccccttccacaagtgtgtcaggcttttacatgtcttcttttgcccacacggtttcttctgttggcttatgctgcagtgtcagctcagacgttacctctttcataaagctgccactgacattctccacctctccctaaagatactcattttcccaatcttcccagcctctattattttatatcaacacagcacttattggtttatagtttgcttctacttactggacttactgtccatttattttcctatcacctg

SEQ ID NO: 631746 - DNA, 592 bp, Homo sapiens
actgcgagaattacggtgcttcttttgtaactctgagacaagatagtatctctctttttaacaaacaataacacttaacaactattgactattattactacttctcaagtaatgtttttagtactttatakgtattaactcatttagtcctccaaagccactgagatagggtctattattgcacccaatatatagataagaaaaccgaagcacagagaggttaactaacttacccatgaacacttagctctcgagatcagaatgcaggattgaagccaagcagtttgctcttgagtcagcattctaaaccactccaatgcattgcctcccagagacactttgtgccagaaaccaaatggtaggtgttgtcttactatatgtagtaacatcacgtagcattaagaggcagcgtagggatcaagaacagagattctggagccaaactgcctctgtttcaattcaggttctgccacttactaaatctatggccctgtgccacttactagatgtgtgaccctctttctatttgaatttacttatttaaaaagtggagcagataatagtaagtgcctcataagattattatgggaat

SEQ ID NO: 631747 - DNA, 592 bp, Homo sapiens
actgcgagaattacggtgcttcttttgtaactctgagacaagatagtatctctctttttaacaaacaataacacttaacaactattgactattattactacttctcaagtaatgtttttagtactttataggtattaactcatttagtcctccaaagccactgagatagggtctattattgcacccaatatatagataagaaaaccgaagcacagagaggttaactaacttacccatgaacacttagctctcgagatcagaatgcaggattgaagccaagcagtttgctcttgagtcagcattctaaaccactccaatgcattgcctcccagagacactttgtgccagaaaccaaatggtaggtgttgtcttactatatgtagtaacatcacgtagcattaagaggcagcgtagggatcaagaacagagattctggagccaaactgcctctgtttcaattcaggttctgccacttactaaatctatggccctgtgccacttactagatgtgtgaccctctttctatttgaatttayttatttaaaaagtggagcagataatagtaagtgcctcataagattattatgggaat

SEQ ID NO: 631748 - DNA, 544 bp, Homo sapiens
aagaggagaaaaagaaatgcactgaagacattcaaaaaagaggtcagttatgactagaataataggaatggtttcctggagagaagcagaatttgatctaaggcttgaatgatggggttgtaaattccacagcatgatcacaggtgcagatgtgggaaagaaaagtataatgaaagatcagtgagcaaacctatttgaagagaacttaggagccatgtaaggaaatttcagaccagaggcctagaaaggtaaattttaggcagagagtcatgaatgtcaaattaagaagtccaaacacctttctaatagacaggagttctgggattttttgcagaggattacatggtattacagatttttccttataaatgggkgccattgacagtgaagagttctaggattttttttttttttttgcagaggattacgtagcattacagattgtccctcataaatggatgcttatatgcaaagatgttgaatagtgttagcaatggaatgtgaattaaagtaatgtggcattttcacctattagattaataag

SEQ ID NO: 631749 - DNA, 544 bp, Homo sapiens
aagaggagaaaaagaaatgcactgaagacattcaaaaaagaggtcagttatgactagaataataggaatggtttcctggagagaagcagaatttgatctaaggcttgaatgatggggttgtaaattccacagcatgatcacaggtgcagatgtgggaaagaaaagtataatgaaagatcagtgagcaaacctatttgaagagaacttaggagccatgtaaggaaatttcagaccagaggcctagaaaggtaaattttaggcagagagtcatgaatgtcaaattaagaagtccaaacacctttctaatagacaggagttctgggattttttgcagaggattacatggtattacagatttttccttataaatgggggcmattgacagtgaagagttctaggattttttttttttttttgcagaggattacgtagcattacagattgtccctcataaatggatgcttatatgcaaagatgttgaatagtgttagcaatggaatgtgaattaaagtaatgtggcattttcacctattagattaataag

SEQ ID NO: 631750 - DNA, 614 bp, Homo sapiens
tgtctccccacccttctcattcgtgaaaaaaatatgtcttccacaaaactgtttcctggtgtcaaaagggttgaggacttctggtccaatgtgtaggccatagagctggtctcataaaaagaatgttctaggggcagggaggcaggcttgccagtcccatggctatggctctttgctcttttctatggctccttacagcatttctgtctgtagtcattccatcaaagcccctgtttgccattgcttgattatctcacacatttttagttgagttcagtaagctgcagtgctctaaaggatcactgttgtgaactttttggccattagattaaaataggtttatttttattattactatgattatcattgttattacaggtctgttgggagatggattagcacattaaaacagtcatatcaggttttaatatctgctttaggctttactagctgtgtgatcctaggaaagatycttaatccttctggccttcagttttgtcatatggtaaatggggacaataatgactacttaaagaatcgttgttaaggttaaggataaagataacacctggcacagagttggtgctcaataaatagcaattattacaaacaaa

SEQ ID NO: 631751 - DNA, 435 bp, Homo sapiens
gcaaaatcaaattacacttgctttttggtgataataggaaaatargttgttttaatatatgtagatgggatcactggtatatggtttacagagctaaatttagattgaaaatagaatcatagtgtttatgaattgaaaggaaagcttaatggaaatctactcaagcttttgtctctttcttatttagaaactgatagaaagattgagtgaattgtttaatatcacaaagttttcattatttaatataattactttatgtctttctgttacttaatacctttatgaaattgggcaagtcagttaaattccctattttttttttcaccagtagaatggagaaatggagaaaataataggtatttcttagagttgtttagagaataaactgagacactgcatgcaaagtatggattttatggcagctattttactgtg

SEQ ID NO: 631752 - DNA, 435 bp, Homo sapiens
gcaaaatcaaattacacttgctttttggtgataataggaaaataggttgttttaatatatgtagatgggatcactggtatatggtttacagagctaaatttagattgaaaatagaatcatagtgtttatgaattgaaaggaaagcttaatggaaatctactcaagcttttgtctctttcttatttagaaactgatagaaagattgagtgaattgtttaatatcacaaagttttcattatttaatataattactttatgtctttctgttacttaatacctttatgaaattgggcaagtcagttaaattccctattttttttttcaccagtagaatggagaaatggagaaaataataggtatttcttagagttgtttagagaataaactgagacactgcatgcaaagtatkgattttatggcagctattttactgtg

SEQ ID NO: 631753 - DNA, 538 bp, Homo sapiens
tacacatggaagagtttatttgctactgatgataaattggaactgaatgcatcatgattccaacctgtygatgcatgccatgtgaaacaacagtcctctctctagcaggactgggtttctttccatgcagaggttttgtgctgtgaggtttgttgttaatggtgtctgtacggttcctttgtctttcttgtacataatgaaaattgacctaaggtaacacatcttttctttgtctctgttactaagtcatgaataaattagtcttgctttctactctgaggcccagatcaatattctactggaatgttgattgttttagtgaatggaaatgaactggcagaatgccattcagaatacttgagcacaggctaatgaaacatttgcatgggtggatgaaaaggccccctgatagaaattaagagtaacatttgcatagtttcctgctatttacaagcacttgcacatatgtttaattctcacaaccactccatgaaaaaaaaaaaaaacaaacaaaaaaaaacaaagtacagtttggtca

SEQ ID NO: 631754 - DNA, 549 bp, Homo sapiens
atgaaaagactagtggcatattaaaacacatattktaagaattaaatgagattataaattaaatatacaggcagttaatatgatatatgctaagaagtactggctgctgttattactgttatttaaaacagaggaaaaaacaatataataatgtgctattctggggaatgtattaccctaaaatacatatataaatacacacacacacacacacacacacacacacgtgtatatatatatatatatatatatatatcttcactacatagttttagcattattttctaagctaagaagacactaaaaatattatccaggagctcttatggacatttctagtctaaaaaatgtatttttattctcttatttaacactttcactgagaatatcttcaaaattgaagatttggctagtttgcttatgttcattgttatcaaatttacctaccaaaatttgttttttctcttaactcaagctcttgagacccaagtaactaatcgtatgctaatgttttgagaaaactatagtttagtgtggggcattttgtgg

SEQ ID NO: 631755 - DNA, 581 bp, Homo sapiens
tcaaacctctctctgttttctcctctggaatgtagggctatttaggccaatattccaaatatgtgagatgaaggaataatgtgactttttaaatgtaatgttaccatacaatgccattcttgatgttatgtttgaataagatctgattttgtagaaatttttatttccttgatattttggttagctatacttgatcagttattttgtcacagaataattttattctgcaacttcaacatcttgtagaaagcgttctcaaaatgtctcaatacacatcaatttttacatgcccatgaaactgaagactgcttttgttgcttgctatttttgttcattttttttttgcacttagcattcatttatgtattctgaggttggctgaactggacactcctatttgatttcagtgtactccaaattatcttgagtaattattttctcttgatgctataatttataaaataaatattattgttttatactgtacaaataawgtctttaatgaacactgtaaggtttcacccaagttcttcttgctgggttaggaattaatagcaaagaaagtaaaggaagaaaagtag

SEQ ID NO: 631756 - DNA, 606 bp, Homo sapiens
ctaaaatgtcctgtaagaattcaacagtgatgaattgtggcagaaaaacaaaaaaaacgcaacagtatattcagttgacttttcataaattaactgtgtcttcatctttaaagcaatgtatatgtaaaaggattcttatatatgtcattaatttcaggtatcttatttcttacttagaagaacgtttaattttttcagatacacatctttggatatatgctataaaagaacaattaaacttagaacgaagtatatgcacttattacatatgatgaagtagactctaaagtaaattagattttatgaattgtatattttacaattacttataccaaaaagtcgattgtattttgtcatttaaatcatagatgtttgaatctttgttctgccacttatttctgtttagcaattggacraatagattaatctttctggaccttggtttcttcatttgttgactcaatttaatatattttatattgtgctgttgtaagaaggaaatgaactaatacttgtaaagtacctagctcaatgttcacaggcagtctgaaatcagaaacagagaaagtgagataattttgtatgtgaaagacaaacactatgaat

SEQ ID NO: 631757 - DNA, 606 bp, Homo sapiens
acctacatcagaataatgaggatattatatgaattcaatgagatggataaggtggaaatgcttaggaaataaaaatattgtatgtttacaatgtagttttcttacaaatattagttgcaaagctgtattctcaaattactaagattgtaaaactgattcgttcaagtgctcacatgaacattttcttttatatatgcaatgttgtctttccatggtgttttgtgttctcccatcataacataaccacagctctcttaaggagaataattttcttgatgagaagacacamtggctgagatgacctcagtcttaagaaccagatcaagtcttccttcccttctccacctgctaattttcttcctttctttctccaatacttgtttggctcctatgatgttataggcaatgtgacaattattaataatatgatgcagaggtgaataagggattgtgttctcttagtaggcctgtggtctatttgaaacttctacttaaaacaattacatgtatggtatgacaaaagcattaatcatggcgccatgaacaaaaaacccatagagaggagttcatctgaatttccagtttgggaatgtcttagagaaaaag

SEQ ID NO: 631758 - DNA, 593 bp, Homo sapiens
gtggtaagaagtctgctgaaaccagagctacatcggggtcccagcagaggagtgtcagcaaactcttgcctctgaacttcatgccagcacacactactaaagtaagggaatgaatgtgatgaagcaaaggcttggtgtgaggtagctttgcatccaacaaacatttgtgccatgttcaaaagtaagtaagatccaggccccgatattgaacataccagccagctagagagagaagtgaataaatattacaattcagaayagcacgtcctttaatacagttggaaaaatggtataaatgacaggacttactaaatggtgactataggcaagatttattatgtaccattcattatttgattatatcctactaatgatcctgtgaagaagctactattttattcccaattacagataagaaagtagggatcaaagactggcatagttagcaggtgaaaaatagtccctccccccaggaaagtgatcaatggtagactgcaattctttaagaaaacatttatgaatgctttagatgatgtagggcatttaaaggtaagttatccatagcccctgccctcacagagtttataataagt

SEQ ID NO: 631759 - DNA, 467 bp, Homo sapiens
tattaatgttataagacaccacttcatattctattaaraaagcattcagtcttatacacttggtcatctacaaacagaaaagctgagttataaccaacactgaatttgcatgaggtacctaaggctaaagatcttttctgcaggaatgccttagaattctggagtgatggagatgccaaatgcctctcccaagaaaggctagaagagacaataagctactaattcctctgtcctcttcctcactatgccccatcctgttattgcatgaaagagccaagagaatgcctgacactgagaggagcaggagacattttcctgagacccaggtggaaatatttgctgtaatatcccataagttaggaggacttgaacatatactggtggaattatcacttagggagcaggatcatcactcttgatgcataatgtgtctgcttctgtcatgatagtgcaagataaatactcaa

SEQ ID NO: 631760 - DNA, 565 bp, Homo sapiens
aaatgtttgttgagtaaattaatgagggaaatactgttatatatccaaagcattgattagaaggtgaaagaatctacttttctctgtgtactcaacttgggttctagcatttaraaagttagtaactaagaattatgtataaaactgctagaagacaactgacctgaaaagacaacaatacatgcaaagacagtgttaacatttccttttattctcaaaccagcagtacaagctatggtatttgcttctgctctatggagaggctacctttgtccaaagacactcagctaggaagcagaagagcaaaaatttgaatctaaatatgtctggctgcaaagcaaaagtttatttcaagcccatcagattagctaaatttttagacaaatatttgggaaaggttttaagtgaagaaatgccaagctctcacaccccagtagaaatgatttcctggatttcaagattagtttgaataatagaatagtatcctttctgagaggaccagcatgtaaggataggtagattcaccttggaattatgaggaagtgaggaggcagggtgttggtta

SEQ ID NO: 631761 - DNA, 558 bp, Homo sapiens
gaagtggtcctcaggacagtaagtcactgctttcctatatgattattgaatacatttctcaaattgacttttacatttaaagaaaatagaggtttagcaactgtgtgaaataaatagaaaagaactcatttcaatgaagtcatataatttgatatgcagtgctgttctaatagatatttatggatcttgttggccactgcatcccagtgtcctgactaatgcctggcacatagttgatgcttgataaatgtttgttgagtaaattaatgagggaaatactgttatatatccaaagcattgattagaaggtgaaagaatctacttttctctgtgtactcaacttgggttctagcatttaaaaagttagtaactaaraattatgtataaaactgctagaagacaactgacctgaaaagacaacaatacatgcaaagacagtgttaacatttccttttattctcaaaccagcagtacaagctatggtatttgcttctgctctatggagaggctacctttgtccaaagacactcagctaggaagcagaagagcaaaaatttg

SEQ ID NO: 631762 - DNA, 578 bp, Homo sapiens
aattctggagtgatggagatgccaaatgcctctcccaagaaaggctagaagagacaataagctactaattcctctgtcctcttcctcactatgccccatcctgttattgcatgaaagagccaagagaatgcctgacactgagaggagcaggagacattttcctgagacccaggtggaaatatttgctgtaatatcccataagttaggaggacttgaacatatactggtggaattatcacttagggagcaggatcatcactcttgatgcataatgtgtctgcttctgtcatgatagtgcaagataaatactcaaacaggagctggcacatgtgagggcagttcaaggtgaccatgtaagagactatctgaagaagtgaggatgtttaaataaaggatagacgatgctgaggtaacaggggagtcattactggargcaggaatatggaaactcattacttactggtttcaaataactgactatgtaaggagactttggtcttgctctgttgattgcagggatttcaaggtaggcattgggtggaagttaccaggaaaatcatttcagtttaatgtaagtt

SEQ ID NO: 631763 - DNA, 597 bp, Homo sapiens
tctgggtttcaattttcttacccatacagacatttcttaagaacttttatttttaaaatcattggaaacataggttctcttaaaagccaaagtaaaggggaaaaagaaagaactgactaattataatgttaatgttttccttccggtttccagactttctatctgaagtattctccacatccaggatggtcttcttttcttatacacaaacagccaacccatcatcaaattattctccttggtaaagctcmtatatatattatttgttatgcttaataaatagctctcatatttattctggaaactgtatcagttgagaagcaagtcagcaggagaatgatagtaccacccttgttactagtaaaggtcagactagactggaatatgtagctcttatatgagattcaagtagatctactgcctttctgctatgtagctattactctatctggatagagaaaaaacccactcaagggccagtatgggtacccagaggaggcacacatatccaggaaactacctcctactgatttaagtggacaagggaggagaaagaggccagagtccctgtgcataaatcctttggcaattaattac

SEQ ID NO: 631764 - DNA, 576 bp, Homo sapiens
tcctcttgggaacataaccccattggcctgagaactatcctccatcactcacagtggctgcagcaagccccacccaaggagaatctgagcctagaccctcttaactctgccccaacctgatggtattttcctacttgccctggtagttgaacacaaaactyagaaactcttgggagctttatggccctgccaatcacctgagtatccaaaatacttaccctgaccatcttagggcaagcttagagccccctacgactactgcagctggtgctctcttgaaagcaccatctcctggctagaggccaaccaactcaggccaccacagtaactcatgacagaataaccctgatcccaggaaggaaaagacaacacctaattccacttcctgaaacatcctggctaaccaaaggtcctgtgtgtgttcatgtgacaactttaccactagtgtaaccagcattacagaaagccagcacactaaacatatctacaaccaaggactttcatagagtctacctcactcccctgccacctccaccagagaaggtgctgcgatccaaggatgggagacctgaagaa

SEQ ID NO: 631765 - DNA, 440 bp, Homo sapiens
tccaaggatgggagacctgaagaaagaccacatcacagaactctgcagacattccccagcaccagcacatagcctggtagctccactgggtggctaggcctagaagagcagtaagaatcactatagtccagctcttaggaagccccagtcctaggggaaagggaagagcaccacatctaaggatcacaccatgggataagagaatctgaacagcaggccttgagtttcagatttcttcactgaaatagtctacccaaatgagaaaagaacagaaaagcaattctggtaatrtgacaaaacagggctctataatacccccaatgatcacaccagctccccagcaatggatgcaagccaagaagaaatctctgaattgccagataaagaactcagaagggtgattattaagctactcaaggaaatgccagagaaaggtgaaa

SEQ ID NO: 631766 - DNA, 510 bp, Homo sapiens
gtaagactgtctcatctcagtaagaactaagtaaataaataaaatgacaataagggacttttgtgcatccagaactttcaggcaaagactgtaagttctctagcatcattacatgcccaggttatatttctcaagccttacttgttccttcccacmcattaacatttcagaattatatttcatttataacaggtattctctaggctcactaacctgacagggttaatatcaaaaaataaaaacaaaaataatggcatttagataaaaatagcctcgggcttgagcccatcctagcaaccacagtgaaattccagcttccccccaatcttctcagagttcttggatggcctaagaatgatccccacagcctctagatgctacctgcaacgttctttgcaaggagctcccctcctcctttcaattggttccacctctgtctgcaaaggctgctttcctgtctctcttatggctcactttactgatactgaactcctcccttcccaatattga

SEQ ID NO: 631767 - DNA, 552 bp, Homo sapiens
cacaagtctaccctttgtcaacttggcacctatacacatctcctcaaaccaaacttattctccaaatgaaaataataggtcataattccacctaccttaatactaccctggatacaataaaaaacacacagtaacttatttcccagatgaggaggtaaaatccttgaaagatgtttactctgatatcctacaacacttgcctgggtgcagtggctcacacctgcaataccagcactttgggaggccaaggcaggcagatcgcttgagctcaggagttcaagaccagcctgggcaacatggtgaaacaccaactctacaaaaaaatacaaaaattagccaggcacggtggtgcatgcctgtggtcccagctacttggaatgctgaggtgggaggatggcttgaacccaggaggcggaggttgcagtgagccaagatcgtgccactgtactacagcctgggtaacagagccagaccctgtctcaaaaaaaamattaaattaaaaatacttaaatagtacgatataaaatattataaatacatctgatgttacat

SEQ ID NO: 631768 - DNA, 629 bp, Homo sapiens
attcccagtatgagaccatactgaatatgaacaattagaggccacaggtgagtgctgtcctcctcacactttctttgaactcttaagcttctactcttttaaccagctacccctctccccaaaaccttcactgaggctagaaacaaacacaaatagactatttgaattttagcaaattttatctctcttttctattctcttgtgtaaaacttaaatggccacaagctacacyactggaggaaaaaggaaagctaaaaggtctatcagccttctgtatgtgatgcagagttcaactgaatatagcaaggtacacacccgcattctccttgccaggacttagatatcataagccattatcttgctggttgttgaaatcataatggggctttatagagcacaaggcgatgtttgtaaacagcactgttcaggtcagattagaatccgtatttcaaaaatgaggagatggaaacagagatattgtgtatgtggtccagggttagccagtaattaaatggcagagccagaactcaaaccaacattccttccagaataccacagctgcctctggagtggtttttgttgttcttgttgaattttgtgatggaagattgtgatttgtttttcccgaa

SEQ ID NO: 631769 - DNA, 563 bp, Homo sapiens
ataatggggctttatagagcacaaggcgatgtttgtaaacagcactgttcaggtcagattagaatccgtatttcaaaaatgaggagatggaaacagagatattgtgtatgtggtccagggttagccagtaattaaatggcagagccagaactcaaaccaacattccttccagaataccacagctgcctctggagtggtttttgttgttcttgttgaattttgtgatggaagattgtgatttgtttttcccgaacacttaatatgttttctgacttgaattatcagaatctaaatttagaaactctctcgtttggtatatttcatgcccatctttgttccatataattacaaaaatatcttagagctgagtataaycttaaagattgtcaagtccaatcttgtggtttttcaaggaagaaaaccggatttaagaaaaataaagcaagtacctcatgttgcttccccaaatctacttcattggagaattacagctaaaaacaatgttcagatttttgctccttctgtcatgtggtcccttgagaatttgccaaatgtataaatcc

SEQ ID NO: 631770 - DNA, 585 bp, Homo sapiens
tacaccattattcttatttttcaaagttgttttagctattctagtccttggcctttccatgtaaacattagaatcagcttgtctgtaacaacaaaatgtcctcgtgatactttgactggaattgttttaaacctctacatcagttttggcagaattggcaactttttaaagttaagtattccaatcttcaaatatggtgtttctttttatttgtttgtatcttctttgagtattttcactggtattytgtagctttcagtaagatgttcatctatttcattttttggtattctatgtggtactggttttcaattttcctatccaattacacatttctggttgtgatggttgaattttttttttttttttgagacagagtctcgctctgtcgcccaggctgcagtgcagtggcgcgatctcactcactgcaagctctgcctcatgggttcacaccattctcctacctcagcctcctgagtagctgggactacaggtgcccgccaccactcctggctagttttttgtatttttagtagagatggggtttcaccatgttagccaggatggtctcaatctcctgacctt

SEQ ID NO: 631771 - DNA, 499 bp, Homo sapiens
aacacacacgtaaacatttttttaaacaacaatgtatatgtgtgtaatataatctcattaatgtgaatcaaatgaacaaaaagaaaaaaaactaccaactcgatctaacatatccagaacactctatccaacaacmacagaacacatatgcttctcaagtgcacatggaacattcttcaggaagaccatatgttaagccacaaatgaaatctcagtagatgttaagagataaaaatcatacaaagtatcttctctaaccacagaaacatgaagttagaaaccactaacagaaggaaaacttgaaaaattacaaatttgtggatattaagcaacacattcttaagaaaacaacaggtcaaagaagaaatcacacaggaaatcagaaaatacttagagatgaataaaatgagaacacaacataccaaaacttgtggaatataacaaaagcagtgctgggggagaaaagtatagctgaaaatgcttgtattttaaaaagagt

SEQ ID NO: 631772 - DNA, 419 bp, Homo sapiens
ctcacatatatacatatgtatatgtgtgtgtgtatcctattggttctgtttccctagagaaccctaatatgctgatgtatagaaatacaattgatttgtgtgtgtgtgttaactgtatatcctgcaaacttgttaaactcacttattagttctaagaggtctttgcaaactcattgggtctttgacataaacaatcgtgtacactatgaacaataactgtcctctccagggtggggtgggcaccaggttaagagttgggcatctccttgagatgtccttatttgcttaggtcctgcatgaaagcacacagtgccctggctcttttgaaaagcaggaaaatcctgaaagcaagcaacacagagctttctccaytgtgaggtggtgaggaggggattagggcactagatgagaaaggacag

SEQ ID NO: 631773 - DNA, 419 bp, Homo sapiens
ctcacatatatacatatgtatatgtgtgtgtgtatcctattggttctgtttccctagagaaccctaatatgctgatgtatagaaatacaattgatttgtgtgtgtgtgttaactgtatatcctgcaaacttgttaaactcacttattagttctaagaggtctttgcaaactcattgggtctttgacataaacaatcgtgtacactatgaacaataactgtcctctccagggtggggtgggcaccaggttaagagttgggcatctccttgagatgtccttatttgcttaggtcctgcatgaaagcacacagtgccctggctcttttgaaaagcaggaaaatcctgaaagcaagcaacacagagctttctccattgtgaggtggtgaggaggggattaggrcactagatgagaaaggacag

SEQ ID NO: 631774 - DNA, 355 bp, Homo sapiens
taagaaacatctatacgtttatgtgcatgtctgtctrttcagcaggttgttggatctatgagtctgagacttagagacaaggccagagctggagatgaagttgtgggagtcaccattgtgcaagtggtgattaatccatgggtgtgcgtgagagttcttgcaaggggaagaggaaacggaagtaagggcttatgcaaggaggactgttgagtaaagtggaaggcccagcctctgcctgctcactaatgtcagtgctgaacaagcccactggtagtggatgctgagggaaggaaggaaggagtctgtctgtaagcttgagcactttttccaagaggtggagaaggcagagagccca

SEQ ID NO: 631775 - DNA, 403 bp, Homo sapiens
taagaaacatctatacgtttatgtgcatgtctgtctgttcagcaggttgttggatctatgagtctgagacttagagacaaggccagagctrgagatgaagttgtgggagtcaccattgtgcaagtggtgattaatccatgggtgtgcgtgagagttcttgcaaggggaagaggaaacggaagtaagggcttatgcaaggaggactgttgagtaaagtggaaggcccagcctctgcctgctcactaatgtcagtgctgaacaagcccactggtagtggatgctgagggaaggaaggaaggagtctgtctgtaagcttgagcactttttccaagaggtggagaaggcagagagcccaagccttgaagaaatgttccttagtggcctggcatcttggaaatttgac

SEQ ID NO: 631776 - DNA, 355 bp, Homo sapiens
taagaaacatctatacgtttatgtgcatgtctgtctgttcagcaggttgttggatctatgagtctgagacttagagacaaggccagagctggagatgaagttgtgggagtcaccaktgtgcaagtggtgattaatccatgggtgtgcgtgagagttcttgcaaggggaagaggaaacggaagtaagggcttatgcaaggaggactgttgagtaaagtggaaggcccagcctctgcctgctcactaatgtcagtgctgaacaagcccactggtagtggatgctgagggaaggaaggaaggagtctgtctgtaagcttgagcactttttccaagaggtggagaaggcagagagccca

SEQ ID NO: 631777 - DNA, 403 bp, Homo sapiens
taagaaacatctatacgtttatgtgcatgtctgtctgttcagcaggttgttggatctatgagtctgagacttagagacaaggccagagctggagatgaagttgtgggagtcaccattgtgcaagtggtgattaatccatgggtgtgcrtgagagttcttgcaaggggaagaggaaacggaagtaagggcttatgcaaggaggactgttgagtaaagtggaaggcccagcctctgcctgctcactaatgtcagtgctgaacaagcccactggtagtggatgctgagggaaggaaggaaggagtctgtctgtaagcttgagcactttttccaagaggtggagaaggcagagagcccaagccttgaagaaatgttccttagtggcctggcatcttggaaatttgac

SEQ ID NO: 631778 - DNA, 355 bp, Homo sapiens
taagaaacatctatacgtttatgtgcatgtctgtctgttcagcaggttgttggatctatgagtctgagacttagagacaaggccagagctggagatgaagttgtgggagtcaccattgtgcaagtggtgattaatccatgggtgtgcgtgagagttcttgcaaggggaagaggaaacggaagtaagggcttatgcaaggaggaytgttgagtaaagtggaaggcccagcctctgcctgctcactaatgtcagtgctgaacaagcccactggtagtggatgctgagggaaggaaggaaggagtctgtctgtaagcttgagcactttttccaagaggtggagaaggcagagagccca

SEQ ID NO: 631779 - DNA, 606 bp, Homo sapiens
cgggaatcctttgccttcaaacatttaataggtgcgtctcttcctctgcttcttcctttctctccttttcctttcttcttcctgaacaagtcagtcctaaatccctgagtggggctgagcaagctgggcttccgtgcaggaaggcgcaggtgcaatggcccagaatgggttgtcagtgctccagcaaggtgagagcacctgtgcagggggctgtctgggtggagggcatccccaggggacagcccagatgagatgtcagagcccaagctgtgtaaggagagcatcacccaggggcagaccagcagaggatcttgaaccccagacagagagaggagggatttggcagggagggacaaaccagcacagratatcagagactgagtggggtgcagtggggtgtggagggcatatgtgtgtgggagggggtggcactgctaggagataggttaatacggaacactgatcaaatcagcaaatatagtaaagagcatgggagtctttctctctcagtaaaagaagttaaaaatgtgaaaaccagccaatgattgcaactggggggcatgaggtaaatatgaggactgataaatcctcagatcaaataattaa

SEQ ID NO: 631780 - DNA, 560 bp, Homo sapiens
tcggcacatggtaattacaaagcatggtgccataagaagttgctggggaggcagacatgtaaatgaatgcagaaaatatatgaggaatactaaaatagaaattaaagtgtcctgtggctttttcgtccacatagacgagtgtcaaagctagtatctctctgggaggatcatggcagacaggaggcaggcctagattgcagctcccactcagacggacagagcagcatgtggagtattgcatcatgaacttttgctccagaatgactgcaggaagaaatcaggaaagccaagagaacccacagaccctctgaaggaagtgaattgctcctgcatgacctgggagacaccccaaataccgtgagtgcccaaactatggaagtgggaaaggggcatcattcagtcccaaacacacaacctcactggggaacctcaagatctagatcaccagagaagattctaacattacctggagctgagtcaatttagagagccgagtgaaacgcaggggtagargaagcagtgggaaaatccctgtgggctctctgggtgccctagcaagc

SEQ ID NO: 631781 - DNA, 616 bp, Homo sapiens
caagacaattcaatagggaaaaagaatagtcttattaacaaatggctgggacacttggatattcacatgtgaaagaataaagttggatccctacctcacaccatatacaaaagttaagtcaaaatagatcagaggtcaggtgcagtggttcacacctgtaatcccagcactttgggaagccaaggctgaatcacctgargttagcagttctagaccagcctggccaacatggtgaaaccttgtctctattaaaaatacaaaattagccaggtgtggtggcgcatgcctgtaatcccagctactcaggaggctgaggtgggagaattgcttgaacctgggaggtgaaggttgcagtgagccaagatcatgccattgcactcccagcctgggagacaagagcaaaattcagtctcaaaaaataaatagatagatagatcagacacataaatataagagctaaaactatacaattcttagaagaaaacatagaagtgagttttctgacctttggttaagcagtggtttcttggatataacatcaaaagcacaaacaaaagaaaaaaaacagataaattggacttcatcaaaattacaagcttctgtacttcaaggacag

SEQ ID NO: 631782 - DNA, 561 bp, Homo sapiens
aggccttacctaatatttcatatcctacagtgccacctattgggatgggattttttttttttctccakgggggccctatcggcccttcatccaaaacctctagttccccaattcatctgcctcctatgtctattagggaccaggctccatgccccatctgtaaacagcaaagctccacctttaacagttgagaggacagctattcaattcatatgttcttttgagacatctgttctacattccacctccatggcattaaacaaaaaggggattttatgtttgtaagtcaatggtcccactctctgggatttcaatgttttgctaggggcatagcaagggaagccagagatagtattgaaacacttcctcctttaaagggtctcacccaaatacaacctctcctggacacctagggtaccctgggagccttatgggccaagtggttctaggaaaccagcagggcaaagggttggggcctagtgcaggtcaccatgactaatcctgctgactagctcctctatatccatggatgaaggtcatgcttgcatccatggggcagtg

SEQ ID NO: 631783 - DNA, 561 bp, Homo sapiens
aggccttacctaatatttcatatcctacagtgccacctattgggatgggattttttttttttctccaggggggccctatcggcccttcatccaaaacctctagttccccaattcatctgcctcctatgtctattagggaccaggctccatgccccatctgtaaacagcaaagctccacctttaacagttgagaggacagctattcaattcatatgttcttttgagacatctgttctacattccacctccatggcattaaacaaaaaggggattttatgtttgtaagtcaatggtcccactctctgggatttcaatgttttgctaggrgcatagcaagggaagccagagatagtattgaaacacttcctcctttaaagggtctcacccaaatacaacctctcctggacacctagggtaccctgggagccttatgggccaagtggttctaggaaaccagcagggcaaagggttggggcctagtgcaggtcaccatgactaatcctgctgactagctcctctatatccatggatgaaggtcatgcttgcatccatggggcagtg

SEQ ID NO: 631784 - DNA, 597 bp, Homo sapiens
gcatgatttataatcctttgggtatatacccrgtaatgtgatggctgggtcaaatggcatttctagttctagatcattgaggaatcaccacactgtcttccacaatggttgaactagtttgtagtcccaccaacagtgtaaaagtgttcctatttctctacatcctctccagcacctgttgtttcctgactttttaatgatcaccattctaactggtgtgagatggtatctcattgtgcttttgatttgcatttctctgattgctggccctattcttaaagggctccaccctgagctgctggatctttttctgtctgtctgcatagtcatatgtgtgatgtgtatgatgtctataaaaagagctctaattaacttaaaaaaggataagcacttggataaaatatttttaaaggaaaagtaagagctgtaatgactcattttacataactttaatctttaaaaaaaagaacagacttagggattgttggtaaaatacaaatgtcttcaaggtgtaaagacgtagtctagattatgtaggtcaaatgctaggtttgctaaatgtttaaggttgtgaactgtttctgtggcctttaaaaa

SEQ ID NO: 631785 - DNA, 597 bp, Homo sapiens
gcatgatttataatcctttgggtatatacccggtaatgtgatggctgggtcaaatggcatttctagttctagatcrttgaggaatcaccacactgtcttccacaatggttgaactagtttgtagtcccaccaacagtgtaaaagtgttcctatttctctacatcctctccagcacctgttgtttcctgactttttaatgatcaccattctaactggtgtgagatggtatctcattgtgcttttgatttgcatttctctgattgctggccctattcttaaagggctccaccctgagctgctggatctttttctgtctgtctgcatagtcatatgtgtgatgtgtatgatgtctataaaaagagctctaattaacttaaaaaaggataagcacttggataaaatatttttaaaggaaaagtaagagctgtaatgactcattttacataactttaatctttaaaaaaaagaacagacttagggattgttggtaaaatacaaatgtcttcaaggtgtaaagacgtagtctagattatgtaggtcaaatgctaggtttgctaaatgtttaaggttgtgaactgtttctgtggcctttaaaaa

SEQ ID NO: 631786 - DNA, 520 bp, Homo sapiens
ctgaaaggcctaagtaaaaataattattcttgctgtactttatgcaaaaaatcaraccaggtatagactaaagtttattttgcaaacaagctcagtcctatcacaatctgtttttaataaaaataaggactgaagggacagaaattgtttcaaaacttatcacacagctgtcattaatttctagtctcattagttgtttttaagttcttgcctatattttaaacaaaccttgcttattcctgtaaaccaatcagcgatctcaagctgcagctcagaggagacagaaagggatgggcaatgtaaaaatctggaacaatattccagttctgggcaattatactacaaacctgccaggtaataagaataaatagagtacccgtaacccagaggtttcctttttgggaaagtgcgaccaagaaaggtaaccaaagccaagttcaagcacccaaatcttaacaggcataactgtagccaccagttatcagagcatgacagcagcctcgggattttttaaagctgt

SEQ ID NO: 631787 - DNA, 574 bp, Homo sapiens
gttgtttttaagttcttgcctatattttaaacaaaccttgcttattcctgtaaaccaatcagcgatctcaagctgcagctcagaggagacagaaagggatgggcaatgtaaaaatctggaacaatattccagttctgggcaattatactacaaacctgccaggtaataagaataaatagagtacccgtaacccagaggtttcctttttgggaaagtgcgaccaagaaaggtaaccaaagccaagttcaagcacccaaatcttaacaggcataactgtagccaccagttatcagagcatgwcagcagcctcgggattttttaaagctgtccttatccaccttgtcttgttttaatacacgtcctctaataactcaaattgtttctttttgcctagaggctatcaagctccaaatggtaatgcaaatggaaccatgcataaatgtatctttcttctggggacccttaaaccagccctgggaaaatcctagctgctgttacccacacaatgcccctctccagtgggaagtagctagaaaaatcaacacccggtctccctagcagcagttaagggttc

SEQ ID NO: 631788 - DNA, 535 bp, Homo sapiens
ttatcagtaagtttttaacatggcaccttcagaatatgtatgtttatttaaatgatatgagctattcggccaggcacggtggctcacgcctgtaatcccagcactttgggaggccaaggcaggcagatcacgtggtcatgagatcgagaccatcctggccaacgtggtgaaaccctgactctactaaaaatacaaaaattagctgggygtgctggtgcatgcctgtaatcccagctactcgggaggctgaggcagaagaatcgcttgaacccaggacgcagaagttgcagtgagccgagataggaccacagcactccagcctggcaacagagactctgtctcaaaataataataagacgaggaaggagggggaggagaaggagaagatgaaggactattttaatacaaggagagcattatagaaatatagaaaaatagaaactgaaaagggataatattaaaaataagtagaagttctaaaacttccttcttatgctgcaacggatcatcttgtccttcccgttttagaccgcca

SEQ ID NO: 631789 - DNA, 605 bp, Homo sapiens
cttggttttgaatgttccttttggagttgatttccagttttattccactgtggtctgagagagtgcttgatataatttcaatttcttaaatttattgaggcttgttttatggcctgtcacatggtttggtttggagaaagttccatgtgttgaacagaatgtgtattctgcggttgttggatgaaatgttctgtgtatatctgttaagtccatttgttccaaggtatagtttaaatccattgtttctttgttgatttttctgtcttgatgacctgtttagtactgtcagtggagtattggagacctccactattactgtgttgctatctcatttcttaggtctagtagtaattgttttataaatttgggagctccagtgttaggtgcatatatgtttaagattgtgatatttttctgttggacaagaccttttaccattacataatgtccttcttaactgctgttgctttaaagtttgttttgcttgtttttggtgtccatttactttgcacraaatgccttttcccacccctttactttgtttatatgagtccttatgtttaacctttaggtgagtctcctgaaggcagcagaaggttggtgag

SEQ ID NO: 631790 - DNA, 595 bp, Homo sapiens
tttgtgcctcccagctgtgaaagaaaatggctttagttcttccccttgcctgtgaagtctgtgcaccagattcatgccctcccacaagttctggctaggaggcttctcacccctttcaaattgttacaaagttcagctagagatttccttctccttgtggagtttaaccgcctgctcctctggccaccctcccgatggatycctgtggtgtcaggcaggaatgggctgcttggggacctagtgagctcccagcgcctttctggtgcttcctgtacccctgtatttcgctcagctctctaacttgactcagctccaggtaaagttggaaacttctcttgcaaacagaccttcatcttctctagtgggggtgtgtgtttgggaaaggagaatctcccttctcacttatgcagttggggcactcacagtatttagggtgtctcctggctcccacaggagcagtctgcttccttcagagggtctttgggtcttctaaggattgctgtttttttcttgcagtcaatctgggctaaaattcacaatgcaagcctctgcatgctgccttgtttggagctgcaatctagtcctgccccccatc

SEQ ID NO: 631791 - DNA, 598 bp, Homo sapiens
ccaggaggaacaaaaaaactccagtcgcaccacctttaagagctgtaacaactcatcgcgaaggtctgcagcttcactcctgaagtttggcaagaccgaaaacccactggaaggaagaaactccagacacatctgaagatctgaaggaacaaactccggacacaccatctttaagaactgtagcactcaccatgaggggccgcgccttcattcttgacgtcagtgagacccaggaaccagcgggaaggacccattctggacacagtgtggcaygatcttggctcactgtgacatctgcctcctgggttcaagcaattctcctgcctcggcctcccaaatacttgggattataggtgcgtgccaccacacccagctattttttttgtatttttagtagagactgtgtttcaccatgttggccaggctggtcttgaactcttgacctagtgatccacccacctcggcctcccagagtgttgggattactgtgagccaccacacctgactttgttggcaatttttttttttttttgagacggagtttcgctcttgttgcctaggctggagtgcgatggtgtgaccttggctcactgcaatg

SEQ ID NO: 631792 - DNA, 598 bp, Homo sapiens
ccaggaggaacaaaaaaactccagtcgcaccacctttaagagctgtaacaactcatcgcgaaggtctgcagcttcactcctgaagtttggcaagaccgaaaacccactggaaggaagaaactccagacacatctgaagatctgaaggaacaaactccggacacaccatctttaagaactgtagcactcaccatgaggggccgcgccttcattcttgacgtcagtgagacccaggaaccagcgggaaggacccattctggacacagtgtggcatgatcttggctcactgtgacatctgcctcctgggttcaagcaattctcctgcctcggcctcccaaatacttgggattataggtgcgtgccaccacacccagctattttttttgtatttttagtagagactgtgtttcaccatgttggccaggctggtcttgaactcttgacctagtgakccacccacctcggcctcccagagtgttgggattactgtgagccaccacacctgactttgttggcaatttttttttttttttgagacggagtttcgctcttgttgcctaggctggagtgcgatggtgtgaccttggctcactgcaatg

SEQ ID NO: 631793 - DNA, 601 bp, Homo sapiens
gacaccttgattcccaagactttgtggatggtaagcagcaggagggggcttgtccagaccattagaaagccgactttccactgtggctctcacacagcattatctctgactcttcagggcaaggtggaggccaggcatcttttggcaacaacacatgcacactggagctgctcagaaggcagggaggcccctgggatggaattgagcctcagcaggctcgccgttccatcacacgaggctggctaagaaggtygtcccagccctatcacctgtggcaactggagactgaatggcagctgaaaatgactagggtttgggtggtgagtatagtctccactattatttttttccttcttgttttcttccccagagcagactttccttactcagtgatctgacaacttttctatccttcttggatttttttctaggaaaaatgaataaagagtggggggtggaggggggtgacaacttcaagagcaaacactcgggaaggtgagagcacctgctccttgcttctattaaacagtcagcatactgcccaaaagaattgaagacaggtgttcaacgagagtctgggcacaaatgttcacagtggcac

SEQ ID NO: 631794 - DNA, 478 bp, Homo sapiens
ttgatgagtgagaacaggatccagtgagaagagcagagagaaagtcaaggcggatatgggctcggggaggagacttgcatttaggaaagagtggagggcatgaaagtaggagggggcccagtgaaaggtaggagtctcagagcaggtagggaggaggctatgaaagaggagtcagggaggccccataaatgacytagttaccatttattcagatgggcccaaataccacctagcttctgcagggctccaggccctctcatccttggatctcccagtcatgacccctccccaggcaggttcttctaactacaggtttgtgggcaatgcaagcacaaaggtagcaaggccagccagctgcaactttttaactttaccaatgcatcataactattttcctggtcaataaatataaatctaattcatcatttttcaatgtaacacatcacagaaatacaataaaaggcatgctatatttaac

SEQ ID NO: 631795 - DNA, 553 bp, Homo sapiens
taaatttctggttttaaaatttaatacatcaacaaaatatttaccataaaggttttaaacattttcaaagttgtttcaaaatagtaatctaattatttcaaaaacggttgtccctgtaattctatgcatccatttactcgaaacataaaagatccttgggcttcactaaactgccacagggtccacggcacaaaagtgkctaagaaccctgagaattcatctcaggatcaggagtaagacgtcagaattacattactaacagccaatggtcaagccacgctttttttttttaattctgcttttccagcaaaaccactgaagatgcttaacatggtcaagacaatttaacctacaaaaacacacatgtaggatacacccctcacctttactaaggagctcctgaagggctgccctggccagggagcctcgaatcttcagtctctcagagaccacagctggggttataagtttatagttgggaacttccttacagagtttatcataggtagctttgtcaaacaagactaagttattgagcttgtcccgaactttg

SEQ ID NO: 631796 - DNA, 553 bp, Homo sapiens
taaatttctggttttaaaatttaatacatcaacaaaatatttaccataaaggttttaaacattttcaaagttgtttcaaaatagtaatctaattatttcaaaaacggttgtccctgtaattctatgcatccatttactcgaaacataaaagatccttgggcttcactaaactgccacagggtccacggcacaaaagtggytaagaaccctgagaattcatctcaggatcaggagtaagacgtcagaattacattactaacagccaatggtcaagccacgctttttttttttaattctgcttttccagcaaaaccactgaagatgcttaacatggtcaagacaatttaacctacaaaaacacacatgtaggatacacccctcacctttactaaggagctcctgaagggctgccctggccagggagcctcgaatcttcagtctctcagagaccacagctggggttataagtttatagttgggaacttccttacagagtttatcataggtagctttgtcaaacaagactaagttattgagcttgtcccgaactttg

SEQ ID NO: 631797 - DNA, 441 bp, Homo sapiens
tgtgacccttccgttcaaaacacagctggcttcccatctcactgggaaagtcctacacgatcttttcactgtgacatgctcttgacctttctctcttcagccacactggcttcttagatgttccctaaaatgccaggcaggcttctagctcagggcctttgcatgtgcactttctgctaccttttccaacatgtatattttgtttatgtgttttargtctttactccaagccatattctcagtgagaccttcactaaccatcttatctaaaactctaaaccaacccatcccccaatgcacacttccaatatccttccatgattttttgacttagcacttatcactatgtactatgtattttacttaactgtcttatgttctacctacctcactagcaataagttctatgagggtagagattattgtctgttttattttacc

SEQ ID NO: 631798 - DNA, 596 bp, Homo sapiens
attcattcaacaaaggtctaataataagcatgtgtaaggagcttaaacaaatttacaagaaaaaaagcaaacagccccattaaaaagtgggcaaaggacatgaacagacgcttttcaaaagaagacatgtatgcagccagcaatcatgaaaagaagctcaacatgactgattattagagaaatgcaagtcaaaaccacaaagagataccatctcacactggtgagaatagttattatcaaaaagtcaaaaacatagcatatgctggcaaggttgtggataaaaaggaacacatacactattgctaggagagtaaagtagtaaattagttcaaccatattggaagacagtgtggcatttcctcaaagacctcaagacagaaataccatttaacccagcaatsccattactggctatatacccaaagaaatataaatcattttattataaagacacatggctgcatatgttcattgcagaaatgtggtatgttttcttcatgtagtacatgaaatactatgcgtccataaaaatgaacagttgttatgtcctttgcaggaacatggatggagctggaggccattatccttagcaaact

SEQ ID NO: 631799 - DNA, 389 bp, Homo sapiens
gtgaaaccacatctctactaaaaatacacacatacacacacacacacaagccagtcataggggcacaggcctgtaagcccacctacakgggaggctgaggcaggagaatcacttgaaggagtaaaggagactttcagttcagagttggctacatttaattggccaaaactcagtgattggcagaagtgtaggctatggtctgtttacagctccacttgttatagttcataatgtacagaaaaatctttgggctgaatttaagataggtaaggaggcagctttaggctaaacttggtttaacagtctatgtcacctgcactgttccccacacattggaggggcctgatactgatagctttactctcttttctgatatttgctagcactga

SEQ ID NO: 631800 - DNA, 401 bp, Homo sapiens
ggaattcaagaccagcctggttaacatggtgaaaccacatctctactaaaaatacacacatacacacacacacacaagccagtcataggggcacaggcctgtaagcccacctacatgggaggctgaggcaggagaatcacttgaaggagtaaaggagactttcagttcagagttggctacatttaattggccaaaactcagtgattggcagaagtgtaggctatggtctgtttacagctccacttgttatagttcataatgtacagaaaaatctttgggctgaatttaagataggtaaggaggcagctttaggctaaacttggtttaacagtctatgtcacctgcactgttccccacacattggaggggcctratactgatagctttactctcttttctga

SEQ ID NO: 631801 - DNA, 583 bp, Homo sapiens
actcagattgagtctcactttgaacgtggatttgcaggttcattttgaaaaaatatttgttaaagtaggaggattaaatatattcagtgacggtttgttagcttgttttagaactttaaaatatttggtatatgacttccatttgaactttkgtttcaagccacataaatgttatgaatgaatctccctgagacatagtaactgtgtaagtagatgctattattattaatatcttacaaggtgattgtatagtcaattaataagtatttacaggaaattgttagcttacagcactgtacaggcacatttgggcagtacaaaagaaagagaagaaacagcataggctttagggtatttatgacctcgctggatattataaattatatacataagaaatttaagaataatctcagaagtgttcagaattttatgaagccagttctctgtaatgactatggaaaacagtctcaaatgaattatggtcactgaggttctataaatctatgtatacaatgccatcctttctttgactgattaaactttctcatctttcaaaggttctcaagcttggcctcctaggtaa

SEQ ID NO: 631802 - DNA, 601 bp, Homo sapiens
gcacaattgcaaaatgccaaaaaattaataactttgtctacttatctccttgtattaagattttgacccattttgaattaatataaatatttagagcacaagataatagagattaaataaatacacaaacaaaatagttttctactctcaagaaacacacagaagacttcagcagaaaagaaaaaatcaattataaaactgtgtaatagaagtatattgtacctatatatctatgtactatatctcgataactattctaaataggatatcagagaatattctatataagatatcataggatagagatatatttaaaaatactagtaacttattgagcatcaaaatatagattgctaagtgcttcatttatattatttcatatcctcattaaattcttgcatgttaagaattattatgcccattttacaaacataaaattgaagtttatggagtttagattggtaaacaaataaagccaaaattaaggtacatttttgtarcttcgccactcatacccttttggccaccccactgttttcattaaattaagataatccgagaatttgtcaaatcgtgaggtgacaaaatatgtatatataca

SEQ ID NO: 631803 - DNA, 612 bp, Homo sapiens
acaaagattaaaaatagatttgaatatgtattagaactcagtatatgataaacataacattctactttagagtgcaaaagataatcaataaatgttttagatacacatgattatctatttgttagtacataaagttagagaccctcttgacattatattcaaaataaatttcaagtagcttagtggtctaaatgtacataagacaataaagattttcaaaaaaattttgaagttatttttataaacttgatggtgcagaagatcttctgaaacataatttaaatatcagaagccaaaaagaaataaaatttacatatttgaacataagaaagttaaaattttcaaacaaaaggcagcaaaaaacaagccaaaatacaaacaataaactggaagaaaatatttatcaaagttatagtagccaaaaggttcttaaatatgaagagttctgcaaactaaaaagtaaagaacatattagaaaatggtaatttaaaaaagcaaagaacatgaaaagaaatttggtagtaamggaattgcaaatcccaacctcagttataaggaagatacgtaaattaaaatatgaagactttttcatacaacagcaatactaaaagc

SEQ ID NO: 631804 - DNA, 598 bp, Homo sapiens
cttccaagattgaaccagaaagaaattgaatcccttttagtatttttactgtctcttcctgcagtaccagacttttatatgcccgagttccttaagactcagactttgtttctcttgtttttccatttcataccttttcctaggttttcttgttaattccattacatcttattatcacttctgtgatgataacttccaagtctttttctaacccacatccattctctgagctccagacccatttaccaaattgtttgcctgttactggaacttcgaattcattattgccaaaactaaactgaatttctgcctgaaacttcctcttcctcctctctttttcctattttaagaaatggcacttcatttatccagttacataagtcagaaatctagcagtcacctctgacaatctctttccctgtacttccaacagtcagtaaattatcaagtcctactaattttcttagatatttgcagaatgtgtaatgttttcaccagattcacagtaattatccatattcttgagtggttaktgcagaaatcacctaaatgttttccttaaatatattcttgacccctctaatccacttttgaccca

SEQ ID NO: 631805 - DNA, 489 bp, Homo sapiens
ttactataatgagttttatgaggattaaatattttgataattctaaagtattttgtagtcctattagaaattataggttagcataaaaattggtacaactacatggaagggattaacatgaaacaaaagccttaaacacatatttttacttaaatatttcacttataaaartttatgaaaaaattactaagcaaaaatatagctatgtggattttatcattagttaaataaataaatgaactatagtgaatattttaaatataatgtatatttgataaggaagatatatatgtgcaatataatacaattctatatacatattttatacacatgtatacacatgtacaataaaaaaatctaaatatcaaaatactggcagtagttatcttaaaattacaggattatgcaagttttaattgtctttttctgtttcaggactttcctaatttttctacaatgagcatggcttttgaaatttaaaaaaaggta

SEQ ID NO: 631806 - DNA, 577 bp, Homo sapiens
ggagtagctcaataaatttgtcagctggcaacataccagcayatttcctatagtgtatttttattgtaaaggaagcaaatacataaaacaactttaaaataataaatagaagtctagaaacccttgactttggctggaggaaaccactcatttactctggcacttgataaaaggaagataagaaaatttaaaaatattaaatatatttcttgcattatgtatctaattatatatacacatatactataaaaggccatagatgaaaccacccaaggaatatgatttattatcacaagtacataggttctctgttatgtgtgacctagtagtcatctttctagagctgatatactcagtcttacagtcgtgggtacagcataccccctggcaactgtttaattagttcaattggtattaaataactttactatctctttgcatctatccccaatctgtttattcttgcagaaaacatgtatcaacttcccattgtataccatgtaatatattaagttttgaagatacacacaaaaaaattccagtcttcagcaagtttaaagtgtagaaaggagtcata

SEQ ID NO: 631807 - DNA, 599 bp, Homo sapiens
ctctggcacttgataaaaggaagataagaaaatttaaaaatattaaatatatttcttgcattatgtatctaattrtatatacacatatactataaaaggccatagatgaaaccacccaaggaatatgatttattatcacaagtacataggttctctgttatgtgtgacctagtagtcatctttctagagctgatatactcagtcttacagtcgtgggtacagcataccccctggcaactgtttaattagttcaattggtattaaataactttactatctctttgcatctatccccaatctgtttattcttgcagaaaacatgtatcaacttcccattgtataccatgtaatatattaagttttgaagatacacacaaaaaaattccagtcttcagcaagtttaaagtgtagaaaggagtcataagacataatgccatataatgtcaccattcttataatagagccacattcaaggagggaggatagagaaagatgtggctaagtcagccagatgtagtcacagaaagctttgttggagacaggatatttgagctgactcttgaagaataagaaagagtttgcaaggtgccaagaaagtg

SEQ ID NO: 631808 - DNA, 564 bp, Homo sapiens
cccaatttatatatgattagaagatacacatgtccttggattgtcctctctataaaacgttctagtgggckggtaaagatagctctaaactgtaccttttcttctagtattatttctgtttctcttccacctgcattgtccaaagggacagtgatttaggttacatgtatgatgaattctctgaagatctaacattgactcaagtggatgctccagaattcatcctagaacttgacctagagatctgttttgcttggtatttcacttatgggcttccttaaagtccaaactcttacaaaataatttaaagttgcattgaaagaaaaaaaagatgctaattgcttttggtttccaccgcaaaacaaaaaccatccactcaccttttattgacaagtggcatattgagaataagagacattttctcaagcagtttgtcttataaagaaattttagaattagaaaacttagttttagaattataaaaagattttacttaccctcagcaggggcactgctggcatttcagacaagaaagagattcattatataaatctgtcccaccca

SEQ ID NO: 631809 - DNA, 564 bp, Homo sapiens
attatttctgtttctcttccacctgcattgtccaaagggacagtgatttaggttacatgtatgatgaattctctgaagatctaacattgactcaagtggatgctccagaattcatcctagaacttgacctagagatctgttttgcttggtatttcacttatgggcttccttaaagtccaaacwcttacaaaataatttaaagttgcattgaaagaaaaaaaagatgctaattgcttttggtttccaccgcaaaacaaaaaccatccactcaccttttattgacaagtggcatattgagaataagagacattttctcaagcagtttgtcttataaagaaattttagaattagaaaacttagttttagaattataaaaagattttacttaccctcagcaggggcactgctggcatttcagacaagaaagagattcattatataaatctgtcccacccatttgaagactgtttatttttcctggaactttttcactaattgccaatatgcctcagtcatgtgacaaacaaaaaattcccaccaacacttacaaacaagccttgagca

SEQ ID NO: 631810 - DNA, 564 bp, Homo sapiens
attatttctgtttctcttccacctgcattgtccaaagggacagtgatttaggttacatgtatgatgaattctctgaagatctaacattgactcaagtggatgctccagaattcatcctagaacttgacctagagatctgttttgcttggtatttcacttatgggcttccttaaagtccaaactcttacaaaataatttaaagttgcattgaaagaaaaaaaagatgctaattgcttttggtttccaccgcaaaacaaaaaccatccactcaccttttattgacaagtggcatattgagaataagagacattttctcaagcagtttgycttataaagaaattttagaattagaaaacttagttttagaattataaaaagattttacttaccctcagcaggggcactgctggcatttcagacaagaaagagattcattatataaatctgtcccacccatttgaagactgtttatttttcctggaactttttcactaattgccaatatgcctcagtcatgtgacaaacaaaaaattcccaccaacacttacaaacaagccttgagca

SEQ ID NO: 631811 - DNA, 541 bp, Homo sapiens
tgtgactatttagtgctttttccataataacagacctgcctctgagaaaaacatacagtaaaaatgagacccattttcctcattttctccatggaaagctagttgataacatcatcaaatatttggcgtgggatgatgtaatctatctaagtcattggcactacatagaaatatamtgcaaataagaaacaatcttccaaaactgacaaaaatatttgactgcttctagaaacctatttaacacttagtcaagagtgcattgaaaagagcaaaagagtaagtaaatatagataaaaatactttctttgacttcgactgactgtatgaccttaaattacactatttatatactctctccaggcctcagtttctccatatgttaaataacgcagttgagttaaattattcttaatgatttcctctataagaaatttttcacttcatggttttcaaacagatttcacttaatgcagttcaagtttattttatattatgcaaagataggtaagagaattccagtctcttataagactcctccatc

SEQ ID NO: 631812 - DNA, 608 bp, Homo sapiens
tagtaagtttctttatttgtatgtcatgttagcacttyattactaaattaatttgtatatcaaaatctggattctcctcaaaagagaggactccaatatcaagaaatctagattcttacagtaaaacaaacaaggatatcaacaataaaaatagactggtactgtaaattataagcttaagagttaggcttggtttatactatggcttcactcaaatccagctgcatagccttgggcaaactgcttaacttttctgagccttaatttctacttgtgtaaaagcagtgaaataatacatttacccagtgggttgctgtaaagaataagtgcaacaagatatgcaaagttcttatcacaggacatagtacatatttggtgctcaatatgttttagttccttgtaattcttccttatatatgcagtttttaatttaggaaagagtaggtattacttaaggatgacttgctttcatcagaaactataccagtgcactaaacagatggaaagaaaaagcatctttatagcttcaccccttaatatctcacttcaagccctctcctcagctctttactatagagggagggttacatgcatccctttctcctcca

SEQ ID NO: 631813 - DNA, 536 bp, Homo sapiens
agtatattcttaacacaaatttcaaaatagaatttttaaaacccaaaaggaatgaaagctgaatttgttttcatgagagactaactgctaactggagatgtggcatttaaggcatacaccatggaaatgagactgcatgaatcatggcttcttcaggcctactcaatccgcccctgactgacaagtccgacttcatttatttagagagggtccctttgatgaggcaattcaacataygactaactgggagattaagaaagagtgaaggaatgatatttccaaaacatgacagcattttccaagtatgagtgattgagaaaaaatatatatgtaaagaaagagaaagttgagggttttgtttactattttaatgaaattgaataacaagaatagaataggaagattcaggacatcaaagggagtctgtgagagttttcccaacaacagttcaattaaactaatatttactgcaggcctaacatgtgcctgatgctaagcccgcaaaacaagcaccttgaattaaggagtttatgtgt

SEQ ID NO: 631814 - DNA, 635 bp, Homo sapiens
gggttttgtttactattttaatgaaattgaataacaagaatagaataggaagattcaggacatcaaagggagtctgtgagagttttcccaacaacagttcaattaaactaatatttactgcaggcctamcatgtgcctgatgctaagcccgcaaaacaagcaccttgaattaaggagtttatgtgtgagtcagtcaacacaaaacagtttcttcggagctgaaatagagctatgtaaagaaggaagaatagaaattaactaattttgcctgggataggagggatccaccgaggagattatactagtacataattttgaaagtcaaataagggttctcctctgggaccacttagaacatggcagaggagaaaaatttccattccaagaaaacctgtctgcacccaatgacagagtttgcattctcccaagacaatataaatattgagaagagtggtcatgcacttgagaggctgtacattttaatggaaaaagtgctggacattagccttctgggcaagtcacttaacctccttggactgtagttgagtgttgaaacttggaatctcaaagttcccttttaaatctagcattcaatggttgtgtcaagatccaggactacagagctagaaagattc

SEQ ID NO: 631815 - DNA, 598 bp, Homo sapiens
atgctttcctagaaatttgtattataaaattttttagacagaatgattttttttacttcaaatcaaattaactttaataaataaaaatttaataattcattattacccattacagacagacacaaataacatttcttattaatgactctggcccttgtacagaatacagtgtttagcccataagagagactcaattaatgtttacttttaacaaatgaactggaaaagatatagaatttggccaggwgcagtggctcacgcctataatcccagctgtcagggaggcagaggcaggaggatagtttgagcccaggagttcgagacctgcctgggcaatatagcgagattcccttccacaaaaaggaagaaaaaacaacaacaacaacaacaacaacaacaacaacaacagatacagaattcacattctggtaaagaaaagcagatataaacatctccaaaacaagggatatactagtgttacactaggaatgcaaagtgtattaagtgttacactagaagtacaaagtaataaatgtatagaaaacaaagaagttccatgttagagaagaaactagatggccagggtctggaaggacaa

SEQ ID NO: 631816 - DNA, 554 bp, Homo sapiens
cttaaaattgcaagtcaaaatcaattccttgacatccaaacaccaatctgttaaatgttctaatctggcaaattatctttaaaaacacaaatatatataaatccaaatgtgtacaaatatcttaacataaaaatattaattaaaaagtttactttcctccattattctgtaattaatctaaatcttttcaggattagtgacctctatgcaccaaagaaacaattaatgcaaactttgtgattgctttcccaagcaatttggggagtggttatatttagatgattactattgtatattacgtagaggtcttggctgggagatatataactgccgatactgcagttaatttttttcatctcctcarctgtaagactaagcatcattttatcatcaatatcccaaaattttacaaaggagttaggtcctagcccatgttcttgggatccaaagtataccataaggaaatgttcagctacataagccagtttgagataaccaccaaatttaaagctaaccttcactgcttcagttaacatttccttggctttcacaat

SEQ ID NO: 631817 - DNA, 632 bp, Homo sapiens
ataggcattaaattaatatacactaaaattcactcttattcttactgcatttaaaatcttaagagttaatactattgctctgtgttttgaaaatgcttgacttactgggaaaccagtcattgaatatgtggatttagaaactgcataattataaattttctccagagtggtcctcactcacaggtggtaaccttaaaaagcttataatgtgtccttttctaataaacaatgtaacaattaaatgctttttcttatctctcagggtacaaatccaattatgcttacttcttcctgattgtactttgtatcagccattaaatatacaaaagaaatctaagacgtaaagtaactcactgcctcyaatgtgcccctccattagcatgacctttttctcagtgcttaagaataaaaccagaactggccgggcgcggtggctcacgcctgtaatcccagcactttgggaggccgaggtcaggagatcgagaccacggtgaaaccccgtctctactaaaaatacaaaaaattagccgggcgcagtggcgggcgcctgtagtcccagctactcgggaggctgaggcaggagaatggcgtgaacccggaaggcggagcttgcagtgagcggagatcgcgcc

SEQ ID NO: 631818 - DNA, 515 bp, Homo sapiens
ccccttgttatccaatacagccttatttctcaccaccgcccttcttcaatgctttgttccaggcagttgaaatgcttcaagttcctcaactgtaccaaattttcyctcacctctgggccttagtatgctaaggtgtgccttagtatatacattgttccctcttccatgaacaccattttctatcatgcctctctttacacgtatcctgtatgaaccattatcacatttacctttccgcttgattttattgctcttcccctcactattaggattgggatttatgtcagtcttggtcacggtgactctttagtgccctacatagcttttatttgcaaatctctatctactttaagcctacccttactataagaaaaagtttaagtctcacctggacctctgcattggactctcctctttctactgtctaggtgctttcaccaactgagtcacaacacagtatctctctgtgataaaatagcaatatgagtttcaagaatggggagatcaaggagcaa

SEQ ID NO: 631819 - DNA, 518 bp, Homo sapiens
tgtttcccctgttgagaatctgctctgtagttatatattgaaatgtaaatatattgaaatggaactttgcacaacagtgtggggagtaggctcacgctccatgcttccttaattgactggagatgagtaaascctttatataggacttcagtggtcttctgcttggttggtgcccatcacgtgatctacacaagctcagaattttcagcatgggtctttgaactgaatgtataattgatagtagaagtgggtaaaaattccaacacagggtatcataccagtgtagctcatgcctgacctaccccactacctccctatgttattatgaaagctatttgtagcaaaaatacatggtgtaaatacaaagcagagtgatcaacccagctcaatgcctgagtctcagcatgcaaccatgatcctacatacaggcccaacctttctcctgtatccaattcatttttaatcctggattttgcttagctattgtccctacctccaagttatatcctaagaattgt

SEQ ID NO: 631820 - DNA, 518 bp, Homo sapiens
tgtttcccctgttgagaatctgctctgtagttatatattgaaatgtaaatatattgaaatggaactttgcacaacagtgtggggagtaggctcacgctccatgcttccttaattgactggagatgagtaaagcctttatayaggacttcagtggtcttctgcttggttggtgcccatcacgtgatctacacaagctcagaattttcagcatgggtctttgaactgaatgtataattgatagtagaagtgggtaaaaattccaacacagggtatcataccagtgtagctcatgcctgacctaccccactacctccctatgttattatgaaagctatttgtagcaaaaatacatggtgtaaatacaaagcagagtgatcaacccagctcaatgcctgagtctcagcatgcaaccatgatcctacatacaggcccaacctttctcctgtatccaattcatttttaatcctggattttgcttagctattgtccctacctccaagttatatcctaagaattgt

SEQ ID NO: 631821 - DNA, 495 bp, Homo sapiens
gaatgagagccactgtggttttggtgaggagataagccaggattcagtggtaggaagcagacgtaagtagcagtctcagacacagcactcccagccactagctccagacattcctggccctggctggaggtgacatcactatggtcactttagatactgcatcagaggctgagcagcaaaggccactgaattccagttgtttcttgacggtgctccctaaggaatcttaaataactttggttcatgagccaaaatgttattaaggtattatgggtaatctaacttgtttcagattagaacaaaggagggaagacagttctgtactttttttttttttttkgcaagtgaagaataaagtttcctttgagtttttgatttctaggctttaagtagagaggctttcaactgaagcaattattgtatatatactgctctacacacgttagagtcttgctccagcagagaactatttttccgaaagaactaaagatgaag

SEQ ID NO: 631822 - DNA, 669 bp, Homo sapiens
tgctaaatctattatatatgttagatgttatgaattttgtcatatataattttattctaaaaatgattttaatgactgctttgtatttaactacatggatgtcttatggctatttaattgcttcccttttttgaacatttagaatatttacatttggttattataaataaagttttataaacttctattcatataaatgtttgcatatacttctttttagttctttaacatgattgtctaaaagttgcttctttgattatttctaacaatatggtttccatttataggcttttctaggtyattccactgaaatacagatgcttattctgaagaacaggacctttagagcttattttcttagaaaatatattgaaaatgaacatagctgatcagtttatatgttgtttactgaaacaacaaaggtttaatgattgcaaaaatgtactcattgtgtgatttttccaggttatgcaattttcagtctttgagaattgctttgaggatttttccaatcatggaaatataacattagaaggaagttaaaatgatctgactcctcagttttttatcttaattatctgcaggtatatcatgttcttcaagtaagattcactaaaggggtcatttgccacatcatgagtttaaaaaataatactgaaataaaggtcc

SEQ ID NO: 631823 - DNA, 550 bp, Homo sapiens
tttctaaagtttaaaaccgtgcacacacacacacacacaaaaacccagccactgggagatcaagaagtctgaccttaggtctcactgaacacatttactgctgtgttggataaaatttggcttaatattttcccaagatgctgtgatacagaacatactgggaaaacttgcagtttgtcctacagtagtaggtgcagtactgcaatttatgaaacatttagatatcttatgatctatttatacaatgtatagagtgctcaaaatttactgtataaataatattaaaatatacacgkcaaagtttccttccaaagataattatgaattattttggccagctgaggacatggatatgaaaataattttctaaccatttgataattaatcacacttcgtatatgtgtttctgtgtattcttgtgtattttattcacatatctatcatactgttggttgtattatatttcatttttggtttaaatgtctatctctacattaattttaaaattagaaagacctggggtaggctcctgtagctgctattaacctaa

SEQ ID NO: 631824 - DNA, 495 bp, Homo sapiens
aatccttgattttaaaattcacatctatgttcttgataagtaaaatgatttaagaaaaataatttagaaaggtgttgcttaccagaaagaaaagtttcagtaatgtattcagtattgcctctgacaaaatattcaaatcattaatcaaatctatttgtcctrcaaattaggtgagagcatttcttaccaccagccatcatatgtaagatactgaaggtcagaggaaatattcttaatgatctaaggcaaattctctcagcctggaaataattcccaaggaattaagtcatgtaccactagatgctgcattaactctttcaggccactaaggtactattgagtgcactgaagctgcagtttaccaaatggtaccccagtggtcttactcagttattgcagcctccagaagggcctgtgtcttcccagagagaagtttaagcattggaaaaatctggttcagaatatattttcccaaggtgatgcttaaaggaaaca

SEQ ID NO: 631825 - DNA, 562 bp, Homo sapiens
cttctgcacaagcactgggaatacaaaaatgaataaaattcaatctcacctttcaaggaattttacagtttagtacatagaggtaggcatatgaatgaataattgttataaagtgtaataatagctgtaatagagatatacagagcttactacacaaatgactaaattcaatctgaatctttgctggggaggggaacatacagaggaaggaagtgatgttttaagctgggccatggaagatagctagatagttttttagaagaaaaggcaggtaaggtaagaaaaagcattctaggaagagggtatgccatgtagtttagaacagtggaggggagagaggatcttggtatacttgggaatggaagccaaaaaaagagcttctaggaaaggataagaaattgtggcacattttccagaaatattaagtgggatagtaacagaaatrattctaaatttggcatttggttttctaatgtcaaagaacatttgcagtagaagggaaaggacagaagctagtttactctcacatgaagtaagaaatgaaattgtatgatgaagataa

SEQ ID NO: 631826 - DNA, 437 bp, Homo sapiens
gattgataggatggtagctaacgaaaaaagcatggtttataaaagtctttggggatwgggtagatttgatattttagaacaaggaaagaaaccaataaagcaaaaacatgaagatactattcaagcaaaatgactatttttgtttaataaattagtgaagtattacagctgattagaaattttttactctcccacctagctctgtgctcaactaatacaaacttagcttatttaacaaagtcatgtaaaaactgagtaggaaaaaagtacattttaattatataaagtgaccatttttattgttatatctttgcaaagtgaagccatattttcaacttaaaattatttttcacactgagttatttagggaattgtaaagatccatctcaaacttacctaccatcaagtttgctgtcttcagggtagaaaagcacagt

SEQ ID NO: 631827 - DNA, 597 bp, Homo sapiens
tgaataagacaatctctcaaatgttccaagaattaaaaattcaaattcattcagtatttattgaatgcttatttatatgtaagtgtatatatttcaaagtgttgctagttgtgattgtgatggagttgaagtggcaacaagaagacatgcaaggccacggcatgtgtttaagtagtttataatcctgtggagagagacaaatatgtacataactgactttaatgcttaacaagattataagagctatgatgagcactgttaattgatttactaatcctcagagcaacagctgaggggtagagagctgaagtgacttctccaagatcatgtatcttagtaagtggtggagctgggattctaacatacaactccagagcccacagaggtatcctccctaatacyaataaaaatatcaacaaattattgccaggtactcagtagttttacaaatgtcatcatgtttcatctttaccgtaagatactggccttacttactctatttataaaagaagaaaataaagtttatcatccttaaataaatgactaggattatccagctagtaaatggtgaaagcactattcaaactggaataagtg

SEQ ID NO: 631828 - DNA, 437 bp, Homo sapiens
gacacttctcaaaagaagacatttatgtggccaacaaacatatgaaaaaaagctcatcatcactggtcattagataaatgcaaatcaaaaccgcagtgagataccatctcacaccagttagaatggctattattaaaaagtcaggaaacaacagatgctgatgaagtgccacttttcaaataaactgtgttccatggagccctatggtttaaataaggtgcctcaggagatgctaaagagaaggatggaaggaattaagtatcttctttaagcataacaacttcttattttactgatmtatttacttaaaaatattttttaaacagttacaggatatcagtctaggatctgggaacatatttgtcaataagggttggttcatggagcttatggtctaatggaggagacaaacataaataaccacacaatccaatgca

SEQ ID NO: 631829 - DNA, 559 bp, Homo sapiens
ctaagtttcctgaggcctccaagacatgcagaactgtgagtcaattaaacttctctcctcttataaattaccatctttgggtatttcttctatagctagtgtgagaatggactaatacacatatataatttttatstctgaatgtatctttagaaagaaatatgttctaaggttctgcatttctaagtggtggtatcatggttgttgatggtacacagtaattggcaccaagaaaatctgagcaggtacgtaaagtatgtccttttataccttccaagacctggaattattagcctgaaattattataattttcatgttgcctcccaagaccataagcggatttttttttgtcttgtgcatagggtccaattccaactgcccaccatgtatggaacttttggcctcaagtatcatgcctatgaggcataaagccccagttcttgggtatataccagacatgctattcctaaaagtagccctgcttcgccttctacttacagtgaggattctctctgttttcaacatttaaggatttcatttttgtcccttttaacttat

SEQ ID NO: 631830 - DNA, 559 bp, Homo sapiens
ctaagtttcctgaggcctccaagacatgcagaactgtgagtcaattaaacttctctcctcttataaattaccatctttgggtatttcttctatagctagtgtgagaatggactaatacacatatataatttttatctctgaatktatctttagaaagaaatatgttctaaggttctgcatttctaagtggtggtatcatggttgttgatggtacacagtaattggcaccaagaaaatctgagcaggtacgtaaagtatgtccttttataccttccaagacctggaattattagcctgaaattattataattttcatgttgcctcccaagaccataagcggatttttttttgtcttgtgcatagggtccaattccaactgcccaccatgtatggaacttttggcctcaagtatcatgcctatgaggcataaagccccagttcttgggtatataccagacatgctattcctaaaagtagccctgcttcgccttctacttacagtgaggattctctctgttttcaacatttaaggatttcatttttgtcccttttaacttat

SEQ ID NO: 631831 - DNA, 518 bp, Homo sapiens
gaaattattataattttcatgttgcctcccaagaccataagcggatttttttttgtcttgtgcatagggtccaattccaactgcccaccatgtatggaacttttggcctcaagtatcatgcctatgaggcataaagccccagttcttgggtatataccagacatgctattcctaaaagtagccctgcttcgccttctacttacagtgaggattctctctgttttcaacatttaargatttcatttttgtcccttttaacttattattacaattatatatatatatatattttatttctaagtgtttggagtgagagtgcagagttcttgcatcagcttagtctaccatttagatcagaatcttggattcactataccttggtcccaattccaaatatcaggaggggagaatgattggctcagattatatctgaccactcttggatgaatcaattatagtggtgcaacattatgtaatagaaacatgtctgttaggggccacctatgtgtgtgaaaggg

SEQ ID NO: 631832 - DNA, 512 bp, Homo sapiens
tcaaatggctggcttatggcctgggggctcctgctagattgcctgggtgtacgtgcaggcaagccagacacgcttctcatctcaaggtctttaactttaatcacatctgcaaggttcctgttgccatgtaaggtaacatggacacaggttccagggattagggcacaggtataaagtggtatctcattgtggttttgatttgcatttccctagtggccaatgatgttgaacatcttttcctgggctttttggctattcacgtgtcttgtgaaatggctatttaaacctttttcccatttttatattgggttatttgtctttttattgaataataagaattctttattcggggtattartttttattgctgctgtgacaaattgctacaaatttcttggcttaaaacaacataaatttattatctgacagttccataggttagaagttcgacatgggtctcactgagctaaaaagtaaagtgttgtcaggctgtaagggagaatctgtcgctt

SEQ ID NO: 631833 - DNA, 386 bp, Homo sapiens
ttttttctttacttattagattgagaactcacaggttttcacttaaaggaagcactttatggctgctctttggcacatccaaacggccagyatcgctactcttatgctgtggggccactattaagtaaaatgagggtgacttgaacacaagctctgtgataccatgacagttgatctgacaactgagatggctgctgagtgactaacaggcaggtagtgtagacaatgtggatacaccactgtatccacaatatgtatccagactggataaaggaatgattcacatcctaggcaggatggtgcaagatttcattgtgctcctcaagtcaaaatggtgtatgccatttaaaacttatgaattttttatttctggaattttccattta

SEQ ID NO: 631834 - DNA, 386 bp, Homo sapiens
ttttttctttacttattagattgagaactcacaggttttcacttaaaggaagcactttatggctgctctttggcacatccaaacggccagtatcgctactcttatgctgtggggccactattaagtaaaatgagggtgacttgaacacaagctctgtgataccatgacagttgatctgacaactgagatggctgctgagtgactaacaggcaggtagtgtagacaatgtggatacaccactgtatccacaatatgtatccagactggataaaggaatgattcacatcctaggcaggatggtgcaagatttcaytgtgctcctcaagtcaaaatggtgtatgccatttaaaacttatgaattttttatttctggaattttccattta

SEQ ID NO: 631835 - DNA, 386 bp, Homo sapiens
ttttttctttacttattagattgagaactcacaggttttcacttaaaggaagcactttatggctgctctttggcacatccaaacggccagtatcgctactcttatgctgtggggccactattaagtaaaatgagggtgacttgaacacaagctctgtgataccatgacagttgatctgacaactgagatggctgctgagtgactaacaggcaggtagtgtagacaatgtggatacaccactgtatccacaatatgtatccagactggataaaggaatgattcacatcctaggcaggatggtgcaagatttcattgtgctcctcaagtcaraatggtgtatgccatttaaaacttatgaattttttatttctggaattttccattta

SEQ ID NO: 631836 - DNA, 406 bp, Homo sapiens
tacactgttgttcaaataaacttgctttgtttcactgtcagcttgctcttgaattctttcctaagcaaagccaagaaccctcctgggctaagccccaatttttgggtttgcctscatcacttggagttcatgcttatttggcatgcctttgaaagtcattgtaggggtaggttttaaagccatccctaagtcaccttttggattacctatcagtgcatgtatcagctgaactttggggaaatatgcctaacttttctagatgcatagattaagttctggccattctggtataggatactactaaggtttacacacagcatagtgaaaaatacatcagaatcacaagccttaagccctggcttctagttctagatctatctgcctgtggctggctgtgtgactttga

SEQ ID NO: 631837 - DNA, 572 bp, Homo sapiens
gtggactgcagcctcagcccatacccaggagttctgggctgcccttcctgatagtctgtcctacagatttcagacttgcctagccagacatcacttatatattattataggacaattccttgcaacatatcttttaaygtatatctcctactggctctgctgctttagttgaactgtgacaaatgtagattttggtaccaagagtggggtgaatacattttcattttgcttgtaggttggaatgtgtctttggggatcagagagaagactggtaggcagagtgatgctcctttcaaggatgtccacgtcctaatcactgaggcctgtgaatatgtcaccttatatagcaaaggggaatcaagcttgccattgaattaaggctgctaatcagctggccttaaaatagggagattatcctgggttattcagatggacccaatataatcacaaggacccttagaggtaaaaggaggaggcaagaagagagggaaccagagagatggtagtgggagcaggactcggtccaatgttgctgctggctttgaagataaaggagctgaggaaagtggaca

SEQ ID NO: 631838 - DNA, 547 bp, Homo sapiens
tctccactaaaaatacaaaaattagccagccatagtggcacatgcctgtaatcccagctacttgggaggctgaggcaggagaagcacttgaacctggaaggcagaggttgcaatgagccaagattgcaccactgcactccagcctgggcaacagagtgagactttgtctcaaaaaaaataaaaacaaaaaaattcaaattctcaggttccccagacctactgagtcagaaatcctaaaggcagagtcagaaatctgcttttccaagccctccaggttgttctcatataagctaagtgattgccaacccattgagctagtagtagtattcttcagacatgrctaaacttcagaatctctgttctaaaaaatactggtggcctcacctaccaccagttaactaagtatctctgggcttgtttgggcaagtatacttttaaacagctttccaagtgattctgatgcacaatgaatattcaaacgcaggcatctagcctaacagcttgcaggttccaaacaggttctgagaaggaaactggcttgccaggg

SEQ ID NO: 631839 - DNA, 656 bp, Homo sapiens
agcagagccataattatctgaggaggaagctgagaaaagaaaggagaaagaaggaataatcccttcatgctgcgcctcctctccccacatcccagcrttacatggctggattcctctagtggccagaaatatttaatcgaatacttttgtttggatcttgcatccctggtaacctgaagatgttaccatggcaatccctgagtaatacatctcgattatttatggccttgcaaatagggtggggaaccattccaggccccatggaaacagcagggaggtagaagcctcatttccttcgctcactgtttccaggcagccccagaggaaggggagaagggagctgccagtttggttgggtagaaatagttcaaagccttttagcacggagaatctcacctcatcattccccttttgtgtcccttagagtttccctgttccctacccctcctattccgggtccccacaggtcaccctctattctctagggcataggtcagggttgggtgggtggaggggtcagggctatctaaggacttgggcccccagttctctgctgagctggtctaaaatcccattcacaccacatgctgcatcgatgacctcaggcacatgacttggccttccaaaggctttgtttcttcaagtgccaaatgagg

SEQ ID NO: 631840 - DNA, 424 bp, Homo sapiens
cgttttctgctctccagaatggtgagtgaatagatttctgttttaagcctcccagtttatggtaatttgttacagcagccccatgaaacgaacacgagccctcagacattgattgttggtaatgtgygtctcctcaggtctcagaaacagcctctgcctcacatcaactggcatgaccaggtcccagcttcctcgctgaactcactggctgtgtgccttttagtgagttgcttaccttctttgagccacatctgtcaaatgggaacattgatgcctgttcagtctgcttcatggacttgcagacttgcagagaaatttgcatttcatcctgtctatgtaataccttatcatctttacagcagactacacatgtagccaatggtgcttattttcattatgatgacacagaaaaaggacttgtgct

SEQ ID NO: 631841 - DNA, 508 bp, Homo sapiens
gaggtgggtcttcgggtgcagaggaggctgaagagagtgtacaagcatggaccccaaaccttcagatatttcattctctcacatcctttgcttggggagggtcctggcagcagcagggttggcactgtcccttcagcatgcactacctgctgtgcctgcagttcaatcagtcattcatgtgcacgtccagcaggttctggctggcagaggggaggcagcatgggggcaaagatcatcctctcaagggatttggagtgggtggggctggatttaaaacccagctctgcatttcccagcagaatgactgaggtcaagctccctaaccaatctgttactccttcagcaaaatggagttgtgaaggggtgcctggcacatagragatactcagaatatgtcagttggatttttctttccctctagataaggctgaacgtgtcatggagtctgcactctctacagtttctgttctttcctgattggcaaaggggtaaagtgagcctggagaag

SEQ ID NO: 631842 - DNA, 508 bp, Homo sapiens
gaggtgggtcttcgggtgcagaggaggctgaagagagtgtacaagcatggaccccaaaccttcagatatttcattctctcacatcctttgcttggggagggtcctggcagcagcagggttggcactgtcccttcagcatgcactacctgctgtgcctgcagttcaatcagtcattcatgtgcacgtccagcaggttctggctggcagaggggaggcagcatgggggcaaagatcatcctctcaagggatttggagtgggtggggctggatttaaaacccagctctgcatttcccagcagaatgactgaggtcaagctccctaaccaatctgttactccttcagcaaaatggagttgtgaaggggtgcctggcacatagaagatactcagaatatgtcagttggatttttctttccctctagataaggctgaacgtgtcakggagtctgcactctctacagtttctgttctttcctgattggcaaaggggtaaagtgagcctggagaag

SEQ ID NO: 631843 - DNA, 552 bp, Homo sapiens
aggcagccttgtctctaactgtagaccagtccagtgcaagctggcaagggttagtgtactgtctggcaggtggtgggctgtcgtggaagttgatggaatggatgagagtatcaataaattcaagcttccttctctccaacgtaaagttcttttgtgtctttgtgtttctactccccattccacgtcctgagccaaggccccagtggggcttctggccttgtccaagatcctgctctcagttarcctctctctcctgtgtcttcagtgtctttctttccacccatctctccgcatggacaggtatccccaggcctcctttcaagatacccttctgggttctctttgtctgtgtctgtaatcaatactggttactttccgctcttagatcagggcatcaccattctctcaacttcctgcactcctcacctctctctccctctttgctacatcagtctgtggctgagtcctcctattttacctctgctttttgtgttgtatccagtttctgtctttccctccccagtttcctccctacactgggccttccttttc

SEQ ID NO: 631844 - DNA, 552 bp, Homo sapiens
aggcagccttgtctctaactgtagaccagtccagtgcaagctggcaagggttagtgtactgtctggcaggtggtgggctgtcgtggaagttgatggaatggatgagagtatcaataaattcaagcttccttctctccaacgtaaagttcttttgtgtctttgtgtttctactccccattccacgtcctgagccaaggccccagtggggcttctggccttgtccaagatcctgctctcagttaacctctctctcctgtgtcttcagtgtctttctttccacccatctctccgcatggacaggtatccccaggcctcctttcaagatacccttctgggttctctttgtctgtgtctstaatcaatactggttactttccgctcttagatcagggcatcaccattctctcaacttcctgcactcctcacctctctctccctctttgctacatcagtctgtggctgagtcctcctattttacctctgctttttgtgttgtatccagtttctgtctttccctccccagtttcctccctacactgggccttccttttc

SEQ ID NO: 631845 - DNA, 552 bp, Homo sapiens
gatctaatctgagtcccattgcctggtaaggctatgcatggtaatgtcccatcttagaagtccaggagaaggctcaattgattgcatgatgtctgctggtccactcttgccgttgtctgtttttggtttcagttgccactctgtaaacaaggaccaggcttggctctctagttccctaagcaggagggcagaggagggaagtcccacccttccggactttgcttgccatccaagctttctttgacycttggccgcacctcagatatttctttcccgaccctgcagtcagcccagatttatcccgcctcgtgtctctcatgtaaaatgcatctcccgacactttaccaggttaaatgatttaacagccgaggcagagagaattaggggtccgggagcaggaggcaatgcctgcttttcagatgagattggaaaggagatggagattggtggtgatgataatctcttattttaataatataaaataactgtcccactgaatcagagtgagcgatgaattctgtggcctggggttagagacagcccagcctggag

SEQ ID NO: 631846 - DNA, 562 bp, Homo sapiens
tccaacctctgcccgttacccagttccaaaggtgcttccacattttcaggcatccttatagcagcaccccctcactgcagtaccaatttactgtattaatccrttctcacactgctataatgatgctacccgagactgggtaatttattaacaaagaaggttcaattgactcacagttccacatgacagggaaggcctcaggaaacttacaatcatggtagaaggggaagcggacaccttcttcacaaggtggcaggagggagtgtgcaggagaaactaccatttataaagccatcagatcttgtgagaattcactcactatcacgagaacagcatgggagaaactgcccccataatccaatcactttccttccttgacatgtggggactacagtttcctccctcaacacatggggattacaattcaaaatgagatttgggtggggacacacagccaaaccatatcaactatcctgggccaggaggttggtcactcttgttctgaggtagcaaaacagctgattaaactatatagcctttctgtttgtttgtttttttagtg

SEQ ID NO: 631847 - DNA, 576 bp, Homo sapiens
tataaagggaagtttccctgcatgtgctctcttgcctgctgccacrtaagacatggctttgctcctgcttcatcttctgccgtgattgtgagtacattaaacctctttttctttataaattgcccagtcttgggtatatctttattagcagtgtgagaatggactaatacacatcctcacccagtctgaggtttccaattgccccaaagtatagtccattgagagccagaggaaaggtagtacattgaggtctgactcgttgcctggagatagaattatccagaccctgttttagcttaaaaaacgaattatctagctttgtccaatagccaaaggcctaaagcaactagacccataggctactggacctgttagaattgagtttggttgcttctacaggagcctaaatatagtggcttctccataatatgtgtttccttttcctcccactcccaaaataaaagatgtatcttaggcattgaggaaatgtctggcacatgatggacaaatgagtgaatgaagccagccccaatcatgatcaatgatatagctcaaagtaaagcaaagggatagaca

SEQ ID NO: 631848 - DNA, 530 bp, Homo sapiens
tagaactgcttgtaatctccttcagacatccacttgctcccacccagccccactgaacacaaaggggctcctattatctccatagccttctgtagccaaaaatgcagatgaaccctgacctcatattccactcaacatgccctctgaacaaagagccttcctcacatgtttacattgccagaatagcagataagtggggcacacagagcaggcttccaggaggtgggcagctgcagcacagtggaagacatcactgattttgcctttggaaattggaagactcagatctgcaactcactagctgtgtggccttagaaaagtcactttacctttcttgccacaattcctscttggtgtaatgagcatgagcccatcccttctttatctatgtcacaggaggtattggggcttgaaatatgtacctgaaatatatccacactgctgatataaattacctaacaaggggagggagtatcatgtttccacacaagtgggttgggatacagaagtgaaaagacaatcatcacatc

SEQ ID NO: 631849 - DNA, 569 bp, Homo sapiens
cagctcagccgggctcctgagggtccttgaagcaggctctgggactggactattccctgacatctgaagccccatggtggggatgagcagagtcaggcttgggtgttgttggtaaaatgagagtagatttggataatttgagggctgggatgggggtgagggtgcagataatgtggacaaactgagggtagccaggagtggggaggggtcgggagcatgcattgcacatgggcctgcttgggaaaacagatctccaggccttcagcttcttcctttgcactcatttctgtgccacttcaggtgatgaaacaggctaaggatccccatgggggaaacttctgcccactttcatgagtacttagtctcatctcctaggaargcatccatgcttcctgagccagatccatcagttgtcatgtgaggaagttctgagtgtagaatatgtacctgttggcaagctccataatcacagcctggtcacttaatttgatgtgactcagacgagtacattagtcaggctggctgacttattccttatgccctgatgtttgggctacttagttctcatg

SEQ ID NO: 631850 - DNA, 578 bp, Homo sapiens
tattgacaaccacacccaaatctaccttttaaaaatgcatctatctgcacatgctcacacctgcatggatatccgtacccagttttgcctcgtagtcaagcacgctggagtgagatgccaggtctgcctttcactcggctgtttgtcctttccaccctgccttactattcctcctgttctgtgtcccgaggggcttactggcaacmttttcaggtaggccgagtgaaaaagaacaacaggctccagttgtaggcaggtagcataacagccgtggacccagatggcctgtgttcagagtcctgctctgccacataccagctgtgagaccctgggcaagctaactcaccttttcaggcctcagtttcttcctggatgaagcggggctgatagtactggtctcacatagctattgtggagcacaagttagtgaatgcatgtgaagtgcttgccacagcgataaatacatagtgataatagtggtgataatattgacaaagataacgacatagatgtgataaacatgatgttgatgaagaaggaaaaggaggaggaggagatgtcagggtggtataaagacc

SEQ ID NO: 631851 - DNA, 578 bp, Homo sapiens
tattgacaaccacacccaaatctaccttttaaaaatgcatctatctgcacatgctcacacctgcatggatatccgtacccagttttgcctcgtagtcaagcacgctggagtgagatgccaggtctgcctttcactcggctgtttgtcctttccaccctgccttactattcctcctgttctgtgtcccgaggggcttactggcaacattttcaggtaggccgagtgaaaaagaacaacaggctccagttgtaggcaggtagcataacagccgtggacccagatggcctgtgttcagagtcctgctctgccacataccagctgtgagaccctgggcaagctaactcaccttttcaggcctcagtttcttcctggatgaagcggggctgatagtactggtctcacatagctattgtggagcrcaagttagtgaatgcatgtgaagtgcttgccacagcgataaatacatagtgataatagtggtgataatattgacaaagataacgacatagatgtgataaacatgatgttgatgaagaaggaaaaggaggaggaggagatgtcagggtggtataaagacc

SEQ ID NO: 631852 - DNA, 627 bp, Homo sapiens
gctaactcaccttttcaggcctcagtttcttcctggatgaagcggggctgatagtactggtctcacatagctattgtggagcacaagttagtgaatgcatgtgaagtgcttgccacagcgataaatacatagtgataatagtggtgataatattgacaaagataacgacatagaygtgataaacatgatgttgatgaagaaggaaaaggaggaggaggagatgtcagggtggtataaagacccttgtgaatgctgtcaccaacaaccttgggaggatgcgctcatccctctggctcaggagaggctgcctaacagctatggcggaagcatcccttaggagcaatttcagagtctctcccttgtgtggcacaacccctgttcacagcatgcccattctcctacactccagggagcagcttgacagtgacccatccatgaagagttgcagtgccaacttctacttggaagtgccaacttcctccttctattcaactctgcagagccctttgctaagtctatgaaagcagatggcgtaaggaattagaaagccaagcagctttgctaagacccccaagaaggtaacggtttctgctaagcattcataacagctgccattgtgttcaaatt

SEQ ID NO: 631853 - DNA, 627 bp, Homo sapiens
gctaactcaccttttcaggcctcagtttcttcctggatgaagcggggctgatagtactggtctcacatagctattgtggagcacaagttagtgaatgcatgtgaagtgcttgccacagcgataaatacatagtgataatagtggtgataatattgacaaagataacgacatagatgtgataaacatgatgttgatgaagaaggaaaaggaggaggaggagatgtcagggtggtataaagacccttgtgaatgctgtcaccaacaaccttgggaggatgcgctcatccctctggctcaggagaggctgcctaacagctatggcggaagcatcccttaggagcaatttcaragtctctcccttgtgtggcacaacccctgttcacagcatgcccattctcctacactccagggagcagcttgacagtgacccatccatgaagagttgcagtgccaacttctacttggaagtgccaacttcctccttctattcaactctgcagagccctttgctaagtctatgaaagcagatggcgtaaggaattagaaagccaagcagctttgctaagacccccaagaaggtaacggtttctgctaagcattcataacagctgccattgtgttcaaatt

SEQ ID NO: 631854 - DNA, 627 bp, Homo sapiens
agcgcagagccggagtcgcggtggccgcctcagcgccatgtcgagggttgctgaggggccagcggcagcgcggcgcggcttgtagtccccgcgcgcatgcgcccagcctgccaggaccctgcgacccgccccagttaccatggcgaccgccgggcccagccgagccggcaccatggtgacagaggaagctgaggtctagctgcttacggatgcagcgatgctctggaccggcacatgggttctctttcaatgaacttggcgggaggagagtaaagaagtatgtacaasagtgaagcagggtatatttccatagctatagaataaatccatcacaacaggtcggagaaggaacactcctttaaaatttgggaaataaagtatttcttattttacaaataaggatgcagcccagttatcttggaagcattatcgccttcacatcttttgggcccccaattccaaattgatggaaggaaaagagctgaaatctgcttaaaacataagcaatacatacattatacagcatataaaagtgatgtcttgctaaaataatttgtttatgtggtagatcaaaagcatgatggcatacccaatagtttattctgcagaaaagcagactaattattt

SEQ ID NO: 631855 - DNA, 554 bp, Homo sapiens
gggttatagcagatttttaaaatccctaattagactctccttctctttaagaccacttttgagttaccactgtatttatatatctgagtcctgtttcccaactgctagtgagctccttgagggcatccttgggtctgtacaccactgaaatctcagcacctagaaagcagttctctaatagtggctgataccatgtgaatgcattctctgcrtcaggtcctgtactcagcactttacgtatgctctcttactcttacaactggaggagaaaggtattataattatccccatcgtatggatgagaaaacagaaagattggtgaacatccaagccagaaacacttgataagcagtagagatagacttcaaactcagatgttctagagtttcagctcttaaccactatattgtactgcttccttactagacaaacacttagttttaaagtaaatattttttgagtaaaaaagtgaatgaagtaaagttaactaaagttaatttcctgaaatcacagtgatgtttatgtcttctttcaataaaccattctcggtataa

SEQ ID NO: 631856 - DNA, 605 bp, Homo sapiens
cttaatcataagtaattgcagtattacattcaggcagaattatccacacaacccctaagctccatggaacttgttcttaaactccatggggtgggtttaaatcagttcttttgaaagcaaccagactttcctcaagtataagatggccacataatgtaacagacgcagctatggatttagtacattcgactagcagctgttagagatgtggtattagcaaattccttctccataaattctttgaattttttaaaagcacaaatgtagtaaaagaaaggaaaatatgtgtgaatgaagttaggatgtatggagtctgctgaagaataccctagtggkgaagatggatttttttttttttttttgagactgagtttctgatgcagtggcatgagctcagctcactgcaaaactccgcctcccaggttaaagccattctcctgcctcagcctcccgagtagctgagattacagatgcgtgccaccttgcctgactaatttttttattgtttttagtagacatggggtttcaccatgttggccaggctggtcttgaactcctgacctcaagtgacctgcccgccttggcctaccaaagtgctgagatta

SEQ ID NO: 631857 - DNA, 558 bp, Homo sapiens
gatggccctggtttcaagaataagaactaatgccattgtagtgagtcattttaaaacttgatgccttttggccgggcgtggtggctcacacctgtaatcccagcactttgggaggccaaggcaggtggatcatatgaggtaaggagtttgagaccagcctggccaacatggtgaaaccccgtttctattaaaaatacaaaaaattagccggacgtggtggcacatgtctgtagtcccagctactctggaggctcaggcaggaggatcacttgagccccggaggtggaggttgcaatgagctgagattatgccactgcattgcagtctgagcgacagagtgagactcgatttcaaaacaaaataaaacttgatgcctttgaaaataaatacagaattagtttaatatatttytaacaagtaggcacaacagagaatggagtgacaaccgctgctcctagaatcacattaagaaaggcatagaagagaggaaacagaagagagtaagtgaggctggtcagtattcaggggacctctccatcatcacctgtgcactctctg

SEQ ID NO: 631858 - DNA, 468 bp, Homo sapiens
aatgtttataccagctcttggggtgggtgggaggatggggagtagaaaggagccctgatgtgtagcaattgcctatttcctttgtgtaaatactcccaccatggctgatgtcaagctgcaagcatgtagtcactgagcatggagttggtaagagatgtgcaccatcagttctcctgagccagtacaagccatctccagcacatcattgcctgccacattaaggaaaccttagctgctggcctgaggcttggcaccatcagatgctactttaacacattcagaaagaacttactgcacccaagatttggcccctgacttacccagcccctgaggttgcctccaatccagacctgggcttggttgactgtrctagtgcagcactgaatgcgatagttgaagttgaagtcatggatagagacaaggttgcctccgtagcatctgctgcagacattctgcagacggaaacaa

SEQ ID NO: 631859 - DNA, 460 bp, Homo sapiens
aggagggagtggggaagaaagggaggttgagtcgtaggtacaaacatacagttcagtagaggaaataagagcaagtgtttgctagatcagtagggtgactgtagtatacaataatctattgcatagttcaaaacatctagaggaaaataatttgaatgtttctcgcataaagaagagacaaatatttgaggtgatttgattaccctgatttgatctttacraattatataaatgtattagatcatcacatgtaccccaaaatatgtgcatctatttatgtataaataaaaataagataaattattggaagggttcaataaaccaaagtatgtaagacataaaccacagttctctcagaaagcacatgctcaaatgaattctatgtgcttgactgctgtaagccattatggatccctgtatacttctagtcagcagccagctccttgcatcttcagatcca

SEQ ID NO: 631860 - DNA, 428 bp, Homo sapiens
gaattctgagtgacctctagccaackcttcgtttaataacctttgagactgaagcctgagaaaataggccttgcttgaggctccatagcagtgagtggcagtgacaccttcctcttccgtccctctgcgggcctctgcactgacgtgtcttcatgttataccgcttgtgtgtctgtcttactttcttcatcacagtcccttctctccccacgaatgagctgcttatgtaggacaaggtctacccgaaatgtagaatcttgaaaacataggggaatgcctaacacatgttaattctctctagttgaaatgaggagagaaaaacaaatctttctctcaaattcaatctatattcacaggtaaaatcttcagaatggcattgatgatgggataggcatttcccaaataaaatttggtgttcttaaaagagg

SEQ ID NO: 631861 - DNA, 546 bp, Homo sapiens
tagtaatcagatgaccagtcaacaaagtcaatctatgttaactaaataaatagatgggataaaagtagagattgtattccataaccatgcccaagtagaaaaaggcattcaagctgtccagaatatgaccccaaccaactttcccatgccttaggcctactgccttcttcaaaagactcccggttccggttcaatccgctgcttgtgctgcccagacatgccctgtgctttggtacctgctggatttggtctgtttttccctttcctggaacacccatcttctccctgcttcccccatcagattttcctgagcctgaatttcacctccttgatgaagccctgtcaccatgaaaatcataccgtttttaaattcaaagaattctgagtgacctctagccaactcttcgtttaataacctttgagactgaagcctgagaaaayaggccttgcttgaggctccatagcagtgagtggcagtgacaccttcctcttccgtccctctgcgggcctctgcactgacgtgtcttcatgttataccgcttgtgt

SEQ ID NO: 631862 - DNA, 513 bp, Homo sapiens
ggcaataaaaacaaaaatgaacaaatggaattgcatcaaactaaaagacatatacagcaaataaaataatcaacagagtgaagagacagcctaaagaatgggagaaaatatttgcaaaccatatatctgagaaggcattaatatccgaaatatatacaaactcaacttaatgacaagaaaataaaaccttattaaaaatgggcaaaggacctgaacggacatttttcaaaataagacatacagttgaccaacaggtatatttaaaaaaactcaacatcactaatcatcagggaaatacaaatcaaaaccacaaacatacataatctcacagctattagaatgccagttgtcagcatgacaaaagatcagtgttggagaggatgcggagaaaagggaaccctggtacactgttggtggaaatttgaattggtatagccattrtggaaacagtatggaagttcctcaaaaaattaaaaagagaactatcaaatgatccagcaatcttacttctgg

SEQ ID NO: 631863 - DNA, 619 bp, Homo sapiens
acaacatggatggacctggagggcattattccaagtaaaacaaagcgggcataggaagacaaaattttgcatgatctcacttatatgtagaatctaaaaaaatttaaattcacagaaagagagtgtcgaatggtgattgtcagggactggaggaggagggaagcrgggagatgtttgtcaaatgatacaacattttggttatgcaggatgactaagttctgtaaacctaatgtacagcactgtgactgtagttaataatagtgtatcgcatacttgaaatttgctagaagatctcttaaatgctcttcccatatccagaaaaaaagaaggtaattatgtgaggtgatggatatgttaattaacatgactgtggcaatcatttcataatgtatacatatatcaaaacatcatgttgtgcatcttaaatatgcacaatttttctttgtcaattatacctcaatgaaacggggaaattttcattttaaaatagttttgccacattttgcttttttcatccatgattcaaaaataagacaactgttgtcagtcctgatgactaatcctttatataggacctatacatatgagcatggaaatatatttatttttgtttagaagt

SEQ ID NO: 631864 - DNA, 619 bp, Homo sapiens
acaacatggatggacctggagggcattattccaagtaaaacaaagcgggcataggaagacaaaattttgcatgatctcacttatatgtagaatctaaaaaaatttaaattcacagaaagagagtgtcgaatggtgattgtcagggactggaggaggagggaagcagggagatgtttgtcaaatgatacaacattttggttatgcaggatgactaagttctgtaaacctaatgtacagcactgtgactgtagttaataatagtgtatcgcatacttgaaatttgctagaagatctcttaaatgctcttcccatatccagaaaaaaagaaggtaattatgtgaggtgatggatatgttaattaacatgactgtggcaatcatttcataatgtatacatatatcaaaacatcatgttgtgcatcttaaatatgcacaatttttctttgtcaattatacctcaatgaaacggggaaattttcattttaaaatagttttgccacattttgcttttttcatccakgattcaaaaataagacaactgttgtcagtcctgatgactaatcctttatataggacctatacatatgagcatggaaatatatttatttttgtttagaagt

SEQ ID NO: 631865 - DNA, 404 bp, Homo sapiens
gtaagtctgtgttgaacagatgagtaagtgagtgagccagttaaactattcccagtgaaaagccagcgctgagctagactctgtcttgctattttgtgacaaatgatactccggagagagggaggaatgaggtcaaataagrgtgaggagcagtggagtcacagttcctgctgaggactggggtgatctgtctgagagctgtctgccctcccttgcccatgagcagggaagatggcagagaccccattaagtgtcactaggattggagcagggattgaaacctctgcctttcccattgtccctccctggagcctcccttcctttgcactgtgaactgttttctgctccatttcctctccaagccctcagatcaccctcagagctctctgttatcttccacatca

SEQ ID NO: 631866 - DNA, 367 bp, Homo sapiens
gagctgcctctgctcagacacagaaaatggatcattctagaccaaaaagagaacctgataatgcactttgcctagacagaacccaatatacaaagtccactgaagaaacaagagaacaaagggccatgtgattaggaaatggttatttatgtttcaagggtatgtgccacagcatgcttttcatataaaaaacaaccatagcagatttaagatacccatttactcaccaaaaccgtatattaatgccaagctcctcaatagyatttttaagcattcatatggtgtgttcttgcataacttcacacattaggtgaggggaagcattacagcagagtgggtaagagcatgggctttgagccaagcagat

SEQ ID NO: 631867 - DNA, 418 bp, Homo sapiens
ggtctgaaggatggtggccctattctcacaggtccatgaggcagtgccccagtagggactctgtgtgtgggctccaactccacatttcttttctgcactgccctagcagaggtctccatgagagccccacccctgcagcaaacttctgcctgaatatccaggcgttttcatacatcctctgaaatattgacttctgtgcactggcaggctcaacaccatgtggaagctgccaagacttgaggcttatmgtctctgaaatcacagcccaaactctacattggccccttttagccatggctagagtggctgggatccagggtaccaagtccttaggatgcacacagcagggggggccctgggcctagcccaggaaaccactttttcctcctaggcctctgggactgtaatgggaggggct

SEQ ID NO: 631868 - DNA, 539 bp, Homo sapiens
gcctccccgcccaggggccctgctctctgcaggctctactgtgtcctgggccctcagctgagagaccaayccgtccttccaggaaaatgcgagcctcaccaggcagggttatgctcccgccctcctccttgtaattattacctgaccctctgcctcctgcaacgccagggctggaggacaggctggcccctattcctatgggcactggccaacatccaacgcctgggacataaactgcacccaatggtatgtgaactgtactttacagtttgcacggtgtgttctggtatttgctaaatcttcacacatgctcaggtggcagtacgttttaatgatacaggcgagggaactggggctcagaaaggtctagtgccttgcgcatgggagactcaagtggtagaaccggtggccgggctccgggctctgagcggaaagcctgcaggactcggaatcctgaagacctgggtttaaacccgctcagctagggactgggtgaggcatcgcaggcaagtgacttcacctcccagcgccggtgccct

SEQ ID NO: 631869 - DNA, 645 bp, Homo sapiens
ttgcagtgagccaagatcgcaccaccgcacttcagcctgggcaacaagaacgaaactctgtctcaaaaaaaaaaaaaagtgagaatagtaccttccttatataaagcattcttttaaagatcaaatgaagtaatttgcttaacaagtgataaccataaaaagcaatattaccctgccaattatgattctcttcttgtttaatattttcaagtcctaatcaccccctcctttttttcaaagtagaaaaaaagacccactattaatcattttggctttcttctctctctaggagaaaaaccaatgtttagaaaacaggctttttcactctgcatggaaaatgtgtgtttgaagtatgaactttttcaactgtgtgatttctatatattctatatatagaacagaatttagaaccctaacttcaccaagtatataaagtctgaaataaaaatcccaatctgttaattcataggaaaaatttcaacaacaaaattcgctcccacagtaagagggcattatttctatcatttcagggaggtaagtgggtcagattttccacaatgcaattaagtatgccaagagccaatggcaaaagtgatttcacayacaatttataggatgagtcaaaccaccaggagaaaaccgatg

SEQ ID NO: 631870 - DNA, 570 bp, Homo sapiens
cgtttagtcttgtcaacctaaataacagacagggagatgctctaaaagaaaatgattaattgggaataggcactgtaatggtagtatgtgtgtcatagtaaactatgtgtgtattcagggaggtaaaggaagactaagatttttaaagggaaaattaggaggatcatatcattgttgagtcagataattatctgacttgtaaggatcaattaacaagggtggtgctaatccaaggttgaacaggtagtggctgggcagatgtctttgaagaggtagtttttgttttttgggtgcaatagttttggggtaagacgtcgggtgttgtagaacctcttgtgatagttcctgttatcagacatttatgcatgagaaccttcctttcatggccttccccagatctgtttgtcaaggtttccaacacaagtgactcctctttgagtctgacaactttcacactttcccctgttgatcaaaatctttctccaaaagcactgctgatcaatcgtyctgtagttaggttgttgttgtttggagatgagggtctcgctatgttactaaggatggccttaa

SEQ ID NO: 631871 - DNA, 615 bp, Homo sapiens
taaaatgaggataataatggtatctatctatttccattttacgtgtgtatttgatttgacaacaattatatagcattcaggatcaggacaagaggtagacacgatgaatatcagtgcatttaatcccmaaagggctgtgaaaactgtgaaaattgtcagaatcaatatggagtcacttgtattaaaaatcctggcaaatagagccagggaaggccacggaggaaggattttcatgcctaaaagtcctgataacaaaaactatcacaaaagactctgcaaaacccacaaccttgcacaaaggtcatcgcaaccttaccaaaaaaaaaattattctgtgaggacatctgcccaggaactgcctgttcaaacttggactggcactaccctggttattggtccttatagccaaggaaaatcatctcaaaacaattatgtaatcctcattttccctttaaaaacatttgtctttcttcacctccctgaatccacacatagtttacccaagacatgcatattctcatcacaatgcctattcccaaataaacaccactttcttttagccagcttctctctctgtttgttatttatgttgacataatggtgtcagaagtagga

SEQ ID NO: 631872 - DNA, 491 bp, Homo sapiens
tgggactacctctttctttcatttcaatggaattgtaaggactctgtcaggcaggattgatttcagcaaaaggtagaatggggtacaaaatatcccttgtttcactgaagtatatacagaaatagtaagactcrttggattcagtcagttttatagttaaagcagttttgtgggctgaacactgacacagtaactttcacaaagtaggcaaagttaccaggcaggtattgttctcttaattaaaaaaaaaaaaacaagctctacaaaatattggtctggttccaggccttggggtaaaaaagctctactgggtcctcttcactatatatgggacggggccggtataatgattgtccccccacaaaaatgcgtaatgttattacttgagatcatgagagtatttggcgtgggatgactgccctttctttttcttggcttctagagctaggcacccgcaattgcaaaacaaattcaagataaaatacccagct

SEQ ID NO: 631873 - DNA, 489 bp, Homo sapiens
tatttggcgtgggatgactgccctttctttttcttggcttctagagctaggcayccgcaattgcaaaacaaattcaagataaaatacccagctgggcaagtctgtacagtagatctcacaaactggtttgctattcaatctttcttctccctacccacttctctctttccctctttttgtctttctttccctgtctcaatgaactaactgctcaactgttcctctcggctattcatcttcggaactgtctgccgatgaagccatttatttatctctgtgactgaaaaaaaagttgtctgaactgtttcagattcccaataagctggcaggcccacttgctccaagttatttatttggggcattaatagtgaggtggttgtgggtggccaaaataattgagcagttgttgtttaacacagcaacgacaacaacaatgacaacaaacaattgtcaggaaatcagccaggaaacagcttgtaaacagaaaag

SEQ ID NO: 631874 - DNA, 489 bp, Homo sapiens
tatttggcgtgggatgactgccctttctttttcttggcttctagagctaggcacccgcaattgcaaaacaaattcaagataaaatacccagctgggcaagtctgtacagtagatctcacaaactggtttgctattcaatctttcttctccctacccacttctctctttccctctttttgtctttctttccctgtctcaatgaactaactgctcaactgttcctctcggctattcatcttcggaactgtctgccgatgaagccatttatttatctctgtgactgaaaaamaagttgtctgaactgtttcagattcccaataagctggcaggcccacttgctccaagttatttatttggggcattaatagtgaggtggttgtgggtggccaaaataattgagcagttgttgtttaacacagcaacgacaacaacaatgacaacaaacaattgtcaggaaatcagccaggaaacagcttgtaaacagaaaag

SEQ ID NO: 631875 - DNA, 413 bp, Homo sapiens
tatggcatgacggcctaatccagyctgccaccgtttttggtaaataaaattttattggaacacagccatacacattcattcatatgcctgtggctgctttcccactataataacagagttgaatagttgtgccagagacctacggcacacaaagcctataatatttactacctggccctttacagaaaaagtttcttgacccttgctgtacttggctgtattggacaaataatgtgagatactttggtctttcacattaaattttaaaaatgccttagatgaagtacccagcaatcctttgagataactggcaagttgaaaataagaaatatttatcataaaatctgtttacattagccttccacttcagtaacaattacacacagcaggaactaaaaaacaacttacagatc

SEQ ID NO: 631876 - DNA, 552 bp, Homo sapiens
cattcattcatatgcctgtggctgctttcccactataataacagagttgaatagttgtgccagagacctacggcacacaaagcctataatatttactacctggccctttacagaaaaagtttcttgacccttgctgtacttggctgtattggacaaataatgtgagatactttggtctttcacattaaattttaaaaatgccttagatgaagtacccagcaatcctttgagataactggcaagttgaaaataagaaatatttatcataaaatctgtttacattagccttccacttcagtaacaattacacacagcaggaactaaaaaacaacttacagatctttcatccaactctattttacagataaagaygctgcccagaaagtttaaggaattgacttgcacaaggtcacacacctaactgagagatgaggaacacagatcctaaatctgggaaaatatattaagaagaaataaacagaacaaagtctattcgcttgaaagaattgtagcttatctgatataacttatttgggggtgagaggttgggtg

SEQ ID NO: 631877 - DNA, 552 bp, Homo sapiens
cattcattcatatgcctgtggctgctttcccactataataacagagttgaatagttgtgccagagacctacggcacacaaagcctataatatttactacctggccctttacagaaaaagtttcttgacccttgctgtacttggctgtattggacaaataatgtgagatactttggtctttcacattaaattttaaaaatgccttagatgaagtacccagcaatcctttgagataactggcaagttgaaaataagaaatatttatcataaaatctgtttacattagccttccacttcagtaacaattacacacagcaggaactaaaaaacaacttacagatctttcatccaactctattttacagataaagatgctgcccagaaagtttaaggaattgacttgcacaaggtcacacacctaactgagagatgaggaacacagatccyaaatctgggaaaatatattaagaagaaataaacagaacaaagtctattcgcttgaaagaattgtagcttatctgatataacttatttgggggtgagaggttgggtg

SEQ ID NO: 631878 - DNA, 595 bp, Homo sapiens
gtgcctcccacacgtagggcttggtgtattgtgaatggtagyctacacatacgcaaatgagaactgggaagataattaaatctgaggtggaaatagagtagacttgtgaatgaacaaagaaagtgtatttctctggaagccaagatgtcaaaggtacattttattgatactgtatactctcagcttccatgtaaatcagtattctcatgcttcaatgttctaaccttgcatttctgaagaatctattgtgtatattaacagcggctgtggcaggagatgtcaggcatttttaaattccagatttaaagagattcatgaatgtgcatgatgctacacataaagaattgaatggtcaaatgcactttattttgagctaaaagttagaacaaaagagattcatgtcaaagactttggattcccaacctgggctttttttttttttttttccctcagaaaatagccataaaactaaaagagagacctgtgtgacccaaaggattctaaaatgcttcagaattttagaatcctttccaatggctcagttggggcaactagctccagaccccaccactatccaagctccaccatcctttct

SEQ ID NO: 631879 - DNA, 623 bp, Homo sapiens
ggtacattttattgatactgtatactctcagcttccatgtaaatcagtattctcatgcttcaatgttctaaccttgcatttctgaagaatctattgtgtatattaacagcggctgtggcaggagatgtcaggcatttttaaattccagatttaaagagattcatgaatgtgcatgatgctacacataaagaattgaatggtcaaatgcactttattttgagctaaaagttagaacaaaagagattcatgtcaaagactttggattcccaacctgggctttttttttttttttttccctcagaaaatagccataaaactaaaagagagacctgtgtgacccaaaggattctaaaatgcttcaraattttagaatcctttccaatggctcagttggggcaactagctccagaccccaccactatccaagctccaccatcctttcttatgactcacactcacaaatgagtgctaagagcctgccctgtgggggcagggatgccctgttagaacaaacatgagctgaaggtgaacccaaaagtaatttggttccatcctttatattacatagatgaaaaccgccttccagggaggtgaagtgattcacaaagtaacacagcaagtca

SEQ ID NO: 631880 - DNA, 656 bp, Homo sapiens
tgttctaaccttgcatttctgaagaatctattgtgtatattaacagcggctgtggcaggagatgtcaggcatttttaaattccagatttaaagagattcatgaatgtgcatgatgctacacataaagaattgaatggtcaaatgcactttattttgagctaaaagttagaacaaaagagattcatgtcaaagactttggattcccaacctgggctttttttttttttttttccctcagaaaatagccataaaactaaaagagagacctgtgtgacccaaaggattctaaaatgcttcagaattttaraatcctttccaatggctcagttggggcaactagctccagaccccaccactatccaagctccaccatcctttcttatgactcacactcacaaatgagtgctaagagcctgccctgtgggggcagggatgccctgttagaacaaacatgagctgaaggtgaacccaaaagtaatttggttccatcctttatattacatagatgaaaaccgccttccagggaggtgaagtgattcacaaagtaacacagcaagtcacacaagtcttttgatttctaacccattgcttttgtcatggccacattgatccctgacaaataatataaaacaaggaaaccagacccttttaaaaaa

SEQ ID NO: 631881 - DNA, 656 bp, Homo sapiens
tgttctaaccttgcatttctgaagaatctattgtgtatattaacagcggctgtggcaggagatgtcaggcatttttaaattccagatttaaagagattcatgaatgtgcatgatgctacacataaagaattgaatggtcaaatgcactttattttgagctaaaagttagaacaaaagagattcatgtcaaagactttggattcccaacctgggctttttttttttttttttccctcagaaaatagccataaaactaaaagagagacctgtgtgacccaaaggattctaaaatgcttcagaattttagaatcctttccaatggctcagttggggcaactagctccagaccccaccactatccaagctccaccatcctttcttatgactcacactcacamatgagtgctaagagcctgccctgtgggggcagggatgccctgttagaacaaacatgagctgaaggtgaacccaaaagtaatttggttccatcctttatattacatagatgaaaaccgccttccagggaggtgaagtgattcacaaagtaacacagcaagtcacacaagtcttttgatttctaacccattgcttttgtcatggccacattgatccctgacaaataatataaaacaaggaaaccagacccttttaaaaaa

SEQ ID NO: 631882 - DNA, 656 bp, Homo sapiens
tgttctaaccttgcatttctgaagaatctattgtgtatattaacagcggctgtggcaggagatgtcaggcatttttaaattccagatttaaagagattcatgaatgtgcatgatgctacacataaagaattgaatggtcaaatgcactttattttgagctaaaagttagaacaaaagagattcatgtcaaagactttggattcccaacctgggctttttttttttttttttccctcagaaaatagccataaaactaaaagagagacctgtgtgacccaaaggattctaaaatgcttcagaattttagaatcctttccaatggctcagttggggcaactagctccagaccccaccactatccaagctccaccatcctttcttatgactcacactcacaaatgagtgctaaragcctgccctgtgggggcagggatgccctgttagaacaaacatgagctgaaggtgaacccaaaagtaatttggttccatcctttatattacatagatgaaaaccgccttccagggaggtgaagtgattcacaaagtaacacagcaagtcacacaagtcttttgatttctaacccattgcttttgtcatggccacattgatccctgacaaataatataaaacaaggaaaccagacccttttaaaaaa

SEQ ID NO: 631883 - DNA, 593 bp, Homo sapiens
aaagtggaggcagaagaccctgcatagaaaactgttgaatgaagtccttgatgtgaacctctatttagttgcacatcacactaaataacacactagttgagggcatgagatctagaatcagactgcctgagctcagatgccatgctaggggtgtgaccttgaggcagcttctgcatgcctcaaatttattgtctataaaatgtgtagaataatacacattagtattattagtaggtagaataatacatacttcacagaattcttattaaggattaaatgaaagggtcaaactaaagattaaatgtaaagggtttaacaaagtatctggtatttaataaatattrgatattagtattactggtattactaatgatcaatatatacctcttttccttccatagaatgtgaggactaattgagagaaaggaccttgaatatatgttttatctgccacaattcttaccacattgtagattctaaataaatattggacggatggatggttggatagatggatggatgaattaattttaagtttctatagataaaggcactacagaagacctccttgttttcagatctcttccagaaag

SEQ ID NO: 631884 - DNA, 593 bp, Homo sapiens
aaagtggaggcagaagaccctgcatagaaaactgttgaatgaagtccttgatgtgaacctctatttagttgcacatcacactaaataacacactagttgagggcatgagatctagaatcagactgcctgagctcagatgccatgctaggggtgtgaccttgaggcagcttctgcatgcctcaaatttattgtctataaaatgtgtagaataatacacattagtattattagtaggtagaataatacatacttcacagaattcttattaaggattaaatgaaagggtcaaactaaagattaaatgtaaagggtttaacaaagtatctggtatttaataaatattggatattagtattactggtattactaatgatcaatatatacctcttttccttccayagaatgtgaggactaattgagagaaaggaccttgaatatatgttttatctgccacaattcttaccacattgtagattctaaataaatattggacggatggatggttggatagatggatggatgaattaattttaagtttctatagataaaggcactacagaagacctccttgttttcagatctcttccagaaag

SEQ ID NO: 631885 - DNA, 645 bp, Homo sapiens
catatcagattttattttagctaaggtaacctaactttctgagtcctgtaaaaataatttaaattccccattttagccayttcagcagccaagggctaataataataataataataataataataataataatacacatgtagaaccagacacctggcagtgaatagtggattgaaaagctactggaaacagtctagctggggaaatggtaaaacttagaagaccttaatattggaagaatatgattatacatcaaagtccattttaagtaaaacttttgttcaaaaatccagttgctagtttatacgtttttctccatacttatgactcaaagttcaaactttggttgtccctctgagtctcctagctctggagtttacgctattcagtcgttaagtgctgtttaaagaggctgcgaagcactttctagttaatagattcacattctctacatggtcaatgttggaggtgccagtcagtgaaggggagtgcatgcagagggaacaaccttgcacacacagatttagtagggggaaaaggaagagtaattgggagggtttttctggacccttacttcacttctaaactccaataaagaccatcaaatattgccaagagtatccccaggcaaaagtgccttcaaaa

SEQ ID NO: 631886 - DNA, 645 bp, Homo sapiens
catatcagattttattttagctaaggtaacctaactttctgagtcctgtaaaaataatttaaattccccattttagccacttcagcagccaagggctrataataataataataataataataataataataatacacatgtagaaccagacacctggcagtgaatagtggattgaaaagctactggaaacagtctagctggggaaatggtaaaacttagaagaccttaatattggaagaatatgattatacatcaaagtccattttaagtaaaacttttgttcaaaaatccagttgctagtttatacgtttttctccatacttatgactcaaagttcaaactttggttgtccctctgagtctcctagctctggagtttacgctattcagtcgttaagtgctgtttaaagaggctgcgaagcactttctagttaatagattcacattctctacatggtcaatgttggaggtgccagtcagtgaaggggagtgcatgcagagggaacaaccttgcacacacagatttagtagggggaaaaggaagagtaattgggagggtttttctggacccttacttcacttctaaactccaataaagaccatcaaatattgccaagagtatccccaggcaaaagtgccttcaaaa

SEQ ID NO: 631887 - DNA, 535 bp, Homo sapiens
gcaaggctccccagaatggagcctggaccacccagctagtgagacgactgatgtggaatgtgggttcatgttgtggagtgcagcaggcccacagtgctacatgggatgtcccatctgtgggcgtgggatctaggaggctatgggggaaatgcaggcagactccrtgagttctcctaagaggccctggaaacatgagggtggccattgatcacaaggcctttccacctaatggcttttcctacacaagtagttcacatctcgaacatttccaggcttagagcaaacagaatatggctgagaaattctgagcaaggcagaaggtaagaaaatgcaaggagaaagttagggaagctggagaaatgtgaggttattaggatgagctgcttctatcaagaggtagtgaacaagagggcagttttgctgaataaggacagaatcatcttaaaaatggataagtctcctgcagtaaagtgacagattaattaaactgcaaaccttctcagttgtctaggtctggagaaagttaagatataag

SEQ ID NO: 631888 - DNA, 535 bp, Homo sapiens
gcaaggctccccagaatggagcctggaccacccagctagtgagacgactgatgtggaatgtgggttcatgttgtggagtgcagcaggcccacagtgctacatgggatgtcccatctgtgggcgtgggatctaggaggctatgggggaaatgcaggcagactccgtgagttctcctaagaggccctggaaacatgagggtggccattgatcacaaggcctttccacctaatggcttttcctayacaagtagttcacatctcgaacatttccaggcttagagcaaacagaatatggctgagaaattctgagcaaggcagaaggtaagaaaatgcaaggagaaagttagggaagctggagaaatgtgaggttattaggatgagctgcttctatcaagaggtagtgaacaagagggcagttttgctgaataaggacagaatcatcttaaaaatggataagtctcctgcagtaaagtgacagattaattaaactgcaaaccttctcagttgtctaggtctggagaaagttaagatataag

SEQ ID NO: 631889 - DNA, 571 bp, Homo sapiens
aatggaaagtccagatatcaaagacacaaaatagctgaggcaaagactagggaaatgctggtaaaggagatttcagcagtagagaagcaaaccagtgaggggaagatctattttttaatagatgattaaaaattttctctcagggaaagatactgtaggttgaaatgaaagagttgcgatagtagaaaagattatttttgcaaaatgcctgagtttggagaaagaacatgggcttacagccccaacttcataacttcctaattgtgcaatcttgtaaaagtagtttgacctctctatgcctcaatttccctctatacaaactagagaacttagtaatgtcaaatcacggggatacaataaggcttaaaacagatcttgcatatgaagactgttggaaatctgtaaagttctaaacaaatgttagcttttattatcacagaatttctttgttttcctccactatatttcacactttctaagygtgcagacatgcactcatgttgctaaaagccacatctgttttttgagtaggctggtcataggtagaactaaaaggaataattggaagact

SEQ ID NO: 631890 - DNA, 577 bp, Homo sapiens
atgctattataatcccagttttacagatgaggaagccaagactcagagtagttaagtaagttctcaagaccacacagtatgtggccaggctgtgatttcaacttaggactctttgactccaaacctccctcatattctctcctttatactgtttctgaccttaaggaactcagagttgagcatgggaatgatctggaaaataaacacaatgtgaaaagtgctctgacagaggtaaggactaggtgcagtgggaccacagaggaaagacatctaactcagatctggggagaatggagccaggaaggaacattagaggagatgctatcctcagtcacggaggagggctgggagcgagaggcagagacacaaagctgaggggagcrtagtacattctttttcaggttattttattttattgttttattttactttttgagacaatgtctcattctgccactcaggctggagtgcagtggcatgatcatggcttactgtagcctcaacctcctgggctcaggtgatcctcctgcctcagcctcccaagtagctgggactacaggtatgtgttactgtgccc

SEQ ID NO: 631891 - DNA, 551 bp, Homo sapiens
gtgcagtgggaccacagaggaaagacatctaactcagatctggggagaatggagccaggaaggaacattagaggagatgctatcctcagtcacggaggagggctgggagcgagaggcagagacacaaagctgaggggagcatagtacattctttttcaggttattttattttattgttttattttactttttgagacartgtctcattctgccactcaggctggagtgcagtggcatgatcatggcttactgtagcctcaacctcctgggctcaggtgatcctcctgcctcagcctcccaagtagctgggactacaggtatgtgttactgtgcccagctcattttcgtattttttgtagagatggggttttgccatgttgcccaggctggtctcaaactcctgagctcaagtgatctgcctgccttggcctcccaaagtgctggaaccatgggcatgaaccacagcacctggcccatttttctttgtgtgaagggactcataagtaaacaaggtcccaataatgtctagttgtctgcatctttttctattt

SEQ ID NO: 631892 - DNA, 551 bp, Homo sapiens
gtgcagtgggaccacagaggaaagacatctaactcagatctggggagaatggagccaggaaggaacattagaggagatgctatcctcagtcacggaggagggctgggagcgagaggcagagacacaaagctgaggggagcatagtacattctttttcaggttattttattttattgttttattttactttttgagacaatgtctcattctgccactcaggctggagtgcagtggcatgatcatggcttactgtagcctcaacctcctgggctcaggtgatcctcctgcctcagcctcccaagtagctgggactacaggtatgtgttactgtgcccrgctcattttcgtattttttgtagagatggggttttgccatgttgcccaggctggtctcaaactcctgagctcaagtgatctgcctgccttggcctcccaaagtgctggaaccatgggcatgaaccacagcacctggcccatttttctttgtgtgaagggactcataagtaaacaaggtcccaataatgtctagttgtctgcatctttttctattt

SEQ ID NO: 631893 - DNA, 585 bp, Homo sapiens
ttgattatacgttaaattacctatatctgccgggcacagtgctcatgcctggttaatcccagcacttgggagctgagatggttgatcacgaagtcaggagatcgagaccaaccctggctaacatggtgaaaacccgtctctacttaaaaaaatacaaaaaaattagcygggcatggtggtggacacctgtagtcccagcctcttgggaggctgaggcaggagaatggcgtgaacccgggaggcagagcttgcagtgagctgagattgcgccactgcactccagcctgggtgacagagcgagactctgtctaaaaattaaaaaaaataaaaataaataaaaaattacccgtatctttgtacatcagtgggccaagatggggagatgctatctctttacctgaaagtgagcccacagttttaaatgtccacaaattaagaatgtttgggatcaaatcctggcaagaatatggatcaactggaatactcgaacactccagacaggatagcaaagtggtgcagccactttggagaacaggttggcagattcttataaagttaaatatacacttaccatatgaccgaaga

SEQ ID NO: 631894 - DNA, 562 bp, Homo sapiens
ggagattactatttgagatgagatttgggtrgggacacagagccaaatatcatagatgaagtaccaggagtgtcctaggatcagcttcattggcagcaataaaataactaaaaccttgtaccatgagaattaagaaaacatattgaccttagatttttaaaatcaaaatgctgttgcttaggtttttaaaaccaaaatgctgatctgcatgcaataatataaatagagagcttctgtttgtttacataaatagcatcttaaattcccttttatcaaatgtaagtcatcttcagctctaggatgtgcaagaatatacaaatgctttctacatacttaggattctttcagcaaagggaaggaggaagggtaggaaagagaaaataatatatacaatactgcatacatatatagaaacttctttaggggttctttcagcaaaaagaggatagaaggatgggagaaaggatggaaagaaaacatgtctccaaacaggcttagaaaaaagaatgtactgcttaacataactaaaacttctgggagatatttagtttaggtatggctg

SEQ ID NO: 631895 - DNA, 562 bp, Homo sapiens
ggagattactatttgagatgagatttgggtagggacacagagccaaatatcatagatgaagtaccaggagtgtcctaggatcagcttcattggcagcaataaaataactaaaaccttgtaccatgagaattaagaaaacatattgaccttagatttttaaaatcaaaatgctgttgcttaggtttttaaaaccaaaatgctgatctgcatgcaataatataaatagagagcttctgtttgtttacataaatagcatcttaaattcccttttatcaaatktaagtcatcttcagctctaggatgtgcaagaatatacaaatgctttctacatacttaggattctttcagcaaagggaaggaggaagggtaggaaagagaaaataatatatacaatactgcatacatatatagaaacttctttaggggttctttcagcaaaaagaggatagaaggatgggagaaaggatggaaagaaaacatgtctccaaacaggcttagaaaaaagaatgtactgcttaacataactaaaacttctgggagatatttagtttaggtatggctg

SEQ ID NO: 631896 - DNA, 559 bp, Homo sapiens
ccacatgcagaagaatgaagttggacccctaccttacactgcatacaaaagttaactcaaaatggttcatagatctaaattaagaactaaaactataaagctcgtggaagaaaataggtgtaaatcttcatgagcttgaattaggcaatggtttcttagatatgacaccaaaaacataagcaacaaaagaaaaaatagataaattgggcttcatcaaaattaaaaatttttgtgcttcgaagccactatcaagaaaatagaaaaatggccacagaatgggagaaactatttataaactatacatctgataagaggcatctaaaaatagttttaaaactcttacaattttacaaaaagacaatccaatttaaaaacagcctaagcatttgcatgggctttttaccaaagaagatatacaagtggtcaatagacacaagaaaagatgctcaatwtaattattcatcagggaaatgcaaattaaaaccacaatgagatagcgataatacttcatacctaactaggatggctataataaaaaagacagacaacaaatgtttgc

SEQ ID NO: 631897 - DNA, 554 bp, Homo sapiens
gcaaaaccccttgtttctacaaaaaaaatacaaaaattagccctgcatggtggcacatgcctgtagtcccagctacttgggaggctgaggtgggaggatggcttgagcctgggaggcagaggttgcagtaagccaagatcgtgccactgcactccagcctgggtgatagagccagaccttgtctcaaaaaaaagaaaaaaaaagttaaacagcattatcctataacccagcaattctgttctgaagtatatgaccaagagaaatgaaaatatatgttgtccacttgaaaacttgtacatgaatattcaaagcagcattattcataatagccaaaagtagagacaatccaatgtccatcagctgatkaatggataaataaaagctgattcattcttattgtggagtattatttggcaataaaaagaaattaagtacgggatacatgctataacatagaagaatcctgagaacattatactcagtgaaagctgacaatcacaaaacactgcatgatatatgactgaatacttagaaaatatccaaaatagacaaat

SEQ ID NO: 631898 - DNA, 598 bp, Homo sapiens
gacaatccaatgtccatcagctgatgaatggataaataaaagctgattcattcttattgtggagtattatttggcaataaaaagaaattaagtacgggatacatgctataacatagaagaatcctgagaacattatactcagtgaaagctgacaatcacaaaacactgcatgatatatgactgaatwcttagaaaatatccaaaatagacaaatccatagagacagaaaggaaattagtgattgcctagggctagggggtgaggtgaagaatgactgctaatgggaatagatttctttttggggtgaagaaaatgccctaaaattggatagtagtaatggttgtccaactctaaaaataccaaaaaccactaacctgtacactttaaaggggaaaattttatgtgtgtgatttatatctcaataaggccacttgaaaacgaaaaaagataaagtggcatttaaaaaatagatcagcaggttaccaccaaagtaacaaatatgccaattccagacttgaagtaaaaattatgaatccctggacataagtgtcaatgacagcttttgccctgatagtttttgttgaactctggagacctt

SEQ ID NO: 631899 - DNA, 564 bp, Homo sapiens
ggcacttacatacccaaaaagtgaaatttgtagtatgtaaattatagcttaatttttaaaacagggagactctcccttgaaatggtctacagcttattttacttcttaagacaacaaaactaatacatgctatttaagcactttttacaaaatggcatggaatgtgctagtgtaacctcctaagatgactgctgttcacagttccctcaaattccttttcctggcattgctcaaccttatcttgtatccaagtggtttccaaacccttacctgccctggggacaattatttctacttccacttttgcaacatttatcatgtagtaccttatattagagttccttctctgtcttatcttcttargattgtaagttccatacaataaaaatccatgctttacttgtatctaccacagtgcctgttaaaatgcctggcaggaatgctataaagaatgtttaacacataaatgaatctatgcttaggtaatagtttcaagtctgtaagtccttcagagactgtgagctccttgaagacagggattgtgcatacctaatcttgtactag

SEQ ID NO: 631900 - DNA, 594 bp, Homo sapiens
atagaacaggccaattcagagaggacgtgcaaaggggaagaaaccaaaaacacacaggttagaaccagcaattggctggatcttttctcccagagggagctgtgttcaaaggcaattcacccacagagcctggatgtgtcaccagccaggagctctcgctgggcattctaagctttgtttctgtttccttgactgctatttgtttatttcaaggctcataaacttgcctcttgatattttaactcccaatcctgacagtgacaaaataccccaagagacggcttggctaataaagatcactagatayaggctaaaattaggcagggtggggctgtgaaaataggtattacattaacgtactaaagagaatgttgaaaatccacattcttgtgccataattagaataacattgtaatattctggcatctatactttactcgtaaaatatgaaagcaggtaaatattaagaatttaataaatatatacttaatataaaatgaaggaatctgaggaacatgctccaccaaattgaattctatggaattttactgtcttgtgcattagtaatgtgtgttctatgggaaaggaaggttg

SEQ ID NO: 631901 - DNA, 594 bp, Homo sapiens
atagaacaggccaattcagagaggacgtgcaaaggggaagaaaccaaaaacacacaggttagaaccagcaattggctggatcttttctcccagagggagctgtgttcaaaggcaattcacccacagagcctggatgtgtcaccagccaggagctctcgctgggcattctaagctttgtttctgtttccttgactgctatttgtttatttcaaggctcataaacttgcctcttgatattttaactcccaatcctgacagtgacaaaataccccaagagacggcttggctaataaagatcactagatataggctaaaattaggcagggtggggctgtgaaaataggtattacattaacgtactaaagagaatgttgaaaatccacattcttgtgccataattagaataacattgtaatattctggcatctataytttactcgtaaaatatgaaagcaggtaaatattaagaatttaataaatatatacttaatataaaatgaaggaatctgaggaacatgctccaccaaattgaattctatggaattttactgtcttgtgcattagtaatgtgtgttctatgggaaaggaaggttg

SEQ ID NO: 631902 - DNA, 484 bp, Homo sapiens
ttctttattcagttagaattgactttactttgtgacagcttccaatctagaacaaagccccatttccttagactcttccgaaatcactcaaagtccaaatctcaggacagattctttctaacattctcctactgagacaccctgtgacccctcatgatgtgtgttctcccttgctgcaacaagtaataaagccaacagctgtgttcctagtggtctttgactgaggatattgacatattaaaagaatgtctctttttttttctcttagcttccaaastcacctattctaaagatcaaaaggctgattccaaaaggaagaaatgaagggaggacagcaaacctgtgcttttagaatggggagctgagaaacagagtagcaaggggcctcgtattgtgtgtcaggaaagagcctgagttttggactcaggatttggtctcagttctaccactgtgtgaacttgagcaagttacttagcctaacaag

SEQ ID NO: 631903 - DNA, 610 bp, Homo sapiens
tttctctgcaacctcatcaacgtgtattatattttgactttttaataagagccattctgactgatgagaaatagtaagcataaccrtttttgaatattttactgcaataaaatatcaatggaacattttaaaggaggaaaaaaacagtatttttaaactttaaagaatatttttctggattaaagtgaccttataaaactctgaatttcttctaaacataattgcatcatcatgaaattacttttaaaatatatacttatatgaaagtactaatatagaacaactaaaactgttagtgatattctcagattatgcttactatccccaggcaaaaatatttctctgtctctctttctctctctttctaacaaatgcaatctgctatagttttttgatgtgtctgcatgaagcaacttttcttgtgttttacatctgtatataactttttggttcaaaatactatgtgtctctattgttctctcttttttcattcgccactattcttaactcatctacattgtaatcagggaagttgagtagggactgtttgtacctcaagaaatctaaaatgtagcctctgtcagcatcctatgcccctacctggtctaca

SEQ ID NO: 631904 - DNA, 607 bp, Homo sapiens
tggagaatacttgattgcttaccgcgcttaaagcagaaggagcctgaagaagaatgaagaatgtgacctgagagaaacagacagggaaggacaggataggggcctttcatacccattgatgttgggtaaaccactgaagatgaagggagaaatgctgccatgaggttagggatggctgtgtttcatattatttcccaaaaagaagggacctttttggtagccaagtacaaacccgaaaataatgaataaacaaccctcgaacactgttagggcactctccctgccatatgggatttgctgatatttaaagtggtccctctacagttggacaaagagttgctaagaatcagctatatggcttataaagggggcatggttcatggccaatggcagagaaacatagatgctccataaactgactcatctgatgttcccaggccactaggtgcctgataagtcacattgtcaggcagtcattgagcactttcctggaatagagtttggaggggcatgtgggagtggatgagaagyacaagatactgtctcttctgttggcttctataatcatactgaagtcaaaaacttacagacctgaatcaattaccaa

SEQ ID NO: 631905 - DNA, 607 bp, Homo sapiens
tggagaatacttgattgcttaccgcgcttaaagcagaaggagcctgaagaagaatgaagaatgtgacctgagagaaacagacagggaaggacaggataggggcctttcatacccattgatgttgggtaaaccactgaagatgaagggagaaatgctgccatgaggttagggatggctgtgtttcatattatttcccaaaaagaagggacctttttggtagccaagtacaaacccgaaaataatgaataaacaaccctcgaacactgttagggcactctccctgccatatgggatttgctgatatttaaagtggtccctctacagttggacaaagagttgctaagaatcagctatatggcttataaagggggcatggttcatggccaatggcagagaaacatagatgctccataaactgactcatctgatgttcccaggccactaggtgcctgataagtcacattgtcaggcagtcattgagcactttcctggaatagagtttggaggggcatgtgggagtggatgagaagtacaagatactgtctcttctgttggcttctataatcatactgaagtsaaaaacttacagacctgaatcaattaccaa

SEQ ID NO: 631906 - DNA, 562 bp, Homo sapiens
acaaaatgaaagacaaaaaccatatgcagaaaaagcatttgataaaatccaacatcccttcatgataaaaacactcaacaaactaggcatagaaggaacatacctcaaaacaataaatgccatgcacaaaaatcccacagctaatattatactgaatgggaaaaagttaaaagcaatcccccaaagaacaggaacaagacaagaatgcccattttcacccgtcctattcaacatagtactggaagtcgtagccagagcaatgaggtaagggaaagaaataaaaagcatccatattggaaaagaggaagtcacttatctctgttcactgatatatatatgtatatatattcagggatggggtctcactctgtcatccaggctggagtgccatggtgtaatcatagctcactgcagccttggcctactgtgctcragggaatctcccatcttatcctcccaagttgctaggactacaaacatgtgccaccacactgaataatgtttttgtcttttgtaaaaacgggcttttgctatgttgtccaggcaggtctcaaactcctgg

SEQ ID NO: 631907 - DNA, 647 bp, Homo sapiens
gaattcctgacgctgcccgctctgcgggcagagctgtctgggaagaaaagcagccaggcctgcgggattccatttactgcacatagttttgctgttttaacagagtgtagtccctgggcccacacttcacacaagatctttttctatacagtgccccatatgccctctcagctgcttctttctagtgtgacctgcctggctcctcttcaaatacctgccatgcagtggctttgagaaatgcctatgcaaacacraaactgctcatgcaaaccctagaatctagtacttggcagctcagtggaggcacagacaacaggaagagatacctgccagtctcacactcttgtgtagggagctacaaacttggacttggccaagcagattgtgtggtggggttgggggctgttggtttggttttcctattccatcacactcaaatttttcttggctttagtctgcattgcaaaccatctcttgtaaacacccctcctttgtttccagacaagtcaccccaaataagtaactccttccaagagaggaagtacaaagtcttttggttctaacccagaaacaccaagtatctaatcacacaggctgtgcttatcctgatcaagtgctacataaggtgtagcctcaacattcattcc

SEQ ID NO: 631908 - DNA, 487 bp, Homo sapiens
tcactctgtcacccaggctggagtgcagtggcctgatattggcacactgcaacctctgcctcccaggttcaagtgattcttgtgccttagcctctgagtagctgggattacaggcatgccccaccatcacactcagctaatttttgtatttttagtagagatggggtttcaccatgttggccccactggccttgaattaactaacctcaggtgatccacttgccttggcctcccaaagtgttgggattacaggcatgagccaccrcctctggccaccattatctcttgattagattattttgagagccaactaagagatctttctgcttctaccccttccccatcttcagtctactatcacccaaacaatcagaataatccagttgcctctctgacctcatctcctattgttgcctccctgctctagcccaacctggcctgcttgttgattctagagtatataaagcacacgtttgcctcagaccct

SEQ ID NO: 631909 - DNA, 555 bp, Homo sapiens
cttgtgcatattttgggtacaagtactttatcagatatgtaatttacaattactttttttccragtttgtggcttatcttcttattctcttaacattatttttcaaggagaaaacattcttaattttaatgaagtccaatgtatccatcctttttcttctatggattgtacttttggtatcagacctaatatctttgccagtctgagagatatgtcagagagctgagcagccatgacagcctatttcaatgaacaggactgcaagctcttgaaccccaagcaggagaccctaacccacatgctgctggagctcaccagatcacttttcaataggatggattttgaagactcggggatggcagtaaattggaatcaccacctgcctccaccagctgccaagacagtgtggttgggaacctccccaggacagtcatcaggagctctcaggctgagaggcacacacaagtgccccatgtgcttgaggaggaggaggctgttgttgggatgccttgccattagcttttccattctaactgcattttgccccggctaagc

SEQ ID NO: 631910 - DNA, 584 bp, Homo sapiens
atatcctttttttcccctttcattcacttcctgcccacttcccagcctctggtaaccaccaatccactctgtatcttcatgagatcaacttctttagctcccacaaatcagtgagaacatgtgagatttgtctttcygtacttggcttatttcacttaatataacggcctccagttccctacatgttgttgcaaatgacagggtttttttcttttttatggctgaataatatcccattgtgtatatgtaccacatttcctttattcattcttccactgttggcgacttaggttgattccgtattttggctattgtgaatagtgctgcaataaacatgggagtgcaggcatctggttgtatattgctttcctttcttttggaatatatacacacacacacacatgcacacacacggtagtgttatttttcgttttgtgaggaacttccatactgttcttcatagtagctgtactaatttgcattccaaccaacagtgtatgagtgttccgctttctccacatcctcaccggtatgttattgcttgtctttttgatacaagccattttaactggggtaagatgata

SEQ ID NO: 631911 - DNA, 584 bp, Homo sapiens
atatcctttttttcccctttcattcacttcctgcccacttcccagcctctggtaaccaccaatccactctgtatcttcatgagatcaacttctttagctcccacaaatcagtgagaacatgtgagatttgtctttccgtacttggcttatttcacttaatataacggcctccagttccctacatgttgttgcaaatgacagggtttttttcttttttatggctgaataatatcccattgtgtatatgtaccacatttcctttattcrttcttccactgttggcgacttaggttgattccgtattttggctattgtgaatagtgctgcaataaacatgggagtgcaggcatctggttgtatattgctttcctttcttttggaatatatacacacacacacacatgcacacacacggtagtgttatttttcgttttgtgaggaacttccatactgttcttcatagtagctgtactaatttgcattccaaccaacagtgtatgagtgttccgctttctccacatcctcaccggtatgttattgcttgtctttttgatacaagccattttaactggggtaagatgata

SEQ ID NO: 631912 - DNA, 584 bp, Homo sapiens
atatcctttttttcccctttcattcacttcctgcccacttcccagcctctggtaaccaccaatccactctgtatcttcatgagatcaacttctttagctcccacaaatcagtgagaacatgtgagatttgtctttccgtacttggcttatttcacttaatataacggcctccagttccctacatgttgttgcaaatgacagggtttttttcttttttatggctgaataatatcccattgtgtatatgtaccacatttcctttattcattcttccactgttggcgacttaggttgattccgtattttggctattgtgaatagtgctgcaataaacatgggagtgcaggcatctgkttgtatattgctttcctttcttttggaatatatacacacacacacacatgcacacacacggtagtgttatttttcgttttgtgaggaacttccatactgttcttcatagtagctgtactaatttgcattccaaccaacagtgtatgagtgttccgctttctccacatcctcaccggtatgttattgcttgtctttttgatacaagccattttaactggggtaagatgata

SEQ ID NO: 631913 - DNA, 584 bp, Homo sapiens
atatcctttttttcccctttcattcacttcctgcccacttcccagcctctggtaaccaccaatccactctgtatcttcatgagatcaacttctttagctcccacaaatcagtgagaacatgtgagatttgtctttccgtacttggcttatttcacttaatataacggcctccagttccctacatgttgttgcaaatgacagggtttttttcttttttatggctgaataatatcccattgtgtatatgtaccacatttcctttattcattcttccactgttggcgacttaggttgattccgtattttggctattgtgaatagtgctgcaataaacatgggagtgcaggcatctggttgtatattgctttcctttcttttggaatatatacacacacacacacatgcacacacacggtagtgttatttttcgttttgtgaggaacttccatactgttcttcatagtagctgtactaatttgcattccaaccaacagtgtaygagtgttccgctttctccacatcctcaccggtatgttattgcttgtctttttgatacaagccattttaactggggtaagatgata

SEQ ID NO: 631914 - DNA, 564 bp, Homo sapiens
cctccacttatcaggatgagggctttattttcctcttcatggtcttaatcataaaaagatttctcactgtgactttggagcccggtatagattctaacctccatcatctcagggtcctgtatctctraatgtgaaaacttccaaatattccatgataagacagtatacctattccaaggcaattacactggcattagaaaaggaaaaggaaatagaaatgggtctagagttataattcaggtggaaaaagtataagcactgtacctggcacatagaagatattcagtaaatatttcaattatgctggatgatttccaatgtgcctatgaaaaagatggaatgaaaaataaaccaaagtataaccaacagtggaattaggtgtgagagaatgtatacaacttttccatctttcctccatttttggatattttgtcatcctaattaataatggaaaaatatacaattatcatttagaaagggtgaagtagaggaaggtgggcaggcagattacggccagctctccttagcgccccaaactcctgcctctttgggcatcgtaggaca

SEQ ID NO: 631915 - DNA, 561 bp, Homo sapiens
tgggcttcattagggcagtggcactaatagggagggggtcctgggggctgggctgacagccagttacttgctcgtctgcattatggattaacccatctgggcctgggagattggctctgaaaggggcacaaaaggcrgggggcgtgaccacaatcacacactgaattatcccgtctgagcgcaattgtccaccaacaaacggggcctcaggatggtgacccccttgggttctcttcatcccccatcccttgccccataggaaaagccagagataaactgctgcctggttaaaaaacagggtttggggcaaggaggacaaggatgccattccagagagacgaggaatttaggggagaggagtgggatttgaggttcagccagagaagccaggagccaagcaaaagttctcccaacatactttttgacttcagctgtccacctcagaaacaaagaacgatgtaagaaacacacctgtcgggaataccaggcagaatccaggagcagaggggcgcagtgtaggggaaaggcaagggaaggaccagagtcaggtgtctcgcatct

SEQ ID NO: 631916 - DNA, 561 bp, Homo sapiens
tgggcttcattagggcagtggcactaatagggagggggtcctgggggctgggctgacagccagttacttgctcgtctgcattatggattaacccatctgggcctgggagattggctctgaaaggggcacaaaaggcggggggcgtgaccacaatcacacactgaattatcccgtctgagcgcaattgtccaccaacaaacggggcctcaggatggtgacccccttgggttctcttcatcccccatcccttgccccataggaaaagccagagataaactgctgcctggttaaaaaacagggtttggggcaaggaggacaaggatgccattccagagagacgaggaatttaggggagaggagtgggatttgaggttcagccagagaagccaggagccaagcaaaagttctcccaacatactttttgacttcagctgtccacctcagaaacaaagaacgatgtaagaaacacacctgtcgggaataccaggcagaatccaggagcagaggggcgcagtstaggggaaaggcaagggaaggaccagagtcaggtgtctcgcatct

SEQ ID NO: 631917 - DNA, 610 bp, Homo sapiens
ggatgttaaatattggtttctctagacacaagctcctttggagaaaattatttatgctcccccttttgccagtactggtggcccccacagtggagggggggatggtgcaaagcattactgagggctgggggctttagagtcagactggtgggaaggtggaagtgtctgacttccgcggggggagactgatttgttttaggttggcctgggcagcctcagtttccctgattcagcagaagaaactcatccagaggaaattggctcatttcaaactcatcaagacttggtaggagctgattggcttccggtctcaaatcattctcgactggagakcgatatggagttgtagatcccaaaatcagattactaggggaggggaagggcattcacgggagagctcaggctctttgccctgttgcccattgctagaaactcctggcatgtcccagggtagtgacctgcactctccaaccaaggacaaaaagtggcaatgtcctttcacatccagaacttcctgtttgccgtttcacagcagtcctgcgacacagggagagcagctaccattcccaaccggcaggatgaggctcagagtggataagcaactcaccca

SEQ ID NO: 631918 - DNA, 610 bp, Homo sapiens
ggatgttaaatattggtttctctagacacaagctcctttggagaaaattatttatgctcccccttttgccagtactggtggcccccacagtggagggggggatggtgcaaagcattactgagggctgggggctttagagtcagactggtgggaaggtggaagtgtctgacttccgcggggggagactgatttgttttaggttggcctgggcagcctcagtttccctgattcagcagaagaaactcatccagaggaaattggctcatttcaaactcatcaagacttggtaggagctgattggcttccggtctcaaatcattctcgactggagagcgatatggagttgtagatcccaaaatcagattactaggggaggggaagggcattcacgggagagctcaggctctttgccctgttgcccattgctagaaactcctggcatgtcccagggtagtgacctgcactctccaaccaaggacaaaaagtggcaatgtcctttcacatccagaacttcctgtttgccgtttcacagcagtcctgcgacayagggagagcagctaccattcccaaccggcaggatgaggctcagagtggataagcaactcaccca

SEQ ID NO: 631919 - DNA, 418 bp, Homo sapiens
ctgcgacacagggagagcagctaccattcccaaccggcaggatgaggctcagagtggataagcaactcacccaggctcacacagctggtagatgacagattcatatggtaacatgggttatctgagtccaaactcaccctcatcccttcgcaccatgctctcttaaaattcaggctactactcctctgccacttgtaggaagatggggaacatttggtgtgtccgtcttttgactacagaagagtgtgcattgagggygtgcgttgaaggcgtgggggtcactgcctgaggtcaggcagaggtcactctcagctctactgccgcagttaggacacaaggatgcggactgctggaaaagccatcaccctgcctgctctctctctctgttcagtggctccatccctcactgccttgtctc

SEQ ID NO: 631920 - DNA, 541 bp, Homo sapiens
tgttttgaaatgtgagagcatgagatttgggaggggccaggggccaaatgatatgctttggctgtgtcctcacccmaatctcatcttgaattgtagttctcttaattcccacatatcatgggagggatctcgtggaggtaatggaatcatgggtggggggggggtggttttataaggggcttttccctctttgccccactctcattctctctcttgccaccctttgaagaggtgccctccgccttgattgtaagtttcctgaggcctccccagccatgcagaactgtgagtcaattaaacctcttttctttataaattacccagtctcaggtatttcttcataacactgtgagaatggactgatacaatagcattggacttaaacttgactttaaacaaatggacctaacaaacatttacagaacattctacccaacaactgcagaatatatattcttttcatcagcacatggaacattctcaaagatagaccatattgtgttagggcacaaaacaagtctcaacaaattttaaaaagtca

SEQ ID NO: 631921 - DNA, 474 bp, Homo sapiens
tatgagcaactgatgaagtcatttagagacaatttgcggtaggagccctgtgtattagagaccaatcaatgtgccctcatggcaccatttcttcctctctccctctttgttcttgccaagtacccatagttcaatttccatagattaaaagagcccatgttgggcctatacctaggagtacaattactgggtcatttgataactctatgtagaattgtttgggaagttgttaaagtgtttctcacagtggctacaccattttaattcctaccagcagtgtatgaaagttctagtttctctgcatcctcamcaacacttgttattttctgtatttttttttttgagacaaagtcttgctctgtcgcccaggcaggagtgcagtggcacaatctcagctcactgcaacctctgcctcccagattcaagttactcttctgcctcagcctccagagtagctggtattatagtcacctg

SEQ ID NO: 631922 - DNA, 474 bp, Homo sapiens
tatgagcaactgatgaagtcatttagagacaatttgcggtaggagccctgtgtattagagaccaatcaatgtgccctcatggcaccatttcttcctctctccctctttgttcttgccaagtacccatagttcaatttccatagattaaaagagcccatgttgggcctatacctaggagtacaattactgggtcatttgataactctatgtagaattgtttgggaagttgttaaagtgtttctcacagtggctacaccattttaattcctaccagcagtgtatgaaagttctagtttctctgcatcctcaacaacacttgttattttctgtatttttttttttgagacaaagtcttgctctgtcgcccaggcaggagtkcagtggcacaatctcagctcactgcaacctctgcctcccagattcaagttactcttctgcctcagcctccagagtagctggtattatagtcacctg

SEQ ID NO: 631923 - DNA, 438 bp, Homo sapiens
ctcagcctccagagtagctggtattatagtcacctgccacgatgcttggctaatttttgtatttttttagtagagacagggtttcaccatgttggtcaggctggtctcaaacccctggcctcaggtgatccacctgcctcagtctcccaaagtgctgggattacaggcattagccaccacaccaggccaattttctgtatcttcgattctagccatccttatggctatgaagtggtakcacattgtggttttgatttctgtttccctgatgatgaatttcattgagcatcttttcatgcgcttattggccacttgtttgtcttccttggagatgtgccatattttcatattcaaaaatgaaagcacaggtccacacaaaaatttgtacatgaatatgaataattacaatagcatcactcctaataacccacagaggga

SEQ ID NO: 631924 - DNA, 581 bp, Homo sapiens
caagttactcttctgcctcagcctccagagtagctggtattatagtcacctgccacgatgcttggctaatttttgtatttttttagtagagacagggtttcaccatgttggtcaggctggtctcaaacccctggcctcaggtgatccacctgcctcagtctcccaaagtgctgggattacaggcattagccaccacaccaggccaattttctgtatcttcgattctagccatccttatggctatgaagtggtatcacattgtggttttgatttctgtttccctgatgatgaatttcattgagcatcttttcatgcrcttattggccacttgtttgtcttccttggagatgtgccatattttcatattcaaaaatgaaagcacaggtccacacaaaaatttgtacatgaatatgaataattacaatagcatcactcctaataacccacagagggaattaaaccaaatgcccatcaccagatgaagagatacaccggttgttgtctacccacatggtggaatattatttgatcacaaaagagaggagagtacatactctacagcctggatgaaccttcaaaac

SEQ ID NO: 631925 - DNA, 644 bp, Homo sapiens
agctgggtgcagtggctcacacctgtaatcccagcactttgggaggctgaggcgggcagatcacctgatatcagttcaagaccagcttggccaacatggtgaaaccccttctctaccaaaaatataaaatttagccttttggtactctgagcagcaccatggcggttgttaagaacaagtgccttatgaaaggtggcaaaaagggagttaagaagaaagtagttggtccattctctaagaaagatcagtatgatgtgaaagcacctgytatgttcaatataagaaatattggaaagacttggtcaccaggacccaaggaacccaaattgcatctgatggtctcaagggtcttgtgtttgaaatgagtcttacggatttgcagaatgatgaagttgcatttagaaaattcaagctgattactgaagatgttcagggcaaaaactgcctgactaacttctatggcatgggtcttacctgtgacaaaatatgttccaaggttgaaaaatgttcaacaatgatggaagctcatgttgatgtcaagactaccgatggttacttctttcttctgttttgtgttggttttactaaaaaacacaacaatctgatactgaagacctcttatgcttagcaccaacagtatgcca

SEQ ID NO: 631926 - DNA, 644 bp, Homo sapiens
agctgggtgcagtggctcacacctgtaatcccagcactttgggaggctgaggcgggcagatcacctgatatcagttcaagaccagcttggccaacatggtgaaaccccttctctaccaaaaatataaaatttagccttttggtactctgagcagcaccatggcggttgttaagaacaagtgccttatgaaaggtggcaaaaagggagttaagaagaaagtagttggtccattctctaagaaagatcagtatgatgtgaaagcacctgttatgttcaatataagaaatattggaaagacttggtcaccaggacccaaggaacccaaattgcatctgatggtctcaagggtcttgtgtttgaaatgagtcttacggatttgcagaatgatgaagttgcatttagaaaattcaagctgattactgaagatgktcagggcaaaaactgcctgactaacttctatggcatgggtcttacctgtgacaaaatatgttccaaggttgaaaaatgttcaacaatgatggaagctcatgttgatgtcaagactaccgatggttacttctttcttctgttttgtgttggttttactaaaaaacacaacaatctgatactgaagacctcttatgcttagcaccaacagtatgcca

SEQ ID NO: 631927 - DNA, 644 bp, Homo sapiens
agctgggtgcagtggctcacacctgtaatcccagcactttgggaggctgaggcgggcagatcacctgatatcagttcaagaccagcttggccaacatggtgaaaccccttctctaccaaaaatataaaatttagccttttggtactctgagcagcaccatggcggttgttaagaacaagtgccttatgaaaggtggcaaaaagggagttaagaagaaagtagttggtccattctctaagaaagatcagtatgatgtgaaagcacctgttatgttcaatataagaaatattggaaagacttggtcaccaggacccaaggaacccaaattgcatctgatggtctcaagggtcttgtgtttgaaatgagtcttacggatttgcagaatgatgaagttgcatttagaaaattcaagctgattactgaagatgttcagggcaaaaactgcctgactaacttctatggcatgggtcttacctgtgacaaaatatgttccaaggttgaaaaatgttcaacaatgatkgaagctcatgttgatgtcaagactaccgatggttacttctttcttctgttttgtgttggttttactaaaaaacacaacaatctgatactgaagacctcttatgcttagcaccaacagtatgcca

SEQ ID NO: 631928 - DNA, 614 bp, Homo sapiens
atacggtcttggtggcatgtgcctgtagtctcagctactctgaaggctgaggtgggaggatagcttgaggccaggagtaatttgaggctgcagtgaactatgattgtgacactgcactccagactggactgcagagcaagaccctgcctcacatacgtacatacatacatacatacatgcatgcatacatacatacacacacacgcacatacatacataccgaggctttatctccggtgattcgactcagtagggtggggtatcccctagggatcctgctgttcagcctggtctgggatccacttttcattgggaactgagacactggctgtgagcctttctgtcctgtgatgtagaggtcatggcgatgcaggttcaagcttaaggagacctgactgtgtattaggtattgtgctgaacatcatctcttactctcacaacaacatccttagaaggttaatgatgtgtmccctctctacagacgaggaactgaactttcagaggagtttagcttgttcaaaacttattcttcctattggaaactttgtaccctttgagcagtgtctcctatcccctaactttcctccaccccagcccctgataaccactgtcct

SEQ ID NO: 631929 - DNA, 614 bp, Homo sapiens
atacggtcttggtggcatgtgcctgtagtctcagctactctgaaggctgaggtgggaggatagcttgaggccaggagtaatttgaggctgcagtgaactatgattgtgacactgcactccagactggactgcagagcaagaccctgcctcacatacgtacatacatacatacatacatgcatgcatacatacatacacacacacgcacatacatacataccgaggctttatctccggtgattcgactcagtagggtggggtatcccctagggatcctgctgttcagcctggtctgggatccacttttcattgggaactgagacactggctgtgagcctttctgtcctgtgatgtagaggtcatggcgatgcaggttcaagcttaaggagacctgactgtgtattaggtattgtgctgaacatcatctcttactctcacaacaacatccttagaaggttaatgatgtgtaccckctctacagacgaggaactgaactttcagaggagtttagcttgttcaaaacttattcttcctattggaaactttgtaccctttgagcagtgtctcctatcccctaactttcctccaccccagcccctgataaccactgtcct

SEQ ID NO: 631930 - DNA, 473 bp, Homo sapiens
aaacaccttaatcatgagaacccagagaattggatttagtgtgactgattccaaactgtcagtaagaacacaattaggttatatttttctccagttcaaataaaagaaaaatgacaataaaatgctgatcaatatgtgtagctcaggasgtagagcctgctttgagatgcagaagtgtttgttttttttagatctatattcttgagtaaagaaaaaatccatctcttttcctagaggagaagactttcagagctgggcttggcaacagcctatcacaggctgaattaaacaaataggtaactcccttgagtgaatggtgcatttctcttgttcagggaaccatgcttttatggtggagtttgctttctgtcttggtctccggatgtgtgtatctgtgggtggatgtctgcatgtaaatggcagtgtatagctgtgtgggtgtgtacaaaattcccatgtgaatctcagctttg

SEQ ID NO: 631931 - DNA, 636 bp, Homo sapiens
tggcaccgtcatggctcacagcagcctctgcctcctgggctcaagcagccctcccacctcagccctcctgagtagctggaactacaggcatgtgccatcactgttgcctaatttttgtatttatttattttttgtagagaggggggtctcactatgttgcccaggctggtctcragctcctgggctcaagcaatctgctcacctcggcctcccaaagtgctgggatggcaggcatgagccactgcgcctggccagtatgttcagtttgtaagaaaagtagtgttgacctcttctacgtgcacatttctttaagtaataattcaataaagcatttagaaaaattggtcataataggagtgatttgtagagtgattggcatgaaagctgatcaccttaatttgaactactctgaaatgagcaccagggccaccaagaggaacctttcaaggtgttatggccaaggataggagtgtgttgtgtacatctctgcataaaggatttgctggttatatggaaggatgaagcctccttctgaggacacaggcagcaaggcaagtggaagcccaaagcattgagctttctaaatggactttgctaaaatcttgtggatgactcatgctcttaacatacacccat

SEQ ID NO: 631932 - DNA, 621 bp, Homo sapiens
  misc_feature 202, 620, 621: n = A,T,C or G
tccatttgtttttctgaagtatttacaaaatagtttacagtagttatgtaattgcatcctgatattcacccctacgtaatttactttccctctaaaaacatgagggcattttttatatgatcattgtcatacctaataaaattaccagtaattccttaatatcctgtaagatcaagtttacattcagatgtcttgtccccanaatgtcaattgtgattatttttttctttgagcaaagataataagatctcagatttaatgacagagattccatgttagcctaatgtctaagctctgtggtccattgtggctttacttgaaagtctcaggctaggcgtggtggctcacacctgtaatcccagcactttgggaagccaaggtaggcagatcatgagrtcaagagatcaagaccatcctgaccaacatggtgaaaccctgtctctattaaaaatacaaaaattagccaggtgtggtggcgggtgcctatagtcccagctactcgggaggctgaggcaggagaatcacttgaaccagggaggcggaagttgcagtgagctgagattgcaccactggacaccagcctgggtggcaagaacgagactctggaaaaaaaaaaaaann

SEQ ID NO: 631933 - DNA, 509 bp, Homo sapiens
ctggggaggtatctgctctagtaattgggaacatggtttctggaatctgattccctgggctcaaattgagctgcctcctagctagctgcttgggtaagttatagaaactgtgctttgattttcttatctgaaaattggctattaatagcttctactcttgcagatatagtgaggattaaataagatgtcacgttaaaagtgcatcatcgacacttaatagagattaggttttaccattcattattattcttggcagatgctgcagataacgtggagagcatacgaaaggcacatgtttgaaccaatagtcacatacgggtgctaagttctgcagtaggggaagggcagagagccatggagagagcctggyccaatcctgaagcctcagaaaaaatttccccgttgaattgctgttttagctgagacttctgggatgggtagtagttggagatcccagacaggaggtgaccgagttagccagggaaaaattgggtcctggcacccatggc

SEQ ID NO: 631934 - DNA, 594 bp, Homo sapiens
gatggaggttaaccaacatgaccatgatggccaggtgtataaatctggcctcttaaaaatctgtatttgaggctgggtgcagtggctcacacctgtaatcctaacactttgggaggccaaagctggcagatcacttgagcccaggtatttgagaccagcctgggcaacatggcaagaccccttctctataaaaaatttaaacattagctgggcatggtggcatgtgctgtagtcccagatacttaggaggctggggtgggaggatggcctgaacctgggaggcagagattgcagtgagttgtgatcttgccactgcactccagtcttagcaacagagtaaaccctatctcaaaacttaaaaatctgtgtttggcccctagccgtcctcagctcttgagtaaatctcagcatcctaggctgttacattatggcccaaatattcaatagagatgctgtatatccttgttcctctcaaaacccctcctcatcaccatcaaaaagctggttyagttctctacctttagataaagaatcatcccaagactcaacatgagctgccgtgacttgtccaagatgacacctctttacaatgta

SEQ ID NO: 631935 - DNA, 576 bp, Homo sapiens
ctatttaagagtaattttcaaatgaaagtggcatggaataacttgacttgctgttgagcttagtagctctttttacttccttaacatccttggtcctggtttctgaatccatgagtattggtcctctccatattccttcccagtctaaatatttcttttgtttttcatgaggtcagacrccatatctatttcatacctcatcctttgagcccagaaggtgctcattgatttactaaataaataaatcagaattggggaagcttctccctgaagcatgaggttgcagctgccacaagggtaagcaatggtaacctctatagcttgtattttcacatatccagtgcagacttctatcacatcctgtactttcttggtgtgtttttctttgcccagttatcaggatctgtgtagttttggaaaactgcttcctgcaatattaatgctgggcttgggaagaaacccaaacaccgcaatgcctaatcaagatctttcgtagtttagaggtgggagacaaacaaaaaggtgaaattctatgataaaaagagaagtttacattagtaaagtgcattattccac

SEQ ID NO: 631936 - DNA, 576 bp, Homo sapiens
ctatttaagagtaattttcaaatgaaagtggcatggaataacttgacttgctgttgagcttagtagctctttttacttccttaacatccttggtcctggtttctgaatccatgagtattggtcctctccatattccttcccagtctaaatatttcttttgtttttcatgaggtcagacgccatatctatttcatacctcatcctttgagcccagaaggtgctcattgatttactaaataaataratcagaattggggaagcttctccctgaagcatgaggttgcagctgccacaagggtaagcaatggtaacctctatagcttgtattttcacatatccagtgcagacttctatcacatcctgtactttcttggtgtgtttttctttgcccagttatcaggatctgtgtagttttggaaaactgcttcctgcaatattaatgctgggcttgggaagaaacccaaacaccgcaatgcctaatcaagatctttcgtagtttagaggtgggagacaaacaaaaaggtgaaattctatgataaaaagagaagtttacattagtaaagtgcattattccac

SEQ ID NO: 631937 - DNA, 565 bp, Homo sapiens
aatcatcttttggggcctacactttcaaatttttattctaatattttggaagaattcactaaccaggtataacaaagtaattctaatggactaaccctcacactataaamacttttaaaaactagacaaaacatatgaaacagctgttttcatacattgaacaagaagaagccaaggacagtgatccctgagagaagaaaaacaattagttgagctcaaagataacccaacctctctacctggaagtgtctattagacactagtttggaaagagggcaaacccaagcagggcacagcattgtcactatgtggaagagacaggtttgagaattcaaggaagctgaagcatctgaaatctgcagggcagactaccaaaaatggggaatctttgagaaagagcttcagaaaacttcatagggatgtcttctagtttatctctaaaagtaataaactgtacacgcatacatgtgttgaaatttcacaaacccaggcaaagaatcaatataaagaaaaactactggagaggagaaagctgaacaactacagagcttgatgagggttagac

SEQ ID NO: 631938 - DNA, 565 bp, Homo sapiens
aatcatcttttggggcctacactttcaaatttttattctaatattttggaagaattcactaaccaggtataacaaagtaattctaatggactaaccctcacactataaacacttttaaaaactagacaaaacatatgaaacagctgttttcatacattgaacaagaagaagccaaggacagtgatccctgagagaagaaaaacaattagttgagctcaaagataacccaacctctctacctggaagtgtctattagacactagtttggaaagagggcaaacccaagcagggcacagcattgtcactatgtggaagagacaggtttgagaattcaaggaagctgaagcatctgaaatctgcagggcagactaccaaaaatggggaatctttgagaaagagcttcagaaaacttcatagggatgtcttctagtttatctctaaaagtaataaactgtacacgcatacatgtgttgaaatttcacaaacccaggcaaagaatmaatataaagaaaaactactggagaggagaaagctgaacaactacagagcttgatgagggttagac

SEQ ID NO: 631939 - DNA, 604 bp, Homo sapiens
gtttttcatccagccagtggtaaagcaagatagtaatttactaatcactgaagtcatccaagcaatggctggatgcatatgcggtgagagtgctaatgagaaggattyattatggggttggatggtcagtggcctagtaagggttatttcatctttgagagatatttctatgagttagaaatagaattagcaaaaataataataaattcaaagtacaaaatacaatgctatgaattaattcatacatttatatatgataaagtttgagcctctacctatgtctcacatacaaaacaggaaaagtttacattatataattgatgcaatgtaagtatacttttttgcatatgtttatttactaatatgatataacttttgttaaatttacttttctgtgtatagtcgctctaatctttcaatattcttaatgaatggagtcagaagccaatctggaatgattcaggttaagtatgcattagaaatattcctcagttaaaaattaatcttttcatgacttattgttattaattcagataagaaacaattagtgttaattgttcatctcctttcttaaaagaatcaattttttagcaagaatctatta

SEQ ID NO: 631940 - DNA, 604 bp, Homo sapiens
gtttttcatccagccagtggtaaagcaagatagtaatttactaatcactgaagtcatccaagcaatggctggatgcatatgcggtgagagtgctaatgagaaggattcattatggggttggatggtcagtggcctagtaagggttatttcatctttgagagatatttctatgagttagaartagaattagcaaaaataataataaattcaaagtacaaaatacaatgctatgaattaattcatacatttatatatgataaagtttgagcctctacctatgtctcacatacaaaacaggaaaagtttacattatataattgatgcaatgtaagtatacttttttgcatatgtttatttactaatatgatataacttttgttaaatttacttttctgtgtatagtcgctctaatctttcaatattcttaatgaatggagtcagaagccaatctggaatgattcaggttaagtatgcattagaaatattcctcagttaaaaattaatcttttcatgacttattgttattaattcagataagaaacaattagtgttaattgttcatctcctttcttaaaagaatcaattttttagcaagaatctatta

SEQ ID NO: 631941 - DNA, 585 bp, Homo sapiens
ttgtttttctcctccctatgttgagggagtgctaggatagacttcaggccacattagatagcattatcaagactttccctgggtctgggctgtgcctgttgctgcttctgggacaagtcagcctaatacaggaaaacttatttcttttttttaaattttctttttctttctttctttaatttcccacctcagcgcatgtctggtgataggcacaggaagayggtgagttatttctgcagtagggctatgtgtcctggaccatgaagaaagacagacttagagcttatctgcgttctctttttgcttccccttgtttcgccagcctaacttcctttccctaattaggacgccacagttagcgggaacccgctttacaagtgaaatatccctgcgttattgaagcgaactggagtcccccacccagcacagcaaagccaaacactgacatggggctagcagcgagagaaaatgaggaaatttttgaagggcaccaagcaaggacattcaggcagctcatgcttcaggcctgcactccctgatggcttacaggtaagcagttttaaaggtggggaggcagaggttaca

SEQ ID NO: 631942 - DNA, 512 bp, Homo sapiens
gatctcggcttactgcaaagtctgcctcctgggttcaagcaattctcctgcctcagcctcccgaatagctgggattacaggcatgtgccaccatgcccagctattttttttttgtgtgtgtgtatttttagtagagagggggtttcaccatattggccagaaacaccctcacagacacaccgactaataatgttttctgttgtctggcatcccttagcctagtcaagtggacacataaaattacccaatacaaagagaaatatacatttcatgaaagcctacggtgtaccaaatatttttctctgtaaatctcatkgaatattttaaaatatgggtattaagtgcataaataatacataaacatcttcttctaaacatttaatgcattacagtgttaaaggaaaaattattcagtgatactggttagagcatggtaagggagaccttattcaggaccaggaaaggtaaagaaaccactgcaatgaagtcttgctgtagggatgagagattgg

SEQ ID NO: 631943 - DNA, 472 bp, Homo sapiens
gtatctatgtcttcagtcatgaagactaatgtgcaaatagcttagctggaaaatgtttgtgaagaaaatgaatattgagtagactctgcagggaggagtgaagcatggcttgataaagaggaagaacatttcaagcagggtgtatatgatgtaccgtagctaaacaatgaagtaaaaataaattttttatgtgtaggaaattttatattaataatgtttaaacattgcccctgaggctaagaaaaacgaaagaagtttatctgtatggaaaaccaaaatatgccacccaaaatatgcttctttggcctattcrgagaagctgcagacatacaaatagctccaaacagctgtgctttcctggggaagatttgcatctgtagagaaaagctacattagtgacgaaaacaacagatgcaaatgagctttctctgagactccattatctgccttatcctgatctagaaaagattag

SEQ ID NO: 631944 - DNA, 561 bp, Homo sapiens
tagtgacgaaaacaacagatgcaaatgagctttctctgagactccattatctgccttatcctgatctagaaaagattagctcataggaaaaggagrctgagatctgatactttcaaaagtctgacagagaaactttcaccacaggctaccagctaatctttctgagagcagttacctgtgaggattcatctgcataacaagatagcctttgctcaccatgcatttcctccccaggccctcatatagtctgtcacaacctcccaccaggagcttcaaacctttattcctttctgtatggtataaaaacttctgacatctggcccttttttgagtctcatgtttcgtgtggctccaatgcatacctgctttttctcttgttgatctgcctatttgttttacatactcaaattatcaaaacttcagaggaaaagtttgaacttccctacacctgcttacatcttgattctctagcaagcaagagccaaatcccagtttacttacatatctaataaaatattgcatcaaaaatagtgtatctgggagtagttcctcaaaaatttc

SEQ ID NO: 631945 - DNA, 561 bp, Homo sapiens
tagtgacgaaaacaacagatgcaaatgagctttctctgagactccattatctgccttatcctgatctagaaaagattagctcataggaaaaggagactgagatctgatactttcaaaagtctgacagagaaactttcaccacaggctaccagctaatctttctgagagcagttacctgtgaggattcatctgcataacaagatagcctttgctcaccatgcatttcctccccrggccctcatatagtctgtcacaacctcccaccaggagcttcaaacctttattcctttctgtatggtataaaaacttctgacatctggcccttttttgagtctcatgtttcgtgtggctccaatgcatacctgctttttctcttgttgatctgcctatttgttttacatactcaaattatcaaaacttcagaggaaaagtttgaacttccctacacctgcttacatcttgattctctagcaagcaagagccaaatcccagtttacttacatatctaataaaatattgcatcaaaaatagtgtatctgggagtagttcctcaaaaatttc

SEQ ID NO: 631946 - DNA, 476 bp, Homo sapiens
actgtccccatgattcaattatctccatctggccccacccttgactcatggggattattacaattcaagatgagaattgggtggggacacagcgccaaatcatataattggtattaattattctttaagtatttagtagaattcatccatgaaggcatctgatcgtgggcccccctttttttttttttctgtggttgtttttsttgggaggtttttgattgctgatttaatcatttttgttcttaccctatcattctaagtcctctcaatgctttgagggaagtgagagaaacaggtatctcaggaagctcccctaactgctgggcacattggatgcgagcttcactccctcttggtcctgagggagaaatcacgtgatgaggagctctctcagggcattgaactgtgctagcttggggacagggactgatgtggataaagtgaaactgctcttcttacctgtttcaatgcagctg

SEQ ID NO: 631947 - DNA, 614 bp, Homo sapiens
acaatttatgaaactttacatatcagcaagaataagacagagaccccaatagacaaatccgcaaaagatagtaatttataggaaacctaaagaacaatgtgcatctaactataacttcaaagtgatcagtaaacagagaaatgcaaagtaaaataaataagaatagaaaggaaaatgatagagaagcagatactgggagccaagagaaaacttcccctttgtcctctgaagttttgttgaaactcactgacaagagatagattaacaggagaaaaggcatataaatttattaatgtgtacatggaagtgtgaacccccaaaatttgagacaggtctcagttaatttagggagtttattttgctayggttgaggacatgcacctatgacataacctcaggaggtcctgacaacatgtgcctaaagtggttagagcaccattggttttatacattttagggagacatgatcatcaatcagcatatgtaagatgaacattggtttggtctggaaaggtgggacaactcaaagtggggaggtagcttctgggtcataggtagataagagagaaatggtggcattcttttgagtttctgattagcccttccaaaggagg

SEQ ID NO: 631948 - DNA, 527 bp, Homo sapiens
attttttagcaggttgagaggtcttatggcctatgacgagaaaatagggggaggaagggagaaaagcaccaacaaacaaaagaacaatcctggaaaatcaatataggccacattactctgaagtccatacatcagtaggcaggtatgaaagtggcttatgtatatatgtatgtatacacattgctgttattttcttgtgaagtttaagttgtttagcttcagtttgccgggctttacaaaagtacagcttagttttcagtgactccaarttataaaaaatggacaaaaaaggaaacaaaatttaaaacattattttgcaagcttgtagcgaagaaaaattagaattaggtccaaaatgtagaaaataatcaaaatagaaaaacattaggcaagactagaatctaacaacaggtgtactatagtttttgaaacataatttttctctctccagtttcccatttttagtaaagacaaatcatggtaggactgatttgctttattttacttgggctgattatttgtatatg

SEQ ID NO: 631949 - DNA, 619 bp, Homo sapiens
taattagagttctttatatagtttcagtagtgaaacaytgtgtacacaacacataaatacatagatgtattagacatgccaatagaggtacatcttatagattcataaaaaacttttttttcctgtctttctcagattcttcataacctgtttcacaaccctaggcagtagtcagataaataaccttaaatttgcatatcaaaggaaacaactcaggtgaaaatcaaatagcaaaatttatatcataaggcatgcagaaaaaaaccatggtgtgctagagggagattaaagatggatgccaaatgaaacataaaattataaaaatctatcataggattatataaggagaccaattttatttagctagggactacctaacttttaactggatttctgagctctgggcagagcccacactgaatcctcggtttccaaaaagggagaattatgaggctaggccacatgatgtttttacagtgcacttaaaaaaatttttttttaacaaagacatttctaagtgtccagactacactcttctttaaaaatccaagaataacctctgttgcaataactattttattcaataaatcaggtaatgcaatacaaaagcaagcaagtt

SEQ ID NO: 631950 - DNA, 635 bp, Homo sapiens
aatcagcattttccataatggttgtactagtttagatttccaccaacagtgtaaaagtgttcccttttcaccacatccaggcaaaaatctatttttttaaattttttgattatggccattcttacaggagtaaggtggcatcacattgtggttttcatttgcattcccccgataattagtgatgctgagcattttttcatgtttgctgaacatttgtatatcttctttygagaattatctattcatagcccacttttttatgggattttttgtttttctcttgctgatttgtttgagttccttgtagattctggatattagtccttgtcagatgtatagattgtgaagattttctccctctctgagggttgtctgtttactctgctgattatttcttttgctgtgcagaagctttttagtttaattaagtttcatctatttacctttgtttttgttgcatttgcttttgtgttcttggtcatgaagtctttgcctaagccaatgtctagaagggtttttctgatgttatcttccagactttttatagtttcaggtcttagatttaaatctttgatccatctcgagttgatttttgtgtaaggtgagaaatgaggatccagtttcattcttctaca

SEQ ID NO: 631951 - DNA, 635 bp, Homo sapiens
aatcagcattttccataatggttgtactagtttagatttccaccaacagtgtaaaagtgttcccttttcaccacatccaggcaaaaatctatttttttaaattttttgattatggccattcttacaggagtaaggtggcatcacattgtggttttcatttgcattcccccgataattagtgatgctgagcattttttcatgtttgctgaacatttgtatatcttctttcgagaattatctattcatagcccacttttttatgggattttttgtttttctcttgctgatttgtttgagttccttgtagattctggatattagtccttgwcagatgtatagattgtgaagattttctccctctctgagggttgtctgtttactctgctgattatttcttttgctgtgcagaagctttttagtttaattaagtttcatctatttacctttgtttttgttgcatttgcttttgtgttcttggtcatgaagtctttgcctaagccaatgtctagaagggtttttctgatgttatcttccagactttttatagtttcaggtcttagatttaaatctttgatccatctcgagttgatttttgtgtaaggtgagaaatgaggatccagtttcattcttctaca

SEQ ID NO: 631952 - DNA, 548 bp, Homo sapiens
gccaagtcaatcctaagccaaaagaacaaagctggaggcatcacacatatctacaactatctgatctttgacaaacctgacaaaaacaagaaatggggaaaggattccctatttaataaacagtgctgggaaaactggctagccatatgtagaaagctgaaactggatcccttccttacaccttatacaaaaattaattcaagatggattaaagacttaaatgttaggcctaaaaccataaaaaccctagaagaaaacctaggcaataccattcaggacataggcatggtcaaggacttcatgtctaaaacagcaaaagcaatggcaacaaaagccaacattgacaaattgcatctaattaaactaaagagcttctgcacagcaaaagaaactaccatcagagtgaacaggcaacctgcagaatgggagaaaatttttgcaatctactcatctgacaaaggcctaatatccagaatctacaatgaactcaaacaaattttacaagaaaaaacwaccccatcaaaaagtgggtgaaagatataaacaga

SEQ ID NO: 631953 - DNA, 619 bp, Homo sapiens
acttttaaaacaatatttgacttgaactggtctgcttatcctctttctctaatttgaagctccacttgtaacatttgggggcttatgtcaaagtcttagaacaaagacttaaatcaattacaagttaaaggacttaaaactatgtgtagatggcatggaacattgaagcaatttccaaatcatggggtatgcaaatctcaaagaaattccaatgcatgtttgagtcattaattcatcaataactataatagctatcatgtgttggacactttctccatatcagtcactacactgggcactttatacacgatcacatttcataactataataaccatctatgtactagccaccctattagtatctccattttatagatgagagaactgacatttggagaagctaaatacttcatctagttagtcagtgattgagccaaaagtctatctcaggcagcctgactccagagccctgccrtaatatccgaaaagaaataatacaaaactaaggcagccagagcccttgatctaaagtggtggtaaatctatactattggcacttcatatggaaacatgaagcaatttaagctactacataacagtacagttcagttatatagga

SEQ ID NO: 631954 - DNA, 508 bp, Homo sapiens
tcttagatgctattcctatactccaaaggtcttaaggcaaatgaaatactggttttttaaaataagagtgaagttagaggaaatctcagaaaacggtgtcatgcttagcagtaatttgatggcagagaagaaacatcaacaaaatccttcttttttatctctcacattttagggctacagtttcaaaatatatagacttcacatatgttcctaggcctgcaacatttacataaggtaaacttgaataggaaaattgaggggaaaaaagagagaaggggttgattgtgaagtgttgctcttcggagttgtacatggcccawtttttttaattaaacccttgaaacatagcttaagatgtaatcagtcaattctttactgaatgcagattcattaggaatagccaaacaagtctaaactaatgcaattcacttagaaaacaaaaagcccaaactaaacaagataacctaattaaagatttttgacttaataactcatgtttgttctagaa

SEQ ID NO: 631955 - DNA, 392 bp, Homo sapiens
tggtttgctattcaatctttcttctccctacccacttctctctttccctctttttgtctttctttccctgtctcaatgaactaactgctcaactgttcctctcggctattcatcttcggaactgtctgccgatgaagccatttatttatctctgtgactgaaaaacaagttgtctgaactgtttcagattcccaataagctggcaggcccacttgctcmaagttatttatttggggcattaatagtgaggtggttgtgggtggccaaaataattgagcagttgttgtttaacacagcaacgacaacaacaatgacaacaaaacaattgtcaggaaatcagccaggaaacagcttgtaaacagaaaaggctgaagggatgaaactctcctatc

SEQ ID NO: 631956 - DNA, 545 bp, Homo sapiens
taataattctgttttaattattattcacattttaaagataaggagattcaagttacagaacttgtcttttttccccacatgtatgcctttaaaatcaaaagtactttaaaggcgattgagcttagtaaacaagataataagcaaatatatatacattttaaaatccctctgttcaaaaagggatttcagtgagtagacagcactagtgaaaggtgggttctgggatcaggcagacctgggttcaaattccaactttggttttttctaagttgtataggggtaatatttaataaattttacctccaatgatgattaagaacaaatagcataaagtaagtgaagtatctggtatacaacagattcaaaacaaatattaatatctatacttaagtcaatttgatattaattgaatatcatataaattttctgaatatcatacatataacacaaggcattagattaaataatatacaatttctgatcatcagatagtgatggtagcatrgtatttatagtaatactagtaataaatcaacaaacaataa

SEQ ID NO: 631957 - DNA, 567 bp, Homo sapiens
gtgacttcggtgctcttaaaagcattcagttttatgcattcacaaagagattgtttggaattggaacttacgtttaaaagggaagcagagcataaaagtttaaaatatttgcagcctgacgatgtgatagaaaagaaaaagccattttctgaggagaagttcaagctggcaacagaaatttgcataagtaatgaggatccaaatgttaatcgccaagacaatagtgaaaatgtctccaggrcatgtcagatgtcttcaagggaccccttttatcacaggcccagaggcctaggaggaaaaaatgatttcgtaggctaggcccagggccttgcttctttgtgcagtctcatgacttggtgcccagcgtcctagctgtgaataaaaggggtcaatgtacagctcaggccattgcttcagagggtgcaagctccaagccttggtggcttccatgtgatgttgggcctgtggatgcacagaagtcaataatcgaggtttaggaacctctgcctagatttcagatgtatggtaatgtctggatgtccatgcagaagtttgctgcagagatgg

SEQ ID NO: 631958 - DNA, 580 bp, Homo sapiens
tatcatgactcatagaagaatttccttatttcttcaccatctctacctgccttccaaaatgctgactcactgtcagctactttgacttaaatttccttagtgaaggctgatgaacccttgaatgggagacctatgtactttcttccacccagttcattcgtagcactttgttaatagaaccctcgaaaccttctgcctgatgtaacaatatgtgtatggttctatctagtgattaataaagaacagtgtagtaaaagtgtagagactttggaaccagacagaycttcatcggaatcccggttctgtctctacacttgctctgtgctgtggttaagttgtttcacatctctaaaatgggaataaaatgggaataaaaatatctacgtaataggttgtttttctctgtgcagagtcggttgcacagtacggtctcactaagtagatttattattacttgtttttccactgaacttactgcttgacttctaacctgactggtaaaatggtaacttctcagagtgaaaacacaagcaaagaatatcagctggaaattaattagtgaactctaattaattaatga

SEQ ID NO: 631959 - DNA, 477 bp, Homo sapiens
gtctgtgtgctctaaagaacacacatgcctgaagatctagtgccccaggtgcagaccaaagctttgtagttagagggcagtcccagggcaggttgattgggtggtagtgataaggacatgagtttccttgacctgctattttgctggagaaggataaagatacagtatacattcaccaagtgagagtttgtatttggagagaattttacctttgaattttgtttgccttstgacagaaaataggatgtttttttttctttgcctgagattaagaggatagtatcatttcattcattacctgatgattaagagggtagtatcggtagtatcatttcattcaaaagaacagttttacattttgaagatcatgtaaagtatgaagcaagtaattgccaaagcctcctccccaccactccctgccctgcaggctttgcacaatgatttagaatattttagggttccttaaatttctgaatt

SEQ ID NO: 631960 - DNA, 598 bp, Homo sapiens
cgtttgtcaaaacttggggcacttacatacccaaaaagtgaaatttgtagyatgtaaattatagcttaatttttaaaacagggagactctcccttgaaatggtctacagcttattttacttcttaagacaacaaaactaatacatgctatttaagcactttttacaaaatggcatggaatgtgctagtgtaacctcctaagatgactgctgttcacagttccctcaaattccttttcctggcattgctcaaccttatcttgtatccaagtggtttccaaacccttacctgccctggggacaattatttctacttccacttttgcaacatttatcatgtagtaccttatatcagagttccttctctgtcttatcttcttaggattgtaagttccatacaataaaaatccatgctttacttgtatctaccacagtgcctgttaaaatgcctggcaggaatgccataaagaatgtttaacacataaatgaatctatgcttaggtaatagtttcaagtctgtaagtccttcagagactgtgagctccttgaagacagggattgtgcatacctaatcttgtactagacttgacgcactgtaaa

SEQ ID NO: 631961 - DNA, 598 bp, Homo sapiens
cgtttgtcaaaacttggggcacttacatacccaaaaagtgaaatttgtagcatgtaaattatagcttaatttttaaaacagggagactctcccttgaaatggtctacagcttattttacttcttaagacaacaaaactaatacatgctatttaagcactttttacaaaatggcatggaatgtgctagtgtaacctcctaagatgactgctgttcacagttccctcaaattccttttcctggcattgctcaaccttatcttgtatccaagtggtttccaaacccttacctgccctggggacaattatttctacttccacttttgcaacatttatcatgtagtaccttatatyagagttccttctctgtcttatcttcttaggattgtaagttccatacaataaaaatccatgctttacttgtatctaccacagtgcctgttaaaatgcctggcaggaatgccataaagaatgtttaacacataaatgaatctatgcttaggtaatagtttcaagtctgtaagtccttcagagactgtgagctccttgaagacagggattgtgcatacctaatcttgtactagacttgacgcactgtaaa

SEQ ID NO: 631962 - DNA, 598 bp, Homo sapiens
cgtttgtcaaaacttggggcacttacatacccaaaaagtgaaatttgtagcatgtaaattatagcttaatttttaaaacagggagactctcccttgaaatggtctacagcttattttacttcttaagacaacaaaactaatacatgctatttaagcactttttacaaaatggcatggaatgtgctagtgtaacctcctaagatgactgctgttcacagttccctcaaattccttttcctggcattgctcaaccttatcttgtatccaagtggtttccaaacccttacctgccctggggacaattatttctacttccacttttgcaacatttatcatgtagtaccttatatcagagttccttctctgtcttatcttcttaggattgtaagttccatacaataaaaatccatgctttacttgtatctaccacagtgcctgttaaaatgcctggcaggaatgcyataaagaatgtttaacacataaatgaatctatgcttaggtaatagtttcaagtctgtaagtccttcagagactgtgagctccttgaagacagggattgtgcatacctaatcttgtactagacttgacgcactgtaaa

SEQ ID NO: 631963 - DNA, 640 bp, Homo sapiens
ttttattttagctaaggtaacctaactttctgagtcctgtaaaaataatttaaattccccattttagccatttcagcagccaagggctgataataataatwataataataataataataataataataataataataatacacatgtagaaccagacacctggcagtgaatagtggattgaaaagctactggaaacagtctagctggggaaatggtaaaacttagaagaccttaatattggaagaatatgattatacatcaaagtccattttaagtaaaacttttgttcaaaaatccagttgctagtttatacgtttttctccatacttatgactcaaagttcaaactttggttgtccctctgagtctcctagctctggagtttacgctattcagtcgttaagtgctgtttaaagaggctgcgaagcactttctagttaatagattcacattctctacatggtcaatgttggaggtgccagtcagtgaaggggagtgcatgcagagggaacaaccttgcacacacagatttagtagggggaaaaggaagagtaattgggagggtttttctggacccttacttcacttctaaactccaataaagaccatcaaatattgccaagagtatccccaggcaaaag

SEQ ID NO: 631964 - DNA, 640 bp, Homo sapiens
tgcatctttaattttcagaaatactttttcaattttataaaaaatatttttgttaaattataaatattagattctgttcattgctgtgaagtaccttcaggtgttgctgtgattgacaataaagtaatgataattccattaacactcggccaaaccagtggagccagaaagggtcaatacttttctaacggttacattgaaaaatactggtggtgaaattggttttgtgattgaagttttgggtctgtcttctgattgactatataaaaaatcatgtagggtgtgtgtgtgtgtgtgtgtgcgtgcatgcgtgcgtgtgtgtgtgtgtgtttatatttaaaaaaatttctccccaatatttgtgctttgtattatgtgattcatcagttaactaaaacttgtaagtttaaaagtatgtatattcaattttcctagtgcacatgaagacattttacattatagagctgaatgaaaagtacttttagggcctagtgctttgcttaattttaatttaattagtggatgccttcttaaaagtagacttcctattctsttcttgtatttccacaatgctatttgttgaacactttctaccagttcagtacttaacactaagtactttctatagatcttgcttttt

SEQ ID NO: 631965 - DNA, 545 bp, Homo sapiens
tgcaaactttagtacataaaatagtttgaaagaaaaaactgctttgatgcattggcttcgattttcatactcagcctcactctttgccttaaattcaacccatgtagaacttaatagaaatcatctgttttttccccaacacacattttctcctgaagggcatatgaaggctgtggtaaaaatcgcacattctcagctgatagatgagagtatgtgtgtatgtgtgcatgcatgcatgtgtgtgattgtgaaagaattaggctatttccatctaggtagtctttcacataatagaaaacccagttttctagacaaaccgtagttaaagattgatttggcagcaaggaatagtcaatgactggttcaaatcatgaacttgcatgatctttcattttacatgttctttttctgtttttacctacaaaattacagwgtttggttctaacctacaaaataggtttcgcatccaatcctcctgggttttaaatcaattatgagtgcacaataacgtatatttattgtgtactcctagatagttttccacg

SEQ ID NO: 631966 - DNA, 597 bp, Homo sapiens
tgtctgtctgtctgtctgtctgtctgtctrtctatctatctatccaccccatccatccatctacgtacccaacctccttacctgtccattctagtccaaatctccaaagtgcactttcttctaccacatccctagcaaatgatcattcaacctctgctaaaattacagaaacattcttgatgtattatttggaatgctcttcagaactccaagctgctattcttaacagcatctgagcaaagaaaatgctttggacatgatgggtttcattcattcacttattttctaaaaagtaggtactgactaagaataacctatgtcctgggcatttcatcaggtgctagagaaatggagataatttggacacagttcttgtttgcaacgcttttacctccaaggagaggagatagtcatagtcacaccctggattgtgggcagtcttattaggagggtaacaaagttcatgcagcctgctggaaaatcctgccacttgactatatttttaagttttccaactgtgctactgatggatcatttatttcctagaatggtctcaaggatgttaggagaccatttggtaaatcaggtatatgatga

SEQ ID NO: 631967 - DNA, 606 bp, Homo sapiens
ctgctacttgcctgttagtaactcagtagccgtcttggtttatcagatcacctgtcacagtatctcagtgcttgggttcagtaatccttgttttacttaatagtggctacacagtacaagagtagtgatgctggtgatttggatatgtcaaagagaagctataaagtgcttcctttaaatgaaaaggtgaacgtttttgacttaataaggaaagaaaaaagttgtatgcagaggtggctaagatttatggtaagaataaatcttctctctgtgaaattgtcaagaaagaaaaaggaagctgtgcatagtatatctagagtttggttctatctacwgtttcaggcaaccactgggggtcttggaatgtatctcatgtggataatgggggactactctataaaaaaataattacaaccagagaactaaaagttgaaatagtgaaaataataaaataagataaaaatgatatgaatgtataaccaatgcatgatattaggaatagttagtaaagaaatgaaaaaaatcagctgggtgaggtgacgaacctgtattcccagctactcgggaggttgaggtgggagtatcgcttgaacccaggggttagag

SEQ ID NO: 631968 - DNA, 594 bp, Homo sapiens
aaatgggaagggaaccatcatatctggaaaagtgatagagccaactgaactttctttttaaaatctggactctctgaatggagcactacatgtttttaacttcaaaaacttaaagtagtttgaacatgcttctttgaggtgaaatatgccttaatatgttttgaatctaaaataaaagaaaataaatatacatatgcaatgtcttatttattgaataacttacttccagggtcagttaartttggagatccaaatctttatccatttctttttgagattttcagtttttctctatgtcacatgaagtgctcgtgtcatatgcacaagtgcaaataacttcttgaggaaagaaaaactgctatgagacatgccaatattttatgccccaactgagacatctgtgcacacaattgacattcagaactccctggtatacattatttcataagcctttgcatattatgctttcaagccctattattattgatttaaaagaagtgaaactttttttttttacaaatattatccactacctttgaaatgctaaagtgagaatctttgaaatgagtttggaaaaaatcttgaataatccac

SEQ ID NO: 631969 - DNA, 578 bp, Homo sapiens
aaaaaaaaatagaatgtagactcatgagaacctaacaaatgaatgtggtgggtaaggaagagaaagamgtagagatgaaatttccactctgactggggaaactaggtagatagatgatcatgaagaatctgaggaagagcagaagtcgtacaggtaagaatgaatgcattcattaatttattcagcaaaactgcctgaagaataccatgtgcagcactgcgggacaaaacagggcttgcattcccaggctgtactcttgtgaggacaacaagaaggaagtagagaaacacacaagaacaatgctaagatggggaaactccatacgctgcgggagcacatacagacaaagtccaggtagggctcccggagaaagtgacatttctagtgattcttcaagtatgagatagtcatccaggcaaagagatggtagaaaagtgttttaggcaaaacaacaaaatgtgcataggctcagaggcctatctgattttctatggcaggctgggctttcatcggcagagaggatggtctgagtgaaggaagctttgtttgtttttgtttttcgtttcgttttgtttaaa

SEQ ID NO: 631970 - DNA, 578 bp, Homo sapiens
aaaaaaaaatagaatgtagactcatgagaacctaacaaatgaatgtggtgggtaaggaagagaaagaagtagagatgaaatttccactctgactggggaaactaggtagatagatgatcatgaagaatctgaggaagagcagaagtcgtacaggtaagaatgaatgcattcattaatttattcagcaaaactgcctgaagaataccatgtgcagcactgcgggacaaaacagggcttgcattcccagsctgtactcttgtgaggacaacaagaaggaagtagagaaacacacaagaacaatgctaagatggggaaactccatacgctgcgggagcacatacagacaaagtccaggtagggctcccggagaaagtgacatttctagtgattcttcaagtatgagatagtcatccaggcaaagagatggtagaaaagtgttttaggcaaaacaacaaaatgtgcataggctcagaggcctatctgattttctatggcaggctgggctttcatcggcagagaggatggtctgagtgaaggaagctttgtttgtttttgtttttcgtttcgttttgtttaaa

SEQ ID NO: 631971 - DNA, 607 bp, Homo sapiens
aaattcagacagtagtgtcaygcagatacatgaagggggcaagattttgaagaaattcaaatatttttaaagcagaaatattttaaggataactctggagatggctgtcaggaaagtgatgaacaggtacagtcatcagccagaatattcaaggttcaggtagtcgataatggcattatgtttactattaccaaggaagcaacacagaaatagttttgacctttgatgtaagggtgacccaggaagggaaacgatgacataaaagtctaaattcaaactctctgggtacgtgtaattcatcttcttaaccctacacacccaagagccctatgaagtatagtttgtacattgacaatggttaactgagcttctggtactaaaaggagcaaaacaattataaaatcagtggtctagattcattcatttacttaaaaaaactatcaaatacactcaacattagcaagtaagaaaaaattctaaacataaagtggaagtgtggtgacaaaacttgaggacagtactttctatttccactagcctcagtttgacaaagataacatttgtttgtaaacagaattcaaccaacttcataaccagcctgcacaac

SEQ ID NO: 631972 - DNA, 607 bp, Homo sapiens
aaattcagacagtagtgtcatgcagatacatgaagggggcaagattttgaagaaattcaaatatttttaaagcagaaatattttaaggataactctggagatggctgtcaggaaagtgatgaacaggtacagtcatcagccagaatattcaaggttcaggtagtcgataatggcattatgtttactattaccaaggaagcaacacagaaatagttttgacctttgatgtaagggtgacccaggaagggaaacgatgacataaaagtctaaattcaaactctctgggtacstgtaattcatcttcttaaccctacacacccaagagccctatgaagtatagtttgtacattgacaatggttaactgagcttctggtactaaaaggagcaaaacaattataaaatcagtggtctagattcattcatttacttaaaaaaactatcaaatacactcaacattagcaagtaagaaaaaattctaaacataaagtggaagtgtggtgacaaaacttgaggacagtactttctatttccactagcctcagtttgacaaagataacatttgtttgtaaacagaattcaaccaacttcataaccagcctgcacaac

SEQ ID NO: 631973 - DNA, 563 bp, Homo sapiens
gacaattagcgagggctccaaggaagtggaggttgtgtacaaatgtggggcattagtaagtgaggcattcataagttagaggcagccaatattggttagaagcagatacttaggatctctgagtctgctctgttaataaatgaagtagcaacaaagacaggagtaccacgcatcrgagggtggaaatggcaaaaaaggaggcaccaatgcaaattctgtaagttgaacatgttgattgctgtctagtgctttgcaaaatgcaagtctgggcagggtgacctctggcttctttctcgaatattttataaaatagcagtatcatagccccaagcaagagcctgagttgcagccatctcagttcattgccttttaactccaaatctgccacttcacagatatcttgctcatcacccccttagcaatacaaagaccctaacacttgtgctttacgacagaccctgaacaaaggataacagctgctgagccacacggaatacttttccaagctgcagaatctcccaaggttggaacccaacaacatgcctaactttttcatcagtatc

SEQ ID NO: 631974 - DNA, 580 bp, Homo sapiens
ctttttcttcatggttagggctttcggggtcctgtttaagaaatttkgtctaacctagtcagaagatattttccttatgtttgttctagaggcttaatggctttagtttcagatggatatatagtatccatctcaaattaattgttgtgtatacttagaggtacaaagttcatttttttcttatggatatccaactgatcaaatacctttgaaaataccatccttttcacaatgaattgctgtggtgccattgtttaaatcatgtaatcatatatgtaaagtgtttctatagtgtctattctgttgcattggtctatttgtgtatatttatttgtttatttaagacagagtctcaccctgttgcctaggctggagtgcagtggcacaatctcagctcactgaaatctccacctcccaggttcaagcaattctcctgcctcagcctcccaaatagctgggactacaggcatgggtcaccatgcctggatactttctgtactttttgtagatggggtgtcttgccgtgttgcccgtgctggtctcttaactcctgagctcaagtgatctacccaccttggcc

SEQ ID NO: 631975 - DNA, 580 bp, Homo sapiens
ctttttcttcatggttagggctttcggggtcctgtttaagaaatttggtctaacctagtcagaagatattttccttatgtttgttctagaggcttaatggctttagtttcagatkgatatatagtatccatctcaaattaattgttgtgtatacttagaggtacaaagttcatttttttcttatggatatccaactgatcaaatacctttgaaaataccatccttttcacaatgaattgctgtggtgccattgtttaaatcatgtaatcatatatgtaaagtgtttctatagtgtctattctgttgcattggtctatttgtgtatatttatttgtttatttaagacagagtctcaccctgttgcctaggctggagtgcagtggcacaatctcagctcactgaaatctccacctcccaggttcaagcaattctcctgcctcagcctcccaaatagctgggactacaggcatgggtcaccatgcctggatactttctgtactttttgtagatggggtgtcttgccgtgttgcccgtgctggtctcttaactcctgagctcaagtgatctacccaccttggcc

SEQ ID NO: 631976 - DNA, 547 bp, Homo sapiens
caggaactgtcatgtctggttcatgcattctttttttttttttttcyttttttgagacagggtcttgctctgtcatccagctaggagtgcagaggcagaatcctagctcattacagctccaacctcctgggctcatgaacctcctgcctcaacctgcatcagccccatgagtagctgggactataggagtgtgccaccatgcccagctaatttttgaaattttttgtagagatggtggggggcgggatgggttggagggggtcttgctgtgttgcccaggctgatctcaaactcctgacttcaagcgatccccactgcctcagcctcccaaagtgttgggattacaggcttgagccacagagcttggtctggttcatgtattcaaaccacggatcagactcaacatttgaatcattagtcattcaataaagatttactgcatgaacaaaagcaaatcattttttaaaagcaaataaaaaataaactttttgcttatttggtctttcctcctttgggtaggattaaagcccaaatagttaaaaatcca

SEQ ID NO: 631977 - DNA, 448 bp, Homo sapiens
ttttgaagtgtacaataaattataaactcgtttccttattgtgctatcaaacactagatattattccttctatctaacygtatttttgtgccttctagccaagtccttttcatcctcccttccccactacctttcccagcctctgtaatcatccttctattcaatacctccatatgactaactcttttagctcccatatatgagtgagaatatgtgatatttgtatttctgtactaggcttatttcacttaatataatatcttccagttccatctatattgttgcaaatcataggatttagttccttttctatggctgaataatatcccattatgtacactaatgtatatacactacattttccttattcattcatccattcatgaacatgtaggttgatctgtatcctggctattgtgaatagtgctgcaataaacatggaagtgca

SEQ ID NO: 631978 - DNA, 505 bp, Homo sapiens
agagtctttaggatttttgttttaaatgtaagatcatattgtctgaaaacaagaacaatgatttctttctttccaatttggatgccctttatttctttctcttgcctaattgctctagctaggacttccagtattctgttgaactaaaagtagtgaaaggggtatccttgtcttgttccagatcttagaggaaaggctttcagttttcccccactcagtatgatgctagctgtgggtctgtcctatattgctttgattgttttgaggtatgctccttctatatgcagtttgttgagagttttttttttttttatcatgaagagatgttgaattttaatgaatgcttttttgacatctattaaaatgatcatatggtttatgcccttgattctaccaatgtgatacatctatgtttattaacttgcatatgttgaaccatctttgcatcccagggatgcatcccgcctgattataatgratgaccattttaacgtgttgttgaatt

SEQ ID NO: 631979 - DNA, 587 bp, Homo sapiens
tgtgtgccattcttcactttaaaaagcagactttttggccgggcgtggtggctcacgactgtaatcccagcactttgagaggctgaggcaggcggatcatctgaggtcgggagtttgagaccagcctgacgaacatggagagaccctgtctctactaaaaatacaaaattagctgggtgtggtggcgcatgcctgtaatcccagctacwcgggaggctgaggcagaagaatcacttgaacttgggaggcggaggttgtgatgagccgagatcacgccattgcacttcagcctgggcagcagcagcagcaacaacaacaacaacaacaacaacaaagcagacttttttaacatttcaaaaagttacaattatttcactagctgcacaaatatttattgagttcctgatctgggccaggcacttttataatggctatcaatgaaagtatcattaataagattatttgcctttcacctctcaacactttatttcttgactgaggaaccagcattgtgagcagatgttaggaatatagccactcattaaatatttattgagtacttattctcgaggagcttcaagtttatt

SEQ ID NO: 631980 - DNA, 558 bp, Homo sapiens
gtgtatgatctcaacgtcttgaatttgttaattatattgttcatggcttctttccaaagacaactacatccttaattctgaccacatcctctgcactgctagttatgtagagttaggtaacaagatagaatggtacacatgaatatgcatctctccttcattttcattaataagaatgcagaacatctttttttcccctcatattcaggcaatttaattcttattcttggaatctgtcttgttaggaaaagaagacagaaagagcagcctatgctatttcataaagttaaaggaaagtgatgctcctatagatcccttctgtgtctaagcaaraaggtgacaagatgacattactttcacttctcatactgtaattaaaatccactattattgcattcaacttaattcaccctttgtatcatgcagttttaagggtgttgggaaaccaactcaaatccaacattctggactttgctttaactttaaggaatttaatgttgcaatatgagactctcaccaccctccttcccaccctacccacacacactagtcaaatat

SEQ ID NO: 631981 - DNA, 583 bp, Homo sapiens
gatttaattttcttttagacaatgcctctctcttccctcttctctgcctattgccctcagatgcactctttaaaaagtgactttagcttagcagagagacatgacttacttttcttgcccacctctaccttccttgtcgccagttgggtattacaaaagcagatggaaagaaggggctttctggagtactaagtatccgttgacaccaatttggggatagaaaacttgaagccatttataatggtggtttcacaaacaaaattttgaaaaaaaaagattttattgggtaagacttccagttaacagactctattagtaattaagtttggaagagtaaaaaattatacatgtactttcaactatgcagggagtaggtgcacctaacccccatgttgttcaagaatcagctgtaattatctatacttatyatgcatttaattaggtaattacaaataatccaatattaccagcaactcactagagacgtttaaagttgagtattctaaatttttaagctaataaatgtgaagaaagtataaatcaggtaggagatttgaacccaaaacttttcagctcccagaca

SEQ ID NO: 631982 - DNA, 583 bp, Homo sapiens
gatttaattttcttttagacaatgcctctctcttccctcttctctgcctattgccctcagatgcactctttaaaaagtgactttagcttagcagagagacatgacttacttttcttgcccacctctaccttccttgtcgccagttgggtattacaaaagcagatggaaagaaggggctttctggagtactaagtatccgttgacaccaatttggggatagaaaacttgaagccatttataatggtggtttcacaaacaaaattttgaaaaaaaaagattttattgggtaagacttccagttaacagactctattagtaattaagtttggaagagtaaaaaattatacatgtactttcaactatgcagggagtaggtgcacctaacccccatgttgttcaagaatcagctgtaattatctatacttatcaygcatttaattaggtaattacaaataatccaatattaccagcaactcactagagacgtttaaagttgagtattctaaatttttaagctaataaatgtgaagaaagtataaatcaggtaggagatttgaacccaaaacttttcagctcccagaca

SEQ ID NO: 631983 - DNA, 646 bp, Homo sapiens
tagcacagcaggcctgactgctgtgttttgaaaggtttgcttacaaggttggcccttggctggtgtctgggaatgttagtttagggagggttcacatcactctaactgctaagaggtggcttactgcacctaaactgtttgtacaaacaatacggtttatgcaaatatctcctttccctctgggagtttggaatttgggtacgtgccaggaagcgagtgctatgtgaccagcctccaataagtctctagacaacaagtctctaatgaacttccttggtggacaacatttcacatgccacagctccttgcaggggggaattgagcatgctctgagtgtctccactgggagagcactcttagaaggttgcacctggtttcccccagaatttgtcccctgtaccctttttkatttccttttactgtaataaatcatagccacgagtatgactatatgctgagtcctgtgagttctccaagcaaattaccaaagctgggggtggtcttgggtaccccaacacaaaagtattaagtcatttcttcagaaatgtatttgccatgcacagtctcatcccacttgcccccctccaaaaaggggaatgagaagcaaagaaaggatgaaagagaaatgactcttgctgcttgccac

SEQ ID NO: 631984 - DNA, 615 bp, Homo sapiens
atttaagctcaccatatgactcactagcaaacacttgcttataaatccactagcaactggtactatatattttgtactggataagtagagtaacactaggattcatcaatcgaaatgagataattttaaaactgaaagagagcactagtaataattaggccagaacaacaggtgtaaacttgtttacctggcaaaaagggacctaaagaaaccagattaatttmataagaaaaccatatggttctgcagatagcttattgtaatgctatctcaattcaaaagacagggaaaggcatcaggtgatatttgttggatattttcccaaggagaaaagatttaagcttgattttgaagaatgaggaacagataaaatgagaagagtttgagtgatgtgatagagtcaggaaaagagaagctatgcttaggtaggacaaaaggtttgtgactaaaggttttgtttggaggagacagaaatgagagttaaggcagaaaaaaataaaatgagtgtagatttcatcatataggcagtgcaaaaacttaagaaggaggctgacaagaaacaagcaacattcaagattaacatgaagacagtgcagcatatagtaattaagtggt

SEQ ID NO: 631985 - DNA, 650 bp, Homo sapiens
ctcctggttccagctgcacctttctaactgcctctcattggccctcacagcctcctcaaaccctatggccaaaattttcccttcctcctacatatgcacaagctaagatcagaagctaaaccaccattctttccracactgtctcagagacttggaaacttcttttcctgtctctgattcccaatatcaaaacagctgcccaatcctgatcctattcataaaaatctccttatagcttttcatccctttgctactctcctgattaaggccttttaaatctcaccagttccatcctaaatggttgactgttctctccccttcacaacctgctggaaaatgatctgttctggtgcatcatagattagatcacccctgtgttcaatgacctgcagtgcctgcagcaatgctgggggggttacttttccgtggctcaaggccatccactaaaatctcccaactggtctctttccaaaatatggctagtcttcctactgcctctactggttctatctctttcaaggtctaattcaagggtaaccttgagctccttaggaaaaaaacaaaaatgagacaggcattgtagaaggtcagggaaattccctcaacttctatgagtcattcagttttatttaagagtacaaaagaatatc

SEQ ID NO: 631986 - DNA, 503 bp, Homo sapiens
gtacagaagcagtagaatttttgaggccttacacatttgtaaatatttttattttaccctcaacctggattgataatttaactagaaatagaaagctaggtttgaatgaattagtcctcagaaatttgaaggctatggattttggtttattgcttcttttacgctgttgaagatccattattgttctgatttctgatgatttttatgtaagctccattttcttatgggttgcttttaggttttcattttatccatgttttttaaacattttatgatgacatgccttttgtttattttctcattcattgyacagtgtacatattgggccattttaatgtggaaactttaaaaaaaaattcattctggaaatattcctgaaattttttttttggcaattctcttgattttattatctctcattcagcagttctattagtcagatgggcttctgatatccttctttatgttttaaaactctgttttctgtttttaatagccctctt

SEQ ID NO: 631987 - DNA, 588 bp, Homo sapiens
atgtgttccaatattgcctaaataggcatcttgacaaagtgacatgtatgatgaataaaggtttgctctagagtcaggtgatctgttgtctgcattcttcaattcccatgagatcagaggatagggttaataaatgtgtaagtaatcaaatatctaatctaagccattcttttcttcctatgtaagtcctttaaaaaatccattcatmataaaaaataaaatactctgtttctatattagtggatatgataaggagagggaaaggaaggcaacattataaaatacatttcacataaatcattttctaatggaaatccaccagctatcccctaaagataatggaaaactgagacagagcagaggttggggactgttatcaggcccaacctggcttccaggacctcttcctttatttggagcctactgactctctcctgtaaactaggcagtaggcacatttgcaagaccagcttccagctagaaagattaaggaactgaagaccaccactcaggctcagggatttaacttttacgttttatttagaataacaaactgaagttcaagttctgtttaccaaacagcttaat

SEQ ID NO: 631988 - DNA, 169 bp, Homo sapiens
acatcagaagttgtggttttaacatgagaaacattttaaataaaaatttcaaagttgctgtaccatgagatcaatggtgttatactatttccccagaatacttacaatcacctaatgcttttgtgttaaaaataactwcatgataaaattttaaataactattaaaatg

SEQ ID NO: 631989 - DNA, 597 bp, Homo sapiens
gatcttactgtggactggtaacacagtttgagggagggtctcaaagtctgaggaccacrctttgtttggcactattgctgtacaggttctttgccatctaaagaatggttctcaagtaacaggatggcgactcttatttcctctgtgtgttcaccctctactgatctagtaacagtgttctttaagaaaacagacagtgatgaatgattcagcctcctttttacgtaagccttcctattttttgtaagtagactatcatacaatttcaaaataactattaaaaatggggatatgtatggaagtgaaaatgtcaagccacaggcagttttattaagttatactttttaaaaatggtcttgattagagaatcagttcttaccctgaaccttgttcatcactctaatcacatgcctagcacaggccttgcaaagactgggcatgcgatcattattaactgaataagctaacctaatgggtggagccaaggtgatgagtgtaagtaattttttaagaagtaattttagggttttaaattagtcccaaaagtccccttataaaataagtcagaaaggtagagttatgggccatgagtgagac

SEQ ID NO: 631990 - DNA, 597 bp, Homo sapiens
gatcttactgtggactggtaacacagtttgagggagggtctcaaagtctgaggaccacactttgtttggcactattgctgtacaggttctttgccatctaaagaatggttctcaagtaacaggatggcgactcttatttcctctgtgtgttcaccctctactgatctagtaacagtgttctttaagaaaacagacagtgatgaatgattcagcctcctttttacgtaagccttcctattttttgtaagtagactaycatacaatttcaaaataactattaaaaatggggatatgtatggaagtgaaaatgtcaagccacaggcagttttattaagttatactttttaaaaatggtcttgattagagaatcagttcttaccctgaaccttgttcatcactctaatcacatgcctagcacaggccttgcaaagactgggcatgcgatcattattaactgaataagctaacctaatgggtggagccaaggtgatgagtgtaagtaattttttaagaagtaattttagggttttaaattagtcccaaaagtccccttataaaataagtcagaaaggtagagttatgggccatgagtgagac

SEQ ID NO: 631991 - DNA, 597 bp, Homo sapiens
gatcttactgtggactggtaacacagtttgagggagggtctcaaagtctgaggaccacactttgtttggcactattgctgtacaggttctttgccatctaaagaatggttctcaagtaacaggatggcgactcttatttcctctgtgtgttcaccctctactgatctagtaacagtgttctttaagaaaacagacagtgatgaatgattcagcctcctttttacgtaagccttcctattttttgtaagtagactatcatacaatttcaaaataactattaaaaatggggataygtatggaagtgaaaatgtcaagccacaggcagttttattaagttatactttttaaaaatggtcttgattagagaatcagttcttaccctgaaccttgttcatcactctaatcacatgcctagcacaggccttgcaaagactgggcatgcgatcattattaactgaataagctaacctaatgggtggagccaaggtgatgagtgtaagtaattttttaagaagtaattttagggttttaaattagtcccaaaagtccccttataaaataagtcagaaaggtagagttatgggccatgagtgagac

SEQ ID NO: 631992 - DNA, 557 bp, Homo sapiens
taaggtttactgaatattttaagccactgttgagaccttctgattaaagaggtttatttctaaatattactgcccattgacaatgcaactagtcacccaagagttctgatagagatttaaatggagaataatatattcatgcctgctgacacaacatatattatgtagcacatggatcaaggaataagaggaataagttagacttctgagtcttattatttaagaaacacatttcattaggctttcacggccataagtagtgattcctctaatggatctgggtaaagtacactgaaaaccttctagaaaggattcatcactttagatgtcattaagaacatttgtccctcrtgggaggaagccaaaatatccacattaacagcagtttgaaagaattgattccaactctcagggatgagttggaggggttcaagacttcagtggaggaagttactgcagatgtagtgaaaatagcaaaaaagctagaattagaagtggagccttctagaaaatgtgactttattgctgcaatctcataataaaacttgaaaggacta

SEQ ID NO: 631993 - DNA, 647 bp, Homo sapiens
taatacatgaatgtccccttttagttcatgtgtcagacctagtttttctttagaataatgacagtgtaggattatttatttatttatttccttatttatttattgagacagagtgttactctgttgcccaggctggagtccagcggcgcgatttcggatcactgcaacctccatctcccaggttcaaacaattctcgtgcctcagcttcccgagtagcttagatgacaggcacacacccccatgcccagctaatttttgtatttttagtagagacggggtttcaccatataggtcaggctggtctcgaactcctgacctcaagcgatccacccgcctcggcctcccaaagtgctgggattacaggcatgagccactgtgcccagccagaatatttattcttaatagcacatgaatactgtatagaagttttatgacaagcagtaagatcttgatattgattaaaacaatgtaaaataatctaaaaaataccatcataaggtaagaatattatttcatgaatcrctatcccctgttcatattttcttttggatatcttacaatctgtagaagatagatcccatccccaggccatttgctttactctaatgcttatttgttaaaataatctgggctaaaactagaatag

SEQ ID NO: 631994 - DNA, 603 bp, Homo sapiens
catagctatctctttagatttcaaaggattcaaatgaaatttctactgtaaaatgttttgtgaaatctgaagtattatctaattgttagttattrtctcacagcttgcatttttaaaaacaagcatttcatcgatttgtttgaatctaaacgtgtagctgtcatacagggaacagacttccttgaataagtgtatgaaaaaaaattcctgaaggggctaattaaccatctgtgggaaacaatacatttctttatagagttggactaaatgacctcctcttagttttcttcaaactgtagggttctctgattgcttaattttgtaaattattagttatttagaaagatcttcccttttgctatctctttgtttgaaattatcacaagatttagaaatagctctttattacttctaatttgtataatcatcacaaagaattagcttttgtatctggactaattttacttagcacagcgatgccccattcctgtttggaggttacatattattgcaataattgatgtattgcatgtgcaagttaatcttaagaaatgactgttcatcagtgcatctctctactagctgacccaattaaggccaaat

SEQ ID NO: 631995 - DNA, 484 bp, Homo sapiens
gatgtattgcatgtgcaagttaatcttaagaaatgactgttcatcagtgcatctctctactagctgacccaattaaggccaaattaacaataagactgtaaatgtttgcaagattccaatagccatttaacttctttgagaagaaatcaaatatagtgggaagaacactgaattaggtttagactttatgttgaccctccttgatttaaaatgaaggaggtctctttctgtgcttcactaaattggatagtttaaaagaaaawcactagaaattatgaagaactaatacaaagctgtgtttgtaagcattttgtcatccctaccatggacatgatactgtgctgagtactgacatgcaataatctcacttatcaatgcatgtcagtactcaggatggtacagtaaatattggtaagattccaatagtcctttaacttctttgagaagaaataaaatataataggaggaacattaaattaggttt

SEQ ID NO: 631996 - DNA, 488 bp, Homo sapiens
cacagtcccatctctacctctatcccatcccgcttctggagaacccatctggcagcaaggaggtttctaagaatgctctttgttacctgctcaagccctgtactttatttaaaaattgtttcattatttaaaaggctgttttcagagtagcagaaacttcttcatggtggaaggctacatacaggcagatatgtaagtatttcacataagaaggtacagttgattgtggagcagaacgccccaaacatcaatgacagcttaatgtctttgactattatgaaaaacagcctttcctttwaaaaaaaaaaagcttttccataatttagcttgacgtgtatccccaggccctgtaaaaacttccactacttgtcaatgagtgatagtttcatttcttgtaaagtgccaaaatgagaattcagagtttcattttggagaaaaatgggatttgtaaagtgttgcatggggaagaatggattagttgacctaaa

SEQ ID NO: 631997 - DNA, 488 bp, Homo sapiens
cacagtcccatctctacctctatcccatcccgcttctggagaacccatctggcagcaaggaggtttctaagaatgctctttgttacctgctcaagccctgtactttatttaaaaattgtttcattatttaaaaggctgttttcagagtagcagaaacttcttcatggtggaaggctacatacaggcagatatgtaagtatttcacataagaaggtacagttgattgtggagcagaacgccccaaacatcaatgacagcttaatgtctttgactattatgaaaaacagcctttccttttaaaaaaaaaaagcttttccataatttagcttgacgtgtatccccaggccctgtaaaaacttccactacttgtcaatgagtgatagtttcrtttcttgtaaagtgccaaaatgagaattcagagtttcattttggagaaaaatgggatttgtaaagtgttgcatggggaagaatggattagttgacctaaa

SEQ ID NO: 631998 - DNA, 603 bp, Homo sapiens
taattgagagagtcctttctttttgcccttttataccttccgtcatatgaggacacagaggaggagtgaggaggcagcatcaaggtgccaccttgaagcagtcctcccaggataccaaacctcctactgccttcatcttggacttctcacttcccagaactgtaataaataaacttctgttctttataaattacctaatctgtggtactctgttatagccacacaaacagactaagacacgaggttaaatgagttttcccatcttagcacatttaataagtgatctgttggacaccctggttttctgatttaacctagtcctttgtttctattaacctataggtatttaaagacaggaaactctttttctctggaagatgagaggcagactaataactgacagagtttctgtgttatcttcagtctctttctacttttrgcagtgctccttgttcactcatgggctcgtgctggttttcttatatccttaacttaactcttgacccaccttgttcaccttcccaaggtgggtcccaagctggaccattctttagagttcagcttcttggatctgggtcatgttatcaggtaaccaaggccagt

SEQ ID NO: 631999 - DNA, 632 bp, Homo sapiens
tagatataacttactatttccaacagtatttattttcttaaattataaggcagattaatgttttcaaaataaaagattggttaaaatgctgcttgaagtaacctgtagtctgtgcctgtggcagggactaatagttaattaattttaggtaggttttattctcacatagyccttatggctgaagaatgggctattctgttattatcaaggatactagctaaaatagtatcgtgtttagagtgccatgggggagggttctgtgtgttttgagagaactccaagtcttgggaagctgcccctgtttcacaggcatttcacgcctgtgaggttctctccaagggggctgttggttttcataatgagttgcactcagcatcttgaggcagatgagtcagagatgcctttccttatccacatgtaattcctggctttttgtttattttctggaccaactgagtagatggtttttctgaggcatgtgagacagacgcaaccttgaaaaagggaagcattgccaaaaacatggctttgtctgggtttcaaacatatgtttcatagggtttttattcacagaagagtcagaagactcttgttttgttcacaggaacaaaagtttgtgtggcccgtagcaa

SEQ ID NO: 632000 - DNA, 588 bp, Homo sapiens
cttcattgttcataattagtaataacccaatttatgcttatttgagccatatacatttgaaatataacttactttgctcatccttccccagcattcctggcttctttctgaacttacaaaaggtcaagccctgctcaccraatgtgcattcagatcaccacaaatttacttataaaaacagcaaacagctaataacactcttgatccctggcaacctttcatggctgaaaaaaaattaggacagtctacctagatggggattccaaagactaaagactgattccaaatttccattaattaactctgagtaacagtataaatcattgctttcttcctaagagtccttttgtttgctatctgtggtgttttctttgattctcaactaaatttaaatatttaaaagtgttattaaattacaaaaaatatatatggtgggtggacttatgtattcattaggagatataacattttagaaaattattatggaatttcttttgaatataaaggacaaagtgaaagttgatttctcctaaacgaaaaccttttgattttacacatggatatttgctagtggtatttaatttgcca

SEQ ID NO: 632001 - DNA, 510 bp, Homo sapiens
gggatgaagtttcaccatgttggttgggctggtcttgaactcctgatcctcaggtgatccacccgccttggcctccaaaagtggtgggattacaggtttgggtcaccgtgcccagactaattyagtatctttagtgaactattttaatgaagtctatttccccctctgtgtgaagcctcttctattatctcttcagagaatgcagcctgggacatgaccacagtcacccagggataacaatagtttcaggagagttctgtttatttccttaggtgatctataaatatgtctgcttcatttggtatcacatccagcttgttagttttcactaactgctagtagattgctctgttgtttttgacaacaccctggagcatatccagttaaattccagctccttgccaggtcacttaaaaaaaaaacaaacagtctttgagattgttatgatgctaaaaaggctctttctgtctctttccctagttatttcttatgatttagcgagagagtcag

SEQ ID NO: 632002 - DNA, 520 bp, Homo sapiens
ttagatgtacgaacacatttttgagcatccaatgtctggctaattgaggctgtgaaggaaaggaatcacagatactgttgtatagttgttgtatagttcctctaaaagttatttaaccaaataatttttatcaacctgtaaaagtatatggactttttcagcaaacatttataaagtacctagacagtactgggcatgtgatagttattaagaataacaataacaataaccttcaaactctctttggttttgttcaaagcccagtaagggccctcatgtattaggtttttttaactgcagagagtagagccactttggtatcttcctagaataatggtcagtgcctagcatttaaatagctgagccaagagcatgtgaaccttacctctgtcagcagtgtctttatcttccttttgaccgaagcatggtgaaaactaagccccatgcatgtcayagcaaacatcatttctctgagattgtcttgatttttaggctttagtgtaagggatttaaccttgct

SEQ ID NO: 632003 - DNA, 617 bp, Homo sapiens
  misc_feature 411: n = A,T,C or G
cctggtgcagactgagttcattgggactctacagatgtgaagatgtcctaaggaaggatggcagagaactaagagcagttagcgttgcaaaagataaatstccactttcacaactctctctggaatcactcctgagtctttggatgccacttacaaatgtatttttttaatgctttgcaatagtgtgaaactggctaggtttcaattgtatttgtagtatcaacctaaaaagcccagctaagccagagttacctcctttgcctaagttcacagcgcacttttggtacaaacatacaaagattcatgggaatgttcattgaccttcagagctagaaaacagaggagttttaaaagaagctgtaatccttgttaatataactgagaagtttatttgcaacatttttcttacanttgctgttcctggcactgattaaatatgaccttaaaaaggaccataatctgctaagagactgaaacctttttctctctctaccccccaccaacccccactttctttctctttgggtaggctgccctcatgaagtgtgttgctttactttattttgagttccttggctgctgaggtttttatttggaaaagaaacatcaaaataagt

SEQ ID NO: 632004 - DNA, 668 bp, Homo sapiens
gattgatacatattaagttttaggtattataatttatatagatttttaaaaatcttcaaatgcaattcagttttatgttgaagaaattttcctttcagttgaactgaataaggtgacaatctgtcccgtttgycaattatttgtgattttaagtttcgcctcaccttcagtcttatttatggcttttcagctattcattgttgccaaaataaatacaaagaaaaattttatcctaacttaatcaattttattactaacaatacttgaaaaataattagaaagttcattttaatgcaaaggctaagaagaagcattatctatttgttctttcctatacttcaaatattttctctccatatcatgaggtccaacatcaagctacaacaaactggaaacatttaatgaaattaactttacaataacataatgctgaaatttaaaacactgagactcacaaaagcccacattcaatttcaaaaagaaacacacacacacacacacacacacacacacccctaaatgtttctctgagtaaggatgctgtcatttctcataaaatgatccctcaactctccatggaaatgacagtattcaaatacttctgacattctgatgaatacatgatgagcactgaaagggaaatccaaggtgaaggaaataacttacaa

SEQ ID NO: 632005 - DNA, 668 bp, Homo sapiens
gattgatacatattaagttttaggtattataatttatatagatttttaaaaatcttcaaatgcaattcagttttatgttgaagaaattttcctttcagttgaactgaataaggtgacaatctgtcccgtttgccaattatttgtgattttaagtttcgcctcaccttcagtcttatttatggcttttcagctattcattgttgccaaaataaatacaaagaaaaattttatcctaacttaatcrattttattactaacaatacttgaaaaataattagaaagttcattttaatgcaaaggctaagaagaagcattatctatttgttctttcctatacttcaaatattttctctccatatcatgaggtccaacatcaagctacaacaaactggaaacatttaatgaaattaactttacaataacataatgctgaaatttaaaacactgagactcacaaaagcccacattcaatttcaaaaagaaacacacacacacacacacacacacacacacccctaaatgtttctctgagtaaggatgctgtcatttctcataaaatgatccctcaactctccatggaaatgacagtattcaaatacttctgacattctgatgaatacatgatgagcactgaaagggaaatccaaggtgaaggaaataacttacaa

SEQ ID NO: 632006 - DNA, 546 bp, Homo sapiens
taaataatgcagggcttctcaataagaagtatagtgaggctgtattagaaaaaaatctaaaaaagaagtatgcctaaagcatgatttttagtaaactgaagctcaaggtatagctatttgtataccgatacatacatttatattactcttaaaattaatccatgttaatgaccaaatacatcttcaatgatttatctactctgagagttttccatgtaagaatgagacacatgacagggatgctgtaccratcaggcaacactgacctcttgtttccacagcttgaatgcattttctcacaaagttgaaccctgcttcattcaaatacactgaaaataagagagaaatcgcattaggtgtttacgctgaactcacattcccccttcagttggctctgttcactgggcctttatgactcaacagtagagaggttttttctgagtcttccaaatattttggttagaggctgactttttattttggggtagaagtagaggagggaacttcaccctcacagctattgtatcaacctgctaagatccttca

SEQ ID NO: 632007 - DNA, 470 bp, Homo sapiens
ttaacatccaaaaacaaaacaaaaaacaaaaaatcaaaaacacccgggaactctttcatgttcaaatgtcgatggaaagggttattactaaatcaaattgcaccattaaaaaggctgataattaatgataattctccttcagtggaggacaaggtacttctggggcaacagcaaggagaggaggataagtatcctamacaggagaaataacgattgctgatttgggctcaatgcttggcccagagcaggcagccaatacatgcttattgattgatggcttgctagttactggtttgtaccaggattgctcaagtaccttctctgatggtttctattagggttagagttgattagcttacataagctacatttgtgaacactttcccagtcccaagccctaccccagccctgtatctcctccattgtagagagaagcagagggatacccagaatacaactactaccaaatt

SEQ ID NO: 632008 - DNA, 253 bp, Homo sapiens
actttttaccaaatgtccccagtgtcatggcttgaggactagtttagtgctaatcttaattgaatggcatctgtttaataytgatgatagatattactactacaaaaataaattcattcccaaagtcttacaatttcatggatattgcagcatattttacaaccagaaaagtatttgtaaattcaataccctgtcattgaccaatattttattttcttatttgatgttttttcataaaggtgattcaagcttt

SEQ ID NO: 632009 - DNA, 253 bp, Homo sapiens
actttttaccaaatgtccccagtgtcatggcttgaggactagtttagtgctaatcttaattgaatggcatctgtttaatactgatgatagatattactactacaaaaataaattcattcccaaagtcttacaatttcayggatattgcagcatattttacaaccagaaaagtatttgtaaattcaataccctgtcattgaccaatattttattttcttatttgatgttttttcataaaggtgattcaagcttt

SEQ ID NO: 632010 - DNA, 581 bp, Homo sapiens
tacagtcacagcatagttttattcttcattcyatggcatttgttctctgtaaattcatactatggccctattttagaacattagatatttctcacactgttgcttgtaggattttcagtgaaggcacagatgttatgattgcttctaaatggctggcattcaaacaaacgtttacctaagttatatattttaccatcctaaacttcattgtcttcagcagttcaaaaacacaaatacatattatgcaaaactgagtttccaaaggacaacaagagtattttagaataagtggaagccatctgaattatggaggatataaatgagtactcttcgaagtggccggtgagttagggctggtactggtttccaataccagttacaggagaagttacatactgaaattgatgcaatgctacctttaggggagtcaaatatcaactaaaaagaaatacaagatctcaagaacaggatgatgtacaaaaaaatggttagagcgcctgacaaaaagaaagatataaactgatttaagcacttaacacaatgagctcacatgacttattcaagacctaacaggtataaga

SEQ ID NO: 632011 - DNA, 627 bp, Homo sapiens
ccacatccatatcttcaaaacacgcaacctctgcaccctaataactgcttacggtataatcagtatgatgatgagattgagggggtctaaatttaagttccttatctcctgagttatgtgaaaatatccctcagtacaaaacatttgtgtgtttcacagatgactctcttgttttgccgtaatgctaccaagtttatggaaactagtcaactgaaggatttttctgttgtgttatgtgtaaatgtctgaacagtaaaatcatctgtgtattcctgtaacattcacgaagtatgaggaagtgggtttctccttgtttgatgtgagtggttttgcttgttgcatgggttccctgtgctttgtaacttgcatgaacacaaccaggtttctcaacaatgatttgtctgctgactcttttcagagatagtgraggaaaaaaaatgtattaaaaccccaaattatctaggtttccaagtaggaaaaataaagatacatatgacttttattattattcgatgataattagctttatataatgtggcatccttcataaaaattcactatgttgtgaggcaaacagatttctcactatcatccagtgtaccctgctcaccttctcactcctagcac

SEQ ID NO: 632012 - DNA, 582 bp, Homo sapiens
gtgtaacacatgacacttaccccctacaccctaaagcggtgtgccagaccacatcaattttagcttggctgtgactgtggttcactctgggatctagactgagggaacagtcactacctagaacactgcttgtcatcatgacagagagaaagaacaacatggtaaaycccatgctgcctcttgaggattctgccccgaagtgacacattaatcctgttcaagtcatatggctacacctgaggtcacgagggcaggaatgtatgatccccctgcagagagaaacatcaagtaaaggtaaatacagcctactacagtaagagactggactgaaattttgttcaaagcatagggaaaaatgagttcacagtgcagttttaaagaggcagtaggaaaaagcataagattggtttcagcttatacctcaccgtggcagtttatattcttcaaaggtggtcacagcaatatctctcatcccacatattctagaaacttaccatttcctatcaaaaagtgaagtctagttgaaaaaaaaaatcaatattggttcattcattgtgggaaatgtaccataccaatgtaaga

SEQ ID NO: 632013 - DNA, 601 bp, Homo sapiens
tatattctgattagagacttgcttgtgtcatactgctatatgccttttcctgggactcaaatatgtatgtatcaaaaaaggcaattgcatttatattatgargcaaagagcagataaaagcactttgtaacaggtaatcggggttagtctggtctaggatggcagagaagttacacagctcaactaggttagcaccatttgtcctcttatatctctagcactctaatatcctttaccctaaatatcatctttagatcatggcaattcaatatagaccagagctatttataagaaactgacaatcagtgctccaatggtcatttggatcgaaaaacacactgctaggcaaaaatatgattattaaagaatcatatccaataatctatacattctctgccattgagagaaatgtattaaatatatgataatcaagagcaggacttttcttagtttatttgaaggcagagtgaagggctagggtgattttaaaggatggttctcttaggcctgctgtgttactttttcctcccttacagaccagataacccagggagagcatgctagatattgctgcagacaaatttgtctgtatgtcaatcct

SEQ ID NO: 632014 - DNA, 642 bp, Homo sapiens
cacattggccaggctggtctagaactcctgacctcaggtgatctgcccgcttcggcctcccaaagtgctaagaaacaggaatgagtcaccgtgcccctgccccttttacttagctttttagcaatgcaattataacctttaccttctctccaccaggcacagcaaggttatctaacaatgtgtttacttagaagttccacagaagaaaccttgaagcaaatcaggtctctggaactctcttccaccaggagattgcttcaayttacagcttacctctgcctgcgatggctccagccagaccacccagtagatacgacacccgaagcaagtcacaaagcaagtcatgtagacccccacacctcatttgtttcctcccctacatgccattcatgtcaaaccctccttttaaagccctggtcttctgcctgaaagacttggagatgctgccctcaaggcaggagccttatactacctgcccctcagctagctctgaaatatggtcactttctttctaccaggctcgctccttttaattggactctgcaagcagtgagcgactggacctgcattccattacaacatgatgcttcagcttatgattttttgactttacaatggtgcacaagatatatgcattgagta

SEQ ID NO: 632015 - DNA, 642 bp, Homo sapiens
cacattggccaggctggtctagaactcctgacctcaggtgatctgcccgcttcggcctcccaaagtgctaagaaacaggaatgagtcaccgtgcccctgccccttttacttagctttttagcaatgcaattataacctttaccttctctccaccaggcacagcaaggttatctaacaatgtgtttacttagaagttccacagaagaaaccttgaagcaaatcaggtctctggaactctcttccaccaggagattgcttcaatttacagcttacctctgcctgcgatggctccagccagaccacccagtagatacgacacccgaagcaagtcacaaagcaagtcatgtagacccccacacctcatttgtttcctcccctacatgccattcatgtcaaaccctccttttaaagccctggtcttctgcctgaaagacttggagatgctgccctcaaggcaggagccttatactacctgcccctcagctagctctgaaatatggtcactttctttctaccaggctcgctccttttaattggactctgcaagcagtgagcgactggacytgcattccattacaacatgatgcttcagcttatgattttttgactttacaatggtgcacaagatatatgcattgagta

SEQ ID NO: 632016 - DNA, 513 bp, Homo sapiens
catgtgtccatgtgttctgataatttagctcccacttataagtgagaacacgtggtattttgttttctgttcctgcattagtttgctaaagataatggcctccacctccatctatgttcctgtaaaagacataatcttgttctttatcatggctgcatagtatgttatgtgtatgtaccacattttctttatccactctatcattgatgggcatttaggttgatttcatgtgttcgctattgtgaatagtgctgcaatgaatatacgcrtgcatgtgtctttatgatagaaccatttatattgctttggctatatacccagtaacaggattgctgggtcaaatggtagttctgtttttaggtctttaaggaataaccacactgacttccacaatggttgaatgaatttacactcccaccaacagtgttccttttcctctgcaacctcaccagcactcgttattttttgactttttagtaaaagccattctgactggtgtgagatggtgtctca

SEQ ID NO: 632017 - DNA, 513 bp, Homo sapiens
catgtgtccatgtgttctgataatttagctcccacttataagtgagaacacgtggtattttgttttctgttcctgcattagtttgctaaagataatggcctccacctccatctatgttcctgtaaaagacataatcttgttctttatcatggctgcatagtatgttatgtgtatgtaccacattttctttatccactctatcattgatgggcatttaggttgatttcatgtgttcgctattgtgaatagtgctgcaatgaatatacgcgtgcrtgtgtctttatgatagaaccatttatattgctttggctatatacccagtaacaggattgctgggtcaaatggtagttctgtttttaggtctttaaggaataaccacactgacttccacaatggttgaatgaatttacactcccaccaacagtgttccttttcctctgcaacctcaccagcactcgttattttttgactttttagtaaaagccattctgactggtgtgagatggtgtctca

SEQ ID NO: 632018 - DNA, 606 bp, Homo sapiens
attgagtcaagtttgagaaggctctctgtatatcccctctaggctaattcccatagctggagctctcaggaggtgggcaagctaccattaataaaactgtcgtccaaatttcttaaaataaaatttaactctgagtttttgttcattccttcctaattcactagggatagcaatactgtgtatatagcaagtcaattctgattactgaggttgttggtatatttctcagggaggaactaaaattaggtttaggtttaaaactgagccaagccactcatgtgagaagtttaagtaaaaagtgccagaataacatacaaaagacacttcaaaagaaaaaaaaattaaaagtagcaggacatatttagttcatcatataaattgactggcaggttagagttgcaagatatcagattatttgatctatataattttaccacctagggttacacatcattcccatggcaaagtaggtacattctcatggttgctgaccactggcaacatacttggtgaccaagggcagagtagtytgggaaataacaggcccctgaaattaattgggtctcccttcttaccctcaatgaaagtgcaaaaacttccagtatt

SEQ ID NO: 632019 - DNA, 532 bp, Homo sapiens
ctgcagggggaggtgccatcacagcaggaaatgggtatcattagtcaggaaaggaccaggtggtgatcaattttgcaggcaatgtgaagatgtctaaaaattagtaagtgggggaaactaacaagttttttttgagtttgttcagacaaaaaggactaggcgaattgatttttatmcattaatttattatccaggtataatagtaacttttatagctacctaacaagagcttttgaaaaggaaaagtatggaatagggaagttattctggcatgacattctaaaagccacctaagccaaataaaatattttgggatttgagagttacacttcctcagagcatgcttatgagtgtgtgtgtgtgtgtgtgtatgtgtgtgtgtgagagagagagagagagagagagattcagatctaaatgtggtatgtacataaatgtaagagaaaattgtggaggtctgtgtgttatagggttggccttttttaaagtgatgaagtgatggatggcatattttcttaatttattcccagaa

SEQ ID NO: 632020 - DNA, 554 bp, Homo sapiens
aggtagtggcttggtgaccccaaaacaaaaatttaacctgctcaaccacttgtccagcagcctgggagacaaaacagtgtgctatttgtttgctgatactgttttcctcttctttsttacaatccacattctatcctccaggccccaatccttgctctttccccagatcagtccagagtacactgatattcactgaactaatccagtgcttatcatctacaccacgcatttatagtttcctgtatataatcagttgcatgtttcatgggattttgtatttttctcttaagtgctagttttgtttcctcaagaacttaggcttatggggacgaaaatcccatcctttctccccagaccatcaagtatctgccacagtgttatacacctgatagattctccctaggaaatgcttgatgagttgaatccccctacctcatttaaatggttgttttgatatcatggagttaccatctaagttgtatcaaggaaaagaagttctctactcatctctaataatttgttctaccatccaaatgattctctttttgtcagaa

SEQ ID NO: 632021 - DNA, 568 bp, Homo sapiens
tcttttgggaactgatggcaactttcatatgtaaaggggagaagggaactaatatttattaagctcctgctatgtgcttactacttttaaaatattatttcatccaatccttgtaattcttgacatggattttataaaccttgacatatggcaaaatttatactcaaaaaagcacacagatgataactgagtgaacccgtactcaataccaggatttctattttcaagtctggtatgtttatcactattctaggactatgtactacatagtaagtggtcagtgaaactttgcaagtgaatgaatgaactccatsgatgtctcctgaatatcaacttgaatctctttgctttttcactctctttttctcacagtaaatatttattctttttttttttacagttttctttttttttttattatactttaagttttagggtacatgtgcacattgtgcaggttagttacatacgtatacatgtgccatgctggtgcgctgcacccactaactcatcatctagcatattcaattaggaaaagaggaaatcaaattgtccctgtttgcagatg

SEQ ID NO: 632022 - DNA, 568 bp, Homo sapiens
tcttttgggaactgatggcaactttcatatgtaaaggggagaagggaactaatatttattaagctcctgctatgtgcttactacttttaaaatattatttcatccaatccttgtaattcttgacatggattttataaaccttgacatatggcaaaatttatactcaaaaaagcacacagatgataactgagtgaacccgtactcaataccaggatttctattttcaagtctggtatgtttatcactattctaggactatgtactacatagtaagtggtcagtgaaactttgcaagtgaatgaatgaactccatcgatgtctcctgaatatcaacttgaatctctttgctttttcactctctttttctcacagtaaatatttattctttttttttttasagttttctttttttttttattatactttaagttttagggtacatgtgcacattgtgcaggttagttacatacgtatacatgtgccatgctggtgcgctgcacccactaactcatcatctagcatattcaattaggaaaagaggaaatcaaattgtccctgtttgcagatg

SEQ ID NO: 632023 - DNA, 539 bp, Homo sapiens
cagactgtgaaaaaataaatttttgttgttttaagacacaaagtctgtggcttttgttatggcagctcaagctgactaattcaatggcttaatggtatcttcatctgaaagtaattagtagctgcatttcttcatatgaattcataaactttaccrtaagtctgtcagtccaagggtaccattaatagtatgtcatgttttgctccacatgccagcctttctaatagtttatccaaaattataataccttttatatttggggtgctgctttttctttttccagttaagaaatgtatgaatttacacttagaaaattggcttacttcatctgatgtttttcaaaggacaagatgtaatctctgagtcttcaattaatagaaaaaaaatgtgtgaatcataaaatccaaaaaataatgttaagagagtctttaattgcagccctgtgagttctacctcaaccagtaactaaattaatgggtgatgtaccactgtgtctactactactactactaccactgtgatcagtcagtgacctgatc

SEQ ID NO: 632024 - DNA, 603 bp, Homo sapiens
tgcttggattacagttgtgagccactggctcccaggtccaaaacatgccttttatttttattattatttattattatatttatttatttttggagacagggtcttgctctgtcgcccaggctagagtgcaatggcattatcatagctcactgcagccttgaactcctgggctcaagcaatcctgttgcttcagcctcctgagtagctgggaccacaggcacatgccaccacacccarctaattttttaattttttgtagggacaagttctctctatcttgcccaggctggttttgaactcttaggctcaagtgattttcacatcttggcctcccaaagtgctggggttacaggcatgagccatatgccctgcctgaagcatgccttttacatgggagtttgtgattttgtaatacactgaaatagtttacaggcctcttaaagctggtgctgttgtgaggtgggtctgaggggagcgaggggagagcttcagtttgtcccctggaaagagtgacacagaacccacctgaactccaggggcaaagggggcggctggggctcctccctggggaggccaagcactgtgggcttggcggggagcccg

SEQ ID NO: 632025 - DNA, 602 bp, Homo sapiens
aacatcacacaccggggcctgttagggttggaggggtgggggaggaatagcattaggagaaaaagctaatgtaaatgacgagttgatgggtgcagcaaaccaacatggcctacatatacctaygtatcaaacctgcatgttgtgcacctgtaccctagaacttaaagtataataaaacaaaagaatataaaatcattataggcctcaaattacttcaccatttttcataaacaatgtctggcattaaaattaaaatagtgatgcatactagaaaataagaaaacaccaagaaaatcaacaaaatggaaatggactctatgtattccagataattgagatataaggcacagaatttaaaatagctgtcctcatgtgcaagtagataaaaaataaagttttaagttttgtcaagaactggaaactatttttaaaagaaaagtctagaaataagaaaatgtagcaatcaaaattaagatcttactgtataggtttaaccacaaattagacatagctgaagagaaaaatggtaaaatagaagcctgaccagaagaaaatgtccaggagtgaagtcaaaaagacaaatgaagaataatacaaaaaag

SEQ ID NO: 632026 - DNA, 602 bp, Homo sapiens
aacatcacacaccggggcctgttagggttggaggggtgggggaggaatagcattaggagaaaaagctaatgtaaatgacgagttgatgggtgcagcaaaccaacatggcctacatatacctatgtatcaaacctgcatgttgtgcacmtgtaccctagaacttaaagtataataaaacaaaagaatataaaatcattataggcctcaaattacttcaccatttttcataaacaatgtctggcattaaaattaaaatagtgatgcatactagaaaataagaaaacaccaagaaaatcaacaaaatggaaatggactctatgtattccagataattgagatataaggcacagaatttaaaatagctgtcctcatgtgcaagtagataaaaaataaagttttaagttttgtcaagaactggaaactatttttaaaagaaaagtctagaaataagaaaatgtagcaatcaaaattaagatcttactgtataggtttaaccacaaattagacatagctgaagagaaaaatggtaaaatagaagcctgaccagaagaaaatgtccaggagtgaagtcaaaaagacaaatgaagaataatacaaaaaag

SEQ ID NO: 632027 - DNA, 565 bp, Homo sapiens
gtatggtgaatgcagagataaatgaagcactgcccttgccaccaaggcaattactgcccactagagggagaaaggcctctaacaagtaagagcagtagaaggcgatcagcatagtggaggcacaaagcagacatgacaaatcgatttttttcttcttttggagagggtcccagcaaaggctatatgctgtagtagcaaaacgtcaatgtgtgtatgtgctgtgtcgggaggggcagggttctgggcctttccagtcacagtgaagagcttacactaaagcaaagaggggtgataaacagatgcttctccagcatactccagcccmatgctgccccacgcaaataccatgtgagcttcaaatgtgagccccgtatgtaaagttaaattttccaacagtacatttaaaaagtaaaaagaaatgggtaaaattcattttaataatatatttgattccaccccatataccccaactactatttcagtatgtaaccattaaaaaaaaagattttacctttttctgtactaactcttcaacatcagtattttacactcaacagcacagctc

SEQ ID NO: 632028 - DNA, 565 bp, Homo sapiens
gtatggtgaatgcagagataaatgaagcactgcccttgccaccaaggcaattactgcccactagagggagaaaggcctctaacaagtaagagcagtagaaggcgatcagcatagtggaggcacaaagcagacatgacaaatcgatttttttcttcttttggagagggtcccagcaaaggctatatgctgtagtagcaaaacgtcaatgtgtgtatgtgctgtgtcgggaggggcagggttctgggcctttccagtcacagtgaagagcttacactaaagcaaagaggggtgataaacagatgcttctccagcatactccagccccatgctgccccacgcaaatacmatgtgagcttcaaatgtgagccccgtatgtaaagttaaattttccaacagtacatttaaaaagtaaaaagaaatgggtaaaattcattttaataatatatttgattccaccccatataccccaactactatttcagtatgtaaccattaaaaaaaaagattttacctttttctgtactaactcttcaacatcagtattttacactcaacagcacagctc

SEQ ID NO: 632029 - DNA, 546 bp, Homo sapiens
gtttttgtcactaaatttgtggtaaccttctacagtcacaacagacaactacagtagtcccccccttatactcaggggatacattccaagacccccagtggatgcctgaaaccagaggtactaccaaaccctgtatacacatttttcctattcatacatacttatgataaagtttaatgtataaattagggacaataagatcaacaataactaataaaagagaacaattataacaatatactgtaataccagttatgtgaaggtgcatgctcacactctttctcaaaatatctcactgtactgtacatatgctgctcaacctacaatggcttatgtcccaataaacccatcacacattaaaatactgyatatcgaaaatacacgtaatacacctcatctaccaaacatcatggcttagcctggcctacccgaaacgtgctcagaacacttacattagcctacagttgagcaaagtcctctaacacaaagcccacttcattatgaagtgtcaaatgtctcgtgtaatttactgaatgctgtgctgta

SEQ ID NO: 632030 - DNA, 546 bp, Homo sapiens
gtttttgtcactaaatttgtggtaaccttctacagtcacaacagacaactacagtagtcccccccttatactcaggggatacattccaagacccccagtggatgcctgaaaccagaggtactaccaaaccctgtatacacatttttcctattcatacatacttatgataaagtttaatgtataaattagggacaataagatcaacaataactaataaaagagaacaattataacaatatactgtaataccagttatgtgaaggtgcatgctcacactctttctcaaaatatctcactgtactgtacatatgctgctcaacctacaatggcttatgtcccaataaacccatcacacattaaaatactgtatatcraaaatacacgtaatacacctcatctaccaaacatcatggcttagcctggcctacccgaaacgtgctcagaacacttacattagcctacagttgagcaaagtcctctaacacaaagcccacttcattatgaagtgtcaaatgtctcgtgtaatttactgaatgctgtgctgta

SEQ ID NO: 632031 - DNA, 565 bp, Homo sapiens
gtatggtgaatgcagagataaatgaagcactgcccttgccaccaaggcaattactgcccactagagggagaaaggcctctaacaagtaagagcagtagaaggcgatcagcatagtggaggcacaaagcagacatgacaaatcgatttttttcttcttttggagagggtcccagcaaaggctatatgctgtagtagcaaaacgtcaatgtgtgtatgtgctgtgtcgggaggggcagggttctgggcctttccagtcacagtgaagagcttacactaaagcaaagaggggtgataaacagatgcttctccagcatactccagccccatgctgccccacgcaaataccatgtgagcttcaaatgtgagccccgtatgtaaagttaaattttccaacagtacatttaaaaagtaaaaagaaatgggtaaaattcattttaataatatatttgattccaccccatatacccmaactactatttcagtatgtaaccattaaaaaaaaagattttacctttttctgtactaactcttcaacatcagtattttacactcaacagcacagctc

SEQ ID NO: 632032 - DNA, 631 bp, Homo sapiens
gttaactccaaattgtttcccaaaataaggcaactggcattgttagaaatctagatcagttgtgtctgagcaaatgagaagagtgaaattaggctgcttttgacaccatgttccttttacctgttctaatgtgcagaaaggaagtctcatcaaaaaatggaaaagaagaaaggaatatgcaggtccccaggtgtcacagttctgtgcaagcacacttgaaaatcacctatataaaaagaaacttcaaattttatcataatgcctgagagtctatttgaaaatgtgaaaattagcactatttttacattaaaaagctccaaatatccacagatgttctgatttatccaaataaaattaatgttttgcctggtgatagccgaacactacaggagtaaattctgctccatttctccatggcacagagccacctccacagcatacacttctctaggcagacgaggcggagagcagctcccaacttacctcccagaggctttcccaccataacacaagaagacactctcctggggtctttcygacctatcccatagaaattaggtgtgcttacaatggatcttgcaaaaatcaaataaaaatatgaacaggacagcacagtatttagcttcatgag

SEQ ID NO: 632033 - DNA, 578 bp, Homo sapiens
ggggttaaaacacactaaaaaaaaatcataaagttcaagacttgttatctctacaatatttgaggagagtgcatcaacaattatgatagctattgcagaatctgctttgaacactaaccaaatttttctaagttgactaccaaaaatgaaattttgatcgactctttaaaataaagtgacccataaaaatggtgcttatctgaggtgattgataggttaattagcttgactgtggtgatcatttaataatgtatgcatatattaaaacaaaaaataaaggtgtaaggaacccctatgaacttgtccactgctctaaacactaaataaagctgaataaaaaaatacaaatgccatccacagagttctacgttaaatmctaagttgttaccagcaacgcagttaaaagctgaactgattttgcttaagttaacatactttttacaacatactaataaactaaaataaagggtcaaaagatctcaaagaattctctatatcacaatcataactataagataaaaagtatattttctactctatacttttaaaaaatacatcaccaacagttttcaaaccat

SEQ ID NO: 632034 - DNA, 576 bp, Homo sapiens
cttgtccaaccatgagattttatcattttcagatggatgcattttccttcttttcaacaggtttaagtaaaatttattaaggtcagtctcccgggtgaatactgagggccccttgaatcagctcagtgggatttcaactctgtctgcacctcagatactccccggtttgactctcaacacacccttgatatctctcagtgagcctgactgcatggcatgaggcctgactgccaaggtatctcgttyactaggagtctgaaagagtcagtgcctcttcaacatggccaattcattcctgaggaggactttacttgctaggagcaaatgattaactattcataacatttgttgagcatcaaaaaattggggatgagcaagtagcccggaatttgatacatttcacttctttgactttgccatctgaagccagagacaggaagtcatctgagctgacaggcattttgggtgagtggtgtgccagtacctccttccaggccagcactgtgcagagaatcccagcagcctccaagacatctaacaaacagatagaactgaaaacccagtcattgcaagctt

SEQ ID NO: 632035 - DNA, 576 bp, Homo sapiens
cttgtccaaccatgagattttatcattttcagatggatgcattttccttcttttcaacaggtttaagtaaaatttattaaggtcagtctcccgggtgaatactgagggccccttgaatcagctcagtgggatttcaactctgtctgcacctcagatactccccggtttgactctcaacacacccttgatatctctcagtgagcctgactgcatggcatgaggcctgactgccaaggtatctcgtttactaggagtctgaaagagtcagtgcctcttcaacatggccaattcattcctgaggaggactttacttgctaggagcaaatgattaactattcataacatttgttgagcatcaaaaaattgggratgagcaagtagcccggaatttgatacatttcacttctttgactttgccatctgaagccagagacaggaagtcatctgagctgacaggcattttgggtgagtggtgtgccagtacctccttccaggccagcactgtgcagagaatcccagcagcctccaagacatctaacaaacagatagaactgaaaacccagtcattgcaagctt

SEQ ID NO: 632036 - DNA, 576 bp, Homo sapiens
cttgtccaaccatgagattttatcattttcagatggatgcattttccttcttttcaacaggtttaagtaaaatttattaaggtcagtctcccgggtgaatactgagggccccttgaatcagctcagtgggatttcaactctgtctgcacctcagatactccccggtttgactctcaacacacccttgatatctctcagtgagcctgactgcatggcatgaggcctgactgccaaggtatctcgtttactaggagtctgaaagagtcagtgcctcttcaacatggccaattcattcctgaggaggactttacttgctaggagcaaatgattaactattcataacatttgttgagcatcaaaaaattggggatgagcaagtagcccggaatttgatacatttcacttctttgactttgccatctgaagccagagacaggaagtcatctgagctgacrggcattttgggtgagtggtgtgccagtacctccttccaggccagcactgtgcagagaatcccagcagcctccaagacatctaacaaacagatagaactgaaaacccagtcattgcaagctt

SEQ ID NO: 632037 - DNA, 541 bp, Homo sapiens
gcatcatgccagctcccatctccctaggctctaggccagcccatgtggacacaggcaccagggctgcccaccccctgaccttggcaccaggccagcccatctgcacaccctaccagccagcctgcatagactctctggacaggctaactgatgcagagctttcactgttgaggcctatttgtaaagaccaaaagacgtgtgtacttcttcaagtgcatagacaccaatgcatggccacaagaatcataaataatcatggaaacatgccatcaycaaaaggacaaaataaagcaccagaaactgaccctaaacatattgagatctattaactgcctgacaagttaaaattatcatcttaaaggagctcagtgagttacaagagaaaaagatagacaactaaacaaaatcagaacagcagtacatgaacaaaatgagaagttcagcaaagatatacagatgattaaaagaacaaaacagaaagtctgcagctgaagaacacaatgactaaactgaaaaatttgatagagatctttaacagcag

SEQ ID NO: 632038 - DNA, 576 bp, Homo sapiens
agcatcatgccagctcccatctccctaggctctaggccagcccatgtggacacaggcaccagggctgcccaccccctgaccttggcaccaggccagcccatctgcacaccctaccagccagcctgcatagactctctggacaggctaactgatgcagagctttcactgttgaggcctatttgtaaagaccaaaagacgtgtgtacttcttcaagtgcatagacaccaatgcatggccacaagaatcataaataatcatggaaacatgccatcatcaaaaggacaaaataaagcaccagaaactgaccctaaacatattgagatctattaactgcctgacaagttaaaattatcatcttaaaggagctcagtgagttacaagagaaaaagatagacaactaaacaaaatcagaacagcagtacawgaacaaaatgagaagttcagcaaagatatacagatgattaaaagaacaaaacagaaagtctgcagctgaagaacacaatgactaaactgaaaaatttgatagagatctttaacagcagtctcaatcaagaagaagaaagaatgaacaagctt

SEQ ID NO: 632039 - DNA, 495 bp, Homo sapiens
gctcttcatgtgtaggaactcattgaatcctggtaacaaacccagaatgtaggtattcttcttcttctcattttacagaygtaaaacaggcacagagaggtggagtgagctgcaaagatcacacagtggaaaatggaacttgaacctagcagtctagattcaaagcctgtattttactttactgcctcaatatttatggaaagcatgcctgtttaaatgttcactgaagtcaataactcagagaattgctcataaacaaattcataattatagagcacctctactgtaaagtttaacatgtttaactatggagaagtagaggggtataagtactttgatactatccgtactgaaaacaaaaaaaaatctttgccaagtccataagagagaacttgtccaaaggtgaatactattagtgattcaaataggttgaaataatattcaaagcctttgtacttcttagactcatgaaaatttggttgcttgatatgctgg

SEQ ID NO: 632040 - DNA, 495 bp, Homo sapiens
gctcttcatgtgtaggaactcattgaatcctggtaacaaacccagaatgtaggtattcttcttcttctcattttacagacgtaaaacaggcacagagaggtggagtgagctgcaaagatcacacagtggaaaatggaacttgaacctagcagtctagattcaaagcctgtattttactttactgcctcaatatttatggaaagcatgcctgtttaaatgttcactgaagtcaataactcagagaattgctcataaacaaattcataattatagagcacctctactgtaaagtttaayatgtttaactatggagaagtagaggggtataagtactttgatactatccgtactgaaaacaaaaaaaaatctttgccaagtccataagagagaacttgtccaaaggtgaatactattagtgattcaaataggttgaaataatattcaaagcctttgtacttcttagactcatgaaaatttggttgcttgatatgctgg

SEQ ID NO: 632041 - DNA, 607 bp, Homo sapiens
gcaccttcatgttctcagcattggagacactgtcagaggcccctgctaggaaatgcttccaatatgtaatcaaactagaaacacccaccatcaccaacaagagacccrgtgttccaattttatgagaaagcatggctttcttttgcatttactaagaagcggttacctgtgtatagcaactttgggagatgtttttggaaataatcccgtgattggattcagatggcagattttgtgcagcccagacttctatgtcaatagcactctgcacagggtttccaccaccccctcccacacgactgtttgtcgcacctcggggtgtatttaatagaaccagtgtctgaggagttatgccctgaggctgggaggccttcatggcaacttgcacatttttacaaaacaactctggtggattgagggtgccctggagagcaaggacaaggagctcaggctgtgttcagctggactccagcattccctgtggttgctctaaatagttcctgttccttcaaatagttcctgttctggcaggtattgtccagagagcaagacttgcaggttggaagaggagagagacttcatcccagtttcatgagcattcatctcc

SEQ ID NO: 632042 - DNA, 521 bp, Homo sapiens
caaaagatccctggaggccgaggatgcttaggtgggaggtctctgtcaaggagcatctaaggagtaggaagaacccagtagggctgatctctcagactagcagaggagagaaggggtcctagtaggtatgtctcagaaaggaatggatggaagctttgaggggtagcatttcttgtttccttgaaaccaaacacccctttctttccatctacaaaataaacatccccagcttggccaacatggcaaaaccccatctctgctaaaaatacaaaagttaaccagacttggtgctgcccgcctgtaatcccagcttcttgggaggctgaggcaggagaatcgcttgaacccaggaggtggaggttgcagtgagccaagattgcaccactgcactccaccctgggtgacagagtgagactttgtctcaaacaaacaaacaaaaaaaaccagaataaacattcaygggtaggtcaaggacatccatccatctatcccactaaatattcatcctttacactacagat

SEQ ID NO: 632043 - DNA, 596 bp, Homo sapiens
aaggccgccccccatcccccaccccctgcctgcctcgccactcaacaccctggcgttccgaacaccctccatggccaaagtgaccactccctgtctgctgaagtgttttcatccccatgctcacatggacacccagccaccagcgtggtctcaggcacatgccagggctcaccacactgacctcatygcgtctgggggctgcctgggctgtcggcaccacccgtgggggtggagaggaaatggacactgcccatgggtctccaaaagtggccgtgagcatctgcctccccgggtgccaaacccacgttccctggagccagctctgtgcctgcagctgggcgtggctgacaagagggaacggatcctttactaacatagagggaaagccagtgttgggcatcttcatactccagagagagggacattcaatattacgtagcccctgggatgccaggtgaaccatactcccagggatcccaagtccagcaggaattcccttcagggtaggtgggaatgaaaaggagtaacagtccccacaattagccttggtgcacaacagaggcgacctcatgcacgcgctgtaaggtgcaaccaca

SEQ ID NO: 632044 - DNA, 558 bp, Homo sapiens
cctccagctgttcacatttctgctcctacaatggcaaagagacagaaacctgttactgcctggcagccgggagcctggtcgtggccacccgcccgccggggtgtgggggtccgtattcacggtggatgaatcacctccagcctgctgttttaatctttgcttccactgcaccgtggggtccagctttcctggagctgacacgttggtcccagagacttcagcttgctgctgtctggaatttctgacatttgaaagcctcaaataagatgtctcattaagcagccttgagccctatttagctattcacttggatccattttctgaaattatagcataataatggggttttaactgcttgtcagttccacgaagaacaaaggagtttatctgatttgagcctggctgcaaaaagccrgagaaagatggtcccaactttaatgaaatgccagagatggaactggaacccctcccaggggctgggcctgagattttacatggagttgacaagtcacccagctgagtcactcccagctaggtggggacgaaggggatgcactg

SEQ ID NO: 632045 - DNA, 451 bp, Homo sapiens
cagaggacactcaggcttaggagggccaaggaccagtccgcatcctctgaggtggggcggggctcctgcagagctttccccactgctgggcaaggctgtcctgctttctggaggggcggagcgggggggatggtggctttgatctctcttacccccggacctagcaggggtctggcacactgcagatcttcaagtcttcttcccctaaggagaataaggcaggtccccaggggacgaccatactcaggttaagccccaggggccatgctggcmaccacatccagtggaaataaagtgtccctctgcctctcacatcctatgagttcttcacggtgtgcatcagatagcacctcctgcaggaagtcctgctggattctcccctactgtccccttcccacccaaatatgcaggccttcctgtctatccaaagaacctgcctgaaccccaacta

SEQ ID NO: 632046 - DNA, 571 bp, Homo sapiens
gcactccagcctgggcaacagagcgagactccatctcaaaaaaacacaacgcaacacaacacaacacaacacaacacaacacaacacaacacaacacaacacaacacaacactacacaacaacactaaggtaggtgccaggtgcggggcctttcccttccctgagtgcagctcctgcaggcagccagaagagggcagcagccaccaacaagcaaaagcaggagaaagaatttctgctgccgaggttggaaccaggtccgggtagtggctacagccactgtgagaagggagtttgagggaatatttaggacgtgctcattcagtgtctgagtcctggctacagaagtgggattttgtttttgtttttggagacaaattctctgttgcccaggttggggtacagtgacataatcacggctcactgcagccttgatctctcaggctcaagccatcctcccacctcagcctcccaagtagctgggactacaggtgcatgccacaacacctgactaatttttagcttttttwtaaaaaaaatttattttttgtagagacagggtcttgccatgttg

SEQ ID NO: 632047 - DNA, 571 bp, Homo sapiens
gcactccagcctgggcaacagagcgagactccatctcaaaaaaacacaacgcaacacaacacaacacaacacaacacaacacaacacaacacaacacaacacaacacaacactacacaacaacactaaggtaggtgccaggtgcggggcctttcccttccctgagtgcagctcctgcaggcagccagaagagggcagcagccaccaacaagcaaaagcaggagaaagaatttctgctgccgaggttggaaccaggtccgggtagtggctacagccactgtgagaagggagtttgagggaatatttaggacgtgctcattcagtgtctgagtcctggctacagaagtgggattttgtttttgtttttggagacaaattctctgttgcccaggttggggtacagtgacataatcacggctcactgcagccttgatctctcaggctcaagccatcctcccacctcagcctcccaagtagctgggactacaggtgcatgccacaacacctgactaatttttagctttttttwaaaaaaaatttattttttgtagagacagggtcttgccatgttg

SEQ ID NO: 632048 - DNA, 461 bp, Homo sapiens
catagtgaaaccctgtctctaccaaaaaatacaaaaattagccagatgtggggaggtggaggttgcaacaagccgagatggcagcactgcagtccagcctggacaacagagcgagaccctgtctcaaaaacaaaaacaaaaagtctggagtctaattctcctgattttgaacctgggtgagtttgtgactcacaggccaccaagtgggcaatttagctgtcctcaggctgtcatgttgggaggaagcccataccggagcgtcaggcagaaccacccagtggggcccttcctgaattcctgacccacagaagccctgagacacaagagacttactggggttttaagccactcagttttggggtgatttgtcatgcagaaacagatcattggaacatcagtccatttctcrggtgaggaaaatgaggctcagagtgtacctttggagtacatttgtccaagat

SEQ ID NO: 632049 - DNA, 503 bp, Homo sapiens
tcccagagaccctggaggccagtttctaaatggccaacatgctccaaagaaactgataattcatagctttggccttggttagtcaggcctaatagtcatcaaaatccaacagcctgcagggttggctgaggttctaggcaaagccgtggagaactgacagcccttccccactcctctcctccacaccattcaatctgtcctggcawtggggtggtccagtgtgcaagtggataggagtcagagaacagcagtactcgatagggagaggcccactgtgctggtcttggattttagacctttggcctgtgggcgctggggagccatagaaggttgtggagctaggttgaggatgtggtgagatccgttccagaaggatcactgccagtggccagctgtgggagggtaaatgactggtggatgagggctggtggcagtggtcataaacatgggccataactgcatgtggaagggaggaggtggttacaggagaatcagcaaggtca

SEQ ID NO: 632050 - DNA, 503 bp, Homo sapiens
tcccagagaccctggaggccagtttctaaatggccaacatgctccaaagaaactgataattcatagctttggccttggttagtcaggcctaatagtcatcaaaatccaacagcctgcagggttggctgaggttctaggcaaagccgtggagaactgacagcccttccccactcctctcctccacaccattcaatctgtcctggcattggggtggtccagtgtgcaagtggataggagtcagagaacagcagtactcgatagggagaggcccactgtgctggtcttggattttagacctttggcctgtgggcgctggggagccatagaaggttgtggagctaggttgaggatgtggtgagatccgttcyagaaggatcactgccagtggccagctgtgggagggtaaatgactggtggatgagggctggtggcagtggtcataaacatgggccataactgcatgtggaagggaggaggtggttacaggagaatcagcaaggtca

SEQ ID NO: 632051 - DNA, 503 bp, Homo sapiens
tcccagagaccctggaggccagtttctaaatggccaacatgctccaaagaaactgataattcatagctttggccttggttagtcaggcctaatagtcatcaaaatccaacagcctgcagggttggctgaggttctaggcaaagccgtggagaactgacagcccttccccactcctctcctccacaccattcaatctgtcctggcattggggtggtccagtgtgcaagtggataggagtcagagaacagcagtactcgatagggagaggcccactgtgctggtcttggattttagacctttggcctgtgggcgctggggagccatagaaggttgtggagctaggttgaggatgtggtgagatccgttccagaaggatcactgccagtggccagctgtgggagggtaratgactggtggatgagggctggtggcagtggtcataaacatgggccataactgcatgtggaagggaggaggtggttacaggagaatcagcaaggtca

SEQ ID NO: 632052 - DNA, 224 bp, Homo sapiens
tgctggtcttggattttagacctttggcctgtgggcgctggggagccatagaaggttgtggagctaggttgaggatgtggtgagatccgttccagaaggatcactgccagtggccagctgtgggagggtaaatgactggtggatgarggctggtggcagtggtcataaacatgggccataactgcatgtggaagggaggaggtggttacaggagaatcagcaag

SEQ ID NO: 632053 - DNA, 621 bp, Homo sapiens
tttggttttgatttgcattctttgatgattagttataatgaccattgtttcatatgtttattggctgtttgtatgtcttcccttgacaagtgcctgtttttgttcttttgcccggcttttaaatggggtaattttttttcttgttaawttgtttaagttccttgtagattctggatattagtcactttgttggaaggcgtaatttgcaaataatttcacccactctgtagattatctgtttcctacgttgataggttgccttttttttttttcctgtgcagaagtgctttagtttaattaggtctctttatcaatttttgattttgttgcatttacttttgaggacttagtcataaattatttgcctaggcaaatgtccagaagagtatttcctaggttttcttctagaatttttataatttgaggtcttacatttaagtctttagtccatcttgagtaattttttttgtataaagaggtcaagtttcattcttttgcatatggttagccagttttcccagtactgtttattgaatagagtgtcctttcccatttctttatttttgcccatgttgtcaaatatcgtttggttgtagatgtgtggttttatttcaagagtct

SEQ ID NO: 632054 - DNA, 621 bp, Homo sapiens
tttggttttgatttgcattctttgatgattagttataatgaccattgtttcatatgtttattggctgtttgtatgtcttcccttgacaagtgcctgtttttgttcttttgcccggcttttaaatggggtaattttttttcttgttaaattgtttaagttccttgtagattctggatattagtcactttgttggaaggcgtaatttgcaaatawtttcacccactctgtagattatctgtttcctacgttgataggttgccttttttttttttcctgtgcagaagtgctttagtttaattaggtctctttatcaatttttgattttgttgcatttacttttgaggacttagtcataaattatttgcctaggcaaatgtccagaagagtatttcctaggttttcttctagaatttttataatttgaggtcttacatttaagtctttagtccatcttgagtaattttttttgtataaagaggtcaagtttcattcttttgcatatggttagccagttttcccagtactgtttattgaatagagtgtcctttcccatttctttatttttgcccatgttgtcaaatatcgtttggttgtagatgtgtggttttatttcaagagtct

SEQ ID NO: 632055 - DNA, 552 bp, Homo sapiens
gggtgagtgaaggaactcccagccaccacattcctgatgcagacccctgagattacagctatcgaagtttccatgacacccatagaaagttggactggaaaggggagctgcctggagaacaagcagaggcacagcttgaacctgcatggagcccagaagacatctctatattgtgcacctgcagcaaaatgtaaccatagctacccatctcccaaggctctcggacttacactgaatggctgcatctccttctgtctgccaggccaggaggcagcaggatctgggagcactctcacayccaagacagatcccaccaccattactatgggactgaagtacttttgatccatgagcccccttgcctaccagcacctcccaagaccacttgcctggccactcccacagtagggtgcccacagcccagcctccactccctagcacagagaagagtgtggtgcaggttcatgtgctggcatgggaactgggtaccctgccctttgcaaggctggaccaggaaaggtgtggcttgatagcctcagcttttcccctggg

SEQ ID NO: 632056 - DNA, 613 bp, Homo sapiens
ggcattgtcttctgcaggcagccctgatcttgtgcccaggctgaggctggtgcctgtgcatctgtttacctctatctttgcttttatcacatgatattgttatctgtctgtgtacttgcctctgccaygtgcctgggaactcctagggaaaggccgtatgtgctttattccagcctttagcacagtgcctggcactcagtggtgccaaatcaatgtctactggatgaatgtatgaattctgcctcaacaaatactcacagaagagcagatagttgagttttgaagggtgaacattgccccaggacaaaggtggggtcaagggcatccctgttgtcttaggtcaggttccctagagcctgggaaagtgaggatagcaccagggcaagagatctcagcagggctgtggtccaaggtgcagaccagctttagcctgggctactgggagccctggcacttgactcccagtgtcagccagtcattggccaaggactacccttgaattagggggtcagaatcttctgggcaaagtggttcccatggggccaaggccagctgtgagttatcattagcccatagacgcagggcctggggttaggggccctgggtggagcat

SEQ ID NO: 632057 - DNA, 520 bp, Homo sapiens
gagggcctatttaactgggcacatgtgtctgaggcttcatctgataatgttctatatcacacttctgacaccaaatatgggagaggacttctcatatcaackaagtctccaactctctctacacaaacttggtgtcccacaattcagttcatttctgacactaactacaaatagttagcacagactctgctagggctcagtctcacaagagctgcatcagtttagacaccaatcatgtgtctaagccacctatacttttgaccaataggctataagtcagggggctcactcaacctcttcctaaggtttgataatttgctatgatagcccatacaactcaggaaaacaattcacaaattattactgggttatcgtaaaggatacaactcagaaacagctaaatgagatagatgtataggctaaggtatgtctgcaggagcttccatacccagtctgggcacaccaccctccaagcacttcatcaatgggctcaccaactagaagctctctgaattccacc

SEQ ID NO: 632058 - DNA, 552 bp, Homo sapiens
gtatgtctgcaggagcttccatacccagtctgggcacaccaccctccaagcacttcatcaatgggctcaccaactagaagctctctgaattccaccacttgtgtgtttttatggatattctattatgtaggcatgattgattaaaccattcaccattggtgattgagctcaatctccagcccctctcctctccctggaggtctgggggtgagggctaaaagtaccaaccctcttatcacatggttaatttctctggcaaccaatccccatcctgagtctatctaggtgcccatcaagagtcaccacattagcataaactcaggtatagtttaaaggggctttttatgaataacacacgtcacttctctcactatctcacaggaaatttctagggctttagaagcccttaggctaggaactgaggatgaaaatcaaatataaatttcttatrtcacagctgtggctattagctgggttgcttggttttcttccttatggtgtctactggagctagaaagtctaagatgacttcttcacttaacttgcctgact

SEQ ID NO: 632059 - DNA, 606 bp, Homo sapiens
cccctcactctgcatgctttccttgagaaatctcaaacatgctcatgtttccagagccatctatatgccagttatagatttttatttcaaacttactcctttcttctaaagcaagtcctgtatgtgcaattgctacaactcaacttcctacacaacctcttttcttggatgttccagagatacctactaccatacacatctgtaaatgaacttatattcttccccccaccctcaccccaaatctgttccttctctaaaatttcccatctwagtaaatggcaacactacccatgcaattgcttaagccaggagcaagaggattttcctattttttcattttttcttataaacctcattccatcaatcactaaatcttcgctggttttacctcctaaatatatctaaaatacacccacttctttccatgcacaccaccagcatctcgctcaagctaacttcatttttcatttcagatacattagtagcgtccaattgctctccttccaaccactcatgccccatctaaacagttatctaaatagcaagttttgaaattgtccatctcatcatttttctccctatcttgaaacttttgagtggctcatt

SEQ ID NO: 632060 - DNA, 606 bp, Homo sapiens
cccctcactctgcatgctttccttgagaaatctcaaacatgctcatgtttccagagccatctatatgccagttatagatttttatttcaaacttactcctttcttctaaagcaagtcctgtatgtgcaattgctacaactcaacttcctacacaacctcttttcttggatgttccagagatacctactaccatacacatctgtaaatgaacttatattcttccccccaccctcaccccaaatctgttccttctctaaaatttcccatctaagtaaatggcaacactacccatgcaattgcttaagccaggagcaagaggattttcctattttttcattttttcttataaacctcattccatcaatcactaaatcttcgctggttttacctcctaaatatatctaaaatacacccacttctttccatgcacaccaccagcatctcgctcaagctaacttcatttttcatttcagatacattagtagcrtccaattgctctccttccaaccactcatgccccatctaaacagttatctaaatagcaagttttgaaattgtccatctcatcatttttctccctatcttgaaacttttgagtggctcatt

SEQ ID NO: 632061 - DNA, 538 bp, Homo sapiens
ctccttaaatctcaaagatctgaactatgacacatgaccaaccttatctgtgagggaggattaggaatttcttagcaaaggagataaataaatggatactgggtggaccactagcggtctctacctcgactgtagaggtagagattatacctcaaatgcagcccaaaattttatataaagagtagttctaccatagctggaaaaccacaagtgatatttattttttgttttattttgaaaacattttattattttgctttcttcccacttttacattttcctacattgaacawctgttatacttgtaatcagatgaaatgttatatatgagtagccagaactattatactagagatataaactaattcagagggattagttctaccagatatcaagtaatgttttaggccgggtgcagcggctcatgcctttaatcccagcactctgggaggccgaggcatgtggatcacttgaggtcaggagtttgagaccagcctggccaacatgggaaaaccccgtctctactaaaagtacaaaa

SEQ ID NO: 632062 - DNA, 573 bp, Homo sapiens
cctttaaagaactttcttaataactctacctagcagattctccttaaatctcaaagatctgaactatgacacatgaccaaccttatctgtgagggaggattaggaatttcttagcaaaggagataaataaatggatactgggtggaccactagcggtctctacctcgactgtagaggtagagattatacctcaaatgcagcccaaaattttatataaagagtagttctaccatagctggaaaaccacaagtgatatttattttttgttttattttgaaaacattttattattttgctttcttcccacttttacattttcctacattgaacaactgttatacttgtaatcagatgaaatgttatatatgagtagccagaactattatactagagatataaactaattcagagggattagtyctaccagatatcaagtaatgttttaggccgggtgcagcggctcatgcctttaatcccagcactctgggaggccgaggcatgtggatcacttgaggtcaggagtttgagaccagcctggccaacatgggaaaaccccgtctctactaaaagtac

SEQ ID NO: 632063 - DNA, 538 bp, Homo sapiens
ctccttaaatctcaaagatctgaactatgacacatgaccaaccttatctgtgagggaggattaggaatttcttagcaaaggagataaataaatggatactgggtggaccactagcggtctctacctcgactgtagaggtagagattatacctcaaatgcagcccaaaattttatataaagagtagttctaccatagctggaaaaccacaagtgatatttattttttgttttattttgaaaacattttattattttgctttcttcccacttttacattttcctacattgaacaactgttatacttgtaatcagatgaaatgttatatatgagtagccagaactattatactagagatataaactaattcagagggattagttctaccagatatcaartaatgttttaggccgggtgcagcggctcatgcctttaatcccagcactctgggaggccgaggcatgtggatcacttgaggtcaggagtttgagaccagcctggccaacatgggaaaaccccgtctctactaaaagtacaaaa

SEQ ID NO: 632064 - DNA, 612 bp, Homo sapiens
atcagatgaaatgttatatatgagtagccagaactattatactagagatataaactaattcagagggattagttctaccagatatcaagtaatgttttaggccgggtgcagcggctcatgcctttaatcccagcactctgggaggccgaggcatgtggatcacttgaggtcaggagtttgagaccagcctggccaacatgggaaaaccccgtctctactaaaagtacaaaaattagtggagcatggtggtgtgcacctgtagtcccagctactcgggaggctgaggcaggagaactgctctaacccagaaggtggaggttgcagtgagccgagattgtgccactgcactccagcctgggtgacagagcgagactccattcaaaaaacaaacaaacaaaaataatgtgttaaagttttcataaacaaaatgaacaatagtagaaaatgatcactagtaccaataaaagtttcccaaaacaaatatatatgtatgtatgtgtrtatatacatgtttgtatacacacacatacacatgcacacatatataaatgtactataaggcaaaattttaaaaatagtttattcaagattgataagtatctaaagtataac

SEQ ID NO: 632065 - DNA, 592 bp, Homo sapiens
ggctgagtatttatgactaatttttgtattgctaatactttatcacatatagggaatcatgagattgttacatattgttgtgactgtctttttctgttcccgtcattttgaacacttgcattattctttagcccatttgtccaaaaaaaaaagtctttttctttacaattttgaatttctgctaaaaatatttagtggaatgaaatttattccattaaaaaaacgaaccttttgattattattgtctccttgctactttcctttattataagagtctatgaactctacatgtatgtgtatatatatacatatgtatgcattaaccaaattagcatactctcagagctcatttctgtttagtgaggtattcgtattttaaaagaataaagaaaaatgggtccctcttttgatcaccattccatgttatttatcaagagatstaattgataaaggttttattttgttttgttttgagacagagtctctctctcttcctcccaagttggaatgcagtggtgtgtgatctcggctcattgcagcctctgcctgagctcaagagatcctcctgccacagccttccaaatagctggga

SEQ ID NO: 632066 - DNA, 558 bp, Homo sapiens
gcagcactattcataatagccaagatgtggaatcaacctaaatgcctatcaatgacagattggacaaaggaaatgtggcacatatacaccatggaatactacgtggtcataaaaaataataagatcatgtcctttgcaggaacatgtatggaactggaggccactatccttagcaaactaatgcaggaacaggaaactaaatactgcatgttcccacttataagtgggagctaaataatgagaacacatggacagaaagaggggaacaacagacactgggatctacctgagggtagagggttggagaaaggagaggattaggaaaaaaaaaaatagaacaactttcgggcactatggttagtacgmgggtgatgaaataatctatacaccaaactcgcaagtcacaagtttacctacacaacaaacctgaattatgtacccccgaacctaaaatcaaagttaaaatattcttcaggatcactgaataaaaagctcataaagattcaaaaaagtcatacactcaaagttataaaaaccttgtagttaccaaccctcacc

SEQ ID NO: 632067 - DNA, 558 bp, Homo sapiens
gcagcactattcataatagccaagatgtggaatcaacctaaatgcctatcaatgacagattggacaaaggaaatgtggcacatatacaccatggaatactacgtggtcataaaaaataataagatcatgtcctttgcaggaacatgtatggaactggaggccactatccttagcaaactaatgcaggaacaggaaactaaatactgcatgttcccacttataagtgggagctaaataatgagaacacatggacagaaagaggggaacaacagacactgggatctacctgagggtagagggttggagaaaggagaggattaggaaaaaaaaaaatagaacaactttcgggcactatggttagtacgagggtgatgaaataatctatacaccaaactcgcaagtcacaagtttacctacacaacaaacytgaattatgtacccccgaacctaaaatcaaagttaaaatattcttcaggatcactgaataaaaagctcataaagattcaaaaaagtcatacactcaaagttataaaaaccttgtagttaccaaccctcacc

SEQ ID NO: 632068 - DNA, 558 bp, Homo sapiens
gcagcactattcataatagccaagatgtggaatcaacctaaatgcctatcaatgacagattggacaaaggaaatgtggcacatatacaccatggaatactacgtggtcataaaaaataataagatcatgtcctttgcaggaacatgtatggaactggaggccactatccttagcaaactaatgcaggaacaggaaactaaatactgcatgttcccacttataagtgggagctaaataatgagaacacatggacagaaagaggggaacaacagacactgggatctacctgagggtagagggttggagaaaggagaggattaggaaaaaaaaaaatagaacaactttcgggcactatggttagtacgagggtgatgaaataatctatacaccaaactcgcaagtcacaagtttacctacacaacaaacctgaattatgtacccccgaacctaaaatcaaagttaaaatattcttcaggatcaytgaataaaaagctcataaagattcaaaaaagtcatacactcaaagttataaaaaccttgtagttaccaaccctcacc

SEQ ID NO: 632069 - DNA, 519 bp, Homo sapiens
ttactcgaaaactgaaaaatggaaaagactaaaaaggtctagagtggatatgataaatgagaaacatgcctattaattaaaaaattgctacacatctagtgttattccctggaataagacccttttgtccaacccctgatttgtttgtctggttgattctcactgattattaggggacttgacactcctcgacttttcccaaaatttcccgaggcagacctaataagggtgtgtcatgagtgtgattgaataagacttctgaactcccatgagacaacttccattttctcttcctctttgacctgctcttgtgagttagacctgctagaagccccatgaaggtccctctggaatcactgaggaaactacctcccaacactggggtgctccrtggactgatattttagggaaatgaggctacttcgatgaaaaagggatccttggagcctctttcattcagggtcatttgaaagaagcatggccttatgctccccagatctcccagaactcaagtatggt

SEQ ID NO: 632070 - DNA, 614 bp, Homo sapiens
ttctggaggagccaaattggaagtagtatgggatgcttaattggggttgcttttgcttcgaatatgacacagaactccagtcaatgcacctgtgttcaaataaaaagccttgactctatgtcaaaacattggtaaatgaatacaaatttatatttttaaataagatgtttaaagtatcatttttatgatttgttgttctaaacactgttagaggcattgaattttatcctccattaaggcttactgtagggcatctgatgacttggtatcagtaaagccagaatacctaaactgatggaattgaataggattctactttatgggtgcagtgtaccttattttacttctctatttatgcttatttaagttatttacagcttttaaaataaagaatactgcaaatctttgcacatgcataattgtattgtgtgtaaatatatctrtaggataagtttctatcagcgatattgttgcagtttatttagacagctttagaactgattgacttttgcttaggatttacgggctagtcagaatttgctttgcaatatttagacttggtgttgtcaattttatcagctagcttttttactctacacttgtacttaaaataa

SEQ ID NO: 632071 - DNA, 503 bp, Homo sapiens
aaaatctttaaaacactcttaaataccataaaaaaaaaagaaaagaaaaaacccacagaatttkgccatccgtctatggacccatgcaattttctgcttccctcaacactgggctcaatctaagctttagtgctaagcaccaaagggaatctccacccatttactatacccagagaaaagcttgttctcagactcctgcagtcagtagctagtcaggttgagccatcctggggaccctaaaaagtgacatatgttatttctgaaagggctaacatcagttccagtataaatcaagcttacccttcactgattaaaaaagaagaaaaaaggtagattcatcaaaacgccttgctatagaaaggatcactagtttagtgtcaaagcccctcctctcagagaaaaagagataatggaaaaaataggaaaaaaacttttctaaaagatcacaatgcatattttcagtgcagtttgacaggctttagggatgcatgaaagtaatgtat

SEQ ID NO: 632072 - DNA, 503 bp, Homo sapiens
aaaatctttaaaacactcttaaataccataaaaaaaaaagaaaagaaaaaacccacagaatttggccatccgtctatggacccatgcaattttctgcttccctcaacactgggctcaatctaagctttagtgctaagcaccaaagggaatctccacccatttactatacccagagaaaagcttgttctcagactcctgcagtcagtagctagtcaggttgagycatcctggggaccctaaaaagtgacatatgttatttctgaaagggctaacatcagttccagtataaatcaagcttacccttcactgattaaaaaagaagaaaaaaggtagattcatcaaaacgccttgctatagaaaggatcactagtttagtgtcaaagcccctcctctcagagaaaaagagataatggaaaaaataggaaaaaaacttttctaaaagatcacaatgcatattttcagtgcagtttgacaggctttagggatgcatgaaagtaatgtat

SEQ ID NO: 632073 - DNA, 503 bp, Homo sapiens
aaaatctttaaaacactcttaaataccataaaaaaaaaagaaaagaaaaaacccacagaatttggccatccgtctatggacccatgcaattttctgcttccctcaacactgggctcaatctaagctttagtgctaagcaccaaagggaatctccacccatttactatacccagagaaaagcttgttctcagactcctgcagtcagtagctagtcaggttgagccatcctggggaccctaaaaagtgacatatgttattkctgaaagggctaacatcagttccagtataaatcaagcttacccttcactgattaaaaaagaagaaaaaaggtagattcatcaaaacgccttgctatagaaaggatcactagtttagtgtcaaagcccctcctctcagagaaaaagagataatggaaaaaataggaaaaaaacttttctaaaagatcacaatgcatattttcagtgcagtttgacaggctttagggatgcatgaaagtaatgtat

SEQ ID NO: 632074 - DNA, 503 bp, Homo sapiens
aaaatctttaaaacactcttaaataccataaaaaaaaaagaaaagaaaaaacccacagaatttggccatccgtctatggacccatgcaattttctgcttccctcaacactgggctcaatctaagctttagtgctaagcaccaaagggaatctccacccatttactatacccagagaaaagcttgttctcagactcctgcagtcagtagctagtcaggttgagccatcctggggaccctaaaaagtgacatatgttatttctgaaagggctaacatcagttccagtataaatcaagcttacccttcactgattaaaaaagaagaaaaaaggtagattcatcaaaacgccttgctatagaaaggatcactagtttagtgtcaaagcccctcctctcasagaaaaagagataatggaaaaaataggaaaaaaacttttctaaaagatcacaatgcatattttcagtgcagtttgacaggctttagggatgcatgaaagtaatgtat

SEQ ID NO: 632075 - DNA, 512 bp, Homo sapiens
gcaacccatttgcagctggggaatttctgccagctgtaatgggaatgggcaagggtattragagctattaaaatggatacaatctaccctctttagaatgagtacgtaagtcagcagcactaggacactgcaagtgtgtatttgcactggagaggctctgagactcctcctcggtatcaaggcaacaccaagctccatagcagttttcagctttgctcctagatcaagcagaaagcctagtcctgaggaggagaatctaaagctatcatctataacacacagttagaaatgtgagtgtaaagttggggagagaggtttgaactaaaaataaaaaaatctcagcatacagatggcatttatagccttgcaaccagaagagatcactagggatgaatacagataaaagggagatgtcatccaaggattgaggtgtgggctgttccaacattaagaaacaggaaaagaaggaaaaaagaaatctggaggcaaacaagacgaaggagtgaaccgat

SEQ ID NO: 632076 - DNA, 605 bp, Homo sapiens
aaatacatgatcacataattgcagatattttatttttgttttttgatgtttagaatcaatctagtcaaagcacctaaatcttaatttgttccagaacaaaatgcaaatattacagattcatagaaatgaacatatagttgacagcrtagaaataggtgtatagttgactgattgtgagagtagagagcagggagaagtgatggagggaaatttggaagctctaattttatgtagcacaatccagaatcagtaggtaacctttatttagaaatatttgtgaaagttgtgataaacaatataacattagaagttaacatatctcaggaaaaagaaagggagtttgagtcagagtgctgcatatttttaaaaaattgatcaattcagaaagagaaatgcaaacctatttgttagaattgcactggtaatcaccagaagaactaacactataaatgggtgaagtggttagcacttaggctgggactagagatgaaaaggaagaagggaacttttattatttttttaatttttaccctcttgtgagtttttttaaacaacatttttatgtattactttcataaataacaattatttaaaaataaactaac

SEQ ID NO: 632077 - DNA, 482 bp, Homo sapiens
attgagggtatgtgtgcaacaggtatctgttttcttcatagtggcaaacctagtagacatcaccttaactacataatcaaagtacataataggacaaatcaacatgatgtactgcttgatgggatgtagtcggaagaaacacagcagaatttctctcttgttttgtcaaagataaatgatatatataccattgaaaatgtcagacaagccaagttgagagacattctaaaaaatgacctgtgatctttaagtgacaaagtcatgaaggtcaagaaaaaactaagagactgttgaagatttaagaagactcaaagagagataatacagccagccagcctggattaggttattttgctataatggactttattggacaaattgatgaaggttgaaygggatctgtgaattaaatgatagttcctgcatcaatgttaatttgactttaataattgcattgaggttatgaaagagaatgtccttat

SEQ ID NO: 632078 - DNA, 566 bp, Homo sapiens
tagtgacttaaaccaataactattagtgctcacaagtctgtggttcaactgggtggttttgctgatttggttttgctgctgggcaggactgcctgatcttggctggtcaagttcctgtgatcggcagattgaaaaggtggtagttggttcagaatagccttatgcgtaccttggatggttgttgttggttcccacctggggcagaggggataaacgggccaggtgtgtttcatcttctaccatgctggctcttgcttgtttataggcagtcccaggttccataaacaagaaagcaagccacaatgtgcaagaacgttagtttctgctcattcattccaaaacacatcacaaggctaatctagattcaaattatggaggaaaatgctacttcttgagggaagagctacaaagtcacattgcaagggcatggacayagggagggaaaatcttttggctatgtttgcagtgtaccacatgcacttgattataatcttaatgcttttcccttcaaatctactgacatagtatagtgggaaatccttgactgagttcttttattttccttt

SEQ ID NO: 632079 - DNA, 421 bp, Homo sapiens
ggctgtattctattgcagaagcatacacaaaatacaacagcagaacaagagaggcaggatgtcagggaatccttggaaaagaggtatcattggagcagaagatgtggatatgagatgactaggttgaagtcaaacctttcaaacctgttcaaaaaacagcaaatcagtggtcaaggctakaccacgagagagacagcagggaggtggaaagtggaaacaaaagttgaaacatgggctctagccaggttatgaagagcctgcataggtttagtatattatttcattgatgagaagtcatttaatgatttagaagaaataagtgcaatagatatatcctctagcaaattaacagatgctgaggtgttaggaggttgagaagtgcggcaagctgtcaggaggctcttccaggtgtctcaaaaag

SEQ ID NO: 632080 - DNA, 591 bp, Homo sapiens
aacctttcaaacctgttcaaaaaacagcaaatcagtggtcaaggctagaccacgagagagacagcagggaggtggaaagtggaaacaaaagttgaaacatgggctctagccaggttatgaagagcctgcataggtttagtatattatttcattgatgagaagtcatttaatgatttagaagaaataagtgcaatagatatatcctctagcaaattaacagatgctgaggtgttaggaggttgagaagtgcggcaagctgtcaggaggctcttccaggtgtctcaaaaagtcatgaaggtctgaacagcagcagcagcattggttcaaagggaagaggagagatgcacaggacaaatcaggatagaaataaggtttgcmaatgcttgaaaatggcagtgggctagaaggatgagttcagatgtgtctgattttgaaaggtgcccaggacaagcaataatatataaacacaaagcatatgaacaggagaaggtccaggagataatagaatactcaaaaatgttgatgcctttgaattacctggaattattctggtctcactgtctttgtattatttgacatttgatcaagacc

SEQ ID NO: 632081 - DNA, 530 bp, Homo sapiens
gattttatctcttggcttggttagggcccaggggacctccctggctggcttagcctgtttgagacatcttttggagcagcacagccctctgcatctcagccaaatccttcatcatgccattgtctacactctgctctgcaacctcagaagctaggtctccctgtctgtccctactgtggccctgtggctggcctgctgaattccaactcagctccttcagtactcctcacagggcctgaagcaacttctagatcactttcaaggcatacagaattcaggagagatttgggcttgctaactcagttctgctgtctgcccaaccttgtcatgctaccattttcacattaatgttgccatccatgttggrgtaagggatccctgtggggtgttttacttatagcatcctaaataagaagttagaaaaactccatctgcttttggctttttccttaattgatcaatacacctctattctaggatttgcattcagaaaagggatctataaaatctataaaatatccaaattttta

SEQ ID NO: 632082 - DNA, 638 bp, Homo sapiens
gacaatatttcacaaataccacaaaaggaccatgctcagcaaagacaattccaggcttggcactaagcaatgtaatctatcaactggcaccagtgagtctcacttggtgtgaatgttccacagcacagaccagtaccactcttagatctgggcaagaggagactaacttgggcactgtgattaagaggatttcactctggtctttctccaggcaccatccttctcacagggtgagggtcccaggggccaaagggctatgccyacctagaaactgactcccttcttttaaaccatatttcagatatgaggggccccagaatttcagctctgccactggcccttttctgagtccctctacccttgagtggacagtgcctctggcagtcatatctttaggctgggggttgtccaaggagcagccattataagaagaatgaacacagatgtgttcacaagacctttcatgtgttgggcaaactcagggtgggaaaagagagtagaagggctgtgatccagggcctagctcttcccacaccaccatacttcagcagagacctcagaagagtcctaaaactctctatataaatagtattcagtttaggtaataattgagttactatgtggcaggcacaatcagg

SEQ ID NO: 632083 - DNA, 518 bp, Homo sapiens
gaaggaggaaacacaggagaaaatgtttactggtgttttgtaagggaggtaaggagaagaagacagctgatgagctgggttcagtatgtgtttagtttgaggtacctgcaagacatctaatggaaatgccttaattacatctaaataggctcatggcaatttgtgtcatgggaaactgtctcacagcaygctgaacaaaagtggttatattgtcccctgatttgccaatattacaagtaacatggggtggaggatattcaaaacagatccgtgggttgttcttccttgaacaagctttattcctccctgatgcatctgtcaaagcaatctgtgagaaccccaatgcccacaaagatggagggagaggtgctggaatgcagacgcaaaaggcagggaggaatgaggctgttttggaacaacaggtcacagctgcagatcgagatcatattaccacaccttccctcaaatctacccaacctcatcagctgaataatgcttaccatctggtctcacaatta

SEQ ID NO: 632084 - DNA, 656 bp, Homo sapiens
ttgaggtacctgcaagacatctaatggaaatgccttaattacatctaaataggctcatggcaatttgtgtcatgggaaactgtctcacagcatgctgaacaaaagtggttatattgtcccctgatttgccaatattacaagtaacatggggtggaggatattcaaaacagatccgtgggttgttcttccttgaacaagctttattcctccctgatgcatctgtcaaagcaatctgtgagaaccccaatgcccacaaagatggagggagaggtgctggaatgcagacgcaaaaggcagggaggaatgaggctgttttggaacaacaggtcacagctgcagatcgagatcatattaccacaccttccctcaaatctayccaacctcatcagctgaataatgcttaccatctggtctcacaattacagtctttttttctagaatgactttttcctaactagttgaactttgcttacatatggaatgcaagaaccaaagttaaagaggaaaacagtccttgccagagaagacctctagagacagtgtccaagatttttgatgaaaaacacagaaagcgtttctagtctggctggcaaagttgtgtttttacaaaagaaccagacatcccatagatccaaaacaagtcaaggtaaatcaat

SEQ ID NO: 632085 - DNA, 597 bp, Homo sapiens
tgcagtgagaattctttacctactccctttgaccacatagggttgtctgttataaaagaagttgaaaaggagatccgagatcaaatatccattattgcctctacaagaaagggaacttttctgaargagaagtcaactgagtttatattgtaaggaggcaagagagggactgtttccatgtgcaatattaactagcattattagaagctagtctggctgatgattccgaaataaccagcattctgtgaatggatccctgtgacctctgtcccacggttctaatgagcaacaggaccagctgcttctagtgttgccccatcagcagtaccacgaactgcaggcagagaaacacaactttagctggacatggaggggtcttgtcacttacaaaagacaacagaagacaccaatggaaattatttgcatttatctcattccccagttcttgctgtgagctccttttaaaaatgtttgaagtgatagatttaggggtttgagggacaaaatgttccagttggcctctgtgtcttgcatctagaatttgatcactgtgtaaaattgaaggcttatatttctgcacaagaggagaggaaaagg

SEQ ID NO: 632086 - DNA, 570 bp, Homo sapiens
tgtcctgtgtgcctttctccaaagagaaaaaggcttcagtatttaaaggggaaacgcagtttggaggggaaagagagaaggtgtggtcacattactgaatccacgtgttgcacgagaaaaggagcaggtaggggaaaagccaattatgtatttgtctggtgctcagtaaatcagcactttacataagataaggtgaacatagagtagctacctgtggagatatctggccttttatctgcagccgtgtgcttagggacaaaaggaagagcagtttcttgcatgacttagatttcagctgaatttttcccttttggcatagtgattttcatagtgaaattttattttcctttcagacttgataatgctgtccattcaatatgagacatcagggagtttgctctacatagtcactcaagctgatggggatgtcactctcttattctgccrcctctatttttggcttttggaaggtggagggggagagaaaaaagatctgaaaactagcatggggtattttagttcatcaagtctagaaatgacagatgtcacatccattcacagcccactgga

SEQ ID NO: 632087 - DNA, 593 bp, Homo sapiens
tcagtttccatttgtgtggaatatctccacccctttactttcaatctatatgtgtctttatagacaagatcagtttcttgtaagctgcatatatttggatcatggtcttttacccattcaatcaatttatatcttttaagtgatgcatttaatccatttatattcaaggtgratattgatgtgtgagattttgttcctgtaatattgttaacttttttctagttgttttgtgaattgtcttcctttttctctgtctttgtggttttatggaagtctgtagtggtgtcatttgattcctttctcttcctcctttgtgtgacttctttaccagtgagttttatactttcttatgttttcatgatggtgaatgtcattcttttgcttccaagtttaggactcctttgactatttcttatcaggtcagtctactggtgatgaattcccttgacattttctcatctgagaaaggctttatttcttctttatttatgatacttaatatttctcctttatgatacttaatatttctcctttatttatgatacttaatcttgccgaaaccagaatccttgcctgtttttttttctgtcagt

SEQ ID NO: 632088 - DNA, 488 bp, Homo sapiens
ggatcatggtcttttacccattcaatcaatttatatcttttaagtgatgcatttaatccatttatattcaaggtggatattgatgtgtgagattttgttcctgtaatattgttaacttttttctagttgttttgtgaattgtcttcctttttctctgtctttgtggttttatggaagtctgtagtggtgtcatttgattcctttckcttcctcctttgtgtgacttctttaccagtgagttttatactttcttatgttttcatgatggtgaatgtcattcttttgcttccaagtttaggactcctttgactatttcttatcaggtcagtctactggtgatgaattcccttgacattttctcatctgagaaaggctttatttcttctttatttatgatacttaatatttctcctttatgatacttaatatttctcctttatttatgatacttaatcttgccgaaaccagaatccttgcctgtttttttt

SEQ ID NO: 632089 - DNA, 488 bp, Homo sapiens
ggatcatggtcttttacccattcaatcaatttatatcttttaagtgatgcatttaatccatttatattcaaggtggatattgatgtgtgagattttgttcctgtaatattgttaacttttttctagttgttttgtgaattgtcttcctttttctctgtctttgtggttttatggaagtctgtagtggtgtcatttgattcctttctcttcctcctttgtgtgacttctttaccagtgagttttatactttcttatgttttcatgatggtgaatrtcattcttttgcttccaagtttaggactcctttgactatttcttatcaggtcagtctactggtgatgaattcccttgacattttctcatctgagaaaggctttatttcttctttatttatgatacttaatatttctcctttatgatacttaatatttctcctttatttatgatacttaatcttgccgaaaccagaatccttgcctgtttttttt

SEQ ID NO: 632090 - DNA, 604 bp, Homo sapiens
tatgaaggagtttcctttatagatgaccgagcagtttcctcttgtgattctagaattcattctttcaatttgacttcagacagtctgattatgatatactgyggcaaactcgttttttacattatatttgcctggggatcattgagctccctgtatgtagatgtctacatcttttcgtatatgttaaaagttttcatctattattttgttaaataggttttctaaaccttttaacctctcttcacacccaggaaatacaaataattcatgagtgtgttcaaccaacatagttcaaaatgtctcaaaggctttgtttattcttttttatgtttgctttacttttgtctaactgaattattttaaaagatctgtcttcaagttctgaaattctttcttctccttggtcaaatccgttgttgaggctttaaaatgtatttgtatttccttcaaagaatttttctgtctcagaatttctatttggtttgttttttgtaaatatctatctccttagtaaatttcttatgcacttcctgaattgattttctgagttctttgtattggttttcagatttctcttgcatctcctcaagctctttaaaaatca

SEQ ID NO: 632091 - DNA, 489 bp, Homo sapiens
aatttccttcttaatttctttattaacccacaggtcattcagaaacatattatttaatttccttgtatttgcatagtttcaaacattcttcttgttactgatttctagttttattctgtgctggtcagagaacatggttgatattactcagggtttttaaaagtattttaaaaattattctgtgacctaacatatggtctatccttaagaatgatccctaggctgaggaaaaacctgtgtatcctgcagttgttagatgaaatgttctgtaaatatctattagaaccatttggtttacagtacagatagagtccaatgtttctttgattttctgtctcaaaggtctgtccagggctgaaagtagggtkttgaagtcttcagatattactgtattggagtctctctttagctctaataatatttgctttatatatctgagtactcccatgttgagtgcatatatactaaaatttgttatatcctcttgct

SEQ ID NO: 632092 - DNA, 553 bp, Homo sapiens
caatacatgagaattcaagatgagcaagatgagatttgtgtgggaatacagccaaaccatatcaaaggccttcatcaaaaagcagaaaaattaaaagtcaacaacataatgtacccaaaagaactagaaaagcaagagcaaatcaaatccaaaattagtagaagaaaataataagatcagagcacaactagagaccaaaaaatacaaaaagccaaataaaataaaggtagttttttaaaagataaatgaaattgataaatggttagctagagtaaccaagaaaagacccaaataattacaatgagaaataaaaaggaggcattacaattgttattttggttatagaaaacattatcagagactattatgaacatatatacacttataaactagaaaacttagaggaaatggataaatttctgggaacatacaacctctcaagattgaatcaraagtaaatagaaaattataagagactgatagcaaatagtgagattgaattagtaataaatctcccaacaaagtaaagctcatgaccagatggatttacagc

SEQ ID NO: 632093 - DNA, 553 bp, Homo sapiens
caatacatgagaattcaagatgagcaagatgagatttgtgtgggaatacagccaaaccatatcaaaggccttcatcaaaaagcagaaaaattaaaagtcaacaacataatgtacccaaaagaactagaaaagcaagagcaaatcaaatccaaaattagtagaagaaaataataagatcagagcacaactagagaccaaaaaatacaaaaagccaaataaaataaaggtagttttttaaaagataaatgaaattgataaatggttagctagagtaaccaagaaaagacccaaataattacaatgagaaataaaaaggaggcattacaattgttattttggttatagaaaacattatcagagactattatgaacatatatacacttataaactagaaaacttagaggaaatggataaatttctgggaacatacaacctctcaagattgaatcagaagtaaatagaaaattataagagacwgatagcaaatagtgagattgaattagtaataaatctcccaacaaagtaaagctcatgaccagatggatttacagc

SEQ ID NO: 632094 - DNA, 553 bp, Homo sapiens
caatacatgagaattcaagatgagcaagatgagatttgtgtgggaatacagccaaaccatatcaaaggccttcatcaaaaagcagaaaaattaaaagtcaacaacataatgtacccaaaagaactagaaaagcaagagcaaatcaaatccaaaattagtagaagaaaataataagatcagagcacaactagagaccaaaaaatacaaaaagccaaataaaataaaggtagttttttaaaagataaatgaaattgataaatggttagctagagtaaccaagaaaagacccaaataattacaatgagaaataaaaaggaggcattacaattgttattttggttatagaaaacattatcagagactattatgaacatatatacacttataaactagaaaacttagaggaaatggataaatttctgggaacatacaacctctcaagattgaatcagaagtaaatagaaaattataagagactkatagcaaatagtgagattgaattagtaataaatctcccaacaaagtaaagctcatgaccagatggatttacagc

SEQ ID NO: 632095 - DNA, 553 bp, Homo sapiens
caatacatgagaattcaagatgagcaagatgagatttgtgtgggaatacagccaaaccatatcaaaggccttcatcaaaaagcagaaaaattaaaagtcaacaacataatgtacccaaaagaactagaaaagcaagagcaaatcaaatccaaaattagtagaagaaaataataagatcagagcacaactagagaccaaaaaatacaaaaagccaaataaaataaaggtagttttttaaaagataaatgaaattgataaatggttagctagagtaaccaagaaaagacccaaataattacaatgagaaataaaaaggaggcattacaattgttattttggttatagaaaacattatcagagactattatgaacatatatacacttataaactagaaaacttagaggaaatggataaatttctgggaacatacaacctctcaagattgaatcagaagtaaatagaaaattataagagactgatagcaaatagtgagattgaattagtaataaatctcccaacaaagtaaagytcatgaccagatggatttacagc

SEQ ID NO: 632096 - DNA, 438 bp, Homo sapiens
atgattactttaatgccttcttattcattatatataatatatacatatatttctctctttcatacatatatatagacaaacatattaatatataaatatatgtctcatatatttataaaatatattcatatataaatatgtaaatgtatgtataacttatataaatatgtttttataagtaaataattttatatctgatatataaactatgaattatatattttattacatataatatataccctaaagaataaatatatattaaaaatatttttatataatttatataatataagagaaatagtggragcaaaaatctagagtacaattttttttacttcttttttttttttttttggaggtagggtcttgctctgttgcccaggctagagtgcagtggcgaaatcttgtctcactgcaacttccgccttcagggct

SEQ ID NO: 632097 - DNA, 598 bp, Homo sapiens
atttatgatgaagatttcaaaagcacaggcaataaaaataaaaacagacaaatgggacttaaataaactaaaaaacttctgcaaagcaaaagaaataatcaacagggtaaatagataacctgcagaatgagataaaatatttgcaaactgttcccaagatgagggacgaatatccagaatttacaagaaactcaaacaactcaataacaacaaaaaataatakccttagaaagtgggcaaaggacatgaacagaattttttcaaaagcaaactgacaaatggttaacagattatatatatatatatataaaatgctcaagattactaattactagagtaaagcaaattaaaactacaatgagatatcgtcttacaacagtcagaatggctagcattaaagtcaagaaacaacagatgttggtgaggatgcagtgaaaagggaactctcatatattgttggtaggaatgtgaattagtacaatctctctggaagacagtatagagatttctcaaagaacaaaaaaatgtaactgtaactcaatccagcaatttcactacttgtcttctactcaaaagaaaataaatcagtatatcaaaa

SEQ ID NO: 632098 - DNA, 598 bp, Homo sapiens
atttatgatgaagatttcaaaagcacaggcaataaaaataaaaacagacaaatgggacttaaataaactaaaaaacttctgcaaagcaaaagaaataatcaacagggtaaatagataacctgcagaatgagataaaatatttgcaaactgttcccaagatgagggacgaatatccagaatttacaagaaactcaaacaactcaataacaacaaaaaataatagccttagaaagtgggcaaaggacatgaacagarttttttcaaaagcaaactgacaaatggttaacagattatatatatatatatataaaatgctcaagattactaattactagagtaaagcaaattaaaactacaatgagatatcgtcttacaacagtcagaatggctagcattaaagtcaagaaacaacagatgttggtgaggatgcagtgaaaagggaactctcatatattgttggtaggaatgtgaattagtacaatctctctggaagacagtatagagatttctcaaagaacaaaaaaatgtaactgtaactcaatccagcaatttcactacttgtcttctactcaaaagaaaataaatcagtatatcaaaa

SEQ ID NO: 632099 - DNA, 598 bp, Homo sapiens
atttatgatgaagatttcaaaagcacaggcaataaaaataaaaacagacaaatgggacttaaataaactaaaaaacttctgcaaagcaaaagaaataatcaacagggtaaatagataacctgcagaatgagataaaatatttgcaaactgttcccaagatgagggacgaatatccagaatttacaagaaactcaaacaactcaataacaacaaaaaataatagccttagaaagtgggcaaaggacatgaacagaattttttcaaaagcaaactgacaaatggttaacagattatatatatatatatataaaatgctcaagattactaattactagagtaaagcaaattaaaactacaatgagatatcgtcttacaacagtcagaatggctagcattaaagtcaagaaacaacagatgttggtgaggatgcagtgaaaagggaactctcatatattgttggtaggaatgtgaattagtacaatctctctggaaracagtatagagatttctcaaagaacaaaaaaatgtaactgtaactcaatccagcaatttcactacttgtcttctactcaaaagaaaataaatcagtatatcaaaa

SEQ ID NO: 632100 - DNA, 642 bp, Homo sapiens
ttttgcagctggcttgaatttctcctcagaaaataggattttcttttctattgcattgtcaggctgcaaattttctgaacttttatgctgtgcttcccttataaaactgaatgcctttaacagcacctatgtcactccttgaatgatttgctgcttagaaatttcttttgcaggctggggcatggtggctaacgcctgtaatccagcactttgggaggccaaggcaggtggatcacctgatgttgggagtttgagaccagcctgaccaacatggagaaamcccatctctactaaaaatacaaaaattagccattgccttgtattccccgctactcgggaggctgaggcaggagaaatcgattgaactcgggagctgagatcatgccatttgcactccagcctggggcagcaagcgcaaaactttgtctcaaaaaaaaagaaaagaaaagaaatttcttctgctggatacactaaatcacctctctcaagttcaaaattccacaaatctcgagggcaggggcaaaatgccgccagtctctttgctaaaacatgaacagagttaccttgcttcagttcccaacaagttcttcctctccatctgagacccacctcatcctggctttcattgtccatgtcattatc

SEQ ID NO: 632101 - DNA, 654 bp, Homo sapiens
aaaacatttatttttgtaatataagcatcattataatagctaacaaaattaacaatgattacctaattctatgtaatagccagtttgtattgaaagttttctaattgtctgaaagagtctttttgtagttgatttgaatacggattgaaagaagataacacattgcatttgacatttatgtctcttaagtggctttacgtcctaacggtctccccttctatttttcaccatgccacagtttagttgaagaaattgaatcttgtagtctgtcgaatgtcagtaccctggctttggcttattatttccttatagtatcatttaccttgtctctctatcccctatatttcttgaataattatagtaatgtatatacagagaggactggactgatatccagttctttgataagacatcctgattgtgctctgtacttcctagtgtatcacatcaggaggcacataatgtctgcttgtttcacttctgttaattcttcaattgaccagtgcatttaagtagtatcagcctgatccytccattaagagatttttattaacttttgacctgattagtttaaagtttattggttattatccctatctgttatttagagtttggaaaatagcgatattctaatttcaccattttatctgtact

SEQ ID NO: 632102 - DNA, 503 bp, Homo sapiens
acaaattccttaaaaaattatgcttcaatgctttaatgttcaatgttccacaccaaatgtttacattaaaatgtaacataaaatatcactggacttgataaaccactgacccattttctggtggtataagaactctcttaggagctagtggcctttctgcttctttgaaatcttgtacagagagtaatgttccagaagtcaatgaagactgaagctccatgaaaagggcttctttttaactcaataacttgccgtaaaataatctgacccacattgacaatatgcatcatagatattctatacttggtaattatccagtaatgacaggcaatttacattaattagggtaattattattaattttataaagtcaaacctaactttttgtttaccttttctttggtaattttctgaaatctaaaagtcaaatgaatgtgaaaaacatttcccctgaatgtttatgtattttactttyctcatgctctcttatatacacagctgct

SEQ ID NO: 632103 - DNA, 636 bp, Homo sapiens
tctttctaaaacttccaggactatgttgaataacagtgatgaaagtgagcatccttgtcatgttccagatattagaggaaaggctttcaggttttccccattcagtatgatactagctgtgggtgtgccatatatagcttttatcatattgacatatgttccttctatacccaattttttgagggctttaacatcaagggatgtttaattttatcaaatgctctttcagcaataattgaacacatcatatggtttttatccttcattctgttgatatgatgtatcactttgactaatttgcaaatgttgaagcatctttgcatcccagggataaatcccatttggtcatgttgaatgttctttctaatgtattgttgtatttggtttgctagtattttgttgaggattacagcttcaatattcatcagatattggcttggagttttctttttttttgatgtgtgtttgttaggttttggtatcagggtaatamttgccttatagaatgagtttggaaatattctgtccttctctattttttagaatagttgggtagggttaatattagttctctttaagattttggtagaattcagcagtgaaaccattgagtcctaggcttttctttactgggag

SEQ ID NO: 632104 - DNA, 418 bp, Homo sapiens
tgcattgtcttggcgttctcacctggcatacaagtagatattctgaagtccctcagctaaaagtgagtttccaggtgggtctattgattatacattcagcacttcagagagagctggaaacgagatgacatggcttagcatcacttttttttttttggtctaatggattttggtgttagaaaatgtttgctcaagttgggtattctagaaattgctctataaccatgaaattttctacagaataaagtaacctgcagaggattaaattgtatgaaagattygttactttggagaaaaacctaggatccacataaatggtgaatttttacctccggagccgtgttttgcgtaactatgacactttgtttccctgagaagaggagaaaatagtaaaaattagagtatccaagctaagcaa

SEQ ID NO: 632105 - DNA, 414 bp, Homo sapiens
acatggcttagcatcacttttttttttttggtctaatggattttggtgttagaaaatgtttgctcaagttgggtattctagaaattgctctataaccatgaaattttctacagaataaagtaacctgcagaggattaaattgtatgaaagatttgttactttggagaaaaacctaggatccacataaatggtgaatttttacctccggagccrtgttttgcgtaactatgacactttgtttccctgagaagaggagaaaatagtaaaaattagagtatccaagctaagcaaactctcatggaaactttttttaggtgctctagattaggtgttttcttcatctggtgaaatcacaaaaatagaattaggctgcaattcaccatatttgagccgttgaattacataaaattctgt

SEQ ID NO: 632106 - DNA, 626 bp, Homo sapiens
gagctaaatttctgggaaagctacagttttccgcaatacaaaccaatatgccttggagacattagaatctttgtaaagtttaagttcttactgggaattgcctagaatgcgttagccagataactagcccaaccaagaagccttgtgttcattgtytgatggccatgattacataagtgcttacagcatttatggtttttttatggtcctctgtgtgatgccttaaaagttgtaggtgactgctaacaatcccaggagtgacgccaatgtgttttgcacacttgattaatcttaaactttctgaggttaacttcataaaatattgctaactgaccattgctacagaccacagaacattcatactgctcggccaactttcagtccctggaactctgcaattctacaggcaaaatggttctcaccttcagagataaaatcatagcccttgaaggttttgttctcattttgtgtcttctctctacatttaaactactaaagctactggctttgtgcctttagatcttacgctctttatttccaccttttgatgggtctacagtcaaggtggctgccaatcagccttcatacacattagtttctttttgtgaattttcaacacagaaaag

SEQ ID NO: 632107 - DNA, 611 bp, Homo sapiens
tattccagaacttgactcagatggcatttctggacctgccctgggccagaggggagcccactgtcccaaagggtgagtcccaggtgctaacttaagagaccttgggccttagggaaatattggtggtagtctggcagtactccctgtggcctgtggtggcagtggctaccagataagcctcccctgcctttagaaaggggagtgaagagtgctaaaaactgcatcttgtggtttgagcaccaactcagctgcactacaatagaataccaggtagacttctaagttttttgactctagcccctgactcccacacaggacctctggacccacatgggaccttggggaactcaccaccttgaagagagagacacaggcctagctggctgtgacacattctcattgtagagctccaacgccctgagcaaacataggtagtagtcaaggcgtggtttacrggagatcttgggtgaggacaagtgctgtgctggctataggtctaactcagcacagtcctagtggtggagaccacaggagagcttttgccatttcacctgcagctttaggtggctcagtaaagggacaaagagatgttgtttgtttggcagaaagca

SEQ ID NO: 632108 - DNA, 611 bp, Homo sapiens
tattccagaacttgactcagatggcatttctggacctgccctgggccagaggggagcccactgtcccaaagggtgagtcccaggtgctaacttaagagaccttgggccttagggaaatattggtggtagtctggcagtactccctgtggcctgtggtggcagtggctaccagataagcctcccctgcctttagaaaggggagtgaagagtgctaaaaactgcatcttgtggtttgagcaccaactcagctgcactacaatagaataccaggtagacttctaagttttttgactctagcccctgactcccacacaggacctctggacccacatgggaccttggggaactcaccaccttgaagagagagacacaggcctagctggctgtgacacattctcattgtagagctccaacgccctgagcaaacataggtagtagtcaaggcgtggtttacagsagatcttgggtgaggacaagtgctgtgctggctataggtctaactcagcacagtcctagtggtggagaccacaggagagcttttgccatttcacctgcagctttaggtggctcagtaaagggacaaagagatgttgtttgtttggcagaaagca

SEQ ID NO: 632109 - DNA, 418 bp, Homo sapiens
gaattcttttctcatttctattctacaacagtttttttacaaaaagtttctaggcttctactctggcctcctttgcttttcccgataacagactgcctacataattttcaggcacagtgcaaaatgaaaatgtgggctttttattaataaattattttgtatttcagtacggtcacagcagagcattaagcctagtacagggcacttctaagcgtagggctcagagcaactgcacagatcacacaagcatgaagctgatcctgtcccacaatatcttttaaaagtataaatcatctgacaagtgtgtcatgacattaagtggttgaaagcatgatcttttcaacaaatggtactggacaactggatacccacatgcaaaaaaaatawagttagacacttgccttacatctttaaaaaa

SEQ ID NO: 632110 - DNA, 570 bp, Homo sapiens
ccaggactttcgccttctgccacgattgtgaggcctccccggccacgtggaactgtgggttcattaaacctctttctctttaaaaaattacccagtctcgggtatgtctttatcagcagcatgacaacagactaatacaatatcattaaaacaatatttgctctcccctggaaagataaaatataattagaggtccatctacaattttattcttttcctttacgaatatggagaaaaaagaaagcctaaataaaatgctactttggaagccatgaaggacatcaaagcttctagagatcctaaagaaaaggcagacccaaccagaaacaagcttcagaggggtcaaagaaatggagcctattttttttttctkgctacttctcttcataaaccctgtaaggaaaggaacacaagtcactcttggaaagtgatgagagcagtgtatgtcagtttaatcttctgaatgtctcacagcctcagtggctcttgactgaaacagtaaagtgtatgcaaacatattaattctaatctattatctatttcatccttgctataggaatgtggcttaaa

SEQ ID NO: 632111 - DNA, 570 bp, Homo sapiens
ccaggactttcgccttctgccacgattgtgaggcctccccggccacgtggaactgtgggttcattaaacctctttctctttaaaaaattacccagtctcgggtatgtctttatcagcagcatgacaacagactaatacaatatcattaaaacaatatttgctctcccctggaaagataaaatataattagaggtccatctacaattttattcttttcctttacgaatatggagaaaaaagaaagcctaaataaaatgctactttggaagccatgaaggacatcaaagcttctagagatcctaaagaaaaggcagacccaaccagaaacaagcttcagaggggtcaaagaaatggagcctattttttttttctggctacttctcttcataaaccctgtaaggaaaggaacacaagtcactcttggaaagygatgagagcagtgtatgtcagtttaatcttctgaatgtctcacagcctcagtggctcttgactgaaacagtaaagtgtatgcaaacatattaattctaatctattatctatttcatccttgctataggaatgtggcttaaa

SEQ ID NO: 632112 - DNA, 536 bp, Homo sapiens
tagctctgatggttctaaaaaatgttccaatgtggtagctccattaagtgtgctattttactcataggtgatgaattctttacttatgaggtcctaagtaaaatgtgccatacacaaatttcacaactataacgtaaaccaaggcaaggagcaggcaggggagcggtggggggagaaataacacacaaaaaattagcagactctacagtatgattccatttacataaaggtcataatcaaaaagtaagccatatattatttagaaatacatacatagcagtgccaaaaaaaaaagcaaggaaattataaacacaaaattcaggagagaggctatttctgtggttgaaaggaaaggaaattaacatgaaagtgacacataggagcatcaaagggtgtttcttcagttacatggtaggtgtaggtgttkgttttactattttaaaaactgtatgtgtcatatatttatatctacaattttttaaataacagaatcccaaagaggtctctataatcacaccatccaaatcagcacccaa

SEQ ID NO: 632113 - DNA, 513 bp, Homo sapiens
gaacaggaaaaatataattgaattctatttaactaaagcacaattcttattttcataaaaggatagacattataagtaaaaaaaaaaaaggcaaatttgttcacctactggtgcctcctgagcctccaaatttctccctattatcactggctgcttctctgccattaaaaattactgataattctaccatctacrgtagtgccttctatactggcgctaaagaaataccagataaagtgatctgacaagtaaaaaagggactttaaaaggggactttatttctctgtacattcaacaaaatctcttatctcctttattccgaagacatagaaaacaatcaagtcagaggcttgtgggagccccctatgtcattttcattgagttaatatgtaaagtgcttaggatagtgcctggcacatagtaagagcatgtatgttagttatttttatccctttttattaccttcaggtaattttattattatatttgggctacaaccaatttttaggacct

SEQ ID NO: 632114 - DNA, 448 bp, Homo sapiens
cctccaactgctgtgaaactccgcaattcaaatattggagcatctctttcccgggcaggtagaattggacagccgagtggggagtgacagctgacagctgacggggctgttaaaagcagagcagtggagtgtggtggtggggtgagctgttgtgggtgcttttttttgttttccaagtgtgggtacgggctgttctgactcagtgtttmtgctcaacctctaagcggcgagttcggtaacacatcttatgaatatttcaggaacgacctcacgggctcacttgcttcagatcaagtttaatgaatatgttgtcagcctttctgctctgcacagtgccctgagctttccacatttcatccctttcccccaccacctaggaaaatacgctgctaacccccagtgggccgtagattggtactatcaattgagtctgtcatttggagagacc

SEQ ID NO: 632115 - DNA, 569 bp, Homo sapiens
accttaactgaaattgtgtgcccaatttacattttatattctaagtcctcagtggatactctgaatttaaagattctgaagacagtatgttctttcatcctgggagcttttaaccttccaactcacttatgctgaccatgagcaagtcatattttatatcagtttctatgctgtaaaatggaaggtatgcaaattaaaaaaataatattgtgccagccctaatctcagtatctataaaataaactcttaagtgttkctatggttccaagggatgaataactttattctcaatgaaagtagatgatttgtacaatgtctgggtactctatatgatatttaagatgccatcaaaataattcacaatttgattttttttgcttttttggtgcaaggcaaaataattgtggcaaatgcctaaggagagcttgttaagcctttttaaaaaatcagtctcatgcaaggcaataactgtagattcaaaagtctttacataacttttaaatgtttccattttaattattgggattaggacttgggtaattagaatgctggttttaagagctcatttc

SEQ ID NO: 632116 - DNA, 569 bp, Homo sapiens
accttaactgaaattgtgtgcccaatttacattttatattctaagtcctcagtggatactctgaatttaaagattctgaagacagtatgttctttcatcctgggagcttttaaccttccaactcacttatgctgaccatgagcaagtcatattttatatcagtttctatgctgtaaaatggaaggtatgcaaattaaaaaaataatattgtgccagccctaatctcagtatctataaaataaactcttaagtgtttctatggttccaagggatgaataactttattctcaatgaaagtagatgatttgtacaatgtctgggtactctatatgatatttaagatgccatcaaaataattcacaatttgattttttttgcttttttggtgcaaggcaaaataattgtggcaaatgcctaaggagagcttgttaagcctttttaaaaaatcagtctcatgcaagkcaataactgtagattcaaaagtctttacataacttttaaatgtttccattttaattattgggattaggacttgggtaattagaatgctggttttaagagctcatttc

SEQ ID NO: 632117 - DNA, 659 bp, Homo sapiens
actatgttacaaaaattgcattcagtctaaagctccactgaacacacagccccattgaaatggagtgaggttaggtgtaatgagcagaagggaaagtacaaacgccagaaggggaaaagcaaactatttttttctttgacctccaaaagaaggaactattccataggaataagaaccagaggaacagaatgtactggaaaaggcagcctattgcygtggtgaaaagtcagctggtttcaggccctcgtttccagcttccagctgtacctgttattgtagaccattcaaggaactcatctaagcccaatatctgcatctgaaagatggagatgtaatatctgtgttacctactccacaaagctgttgtaagaatgcaatgagatggtggaaaatagcctggcctctgttttctccctctcctttccatgccactttgttagcttccatagcgaacaaatcatcagctgcaattatactcctgtttgcctctctccaatagacccagcattagggagcacaggaagtctgcctttttcttcatctgcaatacctagtactgtgtctgtttcatatttgttcatcggcagatgagttaactgacagatcagaccaaatgaatttttgaacactgtaatttatataagtgagtggagctttat

SEQ ID NO: 632118 - DNA, 659 bp, Homo sapiens
actatgttacaaaaattgcattcagtctaaagctccactgaacacacagccccattgaaatggagtgaggttaggtgtaatgagcagaagggaaagtacaaacgccagaaggggaaaagcaaactatttttttctttgacctccaaaagaaggaactattccataggaataagaaccagaggaacagaatgtactggaaaaggcagcctattgccgtggtgaaaagtcagctggtttcaggccctcgtttccagcttccagctgtacctgttattgtagaccattcaaggaactcatctaagcccaatatctgcatctgaaagatgsagatgtaatatctgtgttacctactccacaaagctgttgtaagaatgcaatgagatggtggaaaatagcctggcctctgttttctccctctcctttccatgccactttgttagcttccatagcgaacaaatcatcagctgcaattatactcctgtttgcctctctccaatagacccagcattagggagcacaggaagtctgcctttttcttcatctgcaatacctagtactgtgtctgtttcatatttgttcatcggcagatgagttaactgacagatcagaccaaatgaatttttgaacactgtaatttatataagtgagtggagctttat

SEQ ID NO: 632119 - DNA, 602 bp, Homo sapiens
gattttccactacagaagtgaaaatttaactttcatatctaatccctctctcttatacatgtttctcctttctcaattctcccaatatcactatttttgattaaatattcaacatttattttgacagtgtaaattttatttatagctttttttttgcacaactttttgttttctcaagaattagtaattctaattttttcttattttctattaatgtctattaattttttctttttttttttttttttgagacagagtctcactctgttcgcccaggctggagtgcagtggcatgatctkggtttactgcaacctctgtctcctaagttcaagcaattctcctgcctcagcctcccgagtagctgggattacaggcacgtgccaccatgcctggctaatttttgtatttttagtatagatggggttttgccacgttgcccaatctagtcttgaacttctgggctcaaacgatccacctgcctcggcctcccaaactgctgggattacaggtgtgagccatcaagcccagcctattaatcttattttctattaatttttttattatctattaatgaatatcccaaatttatccccaaaccaac

SEQ ID NO: 632120 - DNA, 584 bp, Homo sapiens
attcatttattattattattttttttttttggtcatttgcaaagcatacaattttagctaygaagcattaacctcccccaaatggtctatttattcttgaggctaaaggcctgcttactttgcagaataattttcttttctacacagattttttaaatagatgagaataaagaactagcaggcaactcagggtgcaggaaaatctttggggtggctagaggtgtgggatttgtggattttaaaaggttatgataaaataaaacaaaatcttttaaaaatgtttcccttaaatgtagaagaaaaaagtatattttaaaaatgtataaacatttcatttaaaaatgtcttgccacattgatggcttcattctatcattaatttctcaaagacacaaagatatttgcccagagagggcaagcttcattattaactatattgtgatcgcttctagtttggggagtagacttcttgtcagatctgattagatagtctcagctgttaggttgggactgagagctcatactaggagcattaattttgctattttctgttggttatttgtgcttgaattattgtctatattc

SEQ ID NO: 632121 - DNA, 584 bp, Homo sapiens
attcatttattattattattttttttttttggtcatttgcaaagcatacaattttagctacgaagcattaacctcccccaaatggtctatttattcttgaggctaaaggcctgcttactttgcagaataattttcttttctacacagattttttaaatagatgagaataaagaactagcaggcaactcagggtgcaggaaaatctttggggtggctagaggtgtgggatttgtggattttaaaaggttatgataaaataaaacaaaatcttttaaaaatgtttcccttaaatgtagaagaaaaaagtatattttaaaaatgtataaacatttcatttaaaaatgtcttgccacattgatggcttcattctatcattaatttctcaaagacmcaaagatatttgcccagagagggcaagcttcattattaactatattgtgatcgcttctagtttggggagtagacttcttgtcagatctgattagatagtctcagctgttaggttgggactgagagctcatactaggagcattaattttgctattttctgttggttatttgtgcttgaattattgtctatattc

SEQ ID NO: 632122 - DNA, 527 bp, Homo sapiens
ggagggatagcattaggagatatacctaatgttaaatgatgagttaatgggtacagcacaccaacatggcacatgtatacatatgtaacaaacctgcacgttgtgcacatgtaccctaaaacttaaagtataataaaaatatatatgtgtatatatatgtgcatatttgtgtgtgtttatatatgtatgtgtcatatatatgcacacatacatgtaaaaatatacctcatayatgtatgtaccatagaaaagagaacactacagctaaaagtaccagtctacagtgagagaggtatttggatgcacaggccataaactttccctttttcaggacttagcttctatatctcacaagctcagtcaatgcctcaagcaatgctaatcaaattctggaacaactacacgttcctgcaccttctgctcttcaaaagcaatggaaagtgggtcatgctgaataaaaagtttgactaacttgtctgaaagtcagacttggagtctagcccgaatttgcctcaatgaactatgtg

SEQ ID NO: 632123 - DNA, 565 bp, Homo sapiens
gttggtgtgtaccctcatcagaaatgttaaaaacagtcaattctagtgtgtgaagggcccaaaggcaggctagtcctaaaagaaatggcataagccaggcacagtggcatgtgcctgtagtcccagctatttgggtggctgaggcagcaggatcacrtgaggccaggagttcaaggacagcctgagcaacattgcaagatctttcctctaaaaaattaataaacttaaaaaaaaaaaagaaatggaacagtcaacccaaccctccttctcctatatttacagagagaccacatacttaaacaaatataagcatgcttaacaatgcaatgagacaagtaaccagagggaagggtctgtggaagtggcccagcagccggccatgtgtgttgggggcagtgaaggtcactcctaattttgtattaaaataaaatatgagtaaagattttaaaaatgtatgaaattatgttgagcatttttccatacatagctagttactagaaaaacaaaaagtatgatttttttgtactattagaattaagtgtgtttattccaaattctcttctca

SEQ ID NO: 632124 - DNA, 565 bp, Homo sapiens
gttggtgtgtaccctcatcagaaatgttaaaaacagtcaattctagtgtgtgaagggcccaaaggcaggctagtcctaaaagaaatggcataagccaggcacagtggcatgtgcctgtagtcccagctatttgggtggctgaggcagcaggatcacatgaggccaggagttcaaggacagcctgagcaacattgcaagatctttcctctaaaaaattaataaacttaaaaaaaaaaaagaaatggaacagtcaacccaaccctccttctcctatatttacagagagaccacatacttaaacaaatataagcatgcttaacaatgcaatgagacaagtaaccagagggaagggtctgtggaagtggmccagcagccggccatgtgtgttgggggcagtgaaggtcactcctaattttgtattaaaataaaatatgagtaaagattttaaaaatgtatgaaattatgttgagcatttttccatacatagctagttactagaaaaacaaaaagtatgatttttttgtactattagaattaagtgtgtttattccaaattctcttctca

SEQ ID NO: 632125 - DNA, 619 bp, Homo sapiens
ggtttctggctccagaatcctgtcttctattttctacctccttctaatgttaagacaaagaaaattttgcataatctttgtttttcttttgtcttctttttctctttttgagacaggtatcactctgtcaccgaggctggagtgcagtggcgcaatcacagctcattgcagcctcgacctcctgagctcaggtgayccacctcagcctcccaaacaactgggactacaggcatgtgccaccatgcctggctgtttttctttttttaaaactaggattacttccttaagtacttttctttctaacacatagagacacctgagcttgtagtagtttactacctacaagtatctagtattaaaaaaaaaacactatgcatatttcaatactaaatgtggtagataaaaataattaaacaaatgtggtagtgggagggggcataatggggaacaaagcacaatgaataggttcttatatcaaatacttaacatttattccccaaattgtttcaatccagatcactcgtggatagcatttttgagacaccaaaggatttgaatatgaaattattgcttcagagcaaggaagtcttattaacaatttcatgtggtttaacgacca

SEQ ID NO: 632126 - DNA, 619 bp, Homo sapiens
ggtttctggctccagaatcctgtcttctattttctacctccttctaatgttaagacaaagaaaattttgcataatctttgtttttcttttgtcttctttttctctttttgagacaggtatcactctgtcaccgaggctggagtgcagtggcgcaatcacagctcattgcagcctcgacctcctgagctcaggtgatccacctcagcctcccaaacaactgggactacaggcatgtgccaccatgcctggctgtttttctttttttaaaactaggattacttccttaagtacttttctttctaacacatagagacacctgagcttgtagtagtttactacctacaagtatctagtattaaaaaaaaaacactaygcatatttcaatactaaatgtggtagataaaaataattaaacaaatgtggtagtgggagggggcataatggggaacaaagcacaatgaataggttcttatatcaaatacttaacatttattccccaaattgtttcaatccagatcactcgtggatagcatttttgagacaccaaaggatttgaatatgaaattattgcttcagagcaaggaagtcttattaacaatttcatgtggtttaacgacca

SEQ ID NO: 632127 - DNA, 667 bp, Homo sapiens
ctttggtagctacaggtgttctgctataaatatgaagattggtacatgatcatttggatcacgattcattcttaagtgattaattcaaagctcctgggtagatatgtgaaataaactagtaatgcaaaccctcattattaaattttgaaaaacacaattaggcaggagggttccaaaataagccatgtgcctartaaatatattgttgactggtgggactagctttgtaaaggcaggttgtatcttattcacctctgtactgtcaactacttgtcccatgcctggcacaaataggtgcttaaagaatgtttgttaaagtaaaaggagctgctaacctgcttcctcattttgtttcacaataactgaacctcccaacttaagtctatgaaaagaaaacacccagaagaatcattttttaaaagataattgtatgataatacctttttccacaaaattcaaatacagagtgatcttttgtcctaaatcatccactacttcttttccattgagggtaacataggctctcttagattcttctgtagttctgtatcttgcaaatgagtacggcttgttaggtggcattaagagagcatccaccagtccacatttctctaaaaccgggagcagctggttccgactcacaccattacccaaaccaccattggca

SEQ ID NO: 632128 - DNA, 552 bp, Homo sapiens
tgtactgaattgaaggccgagacagcagctatgccactctttactcctcatcccaatggacaaaagtcaaagaaaagaattactgtattcctagtgataattgaacctgatgactatgaaaagttaggaatgctgccccacaataagggtaagaagtctaaggaattcccagaatccagagatccactgagacttctctctgtgcttccatgcccaattataagagcaaatgagcagctggatgcaatggctcatgcctgtaatcccagcactttgggaggccgaggcaggcagatcacctgaggtcaggagttagagactagcctggccaacatgatgaaaccctgtctctactaaaaatacaaaaattagccaggagtggtggcacatgcctgtgatcccagctacccggcaggctgmggcaggagaatcgcttgaacctgggagtcagatgttgcagtgagctgagatcatgccatcattgcactccagcttgggtgacaagaatgaaactctctctcaaaaaaaaaaaaaaaaaaagaagaagaccaa

SEQ ID NO: 632129 - DNA, 579 bp, Homo sapiens
tgtgcactacatcttcattctccttcctacttcaaaacattgctccacgaagtcttctctcattcttgttttatcaaacttcccttttttattagattgattgcaacatcataaaatacactggtatttctctcatcttaaaaacaataacctttctttaatccagatttcctcttcaactaatgatgtattattatcgctttcttatagcactcttgaaagcattctctactagatctttctaatatgtcttcccattctttcttcttttaaaaaatgtttcatgagatataattttcataccataaaattatataaaattcaaacttttagcatgcacaaagttgtgtaagcattagcaaaatctaagtttagaatatttttattacccccaaaaaacctgccaattagcaataatttcctatttatctacatcctctatccccaggcccaggaaatcagaaatatactttctatttctataaatttttcctattctggtcttttcatataaatgaaaagcatacaatatgtggtcatttgtgactggctycttttacttagcatagtgttttcaag

SEQ ID NO: 632130 - DNA, 549 bp, Homo sapiens
ggtaaaacgccacaggaggaacataatcttcatcaaaataccaccatcattcttcacagaattagaaacaaacaaaattgtaaaattcatatggaaccaataaagagcccacatagccaaagcaagactaaacacaaagaacaaatccggaggcatcacactacctgacttcaaactatgttataaagccatagtcaccaaaacagcatggtactggtataaaaataggcacatagaatggaacagaatagataacctggaaataaacccaaatacttacagccaactgatctttgacaaagcaaacaaaaacataaagtggggaaaggacacccttttcaamaaatagtgctgggataattgggtagccacatgtaggagaatgaaactgtattctcatatctcaccttatgcaaaaatcaactcaagatggattatggacttaaatctaagacttggaactataaacattctagaagataacattggaaaaccccttctagacactggcttaggcaaggatttcatgaccaagaacccaaaagcaaa

SEQ ID NO: 632131 - DNA, 549 bp, Homo sapiens
ggtaaaacgccacaggaggaacataatcttcatcaaaataccaccatcattcttcacagaattagaaacaaacaaaattgtaaaattcatatggaaccaataaagagcccacatagccaaagcaagactaaacacaaagaacaaatccggaggcatcacactacctgacttcaaactatgttataaagccatagtcaccaaaacagcatggtactggtataaaaataggcacatagaatggaacagaatagataacctggaaataaacccaaatacttacagccaactgatctttgacaaagcaaacaaaaacataaagtggggaaaggacacccttttcaaaaaatagtgctgggataattgggtagccacatgtaggagaatgaaactgtattctcatatctcaccttatgcaaaaatcaactcaagatggattatggacttaaatctaagacttggaactataaamattctagaagataacattggaaaaccccttctagacactggcttaggcaaggatttcatgaccaagaacccaaaagcaaa

SEQ ID NO: 632132 - DNA, 389 bp, Homo sapiens
cttttcaagacatagtacaataaagtataaatagaaacaacaaaaaattacaaagttaggggaacaaagttaaggcatagagtttttattaactttctttttgcttatttgtttatggagaaactgttaagttgttatcagcttaaaataakgagctataaaatagtatttgcaagcctcatggtaatctcaaaccaaaatcatataacacatacacaaaaaaattaaaaagcaagaaactaaatcatatcaccagagaaaatcaccttcagtaaaagaaagaaacaaaagaaggaagagaaatctataaaacaaccagaaaacaaataacgaactggaaaaagtaagtctttacttatgaataataatattgaatgtaaacggaccaa

SEQ ID NO: 632133 - DNA, 389 bp, Homo sapiens
cttttcaagacatagtacaataaagtataaatagaaacaacaaaaaattacaaagttaggggaacaaagttaaggcatagagtttttattaactttctttttgcttatttgtttatggagaaactgttaagttgttatcagcttaaaataatgagctataaaatagtatttgcaagcctcatggtaatctcaaaccaaaatcatrtaacacatacacaaaaaaattaaaaagcaagaaactaaatcatatcaccagagaaaatcaccttcagtaaaagaaagaaacaaaagaaggaagagaaatctataaaacaaccagaaaacaaataacgaactggaaaaagtaagtctttacttatgaataataatattgaatgtaaacggaccaa

SEQ ID NO: 632134 - DNA, 550 bp, Homo sapiens
gcctttcctctaagatcagaaacatgacaaagatgcccactttcaccactgtttattcaacatagtactggaaggcctagctagagcaaccgaacaagagaaagaatgaaaaggcatccaaattggaaaggaagaaattaatttattcttgtttgtggatgacatgatcttacatttggaaaaagctaaagactccaccaaaaaactatttgaactaataaaaaaaattaktaaagttgcaggataccaagtcaacatacaaaaattcatagcatttgtatacccaaacagtgaacaatctgaacaacaaatttaaaaagtaatcccattcatagtagccacaagtaaaattaaatacctatgaattaacttaaccaaacaagtgaaaaatctctacaatcaaaactattaaacactgatgaaagaaatggaagagggcaccaaaacatggaaagattctatgttcatggattggaagaaacaatattgttaaaatactcatactgcccaaggcaatctacagattcaatacaatccctatcaaaatacc

SEQ ID NO: 632135 - DNA, 578 bp, Homo sapiens
tatttctcctctgctcagtaccctgtaatggctcttcaatctgctctacggaaaagccaaagtccttactgtgtcctacaaggtcccaggttctcccctctctttacctttcttatctcacttcctcctagtccccactcctcagtctttccatttctctcatcctgacctccttgctgtctcccaaagaccccacatctgcacctggctcaggcctctgcacttgctgtttcctctgctcaaagcatccttatccctgttggccataygattagttcccttactttcttcatagctttattctgaaatcaccttctcagggaggctttccaggtcattctactgaaaatattagtagaattagtagaattcatatctctcatgcctgcttgattctttctcattaccacctacatgtaacattctgtatattttaatcatcaatcttatttattttctgtctccctaactagaatgtgactccctaagtgtggacttttgtctgttgttcattgatatattacaaacaactagaaaagcatgtaatgcatagtaggtgtccaataaatacatacttg

SEQ ID NO: 632136 - DNA, 437 bp, Homo sapiens
gcctccataccccttcctcctggtcakacagttattccctcaggcatttgctaagaaagataatatagccaattaattgtgccaagattccagtaaaagctaatggattgatgattgaatattaaattgtaagttactacatattttttaattcaggcaactaagtaacctcatgctgtgggaagaaaatttaagggtaagaaacccaagcagaaagtactgtttagtggttgcctgattgctatgatatagaagattttgacctcagggtgaattaatttatcagattacttcctgagaatagaaagaggatttcttaagaagagaattaaggagaagagcatggatatactggacgcctgagaagaggtaactccactaaaggaatgaaatgggcatcagggtgacaccatcaccaaagacagttttggggaaag

SEQ ID NO: 632137 - DNA, 437 bp, Homo sapiens
gcctccataccccttcctcctggtcatacagttattccctcaggcatttgctaagaaagataatatagccaattaattgtgccaagattccagtaaaagytaatggattgatgattgaatattaaattgtaagttactacatattttttaattcaggcaactaagtaacctcatgctgtgggaagaaaatttaagggtaagaaacccaagcagaaagtactgtttagtggttgcctgattgctatgatatagaagattttgacctcagggtgaattaatttatcagattacttcctgagaatagaaagaggatttcttaagaagagaattaaggagaagagcatggatatactggacgcctgagaagaggtaactccactaaaggaatgaaatgggcatcagggtgacaccatcaccaaagacagttttggggaaag

SEQ ID NO: 632138 - DNA, 574 bp, Homo sapiens
atatgctatgcccaaatgtgaagactggttgaaaaaggaaacctatgcaagagaccaagagtatctggagacagaagaggagaatagagtgaccataaagataaaggaagagagtttcaatgaaggaatgtcaaatacataaagagaccaagaatgagattttcaaagcctgaacatgttcattgaatttaacaatatagagatcattgtgaccttgctaagaatacatttaatgaagtgataggcctaagtgagtcaagaaaggcacccaaggaggaaaatttaaggcggcactcactctcaaagttgtgcaaacatggggtcagcacctgagagtgagagcagccttaaatctggcacctgaggtgcctcactggcttcacccaagtcccatgcaggctaaggagtaaatgagaggagaagaaataaagttaacaagtgtacgctgactgcactgactcaggccttacactcctttgtcctgtaaatcaccctgaagaagtaggtttaagccaccgtattttgtcttttttttwaaattattatactttaagttctagggtacatgtgcaca

SEQ ID NO: 632139 - DNA, 595 bp, Homo sapiens
actaaaaagcttatgcaagcatagaaaataatcaaccaaatgaaaaggcaacttatggaatgagagaaaatattgatgagtcatacatttgataagggatcagtatccaaaatatataagaaactcaactcaatagcaagaaaacacataacttgactttaaaatggacaaaagacctgaaatggcatttctctgaagaagacatacaagtggccaagtatatgaaaaaatactcaacawcaataaccatcagggaaatgtaaatcaaaaccacagtgagatatcaccacccattggttagggtggctactatcaaaaagacaagacatagcaagtgttggtgaggatgtggagaaaaggaaactcttggacactcttggtgggaatgtaaactagaacagacattgtggaaaacagtatggaagaagtaaagtcagcaagtgtatgtttaatttctcaaagaattacaaatgtaactaccatatgatctgagtacacattcaaagaaaataaaatcaatttgttgaagagatatctcagccttatgttcattggagcattatttacaatagccaagataaggatgcaacctgtg

SEQ ID NO: 632140 - DNA, 668 bp, Homo sapiens
acaaaatttcagttagacaggaggaataagctcaggagatccaccktactctgtggtgactctagttaataacaatgtattgtatacttgaaaattgctaagatggttgagtttacatgttctcaccacaaaaaaaaagacatgtatatcaggtaatgtgtatgttaatttgcttgatgttgccatttcaaattgtaggtatgtatcaaaacttcatgctgtataccataaatatatgcaatatttgtcaattgaaataataataatttctaaaataaaacaaactttttaaaaagggagcttgtctgtgaaacaaaggaaaaagctcagatattagaacaaggctcatttgagctatatataacggaatgaaaggagaaaatattaatgagctactctgactaacttggccagcttatttgtcttattgatttgtttctaaagagctctggacttgcaagacaagagatgtaatgcttgcctaacagctggttgttcaataagtcttagttttcttccctaaaatgtggaaatgtaaacatttatctacttatctcataggatggatggttatattgaaagacaagttattacactgaaaagtgaaaatgtgagatgttaataattgtgaatcatatcaattataagagtaatgatttatatttact

SEQ ID NO: 632141 - DNA, 668 bp, Homo sapiens
acaaaatttcagttagacaggaggaataagctcaggagatccaccgtactctgtggtgactstagttaataacaatgtattgtatacttgaaaattgctaagatggttgagtttacatgttctcaccacaaaaaaaaagacatgtatatcaggtaatgtgtatgttaatttgcttgatgttgccatttcaaattgtaggtatgtatcaaaacttcatgctgtataccataaatatatgcaatatttgtcaattgaaataataataatttctaaaataaaacaaactttttaaaaagggagcttgtctgtgaaacaaaggaaaaagctcagatattagaacaaggctcatttgagctatatataacggaatgaaaggagaaaatattaatgagctactctgactaacttggccagcttatttgtcttattgatttgtttctaaagagctctggacttgcaagacaagagatgtaatgcttgcctaacagctggttgttcaataagtcttagttttcttccctaaaatgtggaaatgtaaacatttatctacttatctcataggatggatggttatattgaaagacaagttattacactgaaaagtgaaaatgtgagatgttaataattgtgaatcatatcaattataagagtaatgatttatatttact

SEQ ID NO: 632142 - DNA, 668 bp, Homo sapiens
acaaaatttcagttagacaggaggaataagctcaggagatccaccgtactctgtggtgactctagttaataacaatgtattgtatacttgaaaattgctaagatggttgagtttacatgttctcaccacaaaaaaaaagacaygtatatcaggtaatgtgtatgttaatttgcttgatgttgccatttcaaattgtaggtatgtatcaaaacttcatgctgtataccataaatatatgcaatatttgtcaattgaaataataataatttctaaaataaaacaaactttttaaaaagggagcttgtctgtgaaacaaaggaaaaagctcagatattagaacaaggctcatttgagctatatataacggaatgaaaggagaaaatattaatgagctactctgactaacttggccagcttatttgtcttattgatttgtttctaaagagctctggacttgcaagacaagagatgtaatgcttgcctaacagctggttgttcaataagtcttagttttcttccctaaaatgtggaaatgtaaacatttatctacttatctcataggatggatggttatattgaaagacaagttattacactgaaaagtgaaaatgtgagatgttaataattgtgaatcatatcaattataagagtaatgatttatatttact

SEQ ID NO: 632143 - DNA, 627 bp, Homo sapiens
ctgcatagaccccaattccatgctcatggaggccaagagctaattcaaaaggagatttagggtgctgtgaaaacttttacagcagtagcataattttgggatgctattagaaaatgggtacattttgttacttcatgtagaaacatattgctttattcaaagataagagcaatttttggagccctcctcttggtcaacacaggaagtcagttggctggttcagaagagattacttggtgatgcaatctgtgaggctagtctcattcaaaccagggaacagtaacaagagtaacagcagaatggctaagaagccagccaccatgaacccctcactggctgggcaggtgggttctcaatgcattctcaggtctcctgaccgcccggggatggggagaggaaagcgctaacatgcagtccacaatccagtgctctagaagtgtcccagcagtgcccaggactctattctgtgtcacccttagagaaatcttcatccttgggctgttgagcaactcaccctggctgaggctgaggtggggaagmgaagggtaagagcgctcctttcggctctgaatttacttgtcaagcatggtgaacatatgtaaagaaggcagctgaagtgatgggttc

SEQ ID NO: 632144 - DNA, 627 bp, Homo sapiens
ctgcatagaccccaattccatgctcatggaggccaagagctaattcaaaaggagatttagggtgctgtgaaaacttttacagcagtagcataattttgggatgctattagaaaatgggtacattttgttacttcatgtagaaacatattgctttattcaaagataagagcaatttttggagccctcctcttggtcaacacaggaagtcagttggctggttcagaagagattacttggtgatgcaatctgtgaggctagtctcattcaaaccagggaacagtaacaagagtaacagcagaatggctaagaagccagccaccatgaacccctcactggctgggcaggtgggttctcaatgcattctcaggtctcctgaccgcccggggatggggagaggaaagcgctaacatgcagtccacaatccagtgctctagaagtgtcccagcagtgcccaggactctattctgtgtcacccttagagaaatcttcatccttgggctgttgagcaactcaccctggctgaggctgaggtggggaagcgaagggtaagagcgctcctttcrgctctgaatttacttgtcaagcatggtgaacatatgtaaagaaggcagctgaagtgatgggttc

SEQ ID NO: 632145 - DNA, 588 bp, Homo sapiens
ccggactcaaataatgacaggcaggaggccaaaggctttccaactctctttcctgactcagcaaaacccagtgggtccacctgtataccctctgaatatttctgccttagcagtgaaggtactggattgtaagattttggaagccataattctgggagggtccagaacatattcttcattaaggcaaaaagaaatgcacagttccaggggtcacttacatctctgaggagctcagtggtgactgtcttctgtagaacaggactgacaggagatgtaaccatgaaattgaacctcttgatattaagtggagtttcaagtggggtccggagtaagataaggctctgctgcagattcaggctccagttcaaatcatcttgccactcaggcctagatccaatggtatagaagtgttggaggtggataaagaagatatgtagaattgcaagccccacttggagactcaaagcacagatctatgattgtggaggaawaccatgccttctgcagcagaaaattattctcatatgaaaagaagctcataagtaactgaatgagagtaggataccaagtggctatgtgaccagggct

SEQ ID NO: 632146 - DNA, 538 bp, Homo sapiens
ttggaggtggataaagaagatatgtagaattgcaagccccacttggagactcaaagcacagatctatgattgtggaggaaaaccatgccttctgcagcagaaaattattctcatatgaaaagaagctcataagtaactgaatgagagtaggataccaagtgkctatgtgaccagggctgctcatcaaagttggagattgtctgggcaactgattcataagatcaggtggtcaaggaagtaatatctatgtaatagaaattgagcatcaggcctacagaactccaggaggtacaagtaaatgatatgagcaagtggccagacttctacatccccttgctccgtttctctctcaactcacatctataaagagtaaaaaatagttcaagtccaattaaaagactgggactacactatattgggtgctagcaaaaaaaatgaacagctgatacattacagcatcactcaggagtgacaagaagggatcttagcaaaggaaaattctcccagaggtcagagctttaagcactactctgggcta

SEQ ID NO: 632147 - DNA, 538 bp, Homo sapiens
ttggaggtggataaagaagatatgtagaattgcaagccccacttggagactcaaagcacagatctatgattgtggaggaaaaccatgccttctgcagcagaaaattattctcatatgaaaagaagctcataagtaactgaatgagagtaggataccaagtggctatgtgaccagggctgctcatcaaagttggagattgtctgggcaactgattcataagatcaggtggtcaaggaagtaatatctatgtaatagaaattgagcatcaggcctacagaactccaggaggtacaagtaaatgatatgagcaagtggccagacttctacatccccttgctcygtttctctctcaactcacatctataaagagtaaaaaatagttcaagtccaattaaaagactgggactacactatattgggtgctagcaaaaaaaatgaacagctgatacattacagcatcactcaggagtgacaagaagggatcttagcaaaggaaaattctcccagaggtcagagctttaagcactactctgggcta

SEQ ID NO: 632148 - DNA, 546 bp, Homo sapiens
ctcataagtaactgaatgagagtaggataccaagtggctatgtgaccagggctgctcatcaaagttggagattgtctgggcaactgattcataagatcaggtggtcaaggaagtaatatctatgtaatagaaattgagcatcaggcctacagaactccaggaggtacaagtaaatgatatgagcaagtggccagacttctacatccccttgctccgtttctctctcaactcacatctataaagagtaaaaaatagttcaagtccaattaaaagactgggactacactatattgggtgctagcaaaaaaaatgaacagctgatacattacagcatcactcaggagtgacawgaagggatcttagcaaaggaaaattctcccagaggtcagagctttaagcactactctgggctattcacttcctatggaagaaaatttgaaatgtgtgtatgtatatatgtatatatgtgtatatatgtgtgtgtgtatatatatatgtatatatatatatgactcctgagaagtgacaacttacctggctcaagga

SEQ ID NO: 632149 - DNA, 546 bp, Homo sapiens
ctcataagtaactgaatgagagtaggataccaagtggctatgtgaccagggctgctcatcaaagttggagattgtctgggcaactgattcataagatcaggtggtcaaggaagtaatatctatgtaatagaaattgagcatcaggcctacagaactccaggaggtacaagtaaatgatatgagcaagtggccagacttctacatccccttgctccgtttctctctcaactcacatctataaagagtaaaaaatagttcaagtccaattaaaagactgggactacactatattgggtgctagcaaaaaaaatgaacagctgatacattacagcatcactcaggagtgacaakaagggatcttagcaaaggaaaattctcccagaggtcagagctttaagcactactctgggctattcacttcctatggaagaaaatttgaaatgtgtgtatgtatatatgtatatatgtgtatatatgtgtgtgtgtatatatatatgtatatatatatatgactcctgagaagtgacaacttacctggctcaagga

SEQ ID NO: 632150 - DNA, 592 bp, Homo sapiens
aaagcttggtgacttaaatcagcagaaatttcttgtctcatggtctagagtccagaagttggaaatsggtatcactgggttgaaagcaagttgtctgcacctcttccagcttctgcttgctgctggcatttgttggtcttgtgaccacatcactccaatctgtctccttcttcatatcatgtgctcctcagtgtgtgtggaatctcccactgtctccttcttctaaggacacttgtgattttatttaaggccctcctggataattcaggataatctccctatttcaagatccttaacttagtcacacctgcaaagactattttttcatataaggtaatatttacaggttccagggataaggatctgatatctttgggggttggggtgcattaccaatctaccatgatctgggacaggtaggttttaggaagacatttgttgggggtattatcagcctaccacaatctgggtccggtagactttaggaagacatttgtagctgaacctatggaaatggacgcaaaaggtacaaggatctttgtgtctcgtgttgctgcccaccaagatgtattcacctcagaaaaggttctca

SEQ ID NO: 632151 - DNA, 592 bp, Homo sapiens
aaagcttggtgacttaaatcagcagaaatttcttgtctcatggtctagagtccagaagttggaaatgggtatcactgggttgaaagmaagttgtctgcacctcttccagcttctgcttgctgctggcatttgttggtcttgtgaccacatcactccaatctgtctccttcttcatatcatgtgctcctcagtgtgtgtggaatctcccactgtctccttcttctaaggacacttgtgattttatttaaggccctcctggataattcaggataatctccctatttcaagatccttaacttagtcacacctgcaaagactattttttcatataaggtaatatttacaggttccagggataaggatctgatatctttgggggttggggtgcattaccaatctaccatgatctgggacaggtaggttttaggaagacatttgttgggggtattatcagcctaccacaatctgggtccggtagactttaggaagacatttgtagctgaacctatggaaatggacgcaaaaggtacaaggatctttgtgtctcgtgttgctgcccaccaagatgtattcacctcagaaaaggttctca

SEQ ID NO: 632152 - DNA, 584 bp, Homo sapiens
gcccaagttggtaggtttggggagatttgggttagagattgtgagatacgaagttggtaaaaggggaaaagaaatccctattgraacaagcatcccacatcttcttgaatcagtctcttagtcatgagaataggtccgttcagttaaacagttgtgctccctatgatggcattgcagatgggctcttgtaagggccaaggaaaacccccccccctttgacctctgaaggatcactgaaaaatcactgactaaaggcaggttaatagaagaaaaggcatataaatttattgggtcatagttttatgtgacatagcagccttctaatgaagacctaaagatgcagggaaagttgtccatttttatgctaggtttaacaatgtatggacagccatgtagaatatgattggacaaaaatgtgtaatataatggtaatagactgagcggggaaatgcagcaaggcctgcctggttagattcttcttggcctttctgcggagcattccttccttctgagtctcgggcagggccctctctggaatggaggtcttgggacctacaatgaaacaagacagatcaggtaatttc

SEQ ID NO: 632153 - DNA, 584 bp, Homo sapiens
gcccaagttggtaggtttggggagatttgggttagagattgtgagatacgaagttggtaaaaggggaaaagaaatccctattggaacaagcatcccacatcttcttgaatcagtctcttagtcatgagaataggtccgttcagttaaacagttgtgytccctatgatggcattgcagatgggctcttgtaagggccaaggaaaacccccccccctttgacctctgaaggatcactgaaaaatcactgactaaaggcaggttaatagaagaaaaggcatataaatttattgggtcatagttttatgtgacatagcagccttctaatgaagacctaaagatgcagggaaagttgtccatttttatgctaggtttaacaatgtatggacagccatgtagaatatgattggacaaaaatgtgtaatataatggtaatagactgagcggggaaatgcagcaaggcctgcctggttagattcttcttggcctttctgcggagcattccttccttctgagtctcgggcagggccctctctggaatggaggtcttgggacctacaatgaaacaagacagatcaggtaatttc

SEQ ID NO: 632154 - DNA, 584 bp, Homo sapiens
gcccaagttggtaggtttggggagatttgggttagagattgtgagatacgaagttggtaaaaggggaaaagaaatccctattggaacaagcatcccacatcttcttgaatcagtctcttagtcatgagaataggtccgttcagttaaacagttgtgctccctatgatggcattgcagatgggctcttgtaagggccaaggaaaacccccccccctttgacctctgaaggatcactgaaaaatcactgactaaaggcaggttaatagaagaaaaggcatataaatttattgggtcatagttttatgtgacayagcagccttctaatgaagacctaaagatgcagggaaagttgtccatttttatgctaggtttaacaatgtatggacagccatgtagaatatgattggacaaaaatgtgtaatataatggtaatagactgagcggggaaatgcagcaaggcctgcctggttagattcttcttggcctttctgcggagcattccttccttctgagtctcgggcagggccctctctggaatggaggtcttgggacctacaatgaaacaagacagatcaggtaatttc

SEQ ID NO: 632155 - DNA, 584 bp, Homo sapiens
gcccaagttggtaggtttggggagatttgggttagagattgtgagatacgaagttggtaaaaggggaaaagaaatccctattggaacaagcatcccacatcttcttgaatcagtctcttagtcatgagaataggtccgttcagttaaacagttgtgctccctatgatggcattgcagatgggctcttgtaagggccaaggaaaacccccccccctttgacctctgaaggatcactgaaaaatcactgactaaaggcaggttaatagaagaaaaggcatataaatttattgggtcatagttttatgtgacatagcagccttctaatgaagacctaaagatgcagggaaagttgtccatttttatgctaggtttaacaatgtatggacagccatgtagaatatgattggacaaaaatgtgtaatataatggtaatagactgagcggggaaatgcagcaaggcctgyctggttagattcttcttggcctttctgcggagcattccttccttctgagtctcgggcagggccctctctggaatggaggtcttgggacctacaatgaaacaagacagatcaggtaatttc

SEQ ID NO: 632156 - DNA, 528 bp, Homo sapiens
caaataggatgagttcctcttttttgaggtcccctaaatatcccgagkttcctgggcctgtcagaaagtgacgttctttacttgccacaaggaaccttgttagagaaccacgtaaacaagatactaggcttgtgttttcccaagtctattggtcttataaattcaacctcagttcctcaaagcaatctggtcatgtttgagaatattacattccagtcagagccatggtaaaataaccaatgtctccaattgtgttctgttacaaaagaaaacagattcttactgaatttatacaaacatttatgttgccataaaataagaatactcatgaatagtattcaaattctggaaggatcaggtagagagaaaagtaaataagttttgctcacagatactttttacccaattgctacaagctatagataactttgaaagaaaaaaagttttcttgactctggaaaacaaaatataaaaagaatcaataatgttttaaacaaaaaaaggcaaaaaagtcattttagttttcca

SEQ ID NO: 632157 - DNA, 514 bp, Homo sapiens
aaaaatacaaaaattagccaagcgtggtggcgggtgcctgtaatctcagctacttgggaggctgacgccggagaattgcttgaacccaggaggcagaggttgcagtgagccgagatcatgccactacactccagccggggtgacagagtgaaactccgtctcaaaagagtacttgctgcagtcttttccataaatgtccttgaagacacaatactaagatttgcaactagcttttaggaaaaaaggcatcaaaataaagcaattaactgtggatgacaagacttaaaatggccatgattaaagacacaattgacaaggaaatttggttattttctataaaaatttaaccaaatagtcataattatgacataaaatataccaaggcatatcaacattttaggaatcatataattttggaacacctgttaataatatgcatatacaagataaytcaaagaaggttaaacatcatttctttactactacagtttttgcttcctattaatactacaca

SEQ ID NO: 632158 - DNA, 495 bp, Homo sapiens
ttttaactctgatttctgcttttttcaaatcctgccaaggaagtttttaaggctatatttctttcataggtactgataagatagctgtttaggacaagagctctcttaagagttctcttttaaatctagccaatttatttattccatcagtgactcaagccaataagccttttccatggaaagtcccatgggtaattttccaggtttacaataccatggtcakaagtggcattttaaaaatggatgcaaaagttgcacctccccagtgatacccgtctcacaaatttagtcccagaaataaactaagatagcaaaagactcttgtcatagacagttacagccgctatttatgcctatagtgtctccagtatctcacaaatttgtgagggtccaccagtcatggacctgttaatctgtgacactggataggccctcctgggattgaactgtcccagttctaaccaggcaacaagagttaaggcaacaaaagcccct

SEQ ID NO: 632159 - DNA, 570 bp, Homo sapiens
  misc_feature 557, 558, 559, 560, 561, 562, 563, 564, 565, 566, 567, 568,569, 570: n = A,T,C or G
cgtctatctttgttgcttctgcttttcctccacttgtgatgagcaaatgtgttgaccaggttctgagactttctggaacagccaaaaggtgattatgatggattttacaaacataaagtaatctcataaaaagagttcttcaaaatagggttaaattctccaaatagggttagatgatgcccttctgtccttgggcctacaaatctattcaatcattgttgctttaagaaaacagtaagaggaaccagttaattgaattacattttttgtaaaacctttaatcccataatattatttaaaggcatccaggatggaagagcactttgatctaattcccttcttgctagacattctgggtcaggctgttcctggttgacttgactaggacacagtgagcagtgctagattcagagaaatggagcacctctattcactctgctgagtagttggccagctagatgacaaaacttccatctctgagacttctttccctccaaatgtgtaatgycaagtggcaatttaatgggaaaagcttctttaaatttcatatttagacnnnnnnnnnnnnnn

SEQ ID NO: 632160 - DNA, 546 bp, Homo sapiens
aattaccatcaaaataccactgtcattcttcacagaactagaaaaaacaattctaaaattcatatggaaccaaaaaagagcctgcacagcccaagcatgactgagcaaaaagaacaaatctagaggcatcatattacctgatttcaaactgtaccataaggccatagtcaccaaaacagcatggtactggtataaaaataggaacatagaccaatggaacagaatagagaacccagaaataaacccmaatacttacagccaactgatcttcaacaaagcaaacaaaaacataaagtgaggaaaggatgccctattcaacaaatagtgcttggataattggcaagccacatgtaggagaatgaaactggatcctcatctctcaccttatacaaaaatcaactcaaggtggatcaaggacttacatctaagacctgaaactataaaaattctagaaggtaacatcagaaaaacccttctagccattggcttaggcaaggatttcatgaccaggaacccaaaagcaaatgcaataaaaacaaagataag

SEQ ID NO: 632161 - DNA, 441 bp, Homo sapiens
gtgttcacacaaagtatccttgccctatgtttttctttggtaaatatctcatacagaaaggtgccatcattttctctaaaagttttctctcctcttcagtcctcagagtgtatttttagtgagctctttggaaaaattttttcaaaaagttaaagaaaaccacaaacagtatatccattcaaagtgcctagtgtcccatcggagctcttggggaagagtaaactctcctagcaagcccaagtgatgctggggcagcctgtagccccaagatctctggtagccccaagatctcttktagccccaagatctctgcctgtagccccaagatcactggtgctgttagcctatctgtattttatcaaggcaattaaatggaatttgctgtgcttcagtctactagtgatttggcaagaaatattaggtatgctgcaaaactcattg

SEQ ID NO: 632162 - DNA, 608 bp, Homo sapiens
ttgacataaatgtatttataatgattgcattaactgggatttgaagctcaaaatgaatatgctttttttttttgagatagggttttgctctgtcacccaggctgataatatacctataaaaagaaagaaggaagttttaaaatgtcttgtgttagagagggttgcttgggatgccattgtttttagattcaccagcacttagccactggaagtcttagacggttcacgtaagaagaaataagtctttattgtaaaggaaattaagcttttctgatggcaaaatatggacttgtgtcatactgttgatatggatacacactatgggtctatggtctctcttttttttttgcaattgaatggtgaagaaaagcaatttcttctttcaaagaaagaagatagaagtgtagatagtgtgctgagcactgcagggaaaaagataaagagagaaaaagagcaagagagacagccagccttggctatcaaattacttccttttacaggaatcaaatctataatggaagagatatkgccgggtttttatacttggtgaagttgttgaaaacctcaaaaaacagagacgattgaagaagtctagtctcaaattaaga

SEQ ID NO: 632163 - DNA, 513 bp, Homo sapiens
cagtgttctggctttagtgctctgatttccctcctctctcccgaagttcaagtcctgtattctgcctcttaattcccctagaatctggcgcttcctttccatcctcacagacactgacttagttcataatttcttgcttgtgctttcaggataacttcctaagtggtctctctgcctcagttcttgtcctcctgtaattagttcttatgcagctgtcagaatcatttatttattttagagacagggtcttggtatgttgcccaggctggagtgcagttggtattcacyggtgtgaccctagtacactgcagcctcgaactcttgccctcaagccatcctcccacctcagtctccttagtagacgggactacaggcatgcaccactattcttggctagaatcgtctatctgacctacagatctggtcatgccagtctcctttgtgaaatcctgtgatggcccctcatcatttacaggatagagcctctgttcttccaggccctttataatatgc

SEQ ID NO: 632164 - DNA, 375 bp, Homo sapiens
gctcctcttgtccttccttgcccccttttctcagccttgggtaagctcaggtctggaaatcacttaggaaaagcagatgargctgactcacaaggttctgggactaaggaggcctggagtcactataactgctctaagaaccacaggaccctgggtggatattcaccaacatggtgaaaccccgtctgtactaaaaatgcaaaaattagctgggcgtagtggcgggtgcctgtaatcccagctactcgggaggctgaggcaggagccaagattgcaccactgcactacagcctgggtgacagagtgagaacccacctcaaaaaaaaaaaaaaaaaattaggaagagtccatagggtcataggaattaactgacag

SEQ ID NO: 632165 - DNA, 544 bp, Homo sapiens
cccaagatctactgctgagaactgcaggggaacatgcagagtgaaacctgggcaggtgtgcctttccctgtggggcttgttagcacttcccatgaagctgccttccctctgaggcccccaggracacgtttgtttgttaaatgattgacattgacctagttctgaccccaggctgcagctccctgggcatctgtctcctgggtctgcctgaccccaggggacaaagacgatgactcccggatcacaggctgcgtaaatacaggcaggtgtcatgccaggggccaggtgagaggaaggcaggtctaagctagagccacacctataacctaaaacacccatggtttgggagccactgagagatccctccatcccccaccacccaaaaaacagggtagattagctctttcaccttttctttccttcaaccattcattcattcaagaaacattattgctaggcaccgtgataccttagtagaacactaaagacattttaatagttttaaattcgatatgaggggaggtgagattcagtgtataattac

SEQ ID NO: 632166 - DNA, 574 bp, Homo sapiens
tctgaaaaaaaaaaaaggcttatttttttggttataaatatacatacatgttccagcaccatttgttgaaaagattatcctttccccattgaggtaccttggcacttctgtagaacctaaaatgaccactgttggggaaatacaatttaaaaaatgaaaatcttcttgcatcccagaaaacctctcactaaggcggtagagaaagacaacagttttattattgaataaacattaaatcagatgtgatgcacatcacaaatccactgagatattgcaaagactgatagaatcttactcccttatgtaggtagccaagccaaggtaaccctttacaatacacacttttaagataaacaattgttagtcctcaagtaagaggacttgacagcaccattwgtcacacatagtttgtcctaactttattatggtaattggggagaccacctgtactggctttatctggaggagaaacaaactgttcttagtcatattgttctgacaggaggtggttctgtaaattggagcaaggtgctcttcagagttaggctcttaccttcctactgggaactgggag

SEQ ID NO: 632167 - DNA, 334 bp, Homo sapiens
catccattatcaggaaaacaaaaggaatagtaggataggccccaaatggcaatgcaaaaggctacctcccaattgctggaagtgttaagcacagactaacactgactgaatgatgactcatagatacacttacacgaacattctttttcattatccgaactccattcagtctcgtctcccactcctgtttggaacgaactgtctccagtgttgggggagttgacctttcaagaaaccaacaggaatttacagatttaaagaaagccctgctaggaacagtgactcaygcctgtaatcccagcacaagaggccaaggcgggcagatcacttgagc

SEQ ID NO: 632168 - DNA, 527 bp, Homo sapiens
gacggataggaaatagtgcaatcatatgtgtcagtattccggtattctaggaacttaagraaatgcatataagggtttgaacatttttttcttcagctcactaaatgaacgaaaggtaggcgtaggcgttaaagagacacataatgtggaacgatgctgtattttcttagctactaaaacttcatttgtcattgactgtctcagggctttaaaattttatgtaggtctatattcagcttttattaaaatagaaaattccttgagctgttgcctttcttcactaaatagagataatttcgtcttcctaaacactcagtctcaaaaatcacctctaaaataggccgggcacagtggctcacacgtgtaaccccagcattctgggagtccaagacaggaggatcacttgagtctaggagttggagaccagcctgggcaacatgggagacctcctatctatttagtaaaatatattttaaaaaataataatgaaatgaaatagtagtttgccccagtttaaggggtaaggt

SEQ ID NO: 632169 - DNA, 527 bp, Homo sapiens
gacggataggaaatagtgcaatcatatgtgtcagtattccggtattctaggaacttaaggaaatgcatataagggtttgaacatttttttcttcagctcactaaatgaacgaaaggtaggcgtaggcgttaaagagacacataatgtggaacgatgctgtattttcttagctactaaaacttcatttgtcattgactgtctcagggctttaaaattttatgtaggtctatattcagcttttattaaaatagaaaattccttgagctgttgcctttcttcactaaatagagataatttcgtcttcctaaacactcagtctcaaaaatcacctctaaaataggccgggcacagtggctcacacgtgtaaccccagcattctgggagtccaagacagsaggatcacttgagtctaggagttggagaccagcctgggcaacatgggagacctcctatctatttagtaaaatatattttaaaaaataataatgaaatgaaatagtagtttgccccagtttaaggggtaaggt

SEQ ID NO: 632170 - DNA, 528 bp, Homo sapiens
gaagttaaagtagattgtttacctgcattgagtgtttagaaaagaaactataaatcaagctcttatctttaaagttaacggacatcagatcatgaaacataaaaggttagtattaaggaaatttgtattagatgttttgcaaggtaacactgtaactgggttttttttttaatgtgtttagaataaatccatgcttttgaaaaccttgttttaatctcctctctaaggctaaatcttctttatgcatttttggctgtatagatccttatttttcacattgagcaaattttaaattctgactagagatattatatgatgtaaagagtaaaacaggcctgccgcggtggctcacgcctctaatcccagcactttgggaggcygagtcaggtggatcacttgaggtcaggagtttgagaccagcctggccaacatggtgaaaacccctctctactaaaatacaaaaattagccaggcatgatggtacacgcctgtaatcccagctactctggaggctgaggcaggagaatc

SEQ ID NO: 632171 - DNA, 523 bp, Homo sapiens
aagggggaaaaaaaaatgttttcttctcagttccttccccgggagagattttaaatgttgatcgcattctcattagagaaatagcgttcatttgagaagaagagytttctcatcctgttcaaaacgattcgtgcacaacacaagagactggagcaacacaatcatcagataaaaccattttggtggtgtccctagcgccctgaaggaagaaacaagggaaagacaagatgacaggaccctcacgcggccgatcacagagggctgtgccacagagcagttgtgccctctgcatccggcacagagacagccaaagaacgcttgctttcttttttaactgaaaagttaaaagttttttaactgaaaagttaaaaacaacgaaattatgccggtgacagttccgatgctagcctccaggggtcgctgttaaatttcgtagctacttcaaccagcaagtctccaaagagccaagtcaaaaacatttttctccagccagagctttcataaccctttccaaatacagaca

SEQ ID NO: 632172 - DNA, 523 bp, Homo sapiens
aagggggaaaaaaaaatgttttcttctcagttccttccccgggagagattttaaatgttgatcgcattctcattagagaaatagcgttcatttgagaagaagagttttctcatcctrttcaaaacgattcgtgcacaacacaagagactggagcaacacaatcatcagataaaaccattttggtggtgtccctagcgccctgaaggaagaaacaagggaaagacaagatgacaggaccctcacgcggccgatcacagagggctgtgccacagagcagttgtgccctctgcatccggcacagagacagccaaagaacgcttgctttcttttttaactgaaaagttaaaagttttttaactgaaaagttaaaaacaacgaaattatgccggtgacagttccgatgctagcctccaggggtcgctgttaaatttcgtagctacttcaaccagcaagtctccaaagagccaagtcaaaaacatttttctccagccagagctttcataaccctttccaaatacagaca

SEQ ID NO: 632173 - DNA, 523 bp, Homo sapiens
aagggggaaaaaaaaatgttttcttctcagttccttccccgggagagattttaaatgttgatcgcattctcattagagaaatagcgttcatttgagaagaagagttttctcatcctgttcaaaacgattcgtgcacaacacaagagactggagcaacacaatcatcagataaaaccattttggtggtgtccctagcgccctgaaggaagaaacaagggaaagacaagatgacaggaccctcacgcggccgatcacagagggctgtgccacagagcagttgtgccctctgcatccggcacagagacagccaaagaacgcttgctttcttttttaactgaaaasttaaaagttttttaactgaaaagttaaaaacaacgaaattatgccggtgacagttccgatgctagcctccaggggtcgctgttaaatttcgtagctacttcaaccagcaagtctccaaagagccaagtcaaaaacatttttctccagccagagctttcataaccctttccaaatacagaca

SEQ ID NO: 632174 - DNA, 529 bp, Homo sapiens
atgtattgttaggtgattgggtcacctagcagaatacttcagtgctgttagggttcccctcacaaatttgtttctcacaattacagtgaaaggtgtgtcctcggaatccctccccacaaggagggcaaacatgccctacatgataaatccactctaatatcctgtgatggttaatattgagtgtcaacttgatcggattgaaggatgcaaagtattgttcctgggtgtgtctgtgagggtgttaccaaaggagattaacatttgagtcaggygactaggagaagcagagtcactctcaatctgggtaggtaccatctaatcagctgctgggataaaagcaggcagaggaacatgaaaggactagactgggtgagtcctccagtctccatctttcttctgtgctggatgcttcctgccctcaaacatcagactccaagttcttcagcttttggactcttgggtttacaccagtggtttgccagggtatctcgggccttcggccacagactgaaggctgcactgttggctt

SEQ ID NO: 632175 - DNA, 529 bp, Homo sapiens
atgtattgttaggtgattgggtcacctagcagaatacttcagtgctgttagggttcccctcacaaatttgtttctcacaattacagtgaaaggtgtgtcctcggaatccctccccacaaggagggcaaacatgccctacatgataaatccactctaatatcctgtgatggttaatattgagtgtcaacttgatcggattgaaggatgcaaagtattgttcctgggtgtgtctgtgagggtgttaccaaaggagattaacatttgagtcaggtgactaggagaagcagagtcacyctcaatctgggtaggtaccatctaatcagctgctgggataaaagcaggcagaggaacatgaaaggactagactgggtgagtcctccagtctccatctttcttctgtgctggatgcttcctgccctcaaacatcagactccaagttcttcagcttttggactcttgggtttacaccagtggtttgccagggtatctcgggccttcggccacagactgaaggctgcactgttggctt

SEQ ID NO: 632176 - DNA, 615 bp, Homo sapiens
tgggttgctcatttatgttcaggttaatgatgtaacccttagagattgcttgagttgctttcgcaacaggtacacactctcctcagttcgtaatcacttttttggaatgttgattgtataaagcataaacataaccctttgccactttcaagcactccacgaatattaactaattaatccatttcataaaacaggaggtttttggctccgtcttggcagcctaactttccagtctcaataacagttagtcacagagccaagggacacattttattaaccttattaacatactttttttaagactagaattccagatgtagaaaggaacagccaaactcagctygcctcaactgaccaccagctgggggcttctgcctctgctcttgtaatagcattattagagctcttcatctgctaatccccagaaagagggtattgtggtgtgaggcagagaatcccggacttggattccatagacaaggagattttaaaaaagaaaaattagttttctaagtgaggtatgtaaaagcccctattatcttttgtcactatcatttcataaaaaaggcaggacatttttttcttttttattatactttaagttctagggtacat

SEQ ID NO: 632177 - DNA, 598 bp, Homo sapiens
ggaaattctgtgaacgtaaaaatagaagcatagaatacctgtggttctatgaagggaaatatatgggaagagggaggagattgtgatagggacctggcttctgaagtggtgacaaagttcttttaacctggtaggagttaccaagggtattggtcttagtgtaattcattaagccctacgtttgtgtgcagaatctgtttctatgttttattttacatgaatttgttgttktttttttaaggaatccagtgtgtaatgtctatataaggtgcttggtttaagaacataacttggtggctgactttcgaacactacctaggctatcctttgcaaataggattagatttattaaatcataattgtcatataccagctgtatgtataactactttgaacacgtcaggctgggcacggtggctcacacctgtaatcccagcactttaggaggcagagggaaggggatcacttgaggccagcagtttgagaccagcctggccaacgtggtgaaaccccatctctactaaaaagtacaaaaattatctgggtgtggtggcgcgcccctgtaatcccagctacctgggaggctgaggcacgagaa

SEQ ID NO: 632178 - DNA, 598 bp, Homo sapiens
ggaaattctgtgaacgtaaaaatagaagcatagaatacctgtggttctatgaagggaaatatatgggaagagggaggagattgtgatagggacctggcttctgaagtggtgacaaagttcttttaacctggtaggagttaccaagggtattggtcttagtgtaattcattaagccctacgtttgtgtgcagaatctgtttctatgttttattttacatgaatttgttgttgtttttttaaggaatccagtgtgtaatgtctatataaggtgcttggtttaagaacataacttggtggctgactttcgaacactacctaggctatcctttgcaaataggattagatttattaaatcataattgtcatataccagctgtatgtataactactttgaacacgtcaggctgggcacggtggctcacacctgtaatcccagcactttaggaggcagagggaaggggatcacttgaggccagcagtttgagaccagcctggccarcgtggtgaaaccccatctctactaaaaagtacaaaaattatctgggtgtggtggcgcgcccctgtaatcccagctacctgggaggctgaggcacgagaa

SEQ ID NO: 632179 - DNA, 607 bp, Homo sapiens
cacatacagttaatatttagaacaagacaagcatggcattggaaaatggttagccttttaaggtttgtaaaatagattttctaaaacaaagaaactaaaattacrgtgttctgaaagtttgtaagttgatgttttgaaaattagaatctgtttttccaggaagtcttttctgtaacataagccttttggcctgatttctaggcagcccgttggagtcttataaaagcctcacaaataggtaaaataatactttggtggtaaaatattttctgactgattatcagtttttgcctggtttttgttaactgctgagctctttgaacaaataaaatatttggcctacaagtgctctgattatgaggtgggtgaacctgtagccttgccagtcaccctcctttcccaccttaccagctcctcactatttaaaaatcactgttttgagttccctgttaggagactcagattctcccaataaggcattgctattaagcttaatttaagtacagaaacttccctaggtttccccacctgcttgctagtggcagtgaaacctgcctcatactctaaccctataggacagtatgaggtatagaaaagcttcaaaaga

SEQ ID NO: 632180 - DNA, 607 bp, Homo sapiens
cacatacagttaatatttagaacaagacaagcatggcattggaaaatggttagccttttaaggtttgtaaaatagattttctaaaacaaagaaactaaaattacagtgttctgaaagtttgtaagttgatgttttgaaaattagaatctgtttttccaggaagtcttttctgtaacataagccttttggcctgatttctaggcagcccgttggagtcttataaaagcctcacaaataggtaaaataatactttggtggtaaaatattttctgactgattmtcagtttttgcctggtttttgttaactgctgagctctttgaacaaataaaatatttggcctacaagtgctctgattatgaggtgggtgaacctgtagccttgccagtcaccctcctttcccaccttaccagctcctcactatttaaaaatcactgttttgagttccctgttaggagactcagattctcccaataaggcattgctattaagcttaatttaagtacagaaacttccctaggtttccccacctgcttgctagtggcagtgaaacctgcctcatactctaaccctataggacagtatgaggtatagaaaagcttcaaaaga

SEQ ID NO: 632181 - DNA, 608 bp, Homo sapiens
cttataaaagcctcacaaataggtaaaataatactttggtggtaaaatattttctgactgattatcagtttttgcctggtttttgttaactgctgagctctttgaacaaataaaatatttggcctacaagtgctctgattatgaggtgggtgaacctgtagccttgccagtcaccctcctttcccaccttaccagctcctcactatttaaaaatcactgttttgagttccctgttaggagactcagattctcccaataaggcattgctattaagcttaatttaagtacagaaacttccctaggtttccccacctgcttgctagtsgcagtgaaacctgcctcatactctaaccctataggacagtatgaggtatagaaaagcttcaaaagattgggggtaataaacaaaaatagtagaaaagggtttgggaaaatgaggagtgttacaatatggagtttgtaacttctttaccttctctgtgctttttttatttcccacccattcacctcactttggcattgggtagggaaagaagaaagcctgtcctatgataggtgctatgccatacttttatatgcattatcacatttgacttgaatctttgaaa

SEQ ID NO: 632182 - DNA, 385 bp, Homo sapiens
agcggatcacctgaagtcaggagttcgacaccagcctggccaacatagtgaaaccccatctctaccaaaaataaaaaaattagttgggcgtggtggcgcatgcctgtaatcccagctactcgagaagctgagcggagatcgtgccactgcactccagcctggatgacagagcgagatcctgtctcaaaaaaaaagcaatcatctgaacttccgttctctgctgtctcccaggtctctgtttaggattatgcaygtgcattgacttattttccttccctgcctcagttcctcatcacctaccagcaattcctgaggttgcttcccatatcaaccaccaacactcaaatccccatcccagttcttcttctggagaaattcaaaccaa

SEQ ID NO: 632183 - DNA, 409 bp, Homo sapiens
agagttttaattcttattacaagagtaggcaaaattaggaaatatgctttgagactaacatgtcawtgttcttttcacctaagcgttctgtcctctgtttcattagcgagatctgagaatgcctgttcctgcaagaagaaggagcagtcctatgtatctgggctgtaatgctgaagagggccaagtggctccctgtgagtccagataaaggatatattattcaagagaaaaacttgtaactactctaaacttaagacagatttatttagtcagctgggaattccagagactcaggcagatacctaagagcatgtttaattgctctaagcccctgattcctgatttcctaattttatatgtatataatggttatcagttctgtagaatagttttatggtaactgacatac

SEQ ID NO: 632184 - DNA, 511 bp, Homo sapiens
tgttttgaaatatgtgtaaataatgaaatgtttagatacagaaaaatgacataggaattaattatcccagatacttatcattttttggtgaaaacacttaaaatctactcttttagtaattttcaagaatatgatatattgttactattagaatctactataggtttcttcaacttsttcttccaatcaaaatgaaattttgtgtactttaaccgaatctctccaacctcttcactctcaacctctgggaactaccattttactctctgcttctttgagtttaaattttttagactccataaaaagtgagattatgtatttatcttgctgtgccttgcttatttcacttaacataatgtcctctagttcatccatgttgtcacaaattacagaattttcttctttgtaatgtctgaatgatatttcattgtgtatatgtaccccattttctttatccgtttatccactgataagatgcttaggctgattctatatcttggctattgtaaat

SEQ ID NO: 632185 - DNA, 593 bp, Homo sapiens
aaatgtttagatacagaaaaatgacataggaattaattatcccagatacttatcattttttggtgaaaacacttaaaatctactcttttagtaattttcaagaatatgatatattgttactattagaatctactataggtttcttcaacttcttcttccaatcaaaatgaaattttgtgtactttaaccgaatctctccaacctcttcactctcaacctctgggaactaccattttactctctgcttctttgagtttaaattttttagactccataaaaagtgagattatgtatttatcttgctgtgccttgcttatttcacttaacataatgtcctctagttcatccatgttgtcacaaattacagaattttcttctttgtaatgtctgaatgatatttcattgtgtatatgtaccycattttctttatccgtttatccactgataagatgcttaggctgattctatatcttggctattgtaaataatgcttaaatgaacaaggaagtgcagatattgatttggtaagttgaattcatttcctttgatatatacccaatagtaggattgctagatcatatggtagttccatt

SEQ ID NO: 632186 - DNA, 581 bp, Homo sapiens
aaaataaaaacaacagtgggtatcataagcaggggagcagagttgttatttgacagaggttcgtaaaagaataacttattaaattacattgwtattccagtcatccagttcattcctggctcccatattacctcctatgccctaggttgtctttattgctaactcagcctgacatctggtatgccaaatgtcaatgtaaagaaaacactggtaatcaatgaaaccacacactatttaaaaagtaaggcaagtaatatgatatgttaaattttgaagatcaatgtgaactcatagccagaaaggaaatatatttaaagctatttcactcataaaagtgctctagtagcagtatcaggggcaaaacactcacccaccaccaactcacttgtgagcacatggcttctactaacatactccactgaagggaaccaagtctcctttgaagatgcctcatttcaggccttgggagtataaaaaatgaagggttgggaatatcctattgccaacaatgttaaaggaataagtgaaaggattataattcaatttaaaggtgcttccactagccaaacttgtgcaaatta

SEQ ID NO: 632187 - DNA, 519 bp, Homo sapiens
gacttcattattctataactatatatttattttaatagtttctctgtccccctttataaactgtaaaatgaggcttaaatattgagtagggctgggcacagtgattcaagcttataattccagcactttgggaggccaaggctggaggattacttgagcccaggagttcgaggccagcttgtgcaatgtagtgaaaccctgtgtttacacaaaatttaaaaaaaatagtcatgcattgtggcttgcacctggagttccagctactgcagaatctaagaaggtatgatcacttgagcccagcaggttgaggctgcatgagccgtgattgcaccaccacacttcagtatgggcagcagcaagaccatgtttcaagacaacaacaacaaaactaaataagagtatggctttattcaccaacaggtgatagaactaagctattcagtctctaaaaccaaggcctgttagtaaaaagataaagaaatagaaaagatagcgtawtacatgccactgaaaaagttt

SEQ ID NO: 632188 - DNA, 523 bp, Homo sapiens
tgtctttcactatatactgaaattaactcaagatggagtcaagatttacatataagacccaaacctgtaaattcctagaggtaaaccaaggtaaaacttttctagacattgacccagggaaagaactgatggctaagaactcaaaaggaatttagaaaaaaacccaaaaatcatcaataggacttaaactaaaaagctttgcacagcaaataaataaataaataaataaatagtgcaaactgataacttacagaatgggagaaaatatttgcaactgtgcatctaagtataaactaatatccaaaatctatrtgcactcaaacaactcaataagaaagaaaattgaataacctcattaaaaagtgggcaaaatgccaacatggtgaaaccctgtctcttctaaaaattaaaaaaaaaaatagctgagcatggtggcacatgcctgtgctcccagctactcaggatgctgaggcaggaggatggctagaacccaggaggcagaggttgcagtgagctgagatgg

SEQ ID NO: 632189 - DNA, 411 bp, Homo sapiens
acatggtgaaaccctgtctcttctaaaaattaaaaaaaaaaatagctgagcatggtggcacatgcctgtgctcccagctactcaggatgctgaggcaggaggatggctagaacccaggaggcagaggttgcagtgagctgagatggcagcactgcgctccagcctsagtaacagaaaaagaccctgtctgtaaaaaaaaaaaaaaaaaagaaaaagaaaaaaaagtgggaaaaggatgaagacataagcagataacattttaaaatgcccagtatcactaattatcacagaaatgcaaattaaaaccacagtgaaatgccatcttacaccattcagaatggttattattaaaaagtcaaaaaaccccaacagatgttggtgagaacgtagagaaaaaggaatacttataca

SEQ ID NO: 632190 - DNA, 423 bp, Homo sapiens
gttctgtactaaacatgtgcaggcattttttcctgtcattactctctaaataatacagtataacaattatgtacatatcattcacatcgtattaggtatcataagtcatctagaattgagctagagtatacaggaggatgtgtataggctacatgcaaatactatgcgattttatacagrggtttcagtatctctggattttggtcctggagggttagggggtccaggaaccactccttatgacaagagatgactgtttcttttttaaaaaatttctccaattataaaattacctcaaatttaacaagaaccaaaagtttgatgacactaatacaatgctaatacaaacttagaatgcattaacagaaccatagtgtcaacatccaggaaacagttatctgtgatcctatttaatacaagtct

SEQ ID NO: 632191 - DNA, 550 bp, Homo sapiens
tttatctctgtgtttttcttgaacttctataatttgaatatttccctcagacctattaatgaataaatatgagaaatttgaatggaattgagaattgagaactatttatctactatgttacttatatgtccatagaaaaaatattctagtcacagtttttgctttttgactttattttttggacaaatataattttgtgggaaataatttcaattatgtgccmaaaagttttgacagtctcatattcttcattctcattttttttttctggtagtacaacattaacacactagtgcacaaggagaatttcatcctccttcaaactctaccccaattctagaacaatggtgttgcatagctaccgacaattttctatattactctgaaatagtataaaagaggtgttcaataggtattttaataggtatttcatatatatttcaattcatatgaaatacctatttgaatttgaaattcaaatgtcatccctatttcaaggtatgaaagaggtattctgttcctcaataaaacaaattaaggaaagcaagag

SEQ ID NO: 632192 - DNA, 590 bp, Homo sapiens
tttcacagtcattcatttaaaattgattgaatgctctctaatagccagatgcactatccatctgacaaacactatctctactcttcaaaagcaatggaagtttattctgtgacatattctatgacataaaaaggcaattgcaataaggcatgataagtgtaatagtggggaagatacaaagttatttagaagtagagaagtgtgaggagaaaatgagtaaattataatatatcatttttgaaaagtctgtgaaatatcaaaaaggaaatgtccactagtttgctgactaatagaaatggratttaaattctttgcaggaagtgtaagttaaaggatagaaaaaaaaccctaatattgagtaagaacactaaggaacagggtgcatggtaagatgataaaggcttgccatgaaaatattaggaaataacactaaataaatggtgttggtggaagagggtagtagaagctgtacgtaaataatataaaaataaatatttgtgataaaagctgaatactatttatgagtcaagaaatacaacacaaaattgatcttgaatttgtcaatcaagagaatactggtggtggtgtta

SEQ ID NO: 632193 - DNA, 590 bp, Homo sapiens
tttcacagtcattcatttaaaattgattgaatgctctctaatagccagatgcactatccatctgacaaacactatctctactcttcaaaagcaatggaagtttattctgtgacatattctatgacataaaaaggcaattgcaataaggcatgataagtgtaatagtggggaagatacaaagttatttagaagtagagaagtgtgaggagaaaatgagtaaattataatatatcatttttgaaaagtctgtgaaatatcaaaaaggaaatgtccactagtttgctgactaatagaaatggaatttaaattctttgcaggaagtgtaagttaaaggatagaaaaaaaaccctaatattgagtaagaacactaaggaacagggtgcatggtaagatgataaaggcttgccatgaaaatattaggaaataacactaaataaatggtgttggtggaagagggtagtagaagctgtacgtaaataatataaaaataaatatttgtgataaaagctgaatactatttrtgagtcaagaaatacaacacaaaattgatcttgaatttgtcaatcaagagaatactggtggtggtgtta

SEQ ID NO: 632194 - DNA, 424 bp, Homo sapiens
  misc_feature 1, 2, 3: n = A,T,C or G
nnngaattcctggatcaaatggtagttctacttttagttctttaagaaatcttcatactgttttccatagtgattgtactagtttacattcccaccagcagtgtaaaagtgttygcttttcattacatccatgccaccgtctgttattttttgattttttaattatggccattcttgcaggagtaagatgatatctcattgtggttttgattgcatttccctgatgattaatgatgctgaacattttttcatacgtttcttggccatttgtatatcttcctttgagaattgtctattcatgtcctttgcccactttttgatgggattatttgttttttcttgctgatttatttgacttccttgtaaattctggctattagtcccttgttggatgcatagttttgaagattttctcccattccat

SEQ ID NO: 632195 - DNA, 616 bp, Homo sapiens
ataattttaaaaaaagtagacagtgttcaaaattgcaggctaatagctaaactactttaaaaaagcatggcacacttagttgaaattgtaatctttaaataaatgatattaaatgctatatgagaggaaaaaagtgacacttcattagttaatcatatattttaggaagacatggaaagaataccagaataaaataaaaattatagaaggaatgaacgcacaaaggaaaaagcaaacattgaaacagaaaaggaaggcaaaatagtgaggattaagaaaagggaaaatgaagtgagccaatttctgtcaaatagaacaatcaggagagaaaacaaaaatgaacaacactcaaaaagaaaatgtgacatagtcaatgggtagagagttttaaagtatcataacgatctgttatgaacaactcaaaactagaatttttaagcaaggcaattgaaataytttttgaaaatataaactgcaaataactcataaagattgtaagagaaagaatataccataagcaaaacaacaaagaatataccgtaagcaaacaaagtaatttaacacatttcaaaattaaatttttaggctcagatcattttagaagatctttaaataa

SEQ ID NO: 632196 - DNA, 516 bp, Homo sapiens
cattataatctgagccaattaattgtcaaattaattacaatttatctcgccacagagaatgacaaagcatagaaaaccaaccagaaaatatcccagtggacttcccccagggcttttaaagcattaaccacaagatttaaggactcttataaaagattgcttttttaccttgctcagactttgctagcttcttaccaaatacttcttaatactttttttttttaccaaaatacttcttaatactttcttttcctcacatagacaatkgctacaacttgactagtgaaatggaactcatggacattaattgtcttcttccctggtgtttcaagaaattgctctcagctccgtaattatctaatactgtaaagtaaccaaagtcagcacttaacgttagtattagatccattactatgtagcttgttttgagtattaataaatttaggcaatgtccaatttttaaattaaaatttaatttgcattaaaaacagtaaaaatattctgagcagaaaatct

SEQ ID NO: 632197 - DNA, 587 bp, Homo sapiens
actatcaggtgataaatttcttttttttaagcactttgttatggcatatccagsaaactaataccgatggggtattatgtttggaatgacatgagttataagcaaactagtgggaaaggaaacttacttgtatacctattctgactaaaacagaagctttaaatagttgcttaaaatttttaaatgtttggttgataatgataattaattttttaggttggccaatttgccacacaatgcaattcagaggccaattttaataaaatgatttgtctttggctattaaagagagtttctcaagttaaaaactattttaaattacatctacaaagcctccattccaacatgacagcaccggctcatctcttcctggttctctccattaagtacaactgtgagcctaggaaataattccataggcaaacaatggagaatattaaaaggtgaaaagaggaaggtatgctaactagagactccaggattagaagacagacataacaacagggcaacttacgagcccacaaaacagaaaacactacagacccagcatttttcaaccttccagtaagccggagagggctgctcag

SEQ ID NO: 632198 - DNA, 587 bp, Homo sapiens
actatcaggtgataaatttcttttttttaagcactttgttatggcatatccaggaaactaataccgatggggtattatgtttggaatgacatgagttataagcaaactagtgggaaaggaaacttacttgtatacctattctgactaaaacagaagctttaaatagttgcttaaaatttttaaatgtttggttgataatgataattaattttttaggttgrccaatttgccacacaatgcaattcagaggccaattttaataaaatgatttgtctttggctattaaagagagtttctcaagttaaaaactattttaaattacatctacaaagcctccattccaacatgacagcaccggctcatctcttcctggttctctccattaagtacaactgtgagcctaggaaataattccataggcaaacaatggagaatattaaaaggtgaaaagaggaaggtatgctaactagagactccaggattagaagacagacataacaacagggcaacttacgagcccacaaaacagaaaacactacagacccagcatttttcaaccttccagtaagccggagagggctgctcag

SEQ ID NO: 632199 - DNA, 587 bp, Homo sapiens
actatcaggtgataaatttcttttttttaagcactttgttatggcatatccaggaaactaataccgatggggtattatgtttggaatgacatgagttataagcaaactagtgggaaaggaaacttacttgtatacctattctgactaaaacagaagctttaaatagttgcttaaaatttttaaatgtttggttgataatgataattaattttttaggttggccaatttgccacacaatgcaattcagaggccaattttaataaaatgatttgtctttggctattaaagagagtttctcaagttaaaaactattttaaattacatctacaaagcctccattccaacatgacagcaccrgctcatctcttcctggttctctccattaagtacaactgtgagcctaggaaataattccataggcaaacaatggagaatattaaaaggtgaaaagaggaaggtatgctaactagagactccaggattagaagacagacataacaacagggcaacttacgagcccacaaaacagaaaacactacagacccagcatttttcaaccttccagtaagccggagagggctgctcag

SEQ ID NO: 632200 - DNA, 587 bp, Homo sapiens
actatcaggtgataaatttcttttttttaagcactttgttatggcatatccaggaaactaataccgatggggtattatgtttggaatgacatgagttataagcaaactagtgggaaaggaaacttacttgtatacctattctgactaaaacagaagctttaaatagttgcttaaaatttttaaatgtttggttgataatgataattaattttttaggttggccaatttgccacacaatgcaattcagaggccaattttaataaaatgatttgtctttggctattaaagagagtttctcaagttaaaaactattttaaattacatctacaaagcctccattccaacatgacagcaccggctcatctcttcctggttctctccattaagtacaactrtgagcctaggaaataattccataggcaaacaatggagaatattaaaaggtgaaaagaggaaggtatgctaactagagactccaggattagaagacagacataacaacagggcaacttacgagcccacaaaacagaaaacactacagacccagcatttttcaaccttccagtaagccggagagggctgctcag

SEQ ID NO: 632201 - DNA, 645 bp, Homo sapiens
cctggctaaataatcagtctaaatttgttatattgtagcaacaattttgcagcatttttcttcattgattattaataactttataaaatttacattcttaggactcaatatgcagccacagaactccaaaggacattctttctggtatttattagagggcatccaactgagcagtgttcacgtatackcttcaaagaaaacaaaatcaaatgaatttgggagatgccagtccatatatacttgctaagctcaaaacccttcatctatatgttttgcaagtaacatttcaactatcctactttgatttctacatttgtcacttaaaacccctgagcatcttagtcatgagggatttgtaaatatttgtaaatatatatatatttatatttaatatataaaatatatatatatattcacattccatatcatctagagatttggaaacagttctataagccagcaattagaagttttcatggcaatcacatatgatgtgaatcaatttatctagaaagagttgagtgtgtaggagtttaaaaaggagcagaaatcattctgtagttatagtacattaggaaatatctatccaaaagataggcaataataaatactggagagaatgtggagaaaagggaacccttgtag

SEQ ID NO: 632202 - DNA, 645 bp, Homo sapiens
cctggctaaataatcagtctaaatttgttatattgtagcaacaattttgcagcatttttcttcattgattattaataactttataaaatttacattcttaggactcaatatgcagccacagaactccaaaggacattctttctggtatttattagagggcatccaactgagcagtgttcacgtatacgcttcaaagaaaacaaaatcaaatgaatttgggagatgccagtccatatatacttgctaagctcaaaacccttcatctatatgttttgcaagtaacatttcaactatcctactttgatttctacattkgtcacttaaaacccctgagcatcttagtcatgagggatttgtaaatatttgtaaatatatatatatttatatttaatatataaaatatatatatatattcacattccatatcatctagagatttggaaacagttctataagccagcaattagaagttttcatggcaatcacatatgatgtgaatcaatttatctagaaagagttgagtgtgtaggagtttaaaaaggagcagaaatcattctgtagttatagtacattaggaaatatctatccaaaagataggcaataataaatactggagagaatgtggagaaaagggaacccttgtag

SEQ ID NO: 632203 - DNA, 585 bp, Homo sapiens
aaggacattctttctggtatttattagagggcatccaactgagcagtgttcacgtatacgcttcaaagaaaacaaaatcaaatgaatttgggagatgccagtccatatatacttgctaagctcaaaacccttcatctatatgttttgcaagtaacatttcaactatcctactttgatttctacatttgtcacttaaaacccctgagcatcttagtcatgagggatttgtaaatatttgtaaatatatatatatttatatttaatatataaaawatatatatatattcacattccatatcatctagagatttggaaacagttctataagccagcaattagaagttttcatggcaatcacatatgatgtgaatcaatttatctagaaagagttgagtgtgtaggagtttaaaaaggagcagaaatcattctgtagttatagtacattaggaaatatctatccaaaagataggcaataataaatactggagagaatgtggagaaaagggaacccttgtagtccattggtggaaatgtaaattcctgcaaccactatggagaacaatttggaggttcatcaaaaaagta

SEQ ID NO: 632204 - DNA, 585 bp, Homo sapiens
aaggacattctttctggtatttattagagggcatccaactgagcagtgttcacgtatacgcttcaaagaaaacaaaatcaaatgaatttgggagatgccagtccatatatacttgctaagctcaaaacccttcatctatatgttttgcaagtaacatttcaactatcctactttgatttctacatttgtcacttaaaacccctgagcatcttagtcatgagggatttgtaaatatttgtaaatatatatatatttatatttaatatataaaatatatatatatattcacattccatatcatctagagatttggaaacagttctataagccagcaattagaagttttcatgkcaatcacatatgatgtgaatcaatttatctagaaagagttgagtgtgtaggagtttaaaaaggagcagaaatcattctgtagttatagtacattaggaaatatctatccaaaagataggcaataataaatactggagagaatgtggagaaaagggaacccttgtagtccattggtggaaatgtaaattcctgcaaccactatggagaacaatttggaggttcatcaaaaaagta

SEQ ID NO: 632205 - DNA, 585 bp, Homo sapiens
aaggacattctttctggtatttattagagggcatccaactgagcagtgttcacgtatacgcttcaaagaaaacaaaatcaaatgaatttgggagatgccagtccatatatacttgctaagctcaaaacccttcatctatatgttttgcaagtaacatttcaactatcctactttgatttctacatttgtcacttaaaacccctgagcatcttagtcatgagggatttgtaaatatttgtaaatatatatatatttatatttaatatataaaatatatatatatattcacattccatatcatctagagatttggaaacagttctataagccagcaattagaagttttcatggcaatcacatatgatgtgaatcaatttatctagaaagagttgartgtgtaggagtttaaaaaggagcagaaatcattctgtagttatagtacattaggaaatatctatccaaaagataggcaataataaatactggagagaatgtggagaaaagggaacccttgtagtccattggtggaaatgtaaattcctgcaaccactatggagaacaatttggaggttcatcaaaaaagta

SEQ ID NO: 632206 - DNA, 553 bp, Homo sapiens
atgcagttattacacattgcatgcctgtatcaaaacatctcatgtaccccataaatatatagacctgtgtacccacggaaattaaaaatgaaaaaacaaagaaatgtgattaygccatatgttgttaatagttaatacatctaaaaccaacaagcattgttcattatcctcaggaattccttccagagtcatagaaattttattcagtcattgcttaactagtataacataattttctatcattggaataatctgtaaataggattaacatacaaaataaaactaccctaagttaaatgactccctaagtcaccaaacataatctaggcagaaaactgaaaacagaacccagatatccatggacataattgcatcattaaaccacacactccttttgacaaaaaccttaggatgattaataagcttatgggtttgagtgtacaagagaaacttcctctacagaccaactaaaggagatgaactctccttttattctaacatcttagcaaaccacagatacatatattaaaattgcatcatgctggatgagaaa

SEQ ID NO: 632207 - DNA, 553 bp, Homo sapiens
atgcagttattacacattgcatgcctgtatcaaaacatctcatgtaccccataaatatatagacctgtgtacccacggaaattaaaaatgaaaaaacaaagaaatgtgattatgccatatgttgttaatagttaatacatctaaaaccaacaagcattgttcattatcctcaggaattccttccagagtcatagaaattttattcagtcrttgcttaactagtataacataattttctatcattggaataatctgtaaataggattaacatacaaaataaaactaccctaagttaaatgactccctaagtcaccaaacataatctaggcagaaaactgaaaacagaacccagatatccatggacataattgcatcattaaaccacacactccttttgacaaaaaccttaggatgattaataagcttatgggtttgagtgtacaagagaaacttcctctacagaccaactaaaggagatgaactctccttttattctaacatcttagcaaaccacagatacatatattaaaattgcatcatgctggatgagaaa

SEQ ID NO: 632208 - DNA, 553 bp, Homo sapiens
atgcagttattacacattgcatgcctgtatcaaaacatctcatgtaccccataaatatatagacctgtgtacccacggaaattaaaaatgaaaaaacaaagaaatgtgattatgccatatgttgttaatagttaatacatctaaaaccaacaagcattgttcattatcctcaggaattccttccagagtcatagaaattttattcagtcattgcttaactagtataacataattttctatcattggaataatctgtaaataggattaacatacaaaataaaactaccctaagttaaatgactccctaagtcaccraacataatctaggcagaaaactgaaaacagaacccagatatccatggacataattgcatcattaaaccacacactccttttgacaaaaaccttaggatgattaataagcttatgggtttgagtgtacaagagaaacttcctctacagaccaactaaaggagatgaactctccttttattctaacatcttagcaaaccacagatacatatattaaaattgcatcatgctggatgagaaa

SEQ ID NO: 632209 - DNA, 583 bp, Homo sapiens
aattgcatcattaaaccacacactccttttgacaaaaaccttaggatgattaataagcttatgggtttgagtgtacaagagaaacttcctctacagaccaactaaaggagatgaactctccttttattctaacatcttagcaaaccacagatacatatattaaaattgcatcatgctggatgagaaaaggctttcagaaataaaagatttgttactgacttcaaaagattttaacagagygatcttttagaactcttagcttaaataatgatgttactggataatatttgatgtgacttgtagaatttgtttctctactaggattatgtagacaatttgcctagaaaattttaaaaattacaaaagaataaaatatcattggcaccataattcacattcacaggaaacaaattattaaaggtaatatattgattgtggtaccacccagtcaaataatttttgcccgtgactcacaaataagaaataattttacattttaacccccctctttaacaaatacatatattactgaaagttgaggcaatatttacttttagtatttgcactccacctatctatattt

SEQ ID NO: 632210 - DNA, 579 bp, Homo sapiens
gcatcattaaaccacacactccttttgacaaaaaccttaggatgattaataagcttatgggtttgagtgtacaagagaaacttcctctacagaccaactaaaggagatgaactctccttttattctaacatcttagcaaaccacagatacatatattaaaattgcatcatgctggatgagaaaaggctttcagaaataaaagatttgttactgacttcaaaagattttaacagagtgatcttttagaactcttagcttaaataatgatgttactggataatatttgatktgacttgtagaatttgtttctctactaggattatgtagacaatttgcctagaaaattttaaaaattacaaaagaataaaatatcattggcaccataattcacattcacaggaaacaaattattaaaggtaatatattgattgtggtaccacccagtcaaataatttttgcccgtgactcacaaataagaaataattttacattttaacccccctctttaacaaatacatatattactgaaagttgaggcaatatttacttttagtatttgcactccacctatctatattt

SEQ ID NO: 632211 - DNA, 422 bp, Homo sapiens
caaataatttttgcccgtgactcacaaataagaaataattttacattttaacccccctctttaacaaatacatatattactgaaagttgrggcaatatttacttttagtatttgcactccacctatctatattttgattttcctatttttaatacatttatttaaaatatgtattttaatgctggacaaaattcattgttttaatttcaggaccaagtgtagttttctctaatctatataaatctaggtagaatgacttcaaattatgtggaagatctatactgtatattcttactagtgatattattgaagtatgcataatagaatattgtaagaaagatgctgactcaaagctttgcaaatcctcaggatccaaacatacaaaactttttatcatctcttcttctgctactataaaataa

SEQ ID NO: 632212 - DNA, 422 bp, Homo sapiens
caaataatttttgcccgtgactcacaaataagaaataattttacattttaacccccctctttaacaaatacatatattactgaaagttgaggcaatatttacttttagtatttgcactccacctayctatattttgattttcctatttttaatacatttatttaaaatatgtattttaatgctggacaaaattcattgttttaatttcaggaccaagtgtagttttctctaatctatataaatctaggtagaatgacttcaaattatgtggaagatctatactgtatattcttactagtgatattattgaagtatgcataatagaatattgtaagaaagatgctgactcaaagctttgcaaatcctcaggatccaaacatacaaaactttttatcatctcttcttctgctactataaaataa

SEQ ID NO: 632213 - DNA, 422 bp, Homo sapiens
caaataatttttgcccgtgactcacaaataagaaataattttacattttaacccccctctttaacaaatacatatattactgaaagttgaggcaatatttacttttagtatttgcactccacctatctatattttgattttcctatttttaatayatttatttaaaatatgtattttaatgctggacaaaattcattgttttaatttcaggaccaagtgtagttttctctaatctatataaatctaggtagaatgacttcaaattatgtggaagatctatactgtatattcttactagtgatattattgaagtatgcataatagaatattgtaagaaagatgctgactcaaagctttgcaaatcctcaggatccaaacatacaaaactttttatcatctcttcttctgctactataaaataa

SEQ ID NO: 632214 - DNA, 565 bp, Homo sapiens
tagttaatgtctttttatccctactcaggtataagctctatgaggacatgagctatgtctgtttttctgtaacattgggttcctggagtctagaaaacatattaactacatattatcattgaatatgaaccaactctatcaaagacagttacttaagaaaggagatttcaattattataagaaaatgtatataacagattgagaatagtatattgacaataattagcaaatattaaataatakaaataaagatgtgatcaacaattaaatgggagcccaactatctataatttagataaaatctctctcaggaatttttgtagttatgaagacttcaaaaggtcacaattacgtaacttagccaaaagagcataatttagctaaaattacatgattacattgtacaactatagaatgaaggacaaaactaagataatttaaactcataatgttttgatttaaaagttatagtaattagaatcttgtcaggaattttggaaactaaaaaattctctttaacaatttccatacaatcacattttgtatcacatatttaaaaggcatc

SEQ ID NO: 632215 - DNA, 565 bp, Homo sapiens
tagttaatgtctttttatccctactcaggtataagctctatgaggacatgagctatgtctgtttttctgtaacattgggttcctggagtctagaaaacatattaactacatattatcattgaatatgaaccaactctatcaaagacagttacttaagaaaggagatttcaattattataagaaaatgtatataacagattgagaatagtatattgacaataattagcaaatattaaataatagaaataaagatgtgatcaacaattaaatgggagcccaactatctataatttagataaaatctctstcaggaatttttgtagttatgaagacttcaaaaggtcacaattacgtaacttagccaaaagagcataatttagctaaaattacatgattacattgtacaactatagaatgaaggacaaaactaagataatttaaactcataatgttttgatttaaaagttatagtaattagaatcttgtcaggaattttggaaactaaaaaattctctttaacaatttccatacaatcacattttgtatcacatatttaaaaggcatc

SEQ ID NO: 632216 - DNA, 565 bp, Homo sapiens
tagttaatgtctttttatccctactcaggtataagctctatgaggacatgagctatgtctgtttttctgtaacattgggttcctggagtctagaaaacatattaactacatattatcattgaatatgaaccaactctatcaaagacagttacttaagaaaggagatttcaattattataagaaaatgtatataacagattgagaatagtatattgacaataattagcaaatattaaataatagaaataaagatgtgatcaacaattaaatgggagcccaactatctataatttagataaaatctctctcaggaatttttgtagttatgaagacttcaaaaggtcacaattacrtaacttagccaaaagagcataatttagctaaaattacatgattacattgtacaactatagaatgaaggacaaaactaagataatttaaactcataatgttttgatttaaaagttatagtaattagaatcttgtcaggaattttggaaactaaaaaattctctttaacaatttccatacaatcacattttgtatcacatatttaaaaggcatc

SEQ ID NO: 632217 - DNA, 565 bp, Homo sapiens
tagttaatgtctttttatccctactcaggtataagctctatgaggacatgagctatgtctgtttttctgtaacattgggttcctggagtctagaaaacatattaactacatattatcattgaatatgaaccaactctatcaaagacagttacttaagaaaggagatttcaattattataagaaaatgtatataacagattgagaatagtatattgacaataattagcaaatattaaataatagaaataaagatgtgatcaacaattaaatgggagcccaactatctataatttagataaaatctctctcaggaatttttgtagttatgaagacttcaaaaggtcacaattacgtaacttagccaaaagagcataatttagctaaaattacatgattacattgtacaactatagaatgaaggacaaaactaagataatttaaactcataatgttttgatttaaaagttatartaattagaatcttgtcaggaattttggaaactaaaaaattctctttaacaatttccatacaatcacattttgtatcacatatttaaaaggcatc

SEQ ID NO: 632218 - DNA, 655 bp, Homo sapiens
taacataacatctcactctgcccgagatatttggtaagaaagaygagaagaaactgggatattacagtcattgcttagttagccattatgtcaagatgaaagagaaatgagtaataactatctcaatcatagaatgataacaattactttaagatattgtatttatcaattcaaactgataacaaatgcccaatttacttctgttacatacctcaaaatataaatgtgactcttgaggtgtctatcaactgatttaaaataagtgaaacttcagtgctctgagacctcaacacccagtgaaatcaaatgaagtcacattagtgtcaattttctaatatgcattttacttttcccactggcatatgtaggcaattaaaatcttcatcgtctaatgaatagacatctcctcatgtctatttctgaaagtgccgaaaggatgccttatgagatcacacagcaatcaattggttattctcacttccccccacagaatgcatctgccatgttcttcctgttcatcttcggtgctaatacaataattccttactgtaaaaactctgaaattacctcatggttgacattgccatctgctgctcacctggaagttactgagcaatgttggtgtcaaagtcaaaatagaacaaaataacatccc

SEQ ID NO: 632219 - DNA, 655 bp, Homo sapiens
taacataacatctcactctgcccgagatatttggtaagaaagatgagaagaaactgggatattacagtcattgcttagttagccattatgtcaagatgaaagagaaatgagtaataactatctcaatcatagaatgataacaattactttaagatattgtatttatcaattcaaactgataacaaatgcccaatttacttctgttacatacctcaaaatataaatgtgactcttgaggtgtctatcaactgatttaaaataagtgaaacttcagtgctctragacctcaacacccagtgaaatcaaatgaagtcacattagtgtcaattttctaatatgcattttacttttcccactggcatatgtaggcaattaaaatcttcatcgtctaatgaatagacatctcctcatgtctatttctgaaagtgccgaaaggatgccttatgagatcacacagcaatcaattggttattctcacttccccccacagaatgcatctgccatgttcttcctgttcatcttcggtgctaatacaataattccttactgtaaaaactctgaaattacctcatggttgacattgccatctgctgctcacctggaagttactgagcaatgttggtgtcaaagtcaaaatagaacaaaataacatccc

SEQ ID NO: 632220 - DNA, 558 bp, Homo sapiens
ctctgagacctcaacacccagtgaaatcaaatgaagtcacattagtgtcaattttctaatatgcattttacttttcccactggcatatgtaggcaattaaaatcttcatcgtctaatgaatagacatctcctcatgtctatttctgaaagtgccgaaaggatgccttatgagatcacacagcaatcaattggttattctcacttccccccacagaatgcatctgccatgttcttcctgttcatcttmggtgctaatacaataattccttactgtaaaaactctgaaattacctcatggttgacattgccatctgctgctcacctggaagttactgagcaatgttggtgtcaaagtcaaaatagaacaaaataacatcccctaacttcatgccattctttgtcatttggcatgtacagcaaaacttgtcccaagaaaacaccctgtcctaaactatagttatttattatatgtttttgcttcaaactgaggctccagccttgtctaaggttctggatggaaacaggtgctaccctacccactctgcactctgtttcact

SEQ ID NO: 632221 - DNA, 558 bp, Homo sapiens
ctctgagacctcaacacccagtgaaatcaaatgaagtcacattagtgtcaattttctaatatgcattttacttttcccactggcatatgtaggcaattaaaatcttcatcgtctaatgaatagacatctcctcatgtctatttctgaaagtgccgaaaggatgccttatgagatcacacagcaatcaattggttattctcacttccccccacagaatgcatctgccatgttcttcctgttcatcttcggtgctaatacaataattccttactgtaaaaactytgaaattacctcatggttgacattgccatctgctgctcacctggaagttactgagcaatgttggtgtcaaagtcaaaatagaacaaaataacatcccctaacttcatgccattctttgtcatttggcatgtacagcaaaacttgtcccaagaaaacaccctgtcctaaactatagttatttattatatgtttttgcttcaaactgaggctccagccttgtctaaggttctggatggaaacaggtgctaccctacccactctgcactctgtttcact

SEQ ID NO: 632222 - DNA, 558 bp, Homo sapiens
ctctgagacctcaacacccagtgaaatcaaatgaagtcacattagtgtcaattttctaatatgcattttacttttcccactggcatatgtaggcaattaaaatcttcatcgtctaatgaatagacatctcctcatgtctatttctgaaagtgccgaaaggatgccttatgagatcacacagcaatcaattggttattctcacttccccccacagaatgcatctgccatgttcttcctgttcatcttcggtgctaatacaataattccttactgtaaaaactctgaaattacctcatggttgacattgccatctgctgctcacctggaagttactgagcaatgttggtgtcaaagtcaaaatagaacaaaataacatcccctaacttcatgccattctttgtcatttggcatgtacagcaaaacttgtcccaagaaaacaccctgtcctaaactatasttatttattatatgtttttgcttcaaactgaggctccagccttgtctaaggttctggatggaaacaggtgctaccctacccactctgcactctgtttcact

SEQ ID NO: 632223 - DNA, 567 bp, Homo sapiens
ggaagttactgagcaatgttggtgtcaaagtcaaaatagaacaaaataacatcccctaacttcatgccattctttgtcatttggcatgtacagcaaaacttgtcccaagaaaacaccctgtcctaaactatagttatttattatatgtttttgcttcaaactgaggctccagccttgtctaaggttctggatggaaacaggtgctaccctacccactctgcactctgtttcactcactttcctccttattgtccacaaatacactcacttacataataacatcaaaatactttggctaaaacaaaaggctctatrgataaccaatggctcaaatagatgcttgggcacagggtatcatttaatgcaactaatgacttgagaacaaaataaggaaattctctgactatattttttagtacattattttagactagtgtcaaacaatagctaactaaattgaagttataagtgaatgtgttgttttttcttttcagattttgttcattctaagccactaatgagttgacagtgagccattaggatatactgaatatggtttgttaatac

SEQ ID NO: 632224 - DNA, 567 bp, Homo sapiens
ggaagttactgagcaatgttggtgtcaaagtcaaaatagaacaaaataacatcccctaacttcatgccattctttgtcatttggcatgtacagcaaaacttgtcccaagaaaacaccctgtcctaaactatagttatttattatatgtttttgcttcaaactgaggctccagccttgtctaaggttctggatggaaacaggtgctaccctacccactctgcactctgtttcactcactttcctccttattgtccacaaatacactcacttacataataacatcaaaatactttggctaaaacaaaaggctctatagataaccaatggctcaaatagatgcttgggcacagggtatcatttaatgcaactaatgacttgagaacaaaataaggaaattctctgactatattttttagtacattattttagactagtgtcaaacaatagctarctaaattgaagttataagtgaatgtgttgttttttcttttcagattttgttcattctaagccactaatgagttgacagtgagccattaggatatactgaatatggtttgttaatac

SEQ ID NO: 632225 - DNA, 619 bp, Homo sapiens
ttagtacattattttagactagtgtcaaacaatagctaactaaattgaagttataagtgaatgtgttgttttttcttttcagattttgttcattctaagccactaatgagttgacagtgagccattaggatatactgaatatggtttgttaatacattctttcagaccagtggcatacaataggtaacttgaagtggagtaaaacatactttatgccttgttttgtttttaagaactgaaataatagaaacagaagagttggcttcctctattamattttatagacaaggaaaatacaactcaatattgtaaaagcatttaattgtgaaatgtgtcagagatctaaacaggtatctgattattggtttcttataaatgtgactattttatagttttcagaattgcattcattatttttactttgaatttataggaatggatgtgaaattaaataatgttagcacaaattaatgtattttggtatgcttaggccaagagtatgcattaatgtatataaataacttgatctatattctagagtttcagaggtcatcagtgtctaacatatgtatgcatattgtgaccacctggaaagcatttgtaaaaataaataataaca

SEQ ID NO: 632226 - DNA, 505 bp, Homo sapiens
tgtgtattgcactgcaaagtttagaacagtcagtctccctgtgtggaaaataaaatatgtaggtgttgtgcccaacttctctgtttagtcctatttacttactttgttttttcatatgcaayataatacagcataatataaagaagtaactttaaatactggtattacatcacatcagagttaaaaattacatctgtaatataaatataaatgatcacttacaatttttgacagaatagctgataacagtgaattttatgaattccctttcaagattttctttacatatcagtatagtaattttgcttttaattcctctttgaggaatcactctatttcctcattaactaaatcatttaaaaagttgaaatgattgtgtaacctgaattttctatttgaaatatcaaaatattttaccacttactaaaaaaacacatttttaaaaataattgtcacttttaggtagatattatgcattttcaaatgcattatcttttgctggtgg

SEQ ID NO: 632227 - DNA, 505 bp, Homo sapiens
tgtgtattgcactgcaaagtttagaacagtcagtctccctgtgtggaaaataaaatatgtaggtgttgtgcccaacttctctgtttagtcctatttacttactttgttttttcatatgcaacataatacagcataatataaagaagtaactttaaatactggtattacatcacatcagagttaaaaattacatctgtaatataaatataaatgatcacttacaatttttgacagaatagctgataacagtgaattttatgaattccctttcaagattttctttacatatcagtatagtaattttgcttttaattcctctttgaggaatcaytctatttcctcattaactaaatcatttaaaaagttgaaatgattgtgtaacctgaattttctatttgaaatatcaaaatattttaccacttactaaaaaaacacatttttaaaaataattgtcacttttaggtagatattatgcattttcaaatgcattatcttttgctggtgg

SEQ ID NO: 632228 - DNA, 551 bp, Homo sapiens
tagtagtaacaaagagttaaatttctactctttgggattaaataataacatttaatctgattcaaagttaaccagatcactgttctatacagcaacaatggactaaatattcctctgggtttcattaaggcatgagctgatttgagtaaaaagaattaaaatagaactcatctgcggaaaacaaccagaaggctaaaaatggagaacagtgaatgatataktaataagaggaaataataagaaagtcagtgagcttcagagtcaaaggatgttttctgctgctggatttaagtcacatctctaaaagccattgtgtccttgctgcaaaaaatacatataatttaagataagttaaaacaataacagattttttccttagatgggtatcaaccttttttttttggctacggaaaaaaattatttttagcgttgaatgttacagctttctggaagcagcagattatgaagaatcataatcttataccatatcacattaaaaatcttttcagttagtacagcattgagaccaaaatttgtgtccaacaaataga

SEQ ID NO: 632229 - DNA, 623 bp, Homo sapiens
gtttcattaaggcatgagctgatttgagtaaaaagaattaaaatagaactcatctgcggaaaacaaccagaaggctaaaaatggagaacagtgaatgatatagtaataagaggaaataataagaaagtcagtgagcttcagagtcaaaggatgttttctgctgctggatttaagtcacatctctaaaagccattgtgtccttgctgcaaaaaatacatataatttaagataagttaaaacaataacagattttttccttagatggrtatcaaccttttttttttggctacggaaaaaaattatttttagcgttgaatgttacagctttctggaagcagcagattatgaagaatcataatcttataccatatcacattaaaaatcttttcagttagtacagcattgagaccaaaatttgtgtccaacaaatagaacttgaaatccctacttttttggggttggctaattgttgcatgatgtttgctaaaactctgacttctccctcgaccctctcttggctctaattatccacataaaatcaccaaatgcatggccccgagccactcacctcagaaagctagatcatgtctgggattgtggaatcacaggcagcactaacatcc

SEQ ID NO: 632230 - DNA, 551 bp, Homo sapiens
tagtagtaacaaagagttaaatttctactctttgggattaaataataacatttaatctgattcaaagttaaccagatcactgttctatacagcaacaatggactaaatattcctctgggtttcattaaggcatgagctgatttgagtaaaaagaattaaaatagaactcatctgcggaaaacaaccagaaggctaaaaatggagaacagtgaatgatatagtaataagaggaaataataagaaagtcagtgagcttcagagtcaaaggatgttttctgctgctggatttaagtcacatctctaaaagccattgtgtccttgctgcaaaaaatacatataatttaagataagttaaaacaataacagattttttccttagatgggtatcaaccttttttttttkgctacggaaaaaaattatttttagcgttgaatgttacagctttctggaagcagcagattatgaagaatcataatcttataccatatcacattaaaaatcttttcagttagtacagcattgagaccaaaatttgtgtccaacaaataga

SEQ ID NO: 632231 - DNA, 623 bp, Homo sapiens
gtttcattaaggcatgagctgatttgagtaaaaagaattaaaatagaactcatctgcggaaaacaaccagaaggctaaaaatggagaacagtgaatgatatagtaataagaggaaataataagaaagtcagtgagcttcagagtcaaaggatgttttctgctgctggatttaagtcacatctctaaaagccattgtgtccttgctgcaaaaaatacatataatttaagataagttaaaacaataacagattttttccttagatgggtatcaaccttttttttttggctacggaaaaaaattatttttagygttgaatgttacagctttctggaagcagcagattatgaagaatcataatcttataccatatcacattaaaaatcttttcagttagtacagcattgagaccaaaatttgtgtccaacaaatagaacttgaaatccctacttttttggggttggctaattgttgcatgatgtttgctaaaactctgacttctccctcgaccctctcttggctctaattatccacataaaatcaccaaatgcatggccccgagccactcacctcagaaagctagatcatgtctgggattgtggaatcacaggcagcactaacatcc

SEQ ID NO: 632232 - DNA, 551 bp, Homo sapiens
tagtagtaacaaagagttaaatttctactctttgggattaaataataacatttaatctgattcaaagttaaccagatcactgttctatacagcaacaatggactaaatattcctctgggtttcattaaggcatgagctgatttgagtaaaaagaattaaaatagaactcatctgcggaaaacaaccagaaggctaaaaatggagaacagtgaatgatatagtaataagaggaaataataagaaagtcagtgagcttcagagtcaaaggatgttttctgctgctggatttaagtcacatctctaaaagccattgtgtccttgctgcaaaaaatacatataatttaagataagttaaaacaataacagattttttccttagatgggtatcaaccttttttttttggctacggaaaaaaattatttttagcgttgaatgttacagctttctggaagcagcagattatgaagaatcataatcttataccatatcrcattaaaaatcttttcagttagtacagcattgagaccaaaatttgtgtccaacaaataga

SEQ ID NO: 632233 - DNA, 347 bp, Homo sapiens
tgtttaaatttccctttttcatctatatttgccaatgtcttctcatatttttaaaatgttttgatttatgccacattcctacatgtacaagggcttgtgaagttaactttttttattgtaagattagcttactcatcccactgagtagtatttcttttaattatgtatttgatattaatgttattataatattagttgctattactttcttggtatcttctttctctcytaaaggtaaatgttatatttaatttatatttactagaaaaatttaaagctgtaatgcttattaccatttcagaccggtatttccatccaagtgttgcagatttacttccctttttcat

SEQ ID NO: 632234 - DNA, 587 bp, Homo sapiens
ttgctcagggaagtcctcactgagaagctcacatgagcaaaacttggaaggatactgaggaaagggagctttaatggaaatatagcacaaatataaacccatagagtaaaaatctgcttacaatcttgtcaggctcaaaagtgccattactcatttgtatgtgttaagtgaccaccaaatgttatacctaatttcaataaatggcaaatctggrcaaagagagggagagtgccttggctaaagtttcagaggattaatttgggagctgtaaccggacccggggtccttgactgttttgtaatcccacacattttcaagtatgcacagcactttatttccaactgtcattagaaatcatagcaaaaaaatcaaatagaacaatgaatcaatagcaatagcaaaatgtgtacttaggaaacatataaaataagtactttgaagtatatggtgactataaactcatcatttgtatatacaaaacaactattttctcaatattgtctacagtaacataaatctcaccaccacactctcatcctctatgcttactaatttacttatttttctctaatttaccaaattatgtt

SEQ ID NO: 632235 - DNA, 587 bp, Homo sapiens
ttgctcagggaagtcctcactgagaagctcacatgagcaaaacttggaaggatactgaggaaagggagctttaatggaaatatagcacaaatataaacccatagagtaaaaatctgcttacaatcttgtcaggctcaaaagtgccattactcatttgtatgtgttaagtgaccaccaaatgttatacctaatttcaataaatggcaaatctggacaaagagagggagagtgccttggctaaagtttcagaggattaatttgggagctgtaaccggacccggggtccttgactgttttgtaatcccacacattttcaagtatgcacagcactttatttccaactgtcattagaaatcatagcaaaaaaatcaaatagaacaatgaatcaatagcaatagcaaaatgtgtacttaggaaacatataaaataagtactttgaagtatatggtgactataaactcatcatttgtatatacaaaacaactattttctcaatattgtctacagtaacataaatctcaccaccacactctcatcytctatgcttactaatttacttatttttctctaatttaccaaattatgtt

SEQ ID NO: 632236 - DNA, 627 bp, Homo sapiens
gtgtatatgatctatataacttcaggtgccagaatttatagagtactcagaattcacatttcctcatatccagaatatatacctgaattcactagtggatacagcttcacatrcttaagtaattcagatcaaaactttccatttgaaaaaactgaggcaagagaggaatttcataaataatattcatatagtgtatgtaagtttgggtttcccagagaaacaaaaccaataggatacatatatacaaagatatttactataaggggttggattatgtggttatggaggctcagaactcccatgttctgcagttggaaagctggagacccaagagagccaatggtatagttttagtttgagtccaaaggcttgagactcatgaaatttagtggtgtatggtccagtatgaatctgggcctgagttcaaaggaagtacatagttctattatcagtcttctttaaaagattttctttaatactggacattcaaaataaattatactatatgcaggctaaatgcacagtacactttaaatatgatttaatacagtttaaaatgttcttccacaattcatacacttccaacaattaacaaaatgaaataattacaatctgttaggccatgag

SEQ ID NO: 632237 - DNA, 549 bp, Homo sapiens
tcatgttatatattcctaccaatccccatacagtttaaattttccttcccataaaaacacaaattgagtgaattctcaaagttttatycttgtgtaggcagaaatatccttaatggtaatagttttggtctgtactatctcaatgccctggagaatcagaatcctcaaacatgtcaatatttttcattaaaacttttctgaaagcattatctacaaatattgcaaagtgacctaatgcatgtaaacaggtaagaatctatataatcaatcataaattatacctgcctccttgccaagtactgctttgaaaatgaagcattacacacacacacacacacaccatgacacatacatacactgctgtttagaatgtaagattgttggtttttaatggaattaaatactccagaatttgcccagaaatattcatggtatttatggggaattaaaacttctagctatgctccacaagtgtgattctagatttcaaagaagtaataactttgttttatgggaaactttgttttcatcttcaataacaaatacagt

SEQ ID NO: 632238 - DNA, 549 bp, Homo sapiens
tcatgttatatattcctaccaatccccatacagtttaaattttccttcccataaaaacacaaattgagtgaattctcaaagttttattcttgtgtaggcagaaatatccttaatggtaatagttttggtctgtactatctcaatgccctggagaatcagaatcctcaaacatgtcaatatttttcattaaaacttttctgaaagcattatctacaaatattgcaaagtgacctaatgcatgtaaacaggtaagaatctatataatcaatcataaattatacctgcctccttgccaagtactgctttgaaaatgaagcattacacacacacacacacacaccatgacacatacayacactgctgtttagaatgtaagattgttggtttttaatggaattaaatactccagaatttgcccagaaatattcatggtatttatggggaattaaaacttctagctatgctccacaagtgtgattctagatttcaaagaagtaataactttgttttatgggaaactttgttttcatcttcaataacaaatacagt

SEQ ID NO: 632239 - DNA, 421 bp, Homo sapiens
aatatatgtcatatgccctaagcatagtttcctaggaggacagaaagctttatggtatacctccaatttcctcaagcacagaataagttggaaaacaagaaatgttattggaatatggttttactcattcttttcaatattctttttgagaaagctaaataaggaaaattaaaccttatttttcttagaatttgtcctgattaataaaatactatattctwcagaattcctgtcatagtttttttaagtgattatatgtttgtttattatgataagttatactgtgagttctcatacagctttagaaagttttaagtttatgttttatcatgtctctttcaaactcacctttgcttgttttcgtggtgccttttatcagaatatttttcatttgcacagtttcataaatgctttaacataa

SEQ ID NO: 632240 - DNA, 410 bp, Homo sapiens
ttttttgaaatgtgaatagtaaattactcttcattccaacaggtaaacatgtttgctgatataacttaatgtatttattttctttgcattgttatagtttgtctatattcrtcagtattcagaaaattcatgccatgaaataggttttaataaaataaactacacatgacaggctaaataatggttttcaggtgaccctttgaggtcatttacatacataggctattttagatatatcttttaaaagagataatatacttcattaacactaaataaatagttatgtttaattagttgaaattttgaaaaatctgagaaaaaagggttaaaactatgtctgaatgcttgagaatataatttgatattgtactcagaaaacagaagcgagacttttgttgagaaacaaaagt

SEQ ID NO: 632241 - DNA, 594 bp, Homo sapiens
atttcaaatatttagcctccttttaaaaagtccttaatggaatgcatcgtcaactataactacacagaagttgaaagttagcttggccaggttcactatattcaagtaaaaagtaaatggagaaatgcttccttaaatctcttttcattagctcctttctttcttctctttcttttactcatttttcttatttcccttccccttcctctctttttctattctttttctttattcttttctctcttctcttcttattttaccactttttccttccttcctcccttcctttcttccttccttccttcccttttccctctttccttccttcttycttcttgctttcctaccttcctcttgtcttttttcctttcttcctccctttttccctccttcctttatttccattcatttttgccacttcagcttacatgctctcttgtgtaattggaaagcaaatcactcatctttagtattgtggcaattattaatctaataacctggtttgaacacagagtaagtggggaaaatgaagagaaagagtgggttaagttgcaataagcaatcaaggaaaagtgaaatagggtgggagattta

SEQ ID NO: 632242 - DNA, 605 bp, Homo sapiens
ttactagggtgaacaaaatagctctcaggaggcttatattctcatggtagaaaactgacagtaaataaataaagaccccacrgtagtgcctgtgagtgctataaagataagtcaaggtggcacattaaaagctgtatgtgaaagtgataggactggtcaggaaatgcctttctgataaggcagaaactcagtaaatccatataaaacatagatgtcaaattgagtaacattattattttatcttgtagaaaaatgtgatgaggagtagcaatttcttgtaatgtgcaagctgacaagctgaattttgtctctgtctattgattatcctcctcaggtctgtgaagttgtttgggagaatttaagatatggcacactatttagtgtcactttctctggaaagtaaaaaaactaatcagttttagaaaatagaagtctcacctttacttctattctttatatttctaagtattaagaagtattatgtgtgtaaattatctcaaattactggtttttaaatttttttctcacagactgaaattcaatgctatttatttccttctttaattttatttagagataggctcttgcactgtctggcacccagg

SEQ ID NO: 632243 - DNA, 605 bp, Homo sapiens
ttactagggtgaacaaaatagctctcaggaggcttatattctcatggtagaaaactgacagtaaataaataaagaccccacagtagtgcctgtgagtgctmtaaagataagtcaaggtggcacattaaaagctgtatgtgaaagtgataggactggtcaggaaatgcctttctgataaggcagaaactcagtaaatccatataaaacatagatgtcaaattgagtaacattattattttatcttgtagaaaaatgtgatgaggagtagcaatttcttgtaatgtgcaagctgacaagctgaattttgtctctgtctattgattatcctcctcaggtctgtgaagttgtttgggagaatttaagatatggcacactatttagtgtcactttctctggaaagtaaaaaaactaatcagttttagaaaatagaagtctcacctttacttctattctttatatttctaagtattaagaagtattatgtgtgtaaattatctcaaattactggtttttaaatttttttctcacagactgaaattcaatgctatttatttccttctttaattttatttagagataggctcttgcactgtctggcacccagg

SEQ ID NO: 632244 - DNA, 441 bp, Homo sapiens
ataaaccttgaatcttgaagtttgttagtatctatcctccaactttgttattctcctttaatattgaattggtgactgtgagtcttttgctttccaaatatactttgcgtgttctttttaatccatattttcatttttaagtcttcctctggactattgtaactaattattaactggtctcctacctgctggctttaatccaccctcttagttcctcaaaagrtaactttctaaaaggaaatgtttaccatgtcagtcttcacatcgaagtatttcaatagttgtccaattttaaacaaatttaaactctctagaatttgagtaagacctttttatcttctattacctacctaccttttcaatccaatttcttgctactcgtttgtaaagagagatataggaactaggaataaaaggtacagaacagaataatattccagc

SEQ ID NO: 632245 - DNA, 304 bp, Homo sapiens
gggttagaaaatcaacatattaattttagaggggaaataattcaacctataatggctgcttscaactttgtcattatgttttattctttttatagataactggcttggtttatgtttgtttacaaattttacatcttatattcatgaattatgttgtttgtaattttttttgtgttttctcttattatttattacaatcaacattatgttagtcttataaaataaggttgacagctattactcttatcatttctctgacaacagattgtgttaggttggaattacattattctttgaagttttg

SEQ ID NO: 632246 - DNA, 471 bp, Homo sapiens
tggcttgtggcattctcccagtgtgcttgtctgtcacatttctcccttctataaagacagcagtcatattagactaggggcctaccctactacagcatgacctcaccttaactaattacacctgcaacaatcctatttccaaataaggtcacattctgagatactgggggttagaaaatcaacatattaattttagaggggaaataattcaacctataatggctgcttgcaactttgtcattatgttttattctttttatagataactggcttggtttatgtttgtttacaaattttacatcttatattcatgaattatgttgtttgtaattttttttgtrttttctcttattatttattacaatcaacattatgttagtcttataaaataaggttgacagctattactcttatcatttctctgacaacagattgtgttaggttggaattacattattctttgaagttttg

SEQ ID NO: 632247 - DNA, 304 bp, Homo sapiens
gggttagaaaatcaacatattaattttagaggggaaataattcaacctataatggctgcttgcaactttgtcattatgttttattctttttatagataactggcttggtttatgtttgtttacaaattttacatcttatattcatgaattatgttgtttgtaattttttttgtgttttctcttattatttattacwatcaacattatgttagtcttataaaataaggttgacagctattactcttatcatttctctgacaacagattgtgttaggttggaattacattattctttgaagttttg

SEQ ID NO: 632248 - DNA, 304 bp, Homo sapiens
gggttagaaaatcaacatattaattttagaggggaaataattcaacctataatggctgcttgcaactttgtcattatgttttattctttttatagataactggcttggtttatgtttgtttacaaattttacatcttatattcatgaattatgttgtttgtaattttttttgtgttttctcttattatttattacaatcaacattatgttagtcttataaaataaggttgacagctattactcttatcatttctctgamaacagattgtgttaggttggaattacattattctttgaagttttg

SEQ ID NO: 632249 - DNA, 362 bp, Homo sapiens
tgagcttcccgaatattgatagattgaattaatatttacataaattcaaacagaaacacttttctttcatcggaatttcttttaaaatcagcagttgtgtgttcattgttccacaagccagcaatgtcagtagacaattagatttaaacaccattttaactcctaaaacttttttactttcagaagatacataatgaaaagaggtagatacaaattttcatccttgtagtttgtcaggataaagtactctattcacctatccattcatgttacagtttggctgtgctgccacccaaatcttatctcccataattcccrtgtgtggtgggagggacctggtgtgaggtaactgaatcatgggg

SEQ ID NO: 632250 - DNA, 362 bp, Homo sapiens
acttaccaatatgcaaagttaactgatactatgacctttgcagaaaatacagcatttctagaacattttactccatttattcccttagtacttttatactattgttcttatttatttcaattatttggttttgattttaatccctcaggattttattattaccgtattctatactcamgttcatttagactaactgacattttatcattttttaacttcacttatatccagcaacttgaacatgcttcttacgtttgagaaattcgtgattatatgagtttccccctcatttacagatatcaaataattgttttccagcctccctcacagccaagtcatgggcatgcctactgaaagcagct

SEQ ID NO: 632251 - DNA, 362 bp, Homo sapiens
acttaccaatatgcaaagttaactgatactatgacctttgcagaaaatacagcatttctagaacattttactccatttattcccttagtacttttatactattgttcttatttatttcaattatttggttttgattttaatccctcaggattttattattaccgtattctatactcacgttcatttagactaactgacattttatcattttttamcttcacttatatccagcaacttgaacatgcttcttacgtttgagaaattcgtgattatatgagtttccccctcatttacagatatcaaataattgttttccagcctccctcacagccaagtcatgggcatgcctactgaaagcagct

SEQ ID NO: 632252 - DNA, 603 bp, Homo sapiens
gtaccaaaaaatactttaacaaattttaatcacttatttagggaaagcaactttggaaargatttcaaaacatgaataaaaataaaatctattatatatatgtgcattttactcagaatgattaatctgagtatacttcattgcaagcacaacctcctaatgatacgttatctttcaaattagctacaaaacaactgcatatgaacatgtattttcacaaattctcatgtaaatgataaattataatggaaccacataatgtgacaactttaaaatataactatgaacaatagaagttggtatccagaaagcctaatttacaaataaattataatgccattctaagtggaaattgtagccacaattttaagttatttcaaatatagctcttgtgttttttctttctacctcacaattgagaagaagagtagatggagaaataatctaaaccatggtgtacacatttgtcttttgtatataagttgttcatattgttcattttatgttgattttggattcttaaaaaataaatgattaatcctttgagcagattcaaatatttagaaattttgtcatttcttgtaaatgaaattattacacaca

SEQ ID NO: 632253 - DNA, 603 bp, Homo sapiens
gtaccaaaaaatactttaacaaattttaatcacttatttagggaaagcaactttggaaaggatttcaaaacatgaataaaaataaaatctattatatatatgtgcattttactcagaatgattaatctgagtatacttcattgcaagcacaacctcctaatgatacgttatctttcaaatyagctacaaaacaactgcatatgaacatgtattttcacaaattctcatgtaaatgataaattataatggaaccacataatgtgacaactttaaaatataactatgaacaatagaagttggtatccagaaagcctaatttacaaataaattataatgccattctaagtggaaattgtagccacaattttaagttatttcaaatatagctcttgtgttttttctttctacctcacaattgagaagaagagtagatggagaaataatctaaaccatggtgtacacatttgtcttttgtatataagttgttcatattgttcattttatgttgattttggattcttaaaaaataaatgattaatcctttgagcagattcaaatatttagaaattttgtcatttcttgtaaatgaaattattacacaca

SEQ ID NO: 632254 - DNA, 603 bp, Homo sapiens
gtaccaaaaaatactttaacaaattttaatcacttatttagggaaagcaactttggaaaggatttcaaaacatgaataaaaataaaatctattatatatatgtgcattttactcagaatgattaatctgagtatacttcattgcaagcacaacctcctaatgatacgttatctttcaaattagctacaaaacaactgcatatgaacatgtattttcacaaattctcatgtaaatgataaattataatggaaccacataatgygacaactttaaaatataactatgaacaatagaagttggtatccagaaagcctaatttacaaataaattataatgccattctaagtggaaattgtagccacaattttaagttatttcaaatatagctcttgtgttttttctttctacctcacaattgagaagaagagtagatggagaaataatctaaaccatggtgtacacatttgtcttttgtatataagttgttcatattgttcattttatgttgattttggattcttaaaaaataaatgattaatcctttgagcagattcaaatatttagaaattttgtcatttcttgtaaatgaaattattacacaca

SEQ ID NO: 632255 - DNA, 624 bp, Homo sapiens
gattttgattaaatataacaattactcattactttgtacctctattttgaaaaatttatgatttatgtagcagtggttgctactgaaaataatatcataatattttttggcctggaagctgaaaggaattccatgggaccaaccatgtgatatcaaccatttcatagtctcaactactatttaatcaatwttggatattttccaaaaccactcagaatcataagagactgcattgatctttagctaaaacctttatgatatttataattcttttaaccagattaaataatttgaattaattgtgccctactgagtagtgctcctcaaacacttttgaccatgacccagaataagcaataatcttacattggtatccaaatacacacacatgcatatacggacaccataacataaagtttcataaagcactacttacctctgctgtacatgaagtatgacaatatttctattctggtctacttcattttcacttacttgttggtgacctgtaatttgaaaaatactgcatctctcttgaaagatgaggtactaagtcattctcacactctgtggagaaatacccaagactgggtaatttataaagaaaagaggtttaattgactc

SEQ ID NO: 632256 - DNA, 657 bp, Homo sapiens
cttaactcattccagcattaacccaaaagtccaagtccaaagtctcatatgagacaaggcaagtcccttctgtttatgagcctgtataatcaaaagtaagttargtacttcctagatacaatgggggtacaggcattgggtaaatataccccttccaaatgggagactttgaccaaaacatagaggctacaggccccacgaaattctgaaatccaatagggcagtcattaagcttaaagttccaaaattatctcctttgactccatgtctcacatgcaggtcatgctgacgcaagaggtgggctcccatggccttggggagctccacccctgtagcttttcagggtacagcccccctcacatctgctttcacagttggtattcagtgtctgtggctttttcaagtacatgatgcaagatgtggtgaatttaccattctggggtctaggggatgctggccctcttctcactaagcagtgccacagtagggactgtggggggggtggctacaaccccacatttcccttccacactgtcctagaagaggttctccatgaaggctctgcccctgcatcaaacttttgcctggacatccagacatttccatacatcctctgaattataggcggaggttctcaaacttcaattctatgatttc

SEQ ID NO: 632257 - DNA, 657 bp, Homo sapiens
cttaactcattccagcattaacccaaaagtccaagtccaaagtctcatatgagacaaggcaagtcccttctgtttatgagcctgtataatcaaaagtaagttaagtacttcctagatacaatgggggtacaggcattgggtaaatataccccttccaaatgggagactttgaccaaaacatagaggctacaggccccacgaaattctgaaatccaatagggcagtcattaagcttaaagttccaaaattatctcctttgactccatgtctcacatgcaggtcatgctgacgcaagaggtgggctcccatggccttggggagctccacccctgtagcttttcagggtacagcccccctcacatctgctttcacagttggtattcagtgtctgtggctttttcaagtacatgatgcaagatgtggtgaatttaccattctggggtctaggggatgctggccctcttctcactargcagtgccacagtagggactgtggggggggtggctacaaccccacatttcccttccacactgtcctagaagaggttctccatgaaggctctgcccctgcatcaaacttttgcctggacatccagacatttccatacatcctctgaattataggcggaggttctcaaacttcaattctatgatttc

SEQ ID NO: 632258 - DNA, 657 bp, Homo sapiens
cttaactcattccagcattaacccaaaagtccaagtccaaagtctcatatgagacaaggcaagtcccttctgtttatgagcctgtataatcaaaagtaagttaagtacttcctagatacaatgggggtacaggcattgggtaaatataccccttccaaatgggagactttgaccaaaacatagaggctacaggccccacgaaattctgaaatccaatagggcagtcattaagcttaaagttccaaaattatctcctttgactccatgtctcacatgcaggtcatgctgacgcaagaggtgggctcccatggccttggggagctccacccctgtagcttttcagggtacagcccccctcacatctgctttcacagttggtattcagtgtctgtggctttttcaagtacatgatgcaagatgtggtgaatttaccattctggggtctaggggatgctggccctcttctcactaagcagtgccacagtagggactgtggggggggtggctacaaccccacatttcccttccacactgtcctagaagaggttctccatgaaggctctgcccctgcatcaaacttytgcctggacatccagacatttccatacatcctctgaattataggcggaggttctcaaacttcaattctatgatttc

SEQ ID NO: 632259 - DNA, 515 bp, Homo sapiens
caccattattaactaaagcccgtagtctacatgagggttcactcttggtgtacattctgtgggttttgccaaatgtataatatcctgtacctaccattatagtatcaaacagaacagcctcactgcctcaaaaattctctgtgcttctgttccaccttccttccctccccctgagcccttggcaaccactgatctttttaccttctccatagtttgccttttctagaatgtcatgtrgttggaatcatacagtgtgcagccttttcagattggcttctttcacttagcaacatgcttgtaagcttcctgcaggccttcccatggcttggtagctcatttctttttagtgctaactaatattccgttttctagatggaccagtgtgtttgtccactcacctctcaaaagacatctgggttgcttccaagtttggcaattattaataaagctgctctaaacctcggcatacaggtttttgtatgaacctgttctcaactcatttgggtaaatacaaa

SEQ ID NO: 632260 - DNA, 585 bp, Homo sapiens
tgtgtgatttcaagcaaagagacggtagtggttgaattttgtccccctaaaatccacgtctatgtagaacctcagagtgtgaccttctttggaagtaaggttgctggagatgcaatcacttgggatgaggtcatcctggaataagtgggccctaagtccactggttggtgcccttataaggagggaaaatacagacacacagagacatggccacgtgcagatggaagcagagactgggggatgtggccacaagccaaagaacacctggackccccagaagctgaaagagacaaggaagggtcctcccctagagcactggagggagagggccctgccgacaccttgacattggtctctgcctccagaactgtgaggggagacacttctgttgttcaagccccagctggtggctttgaaccctttgtgagagcagccccaggacaccagcacaaagggtgagcatgtaggaggccagtgtggtgacctgcgcatcctgtggtccctcccctccggcgcccaacgcatcctcaggactagccggggcctggggaccggacagggagcaactggcagcagagggtgatg

SEQ ID NO: 632261 - DNA, 426 bp, Homo sapiens
gaattcccttggttgcgagtctacgtagatgtaaatttggcaagtggtttagtgtggtgtttctgtagctctgtgtggcaggggaggaacttttccatttttagaaccgaaaatgtttagtcactgatgcttttaaagaaaatgacaggcgtgtagacatgtaccacagagcacattatcctgtggtttcagcagagaggccaagaaatatgatggcggccccaaggtgcaattgacttcattgcttgagttgcatcagcccatgagtatgaatctcaagcmcttcctgggggagagttggcctggactagccacctgcaatgggagatgagtgggcccacttcctcccggggtcctgtggggaggtcaggcaatgtgaacttggaagacatctcccaggcttgtaaccaggtgctgcttgtcttc

SEQ ID NO: 632262 - DNA, 614 bp, Homo sapiens
cccaaaaatgatactctgtacaatttcagtagggagacccaaatatcaacacttagaagaatgagaaaatgagatttagggacaggataaatatgacagtccatcatttagatgtccatcatttagatgtggtgaataaccagaatgaactgtgtcactactgaagaccctttgtctctgccaattcaggagaaagttgaataagtttctgaactagctgccatagatggaatgcaaataaaccatttgcatctgttgagtcctagggtcaaatacaattagaaaatactacccgtttatgtaactggtatgtgtataaagacaaagagcctgaacattgtaatacaacacttatttttcaataaagggaacagcactactataagagtaattagtttaaaactaamattatgagtcagagtcccactgccctacacattttaaagtttattttgaatatatgaatatacgaggaacagccaccaaatctttaatactactttcttaatctctgctaatcgctctgctacagccttcctgctaaatgtattccagtgtatgtcctctgaccactgggaattgtatccattttatgtacccatattggggttaaa

SEQ ID NO: 632263 - DNA, 527 bp, Homo sapiens
ttatgagggaaatgcagggagtataggaaggcgaggaggtaacacaggaggaaaaggcagacaaaaagggtgctctcccagcccgcgcccccaggggacagggtctcagaatcccgaagggaaacgctggaagtggcgcaaggaacatgcctcaaaatcatgcctcctgaggaataacagcaacaggagagccactggttgagagcttctcccagagaatgtgaattccagcctacaagctggtgggcagaggaaacttacacggttctagcacgaaaattcaccctggaacatggaaagatgcagagcacagagggcaggggtgggcactgacagtcagtggaggtctcattcttagacactgccaaatctctctccatrgagtgggaccctcgggcactcacaccagccaggtacttaagggctctttttgcccttgtctttaccaagagaattcaccaagattttaaatgttttctgatctattaggttaatggtatctactgactccatgttagaaaaagctt

SEQ ID NO: 632264 - DNA, 583 bp, Homo sapiens
tactagtttacattcccacaagcagcataaaagaattcccttttcatcacaaccataccaacatctattattttttaattttttaaattatggccattcttatatctcattatggttttaatttgcatttctctgataagtagtgaggttgagcattttttcatatgtttgttcgttgtttgtatatcttcttttaagaatcatctattcttgtcctttgcccagtttttgatggaattatttctttctggctgatttgttggagttccttgtagattctggatattagtcctttgtcagatgcacagttgcaaatattttctcccattctgtgggttgtctgtttactctgctaattatttctcttgctgtgccgaagctttttagtttaattaggtcccatttgtttatttttgtttttgttgcatttgcttttgagttgttagtcacaaattcttggctgaagccaaygtctagaagagtttttctgttgttattttccagaatgcttatggtttcaggtcttagatttaagtctttgatacatgttgagttgatttttaaataaggtgaaagatgagga

SEQ ID NO: 632265 - DNA, 583 bp, Homo sapiens
tactagtttacattcccacaagcagcataaaagaattcccttttcatcacaaccataccaacatctattattttttaattttttaaattatggccattcttatatctcattatggttttaatttgcatttctctgataagtagtgaggttgagcattttttcatatgtttgttcgttgtttgtatatcttcttttaagaatcatctattcttgtcctttgcccagtttttgatggaattatttctttctggctgatttgttggagttccttgtagattctggatattagtcctttgtcagatgcacagttgcaaatattttctcccattctgtgggttgtctgtttactctgctaattatttctcttgctgtgccgaagctttttagtttaattaggtcccatttgtttatttttgtttttgttgcatttgcttttgagttgttagtcacaaattcttggctgaagccaacgtctaraagagtttttctgttgttattttccagaatgcttatggtttcaggtcttagatttaagtctttgatacatgttgagttgatttttaaataaggtgaaagatgagga

SEQ ID NO: 632266 - DNA, 647 bp, Homo sapiens
ctttttgcttagtattgcttgggctattcaggctttttttttggttccatatgaatttaaattttttttttctaacttctgtgaagaatgatgatggtattgaagcaggatatttccctgaccccttcatgagactctcaacaggggtgccttgtttacttagcccgccactctcaactcctcaagggagggagcacaagcaaacaggtgcgggaactggagtcaacaagcactggaaagggctagccacttcagtgacagcgggatcaaactccactcactcaagacttgctgtgttccactccttgcaggagggagcacacaggtgagtgggtgctggaaccagctagatgctttagcacaggcaggggcaaactccatgaagccccacagcagcatccaggcaggattgcctgccactcctgaagccccagaggcttcagtgctcttttaacgctgctgtccacagatgacttaagtgttaacagctcagtgggccctttgccttttcgcatgaggcagctgccctctgccagtgaaggcaatgaactagtgtgacwgccttttgtatctacactaatggatcccgagcttttgtccagtgtccaagaaaaatgagatcacatgaatgaactgaagcatggtaa

SEQ ID NO: 632267 - DNA, 647 bp, Homo sapiens
ctttttgcttagtattgcttgggctattcaggctttttttttggttccatatgaatttaaattttttttttctaacttctgtgaagaatgatgatggtattgaagcaggatatttccctgaccccttcatgagactctcaacaggggtgccttgtttacttagcccgccactctcaactcctcaagggagggagcacaagcaaacaggtgcgggaactggagtcaacaagcactggaaagggctagccacttcagtgacagcgggatcaaactccactcactcaagacttgctgtgttccactccttgcaggagggagcacacaggtgagtgggtgctggaaccagctagatgctttagcacaggcaggggcaaactccatgaagccccacagcagcatccaggcaggattgcctgccactcctgaagccccagaggcttcagtgctcttttaacgctgctgtccacagatgacttaagtgttaacagctcagtgggccctttgccttttcgcatgaggcagctgccctctgccagtgaaggcaatgaactagtgtgactgccttttgtatctacactaatggatccygagcttttgtccagtgtccaagaaaaatgagatcacatgaatgaactgaagcatggtaa

SEQ ID NO: 632268 - DNA, 647 bp, Homo sapiens
tggcctgcaacaggcatctcttttgagctactgtaaaatctcaataaggaattaaaaactgaccccatccagaaaaccctctttattgcctctttcttgtcacttctaacactctcatgcgtgtaacaaatgacttctatatgtcactctcaaatggtctggacccaaaacaatactggaaaaaaatataaaaaggcttttaagaatagagaatcaaaaagaactattttaaaaggtaacaaaaatcatactctctctmtatatatgtatatacacacacatatatagtatgttttctattatagtatatatattatatataaatatataaatttatatatggtatgttaccttttatatatatatatataaatcactatagtgctcttgtatcatttgggttattaaagaaactgtaagaaaaacatgaaaactatctagtggacttgaaaacacagaaataacttcatcttagagaaagcacttgtagttccagctattcaggaggctgaggcaggaggactacttgagtccaagagtttgaggccagattgagaaacatatcaagacctcatctcaaaagaaaagagaaaaagaaagaaagtaaagaagaaagaatgaaagaaagagagagaaagaaagaaatt

SEQ ID NO: 632269 - DNA, 539 bp, Homo sapiens
ccatcctccctcctcagcctctcgagtagctaggactaccagtgtgtgccaccgtrcctggctaattaaaaaaaatgtttttatagagacagggccttgctttgttgcccaggctggtatcaaactcctggctggaagggatcctcccacctcagcctccgaaagcactgggattataggcgtgagccactgtgcccagcttggatcaccattcttaactgtaaccatcctttcctttctttcttcatcttcagtgacaagtaaagtatcttattggatgtgggagattggcataggaagttagagaatgacttcccaaagtcactcttttctgtgggaagagacctagaaatcctggtgtgagaagtaatttgaggggatcaagaacttcttgattaaaggatggatttgttttcttttgttgcataataaattgctacaaatttagcaaattaaaacaacactcacttattagctctcagttctgcaaggctgaagtgagcgggcttgctatgctcagggtatcaggaagcccagat

SEQ ID NO: 632270 - DNA, 581 bp, Homo sapiens
tatgatcattattatgcttatgatgataggcacacgattataaacgtaatcacaggagtggcacatcatcatagtcacgagttctacaggatgtgggatctggggtgggtaagtgcatttttaaaattccacccaccaccagggtcatctcagaatgcctccaagtgcccctgcccctgtctgaaccctgctggaacaagcccaagcttgtactgttatttgctggcctgatgaacatcctatttcagtagtgatggctaattttatttcatattaagggatttgtggaaagaaattttaactaaagtatgatcattgtatcttgatgccccgaagggtgtgagagattcttaaagatgatagtaaacgtattagaaaaggagcaattactgttctagctttgtagaactatttatatccagactcttaatgtgtattataggtgagacmaagacataatatggattagttcattgcttattttattgtgagaaggagtctatggaactgggtcactggaatttttacaaatataattgagattatggatcataagttagaaggttgattgtatgaatggg

SEQ ID NO: 632271 - DNA, 607 bp, Homo sapiens
cctgcttcagcctcccgaatagccaggactacaggcacacgccaccatgcccagctaatttttgtatttttagtagagacagggtttcaccatgttggccaggatggtctcgatctcttgactttgtgatccgcccgtctcagcttcccaaagtgctggattacaggcatgagccactgtgcctggtcaaaatttttttaaaaattaaaaacattctctagtcgtgccttcatggaggcatactgagcatatggcatcatattttgtcacactctcacgtatctgctagtgtaagctacttcccagccyggtagcacttttgaaagacttacattgggctttttgtggcggaaatggggagcaggatttgttctttgtctttctgaacctgttttagcactgcacaccctctcctgatagtgcctgtggcttctctaagggagctttattcctcagagaagaaacctctgctagaagaaaggaaagagaataatggagaaggaaagattctgtgggggaaatacacaagatggtccttccagaaaagctgctcagacatctgaagcttttgtctatgagtattgttggccaattgttggaggactga

SEQ ID NO: 632272 - DNA, 607 bp, Homo sapiens
cctgcttcagcctcccgaatagccaggactacaggcacacgccaccatgcccagctaatttttgtatttttagtagagacagggtttcaccatgttggccaggatggtctcgatctcttgactttgtgatccgcccgtctcagcttcccaaagtgctggattacaggcatgagccactgtgcctggtcaaaatttttttaaaaattaaaaacattctctagtcgtgccttcatggaggcatactgagcatatggcatcatattttgtcacactctcacgtatctgctagtgtaagctacttcccagcccggtmgcacttttgaaagacttacattgggctttttgtggcggaaatggggagcaggatttgttctttgtctttctgaacctgttttagcactgcacaccctctcctgatagtgcctgtggcttctctaagggagctttattcctcagagaagaaacctctgctagaagaaaggaaagagaataatggagaaggaaagattctgtgggggaaatacacaagatggtccttccagaaaagctgctcagacatctgaagcttttgtctatgagtattgttggccaattgttggaggactga

SEQ ID NO: 632273 - DNA, 607 bp, Homo sapiens
cctgcttcagcctcccgaatagccaggactacaggcacacgccaccatgcccagctaatttttgtatttttagtagagacagggtttcaccatgttggccaggatggtctcgatctcttgactttgtgatccgcccgtctcagcttcccaaagtgctggattacaggcatgagccactgtgcctggtcaaaatttttttaaaaattaaaaacattctctagtcgtgccttcatggaggcatactgagcatatggcatcatattttgtcacactctcacgtatctgctagtgtaagctacttcccagcccggtagcacttttgaaagacttacattgggctttttgtggcggaaatggggagcaggatttgttctttgtctttctgaacctgttttagcactgcacaccctctcctgatagtgcctgtggcttctctaagggagctttattcctcagagaagaaacctctgctagaagaaaggaaagagaataatggagaaggaaagattctgtgggggaaatacacaagatggtccttccagaaaagctgctcaracatctgaagcttttgtctatgagtattgttggccaattgttggaggactga

SEQ ID NO: 632274 - DNA, 607 bp, Homo sapiens
cctgcttcagcctcccgaatagccaggactacaggcacacgccaccatgcccagctaatttttgtatttttagtagagacagggtttcaccatgttggccaggatggtctcgatctcttgactttgtgatccgcccgtctcagcttcccaaagtgctggattacaggcatgagccactgtgcctggtcaaaatttttttaaaaattaaaaacattctctagtcgtgccttcatggaggcatactgagcatatggcatcatattttgtcacactctcacgtatctgctagtgtaagctacttcccagcccggtagcacttttgaaagacttacattgggctttttgtggcggaaatggggagcaggatttgttctttgtctttctgaacctgttttagcactgcacaccctctcctgatagtgcctgtggcttctctaagggagctttattcctcagagaagaaacctctgctagaagaaaggaaagagaataatggagaaggaaagattctgtgggggaaatacacaagatggtccttccagaaaagctgctcagacrtctgaagcttttgtctatgagtattgttggccaattgttggaggactga

SEQ ID NO: 632275 - DNA, 344 bp, Homo sapiens
attgcaatccctgaggggtcccctaccaggaaatacattcacacttagtaattttatgacaactcctacattttcacctccaacccagacttctcttccatggacaccagcccacaggtccaatacatacttctcgtctccactaaggtagtgacatctcaaatttaaaatgtccaagccaaacttctgattttccccatcacaccccaaacctgttttcccccacaaacttctacatcacagttaatgacatctcacatcctatctcatccccatctcacataccatcttacggtggcagatagtattttstaaaaatacagccccagtaatatatccagaca

SEQ ID NO: 632276 - DNA, 563 bp, Homo sapiens
atcacactgttgtgttatcaaatactagatcttattcattctttctattttttttagtactctttaaccctccctctttccccactaccactaccattcccagactctggtaaccatcgtcctactctctatttccatgaattcaactgttttaatttttagctcctacaaataagtgagagcatgttaagtttgtctttttgtkcctggcttatttcacttaccataatgacctccagttccatccatattgttgcaaatgacaggatctcattcttttttatggctgaacaatactccactgggtatacataccatattttctttatccattcatctcttgatacacacttagattgcttccaaatcttggctattgtgaatagtgctgcatctcagcataatcttctatcaagatcatatatatggtctggatatagtggctcatgcctgtaaccctagcattttggaaggccaaggtgaacagattgcttgagcccaggagtttgagaccagcctgggcaacatgaagaaacctcatctctacaaaaaatacaaaaaaa

SEQ ID NO: 632277 - DNA, 603 bp, Homo sapiens
tactttgggaaggggttccccaaaagaaaatttttaatcacactcagcttctcagcctgggccaccatacaaaaacctcttgaagcataaatcgaccaaacccacttctactgcttgctttacttattttattwtttttttttttgagaaattgtctctctttgtcacccaggctggaatgcagtggcatgatctcgactcactgtaacctcagcctccaaggttcaagcgattctgctgtcttggcctcccaagtagctgggactacaggcatgcgccaccatgccagctgatttttttatttttagtagagatgggcttttgtcatgttggccaggctggtcttgaactactgacctcaagtgatctatctcagcctcccaaagtgctgggattacaggtgtgagccactgcacccagccagaaaatgctacattatggtcatctttcctttttgtaagcaagtgtagcacgtccactttcaccctccagaaggctggatggagaggaaatcttcaagccaaactgtccacagagccctctgaacccaacagagtgggaacacatgacagatgactttgaaatgaggcaagaaagtcaaaa

SEQ ID NO: 632278 - DNA, 571 bp, Homo sapiens
gattacacagctctcctgtgctgctttgtagagttttattttcacacactgccatgacaatccatcatactctgtcccctagggaagagaaagagtccatctttttataaatagctgcaggagattcctggagcagctcatgcccctcctgtgcttaaacccatggagcttaagacctaagaggctcactttccactgcaaaataccattcaccatcagtcccacaaatgtgaatggggctgcctccaggtacctcgactagaaagagaaaagcagcttataaaatatgctcctgcttatggaaggagagagataaaaggaagagcaacagcagtgcacaatgcacctaagagaatctatggcctcatcaaaaccggttttttaaaatgtcagaagtcacttgaaaacctgaaataaggaaaaaagtaatacttaaaggaagtgaatgatgggcagagaaraactgggaatttgagaagtgtcagtcactcagtaatgcctacttcatccaatattgttatcacagagataaagttggtaataacgcatcaaattgaaaatgtgtttaatt

SEQ ID NO: 632279 - DNA, 579 bp, Homo sapiens
ttcatttgatagcctagtaaaataggcatttattagtataaagagggactacttctcaaaaacaggaatgaattatttatattgactttattcaaaaagaaaaagaaaaccctaacactcagggatagtcttttgcaatgcttccaaaatctttttcccttctttcttttccttctcaacttctctgagcctgtaactgtaacttatcgaggtatgctcatcacttagcatggcctaggtcagtcgttttcaaagtatctgccagagacccctgaaatccctgagaccctttcagggaggccacaaggtcaaaactattttcatgatcataagaagacattatttgactttattattctcagttcacgctcaactctcacaggtctacaccactgctctsatgcccaatggaagagatgtttatggactcttgtgttttcaaactttctcagttttaatttctaattcagaaaatagaagtagatattacccacttgaacaaaagctctgcggatttttcaaaacatttacagagtataaaggagtcctaagaccaaagagttagagaaccattcaaca

SEQ ID NO: 632280 - DNA, 627 bp, Homo sapiens
ctgtaactgtaacttatcgaggtatgctcatcacttagcatggcctaggtcagtcgttttcaaagtatctgccagagacccctgaaatccctgagaccctttcagggaggccacaaggtcaaaactattttcatgatcataagaagacattatttgactttattattctcagttcacgctcaactctcacaggtctacaccactgctctcatgcccaatggaagagatgtttatggactcttgtgttttcaaactttctcagttttaatttctaattcagaaaatagaagtagatattacccacttgaacaaaagctctgcggatttttcaaaacatttacagagtataaaggagtcctaagaccaaagagttagagaaccattcaacaactccaaaatctcagtggcatatacaacacagcttatttctcattcaggcacacacccactgcagtcatctgagtgtgtgtgaatgtgtgaggggcaagggaaggcatttctacatcttcctcactcaggcatctgggctaaaagcgtctcaatgctgccacagtcaccrtgacaggaagaaggggagagaacaccttgactctcatcctggttctagcagcttctgcctgaaaatag

SEQ ID NO: 632281 - DNA, 539 bp, Homo sapiens
ctcatttatcaagggaggtgagttatcttgtgccagaaacagagtcaggagaggctagaaaagattctgaaatacttgggcttatttttaaaagctgattttttcaagtcaagtttcaatttaagaacaaaaataatgaagtcaactacctaatgtgaaatatttcaaattttttatcaaatgaggagttaatagacaaagcaagagtaagtgcactcttctggggcaatctaccaggactaaatctaaggaccctccccactctcacagcctcagcyagcccagcctctctggacacaggctggatcctcttgagagggcaggaaagaccaaaaggccatcaggggaagacacctgtttgggaaacgacggccccacaggaggagcacagctgtgttctcctcttcccctctctttatcgctgacaagaacagaagcaggaactggaatttggaaaagcaactaaacctgatttaaacagtcatattcaacagcacacacacatacaaagaaaacaagagacacagaaaaggagggtg

SEQ ID NO: 632282 - DNA, 548 bp, Homo sapiens
acaacttaaggctggctacagacccggtttacaaaaccactattgcactaaaatagaaccacatataaagcaaaagcatgcacgtgtggctgagagcaaacccagaagactaatacaacactggtgccaggttataattttcccattacacaaagctgttcttatcacttgaaatgaaacaaataaagtatgatatggttctttcsggacttatgaatgattattgaactactggaaaatgggatcaactatgaatttcatatttcccagtgaagatacatttccctgcacaccaattttcagatccacccctagccttcattcaacagatgtgggacccccccaaaataacaaagatggtttattgagctaaaataagatgagttaaagtaaatgacatcagaattaaaataaccaagtaaagaaagaacaactaagctttcagttttcaggacagctttaggtaatagcaaaatgtataggttctgagtcaaacacacgcatatccccaattcttccactgttagcttggtgattttagacaaatc

SEQ ID NO: 632283 - DNA, 552 bp, Homo sapiens
gtatgtgaccacactccaagtcaacaagcttgatttggtgggagcccagtgcattctagattaaaactgaaatatgctttaaaattatctttatgggccaggcactgtggctcacacctgtaatcccagcactctgggaggctggggcgggcagatcacctgagatcgggaattcaagactagcctgaccaacatggagaaaccccatctctactaaaaatacaaaattagccaggtgtggtggcacatgcctgtaatcccagctactcgggaggctgaggcaggagaatcacttgcacctgggaggtggaggttgcagtgagccaagatcatgccattgccctccagcctgggcaacaagagtgaaactccaactcaaaaaaaaaaaaaattttttttttatatatcttaatggatactctkgctctcaacaatgacttcgtgggctactataagtttgcacatttactccaactaaaaactgcaggtagtgtgtgctaatgttattcaagtgcagacccacatgctttttattctttgtgtttttcaaga

SEQ ID NO: 632284 - DNA, 612 bp, Homo sapiens
ttataaggaaaaagtaaatatagtttcacatatcctgtcggtaaaatattcattccaatttcctatcatgaggagaacttcttctaatacaaccatggggaactcgtacagatgagtgtatttaattgggatcatagaactgagatacagagagtcctggatcagttacatgtgtcttgctctttgcatcaaaaggagatatgcagtcttcatatcaaaggtatgctcaacttacatgatttcaacattgaaaaggaaggggcatatgacagagaaatcatacatttagtccagaagcctaacaatcttaygctccaaacaagctgaaactaagaaattagaaatatgaactggtgctcctccacctccacctagttagcctctgctccttccatctccaggctttgcttagtgtgacatttcactggggtccaaataattttcatgcttaaagatcagcattttaattaaagtgtgtccaaaatccaaatcaccaatctaatcctatgctcaaatgcataaacagcaatccaatgacaagggggtgcaggggatgactttattggacttactgagaaacattatgctggtctcccacccaaaaggttcctt

SEQ ID NO: 632285 - DNA, 567 bp, Homo sapiens
gaggctgatttcccctgcatctgctgaggtgaagccagtgctaaggtttcacttatactgaagaaattcttggtttcctccagaacagaacaccctgaaatatgaagctaatctcatcagagggacaggcaccttaccaagatgaaaattccttaagatttatttgcccagccttaaagcttagacaacttattaagagttacaatagttttgtcaaaaatgacagccttcagtgcttcacagaagccataaaraaaacaaagtccaataccgatgtgttttcgttaactgaaaatatcagtgaccaacaaatacaaagtttcattagaaatcatcaagaaaaaccaggcttgggaagataaattccttgatgcccatgttttaaaaatgatcctgtctgtggattaaactgcaagtcatttgggccattgctcagccgaaaagacaaatgtttcagagtagaaggccactctcctctggcctcaatgaaaacgcatgtcaccttccggctacagacccaggtggccgcctaccaccttgcattctcaggagcaatgcccacctgtg

SEQ ID NO: 632286 - DNA, 479 bp, Homo sapiens
tttaatgttaatgctggtcagttgtatctaaactccaaaagagagaaggtacaatgaggcatgcctggtccccacttcctttcatgacctgaactagtttttcaggtttctttggaatcccctcggccataagggggatccattcagttggttgcagggcttagaattttatttttggttaacgtgtgtgtgtgtgacccccaccrtggagttttatctgtccatactatcaagtggcactgaaactaagagaggagctcaagctgtagcaaaaataaatacccagaggaagacaggtaattttttgtcctaatgaatttgaaagcttcattctttggagaattcactttttccctattatgccaacgaggctaccatggactaattttaactgaatttagcaataccccctagaacattaatgctagtagaactttttcaaggagtagtaaaattccatgccatttgctcccttcttt

SEQ ID NO: 632287 - DNA, 470 bp, Homo sapiens
gaggacagcatcctctaaatgaagtcattttcatggtcaagacttgctccctttaccktttttttttttttttttgagacagagtctcgctctgttgcccaggctggagtgcagtggcatgatttcagctcactgcaccctcagcctctcgaggtcaagcgattctcttgcctcagcctcctgagaaggtgcctgccaccatgcccagctaatttttgtatttttagtagagatggggtttcaccatgttggccaggctggtctcgaactcctgacctcaagtgatctgcctgcctcagcctcccaaagtgctcctttaaaattctgaagtatcttgaataagtatttggaaccccaatctaacaagatcattcatcatgaatctgcccttcaaaagatataatttatttgtatttctctgggaatcatttaggaacagcagttcaaagcttgaaatgggttttcttctt

SEQ ID NO: 632288 - DNA, 590 bp, Homo sapiens
attcaaactatatcagaggaaaagcatttctttttactccttcctaaaatcccactaaaaggacaaaataaaaggaggagggagacaaaaaaacctactcaagtcacacacaaaaaactgggagtcagaaaagttttggtgtttttttagcagcaatattggaagctagagaaaaactgagcactattgtcaaaattctgaaggaaagtgatttctgacctagatttctgaagctagaataaaaaatagtgttcatactataaagtggtaaaaagtttgcttcccatgtaattgtctcatgaagctactaaaggacatgctcaagcaaagcaaggggctaagccaagaaagagggagcaggggacacaggaaacagggaattcaacaggagaggggcaagttaagatcctcgggtgawgacaggaaaagaggatgtcccgtccaggtagggcaagtgagaaggctcaagggagacttcttcaagaagatgaaaatgctgtgtctgaacatatggaggggacatttagagagccagagaagagttgggttgaaatagcaataaaaagagagaaaactaagcaaaggaaaaa

SEQ ID NO: 632289 - DNA, 582 bp, Homo sapiens
agatctcgtgagatgtatgcactgtcacgagaacagcatgggaaagactcaccccatgattcaattattacctcccactaggttcctcccacaacatgtgggaatcatgggggctacaactcaaggtgagatttgggtggagacacagccaaactatatcgatatctgtgcctttacctatttatcccttcttcrttggtgaagaagcttctctcacctgggccacagaactcccctccagctgtgtcccccattccctccatgcctgttcccagaaccagaactaactcactgcacctgcaccgctggaaggtgccgcccctttcctccctcagagaacaggccattccagggagccctctcttgcattctcagcctcttctctgctgcttgttccttcccttcccctcagttcctctcattccaaaaaagaattgttttagtaaaaagaaaactgtaaaaaagaattttctttttctcttttaaattgccaccttttctgcccccttcctgttactggcacacttcttaaaagaatggtccacacctgcaagcacccgtccccttctgccttcacactcc

SEQ ID NO: 632290 - DNA, 311 bp, Homo sapiens
gttcttaactggtaggtctcatgtagcactgtggcatcccacaaacccattgctaacatgcagccaaatttctatcatggtatacatttcatttttggtacagctagaattcttactgttgcagacatattcaaaagatgaaacacaaaggtgagaaggctgtgaagagggatatagagctatatgcaactctctgtaattgtaggagcaaaatgtattttttatttttatttttatagawttaaggggtatgagtgtagttttgttacatagatatatcatgtagtggtgaggtctgggctttttgtgta

SEQ ID NO: 632291 - DNA, 533 bp, Homo sapiens
gatggcgtggtaattactgcttactcatttactgtggttttgggtatttcattctcttcaggtatgccaccaaaaattttagcatttgagaatgggctggagacctatgagttgagaatcattgagccaaaccattagtatgtcaagactaagaggaagcaatattatgggaattgagtgaaaggctgatagattttatgascctatctgcaaagtttctgctttcatgatcaggagctaggcaaaaacacttctgggcccatccaggccatttcaagaaatagctcataagttgagaattcatctccaaccaactgatctcagaagagagaaatgaaggggtggagggaaagcaatgtttcatctcactgagccttagaccactgtcaacactgtaattatattacgtgcactggctattttggtcatttattgaaataaggtacatgggataatttaaaaactaaattcagtcagtcacttccaaaaacatccagctggtttgtgtgtgcagcaataaagtgtgaaagtga

SEQ ID NO: 632292 - DNA, 552 bp, Homo sapiens
tgcacttccaaagttgtgtgtgagccttcaccacaagaaccctggttctgtgggaaggacacgcagagsaccttgctgaagcaggagctgggagtgccacacattcgcatgcagactcccctgagatcccgaagcacttctcaaacatgaattaacttgagcactttcactgcagggcactgtgcacagttactcattcaggtattcatcaaagattcacacagtcaacaacacagggcccccccattacgttccagatgttgtgccaggtgagggggccattcttgagttccctggaaagcagatcccaagatagataaaccttcacttccctccctcaccgccattcttgatttcactcaccattggccggcactctggggagtccaggctgcctgactgatgggcagacccagaacttcagcactgagtccttggctgcctcggcctggcctcatcgagccacagctattgcactttcccatttcctgttatcccctgagcatggaagaaccaagagatgccccactgagtcccccaggttccagtcac

SEQ ID NO: 632293 - DNA, 552 bp, Homo sapiens
tgcacttccaaagttgtgtgtgagccttcaccacaagaaccctggttctgtgggaaggacacgcagaggaccttgctgaagcaggagctgggagtgccacacattcgcatgcagactcccctgagatcccgaagcacttctcaaacatgaattaacttgagcactttcactgcagggcactgtgcacagttactcattcaggtattcatcaaagattcacacagtcaacaacacagggcccccccattaygttccagatgttgtgccaggtgagggggccattcttgagttccctggaaagcagatcccaagatagataaaccttcacttccctccctcaccgccattcttgatttcactcaccattggccggcactctggggagtccaggctgcctgactgatgggcagacccagaacttcagcactgagtccttggctgcctcggcctggcctcatcgagccacagctattgcactttcccatttcctgttatcccctgagcatggaagaaccaagagatgccccactgagtcccccaggttccagtcac

SEQ ID NO: 632294 - DNA, 552 bp, Homo sapiens
tgcacttccaaagttgtgtgtgagccttcaccacaagaaccctggttctgtgggaaggacacgcagaggaccttgctgaagcaggagctgggagtgccacacattcgcatgcagactcccctgagatcccgaagcacttctcaaacatgaattaacttgagcactttcactgcagggcactgtgcacagttactcattcaggtattcatcaaagattcacacagtcaacaacacagggcccccccattacgttccagatgttgtgccaggtgagggggccattcttgagttccctggaaagcagatcccaagatagataaaccttcacttccctccctcaccrccattcttgatttcactcaccattggccggcactctggggagtccaggctgcctgactgatgggcagacccagaacttcagcactgagtccttggctgcctcggcctggcctcatcgagccacagctattgcactttcccatttcctgttatcccctgagcatggaagaaccaagagatgccccactgagtcccccaggttccagtcac

SEQ ID NO: 632295 - DNA, 532 bp, Homo sapiens
aaagttgtgtgtgagccttcaccacaagaaccctggttctgtgggaaggacacgcagaggaccttgctgaagcaggagctgggagtgccacacattcgcatgcagactcccctgagatcccgaagcacttctcaaacatgaattaacttgagcactttcactgcagggcactgtgcacagttactcattcaggtattcatcaaagattcacacagtcaacaacacagggcccccccattacgttccagatgttgtgccaggtgagggggccattcttgagttccctggaaagcagatcccaagatagataaaccttcacttccctccctcaccgccattcttgatttcactcaccattggccggcactctggggagtccaggctgcctgactgatgggcagacccagaacttcagcactgagtccttggctgcctcrgcctggcctcatcgagccacagctattgcactttcccatttcctgttatcccctgagcatggaagaaccaagagatgccccactgagtcccccag

SEQ ID NO: 632296 - DNA, 485 bp, Homo sapiens
gccatcatggtgaaaccccatctctacaaaaaatacaaaagttagctgggtgtggtggtgcttgcctgtagtcccagctactggggaggctgaggtgggaggaacacttgagcctgggaggtcaaggctgcagtgagctgagattgtgccactgagctccagtctgggtgacagagtcaagaccttttcgaaaaaaatattaaaagccaggcgtggtggctcacactgatatcccagtactttgggaagccaaggcgggtggatcatggtgaaaccctgtctctactggaaaaaaaaaaattagctgggcgtggtggcaggcacctgtaatcccagccacttgggaggctgaggcacaaaaactgcttgaacctgggaggcggaggttacagtgagctgagctcgtgccactgcactccagactgggtgacagagcaatacaccatctcaaaaatawataaaataataaataaataaatagagaa

SEQ ID NO: 632297 - DNA, 529 bp, Homo sapiens
tgactatgtggcacacaggagatttttaggacagtaaaacggtatgggaattgtgatgatagatgcacgatgttttacatttgtcaaaacccatagaactttacagcacaaagagtgaactttaacgtttaaaaatttttaaaaaatcatttaagaggtcaaaggatcccaagaagaaatgcagtctgtaacatgagaatctaactatattacaaatgtacgaaacaacctcactgaagagggtggggggaaaygtgctgacctagtaactctggaaatgagtgaggtctgcaagacgaaaggcaaaggactgcacaccaccactgtaccctgattatgaagtggtttctcatggggcacagatgaacaattctgctgctgctatacatgtttactggaattgatcaattaaataaatggatggcagatgcagggggcagtgtctcactcttggagtgagacttaaggataagctagaaggaggctagaaagatccatgcagtcgtggatttgacttggagatatcagt

SEQ ID NO: 632298 - DNA, 501 bp, Homo sapiens
tttttttttacccattaaaatatgataatttaacttacttkgtctctttccatagtaacacaaattattttatattccactggaatatcttctttgaagtaactggttccgaccacatgaggacagcgtttgcatggaaatatttccttcaaagtagtatagtgggaaaacacagacacacacaaactttttgtatttagatgtattactgtctggagtggattctgacactgaccttcaactatcttagtcaagggaaattttaagtaagttactgtcacagcaagtgttgtgttagaatactgtacttcattttcattagtttcgagccactcagcatctctatgctgcagatgtcaggaaggctcatctggactttggtggtgtttttctttcaagctgtttcttttctaatagctgtttatgtcagtttagaaaataagtggtacacatctgcatcgggggaattactaaactgtgattatttcacaaggttttgtg

SEQ ID NO: 632299 - DNA, 501 bp, Homo sapiens
tttttttttacccattaaaatatgataatttaacttacttggtctctttccatagtaacacaaattattttatattccactggaatatcttctttgaagtaactggttccgaccacatgaggacagcgtttgcatggaaatatttccttcaaagtagtatagtgggaaaacacagacacacacaaactttttgtatttagatgtattactgtctggagtggattctgacactgaccttcaactatcttagtcaakggaaattttaagtaagttactgtcacagcaagtgttgtgttagaatactgtacttcattttcattagtttcgagccactcagcatctctatgctgcagatgtcaggaaggctcatctggactttggtggtgtttttctttcaagctgtttcttttctaatagctgtttatgtcagtttagaaaataagtggtacacatctgcatcgggggaattactaaactgtgattatttcacaaggttttgtg

SEQ ID NO: 632300 - DNA, 555 bp, Homo sapiens
aagggacagcatctaggagaggggactttaaatttttaaaaatatattaatgcctcaactgtaaaaactgcctaacagtaagatattaacactacttcaaaatttattctgtaagacacctcaaatacccaccaagccaattaaagataaaagggaagagatcaaaagtcttttacaggtaggagatggyaattagcaacgtggaataatattgtgattggtattaagtgttaaattagatgtgaagttcttagcaattgagaccaaaagggacatataatggttgcatgagtctcattctctgttaggggtagccccatttttaagagacaaactttcctggtacatttcaagaggtatttattatattcaatcttacatgttgtaactgagtaacattttgttactcagtgtgtgtgtgcacatgcacttcagaaacattctttatcaaatgtatggaactatacaaatattggttcttgttctttcatgaatgtaaataatttatatagtgctatttcttttctctatttactttaacgttttagggaatgt

SEQ ID NO: 632301 - DNA, 555 bp, Homo sapiens
aagggacagcatctaggagaggggactttaaatttttaaaaatatattaatgcctcaactgtaaaaactgcctaacagtaagatattaacactacttcaaaatttattctgtaagacacctcaaatacccaccaagccaattaaagataaaagggaagagatcaaaagtcttttacaggtaggagatggcaattagcaacgtggaataatattgtgattggtattaagtgttaaattagatgtgaagttcttagcaattgagacmaaaagggacatataatggttgcatgagtctcattctctgttaggggtagccccatttttaagagacaaactttcctggtacatttcaagaggtatttattatattcaatcttacatgttgtaactgagtaacattttgttactcagtgtgtgtgtgcacatgcacttcagaaacattctttatcaaatgtatggaactatacaaatattggttcttgttctttcatgaatgtaaataatttatatagtgctatttcttttctctatttactttaacgttttagggaatgt

SEQ ID NO: 632302 - DNA, 555 bp, Homo sapiens
aagggacagcatctaggagaggggactttaaatttttaaaaatatattaatgcctcaactgtaaaaactgcctaacagtaagatattaacactacttcaaaatttattctgtaagacacctcaaatacccaccaagccaattaaagataaaagggaagagatcaaaagtcttttacaggtaggagatggcaattagcaacgtggaataatattgtgattggtattaagtgttaaattagatgtgaagttcttagcaattgagaccaaaagggacatataatggttgcatgagtctcattctctgttagrggtagccccatttttaagagacaaactttcctggtacatttcaagaggtatttattatattcaatcttacatgttgtaactgagtaacattttgttactcagtgtgtgtgtgcacatgcacttcagaaacattctttatcaaatgtatggaactatacaaatattggttcttgttctttcatgaatgtaaataatttatatagtgctatttcttttctctatttactttaacgttttagggaatgt

SEQ ID NO: 632303 - DNA, 612 bp, Homo sapiens
ttggcctaattttaattatgattccactgggcatgtggctactcagtctacttttctgttcactgagccagattttcaatccacatactcagagcaaattacgtaccaccggaaaactacattaaaacttttgggatagtgcaggctattttatgcactaaagcagtaatttaccaaatgttccttaatgatctgtgaaaaaattgccatgtttttcacgatattgaatgcgcttccaggaagttaggcaaagggagaatctgacctaatgtgaacaaatgagtaatcttagctcttacctttcctaaaatcaatactattrcctaattcagtgagcatgcacaggaaacatactcaaacgtacaggaccagctcttgaaacactgacacattttggtttcctctctcaagaaaacaacctaaggggaaattctatttccttctcatggcttctctcaaagttaattctttacacaccaagtaatagttataacatgcatgtatttctaaatctcaggttaccaaatataagatttttttttgagaaaacacctttgaagacaggggtataagactgggctgaaaataggagggttggttgaaaggagcagt

SEQ ID NO: 632304 - DNA, 599 bp, Homo sapiens
tgtggtcaagttttctgttatttgcagccgaaaacatccctaattgctatgctrggcacagctctatgaatacccagaaaaagaatatattttatggcaaaaaccattattaggagcagaaaagttattatgtaacagttaataggaagctatagtcattctaaactcatctccaaattagtaacacaaaagatcacagtattactagaagaaatgaaaaaaatccacaaccatactaattgacagaagaagaaaacatttaataaggatatagataactggaataatcaattacaagcttgatctaatggacatatacaaattttgcacaaaactaaagagaaaaaattatttcaaaaaatatgaaaactttataaataaattggctatgtactaggtcatagaacagatttcaacagatatcaggaatctgtaccatacatacaatacactctttcaccacaatatgttattacattgcagatataatgtccttgttaaaaaattagtgttgctatagcagcaaaaccaatttacaattttaatttaaaagatccaatttgtaatgtaataaaagccatacagatctttaaaaaaag

SEQ ID NO: 632305 - DNA, 599 bp, Homo sapiens
tgtggtcaagttttctgttatttgcagccgaaaacatccctaattgctatgctaggcacagctctatgaatacccagaaaaagaatatattttatggcaaaaaccattattaggagcagaaaagttattatgtaacagttaataggaagctatagtcattctaaactcatctccaaattagtaacacaaaagatcacagtattactagaagaaatgaaaaaaatccacaaccatactaattgacagaagaagaaaacatttaataaggatatagataactggaataatcaattacaagcttgatctaatggacatatacaaattytgcacaaaactaaagagaaaaaattatttcaaaaaatatgaaaactttataaataaattggctatgtactaggtcatagaacagatttcaacagatatcaggaatctgtaccatacatacaatacactctttcaccacaatatgttattacattgcagatataatgtccttgttaaaaaattagtgttgctatagcagcaaaaccaatttacaattttaatttaaaagatccaatttgtaatgtaataaaagccatacagatctttaaaaaaag

SEQ ID NO: 632306 - DNA, 570 bp, Homo sapiens
ttcaaatttttaatttctttttattttttaatttttgagagagagtctcatgtgatcatggatcactgcagccttgacctcccaggatcacacagtcctcccaactcagcctccctagttgggactacaagtgcatgtgccacccaccatgcccaggtaattttctttattttttgtagagctgctggtctatgttgccagggctggtctcaaactcctaggctcaagggatcctcctgcctcaacctcccaaagtgctgggattacaggtgtgagccaccttgcctgacataaaatttaaatttctctttacctatttttggtgcaaagaaatgtgactgggcaatcaactctcaagcatgaaaatatgaaaatacatcaaggtaaatttctgkgtggaaaatgaaaagagataagaaaaaaatgcaagagtctcaatttaaagaatttattcacaatttttttgttttatttgtctctcacggtcttgcctgaatatttgtgagtcttaaaaaatgaatagtgggtatccaagtgctatagtatttagtccattttaaaaagtgatac

SEQ ID NO: 632307 - DNA, 614 bp, Homo sapiens
agaaaaataatagtaataaatcagtacctcccatgaaagctcctgttatgtggcaatgaattagaatatcaaggtcaaacactgtaaaactgaattaaacagcccacataatttctccatctgactcccatttgtcagaattcatttttgtattaatacagaaaatgaatcattgttcaaacaggcatcatttttatgaattaaaaatgcataaatcaactgaatgtcctttattcaggaaacatttctctttatacgttgtgcagcttacrcagatgtctgatcacgggagaactgactgacaaaatgttgatgagtcaaactgtcattccccaatagggagaatgcctcacaattaaatacaagatttaagaagatgagttgtaacactaattgttccttcagaaatgtcacaaaggaagcacatcattttttttccccttttgttgcgatttgggaagaacaagggcctgggaaaagtgcttgtacagtccttccctcaagcaaggggcctgcatgtcattgggttctgggactggtaggctgggagcagtgagtttcgcccctcatcctgggatctagggggaaggatgcacccctgtttgcccccacta

SEQ ID NO: 632308 - DNA, 614 bp, Homo sapiens
agaaaaataatagtaataaatcagtacctcccatgaaagctcctgttatgtggcaatgaattagaatatcaaggtcaaacactgtaaaactgaattaaacagcccacataatttctccatctgactcccatttgtcagaattcatttttgtattaatacagaaaatgaatcattgttcaaacaggcatcatttttatgaattaaaaatgcataaatcaactgaatgtcctttattcaggaaacatttctctttatacgttgtgcagcttacacagatgtctgatcrcgggagaactgactgacaaaatgttgatgagtcaaactgtcattccccaatagggagaatgcctcacaattaaatacaagatttaagaagatgagttgtaacactaattgttccttcagaaatgtcacaaaggaagcacatcattttttttccccttttgttgcgatttgggaagaacaagggcctgggaaaagtgcttgtacagtccttccctcaagcaaggggcctgcatgtcattgggttctgggactggtaggctgggagcagtgagtttcgcccctcatcctgggatctagggggaaggatgcacccctgtttgcccccacta

SEQ ID NO: 632309 - DNA, 614 bp, Homo sapiens
agaaaaataatagtaataaatcagtacctcccatgaaagctcctgttatgtggcaatgaattagaatatcaaggtcaaacactgtaaaactgaattaaacagcccacataatttctccatctgactcccatttgtcagaattcatttttgtattaatacagaaaatgaatcattgttcaaacaggcatcatttttatgaattaaaaatgcataaatcaactgaatgtcctttattcaggaaacatttctctttatacgttgtgcagcttacacagatgtctgatcacgggagaactgactgacaaaatgttgatgagtcaaactgtcattccccaatagggagaatgcctcacaattaaatacragatttaagaagatgagttgtaacactaattgttccttcagaaatgtcacaaaggaagcacatcattttttttccccttttgttgcgatttgggaagaacaagggcctgggaaaagtgcttgtacagtccttccctcaagcaaggggcctgcatgtcattgggttctgggactggtaggctgggagcagtgagtttcgcccctcatcctgggatctagggggaaggatgcacccctgtttgcccccacta

SEQ ID NO: 632310 - DNA, 586 bp, Homo sapiens
tgtcttaattgtatcattgtagtaagttttaaaataaggaagtgaaattcctccmaatttgttcttttattcaagattgttttggttactctggggtactttaaatttccatatgaattttatcaccttgtcaatttctgccaagaagccagctaggattttaatagagattatgttgaatctatagatccattttaaaatatatattctatctttttatttactttatatgaggagacactgtcgtatcttcctttatttctttaatcatggttttctttagtttttaaaatatatttataatggctgctttgaaatcagttaaatctgacacctgtaccttctcaaagataatttctgttgtcttccttttttttttcttgtgtatgatttatactttactgattgttgttgtttggcaagagttacaatttttattaaaaaaacagacttttagatattgtagcaattttgcataccgatttttcccttcccttcttccctcctaggcttgttgctatttgcttatttatttatttagtaagttggctgtactattttagtgaagtctatttccctcatagta

SEQ ID NO: 632311 - DNA, 586 bp, Homo sapiens
tgtcttaattgtatcattgtagtaagttttaaaataaggaagtgaaattcctcccaatttgttcttttattcaagattgttttggttactctggggtactttaaatttccatatgaattttatcaccttgtcaatttctgcmaagaagccagctaggattttaatagagattatgttgaatctatagatccattttaaaatatatattctatctttttatttactttatatgaggagacactgtcgtatcttcctttatttctttaatcatggttttctttagtttttaaaatatatttataatggctgctttgaaatcagttaaatctgacacctgtaccttctcaaagataatttctgttgtcttccttttttttttcttgtgtatgatttatactttactgattgttgttgtttggcaagagttacaatttttattaaaaaaacagacttttagatattgtagcaattttgcataccgatttttcccttcccttcttccctcctaggcttgttgctatttgcttatttatttatttagtaagttggctgtactattttagtgaagtctatttccctcatagta

SEQ ID NO: 632312 - DNA, 562 bp, Homo sapiens
taaaacaatatgtgtgttactgaaaataaacagatagtgtaatacctggattataaacatcttgatcccttgaaaataaagtattgccttaattcaaataataatacctcaatgtttatatagtgcctatctgaaaagtatttaaagttactgttattttctagatttcctggcgggttgattcactggagggctagttggttagggaggtagcacctgagctgccaccctctcacagctcccagatggacatggagttgggcgctgggtgggtttgggaaagctcctgggtccggccctcccggatatgcttcctgccccagggcttcaggggatctgcgttctcaggccacatgcaaaaccagttgttaatcatccctgacacactctgagtcaccrccaccctctgggaagccacagggagaccttggctgaagccaccgcagcaccatgtttcgccatcttgcagccaagtctgtttatttgtctgcctttggcacctccaggacctctgtcttttgattgttggtctcagtttgcagacagatctaactgtggactc

SEQ ID NO: 632313 - DNA, 595 bp, Homo sapiens
aattttcaattcttgttttgctttgtcagtgacttgctccttgtcccttttcrtcttaaatatttgtccctagtttcattactggcaatgccttttaatgaaaaaagaaatgttttaattaaccacaatagtatttgtttatgttaacttaaaaattacagcatttgcaaatttttaactataaccaaaatcaacagctagcctaattttaaaaaagactttagaatgccttgatatctattggaacattacatatttgtgatccattttactttctactgttgaacagcagatccttctggttcaagaaaggctacgactccttattaagttgctgtagtattggcaaaatacaaaccaaactctatattagtgaccctgtatttatttgtaagaaaatttaatccatatgattttgagtcattgtcacttacagtaatacaagcaaatcatgctgcgtaagtgctacttgatttccaagatgccttttgaaccaccttttgaggtggtcttttttatttaggacaagaaggtttatttttactggttgaaaaaaggctcaagtttgagtaaaaatatgggcattcatcaaaac

SEQ ID NO: 632314 - DNA, 595 bp, Homo sapiens
aattttcaattcttgttttgctttgtcagtgacttgctccttgtcccttttcgtcttaaatatttgtccctagtttcattactggcaatgccttttaatgaaaaaagaaatgttttaattaascacaatagtatttgtttatgttaacttaaaaattacagcatttgcaaatttttaactataaccaaaatcaacagctagcctaattttaaaaaagactttagaatgccttgatatctattggaacattacatatttgtgatccattttactttctactgttgaacagcagatccttctggttcaagaaaggctacgactccttattaagttgctgtagtattggcaaaatacaaaccaaactctatattagtgaccctgtatttatttgtaagaaaatttaatccatatgattttgagtcattgtcacttacagtaatacaagcaaatcatgctgcgtaagtgctacttgatttccaagatgccttttgaaccaccttttgaggtggtcttttttatttaggacaagaaggtttatttttactggttgaaaaaaggctcaagtttgagtaaaaatatgggcattcatcaaaac

SEQ ID NO: 632315 - DNA, 595 bp, Homo sapiens
aattttcaattcttgttttgctttgtcagtgacttgctccttgtcccttttcgtcttaaatatttgtccctagtttcattactggcaatgccttttaatgaaaaaagaaatgttttaattaaccacaatagtatttgtttatgttaacttaaaaattacagcatttgcaaatttttaactataaccaaaatcaacagctagcctaattttaaaaaagactttagaatgccttgatatctattggaacattacatatttgtgatccattttactttctactgttgaacagcagatccttctggttcaagaaaggctacgamtccttattaagttgctgtagtattggcaaaatacaaaccaaactctatattagtgaccctgtatttatttgtaagaaaatttaatccatatgattttgagtcattgtcacttacagtaatacaagcaaatcatgctgcgtaagtgctacttgatttccaagatgccttttgaaccaccttttgaggtggtcttttttatttaggacaagaaggtttatttttactggttgaaaaaaggctcaagtttgagtaaaaatatgggcattcatcaaaac

SEQ ID NO: 632316 - DNA, 523 bp, Homo sapiens
cgatataatctctgttgactggtaatttacactccatttgggtcaacaccagttcctgagaacttaagcagtagtaaagaaagggaccactatgcaaagggggttataaaggatgttaatgatgacaacaaagaccacaacaggttgaaaatacatggatttagaggagggtacctgtgggctacagggtttgagaagactcytaaaagcattctgagttgggtgttgaaggttaggtaggagttggctggcaagaataaaatccagttgtaggagttaatagaaaaaactaaaatgtcagttgcaagaaatgccatgcatggagatgaaaaggtaacatttctggagccagtggttcagacatacatgctgatggctaaatgtgtctggggagcctcactcttaactcgattggtttgctggttagctgcagaaatttgcacttattccttactgcctctcttttatttattgttctaatcactgggcataataggagccaggtcatcggaggatggtgctg

SEQ ID NO: 632317 - DNA, 523 bp, Homo sapiens
cgatataatctctgttgactggtaatttacactccatttgggtcaacaccagttcctgagaacttaagcagtagtaaagaaagggaccactatgcaaagggggttataaaggatgttaatgatgacaacaaagaccacaacaggttgaaaatacatggatttagaggagggtacctgtgggctacagggtttgagaagactcctaaaagcattctgagttgggtgttgaaggttaggtaggagttggctggcaagaataaaatccrgttgtaggagttaatagaaaaaactaaaatgtcagttgcaagaaatgccatgcatggagatgaaaaggtaacatttctggagccagtggttcagacatacatgctgatggctaaatgtgtctggggagcctcactcttaactcgattggtttgctggttagctgcagaaatttgcacttattccttactgcctctcttttatttattgttctaatcactgggcataataggagccaggtcatcggaggatggtgctg

SEQ ID NO: 632318 - DNA, 598 bp, Homo sapiens
tggaagaatatatcccaagaggaaaatagcacacctttttttaaagagtatsttagataattgagacttgactattcctactgtaagatagaatgctatgtgaattaggatgctgtaagggaaagaagaaacacttaaatgttctggtataacatttgtatttcatagtctacagagataatgtgactgtgctggttacgaatattttaaccaattttagtataaaattcctgtttcaaaaccctatgaatcagttatagtctgacttatacactcacacaagacatactacaactatatttattttatttatttccaatcaattcctcaagaaaccaccaggagacttttcatttgaaaatgttgaagttggtatcatcttcaggacagaggtaaatgagaagcctctcattgtaatcagccctgtgcctggacattttactggctggggagaagtacggattaaaactcactcacaatgccacggtcaggacacaaattcttcctggtatgtaagtaatcctgacttactaccataaaactctccctgaaatagctgttttggcaaaagcttatttaattcagagatgaataatta

SEQ ID NO: 632319 - DNA, 598 bp, Homo sapiens
tggaagaatatatcccaagaggaaaatagcacacctttttttaaagagtatgttagataattgagacttgactattcctactgtaagatagaatgctatgtgaattaggatgctgtaagggaaagaagaaacacttaaatgttctggtataacatttgtatttcatagtctacagagataatgtgactgtgctggttacgaatattttaaccaattttagtataaaattcctgtttcaaaaccctatgaatcagttatagtctgacttatacactcacacaagacatactacaactatatttattttatttatttccaatcaattcctcaagaaaccaccaggagacttttcatttgaaaatgttgaagttggtatcatcttcaggacagrggtaaatgagaagcctctcattgtaatcagccctgtgcctggacattttactggctggggagaagtacggattaaaactcactcacaatgccacggtcaggacacaaattcttcctggtatgtaagtaatcctgacttactaccataaaactctccctgaaatagctgttttggcaaaagcttatttaattcagagatgaataatta

SEQ ID NO: 632320 - DNA, 416 bp, Homo sapiens
ttaattcagagatgaataattaagaagaaccagtgcaacrtatataaaataccattataaaacaaagaaaatatggagcaactggtgaatttataatgttcaacagaaatacgtggctatagatcaaaatcatcttcaaatatttctcatgaattttttaaaaaaatgaataatgaagcaattgaatctataatataagaatacaaagtaatgacacaagagtcagatgactacacactagaaagaagtgaaatgtgagtatcaaacatttttttaaaatacaaacatttaaaaaacgtaaacatcacagaagttagtgtgaaaaaacaaggcacacaggggagaaaagtcacttccaataaggcagaagacaggaatggtagatgtaagtaaatacagtaaaatgaaactaacat

SEQ ID NO: 632321 - DNA, 563 bp, Homo sapiens
attacttataaggccataggggacatctggatggtgaagagctggagaggacaggctttgtcaaaagccattaatagaaaataaaaataatattaaaaacaaaaaacagcttactagcattaaaaacaaaaamaacaacaaaaaaaccccaccacattgtcatttctaacccctagtttataaaatagactcactagcaattaggaaaaaaaataattgaaggctatagttttcataaagctacacacaaatgtagaatcttcaaatgagcctttcagaaacagtagaattaaaacaattacagagacatggccacagaccatttattttaaaatatctggtcctgtaacactttaccacagtatgaaaaagattaataatctgagtttatacaacaatattttgggaaaatgtaacaccactcataacacagtctcattagaatgggttctatacaatatgacaataaattaaaaaaaaaattatcgaactcctctatgtgcccagtgctgtgccaggtgtcatgagaaataggaaaaaaaaagtgcaacccaggcgttctt

SEQ ID NO: 632322 - DNA, 597 bp, Homo sapiens
taatcaagtcaaattatctatgagaagaagtgaagttgagggggcctgcaaatgaaaaccagactcaggcagcggctgacttgagaaagcccaggagctctattaaagacagagagagggagagagagagagagaagagagagagacatttttttcactacccccagactgtttacttttaaatattttgctttctcccttgctcatgtctacccctttgtttatttttatttgtttccttttctggatcttctaaaactaggctgaggactccaagggcaggcagaagagcccatatctgtgtgggaacggggaaagaataagggagcctagagtggggctctggcacaactgtgcctgggttctggggtgcctttccagtgggaatgacaggtggtggtcagaactggcttgggtctaaatcttctgagtgcagcttttggtccaaactgcaggtcattggtgagccctgtaaaatgcatttggatcctttaggccactgattcttctcaggcaattttactctcgaggggacatktggctatctcttgagacatttttggtttttggttgtcacatcattaaaaagtgagattt

SEQ ID NO: 632323 - DNA, 632 bp, Homo sapiens
tttccttgcccttctttctttaagtttattcacgaaggtttgatagctttagtgctagtataaatggtatcatttcaaattttgttttttgtttccaatttatagaaatgttttttgttttgttttgattttgtatacagttttcttgttaagtgcatttaccaatgctaacacatcttttatattctatttgattgttcttacatatgcaatcatgctgtctatgaaaaataaccttacttcctgtccagtaattttggctttttcttcttcattgcrttaacttctgacacagttttgaataaaagtggtgttagcataaatctagtctcattattttgtttgagaaggaaaacttacaatttttcattattaaattatgaagttttaaaaattctcagcttaagacagccttatgccaagtttacgaagagttttttcattatgaattggttttaattttgtcaactgattgtgctgagtctaatatattaagattataatgtgattttttttctttttttgtcaatgtggagaattacattaactgattttcaaatgttaaattctctcacattctcaaaataaatctcagttttttggactgaattatcctttttcctgtattgtta

SEQ ID NO: 632324 - DNA, 632 bp, Homo sapiens
tttccttgcccttctttctttaagtttattcacgaaggtttgatagctttagtgctagtataaatggtatcatttcaaattttgttttttgtttccaatttatagaaatgttttttgttttgttttgattttgtatacagttttcttgttaagtgcatttaccaatgctaacacatcttttatattctatttgattgttcttacatatgcaatcatgctgtctatgaaaaataaccttacttcctgtccagtaattttggctttttcttcttcattgcgttaacttctgacacagttttgaataaaagtggtgttagcataaatctagtctcattattttgtttgagaaggaaaacttacaatttttcattattaaattatgaagttttaaaaattctcagcttaagacagccttatgccaagtttacgaagagttttttcattatgaattggttttaattttgtcaactgattgtgctgagtctaatatattaagattataatgtgattttttttctttttytgtcaatgtggagaattacattaactgattttcaaatgttaaattctctcacattctcaaaataaatctcagttttttggactgaattatcctttttcctgtattgtta

SEQ ID NO: 632325 - DNA, 510 bp, Homo sapiens
ttatttctagttctcctttgtcagctttgtaaattgtatttttaaaacaatttgtttatttcatccaaattacctaatttatcagtatgcaattatttataaaatcccctaattattttttaatgtttataagatctgtagttctgtccccttttcattcctaatgttataatctggggactccatgcatattagtcatgttttccaaatagaatcaataggatatagatacacagacagagaaatgtragaggggatgcactcttgcgttcatggagggtaagaactcctatgataaacctccttcaagctggagtccctgggctgctggtagcatggctcagtccaagtctgagggcctcagaacctgggaggtttaggtgtaattccctgctcaaggcctaaggcctgagaatctggaagcctgtcagcacaaatccaggagtccaaaggctgtggagcctgaagtctttgtccaagtataggcgagaaagagtgtatcccagtttt

SEQ ID NO: 632326 - DNA, 586 bp, Homo sapiens
gtagctcataatattataatttttatatctcacaatttacttattttttctttcatcacttgtgcttttggtgtcatacataagaaatcacttcctaatcaaagaccacaaggatttatttayatttttttctaagagttttatagctttagctgttatgtttaggtctatgctcatttttgagttaatttttgtgtatggtgtgagatagggatctaacataattcttttgtatatggacatccagttgttccagcaccagtggttgaaaggctattttttcccctcattgaaatgtgtcttcattcttgttttaaaaatcaattgaccaaaaattcaaggtttatttctaaactctcatttccatttcattgatttatcctcatgccagtagcacagtgtctagattactgtagctttgtggtaaatttggaaattaaaaaatgtgagtcttacaattttgtttttttccaagattatttggctattcgagtcccttgcattttcttatgcattttaggatcatgttgtcaatttcttcaaaaaaccagctgagatttaaatagcgattgtgttgaacctataa

SEQ ID NO: 632327 - DNA, 586 bp, Homo sapiens
gtagctcataatattataatttttatatctcacaatttacttattttttctttcatcacttgtgcttttggtgtcatacataagaaatcacttcctaatcaaagaccacaaggatttatttacatttttttctaagagttttatagctttagctgttatgtttaggtctatgctcatttttgagttaatttttgtgtatkgtgtgagatagggatctaacataattcttttgtatatggacatccagttgttccagcaccagtggttgaaaggctattttttcccctcattgaaatgtgtcttcattcttgttttaaaaatcaattgaccaaaaattcaaggtttatttctaaactctcatttccatttcattgatttatcctcatgccagtagcacagtgtctagattactgtagctttgtggtaaatttggaaattaaaaaatgtgagtcttacaattttgtttttttccaagattatttggctattcgagtcccttgcattttcttatgcattttaggatcatgttgtcaatttcttcaaaaaaccagctgagatttaaatagcgattgtgttgaacctataa

SEQ ID NO: 632328 - DNA, 481 bp, Homo sapiens
gaaattaaaaaatgtgagtcttacaattttgtttttttccaagattatttggctattcgagtcccttgcattttcttatgcattttaggatcatgttgtcaatttcttcaaaaaaccagctgagatttaaatagcgattgtgttgaacctataaattaatttggggagtattgccatatcaatagtgtcgagtcttacaatccatrtggttacatttctttcaacaacgttgtatagtattcagtataaaagtcttgaacttactttgttaaaattatacctatgtatcgtattattttaaaatatataaataatatttttaaatggaattgttttcttattatgttcagaatggtcattgtttataaaatacaatttttgatgttttgtaatgaacattttatcagtgttaatagctttttagtggattttttaggattttccatatataggatcatgtcatctgcaaaaagagcagttt

SEQ ID NO: 632329 - DNA, 543 bp, Homo sapiens
tgttaatagctttttagtggattttttaggattttccatatataggatcatgtcatctgcaaaaagagcagttttattttttccactctagagcactgccctccccctaattttactggttataatctccagtaatatgttttaaaaagtggctatagtggatattcttaccttcctctgatcttagaggaaaagcattcaatctttccctaagaaacatattttttgtttttttgggkttttttttgttttttttatgaatgcctgtcattgggttgagaatattctcttttattcctagtttgttgagagttttttttttttcccccaaatcaggaaagagattgtattttgttaaataatttactgctccttttgaaatgatcatgtgcttattgtactttcttttattaacttggtatattacattaattgatttgttattatgttaaactaaccttacactaagataaagcccacttggtcatggtggataattcctttcatatgtttctgaatttggtttgttagtattttgttaat

SEQ ID NO: 632330 - DNA, 577 bp, Homo sapiens
gaggttgcagtgagccaagattatgccactgtactccagcctgggtgacagagggagastgtctcaaaacaaaacaaaacaaacaaacaaaaaaacttgaatagatatttccctgaacaagatatacaaatggctaaaagcacatgacaagatacctaatgtcactaatcattagggaaatgcaaatcaaagccacactgaattgtcatttcaaactcattaggatagctagtataaaaacagaaaataacaagtattgctgaagatgtgaagaagttagaaccttgcgcgttgctggagagaaagtaaaatggtacagctaccatgaaagacagtgtaacagcttctcaaagcactaagtatataattaccatatgataaaattgcactcctggatgtataccaaaggaattgaaattagggattccaagaggtatttgtacatgaatgtttatagcaatagtattcataatcgcaaaaagatggaaacaaattaatgttcatcagtggatgaatcaatgaacacattgtggtatatacacaaaagggactattactcatcctaaaaaaggaaagt

SEQ ID NO: 632331 - DNA, 577 bp, Homo sapiens
gaggttgcagtgagccaagattatgccactgtactccagcctgggtgacagagggagactgtctcaaaacaaaacaaaacaaacaaacaaaaaaacttgaatagatatttccctgaacaagatatacaaatggctaaaagcacatgacaagatacctaatgtcactaatcattaggraaatgcaaatcaaagccacactgaattgtcatttcaaactcattaggatagctagtataaaaacagaaaataacaagtattgctgaagatgtgaagaagttagaaccttgcgcgttgctggagagaaagtaaaatggtacagctaccatgaaagacagtgtaacagcttctcaaagcactaagtatataattaccatatgataaaattgcactcctggatgtataccaaaggaattgaaattagggattccaagaggtatttgtacatgaatgtttatagcaatagtattcataatcgcaaaaagatggaaacaaattaatgttcatcagtggatgaatcaatgaacacattgtggtatatacacaaaagggactattactcatcctaaaaaaggaaagt

SEQ ID NO: 632332 - DNA, 577 bp, Homo sapiens
gaggttgcagtgagccaagattatgccactgtactccagcctgggtgacagagggagactgtctcaaaacaaaacaaaacaaacaaacaaaaaaacttgaatagatatttccctgaacaagatatacaaatggctaaaagcacatgacaagatacctaatgtcactaatcattagggaaatgcaaatcaaagccacactgaattgtcayttcaaactcattaggatagctagtataaaaacagaaaataacaagtattgctgaagatgtgaagaagttagaaccttgcgcgttgctggagagaaagtaaaatggtacagctaccatgaaagacagtgtaacagcttctcaaagcactaagtatataattaccatatgataaaattgcactcctggatgtataccaaaggaattgaaattagggattccaagaggtatttgtacatgaatgtttatagcaatagtattcataatcgcaaaaagatggaaacaaattaatgttcatcagtggatgaatcaatgaacacattgtggtatatacacaaaagggactattactcatcctaaaaaaggaaagt

SEQ ID NO: 632333 - DNA, 577 bp, Homo sapiens
gaggttgcagtgagccaagattatgccactgtactccagcctgggtgacagagggagactgtctcaaaacaaaacaaaacaaacaaacaaaaaaacttgaatagatatttccctgaacaagatatacaaatggctaaaagcacatgacaagatacctaatgtcactaatcattagggaaatgcaaatcaaagccacactgaattgtcatttcaaactcattaggatagctagtataaaaacagaaaataacaagtattgctgaagatgtgaagaagttagaaccttgcgcgttgctggagagaaagtaaaatggtacagctaccatgaaagacagtgtaacagcttctcaaagcactaagtatataattaccatatgataaaattgcactcctggatgtataccaaaggaattgaaattagggattccaagaggtatttgtacatgaatgtttatagcaatagtattcataatcgcaaaaagatggaaacaawttaatgttcatcagtggatgaatcaatgaacacattgtggtatatacacaaaagggactattactcatcctaaaaaaggaaagt

SEQ ID NO: 632334 - DNA, 576 bp, Homo sapiens
atatccaagagaaatgaaaacatgtgtcccccaccacatagaaacttgtatacaaatgtttatagcagcaatattcacaatagctaaaaggtggagataacagaaacatccatcaatggacccatgaataaacaaaatatggtatattcatataataaaatatgattcaaccattacaaggaatgaaatacggacagtcctcaacaatgatttgacttacagcttttcaattttttgactttaaaataatgaaaaaatgaatgatacacaaacagtagaacctgtactttgaattttgattcttgatcttttcccaagctagtgaatatgctrtacaatattttctccccatgctgggcagcagcagtgagtcaaagcttctggtcaggtacgtgctcatgagagcaaacaaatgataccctacagtgtgctgtgttgccggatgattttgcccaactggaggctaatttaagtgttctaaacacatttaatgtaggctatgctaaatgatgatatttggtggttaggtatgttaaatacattttgacttcacgatatttccaatttacaagggga

SEQ ID NO: 632335 - DNA, 576 bp, Homo sapiens
atatccaagagaaatgaaaacatgtgtcccccaccacatagaaacttgtatacaaatgtttatagcagcaatattcacaatagctaaaaggtggagataacagaaacatccatcaatggacccatgaataaacaaaatatggtatattcatataataaaatatgattcaaccattacaaggaatgaaatacggacagtcctcaacaatgatttgacttacagcttttcaattttttgactttaaaataatgaaaaaatgaatgatacacaaacagtagaacctgtactttgaattttgattcttgatcttttcccaagctagtgaatatgctgtacaatattttctccccatgctgggcagcagcagtgagtcaaagcttctggtcaggtacgtgctcatgagagcaaacaaatgataccctacagtrtgctgtgttgccggatgattttgcccaactggaggctaatttaagtgttctaaacacatttaatgtaggctatgctaaatgatgatatttggtggttaggtatgttaaatacattttgacttcacgatatttccaatttacaagggga

SEQ ID NO: 632336 - DNA, 576 bp, Homo sapiens
atatccaagagaaatgaaaacatgtgtcccccaccacatagaaacttgtatacaaatgtttatagcagcaatattcacaatagctaaaaggtggagataacagaaacatccatcaatggacccatgaataaacaaaatatggtatattcatataataaaatatgattcaaccattacaaggaatgaaatacggacagtcctcaacaatgatttgacttacagcttttcaattttttgactttaaaataatgaaaaaatgaatgatacacaaacagtagaacctgtactttgaattttgattcttgatcttttcccaagctagtgaatatgctgtacaatattttctccccatgctgggcagcagcagtgagtcaaagcttctggtcaggtacgtgctcatgagagcaaacaaatgataccctacagtgtgctgtgttgccggatgattttgcccaactggaggctaatttaagtgttctaaacacatttaatgtaggctatgctaaatgatgatatttggtggttaggtatrttaaatacattttgacttcacgatatttccaatttacaagggga

SEQ ID NO: 632337 - DNA, 568 bp, Homo sapiens
tgggggcagttggagagaagatcagccgcaggctggctgaactccaggtgaagatctcatcttcccactccattccctttcatccygctgagagccacctccatctggcaataaaattcccagcatttaccatccttcaatttgtctgtgtgacctgatttttcctggatgccagacaagaacctggctaccaagagggcactgagctggttaacgtttaagctgtctgtggatgtcagagctaaaaggagcactgcaacaagcccatcaaggtttcaggagttgcaggtactctccccagacgctactgtggggctggagcccaaaagtgctcatcccggctcctgcgcctgcctgtctgaatggtccccctcctgtaagcggtttgagcatgtggtggccaaacagataagccacacccctctagaacttcctgtgaggggggtcagggaactctcccatctcattgcttctggttaagatcttccatatgtaatttgaattctacattttcggagtaagctcagatcatgttaattttgcttttgctctagaatattttctgttt

SEQ ID NO: 632338 - DNA, 568 bp, Homo sapiens
tgggggcagttggagagaagatcagccgcaggctggctgaactccaggtgaagatctcatcttcccactccattccctttcatcccgctgagagccacctccatctggcaataaaattcccagcatttaccatccttcaatttgtctgtgtgacctgatttttcctggatgccagacaagaacctggctaccaagagggcactgagctggttaacgtttaagctgtctgtggatgtcagagctaaaaggagcactgcaacaagcccatcaaggtttcaggagttgcaggtactctccccagacgctactgtggggctggagcccaaaagtgctcatccyggctcctgcgcctgcctgtctgaatggtccccctcctgtaagcggtttgagcatgtggtggccaaacagataagccacacccctctagaacttcctgtgaggggggtcagggaactctcccatctcattgcttctggttaagatcttccatatgtaatttgaattctacattttcggagtaagctcagatcatgttaattttgcttttgctctagaatattttctgttt

SEQ ID NO: 632339 - DNA, 605 bp, Homo sapiens
aggtggcatggaacaaacagggaagataaagttcattttattaggcaaatgactcgaggtcacatagttagtaaaagacagatatgaggtttgaactcaggtctcttttccaaaacgcacttgtcatattgctgctttgctctttgagtcaacaatcttttaaccctctctgatctcattttcttcaaacttaccatgatcaatagcagtaggtctgagcacactacttttccccctgtgagcctgcctcattgggcaaatttaatatggtcttgtttcccagtattttttcctttcattatatgggagggttttttttttaactttgctccttcttaattaaaaaaaaaagattatatggaaggttttcctttgaagaacttattaagcaactactatttcttcaaggacattttgtcctttgttatgagattcttttaaagtatatggagtttcaaagttctatagactttatggtgaagaactagrtttattttattaagtcttgggtaaatatgagttctgggagaaggtgccaaacaggtgctaaaacaggccctgggactgaaaaaaatattttgtttttcatctgtacacctttgcac

SEQ ID NO: 632340 - DNA, 503 bp, Homo sapiens
gaacactgttgaaatgacaacaaaagatttagaatattacctaaaattagttgataaagcagcacagagtttgagaagacatattcaaattttgaaagcaatactactgtgaatacaatgctatcaaacagcattgcaagctataaggraatgttttgtgataggacgagtcaatcgatgcagcaaacttcattgctgtcttactttaagaaattgttagagccacccaaccttcagcaaccactaccctgatcagtcagtagccatttacatcaaggtaagaccctccaccagcaaaaaagattatgacttgatgaaggctcagataatcattagcatttttagcaataaagtttttttttattaaggtatatacatttttcagacataatgctattgcaaacttaatggactacagtatagtgtgaaaagaactgtaaatacactggaaagcaaaaaatattgtgtgatttgccttcttgtaatatttgttttattggagt

SEQ ID NO: 632341 - DNA, 503 bp, Homo sapiens
gaacactgttgaaatgacaacaaaagatttagaatattacctaaaattagttgataaagcagcacagagtttgagaagacatattcaaattttgaaagcaatactactgtgaatacaatgctatcaaacagcattgcaagctataaggaaatgttttgtgataggacgagtcaatcgatgyagcaaacttcattgctgtcttactttaagaaattgttagagccacccaaccttcagcaaccactaccctgatcagtcagtagccatttacatcaaggtaagaccctccaccagcaaaaaagattatgacttgatgaaggctcagataatcattagcatttttagcaataaagtttttttttattaaggtatatacatttttcagacataatgctattgcaaacttaatggactacagtatagtgtgaaaagaactgtaaatacactggaaagcaaaaaatattgtgtgatttgccttcttgtaatatttgttttattggagt

SEQ ID NO: 632342 - DNA, 552 bp, Homo sapiens
atttaatcctcccatatttaccttcctgaatttagaattcctctggttcaatgtctcaggagaacaaacctctcatatctttctagagttagctgtgacccaaaatttgttctccctttatttattagtaataaagttctacaaaagtacatggctacccagcttgaaactacatttcccaatttccctagctactatggttctgagtaattattaggctcctaaaataagattgacctgacaaagttttgaatggcagaagtgaagtagattccgtttcccttggcaactgaccattaacagtgactattgatattggagttttgcagaagcaggctccagtttttagcttcctaagtgtcaagaaaatggcccagtactggtgacacgttagtctaacatctaacttcataatcatgggaatgcatatttaggyatccatttttcagtttcctgacgtccaaaggctggtatggctgtggccacggctcctgacctagactattacagttcccgtggtgagcacaggggtaggagcttgtgcacctggcc

SEQ ID NO: 632343 - DNA, 545 bp, Homo sapiens
acggtggcatgatgtgggctctctggcaacccctccatcccgggttcaagcaatcctcccacctcagcctcccttgtagctgggactacaggcgcatgtcaccawgcctgccttttttttttttttaatttttgtagagacagggtttcaccatgttgcccaggctagtctcgaactcctgggctcaagagatttgtgcacctcagcctcccaaagtgctgggattacaggcataagccaccacgcccatcccatttaccttgtttgtttattttagttttagatcatttaaaagaatttcttttagctcctaattaaatttcattcccataacatttttctccttgccctctaggctaatacttaagaaatatctgggaacttcttggatatttgggcacagatggaagaaagaagtcggggtgagggggtcagtattgaggataagattagccaaaaagaacaatgtacacaattaggcaattaaccatccctgttccatgggactggtgaccacctcagtccttcaatctgacagtcctagg

SEQ ID NO: 632344 - DNA, 592 bp, Homo sapiens
taatacagcctaacaactatttactcattatttacaacacgttacatattataagtaatctacaggggatttaaagatttaaagaatgtggtaggatgtccataggttgtatgcatgtacaacactacttaatataagggctgcaagtctcttatattacttataatacctaacaaaaagtaaatgctatataaatcattgtaatactatatcattttgtttgtagtttttaattgttgaattgttatttttgtttgttatattttttttattttttaatgccatattttcaatccacggttggttgaacatgcagatgtgaaacctgtggatacacagggtcgactgtatttggtaacctaattaattttctaagattctttgataattatttatttataaaactcaagttagtactttttaatcacattgagattraaaacatataaggagaaaaacctaaggggtcagaaaaaactacataggcattatataaaattactgttaagatactgatcccagttatcctcatttctcacatttatcaattaggagtatttaaatttgcttttaatctcctagataatgcata

SEQ ID NO: 632345 - DNA, 482 bp, Homo sapiens
tcctacttggagctgctgctaacatgaatctgtcttaggaggatggattgtttttaagaaaaagataatgggtttggatccaaggtgctttccaaataaagtctaaactcttagtttagggctttaaaactttttcctaacctactgccccagccttaaccctcattcttacctcactgggtaatgctatcatatggttagaaactttacaatattcttgtttctaaccctttggttacattgttttccttatccacttgttgaaactgtatatgcctttaaataacatctagtccatgaaagctttgtggtcctcccactgcaaatactttttttcttctagacttctgcaattttcgtgtctacttttctgatggcatctagcctattacgttctataytttgatattactctgtgttttgttcatttattgggtttttttaaaaattcttttattctgtttctatatctgttgacaaaa

SEQ ID NO: 632346 - DNA, 537 bp, Homo sapiens
gcttataatcaaggcgagaacaaatcacgaatcaataatctaagtgtctacctcagaaaagaaaaatataagagcaaaataaacccaaagcaagcagaagggaggaaacaaaaaccataagagaggtaatcaatgaaattacaaacaggaaaacaataaagaaaatgagcmaaaaaaaatggtttctttgaaaaaacatcaataaaatcagtaaagtctagcaacactgatgaaaatgacagctaagtaaacaaaaatcaacataaggaacaagataggggttatcactatagataatatagacattacaagaataataaggggatatcacaaacagctttacattaaaaaatttgacagtttaaatgaaccaatcccttgaaaaaaacccaaactaccaaaactcaaccaagatgaaactgataatctgaatcattttataaccattaaaaacatgaaatgtataatttaaagttttttgaaaaaaaaatcttcaggccaaatagttttgctggaaaattctaacaactatttgaa

SEQ ID NO: 632347 - DNA, 601 bp, Homo sapiens
gatatgttaattagcttgattatggtaatcaattcacagtatatacatgtatcaaaacatgatgttgtacacattgaatatataaaatttttaatttatcaattgtaccttaataaggctgaaaaaataatttctcttttacagagtggtgactgggccactcggagactactgcatagctcttctcaaagcttctttttctttattctaatatgctttgtaatggaaaattgaagggaaagtagagaattgactcattaaaaagtctaagacattaaaagatattttgtctatttttccaatagttaataatctttacttacggttgattaagttcatataagttaaccattccattaatatctatagagtgcctacatggygtgtactgttccacatggtagaaaacatagcaaggaacatgtagatagaaatcgctactcttatggatctagcatcctatcatcatgatagacataaatgagaaaaggtagtaaaataaatagtacggtagatagtaagtgctaaggagaaaaataaaacttggaaaaggaatcaagaatggtgaaagttgttgtatattagatgggtatatggattc

SEQ ID NO: 632348 - DNA, 601 bp, Homo sapiens
gatatgttaattagcttgattatggtaatcaattcacagtatatacatgtatcaaaacatgatgttgtacacattgaatatataaaatttttaatttatcaattgtaccttaataaggctgaaaaaataatttctcttttacagagtggtgactgggccactcggagactactgcatagctcttctcaaagcttctttttctttattctaatatgctttgtaatggaaaattgaagggaaagtagagaattgactcattaaaaagtctaagacattaaaagatattttgtctatttttccaatagttaataatctttacttacggttgattaagttcatataagttaaccattccattaatatctatagagtgcctacatggcgtgtactgttccacatggtagaaaacatagcaaggaacatgtagatagaaatcgctactcttatggatctagcatcctatcatcatgatagacataaatgagaaaaggtagtaaaataaatagtacggtagatagyaagtgctaaggagaaaaataaaacttggaaaaggaatcaagaatggtgaaagttgttgtatattagatgggtatatggattc

SEQ ID NO: 632349 - DNA, 556 bp, Homo sapiens
aatttttattttaacagtcaattcctctatttaggtttggcatgtaggtcctggcctacttttgtgggttttagttgcaatgactgtgtaattttcagaggttatgtggtgctattttcatcttggtttatttcatgcctcatggctcccactgtccttggtaatgctgcttgagggtgcagagcaagcttctccaggtcagatatccttatgtctctatatggaggggatttttcagcccatgtggatgaagagtaattcctagctgggcatttgttgtgcaaaattactcttgctggtgactctagccatacaatttcttgagtagtgagttatggtgggtgtgagagggagaatatcaggacattaagaacatggaagcttctcagactgggcactgtctcctgcttttttagctagagctagttctttgaaagcaaatgttgctctgtgagagcagtggcycttctggaagcccctttaattattgaagcacccgggacatatcattctgtttgtgctttcataaattacattgcagggatctgaaagacca

SEQ ID NO: 632350 - DNA, 556 bp, Homo sapiens
tgagggtgttgccaaaggagattaacatttgagtcagtggactgggaaaggcagacctaccctcaatccgggtgggcaccatctaatcagctgccagcgctgccagaataaaagcaggcagaagaaagttgaaatattaaactggcttagcctccaaggctacatctttttcctgtgctggatgcttcctgctctcgaacaacagactccaagttcttcagctttgggactcagactggcttccttgctcctcagcttgcagatgtcctaatgtggaacctcaccttatgatygtgtgagttaatacttcttaataaactctcctttatacatttatcctattagttccgaccctctagagagccctgactagtacaatgaagtttaaatgaaataatacatatcaaaagcataggccagtacccacatatacatgtacacaacaactactatcaattattattgttgttattaagcattatgacaatgataatgattattcagctggcatatgaaagatactaccaacaggtactattaattatgaaactattaa

SEQ ID NO: 632351 - DNA, 556 bp, Homo sapiens
tgagggtgttgccaaaggagattaacatttgagtcagtggactgggaaaggcagacctaccctcaatccgggtgggcaccatctaatcagctgccagcgctgccagaataaaagcaggcagaagaaagttgaaatattaaactggcttagcctccaaggctacatctttttcctgtgctggatgcttcctgctctcgaacaacagactccaagttcttcagctttgggactcagactggcttccttgctcctcagcttgcagatgtcctaatgtggaacctcaccttatgattgtgtgagttaatacttcttaataaactctcctttatacatttatcctattagttccgwccctctagagagccctgactagtacaatgaagtttaaatgaaataatacatatcaaaagcataggccagtacccacatatacatgtacacaacaactactatcaattattattgttgttattaagcattatgacaatgataatgattattcagctggcatatgaaagatactaccaacaggtactattaattatgaaactattaa

SEQ ID NO: 632352 - DNA, 643 bp, Homo sapiens
atactagacacttagttcatgtcatgtgttttccttttttcccctgcaagcattgctgtattacatcacagcaaaaaaaaaaaaatcaatgttcatactattactcttagtttkgagaaatgtttatgtctgggtactctggaaaacagcagagcactgtgtgtatacattattagctctttttaacccaatatgttaaaactgaaacatattttggtattttaaaacataaacttaagtaattcataaaatttaaatatgttgagtaataatagtaaaatagcaattaaaagcactttacacatattagttcatgtaatttcatttatttatgctgaattagatgaaactcctcccattagtgctagattacagtacagtcatgcattacttaacaatggggataattgctgagaagcatttttaggtgatttcatcattgtgcaagtatcatagagtatacttacacaaatctagatggtagagcctactgcacacctaggctatgtataacctattgctctgaagctgcaaacctgtacagaatgatactgtactgagtactctaggcaattgtaacatgatgatatttgtgtatctaaacatatctaaacatagaaaaggtacagtaaaaatatggtat

SEQ ID NO: 632353 - DNA, 551 bp, Homo sapiens
tgtcagaatacgctttaattcttctgagaattcctactgagtctacaaataccacacatgtatccagtcacctcctgggaatgatccaagtacatctaaagctattcttcatcacccagatgccttataggtytgtgtagttagggctgtgacctcattctctatggcagagaaaactgccacagggaatggagctttggccttaattggttaattataagggaaccctgcagcagagagaaaccctgccctctgaatcctggcttccctctacccactgttggcttctgttctcaatcctttgccactatgtatagccatgcatgacagagttttctcttaccgcatttcctacacagagccctggcctcaacatgtctggcaaataactcacggaattgatccttgtcagtgctttcaatgcaatgcctttgaatggcatggttaatttggatggcaaattatccacaggttttggctactgccaccctggctgtcatcccccatttcctatggcttggccaggcttcctatagatcacaatctcccca

SEQ ID NO: 632354 - DNA, 597 bp, Homo sapiens
agtgccatctaccaagcacttactacatgccaggtattgtgctaagcactttgctacatcccttatacatatatttttcccttcacattgaccctgcgargaaatatttttcccattttacagatgtggaaaccaaggttcagaggaatatgcccacagttgcagggctgctcagtgacagaacaagggtttgaattcagtgatgacgctaaatcctgggctctacagcatcccaaaaggtaaggtgagctctaagagttatttggcagatgaggaaatgggaggtatcatgatgcatcaaagtttcagagaagaggaaaagagctgcgtcctctgatcaggagtgtggggaagtgcggaggtgggaagagggaagctgaaggagttcaaatgcagctgtccctcaagtcattccttcctatgaagtaggccagtttatctgctgagggtgaaagggacggggagaatgaaggaggcttcaggaaagggtcagagacttgcggcagaccctgtgagaagatggaaagaacactgactgctaaagattcctggcagcaccaagcactcagctaggactggaaatcatcattttgtaat

SEQ ID NO: 632355 - DNA, 536 bp, Homo sapiens
tcaggctgtctgattatgtcttgtttttgttaataatctgttttgacgtgggttttctgttactagtaggcaaaaatatctaacattatcaaggctgaattagatagtgtaaaataactgaatgcctggaagccatgtgtcaattttaatcattttagttaattactagtatatttcccaagcaattatggacttggttttaaataaatcacaacttcgactattatataatgatatttgtttcaaaaatgtgcagggccactttttttgtttattgtyaccataagtgcctaagttagactggttctttattgttattctttcctagatcacaccctttgctgtggctattcactgctacgatattagtataggactattctagtacagtatatttgagaggtttttttttttagctttatagctaactcatccacaattctacttcattccctatatctgaattataccagaagtttactgagacaattctaattagtatttgttttgtcttttaatgttagctaacatttatt

SEQ ID NO: 632356 - DNA, 536 bp, Homo sapiens
tcaggctgtctgattatgtcttgtttttgttaataatctgttttgacgtgggttttctgttactagtaggcaaaaatatctaacattatcaaggctgaattagatagtgtaaaataactgaatgcctggaagccatgtgtcaattttaatcattttagttaattactagtatatttcccaagcaattatggacttggttttaaataaatcacaacttcgactattatataatgatatttgtttcaaaaatgtgcagggccactttttttgtttattgtcaccataagtgcctaagttagactggttctttattgttattctttyctagatcacaccctttgctgtggctattcactgctacgatattagtataggactattctagtacagtatatttgagaggtttttttttttagctttatagctaactcatccacaattctacttcattccctatatctgaattataccagaagtttactgagacaattctaattagtatttgttttgtcttttaatgttagctaacatttatt

SEQ ID NO: 632357 - DNA, 616 bp, Homo sapiens
gtaatggcttcaaagtactggtggggtagaaatagctgttaactcatagttttaggtaagttatcactcaaagtaaaatacgccaggaatgcatattttatggttcaatattggaaaatctctcaatataaattcactatgttaatagactaaaagaaaataaaatcttatgattaytccaactaatgtgtggttcagcttctctatttacatggagggaaacttctgttagaaaatcagaaataaaagaaatttcctcaaattggtaaatattatataacaaaaacttagcgcaaacatacttaccaatgaaaatttaaattcattctattcctttgaatatcctgagcaagacaaggatgcccattgtcactcctaatattttacatagcagtaaaggttctgaccaatgccataactgaagaaaaacaaagaagaggtgtaagaattggaaaggtagagatgaaactgttattagttataaatgatataataatctgctaaaacaaccccaaaagaatcaacagacaggccaggcacggtggttcatgcctgcaatcccaggactttgggatgctgaggtgggagaatcactttagcccaggagtttgagacc

SEQ ID NO: 632358 - DNA, 626 bp, Homo sapiens
agagctcatggatgaccattatgtttccactccttctcagactctgaaaaggatggatcggagatgggactcatttccacaggatgaaaggatatgattcaaaattgtaccaagtgcaattaaagttagatattagaagaaacttkgttttagaatccccaagggatttttgaggtctctttgaaaatttctgagaaaatactaataatacattaagcatctgtttttcccagaaacaagaagatggataagatagcctctcgatcccttcttttctagaagttctttagaattcaagtaagagggaaatttaaacccaaccaccttctgccccaggtccagttccagggtggccgaatgggcaaatggctactcgtcatgaataggatgacctctctggtcctttcctcctttaagtttattaactctcttgggttagagagaaatctaagccaaatgaccttctgcccccaggtctagctctggggtgaccaataggctgatgatcaatcactatccccattaaagcctagcttttgctaccagcttgctaattttagatacaatttccagggtgacctaccctgaagagcactctagagttgactgagttgtttggggaacag

SEQ ID NO: 632359 - DNA, 615 bp, Homo sapiens
ttctgcttcctattctcctccttgtccttgcccataccaggtattggttcacattccttgaacgctgggttttacactctcatgttgagctaagaactggggccttttggttacacaaacttgccagaaaaaaaaaaaaaaaaaggaactgggggctcctggccataagccaggttcgtcattctgtattccatttgtcctcttgaactcgaagaccaactcgagccgcttaaaatgtccacttctttaaggcaggggctggrgggtggggaggggctgctaattctcatcaatgaaaggtccaaatagaacaaaaattagatggctaagaaccaggaacaagaagattccaggtcctggggtgggtatgccagggacccatcctgctggaaaggccgatcctggcagacctagagcagaccctgtctatgcgaccctcgatctgagagcctccttccaacagaaccagggcctgggctggggcatccacagaggctggtcataaactatacctccagccccaccctgcacaccagccgggaggggaagctgctatagcgcacggtgaagctggtccaagccccagagcctggctttctatgacccctctccata

SEQ ID NO: 632360 - DNA, 615 bp, Homo sapiens
ttctgcttcctattctcctccttgtccttgcccataccaggtattggttcacattccttgaacgctgggttttacactctcatgttgagctaagaactggggccttttggttacacaaacttgccagaaaaaaaaaaaaaaaaaggaactgggggctcctggccataagccaggttcgtcattctgtattccatttgtcctcttgaactcgaagaccaactcgagccgcttaaaatgtccacttctttaaggcaggggctggggggtggggaggggctgctaattctcatsaatgaaaggtccaaatagaacaaaaattagatggctaagaaccaggaacaagaagattccaggtcctggggtgggtatgccagggacccatcctgctggaaaggccgatcctggcagacctagagcagaccctgtctatgcgaccctcgatctgagagcctccttccaacagaaccagggcctgggctggggcatccacagaggctggtcataaactatacctccagccccaccctgcacaccagccgggaggggaagctgctatagcgcacggtgaagctggtccaagccccagagcctggctttctatgacccctctccata

SEQ ID NO: 632361 - DNA, 604 bp, Homo sapiens
ctgtaatctcagcactttggtaggccaaggcgggcaggtcacttgaggtcaggagttcaagaccagcctggccaacatggtgaaaccccatgtctactaaaaacaataaaaaaattagtcaggcaaggtggcacgcatctgtaatctcagctactcgggaggctgaggcaggagaatggctttaacctgggaggcggagttttgcagtgagttttgcagtgagctgagctcatgccactgcatcagaaactcagtctcaaaaaaaaaaaaaaatccaacttcaccactagggtattcttcagcagactccatacatcctaacttcattcacacatatttycctttcttttactacatttgtgcttttaaaaaattcaaagaatttatggagaaggaatttgctaataccacatctctaacagctgctagtcgaatgtactaaatccatagctgcgtctgttacattatgtggccatcttatacttgaggaaagtctggttgctttcaaaagaactgatttaaacccaccccatggagtttaagaacaagttccatggagcttaggggttgtgtggataattctgcctgaatgtaatactgcaat

SEQ ID NO: 632362 - DNA, 453 bp, Homo sapiens
acctatatgtccatgcgaattaagagggttaggtatttgctttatgggtagaaaacttaacataaagggattaagtaacttgctgagagcatagtgtaaatccatggcaaaacctgggtcccctgatcatcagcccagttactgagtgactagatttggcctctaagacagttctttcttccagagaagtctaacaccaacaacctgtatacrtaagaagagaaaggtttttaaaaagtaccttatatagctaggtgtgtaacaaggcagagtccaaagattttgctctccaatgagtgccactaactttcaagcaataataaattcttccagattctaaggacttcaactaacactttcaaatgaatatgaatataatccacaagagagaggtgggaggtcatgattttatgtccataatgctttgttttaatgcctaagcatatggtttct

SEQ ID NO: 632363 - DNA, 587 bp, Homo sapiens
aaaaaaaatcagaaaaagaacacatattcaaagtaagcagaataaagragataataaaggtaaaagcagaaatcatgagacttcagaaaacaaaaacaacagaaaaaaaccagtaagtccaaaagctgtttctttgaaaatatcagtaaaattaagaaacctctactagactaattgggaacaatagagaaaagaaacaagttaacaatgccaggaataagataggtgactataaacacattaaaagaatgataagaaaatattatgaacaactttatgcttaaacatttcaccacttggatcaaataaatttcttgaaagacacaactacccaagctcactcaagaagaaataagtggcctgaatagcctaacatctactttttaaaaataatttatagttaaaaaaaaaactgcccacaaagaaaactccaggcccagatcactggtgaattctaccaaacatttaagaaaaaaaagacaccaattctaacgaaactcttccaacaaagtgaaaagaaagaattatttcccaaagtattctatgaggccagaattaccctgatatcaaaaccagaggcattacaa

SEQ ID NO: 632364 - DNA, 587 bp, Homo sapiens
aaaaaaaatcagaaaaagaacacatattcaaagtaagcagaataaagaagataataaaggtaaaagcagaaatcatgagacttcagaaaacaaaaacaacagaaaaaaaccagtaagtccaaaagctgtttctttgaaaatatcagtaaaattaagaaacctctactagactaattgggaacaatagagaaaagaaacaagttaacaatgccaggaataagataggtgactataaacacattaaaagaatgataagaaaatattatgaacaactttatgcttaaacatttcaccacttggatcaaataaatttcttgaaagacacaactaccmaagctcactcaagaagaaataagtggcctgaatagcctaacatctactttttaaaaataatttatagttaaaaaaaaaactgcccacaaagaaaactccaggcccagatcactggtgaattctaccaaacatttaagaaaaaaaagacaccaattctaacgaaactcttccaacaaagtgaaaagaaagaattatttcccaaagtattctatgaggccagaattaccctgatatcaaaaccagaggcattacaa

SEQ ID NO: 632365 - DNA, 513 bp, Homo sapiens
atttttcctcaggctgatagggtgygtaaaaaggtgagagactgggcacgaatgggagggttcctaagggtgagagattgggagggaatgactcctgggcctaatttaaacaaagctaaaagacagatgaagtcagaggtgaatgaagcagttaaggtcttgccttcagctcaagaccacccatctggttgtaggtactgtttagcactattgccatctgaaaggactgtccttggaagcactgtccgtgggaccatttattgagtggagattaaacattgtacctatctcaacgtcatcttcaaagtgagattaagtacctgagtgaagtattgtcctcttttcacagatgaggaaatggaggcttcaaggtcaaaccccttgcccagagacatgcagcagaaagtgatgaagctgagatttgaacttgcacctgtctgcctgcaaatcccatctcttcctgctgtgccagagacagcagaagggcccacggctgtgtagatgtggcctatt

SEQ ID NO: 632366 - DNA, 546 bp, Homo sapiens
tgcagtgcctttggctgagaggaggggtcatttcagattgttgaggggcttagcttttttttttttttgagacagagtctcactctgtcacccaggctgaagtgcagtggcgcratcttggctcactgcaacttccacctcccgggttcaagtgattctcctgcctcagcctcccgagtagctgggattacaggcgcctgccaccatgcctggcaaatttttgtatttttagtagagacagggtttcaccatgttggtcaggctggtctcaaactcctgacctcatggtcttccctccttggtctgccaaagtgctgagattataggcgtgagccaccacgcctggccagggcttagcattttattgttggtttacattcagttccccgagctcttttaagaagtgcatgtctccctagtaagccacaccttagaaataagcatattcagatgagtaatgctgtgatggaggcagagcctcctcagccctgctcacggaatgcttccaggactttgctgctggccttattgagctctgattccctt

SEQ ID NO: 632367 - DNA, 588 bp, Homo sapiens
tagctttttttaaattaaaagacctctttcaaaacagaagatttcagttaatttggcattgctcttagttttcctctctgaagttgaacttttgtgtccactccttccctaaaaagcagtccatttgtaaactaagttttctggatataggtgagctatatacatatgcatgcacagtaaaaggaatggctagctcttcttcccctggagrgcagagcttgggtgacactttagcacgatgccctgggtatacactcaatcaatactgactaggcccaggagatggatctgatccacatttttaggggaactaagcagaaaaggagatgtttcctgcgtgcttcataaagtatataggtttttcactgactgaaaatgattagaatatagtcctcacaattttataagcactaaattttcaagaactgaagggccagagtccttaatgtcataaactcaatatcttacagtgcaaagtgtgtgtatataaatatatatatacatatatataaaagaaaattaagaatagactttaaatttaaaaatctgaagatcactcttttaaactactttccatgatctgtagaa

SEQ ID NO: 632368 - DNA, 568 bp, Homo sapiens
ggccaaccagtccctgagatcattctgattctaaaaagcaaaatgtctctaattaaggttcttacctattggggaccttagtcatctttgaaaaatctgataaaaactataaaccattgtttcagaaaaattcacatatacccagggacacaggcatgctcttacaagttgaggtgatcaccagatcacaaaggggtccgttggagcctaagtttatgagcctcttttctgtataattaggaaacatccttataatcttatcactagtatcrtggggaaaattgccaagtctttcctttccttttcctctccaacttcatacctaggctctgccctcccacacactcctacaccagcccccgatcctggcttccctcacactgccccgggccagggccgaagctgcagcggtggtggcaacagcatcagctgttgctaaggaagctgagaatgcagggtgggggccggagagtgggcagcaacccagcagggcagcaccccccatgcatgtctgagcaccttgggccctggaaacggtgttcccagctggctgccatggcaacagcag

SEQ ID NO: 632369 - DNA, 478 bp, Homo sapiens
ggaatgtgtgctctcatatgctacaaaaaaataattcaaagttacacctgcattccaactgcagacattctgcattaacccccatccagtatagcctctttagggctcacagtacccttcggaggtacatggaactagccttcactgttatcttgaagacagtgcaggagtgatcacccttcttcagaatctgaatggatgagctacttcaggaaccgaacttgaaaatataagggaatctcacctatcaaagaccattgcatggaagacagggaccagttattcgtttgctttgtttyactccactgtcatatcccactgtcatatcaacaagaggaaacatattcaagctgcaaaacctgggctttaggtttaacatgttaaaggaaaaataaatatgctataaaatattccagtggtaactgggatgctgaaggaaagtggaaggggtggtggtatttacaaaacagttgaattc

SEQ ID NO: 632370 - DNA, 551 bp, Homo sapiens
taccgagaatggtttattgaaagaagacataaacatcactgtgatttcaggaaattaactttagttaactttacttcattcacttttttactcaaaaaatatttactttaaaactaagtgtttgtctagtaaggaagcagtayaatatagtggttaagagctgaaactctagaacatctgagtttgaagtctatctctactgcttatcaagtgtttctggcttggatgttcaccaatctttctgttttctcatccatacgatggggataattataatacctttctcctccagttgtaagagtaagagagcatacgtaaagtgctgagtacaggacctgacgcagagaatgcattcacatggtatcagccactattagagaactgctttctaggtgctgagatttcagtggtgtacagacccaaggatgccctcaaggagctcactagcagttgggaaacaggactcagatatataaatacagtggtaactcaaaagtggtcttaaagagaaggagagtctaattagggattttaaaaatctgctataaccc

SEQ ID NO: 632371 - DNA, 547 bp, Homo sapiens
agcatggtctttggctctgtagaattattctgtcactgtattctgagtaaccctgagcattgccatttttcttcttttgttatcatggcctgtctacctcaaatgcaggtcatgatcttgtctttctgttcatctcttaactcattccccaacatccagcttcatatacctatctgtaaagcctttttaatggatctcttcactgaggtgatctcttcctcttctgaattcctatcatgaaggagcatagctagaccgaggtttgaatctcatctccgctatgtgattgttgaagtcaatttccttatctataaaagagtagtaatagygtaaagtagctttgtggggttgttttacaaaatactgactatatataaagctcctatcaaagcatctaaaagtaacaaaaataacacaaattaaaattaatacagtcaaattaattaattcatgtgaagtgcttagcagagtacctgtcatagtagtaagctctcagtgttaggttttgtttttcatcaataagtgggagagatttgctgttactaac

SEQ ID NO: 632372 - DNA, 456 bp, Homo sapiens
ttaaaggggaaaatgtacagatgcctctctktctgagtatgtgctgaaaaaagcaaagaatgcatatttgggacaagaaggctctaaaacagggaacaatataaacccagatttgaaacaatttatgcaaaacaactagattagagctaggcacactcttgcagctcctaggaagagtaagatggttctgagcctgcatttgttatctgtcttgggtgtggagaccactgtagaagggaagggctcagaggccgctggctctgctgtgcattctttctagatgtagggtagtgatcagaggcagggaggctgggaagggcttgggtggcttctccaggcagctcagaagctcccgactgctgtggaaggtgaactgtcttcctgctgagccaagggctcagggaaatgctgttatctctgtcctcagtatttgcatctcaactcacccttggcagc

SEQ ID NO: 632373 - DNA, 584 bp, Homo sapiens
aaaatttcactatttgaagtattctaggcttaagttcacaccaaaaaaagaaactcgcttttcccctcctccccacctcacttcataggacatcaagcccttctagagaagaggcataccttagaagaaacactattgaaaggccatgtttgtttgtttatgtaggtcttctaaaacaagctgccatctttaatactcatttctcaatctcagtccaaaaacactttctctaagtaaatgaatgaggaaattcagtttccattttactgttagttttagtttagccaaggagtttgactaaaatcgcttaaaaaaatcttttamggaatgcattaaggctaaaaaagcccaaacccaccatgagaaagcacatcacagaaggccctatatgtccttattctttatttttttatgtttatttttgagacagggtctcattctgtcacccatgatggagtgcagtggcccagtcctagctcaccgcagcttctgactcctgggctcaagtgatcctcctgcctcaaccttctgagtagtcaggaacacaggggtgttagtttttaattttttgtagagatggggtc

SEQ ID NO: 632374 - DNA, 629 bp, Homo sapiens
cttcataaagtttttccagagtaatgagaggttgatcatgacagagaggctgagtttcagtcactcaaggtggtatcctcaacacctttctcatggtaggcatgcgtgcattaaataaacattgtgcgcttggtgcactcagtcggtgatgaccccctggtgttaattactctatgactcagacccacagccaaggtgtctttctcagactgactctagctgatttagatgtcgaacctcttctgctgcccacccagagttctaaatccagcyacaagttcttcaacccatggtggagacagtgggcttgaaaagttaatcaatgactccaggccgccacctctctatctcttctacatatgaaagaggtcttttcacagctggttaggccccagtcaccttgtggtaccatgtacgtgtctccccattctacacggctctcagtttagagcagggattatgttctacttggctcagttagatactgccctctacatggcatgtgaatttaatcagagctactttggctctaagtgatggaaacctaatttaaaacagcttaagcaagaaaaggtgacttataggaattttaccctagggatgtagagatttttagaaagaagtataaa

SEQ ID NO: 632375 - DNA, 665 bp, Homo sapiens
tctacacggctctcagtttagagcagggattatgttctacttggctcagttagatactgccctctacatggcatgtgaatttaatcagagctactttggctctaagtgatggaaacctaatttaaaacagcttaagcaagaaaaggtgacttataggaattttaccctagggatgtagagatttttagaaagaagtataaatggctttgaaaagggaacaccaagggtggtaggtgcacagagctggacccagaggtctttcaaatgtactatcaagggtgctcatccaggagggaaggaggaaacaaacctttctaagattccttcaacatctggccagatgaaggagctcagtgtctaaattaaagtgcattatctccagaggtggctgcagtatgttagtatggaaccaggctgcttattattttctattgaagcccacattttttgttcagcagcaagagtcactgyggacccactgctgaggccaattagatctacagaacttgtaaagtcggtctcaattttatcagtgtctgactgatttcaatagcataatttgatatagcaattgcatagagaaggctttacaacatacagcaggcagcaatgggtgcctttccaattgtaattttacttttgagttagttgggcttttcatttgc

SEQ ID NO: 632376 - DNA, 557 bp, Homo sapiens
ggtgatgggatgatctgcgtagcaaaccaccatggcacacatttacctatataacaaacctgcatgcctggcacatgtacccctgaacttaaaataaaagctgaacaaaaaaaaaaaaaagaaaaatgctatggaaaaattaaacaggctgtgggtacaggaaatgccagggtgatgtggaaaggttgctgttttatgggcggtgatcagaaaatgtctcagtgattcggaagccttctgggcagagagcagaaagaagtattggagtgatccatgcatayttctgaagaaagaacattccaagcagaggtaataaccaataccatgccctgaagtgggagtattttccctatggtaaagaacagaaaagagcccttttggtctcaagtggacagaggggaataatgatagaacaagaggtcaggaaggtgaccaggccaggtggcactcaatgtttcagaccattgttagacctttggcttccactctgtcattccttgaagcaactaccaaaggtagagaagaaaaccacaatgctatatgaaaatgggaggcta

SEQ ID NO: 632377 - DNA, 557 bp, Homo sapiens
ggtgatgggatgatctgcgtagcaaaccaccatggcacacatttacctatataacaaacctgcatgcctggcacatgtacccctgaacttaaaataaaagctgaacaaaaaaaaaaaaaagaaaaatgctatggaaaaattaaacaggctgtgggtacaggaaatgccagggtgatgtggaaaggttgctgttttatgggcggtgatcagaaaatgtctcagtgattcggaagccttctgggcagagagcagaaagaagtattggagtgatccatgcatatttctgaagaaagaacattccaagcagaggtaataaccaataccatgccctgaagtgggagtattttccctatggtaaagaacagaaaagagcccttttgstctcaagtggacagaggggaataatgatagaacaagaggtcaggaaggtgaccaggccaggtggcactcaatgtttcagaccattgttagacctttggcttccactctgtcattccttgaagcaactaccaaaggtagagaagaaaaccacaatgctatatgaaaatgggaggcta

SEQ ID NO: 632378 - DNA, 557 bp, Homo sapiens
ggtgatgggatgatctgcgtagcaaaccaccatggcacacatttacctatataacaaacctgcatgcctggcacatgtacccctgaacttaaaataaaagctgaacaaaaaaaaaaaaaagaaaaatgctatggaaaaattaaacaggctgtgggtacaggaaatgccagggtgatgtggaaaggttgctgttttatgggcggtgatcagaaaatgtctcagtgattcggaagccttctgggcagagagcagaaagaagtattggagtgatccatgcatatttctgaagaaagaacattccaagcagaggtaataaccaataccatgccctgaagtgggagtattttccctatggtaaagaacagaaaagagcccttttggtctcaagyggacagaggggaataatgatagaacaagaggtcaggaaggtgaccaggccaggtggcactcaatgtttcagaccattgttagacctttggcttccactctgtcattccttgaagcaactaccaaaggtagagaagaaaaccacaatgctatatgaaaatgggaggcta

SEQ ID NO: 632379 - DNA, 557 bp, Homo sapiens
ggtgatgggatgatctgcgtagcaaaccaccatggcacacatttacctatataacaaacctgcatgcctggcacatgtacccctgaacttaaaataaaagctgaacaaaaaaaaaaaaaagaaaaatgctatggaaaaattaaacaggctgtgggtacaggaaatgccagggtgatgtggaaaggttgctgttttatgggcggtgatcagaaaatgtctcagtgattcggaagccttctgggcagagagcagaaagaagtattggagtgatccatgcatatttctgaagaaagaacattccaagcagaggtaataaccaataccatgccctgaagtgggagtattttccctatggtaaagaacagaaaagagcccttttggtctcaagtggacagaggggaataaygatagaacaagaggtcaggaaggtgaccaggccaggtggcactcaatgtttcagaccattgttagacctttggcttccactctgtcattccttgaagcaactaccaaaggtagagaagaaaaccacaatgctatatgaaaatgggaggcta

SEQ ID NO: 632380 - DNA, 556 bp, Homo sapiens
ataaatgggattagttttaatattgttaagttgcaaaaatacaggcatatgtgcatgccaaagcgaaaatgtacgcaagcaaagggggaaaacatatgggtacccatatggcgaaaagcacattgctagaccttcacacacttctcatttacaacaagaaccaaagttagtgaacataaatttgctttgcaaaaatgtgagaggaacagcttgtttgcccataactgttccactgarcaagatatgtataaccttgatttctcatctcagacacctctttctcacactccagggattaattaggctctaaacatgacttcagattagaaacaaggctcctagctgccttggagagagacaaagaagtagtagcaagactggatgatgcagcaggtcaactaataggcaattcctattagtggctggaactgttacctgggatggcttagaagagaaatgacgttgggaagtctcagcaggtttattttaattgacacagaggaacaacagggacctacagcggacaatggcatgaatgtggctttgatttggaggc

SEQ ID NO: 632381 - DNA, 594 bp, Homo sapiens
ccttcatcaaaattaaaaaccttcggtggagacacagactggataaaaacatttcttgtacatatatttgacaaaaaatttacatctagtgtatatgaagaattcttccaacacaattctaacactccacttcaaactgaaaaaaaaaakgggcaattccaaaagaagatacagtatatgaatggcaaataagtacacaaaaatatgactaacatcttcatcatataaataaaaatcaaaccaagatgagataccgttatataatccctaggaagactaaaattataaaggctgataatatcgagtgttggtgaggatgtggatcaactgaagctttatatattaactctgcaactgtgaaaacatataagccctataggaaacaatttcacattttgttataaagttaaacatacacttagcgtacgacccagcaattccactcctaggcatttattcaagataaatgaaagcatatgctcacaaatgtacattgtacacaaatgtttttagcagcttcattaataatagctgtaaacgacgaataacccaaataaccattgacaggcaaatagattaattgtggaatattct

SEQ ID NO: 632382 - DNA, 545 bp, Homo sapiens
tataaataaaaatcaaaccaagatgagataccgttatataatccctaggaagactaaaattataaaggctgataatatcgagtgttggtgaggatgtggatcaactgaagctttatatattaactctgcaactgtgaaaacatataagcmctataggaaacaatttcacattttgttataaagttaaacatacacttagcgtacgacccagcaattccactcctaggcatttattcaagataaatgaaagcatatgctcacaaatgtacattgtacacaaatgtttttagcagcttcattaataatagctgtaaacgacgaataacccaaataaccattgacaggcaaatagattaattgtggaatattctaacaacagattgctactcagcaattaacaggaacaaaccactggtgcacataaacaaaatggataaatctcaaaaacggcatgctgaggaagttaagctaaaaattaaaaaatacatgctgtatgaatttgtttgcatgaaatcctataataggaaaaactaatctagactggc

SEQ ID NO: 632383 - DNA, 565 bp, Homo sapiens
gttccatagtggccctgaagccagccttgttgggttgagaggttctgatgatcttggccaaaggagcatggaccctttcctgtagaacaagtcttggagtgaggaataggtccagcttgtccatttcaagcactgtgttctccaagactgtccactcttcacagccttcacatttattcaactccaaagtaacaaatttatcatcagtagcatgctgcagatgacacatttaattctcatacactatctgacaccaactcaactccagatgctgaaggtggtgacagatctgaaacgtctatgtgcgacctttaattctgattttgcgcctgctcatgatcatccctggaactgggaatcaatgcaccattcctggcacatcagttacggttcccgaatctggctcctggcagctcactaggaaatgcagatgtctgtttacagctggaaaatgtaacattaatttcacycacaccagctctacctcttaagacagtgcttagcatttagtgtgccaagatagcctatgtttgtatgtatgtatatatgtatagatatctctgtg

SEQ ID NO: 632384 - DNA, 570 bp, Homo sapiens
aatacaacaatcacacatctttttagtaaaacgtcttgaaatgtattccaatgaacttaagatgaagcaaagggaaaagctaactagtgtcacctacaaaggaatcataataygaaagaatgaggtggaagaattgttataaatctgataattaagctaaatgaaaatgccaatgtctcaacatgtaaacgcggattgtgacttcaaaaggtgattttgatagtctgagaaacacagtgccaagataggaaggaggatgaaaggaggctgccgcaattcttacctcccatagaggaagtgaggaaacatttactcagcttgaataataagactcacacaggctgcaaatgctcctggaaaatataaatctaaccaccactataaaaaatcaaatatttatttcaaaaaactatagaggataaaatcaaagaaaatttgtttcaaatagcacaagatacaaaacatgaaagctactagacagaacaaaaagaggaaaacaaaaagctgacgagaaacaaacacatcagttttaatacctgcaagtgggttaaactccccattataatgaaa

SEQ ID NO: 632385 - DNA, 570 bp, Homo sapiens
aatacaacaatcacacatctttttagtaaaacgtcttgaaatgtattccaatgaacttaagatgaagcaaagggaaaagctaactagtgtcacctacaaaggaatcataatacgaaagaatgaggtggaagaattgttataaatctgataattaagctaaatgaaaatgccaatgtctcaacatgtaaacgyggattgtgacttcaaaaggtgattttgatagtctgagaaacacagtgccaagataggaaggaggatgaaaggaggctgccgcaattcttacctcccatagaggaagtgaggaaacatttactcagcttgaataataagactcacacaggctgcaaatgctcctggaaaatataaatctaaccaccactataaaaaatcaaatatttatttcaaaaaactatagaggataaaatcaaagaaaatttgtttcaaatagcacaagatacaaaacatgaaagctactagacagaacaaaaagaggaaaacaaaaagctgacgagaaacaaacacatcagttttaatacctgcaagtgggttaaactccccattataatgaaa

SEQ ID NO: 632386 - DNA, 571 bp, Homo sapiens
ggaggatgaaaggaggctgccrcaattcttacctcccatagaggaagtgaggaaacatttactcagcttgaataataagactcacacaggctgcaaatgctcctggaaaatataaatctaaccaccactataaaaaatcaaatatttatttcaaaaaactatagaggataaaatcaaagaaaatttgtttcaaatagcacaagatacaaaacatgaaagctactagacagaacaaaaagaggaaaacaaaaagctgacgagaaacaaacacatcagttttaatacctgcaagtgggttaaactccccattataatgaaaaaaaggcttcagttggattaaaaaaaagataacagaatatatttctgctctgtttaccaaagctatatctaaatcagactaatacaaatcttttttaaaaggctgagcaaatgtacatttagtgattaacaaaatccaagtaggaaatacaattttaaagttaaaaaaggttaactgtaagccttaaacattaaattgtaaaaaaaaaaaaaattatactgataaaagaagcaattcatattaaagctctaa

SEQ ID NO: 632387 - DNA, 556 bp, Homo sapiens
ggatgaaaggaggctgccgcaattcttacctcccatagaggaagtgaggaaacatttactcagcttgaataataagactcacacaggctgcaaatgctcctggaaaatataaatctaaccaccactataaaaaatcaaatatttatttcaaaaaactatagaggataaaatcaaagaaaatttgtttcaaatagcacaagatacaaaacatgaaagctactagacagaacaaaaagaggaaaacaaaaagctgacgagaaacaaacacatcagttttaatacctgcaagtgggttaaactccccattataatgaaaaaaaggcttcagttggattaaaaaaaagataacagaatatatttctgctctgtttacmaaagctatatctaaatcagactaatacaaatcttttttaaaaggctgagcaaatgtacatttagtgattaacaaaatccaagtaggaaatacaattttaaagttaaaaaaggttaactgtaagccttaaacattaaattgtaaaaaaaaaaaaaattatactgataaaagaagcaattcata

SEQ ID NO: 632388 - DNA, 571 bp, Homo sapiens
ggaggatgaaaggaggctgccgcaattcttacctcccatagaggaagtgaggaaacatttactcagcttgaataataagactcacacaggctgcaaatgctcctggaaaatataaatctaaccaccactataaaaaatcaaatatttatttcaaaaaactatagaggataaaatcaaagaaaatttgtttcaaatagcacaagatacaaaacatgaaagctactagacagaacaaaaagaggaaaacaaaaagctgacgagaaacaaacacatcagttttaatacctgcaagtgggttaaactccccattataatgaaaaaaaggcttcagttggattaaaaaaaagataacagaatatatttctgctctgtttaccaaagctatatctaaatcagactaatacaaatcttttttaaaaggctgagcaaatgtacatttagtgattaacaaaatcmaagtaggaaatacaattttaaagttaaaaaaggttaactgtaagccttaaacattaaattgtaaaaaaaaaaaaaattatactgataaaagaagcaattcatattaaagctctaa

SEQ ID NO: 632389 - DNA, 571 bp, Homo sapiens
ggaggatgaaaggaggctgccgcaattcttacctcccatagaggaagtgaggaaacatttactcagcttgaataataagactcacacaggctgcaaatgctcctggaaaatataaatctaaccaccactataaaaaatcaaatatttatttcaaaaaactatagaggataaaatcaaagaaaatttgtttcaaatagcacaagatacaaaacatgaaagctactagacagaacaaaaagaggaaaacaaaaagctgacgagaaacaaacacatcagttttaatacctgcaagtgggttaaactccccattataatgaaaaaaaggcttcagttggattaaaaaaaagataacagaatatatttctgctctgtttaccaaagctatatctaaatcagactaatacaaatcttttttaaaaggctgagcaaatgtacatttagtgattaacaaaatccaagtaggaaatacaattttaaagttaraaaaggttaactgtaagccttaaacattaaattgtaaaaaaaaaaaaaattatactgataaaagaagcaattcatattaaagctctaa

SEQ ID NO: 632390 - DNA, 589 bp, Homo sapiens
attcctagttataactactaaagcaaaaacagtaaatatggagtaaaaaagaatgttttcacattaaaaaataaacatcattttaaaatcatacatatggctgaaagggaaaaaataatatgactatttttgtaacttatctaagaagaaaatttgataacacctatcttttcctgactaaacattttattgaaatgggaaaaggggtattcttctttaagtggtaaaggagctctctgaaaccatcatcatacctaatagaaaacactagaaatattgctattacaataataaaaatggcaargtaaccgttaaccattaatattattaaatactgctttggaatacgttgatatcagttatttttaaactctttcagaaaataaataaagggaaaacatgtcccaactcattttatgaggccagaattactgataccaaaaccagtcagtaacattacagaccaattgccctcatgaacaaaacagatggaaaatcagtaacaaaatattgacaaagttaatcaactaatgcaaaaaaggatagtatgagtatgtcatgaccacaccagatttattcttggttgcaa

SEQ ID NO: 632391 - DNA, 589 bp, Homo sapiens
attcctagttataactactaaagcaaaaacagtaaatatggagtaaaaaagaatgttttcacattaaaaaataaacatcattttaaaatcatacatatggctgaaagggaaaaaataatatgactatttttgtaacttatctaagaagaaaatttgataacacctatcttttcctgactaaacattttattgaaatgggaaaaggggtattcttctttaagtggtaaaggagctctctgaaaccatcatcatacctaatagaaaacactagaaatattgctattacaataataaaaatggcaaagtaaccgttaaccattamtattattaaatactgctttggaatacgttgatatcagttatttttaaactctttcagaaaataaataaagggaaaacatgtcccaactcattttatgaggccagaattactgataccaaaaccagtcagtaacattacagaccaattgccctcatgaacaaaacagatggaaaatcagtaacaaaatattgacaaagttaatcaactaatgcaaaaaaggatagtatgagtatgtcatgaccacaccagatttattcttggttgcaa

SEQ ID NO: 632392 - DNA, 530 bp, Homo sapiens
acgttgatatcagttatttttaaactctttcagaaaataaataaagggaaaacatgtcccaactcattttatgaggccagaattactgataccaaaaccagtcagtaacattacagaccaattgccctcatgaacaaaacagatggaaaatcagtaacaaaatattgacaaagttaatcaactaatgcaaaaaaggatagtatgagtatgtcatgaccacaycagatttattcttggttgcaaggttggtctaccattaaaaaatcatttcacataattaatcatataatcatttcaatggatgccaaaaaaaacattggacaaaatggaagatctagtcacacacacacactctgttatggtttggccatgtcccaacctaaatctcatcttgcattgtatctcccagaattcccatgtgttgtgggagggacccagggggaggtaattgaagcatgggggtctttcccatgctattctcgtgatagtgaataggtcttatgagatctaatgggcaattattaggggtt

SEQ ID NO: 632393 - DNA, 530 bp, Homo sapiens
acgttgatatcagttatttttaaactctttcagaaaataaataaagggaaaacatgtcccaactcattttatgaggccagaattactgataccaaaaccagtcagtaacattacagaccaattgccctcatgaacaaaacagatggaaaatcagtaacaaaatattgacaaagttaatcaactaatgcaaaaaaggatagtatgagtatgtcatgaccacaccagatttattcttggttgcaaggttggtctaccattaaaaaatcatttcacataattaatcatataatcatttcaatggatgccaaaaaaaacattggacaaaatggaagatctagtcacacacacacactctgttatggtttggccatgtcccaacctaaatctcatcttgcattgtatctcccagaattcccatgtgttgtgggarggacccagggggaggtaattgaagcatgggggtctttcccatgctattctcgtgatagtgaataggtcttatgagatctaatgggcaattattaggggtt

SEQ ID NO: 632394 - DNA, 588 bp, Homo sapiens
agagattaggctggataattaggagagtgtaaatgatgaaggcaataagatatttcttgctgagaagtttagacttattatgaggttaatgaggtacaactgatagctactagrcagaggaggagcacgaccagaaatatatctttaaaagatgtttagtagctgtgtggaaggtagattggatgaaacagatatgggagaagatcaagtaagatgtagtaattgaagggataaatgatgatggcttaaacaaatcaagggtggtgggggaccgacggaaacttgagagagattaggtagccagagcgagtgagacaggatggtcccaccacttgtccagaaaccagggactcaagtcaaatgccgaagtttatcattgagtctttctgccttctttttatcttttatcttttcatcttttatctttctaggactcccctctttttttgaccgaagcctgaatataatatcctgatggtttttgtatttttctagcaatgtgttcctttgcttctcctgtacacctttgaacaccatggctattcccattgatttaaaagagtacgacactgggcaggatttgtgagg

SEQ ID NO: 632395 - DNA, 564 bp, Homo sapiens
ctcttaacctcattagggaaggcaccaggttcaagaggtggaagaagagacccagaaccagaaagcaagacatggcttatactaagggattatatacaggggagagagtccatggtggtgggctggacagcataccccacttcctgcagttcagtggcagtgggctgggcaggaaaaccacaactgcttgtaaacagcatgcagttgatacagcattttcattcaacacccrccctaacaccctccacctggcaaccttcatttaacccaaaactcagggcctcaatcccctgtacagcttgtattccacaggatgatggtggggcagtgggcagtgggtgagtggggggggggcagtgaatggggtgccagatgtttctcatagataacaaatgtatctctgagttggccacttctggattccctagctcagagcacatagtcaggtgcatgtgccatacacggtcattctaagggtttgcttgttattgctataaggtgtatttactctacactagctgtgttttctttatgaatagtttaacccctctggttctcagtttg

SEQ ID NO: 632396 - DNA, 412 bp, Homo sapiens
cccataaaaattaactgattttgcccataaaaaccaagataggttgtattgtctttactcacggtgccragaagtgtaaattatgttgccagaaataaatcacaacacaaaaatgaatgaactcaatagcaatcagcatcatatataataggacccaaatgaactgtttgttcatttcctaccactttgattccatggatcttagttggggggactgagttcttgagaagaatactctttaaagaaggatttccacaggttattggctaaaaaagcaggggctcatgtaaacgatgcttttttctttttctttttctttttttggagggaggagagaatgaatttcccaaaagttccatccaggatttatcatgcactttctttttaataatagaggaacttaatgtcatta

SEQ ID NO: 632397 - DNA, 564 bp, Homo sapiens
ctcttaacctcattagggaaggcaccaggttcaagaggtggaagaagagacccagaaccagaaagcaagacatggcttatactaagggattatatacaggggagagagtccatggtggtgggctggacagcataccccacttcctgcagttcagtggcagtgggctgggcaggaaaaccacaactgcttgtaaacagcatgcagttgatacagcattttcattcaacacccaccctaacaccctccacctggcaaccttcatttaacccaaaactcagggcctcaatcccctgtacagcttgtattccacaggatgatggtggggcagtgggcagygggtgagtggggggggggcagtgaatggggtgccagatgtttctcatagataacaaatgtatctctgagttggccacttctggattccctagctcagagcacatagtcaggtgcatgtgccatacacggtcattctaagggtttgcttgttattgctataaggtgtatttactctacactagctgtgttttctttatgaatagtttaacccctctggttctcagtttg

SEQ ID NO: 632398 - DNA, 584 bp, Homo sapiens
aggcagtaagtatctagcatcttccggggagcccctgggggcctatctgacctgtttgttctttggttatggagtactaagaacagggctgaggctggtgccctgacagagtgggcatttgctgcgctgacttctggaagtcctcagtcccattgttgactaagtgccaagatcacgtggtaggacatgtttctaacagaaaaggaagccatgctgctgctgtgcatgtgcttacactgaataggagtgaagttttgcatcttctaaaatgcattaaagagtgatcaaaattacagccctctctgaatgagactctcctttaacacaacttacattcrgtaagtgcctactatgtttcaacaaataagagatgggtaggtgggtctctgaagctgtcagcttagcagaggaggtgggagcacacagccaacaatttgaggcttgttatgaaagtggtatgaacagatgctgttggagcaaaggcgaaggaggaatgaattggttgattcaaatgagggggagtgatgtggtatggaaatctttctaggggcaatttctgagctttgccatgtaggatgaacagg

SEQ ID NO: 632399 - DNA, 584 bp, Homo sapiens
aggcagtaagtatctagcatcttccggggagcccctgggggcctatctgacctgtttgttctttggttatggagtactaagaacagggctgaggctggtgccctgacagagtgggcatttgctgcgctgacttctggaagtcctcagtcccattgttgactaagtgccaagatcacgtggtaggacatgtttctaacagaaaaggaagccatgctgctgctgtgcatgtgcttacactgaataggagtgaagttttgcatcttctaaaatgcattaaagagtgatcaaaattacagccctctctgaatgagactctcctttaacacaacttacattcagtaagtgcctactatgtttcaacaaataagagatgggtaggtgggtctctgaagctgtcagcttagcagaggaggtgggagcacacagccaacaatttgaggcttgttatgaaagtgrtatgaacagatgctgttggagcaaaggcgaaggaggaatgaattggttgattcaaatgagggggagtgatgtggtatggaaatctttctaggggcaatttctgagctttgccatgtaggatgaacagg

SEQ ID NO: 632400 - DNA, 559 bp, Homo sapiens
catttttccattttaaatagattttttaaaagagaagttttaggtttgctgcaaaactgagcagaaggcacaaagatgcacatatacctacaaacacaacctccccagacatgsacagccccccactgttgacatcccctaccagagtggtgtctttgttttttgtttgtttttgcttttttttttttttggaaaaggggtctccttttttgcccggggtggagtggcctggggtgtgatcacagctcactacagccttcacctccgggggctcaagcgatcctcccacctcagcctcccaagtagctgagaccccaggcgtgtgtcaccatgccaggctaattttttaaatttctggctaattataaaaaatttttttttagagatgggggtctctgtaaattgctcaggctggtcttgaattcctgggttcaagtgttcctccctcctcagcttcccaaagtcctgggttacagatgtgagccaccactcccagccaagagtggtacatttgttgcaatcaatgaacctatattgacacattattataacccaaggt

SEQ ID NO: 632401 - DNA, 559 bp, Homo sapiens
catttttccattttaaatagattttttaaaagagaagttttaggtttgctgcaaaactgagcagaaggcacaaagatgcacatatacctacaaacacaacctccccagacatgcacagccccccactgttgacatcccctaccagagtggtgtctttgttttttgtttgtttttgcttttttttttttttggaaaaggggtctccttttttgcccggggtggagtggcctggggtgtgatcacagctcactacagccttcacctccgggggctcaagcgatcctcccacctcagcctcccaagtagctgagaccccaggcgtgtgtcaccatgccaggctaatttyttaaatttctggctaattataaaaaatttttttttagagatgggggtctctgtaaattgctcaggctggtcttgaattcctgggttcaagtgttcctccctcctcagcttcccaaagtcctgggttacagatgtgagccaccactcccagccaagagtggtacatttgttgcaatcaatgaacctatattgacacattattataacccaaggt

SEQ ID NO: 632402 - DNA, 582 bp, Homo sapiens
tgggtcattgtggaggaatgttgtggagagtggctaacggcaccagggtccccatggtggaaaccactttttttctctaattaggatcgaaagagtgcagagcagtattgggtgtgtgtgttgctgcgactcactgccttgccttttctccctagccgagaaatagaggattctttactcattactttatttggattttaaccaaggccaggatctgttacttgatataggaggttgaatttttcttaccttcctctaacctgattatgagggctgctattgtttttagtttaagctaatcagtccagggtttcttgatttaggcatctcactagaaaaatctttctgaacctttcccaggtgggagagaagtttcctggattaaataccagattataaaataaactggtcttaacaacaaaacttttttrgagcccagagtgcgtaggttatatgaaaccaagtaggaatgaagcataaacattgaactacaatcctgccacatttcacataacttattttaaggaatattcatatttctcatagtaatcaaattaaattttatgagtgtctttgaaaaat

SEQ ID NO: 632403 - DNA, 610 bp, Homo sapiens
ggctcatagttggaaggaacgtgccttgaatcttagatgagaatttggactttggacttttaagtgaccttggaatgagttaaaactcctgagtactattgggaagagatgattttattttgcaatatgagaagaacatgacatttggagggccagaggcagaatgatgtggtttggttgttttgtttcttctaaatctcatattgaaatgtgacctccaawgttggaggtaggcctagtgggaggtattggatcatggtgacagatcccttgtgaatggcttagtgtcatctccttggtgatgagtgaattattgcttagttagttcatgcaagatctggttacttaaacagtctgggacctttcccttctctctcttgctccctcccaccatgtgatacactggctctccctttgccttttgccgtgattgtaaacttcctgaggacctcaccagaagcagatgtcagccccatgcttcctgtacagcctgtagaactgtgagccaaaataaacctcttttctttataaattaactagtgtcaggtatatatagcaaacagactaacacagtgggtgaatgtgatatctattgctggactctctcttc

SEQ ID NO: 632404 - DNA, 507 bp, Homo sapiens
cctttggcttttaaccaatccatatctttcaatttgaggaggagttcttgtactccagtctgttaacctccgccttaattttasaatttagaccacttacacttaatgcaattattgatgtggttagatttaaattaataatctacaattactgttctatttttcctacctcatctttcttttctttttcttttttcttgcagtctgaattaattgaggcatttctataattccaatttagctctactattggcttattagttatccttcctttttattttatttaatggttgctctaggggtttgatatatgtcttcaacatacaacagtctaccttcaaataatattatactatgtcacagttagcgtagaaaacagtacagctgtatatttccattttcttcttcccatcctttgaactaactataaatgtcatatagtttacttctgcaaatgttgttaaccctaaagtgcactcattttttttgctttcaattgccaactat

SEQ ID NO: 632405 - DNA, 507 bp, Homo sapiens
cctttggcttttaaccaatccatatctttcaatttgaggaggagttcttgtactccagtctgttaacctccgccttaattttagaatttagaccacttacacttaatgcaattattgatgtggttagatttaaattaataatctacaattactgttctatttttcctacctcatctttcttttctttttcttttttcttgcagtctgaattaattgaggmatttctataattccaatttagctctactattggcttattagttatccttcctttttattttatttaatggttgctctaggggtttgatatatgtcttcaacatacaacagtctaccttcaaataatattatactatgtcacagttagcgtagaaaacagtacagctgtatatttccattttcttcttcccatcctttgaactaactataaatgtcatatagtttacttctgcaaatgttgttaaccctaaagtgcactcattttttttgctttcaattgccaactat

SEQ ID NO: 632406 - DNA, 584 bp, Homo sapiens
tttttttttttttaaaaagagtcaacagtttcaaagcatcaacaaatatttgaatggtaataatctttgcatcatgactgagtctcaccatggcttattcttatgggattaaatcatgagtaatgcagaagatcactctgtggagctgacctccaaatcccaaccctgttgtctctttccacctcttatgatctgtcatctctttgcctctgggcagcttaattcagtctcttgccagtctccttgatctactcttggagttcacagyttatgctcacacttcatttcctttcagggtggaaaactctgaaaccctttcttcttgaagtccttactactctagaatatgctatgcatatatcactcatgcatggcatcttcctctctaatttcgtttttatttgaggcttctacccagtacccatattgaatgaaagatcacattatataattgatttctagatttattgataaccaatgctcataattaagtctttgtctgggatagagagtagcaaaaagccacaaaatgattgtcactgctaaagtggactaaaaccttgtttgtgggcacctcagctatt

SEQ ID NO: 632407 - DNA, 565 bp, Homo sapiens
ctgagactgtaatttataaagaaaaagaggtttgatgaactcacagttccatgtaactggggaggcctcacaatcatggcggaaggcaaaaggcacatcttacgtggtggcaggcaagagagaaaacgagagccaagygaaaggggtttccccttgtaaaaccatcagctctcatgaaacttgttcactaccacaaggacagtatggggggaactgcccccatgattcaattatctcccactgggtccctcccacaacacatgggagttatgggagctacaattcaagatgagatttgagtggggacacagcgaaatcatatcactgcccttggtcattcctggatgtgggccaagctaacttaggggaaaatttagtttatagtttaagtgataattgcccttccccaaactaaaccggctttataaaattaatgaaaggttaccaggttaaaatgagaggggtctgaattctgcaaagtggtaggttaaacaattaccagctgttgttccatgggtctcaagatttacaacttccccaattactcctgtaaataaaaccatta

SEQ ID NO: 632408 - DNA, 534 bp, Homo sapiens
actgtagcacatctcatgaatggcctgtgaggggaaaattgctgaaatggtgatgagaggatgctggcttcttttcccatatgctagtcaaggacagtggtatcatgttctgtgcagccaatgttggcatgaaaagactctcaggggtcattattggtggggggtgttcaactggagggctagcaggtgaggatgttcaggactgatctgacacaggagcaggtggggaggaagtagccttgacttgggtcccaatcttctccaggggagaaggctccagtgtcaatctcccgactcyctggtgttgaactccattttgcagtagccctggcgttgtctggatgttctcatagagagtcgttcagggccacaaactatatttcctgcagtcctttttttcttttataagttcaccatctgcaatcaaagtgagagctccatcactagtaacaaaacacatggtcctcatttcctttcctccagtccctttcccactgaccaagaactttgcattgaatgccaccccatgttggt

SEQ ID NO: 632409 - DNA, 534 bp, Homo sapiens
actgtagcacatctcatgaatggcctgtgaggggaaaattgctgaaatggtgatgagaggatgctggcttcttttcccatatgctagtcaaggacagtggtatcatgttctgtgcagccaatgttggcatgaaaagactctcaggggtcattattggtggggggtgttcaactggagggctagcaggtgaggatgttcaggactgatctgacacaggagcaggtggggaggaagtagccttgacttgggtcccaatcttctccaggggagaaggctccagtgtcaatctcccgactctctggtgttgaactccattttgcagtagccctggcgttgtctggatgttctcatagagagtcgttcagggccacaractatatttcctgcagtcctttttttcttttataagttcaccatctgcaatcaaagtgagagctccatcactagtaacaaaacacatggtcctcatttcctttcctccagtccctttcccactgaccaagaactttgcattgaatgccaccccatgttggt

SEQ ID NO: 632410 - DNA, 610 bp, Homo sapiens
aggtaagttagagccactgtcccagttttggggagaatgccatgtagtcactggagtataaagaggtccaatttccaggaggggcaaattgtcaaaatgcaaccacctatagaaagggattcaatgaagaagtacagctatggaaggtgaaccaaaattcatatcataaaaatgagatggaaaccctggtattgaacctggtaaatatggtattgttggagccaagggctgtagwttaatagaatggaaatgctgaactgtacaatcctttagaataaaatactaaaagtgttgcattgtgttctaaaaactctagactcaaactattagacaaatgcaacccaaattgcctgagcaagtagtcataaaattagcttaatttagtatgactttcacttctgaaatttcattagatcttggtaaaattttagtaattacaaatgctgtactatagtaattagacatgaaatagtatagcttgaaaacgagagattgggccctgcaagaaatgatcatgtcacaaaaattattagttttatattacagctacatcaaaagcttgaagaaaaagaatccttagggatttttatttgtctctcaggaagaataa

SEQ ID NO: 632411 - DNA, 669 bp, Homo sapiens
aggcagtttaaggctggtacagtggctttgtggccagtagggatccaggtttcctccagggttaagctctgtcattctagttgttgatttccattttcaagactatttcctttgttggaagccactagctggaggaaatataaaagggcaaacataactttctttttttctttttgagacagaatttcactcttgttgcccaggctggagtgtaatggtgcaatctctgctaactgcaacctccacctcctgggttcaagcgattctcctggctcagcctcccaagtagctggaattacaggcgyccaccacaatgctagggtaattttttgtatttttagtagagacgggatttcaccgtgctggccaggctggtcttgaactcatgacctcaggtgatccatctgcctcggccagggcaaacataactttctaccattccatccacttccattaaagaggtttcctagaagctccatacagcatttctactcacacttcattggcttagccttaaccaagcctagctgcaagtggagctgagaaactcagagcttaattccagggagcagatgggagtctctgctactctgctcctaatgaagatagaaaataggtatcaaaatgcaactagctatcttgtcataaccactaaagccactgtcaaaa

SEQ ID NO: 632412 - DNA, 643 bp, Homo sapiens
tccatacagcatttctactcacacttcattggcttagccttaaccaagcctagctgcaagtggagctgagaaactcagagcttaattccagggagcagatgggagtctctgctactctgctcctaatgaagatagaaaataggtatcaaaatgcaactagctatcttgtcataaccactaaagccactgtcaaaagtactactgaagatttgatttcagtgtctcattgggttttttctaaatcaaaagaacatttttaattaaaaatatacgtattcattgtatagtacaaggaacgtacggtgacataaaaagarcattaagttttttctataattgcaccatctagaagtaaccactaagatattttggtatatatctttttggtttttcatatatacttatgtatctacacacctatatatctatctacataaactactatctgtatgtgttgcatattgtacatagtacaaatacacatacatataaaacatgtagttaattttaaccatactctaatattttttattcatattttcacttatcaacatttccttatatcattaatttttttggaaactgtatttaaaaatttttattgctatataatatgccatcatatcaaaggttttatatatat

SEQ ID NO: 632413 - DNA, 643 bp, Homo sapiens
tccatacagcatttctactcacacttcattggcttagccttaaccaagcctagctgcaagtggagctgagaaactcagagcttaattccagggagcagatgggagtctctgctactctgctcctaatgaagatagaaaataggtatcaaaatgcaactagctatcttgtcataaccactaaagccactgtcaaaagtactactgaagatttgatttcagtgtctcattgggttttttctaaatcaaaagaacatttttaattaaaaatatacgtattcattgtatagtacaaggaacgtacggtgacataaaaagagcattaagttttttctataattgcaccatctagaagtaaccactaagatattttggtatatatctttttggtttttcatatatacttatgtatctacacacctatatatctatctacataaactactatctgtatgtgttgcatattgtacatagtacaaatacacatacatataaaacatrtagttaattttaaccatactctaatattttttattcatattttcacttatcaacatttccttatatcattaatttttttggaaactgtatttaaaaatttttattgctatataatatgccatcatatcaaaggttttatatatat

SEQ ID NO: 632414 - DNA, 630 bp, Homo sapiens
aaatgctgtctactgagtatacattctggatcaaatccttcatgtatgttgccactaattttcacaacaagtctgcaagggagaaattattaattctttataaatgagraaactgaatttcagagaaggtggtacttaatttgcttcaggtttcatagttacgaagagtcagaggtgggactgaaacctaggtcacatgggggtcaagccaccaggatggctccctgaggaagatattggttctgggatggagcagataaaaaatgaaaggtgaagctcactgaataactttgtgaaaatagataggaagataaaaaataatactttaaaacacgacctttgttaagttttttttcttatttaaaatcaaaaaacccaggagagaaggggaaatttcaaaattaaatattagtcaatgcaaactattctcttctaaaaagatacttaaaatcttaaatttctggaaattgtatagtcttgagcatttatgctgattcgatttatctgtaaaatagagggaaagatgttttgagttgactaataaaataagtggtttcttttcttctgagggcctcattatactgcaaggcttagagcagtgtcagcagcagaagcatcaatttaacactc

SEQ ID NO: 632415 - DNA, 672 bp, Homo sapiens
actgcccatggccactggcaccacaggcctggctgcccctagaatatgaatgctgcttatttaccctcagatgaactctctatgctccatgcttctttgatttaccaaccttcaattcaaaccaagttaccagtatattatttgctaagtctacctgcccatattccaactgctgatagaaaggataaaatcaagtatcaagaatatttatcttggatagagaaaaggagcctacgggaatgtataagatcacttagtgagcaagtgagaaaggaaaaggataggatggaaagaaatgagaatgaaatggaagaaatgaaggttagggagtttgcagggaaaagccttggtccaagctttgagaaactctagcatagagtttcacctgagtaagagttgtcaaggcctattctgtgataatacacttcagctcaagtctacctagcattttaacttgaaaataagtcagaaataaagatggtatccctcctttgggagtacacttgatttttaacaagtgagtcttgaagtgaatttaagaatcacattataaatctgaccccttaagatggcattttccatgtgaccttacccactctgaagccmactctaattggatatgctcctagggttgttaaactatccaaagttacaacagcacacaaaaaaaga

SEQ ID NO: 632416 - DNA, 630 bp, Homo sapiens
aaatgctgtctactgagtatacattctggatcaaatccttcatgtatgttgccactaattttcacaacaagtctgcaagggagaaattattaattctttataaatgagaaaactgaatttcagagaaggtggtacttaatttgcttcaggtttcatagttacgaagagtcagaggtgggactgaaacctaggtcacatgggggtcaagccaccaggatgrctccctgaggaagatattggttctgggatggagcagataaaaaatgaaaggtgaagctcactgaataactttgtgaaaatagataggaagataaaaaataatactttaaaacacgacctttgttaagttttttttcttatttaaaatcaaaaaacccaggagagaaggggaaatttcaaaattaaatattagtcaatgcaaactattctcttctaaaaagatacttaaaatcttaaatttctggaaattgtatagtcttgagcatttatgctgattcgatttatctgtaaaatagagggaaagatgttttgagttgactaataaaataagtggtttcttttcttctgagggcctcattatactgcaaggcttagagcagtgtcagcagcagaagcatcaatttaacactc

SEQ ID NO: 632417 - DNA, 493 bp, Homo sapiens
aatttcaagtatatactatagtattattaactacagttaccatgctatacattattagatcctccgaacttattcatcttatcactgaaagtttgtacccctttaaccagcayctccccattccccatcccatgtcgcaactactgttctactttctgtttctgtaaggtgttttttttttaaagattccacatatggtgataccatacaatattcgtcttctctgtctggcttacttcacttagcataatatcctccagtttcatccatgttgtcacaaatagcagaatttccttctttcttatggctgaataatattccagtgtgtgtgtgtgtgtgcattcatacacacaacatttcatttacccacgaatgtgtcaatggacatttagattgtttctgtatcttagctattgtaaataatgctgcaatgaacatgggagtgcagatacctctttaagatactgattttgtttcctttggatatataccc

SEQ ID NO: 632418 - DNA, 617 bp, Homo sapiens
ggttagtggctgagctgaggatggattcctagacatcggttccttttctagcgggagtgtccaccatgctctgtttcctctttcgctgtattttataaattcctgctatttgctgatgataatattgttttagtacttaaatattttaaygtaggtctcagagctagatccttaatgtagataccagaacttaatatttggaatccaataaatgtttgttagttaatgaatgaattaattaatgaaggtggtgaatggacataatcaagtccaggttcactatggatccagttccagacctaagagtgtagacaaaaagatggagaagatgtgatggcgtatttaaagttaatgacagcagtgatctttccatgttctattcaagccttcttgggttggattttagtaaaatgatttagagtgtggggggctttgtgacagaccacaggcaagttatttaacctctctagataatatgggatttacctctttgggtttttgtaagagttaggggagatatacatatataaaatctccttagcacagtgcctggcacatggcaagagttcaataagtggctacacttattattactactgctgctgctactaccactt

SEQ ID NO: 632419 - DNA, 617 bp, Homo sapiens
ggttagtggctgagctgaggatggattcctagacatcggttccttttctagcgggagtgtccaccatgctctgtttcctctttcgctgtattttataaattcctgctatttgctgatgataatattgttttagtacttaaatattttaatgtaggtctcagagctagatccttaatgtagataccagaacttaatatttggaatccaataaatgtttgttagttaatgaatgaattaattaatgaaggtggtgaatggacataatcaagtccaggttcactatggatccagttccagacctaagagtgtagacaaaaagatggagaagatgtgatggcrtatttaaagttaatgacagcagtgatctttccatgttctattcaagccttcttgggttggattttagtaaaatgatttagagtgtggggggctttgtgacagaccacaggcaagttatttaacctctctagataatatgggatttacctctttgggtttttgtaagagttaggggagatatacatatataaaatctccttagcacagtgcctggcacatggcaagagttcaataagtggctacacttattattactactgctgctgctactaccactt

SEQ ID NO: 632420 - DNA, 665 bp, Homo sapiens
ggcctgttaaaaaattatgattacccccaaaatggtgggcttgtatgaccttttacatttttaaagtaaagccttccatctggttaaaaaataccttttataaaagcccctttacggtgtttgtgttccttagtaaatgctagatttgttccttagaaaatttgctcttgagcaagtctattttgacctgatgtaattgaatccaaagggagaaaaacattaaattaatgaaattttattgaaaagacatcttatttatatgtaatagtttggtgtcttaattattattattctcccaagttatattatagttttaaacttaattttcaaaaaaagacaactttcagtcacctaattacatgcaatgcagcttcttttcagaagtaataccttatttaaagtaattcttttatratgaactcccaaagacctgtacctaaacatagcagctgaatataatttctaattaatgacttttttaaggcataatagcagatggttgagccatccatggggtgtgttgtggtccatttgtttagtcacccagtgagttacttgaaataatcacttagcactacttttaacaaaaggatctgatttttctgttctcatctcacaccaaatgtaaatgaactctatgggaacaaggactttttctgttttaa

SEQ ID NO: 632421 - DNA, 411 bp, Homo sapiens
gaacatgtgtcaaagatttatttaactgattaattaatgagggaatcaataagatgttacagccaattcacaggagaattcaaagagcaggtccatatagaagcggtcaggaatgctgaagtgaatttacctagtagatgcaaaactggcttcttccatagaaagggagggaaagcaactgcgcttccactgcacaaaatttactcatgtctatgagtaaaaatcacttacattgctcttcattacctacaacttacacagtagtaaaattgctcgcagaccccaaaacaygcagagacctcatagaatcacataacctggaagggtctcctaggcaatgcctagttttccattgacaacacccattaatcattctggttcatttcaacaattttctcaattacatcctac

SEQ ID NO: 632422 - DNA, 259 bp, Homo sapiens
gtatgtattttgtaaataatctataataatctataaaatatatttataaaataatctataaaaatataaactattaacagtagttacctctggggggtaaaattggaaaaggtaaaggaaactcacatttttaccttatatattgctccttgtttgaatttttcttytaatgagtatgcatttgtatatcttgagttcttagcatatggcctggcacttaataaacattttattcaatgtttaacaaataggggaatca

SEQ ID NO: 632423 - DNA, 583 bp, Homo sapiens
tatgcatataaccttaatatagagttttcacaacttagcagtagagacaggttttgttttcagatgtgtagccctgtacaagttaaagctgtgtggctttgttcactgcctttattaggstttccatgggaaaggccaggcagggcagggtaaacaggttaggaacggctagtttgaataatttccgataggtctaaactatagatgtggtccctagttgcttggtacctggccctgggatgattaggagagaggagcattgcttcctgggttctatgggccaggtagaggaggtgtggctctaggttggttagtttgcataacaaaggcatgctcctttctgggcccttggctatctttgagaattacctagccctggagggaggtgtagtctctccccagcctgaaagggtttttttaaggatgttaaaacatcatcataatatacaaaaaataagaaatatacacaaacaaatgagtttaacattcgaatctttctcagtcacctctcttggagttgcaaaatcatttgccaaatctgttctcatttacacagtccttaagttactgtccagtcaggcgt

SEQ ID NO: 632424 - DNA, 586 bp, Homo sapiens
atgggggcagaggtgttaaaggaaaggggtcctgatccagaccccaagacagggttcttggatctcgcacaagaaagaawtcagggcgagtcctcagtgtaaagtgaaagcaaatttattaagaaagtaaaggaatgaaagaatggctactgcatagagtagccctgagggctgctggttgcccatttttatggttatttcttgatgatatgctcaacaaggggtggattattcatgtctcccctttttagaccatatctggtaacttcctgatgttgccatggcatctgtaaactgtcatggcgctggtgggagtgtagcagtcaggacgaccagaggtcactctcatcgccatcttggttttggtggattttggccggctccttcactgcaacctgttttatcagcaaggtcttcatgacctgtattttgtgctgacctcctatcttatcctgtgatttagaatgccttaaccatctgggaatgcagcccagtaggtttcagcctcattttacccagctcctatttaagatggagttgttctggttcacatgcctctgacagagacagacccaggattgagtta

SEQ ID NO: 632425 - DNA, 586 bp, Homo sapiens
atgggggcagaggtgttaaaggaaaggggtcctgatccagaccccaagacagggttcttggatctcgcacaagaaagaaatcagggcgagtcctcagtgtaaagtgaaagcaartttattaagaaagtaaaggaatgaaagaatggctactgcatagagtagccctgagggctgctggttgcccatttttatggttatttcttgatgatatgctcaacaaggggtggattattcatgtctcccctttttagaccatatctggtaacttcctgatgttgccatggcatctgtaaactgtcatggcgctggtgggagtgtagcagtcaggacgaccagaggtcactctcatcgccatcttggttttggtggattttggccggctccttcactgcaacctgttttatcagcaaggtcttcatgacctgtattttgtgctgacctcctatcttatcctgtgatttagaatgccttaaccatctgggaatgcagcccagtaggtttcagcctcattttacccagctcctatttaagatggagttgttctggttcacatgcctctgacagagacagacccaggattgagtta

SEQ ID NO: 632426 - DNA, 586 bp, Homo sapiens
atgggggcagaggtgttaaaggaaaggggtcctgatccagaccccaagacagggttcttggatctcgcacaagaaagaaatcagggcgagtcctcagtgtaaagtgaaagcaaatttattaagaaastaaaggaatgaaagaatggctactgcatagagtagccctgagggctgctggttgcccatttttatggttatttcttgatgatatgctcaacaaggggtggattattcatgtctcccctttttagaccatatctggtaacttcctgatgttgccatggcatctgtaaactgtcatggcgctggtgggagtgtagcagtcaggacgaccagaggtcactctcatcgccatcttggttttggtggattttggccggctccttcactgcaacctgttttatcagcaaggtcttcatgacctgtattttgtgctgacctcctatcttatcctgtgatttagaatgccttaaccatctgggaatgcagcccagtaggtttcagcctcattttacccagctcctatttaagatggagttgttctggttcacatgcctctgacagagacagacccaggattgagtta

SEQ ID NO: 632427 - DNA, 525 bp, Homo sapiens
gaaatcagggcgagtcctcagtgtaaagtgaaagcaaatttattaagaaagtaaaggaatgaaagaatggctactgcatagagtagccctgagggctgctggttgcccatttttatggttatttcttgatgatatgctcaacaaggggtggattattcatgtctcccctttttagaccatatctggtaacttcctgatgttgccatggcatctgtaaactgtcatggcgctggtgggagtgtagcagtcaggacgaccagaggtcactctcatcgccatcttggttttggtggattttggccggctccttcactgcaacctgttttatcagcaaggtcttyatgacctgtattttgtgctgacctcctatcttatcctgtgatttagaatgccttaaccatctgggaatgcagcccagtaggtttcagcctcattttacccagctcctatttaagatggagttgttctggttcacatgcctctgacagagacagacccaggattgagttagtttgtactttcact

SEQ ID NO: 632428 - DNA, 535 bp, Homo sapiens
cgaggactgaatcgcccaaagtggttagaggaaggcaaaagtttcaagccaccagcagcaacattagaagaaatggggaacactctctaattgtggacagttccaattttgtccgtctccagggagaactaatactgttacgatttctcctgatgcatgtgaaatcagttgctacagcaatgaccagtgtttcttggaacttgctgacagcaacaggcctcagaaatgaaatttctgttctgtgtatcgtgtttctaacgctggctccactatttcagcacctctactgtgtccacttcccatgatgatctcttcctgccccttcctgcccagaaggtagggcaagataagtctctgccccagtcactagacrggcatgttgatgatggccttgggaactgtggcttggcggtggtccttaggggaagggaacttgtctgtgttggtcaccactataacctttagaacaatgcctagctcaagtgctaagaaaaaacacacatagtcatgcactgcataatgatgttttggtcaa

SEQ ID NO: 632429 - DNA, 534 bp, Homo sapiens
aaggggacgggtgcttgcaggtgtggaccattcttttaagaagtgtgccagtracaggaagggggcagaaaaggtggcaatttaaaagagaaaaagaaaattcttttttacagttttctttttactaaaacaattcttttttggaatgagaggaactgaggggaagggaaggaacaagcagcagagaagaggctgagaatgcaagagagggctccctggaatggcctgttctctgagggaggaaaggggcggcaccttccagcggtgcaggtgcagtgagttagttctggttctgggaacaggcatggagggaatgggggacacagctggaggggagttctgtggcccaggtgagagaagcttcttcaccaatgaagaagggataaataggtaaaggcacagatatcgatatagtttggctgtgtctccacccaaatctcaccttgagttgtagcccccatgattcccacatgttgtgggaggaacctagtgggaggtaataattgaatcatggggtgagtctttcccatgctg

SEQ ID NO: 632430 - DNA, 561 bp, Homo sapiens
ggagtgtgaaggcagaaggggacgggtgcttgcaggtgtggaccattcttttaagaagtgtgccagtgacaggaagggggcagaaaaggtggcaatttaaaagagaaaaagaaaattcttttttacagttttctttttactaaaacaattcttttttggaatgagaggaactgaggggaagggaaggaacaagcagcagagaagaggctgagaatgcaagagagggctccctggaatggcctgttctctgagggaggaaaggggcggcaccttccagcggtgcaggtgcagtgagttagttctggttctgggaacaggcatggagggaatgggggacacagctggaggggagttctgtggcccaggtgagagaagcttcttcaccaaygaagaagggataaataggtaaaggcacagatatcgatatagtttggctgtgtctccacccaaatctcaccttgagttgtagcccccatgattcccacatgttgtgggaggaacctagtgggaggtaataattgaatcatggggtgagtctttcccatgctgttctcgtgacag

SEQ ID NO: 632431 - DNA, 500 bp, Homo sapiens
gaattccttcacttctcctgtttggcttctctatttatttatttattattttatttatttttgagatggwgtattgctctgtcacccagtctggagtgcagtggcgcgagctcagctcactgtaacctccgcctcccaggttcaagcagtttttgtgcctcagcctcccaagtggctgggattacaggtgcctgccaccacgcccagctaattttttttttttccagtagagacagggtttcaccatgatccacccgccttggcttcccaaagtactgggattatcagtgtgagccaccacgcctggcttttaatatttttttcgaaaaggtcttgactctgtcacccagactggagctcagtggcacaatctcagctcactgcagccttgacctcccaggctcaagtgttcctcccacctcagcctccccagtagctgggactacaggcaagcaccaccacacccagctaacttttgtattttttgtagagatggggtt

SEQ ID NO: 632432 - DNA, 480 bp, Homo sapiens
tatttatttatttattattttatttatttttgagatggagtattgctctgtcacccagtctggagtgcagtggcrcgagctcagctcactgtaacctccgcctcccaggttcaagcagtttttgtgcctcagcctcccaagtggctgggattacaggtgcctgccaccacgcccagctaattttttttttttccagtagagacagggtttcaccatgatccacccgccttggcttcccaaagtactgggattatcagtgtgagccaccacgcctggcttttaatatttttttcgaaaaggtcttgactctgtcacccagactggagctcagtggcacaatctcagctcactgcagccttgacctcccaggctcaagtgttcctcccacctcagcctccccagtagctgggactacaggcaagcaccaccacacccagctaacttttgtattttttgtagagatggggtttcaccatgatg

SEQ ID NO: 632433 - DNA, 635 bp, Homo sapiens
ctaaatgaaaagccttttaaatttcttagaagtcatgaagtcatgacttcgtacatacagcccaatgtgtgtagatgacaagaggggcaacttttacaaatttaagtcaattttatagccatctgttgtaggggatacaaatattagtctatgacaggtaaacaattatagttcagtaagccacaataacagcatcttgtacaaaatgatgtgatggtgcagagaagctcttgaggagggtggtaaggagttaggcctaacttgcatctagagactggaatttatatctgggatggagttagctttgtaacratttaggcgctacctcatccctaggcctaggagaagagatatcacaatgatacaaggaaaaggcagcagtaactgaggatagaaaatctaggtaggagccctcgttctgcggtttgctagttcctgacttcgagttgtctggtcactttagtgagggggtagttgccttatctgtaaaatggaaacggcattaattcccacatcacacagaactgttgctgcaatcaaatgaaataatgttagtaaactgcaaagcttcctgcaaatgtttgccattgccttggctctccagtgtatgtaatgctggtgacataaataatagc

SEQ ID NO: 632434 - DNA, 571 bp, Homo sapiens
tctgggatggagttagctttgtaacgatttaggcgctacctcatccctaggcctaggagaagagatatcacaatgatacaaggaaaaggcagcagtaactgaggatagaaaatctaggtaggagccctcgttctgcggtttgctagttcctgacttcgagttgtctgktcactttagtgagggggtagttgccttatctgtaaaatggaaacggcattaattcccacatcacacagaactgttgctgcaatcaaatgaaataatgttagtaaactgcaaagcttcctgcaaatgtttgccattgccttggctctccagtgtatgtaatgctggtgacataaataatagcttcattccgtgtttgcactgatgcattttgaatgtaacctttgaaaattaggatcctcttgtctttgggacagtagttttattaggtgcagagaagcatttgaatattccaagtgaaatattaggaaataactcctgcaatccttccttgctttgcaggtgattgcacagttttaaaaggtgcttgaaatctcttggccacactcacaaatgtattactgga

SEQ ID NO: 632435 - DNA, 550 bp, Homo sapiens
tttgttttctttctttcttttttttttttctgtttagagcactttctttagctaatttttcagattaggactgttggagatatcacttagttttccttcctctgagaatgtcttcctttcccctttcatttctgaaggatatttttgctggatataggactctgggttatcagtttttttctttcagcacttgaaaactctctcacctcttccttctggcttccatattttctgatgataaaatcaccatcattcaaattgtctttccaatataagtaaggtgtttttttatcttgctgcttttaaaatgttttctttgtcctttgtttttggaagtttaattaggatgtgtcttgatgtgtatttttttggctttatcctgtttggarttcactcatcatctgaatatgtaggttcatttctcttgccaaatttgggaagtgttcagccattttttcttctattacttttctatctgctcctcctttctcctctccttctaggacacttatgacataaatgttagattttttgttatagtccacaaatc

SEQ ID NO: 632436 - DNA, 390 bp, Homo sapiens
ggcttcctttactccacctttcasagtcttcttatgtttgtttcctatctgatgtcaggattttagttatacttggcaggagaagtggggaaaagtgtgtccacttcatcttctacaagtggaagtcctggaactttcatttttagttgacttggtttttcaagctcaatattttatgaacatgctgcaccacttaacaaagcagaaggataccaaaccacctgcaggaaacatttgtttctagggtttatgtgaaaggaaaagtgtctaccatgtgcttggcactttatgcttaatttcacttaatcctcagaagaatgctacagggagggtattattaaccccgatttacagaggtgagaactgaagttcagagaaattaagtaactt

SEQ ID NO: 632437 - DNA, 428 bp, Homo sapiens
agctcaccacaacctccaactcccaggttcaagtgatycccctgcctcagcctcccaagtagctgggattacgggcatgtgccaccacgcccggttaattttatatttttaagtagagatggggtttctccatgttggtcaggctggttgcaaactcccaaaaaataaggttttcttaacaaggcttcttggttgatggatgtagagatactgtgaacatctatctctacactatcatctgccttcggcacagtcagtcagcttcagctcccaattcctaatgcggcaaatgtctatatggctgaactggacagtgagcactggggttcatcaagtgcgagtcaacaggaattttccggaaagcatcagattattttgaatcttgcagatgccagccccacataagccaacgttaatccatcctgctt

SEQ ID NO: 632438 - DNA, 592 bp, Homo sapiens
acagctgcctgtgaccaggacaaaactctgatggtagccatggtgaactggaacacaagctcatctgtgataagagcctcttagttttcctcttattcaatttccatcttgatgaaaaatgggaaatttgtatgcaattgaggaacaaatacacagatttctgtgtcataatcttattgctgattttgtattttgtctacttatccaatgtaagctcatcctatttgatcacgtctctgacagtcatacggttatccttttttcctccacagtgaccgctggaaagggaacaccttgcaacttctcccacgaggctttcgatcctaatgtaaggagcagacctctcccgtcagaagtacatggtggggaaaaagggccatgtggacacatggaaacggattcgggcaggaccagaactatttccttagccacacagatgaagggtttgtactaattcctcagtgaggaggaactggaaccygatatcaaaatccactgtatgtcctttatagtttattgtatataattatgtaccataaactgtgcatggcttacattccagggcatgggatcagtcattcctaacaaatct

SEQ ID NO: 632439 - DNA, 373 bp, Homo sapiens
tctgcaggtgagcattgactcacagatatacttggtgcacaccctgtgtccagtaccgaatgatgccaatatgagccaatgggacttgaggaacatgtaattctattcactgtactctgctgtgaagacgctacaacctccctgttaagtcatgctctttgctcatttctgagcttgggcctcctcttgcatgcaggccctgttccacaaatgactccaggggataaggggcttccaaacacctaagtcctagggtgttgctttaagccacttggctcwtgtgcatgtctgtaaaccattgctagaattggaggtatttcaaaggcagcgagcggcatatgagaataaatgatctaatacagagagtgaattc

SEQ ID NO: 632440 - DNA, 326 bp, Homo sapiens
aaaaacaaaacaaaacaaaacaaaaaaaacacctggtattgaagtcctaatggactcagttaaaggtttgagcaagtgattaatgagtacagtgatagsaattagaggttgcaaagagatgttgtatcttcaagcttggcatctgggactggttctgccaaacactctgggaaagcctaacatctgttgatccagttgctggaaggagacaaggtgaatgaaagccaagtgtggaagaatgcagcagaaatttaggactcagacctcacgctctgctgatgaatgtgttatgtatgttgcttggcaactggcacatggcatgcatc

SEQ ID NO: 632441 - DNA, 594 bp, Homo sapiens
tgctttttctccaaatccctgcagtctcagagcctggtaattgcaaacattttcacatcagctcctctccaccatccaatctgactccaagtggcttctctaacaacaccgaatctactagccaggacttacacaacctactaacctactcagtgrcttctccaataacatgtactgatttcatcagggcctacagaagccatattatgggttgaaaagtaaaaattcatccaatttagggttttctccactgaatctctttttctggttttggctctattctgccaaaatttaccacaaggccctggccaaggccagtcaacatagatgtctttgtgtgagttagaaaaacgtgtcccctccagatggaccagcccttctggaagcctttctgcaaagcaaaacctgcacaactgacaactgaatgcagccgccttggcaagagctcataggccttttctttccagaaaccttgaaaagtgacgagaactctaaggtttgtttgccttaactgggaaaggccacacttggatgattaaatgcaagaggccaaaagcttgagtcaaaacccactctccacctttgcctgtgttc

SEQ ID NO: 632442 - DNA, 599 bp, Homo sapiens
ctataatgaacttcaaagaagtcaacaattatataaagaacaagaagcaaactgacattgaagccaactgaagacatgtactgaggaactscaaaatctccgggcttttctggggaggggaaatgtgagctgacagctttgacctcacgttccacatgctgcttctttttgtgcttcttggagatgtttatatattgattctaagtgtccatggacttaaataatacaagaaggaaagagggaattaaaagcaggtctatatgtagtatccagatctaaatcctaacctaaacacatccaaattcctctgatcttgttacccatgtaatacaacagagtaggtccaaatagtgcaaagcattttgggaccacccatgtacactgggctactctgtcagcagctcaaggaactgtttaaaaagcaaaggaaccaaaaacaacacaaaaaaaccccaatctgaaacactatccaaaaaacgcacagcggtgtctgaagttgagatttttctgctacgtgggtctcaggctaagcgtaagatgctattgatggaatgaacttcagactactggaatgggcaccaccagcaccacagaccttg

SEQ ID NO: 632443 - DNA, 600 bp, Homo sapiens
tttataatttcttatgcctgtctttactttaatctcttaatcctgttatcttcataagctgaggatgtacgtcacctcaagaccactgtgataattgtgttaactgtacaaattgattgtaaaacaygtatgtttgaacaatatgaaatcagtgcaccttgaaaaagaacagaataacagcgatttttagggaacaaggcaagacaaccataaggtctgactgcctgcggggttgggcaaaaagagccttatttttcttcttgcagagagcctataaatgctaaattcttttcctagcaaggaatattaatattaataccctgggaaaggaatgcattcctggggggaggtctataaacagctgctctgggaatgtctgtatgatgcggttgagataaggactgagatgtgccctggtctcctgcagtaccctcaggcttactagggttgggaaactccaccctggtaaatttgtggtcagacaagttctctgtctcaaaccctgttttctgttatttaagatgtttatcaagacaatacgtgcaccgctgaacatagacccttattagtagttctgcttttgccctttgccctgtgacc

SEQ ID NO: 632444 - DNA, 546 bp, Homo sapiens
atagtattatatataatattaagaaaataatgaatacaactaagtgggatttattatagaaattcaaggttggttcctactaggaaatctattatgatcatatgcaatatgatttttccatatatgctgaaaggccttaatgaaattcaacattcactcattataagaatattcaagaaattgaatgtgatttttaacatattaaaaatatatatttgtcaatgctaaaattggtattttaattggacaacactagaagcattcctattcacatcaggaacaaggggaagatgctagttatctccattactatctattattttactgaaagtgttaaaaaaatgcaattagacaaaacaaatctattaaaggtattagaattggtagagaagaggtaaaagtatccctacttatagatgatatgatacctgaaaaacacttaagaatcaataataattaatattgttaattcccaaatcgtaaaataatttagtaaggcaacaggatatgaaatyaatattcataaattaagatattaatccttca

SEQ ID NO: 632445 - DNA, 541 bp, Homo sapiens
gacatttgtggcacaaactcataggaacagagggtagaatggtggctacaaggatctggggaataggagaacggggagatgttagtcaaagggtaaaggtaaaagaataaaagtgaaaaaaaactatggtatatttacaaagtttactgttctgcatcagcaaagcagatcaaactgttgttataaattatacaacatggatcagccccacagagatgatatggaggaagaaaatcaaaatagggcatagtgtgtcattccatttatacgaaattaaaaaaaccgataacatgarttggtagtgaaaaaatgtattctaatgagtacttctgggagtgttaatcaggacaagtaacagaaaggcctttgggtggatgataatgcactgtatctttctatttgtgaggcttacacgtgttatttatggattaaataacactcaccaagctgtacacttaagatccaggtactttatcataggtaggttttaattagtggagaattatgcaaaaacatttattgaatgtattcttttgtctca

SEQ ID NO: 632446 - DNA, 581 bp, Homo sapiens
agctcaacaaacacctgcgtgcctatatgtccaattacaacagtgatttaaatgtgtctaacgtattgaatattagtaagataactctaaataatttgctatttttcttaactraagtaaacatttattgtaaagcatataaactcttttatatcaaatttactaacagaaatcatttcttcaattatttgaagaatgataaaacttaagcatatcatctcaatgttttagttttcattaattatatatgttgcattaaccatgccaactaattttattgatgttatttcatcttactatcctaaacactgaagtatactcatggctgtttttgaaccaaaaatctgatttattcgttaaacagtcattaaatcatagtgtacccaatttattttcaatttataatgaataaaaacaagctgtcatcttaagctattttcttgcagtattactaacatttttctgacatttactttttttcattgattttgttaaatatgacatactggctgttggttgctatttagcttcaacatgaacttcacatttctgacattcgataaaatcttaatatctgtata

SEQ ID NO: 632447 - DNA, 581 bp, Homo sapiens
tatgggcccagagccaagacctggagacagatacctttggaacctacctggtgctctattccactgtggctgagctggcacccaaacacaagacagttcttcccactcttctctcccctttccacargcagaggcgtcttcctccgtgtctgccaccaccacaggcctgcaggttgtattgccaggctactgccagtgttcactcaaggcccaagggctcttcagtcagcttatggcaaatgtggtcaggcctgaaactcacccttcagggatgtgggttcccatatggcccagggcaggtctagaaatgctgtccaagagcttagcctggtatcacggaccccaagatcccccttggtactctacctccttatggccaaactgatacctagtctgttttctttactcttgtttctgcttttctcaagaagaaggggtctctcctcatagccatgacagctgtgaaacagttggtcacacctgaagtcagcacatctcagagtctcacccaatgcccagagagtgtggttgcccacagtgtgtgctacctggctactgctgctgattattcagaggccaaa

SEQ ID NO: 632448 - DNA, 553 bp, Homo sapiens
atttttgccactttcttgtctatcattattcttgcatctcagccttccatcttgtatcatttttttttttctgtctaaaacatatctttkggaattccctatagggaaacaccactggcaaaacaaactcttcattttttttaatttatattaaaaagtccttaattctgccttgttcttggaagatatttttactcaatatactattctaagttgatagtattttcttttagtttttatattactccactaactcctgacttccattgttgttgctgaagaattagttgtctaactatagtgaatcacctgaaaagcaaactgcaaatgagcatatctttatctgcagttttaccctgatgtacagaattgttaattgtttgatttatcatgctgggaattttggtgccttgtatatcaggtactccaagattcaaaaatgggcacgggctctgcctcatggagtttatgagagaaggaaatgagagaaaacaaaataaacaccagaaacaagcatggtttagggcaaatggttaagcattatgtttggggc

SEQ ID NO: 632449 - DNA, 613 bp, Homo sapiens
gctataataataggccatttacattgaataaatgactctgttaatgtcctgatcagtgccttggtgacctatgaaattattcatagatgatcacataggggaaatagtttatttgcataatggaatctgcaattatacttctcaatctatgtataaagaaacaagcagctycttgctgtaaatttatttaatgtcttattcattcaccgtctgtcgtatttatcatcttgccatacaaagaatgtacactcctctatttaccttttcatcgtgaactcctagagagaactgtctataatctattcatcttggtatactttctctgagccacagttcctgataaataataggcactcagtacacatttaggaaatgaatgcctgaaggatcaatataatcaggtacatgcccagggtcatttaacaaacctgtgttacaaggataataaaaggcctttgaaaatttcccaactattgacacttggtatgattgatttatttactccagaagtattattggacatgtactatgtactcagcacctttctggattttggaaatatctcaataaacaaaactgacaacaattttctacttttagggattttacattc

SEQ ID NO: 632450 - DNA, 444 bp, Homo sapiens
taaatcacattatgatattacctatcccttctaatgttaaaacaaaacaagmaaatctacacaaggtgagaaaagatagtgtggaacctgggaaaacagtacaacaaaatttggcatgatgattattattttttttgtcagaggaattttaggttttagttttggggaagttatcgagtagaatgctatcagtctcattaatgaaacaactcccaaaacattacacacacacacacagacacacacaaatacacacacacacacacacacgggggagaggggggcggagagagagagagagagagagggagagaaattaaataacagcagataggtgatatctggaaaactggtggataacgaatgactgcttaaccagatcccaggaaggcaattgcctgagctctgaatgaagaaagcttactggtaagttgattcacatgt

SEQ ID NO: 632451 - DNA, 621 bp, Homo sapiens
aaccaacaatcagagactactataaacagctttatgcacagcaactagaaaatttagaagaaatcaataaattcttggacacatacaatctcgtatgactgaaccatgaaaaaattgaatccttgaatagaccaataatgaactctgaaattgaatcagtcataaaaagcctaccaaccaaaaaaaagcccaaggccagatggattcacagccaaattctgtcagatgtataaacaggagctggtgccattcccattaaaactattccaaaaaattgagaagcagggactcctccccaactcatcctatcaggccaatatcatccagataccaaaacctggcagagacacaacaacaacaaaaacacttcaggcaataaccttgatgaacataggtgcaaaaatcctcaacaaaatactaccaaatcaaatccagcagcacatcaaaaagctaattcccctgtaatcaagtaggctttacccctgggaagcaaggttggttcaytgatgcagaaaaggcttttgataaaattcaacatcctttcatattaaaaccatcaataaactaggcactgaaggaatatatttcaaaatattaagggccatctataacaaacccaca

SEQ ID NO: 632452 - DNA, 594 bp, Homo sapiens
aactggctagccatatgcattagattgaaactgaacccctaccttacaccacatacaaaaataaatgcaagatggattaaagacttaaatgtaaaacctaaaactataaaaaccctggaagttaacctaggaaacaccattctaaacatagaacttggcaaagatttcatgatgaagatgacaaaagcaattgcaacaaaaacaaaaattgataaatgggatttaatcaaacaaaagagtttctacattacaaagaaactatcaacacagtaaacagacaatctacataatgggagaaaatatttgcaaactatggatcccacgaagatctaatatccagaatctataagaaaccaacaaatttgtaagcaaaaaacaagcaaaagtggacaaagaatatgaacaaacactttaaaaagacacacatgcagccaataaacatatgaaaaaatgctaacattgttaatcatcacacaagtgcaaatcaaaaccacgatgagatactgtctcrcagatgtcagaatgtctattattaaaaagacaataaaagtaacagatcctggcaaggttgtcgagaaaaacgaacacttatac

SEQ ID NO: 632453 - DNA, 637 bp, Homo sapiens
caattgctttgcatcctcactatcatttattattgccagaccttttcatcttagccaccccagtgagtgtgaagtagtgtctcattgtgatttccatttgcatttctctaattactaacgatgttgagcatctacttaggtacttatttggcattcatttaycttctcttgtgaagtctctcttcaaataaagtgcaagtatttttaataaaaatcaggttgccttattaagtcataagagttcttatatctactagatataaatttcttatcatatatgctcttcaaatatattctcccagtctgtagctggtcttttaattttgtaagtagtatattgtgaagaacaaatattttaactttaaaatgtccaatgtaccaacattttcttttataacttgtgctttttgcctcaccaaaactcacaaagatattatttttttcttctacattttatagttcactgctctctatatagtttatagctctataaaccagtttgaattgttttgtatgaaggatgtgaagtcaaggtttactttttccacaaggatttccaattgttccagcatcattttttgaaaaaacgaagatttctacattgaattaccctgggtcctttgttaaaagccaatta

SEQ ID NO: 632454 - DNA, 637 bp, Homo sapiens
caattgctttgcatcctcactatcatttattattgccagaccttttcatcttagccaccccagtgagtgtgaagtagtgtctcattgtgatttccatttgcatttctctaattactaacgatgttgagcatctacttaggtacttatttggcattcatttatcttctcttgtgaagtctctcttcaaataaagtgcaagtatttttaataaaaatcaggttgccttattaagtcataagagttcttatatctactagatataaatttcttatcatatatgctcttyaaatatattctcccagtctgtagctggtcttttaattttgtaagtagtatattgtgaagaacaaatattttaactttaaaatgtccaatgtaccaacattttcttttataacttgtgctttttgcctcaccaaaactcacaaagatattatttttttcttctacattttatagttcactgctctctatatagtttatagctctataaaccagtttgaattgttttgtatgaaggatgtgaagtcaaggtttactttttccacaaggatttccaattgttccagcatcattttttgaaaaaacgaagatttctacattgaattaccctgggtcctttgttaaaagccaatta

SEQ ID NO: 632455 - DNA, 588 bp, Homo sapiens
atcctcactatcatttattattgccagaccttttcatcttagccaccccagtgagtgtgaagtagtgtctcattgtgatttccatttgcatttctctaattactaacgatgttgagcatctacttaggtacttatttggcattcatttatcttctcttgtgaagtctctcttcaaataaagtgcaagtatttttaataaaaatcaggttgccttattaagtcataagagttcttatatctactagatataaatttcttatcatatatgctcttcaaatatattctcccagtctgtagctggtcttttaattttgtaagtagtatattgtgaagaacaaatattttaactttaaaatgtccaatgtaccaacattttcttttatracttgtgctttttgcctcaccaaaactcacaaagatattatttttttcttctacattttatagttcactgctctctatatagtttatagctctataaaccagtttgaattgttttgtatgaaggatgtgaagtcaaggtttactttttccacaaggatttccaattgttccagcatcattttttgaaaaaacgaagatttctac

SEQ ID NO: 632456 - DNA, 637 bp, Homo sapiens
caattgctttgcatcctcactatcatttattattgccagaccttttcatcttagccaccccagtgagtgtgaagtagtgtctcattgtgatttccatttgcatttctctaattactaacgatgttgagcatctacttaggtacttatttggcattcatttatcttctcttgtgaagtctctcttcaaataaagtgcaagtatttttaataaaaatcaggttgccttattaagtcataagagttcttatatctactagatataaatttcttatcatatatgctcttcaaatatattctcccagtctgtagctggtcttttaattttgtaagtagtatattgtgaagaacaaatattttaactttaaaatgtccaatgtaccaacattttcttttataacttgtgctttttgcctcaccaaaactcacaaagatattatttttttcttctacattttatagttcactgctctctatatagtttatagctctataaaccagtttgaattgttttgtatgaaggatgtgaagtcraggtttactttttccacaaggatttccaattgttccagcatcattttttgaaaaaacgaagatttctacattgaattaccctgggtcctttgttaaaagccaatta

SEQ ID NO: 632457 - DNA, 643 bp, Homo sapiens
gcctggttaggtactgctgatctcgctaggtcagcttatgcatttgaagtcagtttgagagtcagccaggggctgctcatcccagatggcctcacttacrggtttacggcagttggctgatgactgggtcacactgtgttcaagatctagcaggctagcctgtgcttcttcccatgggtactgggtactaaaagcatccagagggtaagctctactatacaagtgcttttcacgattctactcaaatcatttttacaactgtctcagtggccaaagcaacccacttttggataggaagacctataatgtcactatcaatagagagagagaaataattcgtggtcatttgttataatggaccatatctttagattaaaaaaaaaagaagcattttctttggaacccggtatcagtgccatgcatgtatgaaaggcgctcaagacattatatatatatataattttttttttttttgaaacagagtctcgctctgtcacctaggctggagtgcagtggtgtgatctcggctcactgcaaactccacctcccgggttcacaccattctcctgcctcagcctccccagtagctggaactacaggcgcccaccaccacgcccggctattttcagggtttcactgtgtt

SEQ ID NO: 632458 - DNA, 643 bp, Homo sapiens
gcctggttaggtactgctgatctcgctaggtcagcttatgcatttgaagtcagtttgagagtcagccaggggctgctcatcccagatggcctcacttacgggtttacggcagttggctgatgactgggtcacactgtgttcaagatctagcaggctagcctgtgcttcttcccatgggtactgggtactaaaagcatccagagggtaagctctactatacaagtgcttttcacgattctactcaaatcatttttacaactgtctcagtggccaaagcaacccacttttggataggaagacctataatgtcactatcaatagagagagagaaataattcgtggtcatttgttataatggaccatatctttagattaaaaaaaaaagaagcattttctttggaacccggtatcagtgccatgcatgtatgaaaggcgctcaagacattatatatatatataattttttttttttttgaaacagagtctcgctctgtcacctaggctggagtgcagtggtgtgatctcggctcactgcaaactccacctcccgggttcacaccattctcctgcctcagcctccccagtagctggaactacaggcgccyaccaccacgcccggctattttcagggtttcactgtgtt

SEQ ID NO: 632459 - DNA, 643 bp, Homo sapiens
gcctggttaggtactgctgatctcgctaggtcagcttatgcatttgaagtcagtttgagagtcagccaggggctgctcatcccagatggcctcacttacgggtttacggcagttggctgatgactgggtcacactgtgttcaagatctagcaggctagcctgtgcttcttcccatgggtactgggtactaaaagcatccagagggtaagctctactatacaagtgcttttcacgattctactcaaatcatttttacaactgtctcagtggccaaagcaacccacttttggataggaagacctataatgtcactatcaatagagagagagaaataattcgtggtcatttgttataatggaccatatctttagattaaaaaaaaaagaagcattttctttggaacccggtatcagtgccatgcatgtatgaaaggcgctcaagacattatatatatatataattttttttttttttgaaacagagtctcgctctgtcacctaggctggagtgcagtggtgtgatctcggctcactgcaaactccacctcccgggttcacaccattctcctgcctcagcctccccagtagctggaactacaggcgcccrccaccacgcccggctattttcagggtttcactgtgtt

SEQ ID NO: 632460 - DNA, 589 bp, Homo sapiens
atacccagaagtggaactgctggatcttatgacaactcaatttttaatattttgaggaactgccaaactttttcagagtggctgtactattttacactcccgtcaacagtagacaagggctccagtttctccacatcctcactgacattattttctttttttgtttttgttttgatagtagccaacctgatgggtgtgaggtgatatctcattgtggttgttactttcctgatacgtatatgagataattgttaaaattatattagatactttacagttaagatgtctttggctgtaagtaatagccagcgggtgggggagagtaactttttccttcctaatatgaagtctgaagtttgtaaagactgtgataaagaaaaatttgggcatcttacctgcaatagtttcagtacaacatgactccttatttttcttcaccaatttctttctgcctttacccattccttaaatgccgttgtcctaatggttctgttcctgaactatatgtaccctctaggcaagctcwccctttcccgcagctccaatggctttcttcactaatgacccctagctctagtatctccaggtg

SEQ ID NO: 632461 - DNA, 593 bp, Homo sapiens
aattatagaacaagtttcattgtctcactgctactttggcattttctttattcaaaatctatatgctgcctgagatcatcrgagagtatgtatatgaaaatgagagtgaaaataagagaggaatctagtgatctaaggactacattaagggagtagctgttagtgtcagtaagtctgggttctatttctgagtctaccctcccttcctactgtacagcctgcctaagctttcattattacttattgtattgtattgtattgttttttcaagtgattatttccatggcaatgaggcactgttgcaggcattagggaggcattacagccacagtggagttcggaatcagcaaagaagataaagggagtggagagaaaaggagcaggggttggaaaaactttgaaagcaaagacgtaggatgaatccaacaaagcatcaaagatattctaatttctaatatcagttaatggaaaatttggggttgttcatgtttactaggtcagtgaataagatagatttttgtttgttttctaataataaaaagcaatagaatagtattctgagaagacactgcctgtgaaattacagggtctag

SEQ ID NO: 632462 - DNA, 593 bp, Homo sapiens
aattatagaacaagtttcattgtctcactgctactttggcattttctttattcaaaatctatatgctgcctgagatcatcagagagtatgtatatgaaaatgagagtgaaaataagagaggaatctagtgatctaaggactacattaagggagtagctgttagtgtcagtaagtctgggttctatttctgagtctaccctcccttcctactgtacagcctgcctaagctttcattattacttattgtattgtattgtattgttttttmaagtgattatttccatggcaatgaggcactgttgcaggcattagggaggcattacagccacagtggagttcggaatcagcaaagaagataaagggagtggagagaaaaggagcaggggttggaaaaactttgaaagcaaagacgtaggatgaatccaacaaagcatcaaagatattctaatttctaatatcagttaatggaaaatttggggttgttcatgtttactaggtcagtgaataagatagatttttgtttgttttctaataataaaaagcaatagaatagtattctgagaagacactgcctgtgaaattacagggtctag

SEQ ID NO: 632463 - DNA, 538 bp, Homo sapiens
cagtctatacaaactgaggccacttatcaattatttgtattttctgatcacacaataatgagctcactccagtttccaattatattatgaaatattcataattttaattgacctcatcagaacccctaaaattatagattctattattccttacttaaaatttctctgaaaccaatgccaaggaactctgaatcttccagactcagttatccaagatggayttaatatttaacaaaaatacagcactgaatagcaatacttatcatttaccctgaatgtacaagtcctgccaatgaaaaagcacaaattcttgcacaaaaagtgaaagaagatatgctttgacataggatataacaaatacaatgtcaagtctactgaagatgtttaagtttggaattctttaaactacaagattttagacttatatatttaaacccttaactctcttataacaaagttttatgttacattggtcttctcttatcaatgggggatatcttccaagacccccagctgatgcctgaaaccacatatagta

SEQ ID NO: 632464 - DNA, 465 bp, Homo sapiens
atagtatttggtatactggatactgcatattttttgtcagacatcaaacataagagggattcattttagctcttacttggaagaatgttttgttctcaaagagtctttgaaagaatagtgaagtgaaaagcatgatamaatgatgaaagatagctttgaaattaaactgatgtgaattaaactgatatctctctttctctctctctctctgcatctcttggtggcgtgactttgagcaaattactgaattccttgaatctcattttatccacaagtaaaaataaatagctgaacctgccacacaagatcatcttcagaatttctgagcggataaagtcctcggcatgcggtgaacactaaataaatgttccttcccttcccaaatccatagaattttaaaagacacaagattcaatacctggcaatattcaacagactcaaagtggtagtctcttctgacaccca

SEQ ID NO: 632465 - DNA, 647 bp, Homo sapiens
cactaaatacgtagaagaggtatagtaatattgcttgtcatctaggcaacaactttctcgccattttaagggaggtaaattaagacagtgagtgggattgggatagacttgtagcctcmaaaagaattctgacatggctcatgagggccctctttttgaggctacaagttagttaatcttttggaacatgttatcttctgctatttatagccaagatcctaagtgtaactattgtcattttcttctatatctgccagttggtatgtttacatacaggtgaaagagcctcttttccatatagtctagtcataagtaaaagaccttttaggcttaggtctggaaaacttttaagtcctaatagtatgagatttttttttttaagtttaatttttttattttttcaaacatcacattcctgataaggccaacttacaaactaaaacagtcttggtaaattcttaagcagctttttaaaatgaagcaaattgaatgtacaagtttagtaagcattcaagcactgtttataatccccttaattatctacattccctaatgcatgtcaaatttaaatcatagttataatcagctatttctaattaaaaatacaaaacaagtaattaaattctctaaaatatcaaagattctct

SEQ ID NO: 632466 - DNA, 647 bp, Homo sapiens
cactaaatacgtagaagaggtatagtaatattgcttgtcatctaggcaacaactttctcgccattttaagggaggtaaattaagacagtgagtgggattgggatagacttgtagcctccaaaagaattctgacatggctcatgagggccctctttttgaggctacaagttagttaatcttttggaacatgttatcttctgctatttatagcmaagatcctaagtgtaactattgtcattttcttctatatctgccagttggtatgtttacatacaggtgaaagagcctcttttccatatagtctagtcataagtaaaagaccttttaggcttaggtctggaaaacttttaagtcctaatagtatgagatttttttttttaagtttaatttttttattttttcaaacatcacattcctgataaggccaacttacaaactaaaacagtcttggtaaattcttaagcagctttttaaaatgaagcaaattgaatgtacaagtttagtaagcattcaagcactgtttataatccccttaattatctacattccctaatgcatgtcaaatttaaatcatagttataatcagctatttctaattaaaaatacaaaacaagtaattaaattctctaaaatatcaaagattctct

SEQ ID NO: 632467 - DNA, 647 bp, Homo sapiens
cactaaatacgtagaagaggtatagtaatattgcttgtcatctaggcaacaactttctcgccattttaagggaggtaaattaagacagtgagtgggattgggatagacttgtagcctccaaaagaattctgacatggctcatgagggccctctttttgaggctacaagttagttaatcttttggaacatgttatcttctgctatttatagccaagatcctaagtgtaactattgtcattttcttctatatctgcmagttggtatgtttacatacaggtgaaagagcctcttttccatatagtctagtcataagtaaaagaccttttaggcttaggtctggaaaacttttaagtcctaatagtatgagatttttttttttaagtttaatttttttattttttcaaacatcacattcctgataaggccaacttacaaactaaaacagtcttggtaaattcttaagcagctttttaaaatgaagcaaattgaatgtacaagtttagtaagcattcaagcactgtttataatccccttaattatctacattccctaatgcatgtcaaatttaaatcatagttataatcagctatttctaattaaaaatacaaaacaagtaattaaattctctaaaatatcaaagattctct

SEQ ID NO: 632468 - DNA, 647 bp, Homo sapiens
cactaaatacgtagaagaggtatagtaatattgcttgtcatctaggcaacaactttctcgccattttaagggaggtaaattaagacagtgagtgggattgggatagacttgtagcctccaaaagaattctgacatggctcatgagggccctctttttgaggctacaagttagttaatcttttggaacatgttatcttctgctatttatagccaagatcctaagtgtaactattgtcattttcttctatatctgccagttggtatgtttacatacaggtgaaagagcctcttttccatatagtctagtcataagtaaaagaccttttaggcttaggtctggaaaacttttaagtcctaatagtatgagatttttttttttaagtttaatttttttattttttcaaacatcacattcctgataaggccaacttacaaactaaaacagtcttkgtaaattcttaagcagctttttaaaatgaagcaaattgaatgtacaagtttagtaagcattcaagcactgtttataatccccttaattatctacattccctaatgcatgtcaaatttaaatcatagttataatcagctatttctaattaaaaatacaaaacaagtaattaaattctctaaaatatcaaagattctct

SEQ ID NO: 632469 - DNA, 573 bp, Homo sapiens
caactcttgctcaccttatttgttgtttgttgctgtttttgggggacaagctttaagctatctcactttttgatctggagtataggaacccagcactggcttcttccagcaccttcacttggcctcagtgttgtgatgcactgagccacccctgttattgtgagtctataacaagtaatttgtttctgaaaagattaaagcactacactttgaaaattatttagtgttttaaaatttgatgatagtaagacttgcatttcaacaggattttttgagtttgaatgaaatgggggtgatataaccccagaacagaaaatcgtatacctaagggtgtcatcactgtgcaaactgctattcagaggtgaaatgrgagaagaaaaagacatttaaacagaaacaattaggcaattaacaggccccctcttcacccccgacctccacccctgtcaagcaactgaggcctcaggagtcctgcctgagcagaacagagggttttccatttcttttggctttattttgttgaaaatgttgtccaaaagttgtgacacaagtcaggccataattactctgatc

SEQ ID NO: 632470 - DNA, 608 bp, Homo sapiens
gtcctgtgtttagctcttgggagtatactcctgttttttctctgacatacgtttgctcttttgattttgagcatttcccagtctctgactccacgagatgctccagcattatcttgtattttcctgcccacagccatggaatgaatcaaccacttttccaaggaaccctggttccttttattggagaatgatattcagaaagcaagatctgagccatagatatgcacattgttttgagagtatccttgattctaggtcctcttaacagagagttaggatatttgagtgtgttttctagctcaggtataaacacatcagtgcttgtgcatctagttacctgtgtatgtactttaaaaccatgggttcataccgagacctccaattccagtccagcaccacagggktcattttagcttcctctctaggaagttttatttttagaagctttcccaggggtttatgattttttttttttttttgacaaggtctcactgccacccagtctggagtgcagtgtaggaggcaacctctgcctcccaggctcaagcagtcctttcgcctcagccttctaaggagctaggacctcaggtacgtgccaccacacctgg

SEQ ID NO: 632471 - DNA, 567 bp, Homo sapiens
ttcgtgtgcaaaattaattgaaaatattttctataattaccttcagcctatgtgtttaaggtgtatatgaaacataaatgaattttatgtttggacttgggtcattatgtatatgcaaatattccaaaatctgaaaatatccaaaattcaaaacatttctggtcctgagcattttggataagggggatactcaacctgtagttttatttgtaattgccgaaacctggaaacaacccagatatcttctagctagtgaatggataaacatttgatacatccatgcagtggggtactacttaacagggaacagactactgatacatgcagcagtattgattaatgtcacrtggactgtgctaagctaaagaagccagaatccaaaggtacatactgtatggttctatttatatgatattccagagatggcaagactagggacagaaagcagatcagtgattggcatgggtggggaagagggattgactccagatgggtttgggcattttggagagcagtctgattgatctgtatcttgattatagtggtggctacagcaatgtgtggtca

SEQ ID NO: 632472 - DNA, 417 bp, Homo sapiens
tttgattaggaaagggaattccccaaccccttgcccttcctgggtgaggcaatgcctcgccctgcttcggctcacactgagtgtgctgcacccactgtccgacactccccagtgagacgaacccgatacctcagttggaaatgcagaaatcacctgtcttctgcgtcgctcacgctgggagctgtagactggagctgttcctatttggccatcttggctccttcccctctatgatttctttcagcagtgttttgtagttttccttgtggaggtcttttaccttcttggttaggtatattcctaagttttgtttttgtttttgtatctattgtaaaaggggttgagtttgtgatttgattctcagcttggtcacttttggtgtatacrcttttggtgtatatcagaactactgatttg

SEQ ID NO: 632473 - DNA, 621 bp, Homo sapiens
tttttacagctttgtcaaaacaaacaaaatgtggcattaattaatttcctttaaaaaaaaaaatatggccaggtgcggtggctctacacctgtaatcccagaactttgggaggccgaggccgaagccggtggatcacttgaggtcaggagttcgagaccagcctagccaacaaggtgaaaccccgtctctactaaaaatacaaaaaattaggggggcatggttgcacgtgcctgtaatcccaggcacttgggaggctgaggcaggagaatcgcttgaacctgggaggcggaggttgcagtgagccaagatcacaccgctgtactccagcctggacagcaaagcgagactcygtctcaaaaatgtgtgtgtgtgtgtgtgtgtgtgtgtgtgtgtgtgtgtgtgtgttcttgattatacccacctattccatttacaattagtatgaaggtattagcctaagtatttaaaaatactatataaggtaaaggaaatttttctttttctaaatatgtctaagttcccccatctagtttctgttttgcttttctgagttgcaacatgtaagattattataataattttcagtttccctttcccttgaagagacttctgcagtcgag

SEQ ID NO: 632474 - DNA, 621 bp, Homo sapiens
tttttacagctttgtcaaaacaaacaaaatgtggcattaattaatttcctttaaaaaaaaaaatatggccaggtgcggtggctctacacctgtaatcccagaactttgggaggccgaggccgaagccggtggatcacttgaggtcaggagttcgagaccagcctagccaacaaggtgaaaccccgtctctactaaaaatacaaaaaattaggggggcatggttgcacgtgcctgtaatcccaggcacttgggaggctgaggcaggagaatcgcttgaacctgggaggcggaggttgcagtgagccaagatcacaccgctgtactccagcctggacagcaaagcgagactctgwctcaaaaatgtgtgtgtgtgtgtgtgtgtgtgtgtgtgtgtgtgtgtgtgtgttcttgattatacccacctattccatttacaattagtatgaaggtattagcctaagtatttaaaaatactatataaggtaaaggaaatttttctttttctaaatatgtctaagttcccccatctagtttctgttttgcttttctgagttgcaacatgtaagattattataataattttcagtttccctttcccttgaagagacttctgcagtcgag

SEQ ID NO: 632475 - DNA, 627 bp, Homo sapiens
gaatacacccccacattttattcattagatgctgacacccctaatattatgccaaagcacaattcagtgaaagccattctggggactggaatgacagagagtaaccaagagcccctccaatgctccagctaattcagaggccaactttcacccaaccacaggactgactgactgctctccaggctgtctgccataagcagctcgtggtttctctacacccagcttggaggctgccttgagcttaaaggtccatgctctgaaaagtttcagagakcatgttctgtgttgccaagtgagtccaaaactgaactgggagaaagaatgctgtcttcttgggaaaactcaggggcctccaggatatctgcctgcacagaaattcactctgctcttcacagatgagtggccacggcagagccctgattctaaattgtttcctgttcctacacgcggatgaatgtgtaatcaaggcccatcagttctacaccatgaagcatcgccatgataattttaccctggaagaaatttttaaaatattttaaaactaatgttaccaaggcccttaaatgcacccatagaaaagctggaaaacgcttgtgctgcaaaacttactcctaaataacaaaataa

SEQ ID NO: 632476 - DNA, 575 bp, Homo sapiens
tatgttaaacagcctgctcttgaagcagaatctagtgccatataccttattcctacatgctagcccagcatagctacacaataagaaccaagtcagacctgtcctggtcaacacctgggaaagccacactctgaaccagcagcagaaaagatacacaatgatgtaacccaaatgtttaaaaaatatagcaaaataacacactataaactattcctcctattttatcatgaatgatgagggaaaatgtgggaggacaaaataaataatggagagtgacagagaccaaaggagagccatgcagaaagaaacaaacaagaagtcacagagaaaaaagagcaaaagcaaagacagaatatttaaccagaaaggcaggctcatttggagatgcccacacaraaagcaaaatgtggaaatgaaaaatggtcacagagcagcatccctatcttgaggcttacgggcataaataaaaatattaaagtgcacttgctgattcttggaacaagaagaatacatccagcccattcttttaacaaataccaaaaatgcttctaacacatctctgaaatactctaaca

SEQ ID NO: 632477 - DNA, 593 bp, Homo sapiens
gattattaattcactgacttaattcagttcttcgagtacgtaatggagacaaagttatrggatccgaggcataatctaataatgcttaaaagaagtctaacaacaaaaaagttagccttctcagccttcttttttcttactagttggtccctctcatttctaactaaatttaaaacgttttctagcaggataaagtgggaggaaggaggaacagaattagttaaagaaatatttctggtttccagttgaaatattgaaggaaggaataaatacatctgttccctacagcaaagaatgccatttgagtagtataacagaatgaacagaggttctgggtttgaatactaacttgagctttactatctgagtaatgagtcaccatttccacgactgtgtttatacttctgcaataaaaggccaataatacttcctctatttatctaagagttaccgagacatctcacgagagggaaatagtgcatttctagaggaagggtaaagtagcaaaacattttcaaaaagcaattttaaaatacgaaacaagagctttaaagatgtatctcatctttgatccagttctaagatttcaaact

SEQ ID NO: 632478 - DNA, 593 bp, Homo sapiens
gattattaattcactgacttaattcagttcttcgagtacgtaatggagacaaagttataggatccgaggcayaatctaataatgcttaaaagaagtctaacaacaaaaaagttagccttctcagccttcttttttcttactagttggtccctctcatttctaactaaatttaaaacgttttctagcaggataaagtgggaggaaggaggaacagaattagttaaagaaatatttctggtttccagttgaaatattgaaggaaggaataaatacatctgttccctacagcaaagaatgccatttgagtagtataacagaatgaacagaggttctgggtttgaatactaacttgagctttactatctgagtaatgagtcaccatttccacgactgtgtttatacttctgcaataaaaggccaataatacttcctctatttatctaagagttaccgagacatctcacgagagggaaatagtgcatttctagaggaagggtaaagtagcaaaacattttcaaaaagcaattttaaaatacgaaacaagagctttaaagatgtatctcatctttgatccagttctaagatttcaaact

SEQ ID NO: 632479 - DNA, 593 bp, Homo sapiens
gattattaattcactgacttaattcagttcttcgagtacgtaatggagacaaagttataggatccgaggcataatctaataatgcttaaaagaagtctaacaacaaaaaagttagccttctcagccttcttttttcttactagttggtccctctcatttctaactaaatttaaaacgttttctagcaggataaagtgggaggaaggaggaacagaattagttaaagaaatatttctggtttccagttgaaatattgaaggaaggaataaatacatctgttccctacagcaaagaatgccatttgagtagtataacagaatgaacagaggttctgggtttgaatactaacttgagctttactatctgagtaatgagtcaccatttccacgactgtgtttatacttctgyaataaaaggccaataatacttcctctatttatctaagagttaccgagacatctcacgagagggaaatagtgcatttctagaggaagggtaaagtagcaaaacattttcaaaaagcaattttaaaatacgaaacaagagctttaaagatgtatctcatctttgatccagttctaagatttcaaact

SEQ ID NO: 632480 - DNA, 593 bp, Homo sapiens
gattattaattcactgacttaattcagttcttcgagtacgtaatggagacaaagttataggatccgaggcataatctaataatgcttaaaagaagtctaacaacaaaaaagttagccttctcagccttcttttttcttactagttggtccctctcatttctaactaaatttaaaacgttttctagcaggataaagtgggaggaaggaggaacagaattagttaaagaaatatttctggtttccagttgaaatattgaaggaaggaataaatacatctgttccctacagcaaagaatgccatttgagtagtataacagaatgaacagaggttctgggtttgaatactaacttgagctttactatctgagtaatgagtcaccatttccacgactgtgtttatacttctgcaataaaaggccaataatacttcctctatttatctaagagttacygagacatctcacgagagggaaatagtgcatttctagaggaagggtaaagtagcaaaacattttcaaaaagcaattttaaaatacgaaacaagagctttaaagatgtatctcatctttgatccagttctaagatttcaaact

SEQ ID NO: 632481 - DNA, 596 bp, Homo sapiens
ggatatttttatgaaaacaagcataaaatcagtgagacaaaaattagtttctaaaatctgtggctcataacttgattttagttttaaggttatacaaatgtttattatctttaaaaatgttatcacactctgctttttgcttttggatctgttagtgaaagtgtacttactcagagttctcaggaactaatggaaagacgtggtttgaatatgaatggaagagtcaggtgctaccacgggggaggcagtttgcttttgaaatcaacattgtaatattatagaatgtatacacatattggctcactcacatttgttgtaaaggtcagaagggagaatagagaaccttgctgactttttacgaaatactttaaacattcatatattaagtagcactaacacacataaactctccctcacaggaagttcttaagacttgtgtctgctggtgttttccagaaagaggtcaagaggtgtttgcttaggctgcattttattaacggtcccattttatgttgccrttagaacattgaagtctaatgagtcacctccctgtcccatgagaagcatgagttttcttaatgctaacgtttgggata

SEQ ID NO: 632482 - DNA, 548 bp, Homo sapiens
cccttccttcctggtaccagaaggtgttccagaagaagctactttccctgcctcagctctggcattaattattttacgccagttccttttattgaagaatagtatttacgaacaaagatctgcttattaggcgtgctcgtaactcctgaggtatcattgcttctaggcagcccaagctggcagagccaggaaatgggtggatgtgtgcacgtgtacacacacacacacacacacacacacacacacacccctgcatctatatatgaaaatcatgagggcacacgggttcctccaattcccatccaccatcgcaggcttctttccccctccttatttataatttttttctctttcaacaggaaacatggttctgattatcgtcagtatatctgcttagttactcaatcctaggaaacacaaaatagtttcagaattgctaactcaaatctctgtgaatgtattaactactgcacaatgtttgtttggagtaacatatmaaatatgtctttagacttataatacaagtcaaaatactgtttccaaggtaa

SEQ ID NO: 632483 - DNA, 631 bp, Homo sapiens
catagctagtaactttgggcttgaaaatgatacctttcctccctcctaactcccctaagttttaggagtgtttgtgctcttgccactgagctgtgaatgggtgatggttccttaagcgcagcagaagtagctgcattggaggaagaggattctagtaaacctacaggtgtgctttggtaggctcactagccaagtgacagtgtgcactgaaatgaaaactctgaggcctgctaagaggatatattgagggaccatacaagattactggttaggcagtttgggggagtaaattctctgaaagtctttgttttcaaagcatgctcgccacagatgaactcaggaatttgggggggagtagttttgggactgtggacatgaatatgtttcggctatttgaaaattatttattattcatttttatatttgtgcccccatctgttttcagtaaggaaggatttagaagtagtttacaattaaaacatacatgcacacagactgcctccacacacactgtatattgcatagctaagcctattaatgtagaggaaacaaaattgtcttcatttagcaaatatttattgtactacaactgagtccagtagwtgcatgtaaatcaatttttttttgtttg

SEQ ID NO: 632484 - DNA, 586 bp, Homo sapiens
aggaacccagcactggcttcttccagcaccttcacttggcctcagtgttgtgatgcactgagccacccctgttattgtgagtctataacaagtaatttgtttctgaaaagattaaagcactacactttgaaaattatttagtgttttaaaatttgatgatagtaagacttgcatttcaacaggattttttgagtttgaatgaaatgggggtgatataacccyagaacagaaaatcgtatacctaagggtgtcatcactgtgcaaactgctattcagaggtgaaatgggagaagaaaaagacatttaaacagaaacaattaggcaattaacaggccccctcttcacccccgacctccacccctgtcaagcaactgaggcctcaggagtcctgcctgagcagaacagagggttttccatttcttttggctttattttgttgaaaatgttgtccaaaagttgtgacacaagtcaggccataattactctgatcctaaattaggctgttcagctttactctcttaatgttcagatgcacttgactgctacagccaggcaactctcagtattgtctctcttgtctccaaat

SEQ ID NO: 632485 - DNA, 510 bp, Homo sapiens
tatgctatttttaggtgttgctttctctccagagaggagggcagcttygtttatggatgaggaggcctctgtgcttagggtcacaggaaagcagctttctgatatttaatcttctggccaaggaaggcattaactgtgttggttgggtgctgaaggcaaccgtctccagctcccactttgggctttctctgggaggggctcatacaaagcagacccaggtccaaggctgcttctcagccccagcgcacccacacaggtgcgcccacagcctgctctctgctctcagtgatgcctgcctgggccgggcctctcccttcagtcgttacccttgttgtccccacagccttggcagagaggcccaaaccgggccctgagcagcctagaccatgccagacgtctgcagcctcccagggccttgggaaaggtatgggcaggacctttcccctttgggatcctcctgctcctcatggggtgtggcagcggctgccctgtagctagagatcctggtgt

SEQ ID NO: 632486 - DNA, 510 bp, Homo sapiens
tatgctatttttaggtgttgctttctctccagagaggagggcagctttgtttatggatgaggaggcctctgtgcttagggtcacaggaaagcagctttctgatatttaatcttctggccaaggaaggcattaactgtgttggttgggtgctgaaggcaaccgtctccagctcccactttgggctttctctgggaggggctcatacaaagcagacccaggtccaaggctgcttctcagccccagcgcacccacacaggtgcgcccacagcctgctctctgctctcagtgatgcctgcctgggccgggcctctcccttcagtcgttacccttgttgtccccacagccttggcagagaggcccaaacygggccctgagcagcctagaccatgccagacgtctgcagcctcccagggccttgggaaaggtatgggcaggacctttcccctttgggatcctcctgctcctcatggggtgtggcagcggctgccctgtagctagagatcctggtgt

SEQ ID NO: 632487 - DNA, 556 bp, Homo sapiens
gccacagcctgggatatgaggctcttctgagaggcagagatgcgtggttaatgtcttcgtttgttagggctgccataacaaaacatcactgackgggtggctcaagtagaaattgatttcccacagccctggaagttaggagtccaagatcaaggttgtcaacaaagttggtttctcctgaggcctctgctcggctgggagacagctgccttctcctagtgtcctcaaagtagttcctcttcttatgaggataccagtcagattggattaggactcaccctaatggtcttagtttaattaattctttttttttttttttgagatggactcactctgttgcacaggctggagtgcagtggcacgatcttggctcactgcaacctccgcctcccaggttcaagggattctccttcctcagactcccgagtagctgggtctacagacatgcccagctaattttgtatttttagtagagacagagtttccccacgttggccagtctgatctgaaactcctgacctcaggtgatccacccacctcggcctcccaaagtatg

SEQ ID NO: 632488 - DNA, 556 bp, Homo sapiens
gagggcagtgtgggatgagaggagggccctcttgactatgtgcattgctgtttattctcttggcagcattttctttttttatgtctttagaacctgccctcaacatttcaaatcaccacagctgtggttttctcatcaccgcttcgacttggcgttggcttcttgtgttttcagcwgggttaaggccttgaacaagacactgtgggatatcactattatttaaaatgtatcactcagttggtttcgcttcctagttcttacgaataaacacatttttcaagggggattttgaaatctattttaaaaacatatttgcatttaatgaaaaataccctgaagacattgcggaccagggtgggcacaccttgatattcttgggcatgggggaggaggtaatctagcgtttatgactttgggtttcaccactgtcaggtgtttatgggacaggcccttcaccattttgctgtacaatggaagtcacagtaatgtcatctataaaaaatcaattgagcaaataggattttgaaaaatgtaattcattcactgaattatttca

SEQ ID NO: 632489 - DNA, 548 bp, Homo sapiens
atgatgcattattatattcaaaattttccttgagactgattctctttgaattgcccagttcatctctgttgctatggggattttgactaagagcgtttgatcctggttgaatcttcctggacttaggttggctcaagctccaatatttaagagttaagatttgggaggttgtctttaatggaaagcactaaatgtttaaaaattatttattccttaagagagaaaaggtagaagggaaagatccttttgtgttgccatgcctttttaagacatgggctgataggtgactgtccttctctrtccatcactaaggggatgtgcaactggaccttccagaagaactccctgggcggattgcagagacggttgaggaagtgtcttccttggggatttttcatgaaacagaatatgggtcctcaacaggatgcttctgtgaatagcacggggatctttccctgtctagaacaaacgttaggacagcttctgatggaaagaatgcaaatgaacccggccccgcccctgggccgttgttgcctgccattacagga

SEQ ID NO: 632490 - DNA, 549 bp, Homo sapiens
gcttaaggctgaactgcagttgccttgaaaggagtcttcttctgttcagtttgctcctagggtgcagsttttccatgatctcaacccaaaaggaagagggttcatcaggccaccagccacacacaggctcaccctacaccagggggctctgcactccaaggcaggtgcactcagccccgcaggcaaccacccgcctttcatccagctcctctagaatccacacaggcctcgggtggaaaagtggtcctggctgctggctcttctccctgggcctctggtctcactcctagatctttccctactaattcatcattatcttgttaccacactaatgagctaataatgccttcaagagcaatttttagaagaccttatctacctctttaatttcttctcagatggaaggttgttctaaattgctgaattctgcacgatcaggagcagaagttctcttgggactttcagcaaaagggctctgaccactagcatttattctttaacacttaataccaggtcgttgtccaggaggcaggcgttgcagctgagaat

SEQ ID NO: 632491 - DNA, 581 bp, Homo sapiens
tcactcatcacagtctgaagcccatctcttcacttggcaaccaatggttagtgggtccaataaacaccttaaatatccttatcatagaagaaaattacatgacgcttgccttcaagaaatactcattcccatgaaacaggtaggcaagcacaccactactaagcaatggactgtgtggcggtggttcgaggactcataagtggaagggaatagtgaaaatttggagagtcaaggaagacttcctgggggaggagagactcggcattttattgtaagtcggccattagcctccggcttctaatgagcctgtttgatttaacatatttattaggcaggaatatctgtgctacccctcaagcaactcaccctctcattctacagcgtctrtgaaggctcctggcaaagcagggaaccaggattgaatgactaggagtggatgtggggcaagaagcaaggctcacgcttcacagctgggcagccagaggcaagtttcccagcacttttacacaagcatccaccaactgtccttggactctccattccaccttggtttttatgtgtgagaatctgggtggcagggc

SEQ ID NO: 632492 - DNA, 398 bp, Homo sapiens
ttgactattttagatatctccggtaagtgggaccatacagtggaaaacagtaaagaggttcttcaaatcattttttatttaattaattaattaatttatttgttgagacacggtctcactcagtcacccaggctggagtgccatggtgtgatctgggctcactgcaccctccatctcccaagttcaagcgattctcctgcctcagcctcccaaggagctgggattccaggcatacaccaccacgcccagctaatttttctatttttactagagacagggtttcsacatgttggccaggctggtctcgaacccctgacctcaggtggtccacccgcctcggcctcccaaagtgatgggattacaggtgtgagccatcacgcctggcctcttcaaatcat

SEQ ID NO: 632493 - DNA, 547 bp, Homo sapiens
cgccctggcctcccaaagtgctgtaattacaggcgtgagccacgatccctggcctcatctggttgttcagagtagactttctgaagcttcaatgtgcatatgatcacctgggatcttcatgtctaggatgaagtttgagtcttggtgtttgtaacaagctcccaggtcaggccagccaatactaccagttgatggacacactttgagtagctaaggttggagaaaagaaatttctttgttacaaagtaaggaaaccaaagacagaaacactacaaataggttatagatctcatcagtctcttgagctaagaaataagcctttgaaatccttaaaacacccaaggcatcagaatttgcaggacawggaccagaccaggatactgggacttctctttggtgtggaagaccagtacaaacaaaaaagatgtagtcacccaacaggttcttcctgctactgcacagacaaagccagttcactgagtccatggtattgcagcaaagaaagagtttaacttgaggccagccacatgggagaactcaagtcagt

SEQ ID NO: 632494 - DNA, 638 bp, Homo sapiens
attcacaatcaaatcccaggaattattctcatgtcacctatcctaaccagggacctttttcattccccttccagaaagccatgactctttctgaatcatattttcatcaccagaactgcaagaagtgggaagagtctgagattttgcactgattgtacaagttaacaagttagcctgttactatttcatgggtgccagcagaagacacgagactcctgagtcagagaaaaaggactttattactcatagcataacaggaagctggagcttcaggtttgtgtcagttccccttgcccaccaagtcccacaggggcaacttgcatggacccaaatagatgttatgccyacagtgggtttacatcacatctgaggaaccctaaactgcaagcaaagctatttgacctttgccccagggtgaggcattatctttattatactggacagcaaacaaccctgccctctgtgctatcttccaagatccttgaaaagataatccagaagaaaagccaccaatacttatgctcacaagacattcagaaatgtgagggacccatggagaattgtcttccagtagtgacacattccacctcttgatgaggaaatggcaagtttccagaagagcatttatgataagtgat

SEQ ID NO: 632495 - DNA, 638 bp, Homo sapiens
attcacaatcaaatcccaggaattattctcatgtcacctatcctaaccagggacctttttcattccccttccagaaagccatgactctttctgaatcatattttcatcaccagaactgcaagaagtgggaagagtctgagattttgcactgattgtacaagttaacaagttagcctgttactatttcatgggtgccagcagaagacacgagactcctgagtcagagaaaaaggactttattactcatagcataacaggaagctggagcttcaggtttgtgtcagttccccttgcccaccaagtcccacaggggcaacttgcatggacccaaatagatgttatgcccacagtgggtttacatcacatctgaggaaccctaaactgcaagcaaasctatttgacctttgccccagggtgaggcattatctttattatactggacagcaaacaaccctgccctctgtgctatcttccaagatccttgaaaagataatccagaagaaaagccaccaatacttatgctcacaagacattcagaaatgtgagggacccatggagaattgtcttccagtagtgacacattccacctcttgatgaggaaatggcaagtttccagaagagcatttatgataagtgat

SEQ ID NO: 632496 - DNA, 607 bp, Homo sapiens
acaaaccactgtacccagtctcttcttatttttaaagaatgttaatgttaagtatactttagtttatttcgacattttcttttgctcctacaattgtctctagttcctcaaagtctctcctttggtctctgtttttcacactgcaatcttttcaaaaatatttggtgactttgtgttgtgcaatctgcttaagaatgagaggcaagaaagcagactggaagctctcatgtgtagaggcagggatggtgaattgatgaccttcactgcagggaggtggggcacttcccacacccttcatgtgatgtattagtcaggatgagatttggttgaatgtaacacaaaaacccaaaataacagatgcttagttaaataaaaatgtatttttgcctcacattaaaaaaaagtgcccagatttggaagcctagggtttgtttgacagctccatatcatcaagggtaggcaacatctaccttgctacaccactctstcagtacaatgcctcatgagtcagctgccttctcaacctctagccattacatctgcattacaggcagaaagaaggaggaaggcagagaaaaagtaattttccagtccctttccagaagcc

SEQ ID NO: 632497 - DNA, 601 bp, Homo sapiens
tttgtcagaacagtagtaaaacaccttgaatgccaggcagacccattgagaaaaataaaataaacttacttggtttgaagaaataagtcaaatataaggattaaggtctgattcctttgcagctgggcaagagttagaagaggaagttcatgctttgaattagagcctctatgggctatgaatccatatactgtcctttaattgctaactcaaaattaccacctccctagagtcttctttcaatcctcaagcaacagatgacttctgccactggtacaacacaaaacatcttctgccttatatggcaggtatgtgggctggccttgtgtaccacacaggatcatgaacctctgaaggcttacacttttctagtacaactttggggtccataggacaccttgtatagttccgggcacacagtggcccctcagacattatgggtgyatgaatgaatgtataaataatgaagactgctctgatcatagtagaagtagccactttatgagggtgtattgaacacttccatcaaggtcatcttggaatatggaaaattgtggggacattgggaactttacagttaaaaagcagctagttacaaagc

SEQ ID NO: 632498 - DNA, 573 bp, Homo sapiens
tcagggtattgaacatgaattgttctagaaagtaaggaacaggcccaaaataaaactttttattgaggaagtaataacacatctatgaaaatacattctctcacctattgcacatgagtatttcttaattctgttcagtgcaattcaaaagcaagtgaagaattccagaaacattcttcatracacatgcagatatctgcaaggctcatcttcttcagtcacagaacatgcaggaaaaattaaccattttgcctcataatacattagatgaataattattagatttattaaaaacacccatatctgtcttccccctatctcgcctagcaatgtaaccagctgttactctttaatatgtgtgtcaccatcctggcattggggtcaaactcaaactgtgatgatccactgaagaagtagaaaaatcctgtaaatatagataaggaaaatgatgagacatcttcaaatatgtcattttgcaacacatataacttagattaagtacaagttaataatggagggcatttattaagtgattactctatgccaagcactgagctaagtgctttacatgct

SEQ ID NO: 632499 - DNA, 573 bp, Homo sapiens
tcagggtattgaacatgaattgttctagaaagtaaggaacaggcccaaaataaaactttttattgaggaagtaataacacatctatgaaaatacattctctcacctattgcacatgagtatttcttaattctgttcagtgcaattcaaaagcaagtgaagaattccagaaacattcttcataacacatgcagatatctgcaaggctcatcttcttcagtcacagaacatgcaggaaaaattaaccattttgsctcataatacattagatgaataattattagatttattaaaaacacccatatctgtcttccccctatctcgcctagcaatgtaaccagctgttactctttaatatgtgtgtcaccatcctggcattggggtcaaactcaaactgtgatgatccactgaagaagtagaaaaatcctgtaaatatagataaggaaaatgatgagacatcttcaaatatgtcattttgcaacacatataacttagattaagtacaagttaataatggagggcatttattaagtgattactctatgccaagcactgagctaagtgctttacatgct

SEQ ID NO: 632500 - DNA, 548 bp, Homo sapiens
ggtcactcataagtcaaccaagtctggaaattgaaagagcaggtgactcgttattttcctctttgtgtccttcctttcttctttcctccttcactcctcactttctctcattacttcttttttttyccctttcctattgccagaaggaattttaggcaattttgctttatcctgagatggagatttgctctcctgtagtctgtgcctcttttttttttttcttatctttttggtcaggcatatctcaaccagttctactctcattgaaatagaagggaatcatcttgttcaaagcaagaataggagtctcatagatgacaaaattcgggaaatgcaagcatttttggattgacagtgactggaaaactggactcaaacacccttgagatcatgaagacacccaggtgtggggtgcctgatgtgggccagtatggctacaccctccctgggtggagaaaatacaacctcacctacaggtaatgcttctgccagcttatttccgcctaatccaaaggaacataaagataatttccaaggaacagaataat

SEQ ID NO: 632501 - DNA, 609 bp, Homo sapiens
attatacatactagtaagaccttcccaatcaaattaatggaatgtcactggatcaccattagctacaactaaaaggtgacaaaagcatgataagtgaatttagascgtaagttatctagcttggaaatttgccacctccacaattgttcttaaaatcgtatttggctcacagatatgatgatggcgatgataacaatgatgattatacaatgatgcaatacctagtaacacagctgcttcttgagcaatgctcccaaatctctaaagcagatgattcaacttggtttattgtggagattcagcagatattacttgttttttccttgctttatttaactgcacagcaacaatttcctcaagagtcatttcctgtggtaagtttaaatccccttaaaatgaactaaccctgtcccttgaatcatagtcacattgttttgctttctaagaaataaaacaactgagaatttcaagatctcagtttcctcatttgcaatggaagggggtttaattaggttttgtgatttgtttgtttgttttactgttacagagcagtggtccatattttgggggtatatgtgatattttgacacatggatacaatgtgtaatg

SEQ ID NO: 632502 - DNA, 392 bp, Homo sapiens
aaaagtaaaggaagaaattatcaaataaataatataggaaaatttctctttactgaaggctgaaagtttctagactgaaagcgtccaccaattacccagatcaacaaatgcaaaaaaacccacatcaagttatagaggaaaaaacaggtcacaatcaaaggatagcaattcaaatggctaaaatataggattctagaagatagtaaagaaataccttcaaaattctaaggggatgtgacttcaacttaggtttccatacccygtaaatcaatcaatcaatcaatcaatcaagatacatgagaagtccaaaaactaatttttcatgtatcttttctcaggaagttattgcagaacatgttttagcaattgatagggtaaaataaaaaatagac

SEQ ID NO: 632503 - DNA, 603 bp, Homo sapiens
tagttaacatgaagtgatgttgaattttatcaatgctttttcagcgttaattaaaaaaattatatgatttttatccttcattctgttgatatgatgtatcacagtgattaatttgtgtatgctgacccattcttgcatacctaagataaatcccatttggtcatgatgaattatcttttcactgtgttgttgaacccastttgctagaatttgttgaggattttgtgtcaatgtttatcaagaatatggcctgtagtttctttctttgacgtgtctttttctggttgtggtatcaaggtaatattgtcctcatggaatgagtttgatagtattccctcttcctttatttttggaatagtgtgagtagaattggtgttagttcttctttaaatgtttggtagaattcagcagtgaaggctttgggtcctgagcttttctttgctgggggacatttattaagtttcaatctcattacttgttattggcctattcggattttggatttcttcatggttcaatcttggtgggtagtatgtgtctagaaatttatccatttcttttaggttttccaatttgttggcatatagttgctcatagtagcct

SEQ ID NO: 632504 - DNA, 620 bp, Homo sapiens
gtctcctttttcatatctaattttacttacttgggtcttctcccttttttcttagttaactgggcaaaagatttgttgcttttgtttatgttttcaaaaagccaacttyttgttttgttgatcttttgtatttttttgttttaatttcatttatttctgttctgatctttattatttcttttcttctattaattttgggtctgatttgctcctgcttttttagttttttaagaggcattattatgttatttatttgaagtttttatacttttttgatgtaagcacttactgctataatcttttctcttagtactgcttcactgtatcccataggttttgctattttgtatttccactttgatttgttacaagaaatgttttcatttctttcttaatttctttattgactcactggtcattcaggaggatattgtttaatttccatgtgtttgtatagtttccaaaattccttgttattgatttctagttttattcccttgtgatcagaaaagacacttgatattatttcagttttttttttttgaattttatagacttgttttatggtgtaacatatgatctatccttgggaatgatccatgtgctgaggagaagagtgt

SEQ ID NO: 632505 - DNA, 563 bp, Homo sapiens
attatgttatttatttgaagtttttatacttttttgatgtaagcacttactgctataatcttttctcttagtactgcttcactgtatcccataggttttgctattttgtatttccactttgatttgttacaagaaatgttttcatttctttcttaatttctttattgactcactggtcattcaggaggatattgtttaatttccatgtgtttgtatagtttccaaaattccttgttattgatttctagttttattccmttgtgatcagaaaagacacttgatattatttcagttttttttttttgaattttatagacttgttttatggtgtaacatatgatctatccttgggaatgatccatgtgctgaggagaagagtgtgtattctgtacctgttggatgaaatgttctgtaaatatctattagatccatttggtctatactgcattaattccaatgtttctttgttaattttctgtctggaagatctgtcccatagcatatagaagtctccagctattaatgtgttagggtctatctatctttttagctttaataatatt

SEQ ID NO: 632506 - DNA, 587 bp, Homo sapiens
tgtccctactattagttattgtgaagtaagaacttcatagtagagcaatttttgtagagcaagatttgcatactgttacaagtctacaatttgtggagacaagtttggatgttggtcctttagttcactctcacctccaactggaaaaagagagcgtatgcatggctagatacattatgggtggagggtgctgtttctagcaaaaaaaaaaaaatctctttataagaaacctatccttaaaaaactctattacattactgcagaaaaatacaaactaaaaatttactttattgtcacacgcaakgcagcatttacctggactaagtccacatctggctcttgtgtttctagagtcgctgggaagctgtgagacaccacaccccagaacagcagcagcagcagtggaggaaagctgtgcatactggcctttgtcttctttctcagtgcaaggtaagtgatggcttcccagcctcttgctgctccaatatcccagctaggaagctccctctgtatatatagagtccttgcccttccagaaagccagaggctgtctgactcatgctttataacatcctcttgattagcta

SEQ ID NO: 632507 - DNA, 587 bp, Homo sapiens
tgtccctactattagttattgtgaagtaagaacttcatagtagagcaatttttgtagagcaagatttgcatactgttacaagtctacaatttgtggagacaagtttggatgttggtcctttagttcactctcacctccaactggaaaaagagagcgtatgcatggctagatacattatgggtggagggtgctgtttctagcaaaaaaaaaaaaatctctttataagaaacctatccttaaaaaactctattacattactgcagaaaaatacaaactaaaaatttactttattgtcacacgcaaggcagcatttacctggactaagtccacatctkgctcttgtgtttctagagtcgctgggaagctgtgagacaccacaccccagaacagcagcagcagcagtggaggaaagctgtgcatactggcctttgtcttctttctcagtgcaaggtaagtgatggcttcccagcctcttgctgctccaatatcccagctaggaagctccctctgtatatatagagtccttgcccttccagaaagccagaggctgtctgactcatgctttataacatcctcttgattagcta

SEQ ID NO: 632508 - DNA, 525 bp, Homo sapiens
ttatctgcatggtttattaaacactgtggaaaatgcttatagttagcacatttgtgaaacagatttttgcagctatagctccttttaaaggaaattcaaaccaagagactttctggggatgagtgctactcataccatagctcagttcagccctgtcaaaaccgtcctttcccagctcttacatctgtgaatgtgaatttgagatggwtttgaaatatgtgaggaagcttcctgtgagattttgatcatgtgcccagactatgacttgcttgtttggagtctgtgacatacacacgtgtgtggcctgcagagcttttagtccatgattcagaattcaaactatattccattgtttcagaatttttctgtttttcacaaagtgaaatgttctctaagcctgctacccagttctttttaattactcttaactacttatgcctcagccataattctttctttatttttttattattatactttttgaggcagagtcttgctctgttgcccaggctggaatgcagtggc

SEQ ID NO: 632509 - DNA, 569 bp, Homo sapiens
ccacttcactcccctgctacctccactggagcaggtgctggtatccagggctgaaaggyctgaagacagttcatatcacaggactctttgcagacactccgcagcaccagcccagagcccagcagctctgctgggtcgctagacccagaagaccacaaacaatcactgcagttcagctctcaagaagcctcattcccaggggaaggggaagaacaccatgtcaaaggagcactccgtgggacaaaagaatctgaacagtaacccttaagtcccagatcttttatctgacatagtctacccaaatgagaatgaaccagaaaaacaattctggtaatatgacaaaacaaggttctttaacacccccaaaagatcacaccagctcagcagccatggatccaaatcaagatgaaatcgttgaattgccagaaaaagaattcagaaggtcaattattatgctattcaaggaggcaccagagaaaagtgaagttcaacttaaagaaatcaaaaacattacacaggatatgaaagaaaaaaatcttcagtgaaatagacagcacaaataaaaaaca

SEQ ID NO: 632510 - DNA, 569 bp, Homo sapiens
ccacttcactcccctgctacctccactggagcaggtgctggtatccagggctgaaaggtctgaagacagttcatatcacaggactctttgcagacactccgcagcaccagcccagagcccagcagctctgcwgggtcgctagacccagaagaccacaaacaatcactgcagttcagctctcaagaagcctcattcccaggggaaggggaagaacaccatgtcaaaggagcactccgtgggacaaaagaatctgaacagtaacccttaagtcccagatcttttatctgacatagtctacccaaatgagaatgaaccagaaaaacaattctggtaatatgacaaaacaaggttctttaacacccccaaaagatcacaccagctcagcagccatggatccaaatcaagatgaaatcgttgaattgccagaaaaagaattcagaaggtcaattattatgctattcaaggaggcaccagagaaaagtgaagttcaacttaaagaaatcaaaaacattacacaggatatgaaagaaaaaaatcttcagtgaaatagacagcacaaataaaaaaca

SEQ ID NO: 632511 - DNA, 569 bp, Homo sapiens
ccacttcactcccctgctacctccactggagcaggtgctggtatccagggctgaaaggtctgaagacagttcatatcacaggactctttgcagacactccgcagcaccagcccagagcccagcagctctgctgggtcgctagacccagaagaccacaaacaatcactgcagttcagctctcaagaagcctcattcccaggggaaggggaagaacaccatgtcaaaggagcactcygtgggacaaaagaatctgaacagtaacccttaagtcccagatcttttatctgacatagtctacccaaatgagaatgaaccagaaaaacaattctggtaatatgacaaaacaaggttctttaacacccccaaaagatcacaccagctcagcagccatggatccaaatcaagatgaaatcgttgaattgccagaaaaagaattcagaaggtcaattattatgctattcaaggaggcaccagagaaaagtgaagttcaacttaaagaaatcaaaaacattacacaggatatgaaagaaaaaaatcttcagtgaaatagacagcacaaataaaaaaca

SEQ ID NO: 632512 - DNA, 589 bp, Homo sapiens
tggagagagaggaagcagcttggaaaacatatttgaggatgttgtccacaaaaatttccccaaccttgctagagaggtcaacaggcaaattcagaaaattcatagaacccctgcaagatacactagatggtgaacaacaattcccaagacacatagtcgtcagattctccaaggtcaacatgaaagaaaaaatcttaaaggcagctagaaagaaagggaaagtcaggtacaaagggaaccctgtcacrctaacagcaggcctttcagcagagaccttacgagccaaaatagattagggccctgtattcagcatccttaagggaaaaaaaattctaggctgggtgttgtagcttatggctgtaatcccagcacattgggaggccaatgcaggaggatcacttgagcccagaaattttggactagcctgggcaactaggtcagacccacatctctacaaaaattaaaaaattagccaggtgtgtggcatgtactgcagtcccagctactcaggatgctgatgtgggaggatcacttgagcccagcatgttgaggctacagtgagctgagatcacaccactgcactgcagcc

SEQ ID NO: 632513 - DNA, 635 bp, Homo sapiens
actcattggcattcctcaaagagttggagagagaggaagcagcttggaaaacatatttgaggatgttgtccacaaaaatttccccaaccttgctagagaggtcaacaggcaaattcagaaaattcatagaacccctgcaagatacactagatggtgaacaacaattcccaagacacatagtcgtcagattctccaaggtcaacatgaaagaaaaaatcttaaaggcagctagaaagaaagggaaagtcaggtacaaagggaaccctgtcacgctaacagcaggcctttcagcagagaccttacgagccaaaatagattagggccctgtattcagcatccttaagggaaaaaaaattctaggctgggtgttgtagcttatggctgtaatcccagcacattgggaggccaatgcaggaggatcacttgagcccagaaattttggactagcctgggcaactaggtcagacccacatctctacaaaaawtaaaaaattagccaggtgtgtggcatgtactgcagtcccagctactcaggatgctgatgtgggaggatcacttgagcccagcatgttgaggctacagtgagctgagatcacaccactgcactgcagcctgagcaacagagtaagattatg

SEQ ID NO: 632514 - DNA, 649 bp, Homo sapiens
ccctttatccagaatctacaacgaacttaaatcaacaagcaaaaaacaaacaaccccactaaaaagtgggcaaaggatatcaactgacacctttcaagagaagacataatcttagccagcaagcatatgaaacaatgctcaacatcactaagcattacagaaatgcaaatcaaaaccacaatggatactagctcacaccagtcagaacggctattattaaaaagtaaaaaaataacagatgctagtgaggtcatctagaatagggaatgcttatacgctactgatrgaatgtaaattagttcagccctgtgaagagctatagaaagtttaaacatttctcaaagaacttaaaacagaactaccattttacctagcaatcccattactgcatatatacccaaaggaacataaatcattcaaccaaaaagacatgtatgttcatcacagtgatattcacaataataaagatatggaatcaactagatgctcatcagtgatggactggatagataaaatgtggtacatatatatcatggaatactatgcagccattaaaaaaccaaaatgatgtcatttgcagaaacatgaatgcagctggagatcattatattaagtgaataaatggaggaacagaaaatcaaataccaca

SEQ ID NO: 632515 - DNA, 496 bp, Homo sapiens
atgtaaattagttcagccctgtgaagagctatagaaagtttaaacatttctcaaagaacttaaaacagaactaccattttacctagcaatcccattactgcatatatacccaaaggaacataaatcattcaaccaaaaagacatgtatgttcatcacagtgatattcacaataataaagatatggaatcaactagatgctcatcagtgatggactggatarataaaatgtggtacatatatatcatggaatactatgcagccattaaaaaaccaaaatgatgtcatttgcagaaacatgaatgcagctggagatcattatattaagtgaataaatggaggaacagaaaatcaaataccacatgttctaacttataagtgggagctaaacactgagtacacatggacacaaaaataggaacaacatgcattgtggcctacttcaggggagaggttaagagaagagtgagtgtcacaaaactacctattgagtactat

SEQ ID NO: 632516 - DNA, 496 bp, Homo sapiens
atgtaaattagttcagccctgtgaagagctatagaaagtttaaacatttctcaaagaacttaaaacagaactaccattttacctagcaatcccattactgcatatatacccaaaggaacataaatcattcaaccaaaaagacatgtatgttcatcacagtgatattcacaataataaagatatggaatcaactagatgctcatcagtgatggactggatagataaaatgtggtacatatatatcatggaatactatgcarccattaaaaaaccaaaatgatgtcatttgcagaaacatgaatgcagctggagatcattatattaagtgaataaatggaggaacagaaaatcaaataccacatgttctaacttataagtgggagctaaacactgagtacacatggacacaaaaataggaacaacatgcattgtggcctacttcaggggagaggttaagagaagagtgagtgtcacaaaactacctattgagtactat

SEQ ID NO: 632517 - DNA, 614 bp, Homo sapiens
tctcatagggctgccgtggggattaaatacatataaagcatttagttcattacttgtcaaatagtaataatattccacaaatattagatattattattattattaagatgtatgaaaggagggacttgactctctccagcaatgattaagcctttgttgggtcctaaagtaagtgcttagagagacagcctaacattgctggtagtcctctttagattgttggagaaggaagactaaaacgggaagccttggagtggaaagaacccacggtatctcaacattttcattctcatattcattcactactcacactcttcaaaggcaggkatatttatctacttgttcctagtgtatcccaagaacagtgtctgtcatataagagcccagtccatactggataaatgagtgtatcctgaaaccctagagatatcacctgtaggtcaagttagtgcgttcccacttggggtttcctggggttaacataaaaccaccactgtcaggcactccacagcgaggctttttcatcatgtccagagtttcctcatttggcttccccgtcacattcaacccaaaaaatcgctgcatttctttaagcttttcaacgatcacattag

SEQ ID NO: 632518 - DNA, 614 bp, Homo sapiens
tctcatagggctgccgtggggattaaatacatataaagcatttagttcattacttgtcaaatagtaataatattccacaaatattagatattattattattattaagatgtatgaaaggagggacttgactctctccagcaatgattaagcctttgttgggtcctaaagtaagtgcttagagagacagcctaacattgctggtagtcctctttagattgttggagaaggaagactaaaacgggaagccttggagtggaaagaacccacggtatctcaacattttcattctcatattcattcactactcacactcttcaaaggcagggatatttatctacttgttcctagtgtatcccaagaacagtgtctgtcatataagagcccagtccatactggataaatgagtgtatcctgaaaccctagagatatcacctgtaggtcaagttagtgcgttcccacttggggtttcctggggttaacataaaaccaccactgtcaggcactccacagcgaggcttttycatcatgtccagagtttcctcatttggcttccccgtcacattcaacccaaaaaatcgctgcatttctttaagcttttcaacgatcacattag

SEQ ID NO: 632519 - DNA, 529 bp, Homo sapiens
ctaaatatctcatgatgccaggacacaagaaagtgcctgacaaaatgttggaggcatgttaaatggaaacaggggcctccatcagccaagtttgaacaattcatcagcsaagtttgtctggctagagttatcacattaagcatattagaaattaaaattgaaaaataatatttaatagcccattttaaaatagtaatatgttatttgttaatgtaacatatttttgtaaaaaataactatatttccaaaaaaattggttgtgaagaattgttttatacttcataaacaaaataatcataccaacagattataatctgtgaccaaggttcacccggcaaatgactcctggcctctgcttttctgtgtcagtacctggaactgtgggtgagaggcgtcctccaacagaccggtctctgcctttcttttctgcccacctcctgttggctgcccccaaactgccttgtacatagaaatatcttcagtttcttagaagagatgctcttctttaacatatccttacctcatcacc

SEQ ID NO: 632520 - DNA, 529 bp, Homo sapiens
ctaaatatctcatgatgccaggacacaagaaagtgcctgacaaaatgttggaggcatgttaaatggaaacaggggcctccatcagccaagtttgaacaattcatcagcgaagtttgtctggctagagttatcacattaagcatattakaaattaaaattgaaaaataatatttaatagcccattttaaaatagtaatatgttatttgttaatgtaacatatttttgtaaaaaataactatatttccaaaaaaattggttgtgaagaattgttttatacttcataaacaaaataatcataccaacagattataatctgtgaccaaggttcacccggcaaatgactcctggcctctgcttttctgtgtcagtacctggaactgtgggtgagaggcgtcctccaacagaccggtctctgcctttcttttctgcccacctcctgttggctgcccccaaactgccttgtacatagaaatatcttcagtttcttagaagagatgctcttctttaacatatccttacctcatcacc

SEQ ID NO: 632521 - DNA, 637 bp, Homo sapiens
  misc_feature 1, 2, 3, 4, 5, 6, 7, 8, 9, 10, 11: n = A,T,C or G
nnnnnnnnnnntctatttagtcacatctccatgagacagagactttgtcatcttttacctacagcgtcatatggccaataacagtgttgtcacatgagaaatactctacaaatcattggtaaataaagtcactcaatgrtcatttattgaacatccactatgactcaggctctgtcataaaaatgaaatatacccttgtatataggacacagaagctgccctccagggcttcactgtctaagggacacatagacaattaaatggcaactaaaatcagtaggatcagtactgagataaaggaaactatggcaatgtaataggtcctcacagaagaaagtccaacccagacccacaggtcagcagaggaagctatgtcaagcctgagaactggaggctcagcaggaactaagaagacaaagtagggtgaagagggtgaataggagtgttctgaacagaatagctcaatccaacataaggaatagaattgtagaagacaaggctaaaatggcgaataggattcagattacagagggtcttgaaagccagaataaagatctggacttcatttagaaaatctgagcttgaattatttttcccaacagtcatttttccagttccttgtccaaaagcacacaca

SEQ ID NO: 632522 - DNA, 637 bp, Homo sapiens
  misc_feature 1, 2, 3, 4, 5, 6, 7, 8, 9, 10, 11: n = A,T,C or G
nnnnnnnnnnntctatttagtcacatctccatgagacagagactttgtcatcttttacctacagcgtcatatggccaataacagtgttgtcacatgagaaatactctacaaatcattggtaaataaagtcactcaatgatcatttattgaacatccactatgactmaggctctgtcataaaaatgaaatatacccttgtatataggacacagaagctgccctccagggcttcactgtctaagggacacatagacaattaaatggcaactaaaatcagtaggatcagtactgagataaaggaaactatggcaatgtaataggtcctcacagaagaaagtccaacccagacccacaggtcagcagaggaagctatgtcaagcctgagaactggaggctcagcaggaactaagaagacaaagtagggtgaagagggtgaataggagtgttctgaacagaatagctcaatccaacataaggaatagaattgtagaagacaaggctaaaatggcgaataggattcagattacagagggtcttgaaagccagaataaagatctggacttcatttagaaaatctgagcttgaattatttttcccaacagtcatttttccagttccttgtccaaaagcacacaca

SEQ ID NO: 632523 - DNA, 641 bp, Homo sapiens
atccactatgactcaggctctgtcataaaaatgaaatatacccttgtatataggacacagaagctgccctccagggcttcacwgtctaagggacacatagacaattaaatggcaactaaaatcagtaggatcagtactgagataaaggaaactatggcaatgtaataggtcctcacagaagaaagtccaacccagacccacaggtcagcagaggaagctatgtcaagcctgagaactggaggctcagcaggaactaagaagacaaagtagggtgaagagggtgaataggagtgttctgaacagaatagctcaatccaacataaggaatagaattgtagaagacaaggctaaaatggcgaataggattcagattacagagggtcttgaaagccagaataaagatctggacttcatttagaaaatctgagcttgaattatttttcccaacagtcatttttccagttccttgtccaaaagcacacacagtgatatagccagccaggcaaggggcagcaacaaaggcaagagcagaaaagtgtcaaagaccatgacataattctttgcccttttacgtttgcttcatgcaaacatcactaggcaaatttccatcagggaagctgaggttttccttaggctccatg

SEQ ID NO: 632524 - DNA, 576 bp, Homo sapiens
tggataagacctggagggataagggaagttacatgaaggaaataactttagaggggagtcctggggaataaataggatagttaagccaagagaaagtggaagagatatgttattagcaaagagacaaaggtatgaagacatagagattagaaagaacctgacacagatgaaaaatgccagcgatttaacatagttagcttgcagaatatgaaaataaaatataaggctgaaaataggcagggactagaccatggaaggtcatgtgaakgtgtttggactttatcctatagcaatacagaacctctgaagaatagaagtaggagcaacatgatcacatatactgtagtctagcaacaaccccaaactggtggcttcttttttttttaatattatccatttctgagacaccggtttcaagccattttcttaccctaggctatatttttccatgatgtgactagtaccaattaaagttatgtgccatttaatcatattttggtcaactatggactatggatatgacagtggtcccattcgattatgatggagctgaaaatttcctatcacctagtgatg

SEQ ID NO: 632525 - DNA, 459 bp, Homo sapiens
aagccggaggattgctttagcccggagttcaagatcagcctgggcaacatagtgagacccccatctctacaaaaataaataagaaaattagctggacatggtggcatgctcctgtagtcccagctgcacaggaggctgagggaggaggattgtccaagcctaggagtttgaagctgcagtgagctgtaatcacaccactccagcctgggcaacagagcaagaccctgcctcaaaaaaaaaatttatacagtaaaaaagttacagtaagcaaaagttaatttattaytgaagaaaaatatttttaatttggtgtagcttaagtgtctagtgtttatatagtctacataatgtactgtaagtcctaggccttcacattcactcaccactcactcactgactcacccagagcaatttccagtcctgcaagctccattcatggtaagtgtcctacatagctgt

SEQ ID NO: 632526 - DNA, 626 bp, Homo sapiens
tttgtagcctgggagcaagaggctataccatgtaaccttggtgtgtagtgggctgtgccatctaggtttgtgtaagtgcaccctataatgtttgctcaatgatgcatttctcagaacatatccatatcattaagcaacacatgacttattagcattgcaatacctcccagataaatggtggtacatatgagaattatctgctgtatagcaagcctttatttcattccccttagttactttctaatctcasatgcagccattctctttttgattaagtcatgtgctcgtgttttccctgttattatcaaggattcaacttgtttcttgtggctgctcatgaatttggtcatgcactggggctctctcactccaatgatcaaacagccttgatgttcccaaattatgtctccctggatcccagaaaatacccactttctcaggatgatatcaatggaatccagtccatctatggtgagcaaaattataaatctcaatatatgtgaactaaataggaagcttttcagaaaggaagttaagaaaatcacttcttgaaatattatcatgaagcaaatatccacttaggtaagacccttgtgtaggcatatttcttcatgccctcttaattc

SEQ ID NO: 632527 - DNA, 649 bp, Homo sapiens
caacttgtttcttgtggctgctcatgaatttggtcatgcactggggctctctcactccaatgatcaaacagccttgatgttcccaaattatgtctccctggatcccagaaaatacccactttctcaggatgatatcaatggaatccagtccatctatggtgagcaaaattataaatctcaatatatgtgaactaaataggaagcttttcagaaaggaagttaagaaaatcacttcttgaaatattatcatgaagcaaatatccacttaggtaagacccttgtgtaggcatatttcttcatgccctcttaattcattgtggtattttttttctcatcaaaggaggtctgcctaaggwacctgctaagccaaaggaacccactataccccatgcctgtgaccctgacttgacttttgacgctatcacaactttccgcagagaagtaatgttctttaaaggcaggtaaactcatttctctaaacacctcaacttcctatgaagatttttcttttcaagagatttgaggataaagaggtagtcatggggctagtgaaaatgtgtgcctttgatcttcattttataactgcctatactgtttgaatgctttaccatatgtgtgtatcttgtagttgtttgataaatttttaaat

SEQ ID NO: 632528 - DNA, 606 bp, Homo sapiens
ccctggatcccagaaaatacccactttctcaggatgatatcaatggaatccagtccatctatggtgagcaaaattataaatctcaatatatgtgaactaaataggaagcttttcagaaaggaagttaagaaaatcacttcttgaaatattatcatgaagcaaatatccacttaggtaagacccttgtgtaggcatatttcttcatgccctcttaattcattgtggtattttttttctcatcaaaggaggtctgcctaaggtacctgctaagccaaaggaacccactataccccatgcctgtgaccctgacttgacttttgacgctatcacaactttccgcagagaagtaatgttctttaaaggcaggtaaactcatttctctaaacacctcaacttcctatgaagatttttcttttcaagagatttgaggataaagaggtagtcatggggctagtgaaaatgtgtgcctttgatcttcattttataactgcctatactgtttgaatgctttaccatatgtgtgtmtcttgtagttgtttgataaatttttaaatgtctttaaggaattttaaaaattgccattgcataagaaagggaaatagagtc

SEQ ID NO: 632529 - DNA, 216 bp, Homo sapiens
gtaaaaagtcccttgaaactcaccctttataacactggcttcctccttagggaaataaaaataataggatttcccacatgacagtagaaaactaaaatgtatgtatgtgattccacaaatttcttcgttctccataatgytatttttttccatgtttataaaatttaaaagtatggaagtattatatagttatgaaagataactaatcctgatccc

SEQ ID NO: 632530 - DNA, 408 bp, Homo sapiens
ggccttaaaggccttttagttcacccaacattccaccttatcccatccactccccatttcacaaatgatctataaaatgaaatattctggttaaattcctcattgtgtattttctgtaatgaytttcagagtgcacatgtttagcaaaaggtctgacactcttaactcttttctgaccaggtatgatgaatataaacgatctatggatccaggttatcccaaaatgatagcacatgactttcctggaattggccacaaagttgatgcagttttcatgaaagatggtaagtgaatatacatgtatttcctccatttcattgccgtagcaataacatcattattgttagttggaacagcaaatgccaaaaatatctgtgctcacagatgaattggtttctcaagaattca

SEQ ID NO: 632531 - DNA, 591 bp, Homo sapiens
gatatgtagaatcccttaataagaagagaaaataaccacactggagtctgtatatatggcattattactaatgagagaagatgaaacagtataggaatattaatagaactattaatagagagactggaaactcaaaatacagattgtaaataggatattacaggaatgttaataacacttggcagcaaggactctttcaatgwgaaggtgtgtgaattccacaggataattctgaatgggatgaaagggctctacaaatgttttcagagaagaaaacctattgttcattcagacccataaatgactaaagggaagtatttgccatattctgtgtgcatttagctctgagaaacttttaaaaatctgtttgcatgctggtaatagaaaccaatgaagcatcttccactaggagggtcatagagcacagcagaagtaaaatgaagtaaagttccctctctgccaagcaaggttcaggctttttgtaaaagaatagtctacatattgtttccatgataatgaaggacaagaaagtctaagaaaaaattaattggcaaggcctacccatccatttagtaaataaataccatgaat

SEQ ID NO: 632532 - DNA, 565 bp, Homo sapiens
tcaacaagaacagaaaaaaaggaaaagactttctttttcaggtaatatttggaaggrtattgtgtagagagggtgagcataggaagagatgaggtgccatgagacttatatgaataggctgattagggtgaatcgataactaaagattttttttattcattcacttaacaaatatttattgagtatctatagtgggagtggatcacaaaaacacctaaaattaaacttgtaaatgataggttaagaagtaatctcgattgggtgaatcaatgatagttaagaaaatgattactaaaatagactaattccttaaaaaataaaatatcttgatttctttgaactcagagttaatggcctattcttttttagaagataattgcctttaggtacaaaacaatatacagtgaaatcctcaaaagttttttttccctatgaccttaattaagatctgcattgaacttttttttaccctttgtctactatatttttaaggaaataaatgcactaaatctgaactaaaaagtttcaataactagacaatgtgagctaatgatttaaattttgt

SEQ ID NO: 632533 - DNA, 604 bp, Homo sapiens
tattccagcttttactaattgtaacttttactgtaatattcataaatttgcaaagtctttttaaaatgtttccctaatccatatattacgtgcaaaattctattgatgtttctgtttaacttgtgcaatttttttgttttgttttttaaggtaaccctttgtcctggttttgtggactcttttgacatttttagtttatgcataatttaatgatgctacagattttaacctcatcactctcagcactgggatttctagaaagaagcattagtgtgttttacatgacagggaaacaaaacaaaacaaaaaaaacctctgtttggagccagacaggtctaaattcaaacacctctttttaagcagagagtagagtgacctctagtatatattttatgttctttgagcctcagtttccacacttataaatgcagtagttayaggctttggtaatgagatcatgaatataaccctgaggaatgatcctagcaaagtgcctgatacattgtatactctaagccttgctgcttaaagagtatttcaaggtcagcaacagcaacaagcagggccatgtaagcttgtagaatatcaggaccggtcacagact

SEQ ID NO: 632534 - DNA, 597 bp, Homo sapiens
gaaggactgacctataaactaataatcacattgcaatgcattcgccataacagagatgattacaatgcagcatgggagagacataaacaaatacatgatgtcaagacatccagcaatctgacctcyccactggcaacttcgaggaaaaattgaagcagggtatattttttaccttgatttacaaactctctttttcaatcatccttcacccatgctttttttctgacctccacttaaagttcacctgaccctcattggccccattaccctcgcctggcctggttcatttctaagctataaagagttacagcaaaaatttcagagtaatatactttaaggaattatctgaaaggagggttgtatttataatctaagaatcaatttggggaaaaaaacacctcattttccagaggatcaactctggaaaagtcagttttctatcaaatgattccacactgatattttcaaagtctgccagtaatgctcaaccttgtcggcttcctatttttgctttcaaattagggtaaggatgagtcatcgccaaccaccatgaatgatgccagacaaggtggggaaatctctcctggaactgtggct

SEQ ID NO: 632535 - DNA, 576 bp, Homo sapiens
gctttttttctgacctccacttaaagttcacctgaccctcattggccccattaccctcgcctggcctggttcatttctaagctataaagagttacagcaaaaatttcagagtaatatactttaaggaattatctgaaaggagggttgtatttataatctaagaatcaatttggggaaaaaaacacctcattttccagaggatcaactctggaaaagtcagttttctatcaaatgattccacactgatattttcaaagtctgccagtaatgctcaaccttgtcggcttcctatttttgctttcaaattagggtaaggatgagtcatcgcmaaccaccatgaatgatgccagacaaggtggggaaatctctcctggaactgtggctaacacaaggtaagaatctagaaaaagagtcagggagatttcctcttccatttattcacttaaggtcacatgttctaaaggagatctgattatttttaaaattattttcaaacttctagaaatctaatgctctctgccttttttcacaattactttctatttactcaaacaaaatatactcagtcacccatat

SEQ ID NO: 632536 - DNA, 635 bp, Homo sapiens
aacttagttaaaagttatactggagccatattagatcttgatatattaaagatgtgttcatttaccttatattaattatagaatgaataaattcataagttctttcacaccccattgtcactcacaaaaccccatccttgatagtgttagttagataatggatcactatgaagagagtaacagaaattctaattttggttttgcctcatatgagattttgcattcccaatagagcatatcacaaatgtaattaactctcaagtatcatagcaactaaaatttaattttaataaaatgatatattctgtagytgcatttacagtacaaataaaaataatcataggctagttcagtataagtgttggtcaaattagccactgataataatagcaaatatttgtataattcctacttttttacataccagcctaggaaaaatcaatttaactatataatttacataatgcaaaatatatctgcttatctatgtctatctacctcttcccttttaacactaaattatgagtcagttttgtaggaattttatcaagtctaacaaaatatttttagaaacagcagaaccacagagaacccaaatccgaatgttaagattgagataaaatacataaatgttt

SEQ ID NO: 632537 - DNA, 635 bp, Homo sapiens
aacttagttaaaagttatactggagccatattagatcttgatatattaaagatgtgttcatttaccttatattaattatagaatgaataaattcataagttctttcacaccccattgtcactcacaaaaccccatccttgatagtgttagttagataatggatcactatgaagagagtaacagaaattctaattttggttttgcctcatatgagattttgcattcccaatagagcatatcacaaatgtaattaactctcaagtatcatagcaactaaaatttaattttaataaaatgatatattctgtagctgcatttacagtacaaataaaaataatcataggctagttcagtataagtgttggtcaaattagccactgataataatagcaaatatttgtataattcctacttytttacataccagcctaggaaaaatcaatttaactatataatttacataatgcaaaatatatctgcttatctatgtctatctacctcttcccttttaacactaaattatgagtcagttttgtaggaattttatcaagtctaacaaaatatttttagaaacagcagaaccacagagaacccaaatccgaatgttaagattgagataaaatacataaatgttt

SEQ ID NO: 632538 - DNA, 627 bp, Homo sapiens
ctaatacaatcatattaattcttattgcttttacaaaagtcatgtaagaaatatatttcagcacattttagaatgactcaattttcatcagagatagttctatgtttctatatctccaagtgcattttatttaattttctttagtatgctatttatatttttatttgtgcaacatttataagtaggtctattttattgtacacttggtttaaattttatttgaatatatttttatagtagtttaaaaacgtattatggagaaatagcctttgttcaacatattttatatttcctgctcatctaaattatattggatcccaaaaagttgattttattttctcctttatttgcttcagcccctaagaccttgttaaagcttaatagattactaattacaagtaataatgtcatcctaaaatacattcaattatgctaygatatcatttctaattgaaaattacaatatttaatatagagtaaaaaacaaatgaaagccaaaaaacaatatatttaggatttatagtatgcataaacaccaaggtcaaaataagctaacatttatttaagttttatgttagatcaagaagttgaagaatattgttcttacatgatttgattctttacctt

SEQ ID NO: 632539 - DNA, 609 bp, Homo sapiens
aatattaattcacctagaatatagtaatatagttaaagtaatttttataactcaaaatatgaagaaatttattatctctgtaaatgcacrgatgttacaaaattgtattatgtatggtatgctattatggatttgatttcaaaattatgtaaatatcacagaaaaaaatccttatggtcttggtcaaaattaaatcattgtaataatgtataggtaagtgaaatatattctgccctagagaaaattttcaggttttgaattagtggtaatacatcatattttgctttgcttgttcttctcttttccagtggaacgtatataatctccaaccccatctcagtttgtactcatattgtctaatggttgatgactttgacatatttgtatgcctccctaacactaaaaaaattgttggactgtatgtgcaagggacattggattaaaagacacaaggtgacatttggataaaaggatacaccagtggttttctttatgatatttatctaactccaattatttggattataagaaaagtgaactcagtgtagattgaataatgttttttaacacagacacattacttgcaaatatgcacagaacatagtgata

SEQ ID NO: 632540 - DNA, 633 bp, Homo sapiens
tttcaggttttgaattagtggtaatacatcatattttgctttgcttgttcttctcttttccagtggaacgtatataatctccaaccccatctcagtttgtactcatattgtctaatggttgatgactttgacatatttgtatgcctccctaacactaaaaaaattgttggactgtatgtgcaagggacattggattaaaagacacaaggtgacatttggataaaaggatacaccartggttttctttatgatatttatctaactccaattatttggattataagaaaagtgaactcagtgtagattgaataatgttttttaacacagacacattacttgcaaatatgcacagaacatagtgatagctaataaagtgtagcactgtatacacatacacaacagatatgattgtgattttaaattcttataacaggacattcctcctaattaaatttataaattgagaactacaatgcttttgcaagagtcttgaaatcattatctgcaaagtatatcagcaaggaaactaaagcctgtcatataataaacttaagtcttaatgcatccaaatgcaagcagtatgacagcgagaaaaatcagatacacccttcatacgtatttagtagactagtt

SEQ ID NO: 632541 - DNA, 630 bp, Homo sapiens
ttttaagtacttatttgaagtgatcgagtatggccatgaggcacaggggaaagggcactaatttgaaagtcagagatttagacaagttattaaattctctgagcctggggttcctcataaagataactgtacttgccctgacctgcatttccctaactcgcctcatttggtgatttaaaataaaaatagaatgatatattatgccagacgaaatgtaaagggctataaactcaggggtggttattacaaactgtccctaagtttgtcactgctaatttcacaaaagcattcatttgacattgcctttctgctcctacattcatcaactttgtggactctggttaacttttcttaccctctgcattgtaaatttagctggtttttagccttcccaacatgggtcrcatttaatgtcaaaagaaaaccacagttagtcatatattaactgaatagccatatattaacaaccaaaaaacaaaataagaaataaaaaaaaaaacagaaaaacaatagcaacacattttcaatcttctgttgtgttgtccagcgtacaacagagactatcttattggatttatgcttggcttcctatccttcagagattacttcctagtgtctggcaacagagat

SEQ ID NO: 632542 - DNA, 630 bp, Homo sapiens
ttttaagtacttatttgaagtgatcgagtatggccatgaggcacaggggaaagggcactaatttgaaagtcagagatttagacaagttattaaattctctgagcctggggttcctcataaagataactgtacttgccctgacctgcatttccctaactcgcctcatttggtgatttaaaataaaaatagaatgatatattatgccagacgaaatgtaaagggctataaactcaggggtggttattacaaactgtccctaagtttgtcactgctaatttcacaaaagcattcatttgacattgcctttctgctcctacattcatcaactttgtggactctggttaacttttcttaccctctgcattgtaaatttagctggtttttagccttcccaacatgggtcacatttaatgtcaaaagaaaacmacagttagtcatatattaactgaatagccatatattaacaaccaaaaaacaaaataagaaataaaaaaaaaaacagaaaaacaatagcaacacattttcaatcttctgttgtgttgtccagcgtacaacagagactatcttattggatttatgcttggcttcctatccttcagagattacttcctagtgtctggcaacagagat

SEQ ID NO: 632543 - DNA, 517 bp, Homo sapiens
tgttaacttataaacatatgaatacacaacatgtgtaccaaacatacaatatatgcatgtttcacacacacatgcacacacataatcatactcaacttgtgctgcataatgaaataatcagtgtctgaaaaaatgacaattatccaattttcatgtattattttacattcttatttataaaattatcagggaaaatagcatgtacttacagcttatagatatttgtatatgttaatatttatactagaattttcatttctcaaaayaattttactctgaatttaagcacattaagagtaagtatgttactctgcagagcagaattgtactacgtaactatatgatacatgaaggagttctaaaaatgaagcaccaattaattgaatgttcataaatattacagtttattctaaatttttaatttttggtttgttctaacctagctattatagagttttttaaagtattgtattgctctttaggtaagtatatagatacttctcacctgaccattttt

SEQ ID NO: 632544 - DNA, 585 bp, Homo sapiens
gttgtctcagtctcttctggttctgagggctgcccaaattcatgaattttttttttgctcaaataaactgtgctaactaaagtttttattttatcaatatcaaagctgtaaaaaaactgaggagaaagcagttgccaaaaagatgaaagaaaaacaacatgaaaacctttaaaattagcaaaagtcagtttataataaagtcacttatctcactgatgaaccatttattttaaaaggccctttttagtacgtatttgatacaagagaacatgctcaaatatgaatatatttacaatccttaaagggcgcataaaagactacatactttttaaatgtaatataaaaatatttatattacccaatcaaaaatatgaagcatgatgtttaatactattaaatccctactattgtttttattggcatgaatggctggaaagttattccattctgtgttatcttgtataaatcattccataaaatatttcctcctaaaaattaacatataaataygttagcatctgtcattgaatttctacaatatataaaatgaagtgcttcaccatgatgttatttaaggatgaaaac

SEQ ID NO: 632545 - DNA, 559 bp, Homo sapiens
cacatagataatcagttgaggaggaagaactatctctatggtctataaaatattattaccatcatttgtggaagagtaagtaatacttgccgtttgagctgacatgtcttttacctactaaaaaggagctcaagatctattttggagagataaatagaataaaataagatactctaaatatttaaaactagatgcaactcacagtaagaagaattgttactgagaattgactggaggatattgacatttaatcttaattttaatgaagacaaataggattataagaagaaaaatcgtcttcaaaaatatagaataaacaagaaattatatgtagactacatgacaccacccacccacaaccgaaaccaaagtaccctatctaactaacactatagacacayctacagaaaaaaaaaagtgtttctggttgggcgtggtagctcacacctgtaatcccagcacattgggaggccgaggtgggtgaatcatttgagtccaggagttcgagaccagcctggccaacatagtgatacctgatctctattaaaaatacaaaaat

SEQ ID NO: 632546 - DNA, 559 bp, Homo sapiens
cacatagataatcagttgaggaggaagaactatctctatggtctataaaatattattaccatcatttgtggaagagtaagtaatacttgccgtttgagctgacatgtcttttacctactaaaaaggagctcaagatctattttggagagataaatagaataaaataagatactctaaatatttaaaactagatgcaactcacagtaagaagaattgttactgagaattgactggaggatattgacatttaatcttaattttaatgaagacaaataggattataagaagaaaaatcgtcttcaaaaatatagaataaacaagaaattatatgtagactacatgacaccacccacccacaaccgaaaccaaagtaccctatctaactaacactatagacacatctacagaaaaaaaaaagtgtttctggttgggygtggtagctcacacctgtaatcccagcacattgggaggccgaggtgggtgaatcatttgagtccaggagttcgagaccagcctggccaacatagtgatacctgatctctattaaaaatacaaaaat

SEQ ID NO: 632547 - DNA, 479 bp, Homo sapiens
ctccataaaattgaaagaaataactgttatgctggatgtgcagataccaacataaatacaaaagagacatggaaaagcaagaaaacatgacacctctgaaggaataaaaggtctccagtgccaaaatccaaggaaaataaaatatataaaatgcctggaaaggaattcaaaatagcgatttcacagaaactaagaaagatacaagagaatacagacaggcgataaaaagwaattttaaacaatcatgatctgaatgagaaattcaacaaagagatatcattaaaaaaagacatactggaaattaaaaattcaatgaatgaaatagaaaatataataagcttcaacaataaagtatattaatcagaagaaacaatttctgaacttgaagacaggtgttttgaaataacgtagtcagattaaaaaaataatcaaaggaattaagaaagcctatgtgacatataggacaccaccaactgaac

SEQ ID NO: 632548 - DNA, 479 bp, Homo sapiens
ctccataaaattgaaagaaataactgttatgctggatgtgcagataccaacataaatacaaaagagacatggaaaagcaagaaaacatgacacctctgaaggaataaaaggtctccagtgccaaaatccaaggaaaataaaatatataaaatgcctggaaaggaattcaaaatagcgatttcacagaaactaagaaagatacaagagaatacagacaggcgataaaaagaaattttaaacaatcatgatctgaatgagaaattcaacaaagagatatcattaaaaaaagacatactgraaattaaaaattcaatgaatgaaatagaaaatataataagcttcaacaataaagtatattaatcagaagaaacaatttctgaacttgaagacaggtgttttgaaataacgtagtcagattaaaaaaataatcaaaggaattaagaaagcctatgtgacatataggacaccaccaactgaac

SEQ ID NO: 632549 - DNA, 614 bp, Homo sapiens
acagaaaacctgtttgatgaaacagtagtggaaaacctccttatgtcttacttagttccaataattttccttaygtgatatggatctgagatgctgcattcttgaaatatcctttttctggacaaataacttctcttatgaaatatggcaccaagaatttcctttgctttagaataattactatttgaagatatttagtaaaacagtcccacttcttatgttatttccttgaatgattccaaatatctatttttccctagactatagatgagactagaatttattcttaattcaaattctcaatttggttaggcaaaacaatgaataaatgatggccagtttttaaaagtccctgaaatgaaaaagatcagacacaaattgtaatttagccaatcataattctgcaaaaataatgtatttcatatgtaaaatttaaatctccagaaattagtgttacataaagctgtataaaatgtatattcattatgatttcataatttcatgaaatatgatggtttgggaaaaaataagaataagaaaatatgtggtcactataatgtcatctctaaggtattatcttttattgacttgaagatggaacaacagtttgtagg

SEQ ID NO: 632550 - DNA, 614 bp, Homo sapiens
acagaaaacctgtttgatgaaacagtagtggaaaacctccttatgtcttacttagttccaataattttccttatgtgatatggatctgagatgctgcattcttgaaatatcctttttctggacaaataacttctcttatgaaatatggcaccaagaatttcctttgctttagaataattactatttgaagatatttagtaaaacagtcccacttcttatgttatttccttgaatgattccaaatatctatttttccctagactatagatgagactagaatttattcttaattcaaattctcaatttggttaggcaaaacaatgaataaatgatggccagtttttaaaagtccctgaaatgaaaaagatcagacacaaattgtaatttagccaatcataattctgcaaaaataatgtatttcatatgtaaaatttaaatctccagaaattagtgttacataaagctgtataaaaygtatattcattatgatttcataatttcatgaaatatgatggtttgggaaaaaataagaataagaaaatatgtggtcactataatgtcatctctaaggtattatcttttattgacttgaagatggaacaacagtttgtagg

SEQ ID NO: 632551 - DNA, 636 bp, Homo sapiens
gggacacagaccctgaagggattgaaggatagagaagctgggaacatggggctgctgagcaccaggactagtccctggccctgaggtgctcctaagtaagaggtgagttaaatagacatgaatggctcagtctcattaggtgcctcagaaatcgaagctgcaggaagccctacgastcccacgaacacttgtgctgtcagggagagctgcaaggagagtcagcagggacaggactctagcctgtgtagaagccagaggtttggtgtcagaatggctgcagtagagtatgcccagggatgcttatcccccaaggctcaacatgctcctttaggggcttttgcctttgttgactgatagacctggacagaacagggctgtcttgtccatgggatgggggcagtgtgttctgagcaccatccagtctggtctgccagtctttcccaggggctctttctggtcacactcacttggaatgcagcctcagatgcccaactgggtcactccccagcagctactaccatagctcctacaccagcagacccctcctcaccatcagagagcttatgtggtcaggcctccctccattggtgcgcacctgcctgcagattccccctgctgctttgccggcatgcactc

SEQ ID NO: 632552 - DNA, 636 bp, Homo sapiens
gggacacagaccctgaagggattgaaggatagagaagctgggaacatggggctgctgagcaccaggactagtccctggccctgaggtgctcctaagtaagaggtgagttaaatagacatgaatggctcagtctcattaggtgcctcagaaatcgaagctgcaggaagccctacgagtcccacgaacacttgtgctgtcagggagagctgcaaggagagtcagcagggacaggactctagcctgtgtagaagccagaggtttggtgtcagaatggctgcagtagagtatgcccagggatgcttatcccccaaggctcaacatgctcctttaggggcttttgcctttgttgactgatagacctggacagaacagggctgtcttgtccatgggatgggggcagtgtgttctgagcaccatccrgtctggtctgccagtctttcccaggggctctttctggtcacactcacttggaatgcagcctcagatgcccaactgggtcactccccagcagctactaccatagctcctacaccagcagacccctcctcaccatcagagagcttatgtggtcaggcctccctccattggtgcgcacctgcctgcagattccccctgctgctttgccggcatgcactc

SEQ ID NO: 632553 - DNA, 636 bp, Homo sapiens
gggacacagaccctgaagggattgaaggatagagaagctgggaacatggggctgctgagcaccaggactagtccctggccctgaggtgctcctaagtaagaggtgagttaaatagacatgaatggctcagtctcattaggtgcctcagaaatcgaagctgcaggaagccctacgagtcccacgaacacttgtgctgtcagggagagctgcaaggagagtcagcagggacaggactctagcctgtgtagaagccagaggtttggtgtcagaatggctgcagtagagtatgcccagggatgcttatcccccaaggctcaacatgctcctttaggggcttttgcctttgttgactgatagacctggacagaacagggctgtcttgtccatgggatgggggcagtgtgttctgagcaccatccagtctggtctgccagtctttcccaggggctctttctggtcacactcacttggaatgcagcctcagatgcccaactgggtcactccccagcarctactaccatagctcctacaccagcagacccctcctcaccatcagagagcttatgtggtcaggcctccctccattggtgcgcacctgcctgcagattccccctgctgctttgccggcatgcactc

SEQ ID NO: 632554 - DNA, 636 bp, Homo sapiens
gggacacagaccctgaagggattgaaggatagagaagctgggaacatggggctgctgagcaccaggactagtccctggccctgaggtgctcctaagtaagaggtgagttaaatagacatgaatggctcagtctcattaggtgcctcagaaatcgaagctgcaggaagccctacgagtcccacgaacacttgtgctgtcagggagagctgcaaggagagtcagcagggacaggactctagcctgtgtagaagccagaggtttggtgtcagaatggctgcagtagagtatgcccagggatgcttatcccccaaggctcaacatgctcctttaggggcttttgcctttgttgactgatagacctggacagaacagggctgtcttgtccatgggatgggggcagtgtgttctgagcaccatccagtctggtctgccagtctttcccaggggctctttctggtcacactcacttggaatgcagcctcagatgcccaactgggtcactccccagcagctactaccatagctcctacaccagcagacccctcctcaccatcagagagcttakgtggtcaggcctccctccattggtgcgcacctgcctgcagattccccctgctgctttgccggcatgcactc

SEQ ID NO: 632555 - DNA, 545 bp, Homo sapiens
ccagtcaacggaacccaattatagcacagtcagacactccaggaaattgaagaatataaaggacatctatagaacactgcaccaaacaaygaaagaatatacattcttctcataggtacatggcaaatactctaaaattggccacgtaaagcaattctcaacaaattcaaagaaatcgaaatcataccaactacacatttggaccacagcacaataaaaatggaaatcaatgccaagcgggtttctcaaaaccattcaattacatggaagataaacaaactgctcctggatgactattgggtaaacaatccaattaaggaagaaatcaagacattatttaaaactaatgagaaaaaagatacaacatactagaaactctgcgacacaggaaagcagtgttagaagtatatagtgctaaatacccacattaaaaatttataaagatctcaaattaacaccctaacatcatcccaagaggaactagagaaaaaaaccaccaaagacagaagtcaagaaatagccaaaatgagagcttgagtgaataa

SEQ ID NO: 632556 - DNA, 545 bp, Homo sapiens
ccagtcaacggaacccaattatagcacagtcagacactccaggaaattgaagaatataaaggacatctatagaacactgcaccaaacaacgaaagaatatacattcttctcataggtacatggcaaatactcyaaaattggccacgtaaagcaattctcaacaaattcaaagaaatcgaaatcataccaactacacatttggaccacagcacaataaaaatggaaatcaatgccaagcgggtttctcaaaaccattcaattacatggaagataaacaaactgctcctggatgactattgggtaaacaatccaattaaggaagaaatcaagacattatttaaaactaatgagaaaaaagatacaacatactagaaactctgcgacacaggaaagcagtgttagaagtatatagtgctaaatacccacattaaaaatttataaagatctcaaattaacaccctaacatcatcccaagaggaactagagaaaaaaaccaccaaagacagaagtcaagaaatagccaaaatgagagcttgagtgaataa

SEQ ID NO: 632557 - DNA, 545 bp, Homo sapiens
ccagtcaacggaacccaattatagcacagtcagacactccaggaaattgaagaatataaaggacatctatagaacactgcaccaaacaacgaaagaatatacattcttctcataggtacatggcaaatactctaaaattggccacgtaaagcaattctcaacaaattcaaagaaatcgaaatcataccaactacacatttggaccacagcacaataaaaatggaaatcaatgccaagcgggtttctcaaaaccattcaattacatggaagataaacaaactgctcctggatgactaytgggtaaacaatccaattaaggaagaaatcaagacattatttaaaactaatgagaaaaaagatacaacatactagaaactctgcgacacaggaaagcagtgttagaagtatatagtgctaaatacccacattaaaaatttataaagatctcaaattaacaccctaacatcatcccaagaggaactagagaaaaaaaccaccaaagacagaagtcaagaaatagccaaaatgagagcttgagtgaataa

SEQ ID NO: 632558 - DNA, 437 bp, Homo sapiens
gacagttctcctgtttatatttcttttaatgttattggaatgaggttgatcatctgtaaagtgattatcaaccatttatattacaacatatttatttattatattgctcatcattaattcaatcttataaataaaaactattaacaccttctaagcccagtagagagccctgaagaaagttagccctaaaaaagcaagctagataaataagaatraaattattgaatcttactccatgtcacatagttgtcatatgtgataaagacgttaatggaggataccactggacaaaatacctcacacagccctaaaggtcaaggaatgctttgtaaggggaatggcatataatggatatcttgaaggacaattaatatagtgcagaggtgagtgaagggtggggcagtgattcaagttgagaaggttgcaagtgcaaagag

SEQ ID NO: 632559 - DNA, 437 bp, Homo sapiens
gacagttctcctgtttatatttcttttaatgttattggaatgaggttgatcatctgtaaagtgattatcaaccatttatattacaacatatttatttattatattgctcatcattaattcaatcttataaataaaaactattaacaccttctaagcccagtagagagccctgaagaaagttagccctaaaaaagcaagctagataaataagaatgaaattattgaatcttactccatgtcacatagttgtcatatgtgataaagacgttaatggaggataccactggacaaaatacytcacacagccctaaaggtcaaggaatgctttgtaaggggaatggcatataatggatatcttgaaggacaattaatatagtgcagaggtgagtgaagggtggggcagtgattcaagttgagaaggttgcaagtgcaaagag

SEQ ID NO: 632560 - DNA, 649 bp, Homo sapiens
aaagaaaaaagaagaaaatcatgcaatacatttttaaatttactttttcaatggtaaggatgtaagtgaggaagaagcatgagcgaagtaataaatataagagcaagtaggctataatgggttctgtttggggcatgtgaatttgaagtatatgggggtgcttcatataaaaatatgaaacagaccatgaactattgagttctgaagctgtagagrtaagttggaattgggagtaaagaaaaggaaagaaaaagtcatcaatacatagatagtaatggtagccataaagaaaatggcatggctccctgagagtgccacttcctaccaggagtctcagactcaaattcctcctgggctctgacattttgtaaagtgatgtatagaaaggagacagatcatataactctaaaattgtgaaagtttaactgacatccagtggaagataatacagcaaagaggaatagaagcagagcctataaatctacatatctattagagagaaaaatttgaattttgaaaggttaaagtgataataaccgacaggaatgtagaattttcatacaactggctgagagatgaacacttgtagttttcattgcttatgcatcctgggtgctacagtttgccttgatatgtagtagcaacttgc

SEQ ID NO: 632561 - DNA, 649 bp, Homo sapiens
aaagaaaaaagaagaaaatcatgcaatacatttttaaatttactttttcaatggtaaggatgtaagtgaggaagaagcatgagcgaagtaataaatataagagcaagtaggctataatgggttctgtttggggcatgtgaatttgaagtatatgggggtgcttcatataaaaatatgaaacagaccatgaactattgagttctgaagctgtagaggtaagttggaattgggagtaaagaaaaggaaagaaaaagtcatcaatacatagatagtaatggtagccataaagaaaatggcatggctccctgagagtgccacttcctaccaggagtctcagactcaaattcctcctgggctctgacattttgtaaagtgatrtatagaaaggagacagatcatataactctaaaattgtgaaagtttaactgacatccagtggaagataatacagcaaagaggaatagaagcagagcctataaatctacatatctattagagagaaaaatttgaattttgaaaggttaaagtgataataaccgacaggaatgtagaattttcatacaactggctgagagatgaacacttgtagttttcattgcttatgcatcctgggtgctacagtttgccttgatatgtagtagcaacttgc

SEQ ID NO: 632562 - DNA, 649 bp, Homo sapiens
aaagaaaaaagaagaaaatcatgcaatacatttttaaatttactttttcaatggtaaggatgtaagtgaggaagaagcatgagcgaagtaataaatataagagcaagtaggctataatgggttctgtttggggcatgtgaatttgaagtatatgggggtgcttcatataaaaatatgaaacagaccatgaactattgagttctgaagctgtagaggtaagttggaattgggagtaaagaaaaggaaagaaaaagtcatcaatacatagatagtaatggtagccataaagaaaatggcatggctccctgagagtgccacttcctaccaggagtctcagactcaaattcctcctgggctctgacattttgtaaagtgatgtatagaaaggagacagatcatataactctaaaattgtgaaagtttaactgacatccagtggaagataatacagcaaagaggaatagaagcagagcctataaatctacatatctrttagagagaaaaatttgaattttgaaaggttaaagtgataataaccgacaggaatgtagaattttcatacaactggctgagagatgaacacttgtagttttcattgcttatgcatcctgggtgctacagtttgccttgatatgtagtagcaacttgc

SEQ ID NO: 632563 - DNA, 572 bp, Homo sapiens
ggggcatgccattcttagaaaagataaaatactggccgggtgcggtggctcatgcctgtaatcctagcactttgtgaggctgaggttaggcggatcacctcaggagaggagtttgagaccagcctggccaacatggcaaaaccccatctctactaaaaatacaagaattagctgggtgtggtggcaggygcctgtaatcccagctactcgggaggctgaggcaggagaatcacttgaacctggaaggcggaggttgcagtgagctgagatcacgccattgcactccagcctgggcaacaagagcgaaactccgtctcaaagggaacaacaacaacaaaaaagataaaataccagcacatgaataacagacctgcaaggtaaagagtgagaagcaaagaaaggaaggagacacagctagcactttcagaaaaagaagtgagtaaatataattattgaaaattaagggaagattttagaatgaaatgtcatttaaataggctcatttgtgaaagaagaggtttggtgaaaaaatatgtttctgaaaatgatctattttgagaacaatcacccta

SEQ ID NO: 632564 - DNA, 542 bp, Homo sapiens
attcactgtttttacaaaacatctaacaatacatcaatactctgcaaagatttaagtttctccaataacatcattgaaaatcacattttgtttctgcaaccaaataaataataaatttattttatattagcacataaatgttcatgtcaatatgatttatttatttttctgatgtatgggcctaaaaacactattttaaatatcactaaacaggaatttttaaaagtatacatgcaaataccagaaagagggattggctcaagatccatactgaacaattgattaaaatacaaatcgtgtaaatactacttttattttagatctgtcttaagtaaaagtagatttacatgtgactggtcatcatctaaactttgaaataaatgtagataaaacaaatcaaaagaaatgtaaaattagaaacaacatttcaacctgaggctagctcaaagctatgaaaatatgaaagagaaattgtartaatattctttttctattatcaaaggaaactttcttgttttctctctcctataaatattatttat

SEQ ID NO: 632565 - DNA, 578 bp, Homo sapiens
gatctattttgagaacaatcaccctatgctgtattgattttgctaactttttcagacacatgatcaactttccctccagcagcatttgataatttttaccctagaatgaggttgcattcatttcttcacaatatagagaaaataatattacaaatgcctacacattttatttctatttacctttcttatattgctagagaaattgaaatttcttrtgtgtgaattgatcacttgcatttctttttagtgaatttatttgttgtggcattttccacaataatattttatatcgatttcccccaaaatttatctgcacacttaacactgtgaatagtagattaacagtgggagaaaatatctgatgttctctttaagttcaattctattatgtcctagtagtaacttttcattttggagatatctgcacttaaattattacttaaatcgtcttttttatgtgcttcgtggtatagctgacattgttttattttaaggcgtttggatgttgatttcctattctcaggttgcacgttacataataggcatgcaattgaccaacaaaataaatattctctcta

SEQ ID NO: 632566 - DNA, 566 bp, Homo sapiens
gtcaggtcagtcaataagtcttaatataaactgattgaggagacgtgcccattggctttggctgacaatgctacactcagtgcaggttttatcagtatgtgctgacccctgacaatcccattttctccttttctctttcaatatctaattttctcataagctgtatggtgtacattttaatgcttgccatatcccagctcttaccaatcatattcataatcattttataaaaaaagtacactgcctctagatatctgcttatttttcccaaatgcatgctgcccctaagcttagtccattctwacttattgtcagaaccagaatgagtcttgccctgaagggaccctttcaaactcactgttggttctgaatgcatttttgccttcaggctccctctattccttcagaccgatcatccaggctccagtgaatgttgcctttgggttgtctccttcggtttcaatttcaaggcttgcatgctttttaccctcaggttttcccttttcagtttctgtatgagattttaagggcctcgtggctttaaacactttctcattgcagtattt

SEQ ID NO: 632567 - DNA, 566 bp, Homo sapiens
gtcaggtcagtcaataagtcttaatataaactgattgaggagacgtgcccattggctttggctgacaatgctacactcagtgcaggttttatcagtatgtgctgacccctgacaatcccattttctccttttctctttcaatatctaattttctcataagctgtatggtgtacattttaatgcttgccatatcccagctcttaccaatcatattcataatcattttataaaaaaagtacactgcctctagatatctgcttatttttcccaaatgcatgctgcccctaagcttagtccattctaacttattgtcagaaccagaatgagtcttgccctgaarggaccctttcaaactcactgttggttctgaatgcatttttgccttcaggctccctctattccttcagaccgatcatccaggctccagtgaatgttgcctttgggttgtctccttcggtttcaatttcaaggcttgcatgctttttaccctcaggttttcccttttcagtttctgtatgagattttaagggcctcgtggctttaaacactttctcattgcagtattt

SEQ ID NO: 632568 - DNA, 563 bp, Homo sapiens
gattatttttaatgtttcccagagcataaatcattgccttgaacatactagaggttcactaaaaattccttgagtaaatccacaaataaatacagatgatgatatttgtgttgtccagtgtactgttaaatacttttaactttacatgttatgttttcagactgttgagttgttttttaattaaatttatccctgttttcttaacattttttgttaccttctacttctagatttccctttttctcaactgaatttacctttttcttcaactgtctcagacaatttttctgattttctagtgagctggtaatattgtgctaataatatgatatcagttttaaagtgtgggaaaaaaagtgctctaagttttaggaagcattgcattgaaaagcctcataactttataagatctttcttttttgttttatttctcactgatttgccmaaatattttcaaattttctctcaaacaattaagtatcccaattttgatcacggcagaacttcatgttttctaagatatggtttatctgattatatatttttcagtaattaatcaaata

SEQ ID NO: 632569 - DNA, 563 bp, Homo sapiens
gattatttttaatgtttcccagagcataaatcattgccttgaacatactagaggttcactaaaaattccttgagtaaatccacaaataaatacagatgatgatatttgtgttgtccagtgtactgttaaatacttttaactttacatgttatgttttcagactgttgagttgttttttaattaaatttatccctgttttcttaacattttttgttaccttctacttctagatttccctttttctcaactgaatttacctttttcttcaactgtctcagacaatttttctgattttctagtgagctggtaatattgtgctaataatatgatatcagttttaaagtgtgggaaaaaaagtgctctaagttttaggaagcattgcattgaaaagcctcataactttataagatctttcttttttgttttatttctcactgatttgcccaaatattttcaaattttctctcaaacaattaagtatccmaattttgatcacggcagaacttcatgttttctaagatatggtttatctgattatatatttttcagtaattaatcaaata

SEQ ID NO: 632570 - DNA, 541 bp, Homo sapiens
tccttacctgccagatgaccaaaaaattaaaagtaaaaataaggtataaatcttgagagggaaattctgattttgtcaggaggatgcaccttgtagtaacgattcaccaaaggctaatgaaacgtagaaggtgtgggaaaagcaacagcagcagcagccacagaaacatgagaaaaggttgcctcccaataaagagtggcaaacgcatatgttatgtaagacctgtacattatagcaactcggagcaatctaggcactgagtagccaaatgctgaagactagtgggaaaaaagaaatcactgcatgtcaaggtagaagaggatgagaaattaataggatggagaccttgaatttarccacatatccttgcaagatgtttactgtcatttttaaatttttgcttaagtaaggaaatcaatgtttatcaattctctactcaattttgctttcagagcttatttatgttatacacaaaagaaatatatgatacagttattagtctcttcattgggcatcagtgaaaataaatcaacacaaaaac

SEQ ID NO: 632571 - DNA, 586 bp, Homo sapiens
atgattgtttttaatagataaatgtaaaagttcataagaacccacttcctcaaatattttgttcattcatatgtcactaattctgaatattatgtaaaaagagacaacggggatattcattgacatcaagaaccacttatgttttttaatgcgaatttttttcttttaaatgggatgtcttattacaaagtaagtagatcagcagccccttgaagttattatgggcctgttgtggcttataaaacagaaaggcagtaaaaggcacagaagsagaaattggggatgcaaaagatttactaaattttacagttttctcagcattaactctgttcatagctgtaagtgacataataacttattgattattaatcaatttcagccagtgaaatacattgtgaagttttaaaattatttgcttatcagatcatgtgataaagacagctaaatacaataacagaacaaaatccacaaatcccttatacctgtgcaagttgttgtgaaatgtttctgtattaaggatcttagttataagggaaaagaaaaagttatagcctgaaaaaaaaagaaatgtgtcaaaggacaaagt

SEQ ID NO: 632572 - DNA, 598 bp, Homo sapiens
tactaatgagtttaaaaatctattcaaagattagccatccatatttctttttctgcaaatttcttatttgtttctcttgcacattcttaatcaacttataagatttttcttactgtattttatacaatctttttattattaatgacatttctttttctgtaatatagtctgtcacttatctgatataataaagaaatgattcattttatatagttaaatctgtctttccttcatgatcaggtatctaggcattgttttggggttgttttttggttattgagaactttttattgcaaagatcataaaaatatttgtctacattttctttcaaattattctaggttttatcctmgcttgtattattaattattgtgtaaattattccctagaagagtataatatagtcgttcttcctctttggtacagatttcctaatattatttgatgaccaggttatgtctgcccactgatttaaagtgtcacttcatttgtagcttaattttgatttatatacatatgtgtcactgtcttgactctgttcagttgacatatttctttattcttgaatgttattgtcatcattgtgactttgtagggc

SEQ ID NO: 632573 - DNA, 586 bp, Homo sapiens
attgtcatcattgtgactttgtagggcaagtagtctttttattgcctgctaccaatatggatgggcttcacttactagtttttttttttaagttaaatgatgccagcctagcaacaataaaatttaaatttcagttaccacagtatatcaactataaaaaattgaacaaagcataaacttkgctgctaacactccattccacaaattataatgcaaataataggaacatcatgatcaatgaccaatcgcatcacttctttcagaatctgccagtgtttggtcactgcacatctgttagttcacatacaaacagcaaagcgtgtagttgtgttatctgtttattccccagtaatacactcatatgacactttacaaaatagttaatcaagagagtaaagcagcaaaagtgcagcaaagaaattaaaagtgataagactgaaagtgaaactagatttttaaaaatgttttaaatgcacactttgagcaaatcttcaaagagaaggcattgaaagtaaatggagcgaggacacagatgctgggcggaagggggaaatagctgggtatcctgcacaaggctaccaagcac

SEQ ID NO: 632574 - DNA, 461 bp, Homo sapiens
agtgataacctgtgtctcaaccgtgccatggctgccactggtgcaagtgcaagcatrgacactggcaaccataacccacccataccatgccgctggagtgagcatgtgcaggaacactgtaccctgctcctgctgcttccccaccacaggaaatgtgcttgtaccccactacagtgtcacaattgctggcacatgcaagcaagcacagatcatcctgccagcaccctggtgaaggctttggctggcacaatccatcggagtgttttcgtcagcagatggggaacacctcagaccctccaatgcaacagattcctaacctctaggggccagaaaacaaagccaagagcacattaccaactccccagagttagaggatgcagcccaggagtactgagctaagccttatccccttaaatgtcctagaaataaagccagtcagctgaaatcaccttataccaaat

SEQ ID NO: 632575 - DNA, 537 bp, Homo sapiens
tgtcctagaaataaagccagtcagctgaaatcaccttataccaaataagagcatcaaaggagagaaaagcaaaaaaaaaaaaaaaaaagccattcaaaggggagtaacttcaaatattggaggaacatcaggccacatagaggagtaagaaccaatgcaagaactctagcaactcaaaaatcctgagtgtcttctcacctccaaacaactgcactcataccccagaaatagcaatggttcttaacttgcctgaagtggctgaaatgacagaaatacaatttgtgatatagatagaaatgaagattatcaagattcaggagaaagtagaaaccgaatccaaggaatctatggaatacaataaaacaatacaggagctgaaagacaaaatggttattttaagaaaaaaaaaaaaaaaacctgatctgatagagctgaaaactcacttcarggatattatagtacaatcaccaaatactaacagcagaatcaactaagttgaggaaagaatctcagagttcaaagaccagttatctaaaa

SEQ ID NO: 632576 - DNA, 577 bp, Homo sapiens
accattcttttacttttaacttatctgtgtttttatatttaaagtatatctcttaaaagcagcatatagatgtcttgctttaaaaaaaaaaacctcataatctctcccttttaattaaagtgtggtttttgttttgtttkgttttgtttgagacagagtctcactctgtcaccaggctgtagttcagtggtgcgacctcggctcactgcaacctccgcctcccaggttcaatcgattcccctgcctcagcctcccgagtagctgggattacaggcacgcgctgctacgaccagctaaattttgtatttttagtagagatggggtttcaccatgttggccaggatggtctccatctcctgacctcatgatccgcccacctcagcctcccaaaatgctgggattacaggcctgagtcaccatgcccagcctaattaaagtgtttaatccattaatgtttgtagtggactgaataatgtaccctcaaaatttatgttttcccagaacctcagaatgtgaccttatttgaaaattggtttttgcaaatattagttaagatgaggtcatcctagattagaac

SEQ ID NO: 632577 - DNA, 500 bp, Homo sapiens
ttttgagttgttttttttttcttttttttttttgttgagacagagtctcactccatcgcccaggctggagtgcagtgatgtgatctcaatctccacctcccgggttcaagcgattctcctgcctcagcctcctgagtagctgagattacaggtgcccagctaattttataaaatatttttagtagagatggggtttcaccatgttggacaggttggtctcaaactcctgacctcaggtaatctgctcacctcagcctcccaaagtgctgggattacaggcatgagccactgcactcagcctgatttaattttttatatggtgagagatagggatctagttttattcttctgcatatggatatccagtrttcccagcaccatttattgaagagattctttttcccagtgtatgttcttagacctttatcaaaaatgagctcactgtaagtgtgtggatttgtttctgggttttctattgttccattggtctatgtgtctgt

SEQ ID NO: 632578 - DNA, 491 bp, Homo sapiens
ctcctgcagcagcagaagatggctgggagcaacatggatgagatgttcgagagccacatcaacaccctttggtggcagctggacactctgggtcagagaagctgaagctggaggtggagcttggtgatacgcaggggcagcttgaggacttcaagaaaaagtaggaggatgagatcaacaagcatacagagaaggaaaacgaatttgtcttcatcaagaaggatgtggaygaagcttacatgaacaaagcagagctggagtctcacctggaagggttgactgatgagatcaacttcctcaagcagctgtatgaaggagatccaggagctgctgtcccagatcttggacacatctgtggttctgtccatggacaacagctgctccctggacatggacagcatcatcaccaaggtctgtgcccagtatgaggacatctccaatcacagccaggccaaggctgagagcatgtaccagatcaagtatgaggagtt

SEQ ID NO: 632579 - DNA, 612 bp, Homo sapiens
gtaatatggaggatggattagaagagggacaagtctggaggcaaaaaggacttaggtgttgaagtgattcaagtgagaaatgatggcaatctgaattaaagccatgatagaagatgttggagaagtaaggacagatttaagcmatactgacctgggacgctggttaataataagtggaaaaaaaaaagaattaaaacttaggttcatactggcaaaataaagtgcgaaaaaccttcaaaatttatttaaacttgtagtagaaaacaaacgaactactttcctagtactaccttcaggctgtgaagatattaaccaaagaccacaaaaactgtccctcaggttctctaagtaaccagtgtccaaaggtattttggctaaaacaaagccctttttcaattaccacagctggcatcctagtatgttaccactgaaagagaaagacaggaaatgaatcaataaaccccaggcatatgctcagcctagaaagacacagcatatcaaggagcagaaatctgtaaataaagaccctgggtaatttaattaccaggccagaatctgctaactgccggtttaattgtttgaacagcgcccaaattgtctgacgaggtgatc

SEQ ID NO: 632580 - DNA, 499 bp, Homo sapiens
gtgagtgaaagttactgaacacagttgtaatataataaaaataatactttaggaagattaaacaggaattatataaaatgtacttgactagagaagaaagagagaatggtaaaacatgaaggattcgctaattaagacatgaagtgttgaaagcttagggcagggtgatgactggggaaacagaaggatttaatttcaagtcattttgcaagaacagagtatgatctgctggccaactaaatacaaaactaasaatgaaaaaaacattgggaacataacaccctcccagcacagagtaagcaataaaggaatacttgtaaagttaaataaagactgactctgaagttataaacctgaaatcttaatatacagttcaaagtacaaagttaactactgtttatctatggttttttttccatctaagtctccaattggtttaaaacattttgggcttaattcacttaaaatcttatacagtagtccccgcttatctgcaggg

SEQ ID NO: 632581 - DNA, 510 bp, Homo sapiens
gcaattcttggcaaaactgcaaactgggagactagatttcgctgctctaccaatttctgtcattccttacattccataatcctcacatatgaatgtcccaactgactgaaaaaaatggctaaaaactcagaagyaattcattttggtcataactttttcattgccaatttcccacagatttagtgtatctaatgacaagacttgaagttctatgtgttttttgttatctcaagattgattacattgtttcacatatgtatgtgtatatatatgtatgtatatatgtaatatttatcttttttatttctgtatttttacacagcggatactcaataattttgacaggtttgtaaagaaattgtgtttaggtgggatcttagaagcaccgatgtattatcttcaatcatataaagttatgtgagataaatatttgtacaaagaattgactccttgttacagcttctaattattcctatgcagcattcatgcaaagcttttggagtagcaaat

SEQ ID NO: 632582 - DNA, 545 bp, Homo sapiens
aagaaggcattttaaatgcatgttttatgagtccttgcttaatgactttctaaaaacaaacaaattgtgagttatagagaggttctacaaaacttttgaactgtagtatatcgtgtggttgaattccaaatccatcagttcttaatatttttttctcatcagctcttactgggattaatagcaagatttaattaagtcatctattatttatcaggtcaaatttagttaatacagtaagagctgcttaagtggagtgattgacactttgaggttgacaattcaaatggtgtccgttttaaactaatatatcttaaagagctagggggcactatggagtaataccgtggtttggctrtcagagtgagatcaatgcattcatttgtaattggaacaagcaccggtcagatcgtgaaagaggacttagatcctaaatcgtgtgtgtagtatatatgtgtaaaatgatttacgttaaaagctaaatgtttagtccgcagaacccatttccctgtgcttttctaaagaagctgttattaacatataaaaag

SEQ ID NO: 632583 - DNA, 546 bp, Homo sapiens
tgctggaaatggaagagcatggtccctttaaatgatatcgaagtgggggaagagaagtgctgggtagaaaagggcatggtctgtggctagagttccatccccggacctgtgcctatggatctaagtgtggacaggaatttttgttttcctgccctatggttgcattacccaagaccaacctggcctaccatgcccctatcctgtgtctataaaaacccctgagaccctagctacttccactcaataaaacctggcactcattctccaagaccctagcagatagacacacaggtgctggacataaggaagagcaccaccagtgaagaaagacatgcacacgggtatcgggacattgagaggcgcacaccgacaggcaccagcgtgctggcaggccaccaaccagcggaacaatgcggagtttggctggggcagttggaggagagctagggccaccaactggcccaactccagggaaraatcatctcccttctggctcccccatctgctgagagctacttccacttaataaaaccttgcactccttct

SEQ ID NO: 632584 - DNA, 546 bp, Homo sapiens
tgctggaaatggaagagcatggtccctttaaatgatatcgaagtgggggaagagaagtgctgggtagaaaagggcatggtctgtggctagagttccatccccggacctgtgcctatggatctaagtgtggacaggaatttttgttttcctgccctatggttgcattacccaagaccaacctggcctaccatgcccctatcctgtgtctataaaaacccctgagaccctagctacttccactcaataaaacctggcactcattctccaagaccctagcagatagacacacaggtgctggacataaggaagagcaccaccagtgaagaaagacatgcacacgggtatcgggacattgagaggcgcacaccgacaggcaccagcrtgctggcaggccaccaaccagcggaacaatgcggagtttggctggggcagttggaggagagctagggccaccaactggcccaactccagggaaaaatcatctcccttctggctcccccatctgctgagagctacttccacttaataaaaccttgcactccttct

SEQ ID NO: 632585 - DNA, 546 bp, Homo sapiens
tgctggaaatggaagagcatggtccctttaaatgatatcgaagtgggggaagagaagtgctgggtagaaaagggcatggtctgtggctagagttccatccccggacctgtgcctatggayctaagtgtggacaggaatttttgttttcctgccctatggttgcattacccaagaccaacctggcctaccatgcccctatcctgtgtctataaaaacccctgagaccctagctacttccactcaataaaacctggcactcattctccaagaccctagcagatagacacacaggtgctggacataaggaagagcaccaccagtgaagaaagacatgcacacgggtatcgggacattgagaggcgcacaccgacaggcaccagcgtgctggcaggccaccaaccagcggaacaatgcggagtttggctggggcagttggaggagagctagggccaccaactggcccaactccagggaaaaatcatctcccttctggctcccccatctgctgagagctacttccacttaataaaaccttgcactccttct

SEQ ID NO: 632586 - DNA, 485 bp, Homo sapiens
gagagatcctgtctcaaaaaaaataaaacacaaaatttcctttgcactcacaactttgctaactgtttggcagaagagacttagctgttggcctgtttcagagttcaaaatgccttcctcaccaatcttaattatttctagatttacatttaaaatgagagacatgcaactgactcttcctttcacttgaacactgagaagccactgcagggttattaattggccaaatttcaataccattgtgcctcagggatctgggatgcctgaatggccagctggtggaacagtcagaacacacggcatttattgattaggttcaccatcttcaaagggcatggttkgtggcaccccaaaacaatgacaatcatgacatcaaagatcactgaccacagatctccttaacagatataatcaaaaatgaaaaaggttgaaactattgtgaaaattaccaaaatgtggcagagacacagagtggagcacacgac

SEQ ID NO: 632587 - DNA, 557 bp, Homo sapiens
aaacagcctggggcacaatgttgttgttatctctgtaatctttggcactaaattctttccttgyataatacacatgttgaacccacgcatacttaaccttatgaaactttttcttcctctcactcctagaatccattggctccctttgcttggaacccttagatagacctctgggaggaatctgactgccgttctccccaaaaacaaatgccccctgtctgtgggaagcacttaggactaatcatcatccgtattctaatggcaattaggtgtacctcttcagagggtagaaatgatccagaagggaactgctggaaatggaagagcatggtccctttaaatgatatcgaagtgggggaagagaagtgctgggtagaaaagggcatggtctgtggctagagttccatccccggacctgtgcctatggatctaagtgtggacaggaatttttgttttcctgccctatggttgcattacccaagaccaacctggcctaccatgcccctatcctgtgtctataaaaacccctgagaccctagctacttccactcaataaa

SEQ ID NO: 632588 - DNA, 568 bp, Homo sapiens
ttgtgagcatttaccgtgtgccaagcacagttcaaagcctttctcatgaattactgcatttaatcctctcagcaccctgaggccacattctattgatgaagaaacaagaggtgagtaacttgcttatggtgagtctttttttttttttttttcgagayggagtctcattctcttgcccaggctggagtgcaatggcaccatctcagctcactgtaacctccgcctcccaggttcaagcaactctcctgcctcagcctcctgagtggctgggattacaggcacctgccaccacgcccagctaatttttgtatttttagtagagacagggtttcaccatgttggtcaggctggtctcaaactcctgacatcgtgatccgcttgactcggcctcccacagtggtgggattacaggcgtgagccaccgaacccggccgcgtcttcttctttctctccccaacacctggcatgttacctgatacatgcaggagttcagcagcaattctgagaacaagtggatggatggatagatgaatgaatgactaaatgaatggatgagaatgtccccttc

SEQ ID NO: 632589 - DNA, 611 bp, Homo sapiens
tctgctgactgaaccccacctcaaggaagaaggccatgcttcatggcataaacaagcccagggaactcgaagtttgccaacagcagggagaaaggaaggtacaggtgagggtggttaattcctattmtccaggttttccctgcttcatgggtacatactacattgttacctggggccagccagcacctgccaaggtcgccggggctcagggacaagaggtggaaagtgaaaggaggatgctcgcgttctctctccatcacgccctgagttttcactggaaggaggaagggaaatgagggacacttctattctctgtctttcagaatgtgcaaccagttctcttcaccatccccagcttatactcctctaaagtgtatcctgaacaattgggactgctttgatcctcagaatctggaggaaaatggcctcatagccctctgcacaaaggtttggccaaattatgatttacaggaaggactggcttgggctcaggaaggaaccattcactacaatggcattcaacaattagaactcttctgtagatgtgaggatagacagttctgaggccgatatgtacaggtttctataccttgcaaggcaatacagacctt

SEQ ID NO: 632590 - DNA, 616 bp, Homo sapiens
ccagcaattcttccagttcttcctgagcaattttccactagttaggagtcaggaaagaggaaccgtgagagctgaggagctgtgtatttcattaattgtgaaatacacaaatattggcctgttcccttgcgatcataaaatttgcaacgtaatattgcagacatttttgcatattactaaagttctttgaaaagtgtattctttgatggtttctattggatccactattcacactataatcacatattcctgggaacttaagctgtttctattttagtaatartgtaacaccatggtgttaacgttgtgaagtgtggtcttcatctctggttgttgccttggaaaggttaccaagggtttgctctgtcaaaggaaatgaaaggcttgccaaatttctttccagaaaggctctcatgagcagcttaaggttatgtacttttcagacataaaaaatgtgtttattaggtagaatgtgtatagacacactttgtgaataatagaatcttttctgaaaagcagcgctactccttagtatcagagatcccttttatctgaggatatcaaagcacttctttttgaagaaggtttttcttgtgctgagatatatggaaagatt

SEQ ID NO: 632591 - DNA, 592 bp, Homo sapiens
atcctggtgctgtgcgttcattacagcctccccttggctgtttgcccttgtggagttggttgtcttctgctgaaagtcaccacctgatgctgtgggtgctatgggagaacagtgaagtttctggagggaagataggaatcaaccgcctgttttctcctgggactgagttttcctggagacatattgctcagaaacaattccttcccacagtaaagcacaaggcaaacggggtgcttagtttgcwtcatatttcacaggtatttaatcttcacatgtaactcttgctttgcatgtaactcatttaatctttaatagctatgggtaggcactttaatagccttgtcttttgatgaagaaagtgagggagagagattaagaatgtgcctatgacctgagagttggtaaatagaagaatcagaacagaaatctgtgtagtctctagttctagagcctacagacaactgtcacaccttacttcaaagttctacccaagcattctagaaggatgagcagggcagtcagagaggcggggtgtaactagatccccaaatccagaaatgtggtcttcccattgcctcagagcaaagctcca

SEQ ID NO: 632592 - DNA, 592 bp, Homo sapiens
atcctggtgctgtgcgttcattacagcctccccttggctgtttgcccttgtggagttggttgtcttctgctgaaagtcaccacctgatgctgtgggtgctatgggagaacagtgaagtttctggagggaagataggaatcaaccgcctgttttctcctgggactgagttttcctggagacatattgctcagaaacaattccttcccacagtaaagcacaaggcaaacggggtgcttagtttgcatcatatttcacaggtatttaatcttcacatgtaactcttgctttgcatgtaactcatttaatctttaatagctatgggtaggcactttaatagccttgtcttttgatgaagaaagtgagggagagagattaagaatgtgcctatgacctgagagttggtaaatagaagaatcagaacagaaatctgtgtagwctctagttctagagcctacagacaactgtcacaccttacttcaaagttctacccaagcattctagaaggatgagcagggcagtcagagaggcggggtgtaactagatccccaaatccagaaatgtggtcttcccattgcctcagagcaaagctcca

SEQ ID NO: 632593 - DNA, 592 bp, Homo sapiens
atcctggtgctgtgcgttcattacagcctccccttggctgtttgcccttgtggagttggttgtcttctgctgaaagtcaccacctgatgctgtgggtgctatgggagaacagtgaagtttctggagggaagataggaatcaaccgcctgttttctcctgggactgagttttcctggagacatattgctcagaaacaattccttcccacagtaaagcacaaggcaaacggggtgcttagtttgcatcatatttcacaggtatttaatcttcacatgtaactcttgctttgcatgtaactcatttaatctttaatagctatgggtaggcactttaatagccttgtcttttgatgaagaaagtgagggagagagattaagaatgtgcctatgacctgagagttggtaaatagaagaatcagaacagaaatctgtgtagtctctagttctagagcctacagwcaactgtcacaccttacttcaaagttctacccaagcattctagaaggatgagcagggcagtcagagaggcggggtgtaactagatccccaaatccagaaatgtggtcttcccattgcctcagagcaaagctcca

SEQ ID NO: 632594 - DNA, 592 bp, Homo sapiens
atcctggtgctgtgcgttcattacagcctccccttggctgtttgcccttgtggagttggttgtcttctgctgaaagtcaccacctgatgctgtgggtgctatgggagaacagtgaagtttctggagggaagataggaatcaaccgcctgttttctcctgggactgagttttcctggagacatattgctcagaaacaattccttcccacagtaaagcacaaggcaaacggggtgcttagtttgcatcatatttcacaggtatttaatcttcacatgtaactcttgctttgcatgtaactcatttaatctttaatagctatgggtaggcactttaatagccttgtcttttgatgaagaaagtgagggagagagattaagaatgtgcctatgacctgagagttggtaaatagaagaatcagaacagaaatctgtgtagtctctagttctagagcctacagacaactgtcayaccttacttcaaagttctacccaagcattctagaaggatgagcagggcagtcagagaggcggggtgtaactagatccccaaatccagaaatgtggtcttcccattgcctcagagcaaagctcca

SEQ ID NO: 632595 - DNA, 665 bp, Homo sapiens
tgtattttctgttttggccaatggaagtcaaacatcttgcacctaaactcccttctttgagtagcttcctattttagagtgatatttctgcaatcacaacacaagakggttaagtatggatttgccaacacagattttttgaagaggtgagacaagttcagtttctccttcaagatggaagatggggttcctcattgtgtttgtaatgatgtagaaaactgtaaatccatccattttgttgttggaactcccttactccgttttattttcaagcacagtgtctttaggctaatcctgcttcttccagaagcctgacttctccagacactgctctgtgctttgcacctgtctcctaatggtctctctctctcccatctctcactgctgagtgctccctcagaaatggcatcctgatgtactacttcctactgaactgttgatgattgctattgccttagtgggttttttcctttctggaatatttatctttaaacaagagacaactatctcaactcaaggaatttatttactaaaattaaaattaattaataaattattcctggcattagttgcaggcatgagtggctgagtgattaaaccggggttcccaatgccctttaactcgcactcatttgtatgctttcacagaacacctgttttgctca

SEQ ID NO: 632596 - DNA, 662 bp, Homo sapiens
gcaaaacaggtgttctgtgaaagcatacaaatgagtgcgagttaaagggcattgggaaccccggtttaatcactcagccactcatgcctgcaactaatgccaggaataatttattaattaattttaattttagtaaataaattccttgagttgagatagttgtctcttgtttaaagataaatattccagaaaggaaaaaacccactaaggcaatagcaatcatcaacagttcagtaggaagtagtacatcaggatgccatttctgagggagcactcagcagtgagagatgggagagagagagaccattaggagacaggtgcaaagcacagagcagtgtctggagaagtcaggcttctggaagaagcaggattagcctraagacactgtgcttgaaaataaaacggagtaagggagttccaacaacaaaatggatggatttacagttttctacatcattacaaacacaatgaggaaccccatcttccatcttgaaggagaaactgaacttgtctcacctcttcaaaaaatctgtgttggcaaatccatacttaaccctcttgtgttgtgattgcagaaatatcactctaaaataggaagctactcaaagaagggagtttaggtgcaagatgtttgacttccattggccaaaacagaaaataca

SEQ ID NO: 632597 - DNA, 439 bp, Homo sapiens
gttgcaggcatgagtggctgagtgattaaaccggggttcccaatgccctttaactcgcactcatttgtatgctttcacagaacacctgttttgctcagatgtaaggtcacttctgcyctcttactcaccgctgacctaattctcaagtctttcaaaccttcctcagggaatgctttcttatgatgacttaatatttacaaatgacattctgaggtcttttccaggatctaggaatggtggccaaaggcagatcagctggaagctctaaagctgtgcttttttccccctctaagaactcttaaactttgagttcaaggctgtctctgcaataatggctcatacttctctttagaagaatgcaagggagctttcagatgagcagtttcagaggctttttaaaaagagtagaatgggaggaacgaggcaccatagctgggtg

SEQ ID NO: 632598 - DNA, 439 bp, Homo sapiens
gttgcaggcatgagtggctgagtgattaaaccggggttcccaatgccctttaactcgcactcatttgtatgctttcacagaacacctgttttgctcagatgtaaggtcacttctgccctcttactcaccgctgacctaattctcaagtctttcaaaccttcctcagggaatgctttcttatgatgacttaatatttamaaatgacattctgaggtcttttccaggatctaggaatggtggccaaaggcagatcagctggaagctctaaagctgtgcttttttccccctctaagaactcttaaactttgagttcaaggctgtctctgcaataatggctcatacttctctttagaagaatgcaagggagctttcagatgagcagtttcagaggctttttaaaaagagtagaatgggaggaacgaggcaccatagctgggtg

SEQ ID NO: 632599 - DNA, 439 bp, Homo sapiens
gttgcaggcatgagtggctgagtgattaaaccggggttcccaatgccctttaactcgcactcatttgtatgctttcacagaacacctgttttgctcagatgtaaggtcacttctgccctcttactcaccgctgacctaattctcaagtctttcaaaccttcctcagggaatgctttcttatgatgacttaatatttacaaatgacattctgaggtcttttccaggatctaggaatggtggccaaaggcagatcagctggaagctctaaagctgtgcttttttccccctctaagaactcttaaactttgagttcaaggctgtctctgcaataatggctcatacttctctttagaagaatgcaagggagctttcagatgagcagtttyagaggctttttaaaaagagtagaatgggaggaacgaggcaccatagctgggtg

SEQ ID NO: 632600 - DNA, 554 bp, Homo sapiens
cagggctctcgagaaagacagaactaataggatagatgtacmtatgaaagggaatttattaaggagtattaactcacatgatcacaaggtgtcccacaataggccatctgcaagctgaggagcaaagaagacagcccaagtcccaaaaactcaaacgtagggaagccgacagtgcactgtggccaaaagtctgagagcccctggcaaaccactggtgtaagtccaagagtccaaaagctaaacaacttggagtctgatgttggagggcaggaagcatccagcacgggagaaagatgaaagctggaagactcagcgagtctgctcattccaccttcttctgcctgctttttttagccgtgctggcagccaaggggatggtgcccacccagattaagggtgggtcttcctctccagtccactggctcaaatgttaatctcccctacaacaccctcacagacacacccagaaacaatactttgcatccttaaatccaatcaagttgacaatattaaccatcaaaatgagaacctctctactgttcactctcatctat

SEQ ID NO: 632601 - DNA, 573 bp, Homo sapiens
tttgtttcttccttagtacttgaaactccattggtaattaccattatggggttgcatttcgcatctgtaagtcttaggatgaaaactagagctccctcacatgttttctatttacacatttttcttttctcagaaaactgggccacatgcattcacaagaggtgggcagcaggatgacagactccacaccgagcagatgagacatattcctatagtcccatgacctccaacagggtttccctttatctgcagactcagtaatctccttttctgtccctctctgaaagaatgaaaagaacccaaccaaacaatctctgtggtagttcaaccctggctatcataaatcaaatagggtgaaggataaaactgtgtacctgagccaatgggtttctttggaaacctgctaagatggagctgttacatactcgccatctaactgatgcttttcaaactttaatgtgcttatgagtcacctggggatcttggtaaaatgcagattcttagccccagkctggggagcccaggaatagggatttctaatgagctcccagatgatgctcaagcgatggctgg

SEQ ID NO: 632602 - DNA, 571 bp, Homo sapiens
atgatactgaagccaacttctgtaccagtatagcagcttagcagacttctatatgatccatgtaagggtctgtttgctctctgagattttgggtgccttctctagcccctgagtgctgggcttcttctgaattccataggggtggaggtgaagrtaccgccagctctcacccaactcatccattcctggacagcagggattctgctcatcaccttggtgcctccgatgcctgaagcacaataggccctcagcaaacatttgttgaattcatgccatgaacattaatcgagccctttttatacactgtgcactgggattgggaccatggaaaatttagagaggaaaaggtccaccttcaaggggcatctagaggaacttatcctctagcaggagaaattgctaatgagaaaaggtattttggggagtggagtgaggtgttggtctagctggcaggttcagcctatgctcagtggctctctggtatggaaaattcctcagaatgttgattcagccatagatttctctggcagcactgactcttgccttccttcggccacattttattccccaa

SEQ ID NO: 632603 - DNA, 571 bp, Homo sapiens
atgatactgaagccaacttctgtaccagtatagcagcttagcagacttctatatgatccatgtaagggtctgtttgctctctgagattttgggtgccttctctagcccctgagtgctgggcttcttctgaattccataggggtggaggtgaagataccgccagctctcacccaactcatccatycctggacagcagggattctgctcatcaccttggtgcctccgatgcctgaagcacaataggccctcagcaaacatttgttgaattcatgccatgaacattaatcgagccctttttatacactgtgcactgggattgggaccatggaaaatttagagaggaaaaggtccaccttcaaggggcatctagaggaacttatcctctagcaggagaaattgctaatgagaaaaggtattttggggagtggagtgaggtgttggtctagctggcaggttcagcctatgctcagtggctctctggtatggaaaattcctcagaatgttgattcagccatagatttctctggcagcactgactcttgccttccttcggccacattttattccccaa

SEQ ID NO: 632604 - DNA, 264 bp, Homo sapiens
ctgcttctcccagccatgccccgagacaccagtgtgtatgtaaattctgttctcaagtccagagggagatgcttctaagaaaggctttcgaacctccctctgcgctcttctctttaactgttcacggacagctggactctagcacagtcactgcaatacaatgttttttacatgcatcagagtcagagaggggcttcagcagagaaagayaccctctcctgagtcctcagagcacggggaggcaagattgacatttactgaatt

SEQ ID NO: 632605 - DNA, 572 bp, Homo sapiens
tcctgtgcactgcttagccagggaactgtgcccttacaccttgttagccagtggaagaagagtgagtctaccttttagctgtctgtagcattgttactgtagtattattgtatgcttctgtttatgatggtggagaggccatttgagatggaggcattgttcatcatgctgctgaaatttgagtaggataaatttagaatttggataggtgagcagctgggaggggcatcttttgggattgtcaggagttactcagttgatgtggctcatcagcaggtgtcccattctccttacctttccatgggctttctttcatgcttcaaccaaagagaaggacccttcttcagttaaggatttgtctggatgttttctacatgtggtgtgatcgcttatgagttttcctgcctctgagacctaccttctgaatgcctgactgacaaagatttaaaggtcgtccattwcagttggcatgcttttatattccacatgccagagctacaagaatgttattatttcctttcttctctcccaggtgatatatttggtcacctaggtgtcattaggtactaagc

SEQ ID NO: 632606 - DNA, 565 bp, Homo sapiens
agcatctctctctacatcactgttttcatacagtttgactttcaccagagaagtttcctgctttccagaacactggtgtgaataacctctcagtgcatccacattcctacgccagctctccatttccccttccacactcaggctctccaaaccctagtctagttccaaactaagccaggcctgaaagaaggaagtggttgagttgcttctgttcaccctcctgtcccttctgaccccatcccccatctggtagggcatagtgttaagctgcctgcctggagacagatggaggagtggtgcccaggccacaacattgtgcctggatccatgctggctgctattccctgaatttccttgaatttccctgacctagatacaacctcatgataagagtttgctgagccttccaggaaaactgtgcccacctacatraacctcagctgcaaggatctgtggctggactcaatggtccatagtctaccctaccacacaggtgatattggtgaaggatctaccccttcagacactccctactgtgaccatgtcttacaaagtataaatcacc

SEQ ID NO: 632607 - DNA, 565 bp, Homo sapiens
agcatctctctctacatcactgttttcatacagtttgactttcaccagagaagtttcctgctttccagaacactggtgtgaataacctctcagtgcatccacattcctacgccagctctccatttccccttccacactcaggctctccaaaccctagtctagttccaaacyaagccaggcctgaaagaaggaagtggttgagttgcttctgttcaccctcctgtcccttctgaccccatcccccatctggtagggcatagtgttaagctgcctgcctggagacagatggaggagtggtgcccaggccacaacattgtgcctggatccatgctggctgctattccctgaatttccttgaatttccctgacctagatacaacctcatgataagagtttgctgagccttccaggaaaactgtgcccacctacataaacctcagctgcaaggatctgtggctggactcaatggtccatagtctaccctaccacacaggtgatattggtgaaggatctaccccttcagacactccctactgtgaccatgtcttacaaagtataaatcacc

SEQ ID NO: 632608 - DNA, 540 bp, Homo sapiens
aggatggttgcgatttacaacggggaagggaaaatgggrgctactactggagaaggtctgccaaggatttctgtagacagaggagctagtttcagggatatgaatgggcccattttgatgcaagatcaatgtaggcaagcaccataaaatcagggtagacacatggggcggggccatgtgctttgatgtttctccagtgagaagttagtggccaagttcaaatgttcagcagcagagattcatgacagcagctgtgcttctgcaaggctctctggcataccttacagtcatacagtcccaggctttcagaaccacccaaagtgaatgcagagaataagagatagtaaatcatctttaccaactgagataggaactaattctccttctctttgctggttcctctccctattccatactaatttacatagtttagtctttgtacctgtattctttaggtacttctagaggcagacagagagcaggaggtaaagacccctgagagtcttagaacaagaaaacgttcatagcccaacagcattt

SEQ ID NO: 632609 - DNA, 572 bp, Homo sapiens
ccatttacatgaaatgcccaaaataggcaactccatagagacagaaagtaaattcatgcttgccagggactgggagagataaaatggggagtgactgctaatggatatggagtttctttttggagtcatgaaaattttctacaattagatagtgatgatgattgcacaactctgtgaatatactaaaaascactgaattgtacattttaaataggtaattttatggtatgtaaattatatcttaataaagctcttattttttaaaaatagatatggagtccttgttacatgaagatcctttggaagtcatgagcatctaagtcggtgagctaaacattaggatattaaccagaagaacaagcaagtgactcaggctactgtgaagaataaattacatattatatgttaagcactgagtactgtgcctgagccactgaagaccctcagcaaatgggtgttaccagcagcagcatcattgatgtttattaggtgcctcctgtgtgccaggcactgtgctctgctcttcgtgtgcatggtctcatttaagaggtctcatttaaccatacctactc

SEQ ID NO: 632610 - DNA, 573 bp, Homo sapiens
tttgtttcttccttagtacttgaaactccattggtaattaccattatggggttgcatttcgcatctgtaagtcttaggatgaaaactagagctccctcacatgttttctatttacacatttttcttttctcagaaaactgggccacatgcattcacaagaggtgggcagcaggatgacagactccacaccgagcagatgagacatattcctatagtcccatkacctccaacagggtttccctttatctgcagactcagtaatctccttttctgtccctctctgaaagaatgaaaagaacccaaccaaacaatctctgtggtagttcaaccctggctatcataaatcaaatagggtgaaggataaaactgtgtacctgagccaatgggtttctttggaaacctgctaagatggagctgttacatactcgccatctaactgatgcttttcaaactttaatgtgcttatgagtcacctggggatcttggtaaaatgcagattcttagccccagtctggggagcccaggaatagggatttctaatgagctcccagatgatgctcaagcgatggctgg

SEQ ID NO: 632611 - DNA, 467 bp, Homo sapiens
caaacaatggggattaaagagggggtaaaaattaaatgaaaaaatagcccacaaatgaatggaaatatacatgctctccaaaataacattgtggaagtaaacaaaaacagacagagaattatgcttaatgagaattggacatgtggcttagccctctgaggcctgaaacaagtaaacacttcccgaattgtcagtccatacatccctctctcaaaagagagctcttagaactggctccctctcctcctgtttacgaagcttacttggtctttggaacaattgcacrtataattttaacaactaaatgaactctacaggagatgggttttgagtacttaaaaaattcctatagtttgtatcaatcagatacgggagatagttttgcaaaatactgtttgtgtaaagagaagggaagaacatgcgctctagtctaaccaatcaacaaagtgtgaaaacacgatttagac

SEQ ID NO: 632612 - DNA, 596 bp, Homo sapiens
aagtcaatctaattgctggcaatgggagtaccattcctcctcaaatattcctcctcaaatgcatagtgaagttaaagtgaattaaatgtttgtgagatgcttgttaagtcataaattaagatgtgaatgtaattgcaatctaaatgaggttgaggttggcaaaagaggactgcaagtacgtaggaagctggagacgttcctggacttcaggagatgggcaggagggaagatggggaaggacagcggtggatttgtttgacggcagacaaggaggtgtataacaaaggctagatcgtggcatcttaattgcatcatctactggagactttatcagcaaggtaaacatttcaccactactcattgccccrgctaacaagtgtgttcctgggctgcttctcctagacatccaagggtcacactcagagaatgtttggagcatttaattatcagggtattttagggacttaagaaatgcgcgtcttgcatgtgtatgtgtgtgtaggtgtatgaaaatatgtgtatacccatactttgctataaaaagaagtgctgtgggcgtaaggttttagcaatatctgttattctagatacccatg

SEQ ID NO: 632613 - DNA, 596 bp, Homo sapiens
aagtcaatctaattgctggcaatgggagtaccattcctcctcaaatattcctcctcaaatgcatagtgaagttaaagtgaattaaatgtttgtgagatgcttgttaagtcataaattaagatgtgaatgtaattgcaatctaaatgaggttgaggttggcaaaagaggactgcaagtacgtaggaagctggagacgttcctggacttcaggagatgggcaggagggaagatggggaaggacagcggtggatttgtttgacggcagacaaggaggtgtataacaaaggctagatcgtggcatcttaattgcatcatctactggagactttatcagcaaggtaaacatttcaccactactcaytgccccggctaacaagtgtgttcctgggctgcttctcctagacatccaagggtcacactcagagaatgtttggagcatttaattatcagggtattttagggacttaagaaatgcgcgtcttgcatgtgtatgtgtgtgtaggtgtatgaaaatatgtgtatacccatactttgctataaaaagaagtgctgtgggcgtaaggttttagcaatatctgttattctagatacccatg

SEQ ID NO: 632614 - DNA, 593 bp, Homo sapiens
ggcagcaaaaacatgggtatctagaataacagatattgctaaaaccttacgcccacagcacttctttttatagcaaagtatgggtatacacatattttcatacacctacacacacatacacatgcaagacgcgcatttcttaagtccctaaaataccctgataattaaatgctccaaacattctctgagtgtgacccttggatgtctaggagaagcagcccaggaacacacttgttagccggggcaatgagtagtggtgaaatgtttaccttgctgataaagtctccagtagatgatgcaattaagatgccacgatctagcctttgttatacacctccttgtctgccgtcaaacaaatccaccgctgtccttccccatcttccctcctgcccatctcctgaagtccaggaacgtctccagcttcctacgtacttgcagtcctcttttgccaacctcaacctcatttagatkgcaattacattcacatcttaatttatgacttaacaagcatctcacaaacatttaattcactttaacttcactatgcatttgaggaggaatatttgaggaggaatggtactcccattgccagc

SEQ ID NO: 632615 - DNA, 573 bp, Homo sapiens
tttgtttcttccttagtacttgaaactccattggtaattaccattatggggttgcatttcgcatctgtaagtcttaggatgaaaactagagctccctyacatgttttctatttacacatttttcttttctcagaaaactgggccacatgcattcacaagaggtgggcagcaggatgacagactccacaccgagcagatgagacatattcctatagtcccatgacctccaacagggtttccctttatctgcagactcagtaatctccttttctgtccctctctgaaagaatgaaaagaacccaaccaaacaatctctgtggtagttcaaccctggctatcataaatcaaatagggtgaaggataaaactgtgtacctgagccaatgggtttctttggaaacctgctaagatggagctgttacatactcgccatctaactgatgcttttcaaactttaatgtgcttatgagtcacctggggatcttggtaaaatgcagattcttagccccagtctggggagcccaggaatagggatttctaatgagctcccagatgatgctcaagcgatggctgg

SEQ ID NO: 632616 - DNA, 582 bp, Homo sapiens
tcattctttttatggttgaatagtattaatatattatatatatatcttacattttctttatccaatcatccattgatggacacttaggttgattttatgcctttgctaatgtgaatagtgctgcaataaacatatgagtgcaggttatctttttgttataatgatttcttttttggggggtagacacccagtagtgggattgctkaatcaaagagtagttccatttttagttcttttagatactgtttcccatagaggttgtactaatttacattcccaccagtggcatataagtgtttccttttctctgcattctctccaacatcctctcctacatttttgtctttttaataatagacagtctgatgtaagttggtatctcattgtggttttaatttgcatttctctgatgattagtgatgatgagcatttttatatgcttgttggccatttgtttgtcttcttttgaaaaatgtctattcaagtccttagcccactttgtaatgagattatttgggttctttgtagttgttgaacttttttagttccttgtaaattctgaatattagtcacctgttggat

SEQ ID NO: 632617 - DNA, 501 bp, Homo sapiens
gtacatatgtacacattatttaagctctcacttataagtgagaacatgcagtatttgtccctgtttctgagttgtttaacttaagacaatggcatctakttccatctatgctacaaaaaacatgatttcattctttttatggttgaatagtattaatatattatatatatatcttacattttctttatccaatcatccattgatggacacttaggttgattttatgcctttgctaatgtgaatagtgctgcaataaacatatgagtgcaggttatctttttgttataatgatttcttttttggggggtagacacccagtagtgggattgctgaatcaaagagtagttccatttttagttcttttagatactgtttcccatagaggttgtactaatttacattcccaccagtggcatataagtgtttccttttctctgcattctctccaacatcctctcctacatttttgtctttttaataatagacagtctgatgtaagtt

SEQ ID NO: 632618 - DNA, 572 bp, Homo sapiens
agcaattgcggcatgtgaggacgtcaaagataaaggctttcttgggacacagtgaccgccaaatcaagttcatggaaacctcaacttcaaaaatacatttaatttactttattctactgccaaagaaatgcaagtactccaggtataattatctttgtctactcrgttcgcttgagagaagaaagacgggtgggagaaggaaatagcatttcctgatgccagtgacatgccaggcactctgctaggttcactcactccccacaatcatcctaatgaggactgtgatccctttaatatgaggaggggccttaggtttagtggtgttgagggaccaagtctatctgatataacgtccatgatcattccccttctaacacaccctttctttgaaaacacaatattccccacgtggagtgctatagcaccatgccagacagcccagtttcttgaatcatgtttccttctccctccagccttttccttggagtaaaagctttatgaagaggtctacatattagtgaggggatactcaccattgatgcaagtaagcagtatggcacaagggttcagtt

SEQ ID NO: 632619 - DNA, 599 bp, Homo sapiens
tatataaaatactgaaacgcacagccataaattatgctggcattatgtgtatttctatttcttatgtttccaactaaggctgttgatgctagaatgttaaaaaacgttcttcatttcaaaataaattcgtatctcattgaggtcctgtgattgttttttgcttcaagcatttgcaaaacaattcaaaagagccatcaatataggcactttacagacaacagcatcaattattatgttggaaaatattttaatattatcacattccaagtgaggaaaaatctttacttatcctgcatgattccaaataatgaataatgacctttaaaattcatttaataaacagttgtcttaataataacttgtgtgacaatgtttttttagttttagattcttacatctttttaaatatatttctaagaacaggtcatccaaaatttgagatatttcacatgaagamcatgtatggaggctgacctgtatgccagttcagatccgtagagccaggtgtgcactgcattttaaaactgggatagtttggttggaagagtatctgcgccactctggcttctttggttgatgcaagttcatggaggtgacca

SEQ ID NO: 632620 - DNA, 604 bp, Homo sapiens
ctggtcacctccatgaacttgcatcaaccaaagaagccagagtggcgcagatactcttccaaccaaactatcccagttttaaaatgcagtgcacacctggctctacggatctgaactggcatacaggtcagcctccatacatgttcttcatgtgaaatatctcaaattttggatgacctgttcttagaaatatatttaaaaagatgtaagaatctaaaactaaaaaaacattgtcacacaagttattattaagacaactgtttattaaatgaattttaaaggtcattattcattatttggaatcatgcaggataagtaaagwtttttcctcacttggaatgtgataatattaaaatattttccaacataataattgatgctgttgtctgtaaagtgcctatattgatggctcttttgaattgttttgcaaatgcttgaagcaaaaaacaatcacaggacctcaatgagatacgaatttattttgaaatgaagaacgttttttaacattctagcatcaacagccttagttggaaacataagaaatagaaatacacataatgccagcataatttatggctgtgcgtttcagtattttatatagaac

SEQ ID NO: 632621 - DNA, 436 bp, Homo sapiens
aacataataattgatgctgttgtctgtaaagtgcctatattsatggctcttttgaattgttttgcaaatgcttgaagcaaaaaacaatcacaggacctcaatgagatacgaatttattttgaaatgaagaacgttttttaacattctagcatcaacagccttagttggaaacataagaaatagaaatacacataatgccagcataatttatggctgtgcgtttcagtattttatatagaacattaatcaataccttaaataacattttgttcttcagttatttgatttcatagaaaagtaacgggccttttcattatttccgtgagcgaatatgaaccccaaacattttttcccagtgaattattgctgaggaaaataggagaaatagctaatggcaatagcaactggttaagattgtataatccattcattcatt

SEQ ID NO: 632622 - DNA, 406 bp, Homo sapiens
acatttgtctatatttgtttctgttgtatttgcttttgaggtcttagccataaattctttccccaggacmatgtctggaagagtttttcctaggttttcttctaggatttttatagtttcaggtcttacatttaaatctttggtccatattgtgtcattttttgtatataatgagagatatggggcccagtttcattcttcatagctatttagttttcccagtaccatttatgtcctttctctattacctgtttttgttgactttgccaaagataaagttggttgcaggtatgtggctttatttctgggtactctattctgttccatttgatctacatgacttttttttttattccagcaccatgctgttttgtttgttacagctatagctttgtagtatagtttg

SEQ ID NO: 632623 - DNA, 563 bp, Homo sapiens
ttatactggactcttgaccaaatggacctaataaacatctacagaacataccacccagcaactgaagaatatttttctcatctgcatataaaacattctgtaaaattgaccatatccttaaccgtaaagcaagtctcaataaattcaaaataatgaaatcctatcaagtatcttctcatatcacaatggattaaaatcaaatatcattaccaaaaggaattctcaaaaccacacaagtacatgggaactaaacaacttgctcctgaaagacttttcagtacacaatgaaattaagacagaaatcaaaaatatttttgaaacaaatgaaaatagagacacaacatacaaaaacctctggaacagagaaaaaacagtattaagagggaagtttatagcatttcatgccttcatcaaaaagaaagatctcaaattagcaacctaacatcacacatcaagaaactataaaaataagaataaacccaaagctagcagaagaaaagaaataacaaagattggaacagaactcaatgacaytgagaccaaaaaaaactatacaaaggatc

SEQ ID NO: 632624 - DNA, 563 bp, Homo sapiens
ttatactggactcttgaccaaatggacctaataaacatctacagaacataccacccagcaactgaagaatatttttctcatctgcatataaaacattctgtaaaattgaccatatccttaacygtaaagcaagtctcaataaattcaaaataatgaaatcctatcaagtatcttctcatatcacaatggattaaaatcaaatatcattaccaaaaggaattctcaaaaccacacaagtacatgggaactaaacaacttgctcctgaaagacttttcagtacacaatgaaattaagacagaaatcaaaaatatttttgaaacaaatgaaaatagagacacaacatacaaaaacctctggaacagagaaaaaacagtattaagagggaagtttatagcatttcatgccttcatcaaaaagaaagatctcaaattagcaacctaacatcacacatcaagaaactataaaaataagaataaacccaaagctagcagaagaaaagaaataacaaagattggaacagaactcaatgacattgagaccaaaaaaaactatacaaaggatc

SEQ ID NO: 632625 - DNA, 425 bp, Homo sapiens
cctgcagaagatagtgtgtcaatatgcatcagtcttgtgtgttatagacccaatacatcactccaacaagcagtatttgaaaaaaccactgcataaaagctttccataaccaaggaacccatacagagacttggtcccctgaaagcacccagaaatgaaaccaaatggtcatacacaatatacaacacagtcataccttctagggaaaataaatttttaaaaagtcttagccaaacaayagcaaattcaaaagttagaagcgacagtttctttagttgagaaggaatcacctcaagaaatctagcagtacaaaaaaacagttctgacacaaaggatcaaactagcattctagcgatggatccttaccaacatgaaaattctgaaatgacagagaactcaacatatggactgtaaggaagacctca

SEQ ID NO: 632626 - DNA, 370 bp, Homo sapiens
ccaccatgcaagttgtgcagaagcaaagcattcaccagaagcttctaggtcagcgtcaggaaacaggcagggaggtattcaagtggcataaccgtgctgtgggaagaggyccactagggcagcctgacaggtggtccctctgccgcggaaaagggcagcacctggactatttttattcccacacgtcttgtacaaactattgctttcaccagcagaaaatcatgaagaagccaaacactgcagaactgtaaatagtgggaaactcctggtcgtggaaaccacggttggctttctcaggcacaggagttttctaactgtgcacagaagccagccttgagcaccccgcccctcgttccccaccaccccaatg

SEQ ID NO: 632627 - DNA, 611 bp, Homo sapiens
aaaccctgtctctacaaaagatacacaaattagctggacatggtggcactcgcctgcagtcccagctactctggaggctaaggtgggaggattgcttgagcctaggagttcaaggctgcagtgagctatgaacttgccactgcactccagcctgggtgacagagtgagaacctgtctcaaaaagaaaaaaaaaaaarggaaaaaaattttaaaaaaatatttaaaagtaatcaccgaaaaaatagaactcgcttgaaagacaagaccaaaaacgaagaggacgtttccctagatggtgaaaacaagtggggcggaatcactgcagcgtcctgcacagaactctggaattgccactttgcagttgctgccttctagtgtgtattgttgaaagacagttttattgaggcataattggcatacaataagctgcatataaaaatgtgtacgtgatgacttttgacatacgtgtacacccgtgaagctatttccacaatcaagataatcaccatccccttcactctggaaagtttcccatgcccttggtaagcccaccctcctgcttcttgcctcccatccccaagtaacaactgtgctgctttctgtcactacag

SEQ ID NO: 632628 - DNA, 440 bp, Homo sapiens
agctggcattataggcgagagccagcacatctggctaatttttgtatttttagtagagacagggtttcaccgtattggccaggctggtctcaaactcctgaccttatgtgatccactctcctcggcctctcaaattgctgagattacagatgtgagccaccgtacccggccattatttattttttactggtctattcttctagaacacccatttgagataagaacagggcactgaytggatttgtggttaacttcttttctaaggagaagaaatgtttatttaaaaaaaattttttttaaatagagacagtgtctcactgtgttgcccaggctggagtacagtgatgccatcatagctcactgcagcctcaaactcccaggctcaagtgaaccttccacctcagcctctcaagtagctgggactacccacagacacccat

SEQ ID NO: 632629 - DNA, 591 bp, Homo sapiens
agatgacggccagtaactgggtttcagagcaggtggsgcagggcttctggacctggggcagggagttttggagtgctcactcttctttcttccttcccctcctttttctctctttccccagggccccccagccatccagggggaggggggagtggggccttgctgggtggagtttgggagggtgacctcagctccccaggcgccgtcctgactcccaggccaaagctaacatgggctgagcacagcccatcagggcgccctcattcccaagaactcggttttggcatcacagcctccccagctgtgtgaattctagtttcagcttgtggcgggctgaagacaaatgatttgacaaggggagaagctgggccccctttttgctgagcgaggaacctcagtccttgagtcatcgccttttcagtactgacctgcgtcccagagctggccataaaaggctgtgggctgcgggccccaggcaggcgctgcaggcttagctagtgtggcctcatcccccgggggcagaggcggctctccctgcccctgtttccctcatgttgcccttggcctctctttctggttttctgccgagac

SEQ ID NO: 632630 - DNA, 527 bp, Homo sapiens
aatcccagcgtgccttctttctttcaaatgactgtgtaacccctccagcaaggatgctgaactaggctgagatggctraaatgacagaaatagaattcagaatacggataggaacaaagatcattgagatgcaggagtacattgaaacccaatccaaggaagctaagaatcacaacacaacaatacaagagctgactggcaaaatagccaatacgaaaaagaacgtaactgcctgatagtgctgaaaaacacaatataagaatattataatgcaatcacaagtattaatagcagaatataccaaactgagaatagaatcccagagcttgaagaccagctttctgaaataagacagtcagacaagaatagagaaaaaagaataaaaaggaatgaacaaaacctccaagaaatatagaattatgaaaagggaccaaatctatgacttgtttgtgtcctggaaactgttggggagagtgtaagcaacttggaaaatatatttcaggatatcatgcaagggaacttcccca

SEQ ID NO: 632631 - DNA, 527 bp, Homo sapiens
aatcccagcgtgccttctttctttcaaatgactgtgtaacccctccagcaaggatgctgaactaggctgagatggctaaaatgacagaaatagaattcagaatacggataggaacaaagatcattgagatgcaggagtacattgaaacccaatccaaggaagctaagaatcacaacacaacaatacaagagctgactggcaaaatagccaatacgaaaaagaacgtaactgcctgatagtgctgaaaaacacaatataagaatattataatgcaatcacaagtattaatagcagaatataccaaactgagaatagaatccsagagcttgaagaccagctttctgaaataagacagtcagacaagaatagagaaaaaagaataaaaaggaatgaacaaaacctccaagaaatatagaattatgaaaagggaccaaatctatgacttgtttgtgtcctggaaactgttggggagagtgtaagcaacttggaaaatatatttcaggatatcatgcaagggaacttcccca

SEQ ID NO: 632632 - DNA, 635 bp, Homo sapiens
gtggcctcacacctgtaatcccagcactttgggaggccaaggcaggcagatcaccagaggtcaggagtttgagaccaacctggccaacatgatgagaccccgtctctactcaaaatacaaaaattagctgggcatagtggctcacacctgtaataccaactacttgggaggctgaggcaygagaattgcttgaacctgggagatggaggttgcagtgagctgagatagtgccactgcactccagcctgagtgacagagtaagactctgtctcaaaaaaccacccaacacaggagcacctagattcatatagcaaaagttcttagagaccttcaaagagacctagactcccacacaagtatagtaggagacttcaataccacactaacagtattagacagatgatcaaggcagcaaattaatgatattcaggacccaaactcagtactggagtaaatggtcctgatagactctactcagaaacagcagaatatacattcttctcatcgccacatggcacatactctaaaattggtcacataatcggaaggaaaattctcctcagctaatgcaaaggaactgaaatcataaccaccactctttcagaccacatggcaataaaattagatatcaagac

SEQ ID NO: 632633 - DNA, 598 bp, Homo sapiens
ctgaatatttttcattgtatggatgtaccacagttttgttcatccattcacctattgaaagacatcttggttgcttacaagttttggcaattgtgaataaagctgctataaacattcatgtgcaggtttttctatggacataagttttcaactcatttaggtaaatrtgaggaggtttcctttaaatactgaggcttcctgttaatactgagcatctctacctcaggaagatgtatatgtttttatgcaacatattttatcttgtgtattcttaattacagcttctcattcggctctattatctactcagttctctttattttcaatgattttatccctacaaactctttttcctcaacttgtaaccaagttcatgcctttcctcctttgagttggcatgttccattagctactattttaaattttatctttttgttcccatttcccagtaactctacaaagcactgtattcaggctcttgcttgtgtcagtccagtgaaattgttcttactgaagttattgataccctcctaattgccaaaatacctttagttcttatattaaccaggtattgtcatgtactttactaccattgacc

SEQ ID NO: 632634 - DNA, 579 bp, Homo sapiens
agtttgatacatggagagctgcaccagcagagaggggcagggttggtaaggaggtgttttatgaaatccagcttgaaacatgtttcgtttagaggccatgaagtaaaggagggcgacatcccagtgtgtgacagtgtgggtttatttgatggattgggggaaaggtgtttagctgagcaagattataaacaggttttgggaatggattggctgagtaggtgagatgcaggtttattttggrccaggtttatgtggttaggttaacaggaagggctgtgatttgctggatttatgtggacaaataaatttaacagttggaagaaagagggaagtgtaactgattaaaaggtaatgtgtgaggttgacaaaggggccccaactgccaaaggttgggggtggggacttagagtatccaacagacaaagaagacaaaaagaaaaaataaaaacaaaaacggagatttgagtaggagtgatatcctggaaggtgtcctgcagccatagctcctggattaatgtgaggaactggagtggtctatccagggacacgggagggaatactgggaaagatttgaaacaa

SEQ ID NO: 632635 - DNA, 618 bp, Homo sapiens
gcagagggtagaatgattgtccacaggggctagggcagtgtctgggattgagaagatcaaaattttagttagacaaagggaataagttcaagagatctattgtacagcatggcaactatagttaataataatgtattgtgtgattgaaaattgccaaaagagtatatttggtgttctcaccacaaaaaataatgataagtatgtgaggtaatacatattaattagcttgatttagccttccacaatgtatacaggttttaaaacatcatgttgtgcacagtaaatgtgtacaatctttgttaattaaaaaataaataaataacatttttaaaattaaaaactacaaacatagggaagaaatctctctccaaaggaaacarctatgcagagaagcaactctgcctgcaatataaagacaaatttttgcattatcccaaagagttatttaaaccttaaccgagtttatttgccatttttcaaacttttttctcattacgttttgttctacatttgcatacacaagtgactttctgataagaaagaacattccacagcaaatatgcatccatatcagagcctcttgcaggagacagatgatttgcagctttgacatgacag

SEQ ID NO: 632636 - DNA, 566 bp, Homo sapiens
cacctacaatcaaagttaaagtgccctgtgcatccaacaccatagatacatctttaggaaaaagttttccctatgcatgcaaatttaaaaaaactggaagaagcagctattacaccagatatacagatatcaatgtaaagacacaagaaccatgaaaaaatagraaacatgacacttccaaaggaacacaataattccccagaaacagaatccaatcaagaggaaatttatgagatcctaaaaaaggaatttaaaataatgatattaaagaggctgagtgagaagcaggagaaaaccaaagcaatacaaggaaatcagaaaaacaattcaggatatgaatgaggaatatatcaaagagacaaacataataaaagagaacaaacaggaattctggaactgaagaatgtactaagtgaaataaaaaatacattaaaaaaacttcaacaatagatcaagcagaagaaagaattttagaacttgaagacaggtcttttgaaataacccagtcagacaaaaatatagaaaaagaataaaaagcaatgaacaaattttgtgtgacatatggg

SEQ ID NO: 632637 - DNA, 570 bp, Homo sapiens
tgaatatttaggtcagtatatttggactagtcctctgaatggaaataaaggtattttctgtgacacactatatcaaagtactttacttaatcagcagcttctaccatctgaaacataaaagagaactagaaaataagcatccaaaagtcctgactagagtgttttatgggccagatctcaagcactttatgcttaaaaattgggaaggtctctaatgacccatactaaatctgtatttgtttttacttcacctactgttttaactatgccttttattttctgtacttttcaactttgacatctgcggccttgctggccctaaagggagtgcttctcccagggttagccaattcctagagagaataaatcacttgccttcttcagcatgcttttcaaataccaaccaattaattcagagtccacaacctcaatcacctactttactgagctctcacactccaggtcactatccacctaccctatcaccccagggccagctacatgacaactaggrttggcccctctgtcctggagtctgctgaaattgttcaaattagacaaaatgaagct

SEQ ID NO: 632638 - DNA, 569 bp, Homo sapiens
gtggctgggattaggatctgagagtagttcccagctgacagccaggagacaaattgggacctcagtcgtacaaccacaaacaactgaattcttccaacaacctgaataaacttggaagtggaggttcccgagaacctctagaaagtaacacagcacagccaacactctgatttcaacctgtgagaaccagaacaaagaacacaacmatgccatgcctggaatttgtatacagaagtaaactaaaaaatgagtattgttttaagctactgagtctatggcaatttattagaaatcaatagaaaatgaatacaattgctaaaagcacattttggaaaataaatcactagtagaactatatacttaataagatgattgatatttctaaaggaagctttcctttacctggacactttccttcatttgtgtcatacatcagaagattatattttatatattggagtttcttaaagcaagctatatttttcttacttatgttgctactatatggtaagcctaagacctaatttttgctgcaacatttagccaaaatcaactagcaacaaaaaaag

SEQ ID NO: 632639 - DNA, 424 bp, Homo sapiens
tttgtgcacatgtgggcaattatataagctctaccrcttttaaatttttaacagatgctatattttagactagatttaaattttaggaaaagttgtaaagatattacagagcccctatatactgcatcaaccagttttctcttttgttaacatctcacatttcgggatacatttgtcacagctagggaatcaacattggtatattataattagttaaatttcacagtttatcaggttttgctatttttaaccgagtgttccttcttggttctaggatcccatccaggataccatcttaaatgtagttatcatgcctccttagcctcttctgatccatgacaatttctcagactttccttgttttttttttttatgaccttgacatttttgaggagggctggtcaagtatttcgtaaaaggttcc

SEQ ID NO: 632640 - DNA, 441 bp, Homo sapiens
gaattccaaataatttatgtaactcctcccttctcaatttggggcagcaaaactacctacccgttccttacaggtggactgaatatagtgacttccttccaaagagtataatgcacaagtgggaaaagagtttgttgacagtggagaaatctgagaaacactacctctgtcaggtgatcaaggtcaacatcagtagtgaaaagctatgtttacaytatgtacccttgatatgatgtgatgagaatggcactttacctctgtgttctttcttccaaaaactcacaaccccttgtctaagcatcagagaaggtcagttctgaagaacattctacaaaatatctgaccaggattcctcaaaactgtcaaggtcaccaaaaacaaggaaagtctaataaactcttccagccaagaagaacctaaagaaacatgatgactaaatgt

SEQ ID NO: 632641 - DNA, 442 bp, Homo sapiens
gaattccaaataatttatgtaactcctcccttctcaatttggggcagcaaaactacctacccgttccttacaggtggactgaatatagtgacttccttccaaagagtataatgcacaagtgggaaaagagtttgttgacagtggagaaatctgagaaacactacctctgtcaggtgatcaaggtcaacatcagtagtgaaaagctatgtttacactatgtacccttgatatgatgtgatgagaatgkcactttacctctgtgttctttcttccaaaaactcacaaccccttgtctaagcatcagagaaggtcagttctgaagaacattctacaaaatatctgaccaggattcctcaaaactgtcaaggtcaccaaaaacaaggaaagtctaataaactcttccagccaagaagaacctaaagaaacatgatgactaaatgta

SEQ ID NO: 632642 - DNA, 597 bp, Homo sapiens
taccatcaagtgagaccgtggacctaatagtcctatataaattgctaagtctgatctcagatgacttggggtcttgattctgttgcttcctacaaacaaaatccatttctcttttctttctgaaatgcatttacattatttaggtgactattagctaagaaggcaagtgtgtcaagttccagtagccacaagatatcagaattctcaaatgctgctgaaaaggagttaccgtaagaggttgtatcatcttctcttctagaacagaataaatcagcatttcttaaaatgctggcttactttcaggtgcctactttcctcaaatgactggtaaaaaaaaattccatggctaagaggagaaaagtgcatactaacactgctttcctcttgaagactcacatgcacttcatctggggcrtcctagagtgaaacaatctttgtagggttggagcttcccaaaacatttgatcatgagaactctttctttaaccacctatgaatttagccgaatgaagacaatcttctgggaatacttttagagaaatggttatgtaaataaccaacagcaaagacttaaggaaatggtactaggtggaatgg

SEQ ID NO: 632643 - DNA, 472 bp, Homo sapiens
aaagtgcatactaacactgctttcctcttgaagactcacatgcacttcatctggggcgtcctagagtgaaacaatctttgtagggttggagcttcccaaaacatttgatcatgagaactctttctttaaccacctatgaatttagccgaatgaagacaatcttctgggaatacttttagagaaatggttatgtaaataaccaacagcaaagacttaaggaaatggtactaggtggaatggtcctttagtgctgaatgaagtaagtctactgtaacagaatccaggctgtagacatcaactcataagcaaactgttttttttttttgggaacgggatcttgccctgtcactcaggctgcagtgccaatggcatgatcagggcttactaccagtctttaactcckgggctcaagcgatccttccatttcagccccctgagtagctgggactacgggtgcttgtcaccagacttg

SEQ ID NO: 632644 - DNA, 472 bp, Homo sapiens
aaagtgcatactaacactgctttcctcttgaagactcacatgcacttcatctggggcgtcctagagtgaaacaatctttgtagggttggagcttcccaaaacatttgatcatgagaactctttctttaaccacctatgaatttagccgaatgaagacaatcttctgggaatacttttagagaaatggttatgtaaataaccaacagcaaagacttaaggaaatggtactaggtggaatggtcctttagtgctgaatgaagtaagtctactgtaacagaatccaggctgtagacatcaactcataagcaaactgttttttttttttgggaacgggatcttgccctgtcactcaggctgcagtgccaatggcatgatcagggcttactaccagtctttaactccggggctcaagcgatccttccatttcagccccctgagtagctgggactacrggtgcttgtcaccagacttg

SEQ ID NO: 632645 - DNA, 606 bp, Homo sapiens
tcatttctggagaattccctgcctaatttggttcagtaaagccccaagaggataacttagctttcaacttgaccatccccagtagggttaawgtttgaacacaaacaggaattgcttaaagacaagatagtctaaactggtttaattgttactggacatatatatatatatatttgagacagagtatcgctctgttgcccaggctggagtgcagtggtgcgatctcagctcactgcaacctccacctcccgggttcaagcaattctcctgtctcagcctcccaagtagctgggactacaggcacacaccaccacgtccagctaacttttgtatttttaatagacacggggtttcaccatattggtcaggctggtctcgaactcctgacctcaggtgatccacccacctcggcctcccaaagtgctgggattaaaggcatgagccactgtgcccaggctagacttagctagctctattttaatcattgcttaagtttttattctccacatttaagataagtttggcaagatagccagctttaattcatcaaggcagaggctaattttgtgcacctagacaaattctcagaatcttcaaatttcagcc

SEQ ID NO: 632646 - DNA, 606 bp, Homo sapiens
tcatttctggagaattccctgcctaatttggttcagtaaagccccaagaggataacttagctttcaacttgaccatccccagtagggttaatgtttgaacacaaacaggaattgcttaaagacaagatagtctaaactggtttaattgttactggacatatatatatatatatttgagacagagtatcgctctgttgcccaggctggagtgcagtggtgcgatctcagctcactgcaacctccacctcccgggttcaagcaattctcctgtctcagcctcccaagtagctgggactacaggcacacaccaccacgyccagctaacttttgtatttttaatagacacggggtttcaccatattggtcaggctggtctcgaactcctgacctcaggtgatccacccacctcggcctcccaaagtgctgggattaaaggcatgagccactgtgcccaggctagacttagctagctctattttaatcattgcttaagtttttattctccacatttaagataagtttggcaagatagccagctttaattcatcaaggcagaggctaattttgtgcacctagacaaattctcagaatcttcaaatttcagcc

SEQ ID NO: 632647 - DNA, 606 bp, Homo sapiens
tcatttctggagaattccctgcctaatttggttcagtaaagccccaagaggataacttagctttcaacttgaccatccccagtagggttaatgtttgaacacaaacaggaattgcttaaagacaagatagtctaaactggtttaattgttactggacatatatatatatatatttgagacagagtatcgctctgttgcccaggctggagtgcagtggtgcgatctcagctcactgcaacctccacctcccgggttcaagcaattctcctgtctcagcctcccaagtagctgggactacaggcacacaccaccacgtccagctaacttttgtatttttaatagasacggggtttcaccatattggtcaggctggtctcgaactcctgacctcaggtgatccacccacctcggcctcccaaagtgctgggattaaaggcatgagccactgtgcccaggctagacttagctagctctattttaatcattgcttaagtttttattctccacatttaagataagtttggcaagatagccagctttaattcatcaaggcagaggctaattttgtgcacctagacaaattctcagaatcttcaaatttcagcc

SEQ ID NO: 632648 - DNA, 606 bp, Homo sapiens
tcatttctggagaattccctgcctaatttggttcagtaaagccccaagaggataacttagctttcaacttgaccatccccagtagggttaatgtttgaacacaaacaggaattgcttaaagacaagatagtctaaactggtttaattgttactggacatatatatatatatatttgagacagagtatcgctctgttgcccaggctggagtgcagtggtgcgatctcagctcactgcaacctccacctcccgggttcaagcaattctcctgtctcagcctcccaagtagctgggactacaggcacacaccaccacgtccagctaacttttgtatttttaatagacacggggtttcaccatattggtcaggctggtctcgaactcctgacctcaggtgatccacccacctcggcctcccaaagtgctgggattaaaggcrtgagccactgtgcccaggctagacttagctagctctattttaatcattgcttaagtttttattctccacatttaagataagtttggcaagatagccagctttaattcatcaaggcagaggctaattttgtgcacctagacaaattctcagaatcttcaaatttcagcc

SEQ ID NO: 632649 - DNA, 571 bp, Homo sapiens
gaatggagaacccagaaataaacccaaatacttacagccaactgctgtttgacaaagcaaacaaaaacacaaagtggggaaaggacaccctattcaacaaatagttctgggataattggcaagccacatgtggaggaatgaaactggatcctcctctgtcaccttatacaaaaatcaactcaagatggtttaaggactttaagacctgaaaccataaagcttctggaagatagcatgagaaaaacacacttctagacattggcttgggcaaagactttatgaccaagaacccaaaagcaaatgcaacaaaaacaaagataaagagatggggcttaattaaaataaaaagcttctgcacacaaaagaaataatcagcagaggccaggcgcagtgtctcatgcctgtaatcctagcactttgggaagccaaagtgggcaaatcacttgaggtcaggagttcaagaccagcctggccaacatggccaagattgacccaccacactccrgccttggtgacagagcgagatttcatctgaaaaaaaaaaaaaagatataatcggcagagttaacag

SEQ ID NO: 632650 - DNA, 594 bp, Homo sapiens
agcagcccattctgctgctctgcctatggagttgccattcttttattcctttactttcttaacaaacttgctttcagtttattctatggacttgccctgaattatttcttgcacaagatccaagaaccctctcttgggttctgggtcgggacccctttcyggtaacagtaggacccaatccagggattcatcattggaatctaatgaaaggtggagaaattactgctgatcagcatttcataggccaagacagccattaaggggtttggatcacaatctcgaacaccatacataatcctaaaagttgaaatcctgaaagatcaatatttctaaactaaaaatcccttatatttaaattcctcaaaatcacaatcatgtgacagttgcctcacattaggcagaataaggtaataaggtaataaccttattattgtccctatctggaaataactatggtttaaagagatgaatattggtgccaaattgacaagggtggacttgtggactcaatttttggtgtcaacttgtctggattaagggatacctagaaacgtgttaaagcattattttaggtgtgtctgtgagggtgtttcc

SEQ ID NO: 632651 - DNA, 386 bp, Homo sapiens
accatccaacgggctggggacctagagagcccacaaatacagaaggctgggtttggtggctcgtgcgtgtaatcctagcactttgagaggctgaggcgggcaaattgcttgagcccaggagttcgagaccagcctgggcaacatggcaaaaaatcctatctctaccaaaaaaaaaaagaaaaaattagtcaggcatggtggtgcatgcctgtagtcccagctgtgcaggaggctgagatgggaggattgcttgagtccaggaggtggaggttgcagtgagccaagatcacaccactgcactccagcctgggttgacagagcaagacccttcctcaaaamacacacacacacacacacacacacacaaacagaagcaaactgactct

SEQ ID NO: 632652 - DNA, 599 bp, Homo sapiens
ttaccaggggcagttgggaaggagaatgaggagttattatttaatgggcatagagcttctgtttgggatgatgaaaaagttctggaaatggatagtagtaacggatgtacaacattgtaaatgtacttaatgcgtgcaatttgtatagctgaaatttgctgacagatcttaaatgttctcaccacaaaacaaaaccaaaaaaaaaaaaaaggtaagtaggtgaggtgatagatatgttgaytaacttgattgtggtagtcatttcataatatatatgtatatcaaatcatggatcgtacaccttaaacttctacaattttgtttgccaattatttctcaataaagctgtggaggaataaaaatagggatctgccaacgacataagattattgtgaggactaaaattaaacaaggtgtgttccacggctatcacagtcaattcttcatcaacattttcttgtaccttctcgtctttcctgagttctagctggagcactgcaacctatcagatatgtaactaaactcctcaagatgtagttttccacctgtaaaataagggattagatgatctttattgctatgttcgcctctaacattct

SEQ ID NO: 632653 - DNA, 514 bp, Homo sapiens
atagtacaggtgctaaagagaactaaagctgactcaggaaatggctacacaaaacctaagagccaaaaaaggaaggtttttttgttatcattgatcgcgctcttctatttttcttattcacaaaattaatagatgcttccttggtagcttcaaagtgagacatttgctgccactgtttcctttaggagaaaagaggaaggaatttagtatcacaaaggaatttagaaaatagtagcctcattctggaaattgcccgaacccagtttatgaaaaaagaaccaccataaaggcagggaactccatttgattgaagaaatcactaatatcagaataaaaattagaaatcagcagctatgtcattacttctcaagtgtgcccaaatattgtcattttagggactaattattcttttctcattattctctttctcattatcattcttttttcactaatgatamtttgtaaaaatacacattttgctttcaggtgagactcaatatcactactttcattc

SEQ ID NO: 632654 - DNA, 569 bp, Homo sapiens
gtaaacttgtcctgtattcctacacaaagaatataacagcaatatattccacaagagtaaagcaaaataagtaaartgattccaagtaaactaaattagaagggttttcatgaactgggccactgttggaactaagctgatatggggttgctagatgattccactgtgtgcctaggattagaatattgatccagatttttgcattaccaaacctcttgtttcttctgagtagcagtcagagattactgattggttcacaagaataagcagggttagcctaaattccagaaacaaacttaaaaacaactaatgagactagaatttaataccaagtgtaccacagttcttgaaacataatatttctctctccagtttcccatttttactaaagacaaatcatggtaagactgatttgctttattatacttggcctgattatttgcataaaatgcagcaggaataattatttttcacataagctcttttaaaattggctttgatggaactctgttccatagaaggaattttagataagactttttaaaagctgaacccagccataggtttgt

SEQ ID NO: 632655 - DNA, 569 bp, Homo sapiens
gtaaacttgtcctgtattcctacacaaagaatataacagcaatatattccacaagagtaaagcaaaataagtaaagtgattccaagtaaactaaattagaagggttttcatgaactgggccactgttggaactaagctgatatggggttgctagatgattccactgtgtgcctaggattagaatattgatccagatttttgcattaccaaacctcttgtttcttctgagtagcagtcagagattactgattggttcacaagaataagcagggttagcctaaattccagaaacaaacttaaaaacaactaatgagactagaatttaataccaagtgtaccacagttcttgaaacataatatttctctctccagtttcccatttttactaaagacaaatcatggtaagactgatttgctttattatacttggcctgattatttgcataaaatgcagcargaataattatttttcacataagctcttttaaaattggctttgatggaactctgttccatagaaggaattttagataagactttttaaaagctgaacccagccataggtttgt

SEQ ID NO: 632656 - DNA, 569 bp, Homo sapiens
gtaaacttgtcctgtattcctacacaaagaatataacagcaatatattccacaagagtaaagcaaaataagtaaagtgattccaagtaaactaaattagaagggttttcatgaactgggccactgttggaactaagctgatatggggttgctagatgattccactgtgtgcctaggattagaatattgatccagatttttgcattaccaaacctcttgtttcttctgagtagcagtcagagattactgattggttcacaagaataagcagggttagcctaaattccagaaacaaacttaaaaacaactaatgagactagaatttaataccaagtgtaccacagttcttgaaacataatatttctctctccagtttcccatttttactaaagacaaatcatggtaagactgatttgctttattatacttggcctgattatttgcataaaatgcagcaggaataattatttttcacataagytcttttaaaattggctttgatggaactctgttccatagaaggaattttagataagactttttaaaagctgaacccagccataggtttgt

SEQ ID NO: 632657 - DNA, 578 bp, Homo sapiens
cacataagctcttttaaaattggctttgatggaactctgttccatagaaggaattttagataagactttttaaaagctgaacccagccataggtttgtaccctcaaatacctatgagttaggtatttctttcctcttgaggtcccaaggtaaattggggctcctggacctgttagaaagtgacattctttatttaccacaggttagaaaccttgtacaaggactattgtaggcaaggcatgargccagttccccatggggcttttattggctctgtaagtttaattccttaaaggaaaacacaccattccagtaaaataaccagtaaaattccttggtaaaataaccagtaaaattccttggtaaaataaccaatttctcaaattgtgtcctgttacaaaagaaaacagattcttattgcacttatgcaaataactatattgccataagttaagaatactcacaactagtttccaaagtctggagaaattaggtagagagaaaaaaatgtgctccaaattttgttcacagcagtataatttacttaattgcaacaagctgtaaatagctcaaaagaaa

SEQ ID NO: 632658 - DNA, 618 bp, Homo sapiens
actattcttgtgtgtgggcctcattcgatctgttgaaagccgaagagcaaagtcaaggtttctctgagaaagaagaaatcctgcctcaaggctgtggcattagctcctccctcatcgtctgcagcctgctagcctgccctatggatttcgaacttgccagcctccacactcttgtaagcccattcctggaaacctctctctatcaatcctgtctctgtgtatctgtctctctctgtgtgtacgtgtgtatgcatgcatgtatgtactcatccattctatttatctctctcctactggttctgtttccctggagaactttgctggattaatgtagagttttgtgctaagaatggctctagaggaaagcattttaaggacgagttttctggattggtatagaatatgattaggtttaaatccartgataaaaatgatactgatagtctgtgacatgatgtggcaatagagatatgcaaaatgtcaccattggatactcctaatcaaatagttataagaggcaaggttatgggtggccatgtaattgaagccttagagcatttttgtcaaatggaggataatgaaaattgttgtgtgaaggaaaaatttttcttctttgag

SEQ ID NO: 632659 - DNA, 550 bp, Homo sapiens
ttggagtctgatgtttgagggcaggaagcatccagcacagaagaaagatggagactggaggactcacccagtctagtcctttcatgttcctctgcctgcttttatcccagcagctgattagatggtacctacccagattgagrgtgactctgcttctcctagtcgcctgactcaaatgttaatctcctttggtaacaccctcacagacacacccaggaacaatactttgcatccttcaatccgatcaagttgacactcaatattaaccatcacaggatattagagtggatttatcatgtagggcatgtttgccctccttgtggggagggattccgaggacacacctttcactgtaattgtgagaaacaaatttgtgaggggaaccctaacagcactgaagtattctgctaggtgacccaatcacctaacaatgcatttctcagaacgtattcctgtcattaagccgggcgtgactgtgtctctcttccatgtaggtcagaaattgcagtggagattactaccactgaactgggatccttaaatgcaatgg

SEQ ID NO: 632660 - DNA, 550 bp, Homo sapiens
ttggagtctgatgtttgagggcaggaagcatccagcacagaagaaagatggagactggaggactcacccagtctagtcctttcatgttcctctgcctgcttttatcccagcagctgattagatggtacctacccagattgagggtgactctgcttctcctagtcrcctgactcaaatgttaatctcctttggtaacaccctcacagacacacccaggaacaatactttgcatccttcaatccgatcaagttgacactcaatattaaccatcacaggatattagagtggatttatcatgtagggcatgtttgccctccttgtggggagggattccgaggacacacctttcactgtaattgtgagaaacaaatttgtgaggggaaccctaacagcactgaagtattctgctaggtgacccaatcacctaacaatgcatttctcagaacgtattcctgtcattaagccgggcgtgactgtgtctctcttccatgtaggtcagaaattgcagtggagattactaccactgaactgggatccttaaatgcaatgg

SEQ ID NO: 632661 - DNA, 550 bp, Homo sapiens
ttggagtctgatgtttgagggcaggaagcatccagcacagaagaaagatggagactggaggactcacccagtctagtcctttcatgttcctctgcctgcttttatcccagcagctgattagatggtacctacccagattgagggtgactctgcttctcctagtcgcctgactcaaatgttaatctcctttggtaacaccctcacagacacacccaggaacaatactttgcatccttcaatccgatcaagttgacactcaatattaaccatcacaggatattagagtggatttatcatgtagggcatgtttgccctccttgtggggagggattccgaggacacacctttcactgtaattgtgagaaacaaatttgtgaggggaaccctaacagcactgaagtattctgctaggtgacccaatcacctaacaatrcatttctcagaacgtattcctgtcattaagccgggcgtgactgtgtctctcttccatgtaggtcagaaattgcagtggagattactaccactgaactgggatccttaaatgcaatgg

SEQ ID NO: 632662 - DNA, 550 bp, Homo sapiens
ttggagtctgatgtttgagggcaggaagcatccagcacagaagaaagatggagactggaggactcacccagtctagtcctttcatgttcctctgcctgcttttatcccagcagctgattagatggtacctacccagattgagggtgactctgcttctcctagtcgcctgactcaaatgttaatctcctttggtaacaccctcacagacacacccaggaacaatactttgcatccttcaatccgatcaagttgacactcaatattaaccatcacaggatattagagtggatttatcatgtagggcatgtttgccctccttgtggggagggattccgaggacacacctttcactgtaattgtgagaaacaaatttgtgaggggaaccctaacagcactgaagtattctgctaggtgacccaatcacctaacaatgcatttctcagaacgtattcctgtcattaagcmgggcgtgactgtgtctctcttccatgtaggtcagaaattgcagtggagattactaccactgaactgggatccttaaatgcaatgg

SEQ ID NO: 632663 - DNA, 435 bp, Homo sapiens
cttgaaagataaagaggtggtgatttctaccacattcttcattaaactagcctatttgtcctgtgcagaagacagatgaatcttgaagaatkgtagtggattatcctaaacttagccaggtgatgactccaactgcagctgctgttctggatatggtttaattacttgagcaaattaccacatctcctgctacgtggtatgcaggtactgatctgacaaatgcatttttctccacacctgttagtaaagactaccagaaatagtttgtttcagttggccagcaatacaccttcactgccctatctcagaggtatatcaattcttcagccctatgccacagtttagtctgcagggaactaatcatctttcccttctacaagatatcacatcggtccacaaaattgatgacagcagtctaattggatcaaatgggca

SEQ ID NO: 632664 - DNA, 507 bp, Homo sapiens
catgcctgtagaactactggtcttaccatggttcccagcatcctgaaagagctagtttgataaaatggtggaatggccctttgaagactcaattacagcattatctaggtggcattacctcgcacgactggagtaatgttctccagaatatataccttaaatcagcatccaatatatagtactatttctcctatagccagaattcatggctctaggaatcaatgggtgaaaatgggagtggcaccactcactattagccctaatgttcctctagcaaatttttttctttctgttcccatgaccttatactctgctggtccagaggtcttagtttcaaagggaagaattcttcraccagaagatgaaacaatgattccgttgaactagatgttaggactgcctctgggttactttggacttctcatgcatttgaaacaacaggcaaagaaaggcactactgtactggatggagtaattgatcttgattatgaaggggaaattgggctg

SEQ ID NO: 632665 - DNA, 246 bp, Homo sapiens
aagaaaggcactactgtactggatggagtaattgatcttgattatgaaggggaaattgggctgctactacacaaggaggtaaggaagagtatgtctggaatataggacatcctttggggtatctctyagtactattgtgccccatgattaaagtcaatggcaaactacaacccaattctctcagtctgctaatggcccagactcttcaggaataaaggcttgagccacctcaccaggcaaagaacc

SEQ ID NO: 632666 - DNA, 530 bp, Homo sapiens
ggattattttttctttctaattttaactttctgaattttacatagagtctcgttctgtcacccaggttggagtgcagcggcacaatctcggctcactgcaacctccacctcctgggttcaagtgattcttgtgcctcaggctcccaagcacctgggattactggtgtgcaccaccatgcccggctaatttttgtatttttagtagagacagggtttcgccatattagccactcctaacctgaagtgatccacctgtcttggcctcccgaagtgctgcgattacaggcgtgagccatcacgctcggctaactttctgaatttctgatctcaatagctaatgctgcaaacagactacaaaggttaacttttttttttttaagaaaagtatgtaaagatatcctaagaatatttttaaaaattatatagccactaggttkggtggcacatgtctgtaagtcccagctactcaggaggccaaggcagaggatcacttgagcccaggaatttgagtctgcctgggcaaaatagct

SEQ ID NO: 632667 - DNA, 666 bp, Homo sapiens
ttttggttctatgtcacaaaactagtaagtgacagagccagaagctgagaatgaactcagaatatttcagctcagtgtctattaattattgctgctacaacaaattaccacaaatttagtggcttaaaacaatacaaacgtatttatcttacagttcagaagtctgacrccggtgtccctggactaaaatcaaggtgtcagcagggctgcatttccttctggagattcaaagacaaaatcagttcttgccctttctagcttgtgggggctgcccacattccttggctcacagactccttccacctttaaggcctggaatgttgtctctttctgatgctgctttgttgttacatttccttgactttcctgcttttctcttccactcttaaaaaccattgttactctattatgcctacctggataagccaggataaactctctatttcaaaatcagtttatcaggaactttaactctacctgcaactgtaactcctctttaccatgtaacctaatatattcaaaggttccgagaattcacagaacatggacatctctggggagtcaagatgctgcctaccacagtacccatgcttataatcagtatactacaacaatcatgctcatgctcaactgttagggttcagagagtcagtatgcttccatact

SEQ ID NO: 632668 - DNA, 666 bp, Homo sapiens
ttttggttctatgtcacaaaactagtaagtgacagagccagaagctgagaatgaactcagaatatttcagctcagtgtctattaattattgctgctacaacaaattaccacaaatttagtggcttaaaacaatacaaacgtatttatcttacagttcagaagtctgacgccggtgtccctggactaaaatcaaggtgtcagcagggctgcatttccttctggagattcaaagasaaaatcagttcttgccctttctagcttgtgggggctgcccacattccttggctcacagactccttccacctttaaggcctggaatgttgtctctttctgatgctgctttgttgttacatttccttgactttcctgcttttctcttccactcttaaaaaccattgttactctattatgcctacctggataagccaggataaactctctatttcaaaatcagtttatcaggaactttaactctacctgcaactgtaactcctctttaccatgtaacctaatatattcaaaggttccgagaattcacagaacatggacatctctggggagtcaagatgctgcctaccacagtacccatgcttataatcagtatactacaacaatcatgctcatgctcaactgttagggttcagagagtcagtatgcttccatact

SEQ ID NO: 632669 - DNA, 608 bp, Homo sapiens
taggcagaacatgccagctgactgctgcatgttcctacaatcaaaaatatttaataaatgtctatgtgtcattgttctatgtgcttggaacaactttagtaaccaaaactaagatccctaccctcacggagcttacattccagtggcagccattccagtcatttggagttggtacaacagcagttcgaaacctatctgccaacctttatgtaaagacttaataaactgttagagttaacatgtgaaggagttgtactgtagatattgtgggataataatgctacaaaaattaagctagtattcccrctagaaaacaatgttccagcttattagggaggacaaagggtacattcttagatacaattggagaaataaaaggaagccaaagaagaaaaggctactaagatggtgaagaaaattattgttaatgtaagaacttgacacagtggcaaaagagtggcaaataaaatttccattggtagcttctgatgagactcttcttccagtgatgttcatataacagtaatagttacaaggctggaggtggtggctcatgcctataatctcagcactctgggaggccaaggtcggggaggatcatgctcggc

SEQ ID NO: 632670 - DNA, 571 bp, Homo sapiens
gactttactatcaggaataaacaattacatctgcggggagcagaagatctttgtttgtatttttgaaaggaaaggaggaaaattaacctactttagcactagtccattcttggaagattctattgtgtctccattttccaacgggcaattgtggaaacaggaaattgaaaaacttcaccacgttaagataaatatgatgatatactaaagctgtgagatatgtttgctgactttcagtctgctgaatttgggcttcttctccacaagtcaaggggtcacctctaataattcatccattcatttcaaccaccccttatgctcctccctctcaacccctcttcttaaacacatcctcactacaacaagtggaaacaaatgctagtcatggggaaaggagaggggctcattctgagctttgcagtcatttccctagaggcctgagaatggcagggatgattcatgataaatkctaatcctggctcttgcatctaattttcaggtaggtacaaaggagcattagtttttgcatctagggatatggataatgacaacaacaggctttcccgagggg

SEQ ID NO: 632671 - DNA, 521 bp, Homo sapiens
aattaaatgaactccaccctgcactcccctataggcccttgagaactttctcattgctgagacaaaaaagctgaggtctgcctagcctgtgggaagtgatttgtctcattacacttatccagattcccaggcacmatcttggttctctagcttcactggaaggggtattaggaggggtggggtgctctgaaggacttctgaatattgggaagcccttcatcaactcaacagggccagggaaagcaatgaatgggagagacataggcaaaagtaacgtgggcctcccctgcatgaagtgcacttccagcacggggagacagacatttaaccaagaattttatgaaatagtggatacaactgtgatgaatgctgtgagaaaaaaaaaatggaaaagacaggatgggagattctcatcgtgcctggaagatcaggaaacttccctaaggaagtgacattaaactggacttaaaagtgagctggagatgaagggatgggcaagcatgggcaggaatctcgtggat

SEQ ID NO: 632672 - DNA, 521 bp, Homo sapiens
aattaaatgaactccaccctgcactcccctataggcccttgagaactttctcattgctgagacaaaaaagctgaggtctgcctagcctgtgggaagtgatttgtctcattacacttatccagattcccaggcaccatcttggttctctagcttcactggaaggggtattaggaggggtggggtgctctgaaggacttctgaatattgggaagcccttcatcaactcaacagggccagggaaagcaatgaatgggagagacataggcaaaagtaacgtgggcctcccctgcatgaagtgcacttccagcacggggagacagacatttaacmaagaattttatgaaatagtggatacaactgtgatgaatgctgtgagaaaaaaaaaatggaaaagacaggatgggagattctcatcgtgcctggaagatcaggaaacttccctaaggaagtgacattaaactggacttaaaagtgagctggagatgaagggatgggcaagcatgggcaggaatctcgtggat

SEQ ID NO: 632673 - DNA, 548 bp, Homo sapiens
gggtctagtttcattcttctgcataggaatatccagtttttttcagcaccatttattgaacagtgtggtctttctcccaatgtatgtttgtggcaactttgtcaaaaatcagttggccataaatgggtggatttatttctgagttctgtataatgctccattgaattatgtgtctgattttatgccaataccatgctgtttttgttactatagccttttaatatattttgagtccagtagcgtaatgcctctgctttgttctttttgctcaggattgccttggctattcaatatcttttttaaagttccatacaaattttaggatttttttttctatttctgtgaaaaatgccattggtgttttygcagggattgcattgaatctgtagattgctttgggtagtatggtggttttaacagttttaattcatccaattcataggcatgggatacttttccatttgtttctgacatctttaacttttttttgtcagtgttttgtagttttccttgtagacgtcttttacctctgaagtaaaatttattct

SEQ ID NO: 632674 - DNA, 657 bp, Homo sapiens
taagcttaggttattggttgagatcttttgcctttttttaacatagacgtttacaggtataatgtcccttaagcaccgatttaactgcattccataaattttgaatatgtcaagttggytgatagtgttgctcaagactgtggttctgttgtttcttgacagtggggtattgaaatctccaactttaaatggtgactagtctattttttctttcaattttgtcaggtttgcttgctgtattttgagattgtgcttttaggtatgcatacctatataagtattacatcctcctgatatatgaactcttttatcatactgaaatatcccagcttgtctttgaaatagttctagtcttaaagtttatttttttctggtattaaaaaaatttcctttccaatttacatgccttctttcttatggttactgtttgcatggtatatatattcatcctgttacttttaacctctttttagctttgaatctaacatgtagaaacctgagattattaaatattttagatttttagatagcttataagaaattggatcttactttttttatccaatctgacaatctttgcctttattttattttatttttgtttctatttatttggtttttttttcagggggtacatgtgcaggtttgttacaaagg

SEQ ID NO: 632675 - DNA, 605 bp, Homo sapiens
tatgacacaactcacaccctggccatagttacaccagtgcaagtgtaggcaccagacccaagctaaccaaacagacttcctttcaaagtgaatttgtaagaggaacatagaaaagtattcaatcttttcaggcaattgtgtgtgtaagatttaatcttagatgctcttacttctgtgttccatcatgtagattagagaagtagagtaagcagttctgcataaagaggagaataaaaaagccatgagaaaacagcagaattgaggtccctgatgcgattcctgtccttggtgcctrtttttgaagcaaagttgtagtcttatgttcatacaccgagagctcattctacagctgaacttcgaacaatgtgggggtgaggagtgtggacccccatgcagttgaaaatccaggtaggactctgactcccccaaaactaaattattacagccaattgttgaccagaagccttaccagtaacatagtcaatcagtacatattttgcatgttatatgtattgcattattgatcatatttgtataataaagtaataaacgagaaaatgttaagaaaatcatagaaaaaagtagatttactatcaattcagtaa

SEQ ID NO: 632676 - DNA, 405 bp, Homo sapiens
ctggggtccacttatatgagacatccctggctgtcaggtcactgccagatcatgttcaagaagctctttttaggttccagaggtaccmagaatgtagagtcatctgctttttcttgtattttcatcagaggtattttttttccttctactggttttttatctacaatagctttgtcatctgctttcatatggtgctaaatgtgctgaagaaaattctagtgtgtgttggtgagtgttactaggttccatgctgacattcacagatattatctgcagcaattggtgttgagaacaagacaattatttttgctgtggtttgtttgttcagtttaacttgggtttgattggaggagaagtgttggggaaaggcaattgtttctctcttctcactttgcaagaagggaa

SEQ ID NO: 632677 - DNA, 405 bp, Homo sapiens
ctggggtccacttatatgagacatccctggctgtcaggtcactgccagatcatgttcaagaagctctttttaggttccagaggtaccaagaatgtagagtcatctgctttttcttgtattttcatcagagrtattttttttccttctactggttttttatctacaatagctttgtcatctgctttcatatggtgctaaatgtgctgaagaaaattctagtgtgtgttggtgagtgttactaggttccatgctgacattcacagatattatctgcagcaattggtgttgagaacaagacaattatttttgctgtggtttgtttgttcagtttaacttgggtttgattggaggagaagtgttggggaaaggcaattgtttctctcttctcactttgcaagaagggaa

SEQ ID NO: 632678 - DNA, 559 bp, Homo sapiens
aaaaaacagcaaaatacaacctttgcgggaaaagtgaggctaggaatatttgctaaaatatattttctaaaacgtgcacttaaaaaaagtatgagatatgcaaggaaagaggaaactgtgacccatacaaaacaaagtaggcaatagaaactctctgattgtccccagatgttgaatttaccagctgaaatttcaagccattcttataaatatgtttaaaaaactaaagaaaaccatgtttttgaaattaaaggaatatatgacaacaaaaaaatccatatgtagagagtctaacaaaggaaacaaaagtataaagagaaccaaatgcaaattatggaaacaaaaagtacaatgagaaaattaaaatctcactggaggacccaacagcagrttcgagatgacagaagaaagaatccatgaatgtagaaataaatccatataaattacccagttggaaaaagaggggaaaaaagacagaagaaaaataaacaaagcctcagagtgccagcatatataataatgggaatcccataaggagagcaaagaggaagcaaaaaat

SEQ ID NO: 632679 - DNA, 594 bp, Homo sapiens
ccacttcccagagcccagctaggatccatgtgtctaggtaatagggacaaaagatcaagtagcccttcaacatctggggaaaatttcaaactcattactattccaggcaacgcagtttaaaacaaaggcatggcatttccacctatcaagcagcaaacctaaacaaaatgataataggtagcatcggtgaggggtgacagcaggaagaaccaagcgggctgaggctgaggctgagggtggaggtgctcaggctaccttcctgaagggcaatttgacagcaggtgtcaaaaaccctgctgtttgcatattctctgccacaataccactggaagaatatatcctaaggaggtaatcatgcttgtgaataaagacmatgaggatgttcatctgaacagtatttacaacagcaaaaccactggaaaccatctaactctctcaccactgagcattactacttaaatgatggtccatttagaaaatagaatattgtgtagcaataaaatataacataaaatatttaatgaaacagaaagatgtgtatatacataagttatatgagtaggtaaccaaagattgaattcatttttttaaatg

SEQ ID NO: 632680 - DNA, 594 bp, Homo sapiens
ccacttcccagagcccagctaggatccatgtgtctaggtaatagggacaaaagatcaagtagcccttcaacatctggggaaaatttcaaactcattactattccaggcaacgcagtttaaaacaaaggcatggcatttccacctatcaagcagcaaacctaaacaaaatgataataggtagcatcggtgaggggtgacagcaggaagaaccaagcgggctgaggctgaggctgagggtggaggtgctcaggctaccttcctgaagggcaatttgacagcaggtgtcaaaaaccctgctgtttgcatattctctgccacaataccactggaagaatatatcctaaggaggtaatcatgcttgtgaataaagaccatgaggatgttcatctgaacagtatttacaacagcaaaaccactggaaaccatctaactctctcaccactgagcattactacttaaatgatggtccatttagaaaatagaatattgtgtagcaataaaatataacataaaatatttaatgaaacagaaagatgtgtatatacataagttatatgagtaggtaacmaaagattgaattcatttttttaaatg

SEQ ID NO: 632681 - DNA, 525 bp, Homo sapiens
aaattaatgtgaggtgggtcttagttttgcatactcattcctttgggatttggagctctgaaggcatggccaacctggccctacggaggagtcagggcaggtccccgtgcctaaggcctgcccttgggtttgttccaggcttctggccccaaggagctgggactgagaaataggcctcgggctgcaaaacacagccagcaacctgcagatgccattgagggggacagccccacccccacaggcaatctttgctttgttttttatttattcccatgtaaatttgggacaaggctgaatggaaaaagaagggtgaaaaggaagcacctgccaacgcatgcatgtgtgtgtgcagcatgagggtgtgaacagcatgtggtgtgtgtgctgtgtgtgtgcaccrtgtgtgtgcggcatgcatgtgtatgtgaggcatgtgtgtgcagcatgtgtgtgtgtgtgcatgtagcatgtgtgagagtgtgtggggtgtgtgtgtagtgtgtgtgtagcatgtgtgtatgtagc

SEQ ID NO: 632682 - DNA, 554 bp, Homo sapiens
gggctccaaagacgtccctgggggcttgtgctccattctcaggactgtcagaaagcctcagagctgccgggatggcacagccagggcactggaccaggcacagtgtcagtgccagaaacgacatccctttccacatcactgtctgcagtaggattttattccctttcttctgctcacactctttctcttaggctcaatctggctttacatcggcacatacatacccatctgacaggctcttccatgaaatttgctgttccaatctcaaactgtcccccagcttaaagacagccaggtacacaatgaggagtaggtcagtaaaagtcagggaaaattaggacacttccctgggtggcaggaattaacttacaggactcttgcaggcacaggcrtatttcaggggagcacactgtgtgtttaaaaatgctttagaaaagcaggtttccaattgtagcttttcctaacaaaagacagggagacttctgccagaggtaaagcttccaggctgatggcagagggagggctggaccatcagtcagcgggaagcagagtgt

SEQ ID NO: 632683 - DNA, 530 bp, Homo sapiens
aaccaattttcgaatcactgacatgtagtaaaggaagattttcacaaggggcagctgtgtgaagtcaacagagactagaacaaggaagggtaccatgaagattgaaggtaaggttcagaagaagttgaagaaattgttttgagaagtgatatccaaagaagtcagagaaccacttgaagagtggtgtcaagaaacctaraagaaaagatttttaagaggggacctattaaataagaactgaaaagaagccgttaaatgttgtgcttagagagtcactgatgctggcagcttatcatcctagtggaaaggaagcctgactggagttggttgtgaaggaagaagtgagaaagtagcgatgtctgtcatagaccattctttaaagaaacatagcagttaaaagaggtagctagtggaggacttgggagaaacaaggagatttgggagtaaacagaatctagaaaagtggtggtaagatcagtcttgaacagggacagcaccaactcccctgctgagagaagagtggcatagtc

SEQ ID NO: 632684 - DNA, 577 bp, Homo sapiens
tttaccatacactgctattgaatattagaacttattcctatatcgtatgtccttattttttattcctatatccattagccaacctttcttcatacccttcctctccaccccttcacagccctcacatccttcggtaataatcattctactctctacctccgtgagatttttggctcccacatatgtgtgagaacctgtgatatttgtctttctgtgcctgacttatttcactgaacataatgacctccatgtcaaatgaaagacatgatttcatttgtttttatagctgaataatattctatctattctattttgtgtagatgccacattttctttatctattcatcagtcgatggacagttaggttggttccacatctttgctattgtgaacagtgctgcggtaaatgcgggtgcacagctatccctttgataaactggctttttytcctttgaataaatacccagtagtgggattgctggatcatatgatagttctatttttatttttctgataaatctttgtattgtttccatagtggtcgtactaatttacattcccaccagcagtatgtaag

SEQ ID NO: 632685 - DNA, 584 bp, Homo sapiens
tgttgtgtgaggccattctggcattactataaagatatacctgaaattggataatgtataaagaaaagaggtttaattggctcctgtttcttcaggctgtacaggaagcaaagcatggcaccggcatctgcttggcttctggggaggcctcaggaagctttcaaccatggcaaaaggtaaaggggaagcaagtatctccacatggtgagagargaagcaggagagagagggtggggaggaggtaccataccccaacaacagatctcatgaggacagcccgaagctctgagggatctccccccattacccaaacatctcccaccaggccctatgccaaacactggggattgtaattcagcataagatttggcagggacatgtattcaaactatatcatgcatatacacacagacaggcacacacacacacacacacacacatacacacaatcggtcaacagtgtaaaatgagatgacaaaaccatacttgagcaattgccaaatgatattaaggacaaacaatgatggatgtagaggagagtgtaattagacaggtatggatggccaaggaaagctgcagagagg

SEQ ID NO: 632686 - DNA, 574 bp, Homo sapiens
gctggtgtatcatatattttaataagaattcagaaatgggagttttctaataagcaactgagttgggaaggtaacagaaggggaaattttggttgaataggataagaatgagaattttgagtgtcagtgatcaacaattaaccctacgtctcaattcatcataagcaaatacaattactactctgcaaatactatgtagaagaatgaaatgatgtgttggtgtctgtcccccaaattggaggcttctggccattgcttgaataactttctgcctctagtatccccaaacttatgttttgttttttctttttctcttagtatccatgcttctcctgaatcattcctctcgttaggaatgtcagtctactaaattttgtggcaatacaatgcctgggtttgaattcaagttctgccrcttccttactctgtctctttatcaataaactcattgggaaaagtggaggaaatcatagtaacgatttattaaagttgaagattgagttttatacatttaaagtcctagaacaaagcctgcacatagcaagctcttagccaatgttagcagccattatta

SEQ ID NO: 632687 - DNA, 570 bp, Homo sapiens
cttcaaattactagccgttttctaagctctcacagaaaagaaaaaaaaaatgtttcagaaaagtttatgagcagaaagagcacaattttcacatacaaataacgcccaaatatggcttttataaagttctctaagaaagactcttctttaaggaatatcagcctaacaggtattttttttttccttttagaaaaatgtgagtkggaattagaatgtctgccaggctctaagagagcaactcgggctgtcaccatggatgtgtgggggatgatcagattccagtgctgtgcttttgattatctgcattttgaagaatattcttggcttatttgtgttctaatttggcaagacatttctaatgacagaactggcacctacagagagagacaaaaaaaaggaaagttgcatttctaaaattctttatccatgcttgggccaactagctgggaaaagtgataggtggaactgagggtaggtgctcagagagtgaagggaaaaaacgagccggagaagtagaagtgacagcctgtacacctgccccactggtctctttcactctggcagggcgcc

SEQ ID NO: 632688 - DNA, 586 bp, Homo sapiens
tggcatgttatcctacataatggctgaatcaagggatgctctcaacataggagtagagctccaacaataacctgctcagtgcctctggctagaatccttttagcaaggtcacaggagatattctccatgggtgtcttgcatttctgcacatattgcaagaagaggacctatcttttcatggatatttgtagactgaacaacctgaaagacagagataatatctcccttctgagcagaggacatgttttctttaacacccagtataacaaaaataatatttccctcccaggcaaaagttgagcaggtttacttgcagtccattataaaagatccaggttccccaaactcagagttatccagctgtcatgcaaacacaacccaagtgtctagcctccatttgcgctgctctgggtcacacctgtggatttggggtgcttggggagcatggcgagctggtgtgaacttgaagctcataccactggctgtgccacagtaataaagtcttttgcctaggacccaggagtctcgtgtcttttgtkgggtaaaatctcagatccatcacagttcctgacagatttcagtgatg

SEQ ID NO: 632689 - DNA, 461 bp, Homo sapiens
gcaaggcttagagctttagaggaaatgagagaatagggagaagtgaatagagaggaagccaaatattagaggaaatgagagaatagggataagtgaacagagaggaagggaggggaagtgactcactatgaaactgtgatttttcaggtcttaggaactgagagtccatatgtatgggatgtaaaaatgtgtgcctacccatctgtctgtctaagctcttcttccatacacagggatgaagcccgcagctttcacccactggcaacatatgcacrgggtctatagctctcccatctaaatgcagccccatgaagctgagatggctcatagccagggaataggggccagattctgagttgagaagtcctgagttcaagtcctgtgacttaacatgtgggtaacattcagcaagtcaggtaacctctctgagatgccatctcctcacctgtaaaatgggggaa

SEQ ID NO: 632690 - DNA, 496 bp, Homo sapiens
acatctttcatttgagtctgygttcatgccatggtcacaaatggatgtggtggggaactgccctatctatctctttttttgtctcaaactggcatgtaagaaggtgtttctcaagtggagttaactaacgttggagactccagcctctgctgccaaacaggacactagccaacatgctggcttccatggtgaataagaagtagaggtgttggtgccagtagccagccatgagttgtgtgggactatgaaggttatctacactctctgcactgcagtttctccatggttaaaagaaaagaaaaagaaaggggaaaacagggagggaacaaggaagaaaaagaggaagaagaggaggggaagaaaaaaatatgagtcatcttggagagctgtgggaataagcaccatgaagcctagcacagaagaggtctgccctgccttcaccatgtcttcttcccatccttaagtggtttattagaagagtaacttttgtacctaa

SEQ ID NO: 632691 - DNA, 559 bp, Homo sapiens
tatgcacacaatctggaaaatctagaggaaactgatgtattcctggaaacacataacctccccagattgaatcaggaagaaattgaaaccttgagcagaccaacatctagtcccaaaattgaactggtaataaaaatcttaccaaccaaaaaaagycctggagcagatggattcacagccaaattctaccagatgtacaaagaagagctagtaccaatcctacagaagcaattccaaaaaattgaggaggagagactgactcctccctaactgattctacatagccagcatcaccctgataccaaaatctggcaaaaacacaatgaaaaaaaagatttcaggccaatatacctgataaatatagacacaaaaatcctcagcaaaatactagcaaactgaatccagcaatacatcaaaaagttaattcaccagaatcaagtaggcttcattcctgggatgcaaggttggttcaacaaatgcaaatcaataaatgtgattcacagcataaacagaattaaaaacaaaaatcatatgatcacctcaataaatgcagaaaaag

SEQ ID NO: 632692 - DNA, 550 bp, Homo sapiens
tgatttgccatgtttttgattagtctggctttcctactgtacatatgaggcagacatagcttccagttttgtctatgatgatcctcaaatctggcacatattaggcaaccagaaatatttgctgaatgagtgagtgataaaagggattgatctgatatttgttctattcttgtgatatgctttctcaactattttctccttctcttggtaccaggtctttcctggtagagagaagaaagtcactccgttttctcatagccactctgagggcaggcagcctgggaagtggtctgtggaggcttgtggctggcaatgagaagacttctcttctagttcaaggtcaagagcccagtatgacctttggccagagacttcattactctgggcctcgattttctctttggtaaatgaaaatcaattctttctgcttcttctgcctcctatggggctgttgttgggacaaaactgagttttaaaggtgctgtataaagayaatggttacacaaacataatgcatccttaaagtaaaatactttgtggcacttctcta

SEQ ID NO: 632693 - DNA, 492 bp, Homo sapiens
ggcctccactacaggacagggcatgtcaggagacagagcaagggaaatactccaggtggagcttcactgcttggaaggtgtggaagtggggttggcatggtttatctggagggcaaggaacagaccatgtgtttagagaggaggactcttccgggggagcagcaggggcacggatggagcctttggaaggggtcagatggaggtggactttgagagacggctggaatttcgaactacatgctgcagatactgggacgccaactacaatggtcactcyttaggcaccatttggctctgatctgtgtaatcttacctgtgtgattatggctttaatttctctgaaagcaatctgcaggtaaggggcatgtgtttttatcctttgattgttccacagggactagctcagtatctctaactcaaatattcttcataggaatgaaactgcaaagacacctttgtggcccatgaaggccaggaatggaagcacaaagc

SEQ ID NO: 632694 - DNA, 578 bp, Homo sapiens
tgacttagtcagaatatcctacatgaatcaaagaaaggttctagttttggacatccatgggatttgaggaacgaggagattgcaaacatgcacttcaattgtgttttggcttttcagtggcacatgtttccagaagatatcagtcaatttactctctatttgagaagatataaaaaattgggaygcaaacaattacttattattagtgctcaaattacttttcggtcttttttaagactattattattattactattactatcactataaatgcattcaattttttaaagtagtaatcccaagcaagattaataaatcaagagatgttctcaggcatgaagctgaaataaaactagaaatacaaagagaataaattgtacaatcaaatgagcaagcactcaagtcgtatttagtgctccaaacacattaacctgcaatggttacataagcagaaggattagtatttaggtcaccaaattagtcttttgaattttcttgctctttatcaagaattctatgtgcttcctgatatcatttaccatgacatattaaccacagcactttatctaccagcattt

SEQ ID NO: 632695 - DNA, 574 bp, Homo sapiens
gtatgttatcttactaacgaatcagcccatgtccatgtcatagctggcattattaaaggggcaacagctaagagcccatttcaagtggaataacaatatctttccaggtggtggaaatcctgaaatgcttctggctctgggatgaaggctaagtccttaggatggctggcatttgtaactcctactgtagttcacacccatgtgggctcagcactagcacagtgcttttctgatgtcatagatgaacggatggcatacagaaagtaaggagcttctcaggtcttggcagagttgcaggtagtttgactaaagttggactccttaactggtggtggcttaatagataaaacattgaattttcttatcaatttaaagaagaatctcattcctttttgaagaaaaaaccccaaagataacttccctggggtagggtggggtgtcttagattgtttttcagagttagtcattcaaaaatttagtctaaatattcacccaatgagttttattcctcccttccaaatarcaataaaaattttaaaatagtctgggtttatggaaaacaaactccgtaaac

SEQ ID NO: 632696 - DNA, 337 bp, Homo sapiens
gtcacccagctggtacatgacagaaattcagggaaaaaataccatcacaccaattgttgcaattattttaatttaacattcgagtcctgccactgctgtttgtctcagaataaattgttccrtctttctaaatcttagaaacctcatttataaattaaaggtggggggattctatcatctataaggccctttcaaatactcttatttattgtgtacaaaaacccctgaaaagtcacttacaaaaaaacttgttcatgcccgtctgaagatttacgaactccagctttttatctgactgtgcattctgacaattttctgcatttctctaagaatggtc

SEQ ID NO: 632697 - DNA, 586 bp, Homo sapiens
actacacttatacacttcctctgaagtctaaagaaatcacaggctcctcccaagatttggaaaattgagctcatctttgtctatcttcagaaaaaaaatctagttaaattgttcaatggttaagttagatattatctgatatggaactaagtttgtgagatataaacagtattctgtccacccctccttagttaagctaagaggtattagctttattatttgctaaatgtcacttagcatttgataaatgtarcatttacagtgcattctccgaggactggaaacagtattgtagaacaccagaacctgttttccccttgaagtaacacgctatctcagtatataaattacccagtacccaaggtaatggagaagaaaacctaaggaagtttgacatttactttggaagtgtgataaagcaattgagactgttgaaatttaacactaccttgaggtcttattacacttgcatgtcactccttagtgcaaactcacttttgctttatagaagagcccaatatattaatctacagccttaaagtgagttaccggtttaatgcagatccaatctgagaataaattaggc

SEQ ID NO: 632698 - DNA, 643 bp, Homo sapiens
ccagagggattaagtgatttgtctaaggttatacagataataggtggatatcccagatttcagactagactttcttgagctcaagttcaaggaaggtccattcttctacactatgcattcagcaatatattacaatggtaataataattacaataacccccatctattgaatacatcctgtgggccaagggttctggtaaactccacacatataaaccctcctctgaycctgaccctgttctattcctctcatagctccatgagatatgtctggttctcttcattttacagaaagatgactgagactcagagtttgtgacttgtacaaggcctcacagctaggagatgccaacagctgggtccaatctcagctcggaatctgcactctgtctacaggactagcgctttgcccaaggagaccaaaatgaagacatcttgtctcctggtcttgaaaattaactaattcacttttaatgacatcaagtgtaaacaatctaccaaattattaaaacattatctttttgtctatgtaggccatggatcaagaccattaacttataatcagtgatagccaagaggatgggaagagaatattaagcctggtgctctgcaaattaatacttgcaggtaaatgagaagtatc

SEQ ID NO: 632699 - DNA, 643 bp, Homo sapiens
ccagagggattaagtgatttgtctaaggttatacagataataggtggatatcccagatttcagactagactttcttgagctcaagttcaaggaaggtccattcttctacactatgcattcagcaatatattacaatggtaataataattacaataacccccatctattgaatacatcctgtgggccaagggttctggtaaactccacacatataaaccctcctctgaccctgaccctgttctattcctctcatagctccatgagatatgyctggttctcttcattttacagaaagatgactgagactcagagtttgtgacttgtacaaggcctcacagctaggagatgccaacagctgggtccaatctcagctcggaatctgcactctgtctacaggactagcgctttgcccaaggagaccaaaatgaagacatcttgtctcctggtcttgaaaattaactaattcacttttaatgacatcaagtgtaaacaatctaccaaattattaaaacattatctttttgtctatgtaggccatggatcaagaccattaacttataatcagtgatagccaagaggatgggaagagaatattaagcctggtgctctgcaaattaatacttgcaggtaaatgagaagtatc

SEQ ID NO: 632700 - DNA, 643 bp, Homo sapiens
ccagagggattaagtgatttgtctaaggttatacagataataggtggatatcccagatttcagactagactttcttgagctcaagttcaaggaaggtccattcttctacactatgcattcagcaatatattacaatggtaataataattacaataacccccatctattgaatacatcctgtgggccaagggttctggtaaactccacacatataaaccctcctctgaccctgaccctgttctattcctctcatagctccatgagatatgtctggttctcttcattttacagaaagatgactgagactcagagtttgtgacttgtacaaggcctcacagctaggagatgccaacagctgggtccaatctcagctckgaatctgcactctgtctacaggactagcgctttgcccaaggagaccaaaatgaagacatcttgtctcctggtcttgaaaattaactaattcacttttaatgacatcaagtgtaaacaatctaccaaattattaaaacattatctttttgtctatgtaggccatggatcaagaccattaacttataatcagtgatagccaagaggatgggaagagaatattaagcctggtgctctgcaaattaatacttgcaggtaaatgagaagtatc

SEQ ID NO: 632701 - DNA, 643 bp, Homo sapiens
ccagagggattaagtgatttgtctaaggttatacagataataggtggatatcccagatttcagactagactttcttgagctcaagttcaaggaaggtccattcttctacactatgcattcagcaatatattacaatggtaataataattacaataacccccatctattgaatacatcctgtgggccaagggttctggtaaactccacacatataaaccctcctctgaccctgaccctgttctattcctctcatagctccatgagatatgtctggttctcttcattttacagaaagatgactgagactcagagtttgtgacttgtacaaggcctcacagctaggagatgccaacagctgggtccaatctcagctcggaatctgcactctgtctacaggactagcgctttgcccaaggagaccaaaatgamgacatcttgtctcctggtcttgaaaattaactaattcacttttaatgacatcaagtgtaaacaatctaccaaattattaaaacattatctttttgtctatgtaggccatggatcaagaccattaacttataatcagtgatagccaagaggatgggaagagaatattaagcctggtgctctgcaaattaatacttgcaggtaaatgagaagtatc

SEQ ID NO: 632702 - DNA, 608 bp, Homo sapiens
gctgcgatggggacctctggctgccccttggagaagaaaaatgggagaagcagaaaggagaagagaggagaggtgccagaagcaaattagagatggaacgagagacaagcttgcacagagagtaaaggcacagcatgtttataaaagtgcacagacccacaagaaactgcacgtgttcccatggattcttacagagtttttgttygtttatttgtttgtttcttagagacagggtcttgctctgtggtgtaggctggagtgcaatggcgcagtcatagctcactgcagccccaaactcctgggctcaatcggctaattttttttttttttaattttgtagagacaaggtctcactatgttgcccaggctggtcttgaactcccagcctcaggtagtcctccaaccttgtcctcccaaagtgctgggattataggcatgagccactgcgcccagactcttacagagaacttaatacagaaaatgccagggcatgccatcaccactaatcaaaagagaaacatggttaatcctgttgatttctgacaaaactgacattaaaatctgatgtttgtgtatgcttttaaaatatctacaccagagatttgaaa

SEQ ID NO: 632703 - DNA, 603 bp, Homo sapiens
ttcaaatctctggtgtagataattttaaaagcatacacaaacatcagattttaatgtcagttttgtcagaaatcaacaggattaaccatgtttctcttttgattagtggtgatggcatgccctggcattttctgtattaagttctctgtaagagtctgggcgcagtggctcatgcctataatcccagcactttgggaggacaaggttggaggactacctgaggctgggagttcaagaccagcctgggcaacatagtgagaccttgtctctacaaaattaaaaaaaaaaaaaattagccgattgagcccaggagtttggggctgcagtgagctatgactgcgccattgcactccagcctacaccacagagcaagaycctgtctctaagaaacaaacaaataaacgaacaaaaactctgtaagaatccatgggaacacgtgcagtttcttgtgggtctgtgcacttttataaacatgctgtgcctttactctctgtgcaagcttgtctctcgttccatctctaatttgcttctggcacctctcctctcttctcctttctgcttctcccatttttcttctccaaggggcagccagaggtccccatc

SEQ ID NO: 632704 - DNA, 618 bp, Homo sapiens
cctgtaatcccaacactttgaaaggctgaggtgggtggatcacctgagatctggagtttgagaccagcctggtcaacctggagaaaccccgtctttactaaaaatacaaaaattagccaggtgtggtagtgggtacctgtaatcccagctgctcggttggctgaggcaggaaaattgcttgaacccaggaggcagaggttgcagtgagccaagatcacgctactgtgctccagcctgggkgacagagcaagactccgtctcaaaacaaacaaacacactaacaaacaaacaaaaaaacccttcaatgccagcactcgggaccagagtgtgaaacattagactcaatagcaatcttgcttttctcatcagacaagaggatataagtcactacaatactgtacagaactttcgagttgccaagtaatttcttacatattagctaatctggatgttcataacagcctgggaagagatggaatatataattaacttaacttgaagatgaaaatactgaggttcagaaacatgttaaataacttagtcaaggtcacatggccagaaggagctgctgctgatgatggaaaagttgttcagaatccagatgagccaaatatccct

SEQ ID NO: 632705 - DNA, 584 bp, Homo sapiens
gtaggtgactgtgtctcctgtgtggccagcaagaaccctctaatgccttcacttaattctacttttgctttaattttagttctgttggctgttcttttatttgctgatagaaattacagtaattcaatcctcatayttgtttagtgttaaagaacagtgggtgagaagtagtcatggtttcggtgatttaaactttcactttttaggtttctttacaaattctgtttaacattcagagaaagcaaaataagtcacagcagtttaaaattatccagtttaaaaggtatggagtattattttaatattgagtctattttactctggtcttattatctgaaaactgataatcttgtggggaaccgaattaattcttttctttcttctataacttaattcagtggtgactccagtatcacaatgctgttaagtctcattagtataaacactagctgtgaactcccattcacaattgctacaatgagaataaaatacctgggaatacaagttgtgaaggacctcttcaagaagaactacaaaccactgctcaaggaaataagagaggacacaaacaaatggaaaaacat

SEQ ID NO: 632706 - DNA, 588 bp, Homo sapiens
taaacttttttcagtgcactaatttctatataatgtaacagatatttctatatcatatgacaaaggaagctgtcatatacaccatgaatatttgatataaatcacagacttataaattctaagattataatcagattacttaaccagcatttacttggggcatgactgcagagctagctgcagatgcaatggtgcaggtctgactggagagcaggagttggggacattgcagagtcagagaatccccagagtccccagcatctgggatgggaacagcttagaatgagaggtgggacaacacccaaaacaaatgttacttcccttacagttgtgcccattagatgttttggaatatcctttctctacgctgagccactgcctcacgtttttagactccrcagcttcgctccctggaggggaacattgtaggttgaggggtggtgcctctctctcggcattgtgtgatagtccaggacagttgggcccgtggaattgtattaaatcagtggaaggagggtttactacacttagcttagcaaatggcttacgtggttctcaaagtcatccccacatcagcagcatcagtta

SEQ ID NO: 632707 - DNA, 537 bp, Homo sapiens
tgctggctgtgctgcttggggaagcatgcccaggtgtctgtgcccacaccaaatttccctctgcttagctttctgaggaggccctcctgcctgtttttcaggtttctctctgttcacacaaatcaaatgtgtgtactcaaatatgctctcccaccactgacctcttggtgttctctgggctccttggcctggtctcaccttatgctaattacaggcagcaagcacagtgggctgtgatgattagaaaatatatgggtcaaatagaaaataaaattaaggctagtcttctttgttatgcaagtaaaagaagaaatgagtattcttactatttcacagacttcagtctttaaaaattattagaactatgaaaagttctttgttatacaagtaaaagaaatgagtattcttggtattccatagayttcagtcttttctttaaaaattattagaattatgaaaaaagaaacaatgaatgacactaacttttaagaagactgaagtgagatcaaacatgcaaaaggctctgtgctcttcgtt

SEQ ID NO: 632708 - DNA, 536 bp, Homo sapiens
cacctgatcaatgcccaacaaaacatgtagcctttctgcggtgggagagccaccctgccaactgagtctgagttcgcttctaaaaaatgtctggtccttaaagccttcttaagataaccacggatctccagattatttaagatgctggactccaaggatcacttaaaacaacagtctctatgttacaaccacrtaataaatgtgcttacttatttgggattagagatagacagtaagctcttttttttgtttgtttcaatctgtacttactggtgcagcttaaaggtttatagatgtattctctatactgacccctctcttatctacctggtgcttctcttactgaaacccagctaagtcccaaagagatattgatttgcaaatattgcaaagagctgattaccatttacattcccactgatggagaaaagatcctgcctatattgatataatggaggaactcaagggccaaagcctttcacccaatcaccaattaaaagcaaaattctacctaccacacattttcaagggggaat

SEQ ID NO: 632709 - DNA, 612 bp, Homo sapiens
gggatttttactattcttgttttagaattatggggtaaaaccgggaaggctgcagacatcagaggagagctctatattctcctactttaaaatgttgcctaagacaagcaacaaactcaatgtactttgccctctgagagagctcagaatccttgtcctcaggaatcatgygatcaatgcaaaggtaagacaaaaacccccaagtaggcaatgtctaagtgagggttgatggaggtgcttttaacaggaggtggaaactgaggaggtggaggagaatttggaaaatgtatcctgaggcaaaaatttagctctgcatctacttaaaaaatcaaactagctagagtacaacttcttttaactggcactgaaactgaagaaaacaagaaggagaaataataatgatttgaagaaaattaagctgtgaaaagaactccatagaacacgactataaaagacttctttaaaaaaaaaggacatactggaattatgggtgaatccataattgtctcaaaatgttttgtcttaatagatgacactgttaattattatttttgaattcccacttcatgctaagcttggtactgaggttgtatccatggtgtatatttgtta

SEQ ID NO: 632710 - DNA, 553 bp, Homo sapiens
gtgaaaatgtgctcgcctaagaacaaagggagggtctggcttaaacagggaaagtttctcaccccgattctcaatcaggtccacgtatgcaattgaaagatttaaacttgtgccagtctgattgggtggctcccaagccccaaactagaagtctttgtaagatagtcctccggccgggtggtggggagagggtgtgtctggccacagtttatctaggcmccatcagaaactggtttggcttgatcatacaaagggaggccctgtgacccttttgcgacacctttctgagaatactgactatatgatcgccagcccctcacgcaaccatggcagactggttctgtttttaatttcagcacctctgttggttacagagaatctgttttatctgttggccaggtacctacctaactctaatatggactcatggattcttattttattcaatcgctgttattattcattttgtgtacacctttaatccagaaattctccttctaagacttttcccacaggtaataattagtatcccatcactacttttttttttctc

SEQ ID NO: 632711 - DNA, 553 bp, Homo sapiens
gtgaaaatgtgctcgcctaagaacaaagggagggtctggcttaaacagggaaagtttctcaccccgattctcaatcaggtccacgtatgcaattgaaagatttaaacttgtgccagtctgattgggtggctcccaagccccaaactagaagtctttgtaagatagtcctccggccgggtggtggggagagggtgtgtctggccacagtttatctaggccccatcagaaactggtttggcttgatcatacaaagggaggccctgtgacccttttgcgacacctttctgagaatactgactatatgatcgccagcccctcacgcaaccatggcagactggttctgtttttaatttcagcacctctgttggttacagagaatctgttttatctgttggccaggtacctacctaactctaatatggactcatggattcttattttattcaatcgctgttattattcattttgtgtacacctttaatccagaaattctccttctaagacttttcccamaggtaataattagtatcccatcactacttttttttttctc

SEQ ID NO: 632712 - DNA, 573 bp, Homo sapiens
acctcctgctctcaacaagcactgatctgctgtcactgtagataacttgttctagaatgccatataaatgaactcatayagcatgtactcatttgtgtctgccttattttactcagcataatgcttttgggattcatcatgttgttatatatatcagtagcttgcaccttttttaaattgctgagtagttattcgttatatggatgtatcacattttatttgtccattcataagttgatggatagttggggttaatattaataaagctgccatgaatagtcacatacaaaaaaaaaaatcttttttttctcccgggtagtttctaggattttattttttatttctgatggtctacatgttcattctgacgttaagttatagatttattttagtttatctttattagcatttaataagtactttcaatttgtggacacatttcttaaaatctggaaaggttttagctattacctctttcaatattgttttcttccattccctcttgcttctcttctgaaatttcaactgacatttgttggagcctatcagtctatccaccgtgtatctgaacct

SEQ ID NO: 632713 - DNA, 573 bp, Homo sapiens
acctcctgctctcaacaagcactgatctgctgtcactgtagataacttgttctagaatgccatataaatgaactcatatagcatgtactcatttgtgtctgccttattttactcagcataatgcttttgggattcatcatgttgttatatatatcagtagcttgcaccttttttaaattgctgagtagttattcgttatatggatgtatcacattttatttgtccattcataagttgatggatagttggggttaatattaataaagctgccatgaatagtcacatacaaaaaaaaaaatcttttttttctccckggtagtttctaggattttattttttatttctgatggtctacatgttcattctgacgttaagttatagatttattttagtttatctttattagcatttaataagtactttcaatttgtggacacatttcttaaaatctggaaaggttttagctattacctctttcaatattgttttcttccattccctcttgcttctcttctgaaatttcaactgacatttgttggagcctatcagtctatccaccgtgtatctgaacct

SEQ ID NO: 632714 - DNA, 573 bp, Homo sapiens
acctcctgctctcaacaagcactgatctgctgtcactgtagataacttgttctagaatgccatataaatgaactcatatagcatgtactcatttgtgtctgccttattttactcagcataatgcttttgggattcatcatgttgttatatatatcagtagcttgcaccttttttaaattgctgagtagttattcgttatatggatgtatcacattttatttgtccattcataagttgatggatagttggggttaatattaataaagctgccatgaatagtcacatacaaaaaaaaaaatcttttttttctcccgggtagtttctaggattttattttttatttctgatkgtctacatgttcattctgacgttaagttatagatttattttagtttatctttattagcatttaataagtactttcaatttgtggacacatttcttaaaatctggaaaggttttagctattacctctttcaatattgttttcttccattccctcttgcttctcttctgaaatttcaactgacatttgttggagcctatcagtctatccaccgtgtatctgaacct

SEQ ID NO: 632715 - DNA, 458 bp, Homo sapiens
ccacaggtagcagctacccagactgaggctatctgaccttgatgctgagttcctctactgtgctcggaggggtccagaacccaaaactcagcacttccttaactcatgcatgctctgaacctgggagagggagaggtatgtgctgcctttcagtttctatgaggatggttttcttggaaagttctagagcagcgatggaggctctgagctctcagatggatatgagctggaatycgacttttcttgcccttttcttgctctgcctcaccttcctgggcctgagcttcttcatcggtaagctgccattgtagtgttgtcacaaggatcaaaggataatggttgtaaaatgcttagcaccatgcctggcacatggcaagcccctgatacacaagcactgggattagtatgtgcatcattctgtagctggtccagtctcttccggggcccctatagctatg

SEQ ID NO: 632716 - DNA, 571 bp, Homo sapiens
tggagtgataaggattaacacaaaaaacaaaaaaaactcccacaccagccatattgttgtcatgcaaggacacctccaagctccaggagcatctgtgctagtgagtgcctctgctggcccgggctcttagtattacgagctaattcacctgagaacctgacactctggcagttcaggcagaggaagcygagtctgtttgttgggctaatacagttttcttgttctaggtgagaaggaagcatgtagagcacgtgctcagtatttgctgggagctagtgaaagctgtggaatgccgctggtcaagctgcagagacagggcaactggggcaggtgatggcagtggcagtgctgttggtggcagatggctggggcccaggacactgagggtggcctggctccgtcattcctcagacaactgtgctggctatatatactccaaccctgtctatgtgtgaggcctcatgctggctgctggaagagctgccctgggagctggttgtgcttgaattttcaatgagttgatttgattagcggtggaggattgaggggaacagggaggacaggaaagctt

SEQ ID NO: 632717 - DNA, 571 bp, Homo sapiens
tggagtgataaggattaacacaaaaaacaaaaaaaactcccacaccagccatattgttgtcatgcaaggacacctccaagctccaggagcatctgtgctagtgagtgcctctgctggcccgggctcttagtattacgagctaattcacctgagaacctgacactctggcagttcaggcagaggaagccgagtctgtttgttgggctaatacagttttcttgttctaggtgagaaggaagcatgtagagcacgtgctcagtatttgctgggagctagtgaaagctgtggaatgccgctggtcaagctgcagagacagggcaactggggcaggtgatggcagtggcagtgctgttggtggcagatggctggggcccaggacactgagggtggcctggctccgtcattcctcagacaactgtgctgsctatatatactccaaccctgtctatgtgtgaggcctcatgctggctgctggaagagctgccctgggagctggttgtgcttgaattttcaatgagttgatttgattagcggtggaggattgaggggaacagggaggacaggaaagctt

SEQ ID NO: 632718 - DNA, 646 bp, Homo sapiens
tgtataaggctgctctgcttatgagcaataccccgaatttttcaaatcaccccttcctgtgtaaaggctgcttttaaagtgactgccatctttcaaagttaatgaacatttagggagcacttggttgaggctagggcaatttatatgtggtgctttaagaagtggtttttaataagagaaataaaagtacccatacgtgcaccaagcatacctgagtcatacctagggtggtaaatgtgcacaccacatatcacgccctgcctgccygcgtgtgcctacacatatatacctggcagaatcagggaacagactacataaaacccacctgcctattcattcatgaactcatctactcactcgaacatttgtcaaacacctcttctgtgcaagatgctttgcaataagatagcaaaagattcaaagatataaaaatatatgaaactatattagtccctactcataaaagcttatactcctgtacaagatattttcatgacccagagtaagacacatactttacacctccacaacttatcacatgtgcacacccacacacatccctcaccaaagtttaacaaagcaacaatccttataacctatgaagtgctctcatctcgtctggtctttcattttataaccactaagt

SEQ ID NO: 632719 - DNA, 580 bp, Homo sapiens
tgtgcctttgaaatgtctattgaatctgagttcttttcttggcagtgccccaccaaggccctgatggttccacttcctgggtgtctccttctcmtccacctcttctcgtcttattctctacagatctgtgcaattctcatcttcctgaaacgccatcttcacaaagtgactttccgcataagaacccagaacggctctgtccagcagactgtgggctgtgcacactttctgccctgcctctgcggcctttcaaaccaggcccatctcccggtcctgggttactttcctctgtgcccagggccacaatgagcatggtgggcaggaagtcagctcatggcctggttctgactgtggcctgatgcaagtcacttcgtctctgggtatctcaacttccccatgagtaaaatgggaaagtgagtatccgccttactgtcattatattcatatagctggtttatcatgattaatgcctgcacagggcgtggtgcacgtctgccatcactaagtctgtgaaactcacttccatgcaaccacctctgtttccccatcaactgaaatggcttcccttctttgtttctga

SEQ ID NO: 632720 - DNA, 458 bp, Homo sapiens
ctatattgccttgcagttgcccacgccatagctcattttctgcttctctacccactcaggaaatctcatgagatcttactatggtttatccctgtcagtttgacatttcacttccatctttaattttggagatctcactgtatactctccaatccaaatcacttatraaacaattaaacgaactcttaaaatttttctgtctagagaaacaatcttttttttctacctttggtttcctattaagcaaattctttatctatagcaaaataaataccactcccacatcactccctggctggtggttaatatcttgaccattccacagattttttgtttcagcattcctttccttatcaagggggaacatcataggaaagaccagactatggagtcaaatccacctgctttgtcatcaactagtggcccaaccagggccaggcacttagcatcctcaagct

SEQ ID NO: 632721 - DNA, 595 bp, Homo sapiens
ttttagacctttactggcagaggagacaccataactgaatgaacaccagcatcaacctgaccaggagactggagtggctcttattttgaagtttcttctttttaggcatcctcctgcccggtcacttcctaccctgctctccacgtgcagatactgagcaacaagtcctgctgggttgggcatgcacaaaactgaaaggccctactcccttatacatctgtgagtaggacacaaaataagccattacagtgcctgagracgtggtttaattgtactttaattccaacagtagatgtagcactggttgtgaggagctaatggatgtggaagttagccctggcttcagctatatgggcacccaggcctacggtggagggcagtgcaaccagtccaaaagcctgagcaggtctgcgtgctgctctctcaactcccacaacgggaggggcaggggaacgaatataagctatcagccttaaaatctgagcacgacctacctctgggagggcagacaccatattctatttgtttttgtaacctccaccccccggcacagcacctggtacacagaggtgctcaatagctgtttgctgacaac

SEQ ID NO: 632722 - DNA, 624 bp, Homo sapiens
aagttattagaaataatgaaatttcttgcataaagtcattgcatgaattacttaggtgcttgtcagatccctaatcagaaagagctgycagagatggcagagacttcacttgccaagacaacgtagtccatcagcaaatcagtggacttgggaaggaggtggttttccatttaagctgcagcatcacagaaagttaccctctaaagtcattcttagatgaatacttctatgtcatacacagctaaattccaacagtcaaaacaattattctaagctaattaaaatacaaataaaattttaggctatgggataacagatcatgagataaaaacaattctacgattgttggaggggccctgtatgatatattcagatcttgctcatctcttccaaatctttgtttttttaaatagaaaatgtaaattatatttagcttaagtctatgtttgaatttaaatcactaaaaaaatctactttctataaagcatttggagcaatcttgcatataatactcatttgcttagctaactctttttttctgtagataagtaaggtaaatgttaggccactagacaaaattatcatacatcttcaatcatcaatgtccagagtaatgagtcaata

SEQ ID NO: 632723 - DNA, 436 bp, Homo sapiens
ccctcagcctcccaaagtgttgggattacaggtgtgagccactgtgcctggcccagacatagcattttatttgaaatgagcttcacatttttttgtgatcattttcataacctccatgagtacaagacagaaagagtttcagcctgaatataactttaaacctttggcctaagytttcctagactgagcaaatacaggtgcatgtgtatgtgtgtgtgtgtgtgagagagagagagagagagagacacagagagagagagagagagagagagagagagagagagagaaacaactactcagggaaaaaggaactaactcgggggaggggaaagagacaagggaagcaggagaaaggagaggaaagcacagagagtttcatcactgtctcccttatcttcctcttaaagaaatgtccccaccaccacagatgtgttac

SEQ ID NO: 632724 - DNA, 436 bp, Homo sapiens
ccctcagcctcccaaagtgttgggattacaggtgtgagccactgtgcctggcccagacatagcattttatttgaaatgagcttcacatttttttgtgatcattttcataacctccatgagtacaagacagaaagagtttcagcctgaatataactttaaacctttggcctaagctttcctagactgagcaaatacaggtgcatgtgtatgtgtgtgtgtgtgtgwgagagagagagagagagagacacagagagagagagagagagagagagagagagagagagagaaacaactactcagggaaaaaggaactaactcgggggaggggaaagagacaagggaagcaggagaaaggagaggaaagcacagagagtttcatcactgtctcccttatcttcctcttaaagaaatgtccccaccaccacagatgtgttac

SEQ ID NO: 632725 - DNA, 546 bp, Homo sapiens
agccaggcatggtgggctcagtctccactaacgctggctcccatgccactgtactgctctcttggaaagatagggaccagactgcctccagcgacagagagttacctccaagaggtcacctccaggaggtaagcgactccaccaagcaggggccccaatacttgctgggttctccttagactgaagtaaaactgtctccttcaacttctatcattttgtcccagttctgctctcargaatacccttgaaattgtaaattttctcttccacataaaaaccataatcttgtagatttagatgtcacacatttatatgcctttacaaatgttctacaattattcagggtgttttatcccctctacactgagataagcctcccttttgttcatcattctgatttagtgagactttataattactagaagaggatgcatacagaaatgtgacttttccaaagtatattgaaagctaattttcaaaatggttggaaaacagacacactcatagcgccagctagagaaacatgtgcgtccaggagggctacgt

SEQ ID NO: 632726 - DNA, 589 bp, Homo sapiens
gaaagtcacttaaccaaagggtggttaacaagtactttgtccccatttggcaaaagaggtcagctaatcatttatgaggcaaagaaagggcatttggaaggactgtgtctggccttgtctgaggcagtcaaggggtgatccaccagacttctctaagtcacrtggggaaggggcgttctttgcaatcagtcattttccaggacacaaaggttggggtgattactcaacctttgctgttttccaggatccctaagggtcaggtaaaagtcaacattgtctgttcctgtcccctcctttctgtcctcactgtcagcagcctggccagctgccacttgcagtcacctgggatagtctctgccttcaggctcctctattccaagtctcctccaacctgccctcagaatttttctctgccataaatctaactaagttattctcctcaaaatcaagacaaaatgaaatgacaaacaaaccagatactcagttaagatgattcctgaactttctctcattaagcagaggatgaaggaacactctttagcatggtgtccaagacacctgactcacagtcccacctactgcctcacca

SEQ ID NO: 632727 - DNA, 579 bp, Homo sapiens
ctcaaaactttcaaaaacaaaggacaggagtgatgttagggaagatggtgggtaggaagtgccaggaatctgtctctctgcctagacaacaattgcactggcagaatctgactgatagaactattttggatctctggagtcttgcagcttccggaggtcagcttagatggtggtaaatcatggctaattttggtcaatttcagctcttagaacagtagcaactactcacttcccatcctccagccctgtggcaggcagctgtgccaacaatctgggtgcaacttgcatgtggctttcaagaaccagggtgggcaayaagtaccttgtcctccaaatattgaggatctgtgtcctcataactgactatgaaggtgcaggccagaggcctttatagcaatccccattgcctaaagtggcttccagggtatgtgaagataattgccttaaaaaaatttccctccagttttccccttctggggagccaaacatttaaggattagcacatttaaaagcaataacatatacaagggaatttagtaagtcaccatgcacgaccaaggaaagcagtgggctcagaaa

SEQ ID NO: 632728 - DNA, 554 bp, Homo sapiens
agccctgtggcaggcagctgtgccaacaatctgggtgcaacttgcatgtggctttcaagaaccagggtgggcaacaagtaccttgtcctccaaatattgaggatctgtgtcctcataactgactatgaaggtgcaggccagaggcctttatagcaatccccattgcctaaagtgrcttccagggtatgtgaagataattgccttaaaaaaatttccctccagttttccccttctggggagccaaacatttaaggattagcacatttaaaagcaataacatatacaagggaatttagtaagtcaccatgcacgaccaaggaaagcagtgggctcagaaatgacctgagaagaccttaagtttacacctcatgctgatgtctggcatggagctaccataaaacaattaaaaaaccccaaacaaacaaaaaccaaaatcagaagcagcaaaccctggggaaggcggggaatctgattaatagagatactatattatgagattcaaatggtcagtttcaacaacaaaaaaatacgtggtatatgaaaacaggaaagta

SEQ ID NO: 632729 - DNA, 579 bp, Homo sapiens
ctcaaaactttcaaaaacaaaggacaggagtgatgttagggaagatggtgggtaggaagtgccaggaatctgtctctctgcctagacaacaattgcactggcagaatctgactgatagaactattttggatctctggagtcttgcagcttccggaggtcagcttagatggtggtaaatcatggctaattttggtcaatttcagctcttagaacagtagcaactactcacttcccatcctccagccctgtggcaggcagctgtgccaacaatctgggtgcaacttgcatgtggctttcaagaaccagggtgggcaacaagtaccttgtcctccaaatattgaggatctgtgtcctcataactgactatgaaggtgcaggccagaggcctttatagcaatccccattgcctaaagtggcttccaggstatgtgaagataattgccttaaaaaaatttccctccagttttccccttctggggagccaaacatttaaggattagcacatttaaaagcaataacatatacaagggaatttagtaagtcaccatgcacgaccaaggaaagcagtgggctcagaaa

SEQ ID NO: 632730 - DNA, 579 bp, Homo sapiens
ctcaaaactttcaaaaacaaaggacaggagtgatgttagggaagatggtgggtaggaagtgccaggaatctgtctctctgcctagacaacaattgcactggcagaatctgactgatagaactattttggatctctggagtcttgcagcttccggaggtcagcttagatggtggtaaatcatggctaattttggtcaatttcagctcttagaacagtagcaactactcacttcccatcctccagccctgtggcaggcagctgtgccaacaatctgggtgcaacttgcatgtggctttcaagaaccagggtgggcaacaagtaccttgtcctccaaatattgaggatctgtgtcctcataactgactatgaaggtgcaggccagaggcctttatagcaatccccattgcctaaagtggcttccagggtatgtgaagataattgccttaaaaaaatttccctccagttttccccwtctggggagccaaacatttaaggattagcacatttaaaagcaataacatatacaagggaatttagtaagtcaccatgcacgaccaaggaaagcagtgggctcagaaa

SEQ ID NO: 632731 - DNA, 531 bp, Homo sapiens
atttccagacaaacaaaagttgaaggcattcattttcagtagacctgccttgtaagaaatgctaaagggagtccttcaagttgaaatgaaggactctagacactaatttgaaggcatatgagaatataaagttctctggtaaacaaaaatacatagacaaatatttaaaaaacagtattactgtaattttggttcgtcactttgcttcttattttctacatcatttaaaagactaatgcataaaaacaattattagcctatgtttttggacacgtaaaacataaagatgtaatttgtgatacaagtaactgaaaagtagtgagaatggagctatataggagcggaatttttgtatgctattgaaattaaacgggtagaaattcaaattaaagagctacaattttagggtgttaagtgtataatgtacatggtcatcacaaagaaaatragtacagagtatatacaaaaagaactgaaaaaggaatttcaaattgtcacaacaaaaattcactaaacacaaaagaatacaat

SEQ ID NO: 632732 - DNA, 610 bp, Homo sapiens
ggagattgagtcagtaatcaacacccccttgttaaagataagccctggacgagactgcttcactggtgaattttaccaaatatttaaagaactatcatcaatttttctcaaacttttacagaaaactgaagagggggaacactttctaactcatagaaaggcattcaaatagaaaaggaagaaggagaattatctctcttcacagatgacatgatcttacatgtagaaaaccgaagaaatcctaacatgtccactgatagatgaacagataaattatgtcatatatatccaacgggatattatttacctttaaaaaggaaggaatgaaattccmatatgtacttcaacatgggtgaaccttgaagacatgacattaagtgaacacaaaaggacaaatattgtatgattctgtttatatgagatagtgagagtagtcaaattcatagagacagagagtagaacagtggttaccagggcctgcagggagcggcaatggggaattattgtttaacgggtgaagagtttcagtttcaggtgatgactaacttctggagatggatggtgatgctggtctcacaacaacaaaaatattcttaatgccaccaaagtg

SEQ ID NO: 632733 - DNA, 615 bp, Homo sapiens
aagcttgagaaattctccaagcagaatcaactttcytaaaccttaacattcttaatgaagcaagtggacatagaacctctccctctttctccccacccacaaatggtgtccctccacttctgggagagtatttgtagctgttactacctgtaaaagtagtaagaagtgtcagaaaagaggtacttgtctttcaacactgtgggactgattccacacaacttaagcctccgatacaatcacttacaaaaaacaaataaggcctgacaacaaatcggaatgtttcaaacaaagaataagtaccacgctccctactttagagatcttccctttgaatagtgtgtctccatttgtaaagatgcacacagccccagatgtaatataacacagctccttattacaggggttctggcagactgcagtggaaatgagtcaattctgaaacgcccttcagagtgggagcagggaggagttctgtgcaggtgagcgtctggcccagcagccacaccagtgttaggacagggtcccctgaggccccgctgatggtggagggtcctcagaagggtctctccagcttttggaagtgcccacctgaccgtcctctcattactcctggct

SEQ ID NO: 632734 - DNA, 615 bp, Homo sapiens
aagcttgagaaattctccaagcagaatcaactttcttaaaccttaacattcttaatgaagcaagtggacatagaacctctccctctttctccccacccacaaatggtgtccctccacttctgggagagtatttgtagctgttactacctgtaaaagtagtaagaagtgtcagaaaagaggtacttgtctttcaacactgtgggactgattccacacaacttaagcctccratacaatcacttacaaaaaacaaataaggcctgacaacaaatcggaatgtttcaaacaaagaataagtaccacgctccctactttagagatcttccctttgaatagtgtgtctccatttgtaaagatgcacacagccccagatgtaatataacacagctccttattacaggggttctggcagactgcagtggaaatgagtcaattctgaaacgcccttcagagtgggagcagggaggagttctgtgcaggtgagcgtctggcccagcagccacaccagtgttaggacagggtcccctgaggccccgctgatggtggagggtcctcagaagggtctctccagcttttggaagtgcccacctgaccgtcctctcattactcctggct

SEQ ID NO: 632735 - DNA, 562 bp, Homo sapiens
aaatataattcagtcccatctctgttgagtgtgggtgatagacaagtacataaacctaaatgagtaaactttttactcacatctcttttgagacaaggagtcctttgagtggcttaagtcactcagtgcttgaaaccttcatttcaaggtttatgaaaagaacctacattagtcctagtctgagaaagagagacacctgaaggtggcaagcccctaaaccatcctattcttggctccactcgacccttatcctgccattcccatggctggccttctgctctccactctcagttgtagggtcacaggggaggagattaagtcaacataataatatatttacaaatcacataatttctataaaatttgagttgtttttttgccttgattcctagaatttaaaaaagtaaaacaagaacaacagcaaacttgtgatctgtttagaaaatgtgtcacaacaaagaaatagcagtggctgacacttttgacagattcccartcaggagtcaggggttgtgctgtttcacctctatcacattattcaatcctcccaacctgaaaagat

SEQ ID NO: 632736 - DNA, 609 bp, Homo sapiens
tcatctagatatataccttgatgacacaggtgagggtcaagagaaccatttatatcaagggttcctcttttttttttttttcataatcctaattaaacacaaraaggaattcttcttaagtatagttctagtttctggtctgtgggctatggctgttctccagatgaatgatctcacctatcaggtaggtgagtccctggttcctcctaatagcgagtagcttggtccctttctgggataataatgtagtcatacagtcccgtggatgactgataacatcaagagggtgaaaattatatacattcaaatgggcttttatcctaatctaataaaatattgctaaataaatggcgtaggcaatgtccttgagaagtctcaacagtcttgaatgaattagcttgaaagacttcttttggatctgttcagaatagaattgcggaagcgagtacggaactgttggatgagccatcagtaagttatgttaggaacatatttgtgtttagcaggtgtgtgatccgtggtagacaaggagcctctggacactgatggtattttatctcagacttaggcttttcaaagaggtaggaatcagattgtgaatacttagcc

SEQ ID NO: 632737 - DNA, 538 bp, Homo sapiens
aaaaaaaaaaaaaaaaaaaaaaaaagataaaaaagatcttcacaaacatttttaaatggtaaaaggaaagcatggaggtgggaggtgtttttgcaaatacaggactataaagatccctgcaagagccagaacctaaacgtttcttaraaacagaacagtgactggttcactgggtcagtaaccttcagactcagtagagatcaatgcacagattttgaagtcaggctctcttgggtttgaatccagtcatgtcatttaataactctggaacttcaggtataaccactctcttaatttacttatctctaaaatgggataataacatctgattcatagaatgagagtaataaaaatcttacttctattactatcttttgctgcttttgataatataaagtatcacaaacccaaaggacataatagttatataagcagcaagtcaaaatgaccccaggaaagatgcttcagcagaaagaggcaggatatccagcatgttaaacactccattcaagcaaaggaagacgaaggctgatctact

SEQ ID NO: 632738 - DNA, 538 bp, Homo sapiens
aaaaaaaaaaaaaaaaaaaaaaaaagataaaaaagatcttcacaaacatttttaaatggtaaaaggaaagcatggaggtgggaggtgtttttgcaaatacaggactataaagatccctgcaagagccagaacctaaacgtttcttagaaacagaacagtgactggttcactgggtcagtaaccttcagactcagtagagatcaatgcacagattttgaagtcaggctctcttgggtttgaatccagtcatgtcatttaataactctggaacttcaggtataaccactctcttaatttacttatctctaaaatgggataataacatctgattcatagaatgagagtaataaaaatcttacttctattactatcttttgctgcttttgatartataaagtatcacaaacccaaaggacataatagttatataagcagcaagtcaaaatgaccccaggaaagatgcttcagcagaaagaggcaggatatccagcatgttaaacactccattcaagcaaaggaagacgaaggctgatctact

SEQ ID NO: 632739 - DNA, 601 bp, Homo sapiens
tgatgttctacagagaaaggaggctacactaaagaataagaaagtgattattcagcaatgttatctgaacttaatgcaagtcacatccaatgaatcagtcaaatactgcatgccacaggaaggtaacgtgtcatgcacaaggtgggaggatcaaggtggctaaactgaaatctgcataacaccttttttttttttttttttttgagacggagtcttgctttgtcacccagctgtagtgcagtggcatgatcttggctcactgcaacctccacctccctggttaagcaagttcctcctgcctcagcctcccaagtagctgggattacaggccccagctaatttttttgtatttttagtagagatggggtttcaccatgttggccagactggtctcaaactcctgacctcaggcaatccgcccgccttggcctcccmaagtgctgggattataggcgtgagccaccacacccggcctgagaattgtcatatttttaattaaattaaattaaaattgtcatatttttaatttaacccgaaatctgcaaaacacttttaagtaatgtcttttccactatctgcttcgacatcagtggggtgccaa

SEQ ID NO: 632740 - DNA, 601 bp, Homo sapiens
gtattgcttccatactgattacataattgaaactgagatatagacatattttggagcaacacaaatattttaagtatttcactgaggaagtttagatttagtaaatttttaaaagtccttcatcgttcattcttcattaaaatgtatttgctgatgagtatcttattaaaagggggcacattggaaagatatgttttatgatgcagtgcatgtatgctaaagaaagatcttcagattcttataacattcttattaagaatttgattctaaagccaagctacctaggcttcaatcctgcacctgccacatactaggtgtaaattacttaatcttgggttaattacttaatctctgtgtgcctcagtttctgtatttctaaagcaaggttaatgataaggtgggtgttaggaggtttaaatgagttagtacttccaaaccactaagagttatgcctggcccatagtaaacatttcgtatatggtagmtgctgctactgctgctgccaccaccatcactgctactattattattattattgagttctacaagcatctggtgagatgtgtaaagcccctgtgaaagttctcatagaaccttagta

SEQ ID NO: 632741 - DNA, 543 bp, Homo sapiens
ttattattattattgagttctacaagcatctggtgagatgtgtaaagcccctgtgaaagttctcatagaaccttagtaagacaccatgtatttatgatacaagcttcttgcctttttaaaaattttttattttatttaaagcttcttgtcttaatgagagrccctgtataccactctgcactgaaacatgatttgacccagaccgtaacgacatctatggagtaataaagtattttttcataggattttaccgtataagcaattgaagaaatggcagaagacccattagcttttggagtctgttcctttgagaccaacttgctaggaatccatttcctatctttttaaaaagagtaaattaattttcctcattgacattctgtaaacagaatactggcagcttatattttatggaacgtaatgttttaaagtgaacctaatttttcttagtaaactgcttttaataatgcatcagagtaatttttttccctctgttgtcaggttgctatcaagatcatagataagacccagctggatgaagaa

SEQ ID NO: 632742 - DNA, 529 bp, Homo sapiens
aagaaagtccaaatagaaaaaagcagaaatgaaaaaagagacattataacttacaccatggaaatacaacagattatcagatacctttataaacaactgtatgctaacatactggaaaacctcgaggaaacagataaatccctggatatctacaacctaccaatattgaaccaagaagaaatagaaaatctaaatgactaataatgagtaacaagattgaattggtaatttttttaagtctcccaaaaaagaaaagccaggattgggtggcttactaccaaattctaccaaacttataaagaaaaactaagaataattctcctaaaattattccaaaatattgaagaggagagaattttccctaactcattctacaaggccaacattaccctggtaccaaaaccagataaggacacacacacacacacatacacacacacacacacacacacacacacacacaaagaaaactacgggccaatatccctgataaayatagatacaaaaaattatcaacaaaacactagca

SEQ ID NO: 632743 - DNA, 584 bp, Homo sapiens
gaattcagaccttttatagtgcttctctctccttccagctacttagaacaagctacttagaacaagcccagctttacttgttyctctttctcccccctaacactcagtattatacttcagaagcttggtaagaaaggggaagatgatatctcttattgacttgtttccttttaagacctatttagatagatgagttaactccattgactcaatcacttggttttactttgagagttaataatttccaccagtgtccaacattttggcttccctgggccatattggaataagaattatcttgggccacacataaaatacaataaaactaacaatagctgatgaggttaaaaaaaaaaaagggtctgtgcttaactttggtgatttccgccaccaaagataagcaaaatagtcctcactttcaaagggttggacactcatgatcctctaatttaacagttatgttgcttagtatggaagcatactgactctctgaaccctaacagttgagcatgagcatgattgttgtagtatactgattataagcatgggtactgtggtaggcagcatcttgactccccagagat

SEQ ID NO: 632744 - DNA, 568 bp, Homo sapiens
ctacatgcctctattttcttattatttatttgtttttaataatataaacttcacactatgatctcttaggacaaaaaatgacaggggaaagcacgaacacagtccctcactactacaaattctgcatttggggaaatcacaggggtcagcacaaccaaagtgcaatggatgagcctcactctgagaaccaccttcatgatcatggtatctccccagccagataagtgtattgtctattttctttttgtttgttctagtttttctaatttacagagcaacttcttgtttcagaaatgagaagataaaaaggagataaactatgtgttctgtgtcacctattatttcaagtttcctgaactayagattcatgacttcttactctagctataaatttatctctaagaatcatcaatattgtttttccttttctgaaacatcggtcattgtaaaaatcctattcatcttctgacaacatcctaagagcttcacaaccctcttttctacttgacatttgttatgagtttctccttctgacttacagtgcatgcattaaaacaaaaacaataca

SEQ ID NO: 632745 - DNA, 568 bp, Homo sapiens
ctacatgcctctattttcttattatttatttgtttttaataatataaacttcacactatgatctcttaggacaaaaaatgacaggggaaagcacgaacacagtccctcactactacaaattctgcatttggggaaatcacaggggtcagcacaaccaaagtgcaatggatgagcctcactctgagaaccaccttcatgatcatggtatctccccagccagataagtgtattgtctattttctttttgtttgttctagtttttctaatttacagagcaacttcttgtttcagaaatgagaagataaaaaggagataaactatgtgttctgtgtcacctattatttcaagtttcctgaactacagattcatgacttcttactctagctataaatttatctctaagaatcatcaatattgtttttccttttctgaaacatcggtcattgtaaaaatcctattcatcttctgacaacatcctaagagcttcacaaccctcttttctacttgacatttgttatgagtttctccttctgacttayagtgcatgcattaaaacaaaaacaataca

SEQ ID NO: 632746 - DNA, 439 bp, Homo sapiens
ccagacttctgaatgctattctacatttgtctcactctaactaaactggttatctttctggtttttttttatttgtatgaatttaaggggcacaactgcaattttgttacatgaatatattgcatagtggtgaagtcttggcttttactgtatcccatcacctgaataatgtacactgtagctattaagcaatttatcataaactttcaactcttaaacctgccctactctcccccaactctgaactgtccactctggtgctagtggtctgcacttccttccaccacatcttcacctggctcagacaagtccttcaaagttgaagcataaacttgacttcctcaggcacctcttccattcaaggttayattcttctctaattagatgtcccaatttaagtttataacttcagtttcacagcactcttcacacttaaaat

SEQ ID NO: 632747 - DNA, 580 bp, Homo sapiens
tgtcttccatcttaaagctaagcacaggtctgttcccaaaagatgaagggttaatgatcagaaacagyggtgaatataaggcactgtgatgtgctagctagcaagcagaactgcgaataccaggatctatcagaagttccaactaaacccattcaaacaaagaaatcgctgactgacacaactcgatgtgcgcccactcctggttaaaggctacagagtaaataagctctgttcatgaatctttaggcctcagcaacctaagcaggagcaaccctagaatactctgggtaggagccggaataggtccgggcatcactgaaatcacccctgcacctgtacttggctgagtctcagtaaccatcgtttgtaagccacgtcactactttatccaccgcgaggaaaggaaagggggaaaatacttcctattaaacaataccagaacatttatcataagaggcatcccaatttaaagatgattaaaatgtgagaggaaaaaatatatgtcttagaataaaatgaaacatgataaatttttctacactccagattggaacctgttccctacctcccgttttaagag

SEQ ID NO: 632748 - DNA, 571 bp, Homo sapiens
ttacaacagcacacaaaaaaagaactgatagagttttatataaaaattaattgaaataccatatgcattgcctggatgtatttcttcagtattcttaactgacctgtgactctctgagtaattacctgcagatctttaaacttggcgagaattgaatcaaacgcaaataaaaagacatgttacatcttttgtgttaggaataaaacggagactaataccctttgagaaaaataacttggacattatgatgatggttattatggcaagaaaaaaaaagtgtgtggggatatggtaccaagaaaatatacttttcccatatagtctcactattagaaatagatcccattcaaatwccttttctttaggaaaaaaaaagtctacatatcttagtccattttgtgctgctgtaacagaatctctgagactgggtaatttgaaatgaacagaaatgtattggctctcagtgctagaggcgggtgagtccaggatccaggcaccagcatgaggtgtggtgagtgccctttgctgcgtcctttctggcaggaggtggaaaggcaagagggcaagagaa

SEQ ID NO: 632749 - DNA, 554 bp, Homo sapiens
aaaggtaattgcagtttttgcaattttaattgtaagaaccacaattatttttgcaccaacctgataaattacccagtcttgagtatgtctttattagcagcatgagaatggactgatacaaatataaatcattctatcataaagacacatgcatgcacatgttcactacagcactattcacaatagcaaagatccaaatgcccaccaatgatatactggataaagaaaatgtggtacatatacaccatgaaataatggacaaccataaaaaagaatgaaatcatgtcctttgcagggagatggatggggctggaggccattatcctaagcaaactaatgcaggaccaggaaaccaaataccacatrttctcacttataagtgggagctaaatgatgagaatacatagacacatagaggggaacaacacacactggggcctgtcacagggcagaaggtgggaggagggagaggattaaaaaaaaaaacagcaactaataggtacttggcttaatgcctgggtaatgcaataatctgtacaacaaacccccatgac

SEQ ID NO: 632750 - DNA, 595 bp, Homo sapiens
agacacacatatgaatactctccactcccactcccatagcagatatcccaataactcctggcattgagatgggagtcatcttaaatcatctcagtacagcctctaggccatcactaccacatgatcacagctggcactaatgaggaaataaaattgtcatcccagtgttgggtactaatacatcctaagatgacataaatttttggcaatcatttgatacgccagctctgagggagccgactaaagttcttaagtcattttcccatatgttgctactaaacaacatccccctccatcctttattggtacacttacttgtttctggttttatggctttagcttttgttttgtttctgcaatcagakgcaaagacttgtattcaaccatcttcaattaagatgtcatttaataaagatgtaaaactcattattgagcccaatgttctatggttgtattaaaaacaatataatttactagcacaatatgggagaggagcatgagtagcaaaaagtcatcaaaaatcacagctttacatatggagagaactgaggattttggatgatgtcaagcaaattaagagtcaataatgagacat

SEQ ID NO: 632751 - DNA, 595 bp, Homo sapiens
agacacacatatgaatactctccactcccactcccatagcagatatcccaataactcctggcattgagatgggagtcatcttaaatcatctcagtacagcctctaggccatcactaccacatgatcacagctggcactaatgaggaaataaaattgtcatcccagtgttgggtactaatacatcctaagatgacataaatttttggcaatcatttgatacgccagctctgagggagccgactaaagttcttaagtcattttcccatatgttgctactaaacaacatccccctccatcctttattggtacacttacttgtttctggttttatggctttagcttttgttttgtttctgcaatcagatgcaaagacttgtattcaaccatcttcaattaagatgtcatttaataaagatgtaaaactcattattgagcccaatgttctatggttgtattaaaaacaatataatttactagcacaatatgggagaggagcrtgagtagcaaaaagtcatcaaaaatcacagctttacatatggagagaactgaggattttggatgatgtcaagcaaattaagagtcaataatgagacat

SEQ ID NO: 632752 - DNA, 593 bp, Homo sapiens
acaccatgtaaataactttgtaactttacttcattgtcttcgtttacagagggcataccccaagtagagggtatttaaattcacagaaactctgtaacagggccttttagcccctgtgcttggccactaccacactgtggagtatactttcattttcaataaatccttttattccttccttgctttgtttgtgcattttgtccaattctttcttcaagatgccaagaacctagataccccccaccattaacataccttggcgagccagccaggaggaagaggtaagcccaaagtttggaatttattattctcctttctccttttcctttctgctccatacaagggaatctcttttcctttacaacctggggcccttggtgggcagcacctaaacatggaagcaactgcaggtttctggccatggccagtgaaactgagaggtttcctcgtggagaagcctgaccaccaccaccggtttgcttaaggaacctgggtcrctttcattttcttttcttctctttctcttacagtcttgcagtggctgttttccagtagctctttggaaattgagggcaatttgctggggtcactcc

SEQ ID NO: 632753 - DNA, 593 bp, Homo sapiens
acaccatgtaaataactttgtaactttacttcattgtcttcgtttacagagggcataccccaagtagagggtatttaaattcacagaaactctgtaacagggccttttagcccctgtgcttggccactaccacactgtggagtatactttcattttcaataaatccttttattccttccttgctttgtttgtgcattttgtccaattctttcttcaagatgccaagaacctagataccccccaccattaacataccttggcgagccagccaggaggaagaggtaagcccaaagtttggaatttattattctcctttctccttttcctttctgctccatacaagggaatctcttttcctttacaacctggggcccttggtgggcagcacctaaacatggaagcaactgcaggtttctggccatggccagtgaaactgagaggtttcctcgtggagaagcctgaccaccaccaccggtttgcttaaggaacctgggtcactttcattttyttttcttctctttctcttacagtcttgcagtggctgttttccagtagctctttggaaattgagggcaatttgctggggtcactcc

SEQ ID NO: 632754 - DNA, 438 bp, Homo sapiens
cccaagagtatatgccctttgtcttcagttaccagggtgagtagggaaggaccatcaggtgggggcagggctgggcatgtctgagctcagactctccttgggcaggtcttgctgatgctgctgtggagggtgggcatgaggttctcaggtcaatagagttgcgtacctaggaggattatggctgcatctgctgmgtcatgcaggttgtcagggaagtggagtaaagctggcagtcaaaggcctcatccagctgtcatgcaattcaaagggccccagtctcactgccaccatgctccctccaacagcaccgagtctgtttccaggcagtgagcaagcagggctgagaacttgccccaggctacctgcttcccagctgtgaaagaaaagggctttagctttagttcttcccccatctatggtgtctgcacaccagattcc

SEQ ID NO: 632755 - DNA, 580 bp, Homo sapiens
atcgtaccagctcttctttgtacatctgacagaatttggttgtgaatctgtccagtgctgtgctttttttggttggtaggctatttattactgattcaatttcagagcttgttattgatctggaacaaatatttcttaaaagaagacatataagtggccaagaaataggtgaaaaacgttcaacatgactaatcatcagggaaacacagacaagactgcaatgaaatattctctcaccatagttaggatgccaactatcaaaaagacaaaaaataacatatactggtgaggatgtggagaaagggaactcagaygctgttggtgggaatgcaagctaatacagccactatggagaacagtatagcagtttctcaaaaaaccacaaatagaaccaccataggatccaccaatccctctactggacatttacccaaaggaaaagaaacagtatataaaagagacatctgcactccagtgtttattgcagcactattcacaatagccaagatacggaatcaacataggtgtccaacaacagatgaatgaataaagaaaatgtagtatatatataatggaaaac

SEQ ID NO: 632756 - DNA, 611 bp, Homo sapiens
tccattcattaaaactgagacctaagacgcaattacagcaaagtttcaggatgcaaggtgttaaatcaaatttagcctaaagctgcctccttacatattttaagttcaacctgaaggtttctctgtacatgagctataataagtggagatgtaaacagactatagactactcttgtgtcaattgccaagttttggccaatcacatgtggccagcttttcaaactgtgttcaaataaggcaaaygccaagctgtaaccaatccagctgtttctgtacctcacttccattttacgtacattattttcctttttcatccataaatcttctaccacttgactatgctggattctctgagcccactgtggctcaggaggctgcctgattcacaaactgttctttgctcaaataaactcttttaaatttaatttgactgaagtttttttttttttaaccaatggttaatatacaaaagttaatcactttcctatatacttgcaatgaacaagtggaatttgaaattcaaagctcagtaccatttacattagcatccccttaaaaataaaatacttaaaaataaatctacaaaatatcagccaggaatggtggctcac

SEQ ID NO: 632757 - DNA, 474 bp, Homo sapiens
ttattctatagattctaagaaactgattctaaagtttacataaaggggcaaagactcagaatagccaacacaatattaaatgagaataataaagttggaggactgatactacactactataaaatgaaaggaatccaaacagtgatmgtgacaaataatagacaagcagatgaatggaacagaatacagaactcagaagtagacccatataaatatagtcaaccagtctttgacaaagaacaagggcaatacaatgaagaaaaaataatcttttcaacgaaaggtgctgaaacaactggacatttacatacaaaaaaaatgaatctagaaacaagccttacacccttcacaaaaatgatctcaaaatggatcacagacttaaatgtaaaatgcaaaactttaaaactcctagaagataacatagaagaaaatctagacaatcttgaatttggcaatgacctttcacatacaaca

SEQ ID NO: 632758 - DNA, 579 bp, Homo sapiens
aaaaaaaaaaaaaaaagaaaaaataaataaatctaataaaatatgtacaagctctatatgagaaacaccataaaactttgtttaaaaaaaagaaagaaagaaattgggagatattccatgttcatgggtagaaagactcaatattgtcaagatgtgagctcttcccaaattgatatataagctcaatgtgagcttagccaaaattctagcaagttattctatagattctaagaaactgattctaaagtttacataaaggggcaaagactcagaatagccaacacaatattaaatgagaataataaagttggaggactgatactacactactataaaatgaaaggaatccaaacagtgatagtgacaaawaatagacaagcagatgaatggaacagaatacagaactcagaagtagacccatataaatatagtcaaccagtctttgacaaagaacaagggcaatacaatgaagaaaaaataatcttttcaacgaaaggtgctgaaacaactggacatttacatacaaaaaaaatgaatctagaaacaagccttacacccttcacaaaaatgatctcaaaa

SEQ ID NO: 632759 - DNA, 572 bp, Homo sapiens
tttcgtaggcccaaatggacttggtcaatgtgggaagaattataatcttcctgtrcagaggggctgacaacaaatgttggacagtaaaacaaacagccacagcctttctccagcctcgtctcccacctcagtctctgtacccaggattctaagcccatggtgccacttgtgctttgcgaaagccctgtgttctcacgactttccatttgccttcccctgcccagaatgcccccttctcttattcatctggagaccttcttctccttcatgtgccacctctccagggatgcttcttctttttttcattttatttttagagacaggatctcactcggtcacccaggctggagtgcagtggcataatcttaactcattgcagcctccaactcctgggctcaagcaatcctccctcctcagcctcccaagtagctgaaactacaggcatgcaccaccatgctcacctaattaattttttttttttgtagagacaaagtctcactatgttgtccagggtggtcttgagctcccgacctcaagtgatcctcccgccttggcctcccaaactgttggga

SEQ ID NO: 632760 - DNA, 572 bp, Homo sapiens
tttcgtaggcccaaatggacttggtcaatgtgggaagaattataatcttcctgtgcagaggggctgacaacaaatgttggacagtaaaacaaacarccacagcctttctccagcctcgtctcccacctcagtctctgtacccaggattctaagcccatggtgccacttgtgctttgcgaaagccctgtgttctcacgactttccatttgccttcccctgcccagaatgcccccttctcttattcatctggagaccttcttctccttcatgtgccacctctccagggatgcttcttctttttttcattttatttttagagacaggatctcactcggtcacccaggctggagtgcagtggcataatcttaactcattgcagcctccaactcctgggctcaagcaatcctccctcctcagcctcccaagtagctgaaactacaggcatgcaccaccatgctcacctaattaattttttttttttgtagagacaaagtctcactatgttgtccagggtggtcttgagctcccgacctcaagtgatcctcccgccttggcctcccaaactgttggga

SEQ ID NO: 632761 - DNA, 563 bp, Homo sapiens
ttacttgagaatggtaatgacgatggggttatagaactggaaaaaagcaacaacaaaaaccttattgcttgctttacctaaaaaaaaaaaatcttcctcactgtgcaaaagtaactgataatatctcttctatggttctattaactggttaaattctaggattttttcttttttgagacagagtctcactctgttgcccaggctgctggagtgcagtggtgcaatctcagctcactgcaacctccgcctcctgggttcaagtgattctcctgcctcagcctcgcgagtagctgggattacaggcatgtgccaccatacctggctaatttttgtatttttggtagagacagggtttcgccatgttggccaggctggtcttgaactcytgacctcaggtgatccgcttgtcttggcctcccaaagtgccgtgattactggtgtgaaccaccacgcttggccagaattccaggatttaaaaaatcttttaaatgtccactttttatgggttgtcatatggctgtttcatttctcaggggttcatagcttccttaaactgttttgcc

SEQ ID NO: 632762 - DNA, 563 bp, Homo sapiens
ttacttgagaatggtaatgacgatggggttatagaactggaaaaaagcaacaacaaaaaccttattgcttgctttacctaaaaaaaaaaaatcttcctcactgtgcaaaagtaactgataatatctcttctatggttctattaactggttaaattctaggattttttcttttttgagacagagtctcactctgttgcccaggctgctggagtgcagtggtgcaatctcagctcactgcaacctccgcctcctgggttcaagtgattctcctgcctcagcctcgcgagtagctgggattacaggcatgtgccaccatacctggctaatttttgtatttttggtagagacagggtttcgccatgttggccaggctggtcttgaactcttgacctcaggtgatccgcttgtcttggcctcccaaagtgccgkgattactggtgtgaaccaccacgcttggccagaattccaggatttaaaaaatcttttaaatgtccactttttatgggttgtcatatggctgtttcatttctcaggggttcatagcttccttaaactgttttgcc

SEQ ID NO: 632763 - DNA, 563 bp, Homo sapiens
ttacttgagaatggtaatgacgatggggttatagaactggaaaaaagcaacaacaaaaaccttattgcttgctttacctaaaaaaaaaaaatcttcctcactgtgcaaaagtaactgataatatctcttctatggttctattaactggttaaattctaggattttttcttttttgagacagagtctcactctgttgcccaggctgctggagtgcagtggtgcaatctcagctcactgcaacctccgcctcctgggttcaagtgattctcctgcctcagcctcgcgagtagctgggattacaggcatgtgccaccatacctggctaatttttgtatttttggtagagacagggtttcgccatgttggccaggctggtcttgaactcttgacctcaggtgatccgcttgtcttggcctcccaaagtgccgtgattactggygtgaaccaccacgcttggccagaattccaggatttaaaaaatcttttaaatgtccactttttatgggttgtcatatggctgtttcatttctcaggggttcatagcttccttaaactgttttgcc

SEQ ID NO: 632764 - DNA, 568 bp, Homo sapiens
taaagcttgttaatcatgtaatcatatttttatatctgtgctaatttttgcattcttgatctatcagctgcatagagaggtgtgtatcagtaattccctgcatgactgtggatgtgtcaatttcttattattctgccacattttcattcatatatttgaagctctccttttggatctctgactggagttgttcaataattttactccaaggcagtgatatcattaactcactcgtttacctctggcattccatttcctctccatttctggcattmtttatctctccgagcttcagttcatatattcaaaatcattttacacattccaactagtacttctaaaggcttgaaatggaagagttgtcatactgccagaacctgaagtttacagaattcatttaacctataaaacgggatgagatcacctagggagagagtgtaaaatgaagagaagctcagagaggaatgacccgcaggaaactccaatatttagaagatgaatgaaatgagataaactggagtatgatctccctttattctagaatttttgcaagctgtcttcctgttag

SEQ ID NO: 632765 - DNA, 613 bp, Homo sapiens
cacatagtacaatgagattagagtaaatcctgaaagttctgaaagatttcagagatctatgaaacttcttgggtcaaaaaaaaaaaaaattaaccagaaatgttatgaaacaatttctctcacaacatctagaatgcttctgcagtycccaaggttgataattacattatgcagagacagaattaaaaacaaaaaattacctaaggatatacagtgaatgtgctcattaataagtatttaaacttgggaaagatataagggagcaataatgctgtgactgatactagttctaatggaaaaataccaacaagttgcttcaaaaaatgaagaaaacttctttgcaatgactgagttttcagatgtacacatcagttctcctacattcttaaatatattaaacccaatttgcatatggttatattaaatcaaattactgtataacacttaaaatatttaatttggaatgtgtgcaaaaaatcaaggctaaaaaacaaaaaaaaattctattccattattacaatttattataaatattctctaacagaaaagtagtatttttttcaaattttcttctttaaattaacatataaaattgtatgtatttcttgtgaac

SEQ ID NO: 632766 - DNA, 529 bp, Homo sapiens
ctgtgtatgccatgttttctttatccactcatccattgatggacactgggtttattctatatcttggctattgtgaaaggtgctgccacagacatgggatttcattgacatactgacttcctttcctttgaatatattcccattggtgggattgctgcatatagttcaacaaatttatgggrgaattagcactaagtgcttcttgcagcctgggagtggggcttttactaacagtggatgttttcctcctgctactgcctgagtgttgaacatgcccacttccttgttctgagcttcttgcgcttgagcaacactgttactcctactcccttaatattgtgataactggtcctcagagaggaccttctgctgttgtctgcatttgggcctacttcccttccccagaccctgtccaagtcttggggatatatctatttctaggctgtagacacttctattctgcctcatcctaccatcaactgtcctgtgccaggccatgcttttagatccaaagcctttgtacatcctg

SEQ ID NO: 632767 - DNA, 593 bp, Homo sapiens
atcaatagaatgttgaatgcaaaaggccagacacraaacgtaacctctgtatgattccacttaagtaaaattcaaaaagaggcaatactcatctattgtgccagatgtcagagtagtggctacctttgggatggtagtgatatattacattcaagaaaaatccattttaaaatagactttaaaataaatgtcactttaatggagataaaaagtataaataaagacatgacatttgagttacagtttgaagagtgatttttgggttctccaggcagatcattccagactagagaaaatatcattttggtattgcagcactatatttttcctgtttatttttcctttctgcattctttcttcccattaaaacttaactattttgcatattttttctttagaaactatctacctctagatagtttagctagtttaatatgttactgcacctagattagattttagacttaatagtttattctaaaaagtaattgatgtggaaatttttatacctaggcaggcaggaggggaattaaaaaaaaaaagaacccatttaaaattacaccatatacagcatgaccagtgtagtttacatc

SEQ ID NO: 632768 - DNA, 593 bp, Homo sapiens
atcaatagaatgttgaatgcaaaaggccagacacaaaacgtaacctctgtatgattccacttaagtaaaattcaaaaagaggcaatactcatctattgtgycagatgtcagagtagtggctacctttgggatggtagtgatatattacattcaagaaaaatccattttaaaatagactttaaaataaatgtcactttaatggagataaaaagtataaataaagacatgacatttgagttacagtttgaagagtgatttttgggttctccaggcagatcattccagactagagaaaatatcattttggtattgcagcactatatttttcctgtttatttttcctttctgcattctttcttcccattaaaacttaactattttgcatattttttctttagaaactatctacctctagatagtttagctagtttaatatgttactgcacctagattagattttagacttaatagtttattctaaaaagtaattgatgtggaaatttttatacctaggcaggcaggaggggaattaaaaaaaaaaagaacccatttaaaattacaccatatacagcatgaccagtgtagtttacatc

SEQ ID NO: 632769 - DNA, 618 bp, Homo sapiens
tttgtttgtttgttggagacagggcctggctctgtcgcccaggctggagtgcagtggcatgatcatagctcactgcagcctcaaactcctggcctcaaaccatccttctgcctcagcctcccaactacctaggactacaagcacatactaacaggccaggctaatttttaaaatttgtttttggagatggggtctygctgtgttgcccaggctagtcttgaattcctggccgcaagagatcctcccatcccattctcccaaagtgctgacattacaggaatgagccaccatgctcagcccctatcaatatttttaataaccgtttgtagcaaaacttttttttgagacagggttttgctctgctgcacagtgtaacaaaacttttaagaaaccccaaaacatggactgactgagctacctaaaagtattagtcacccaatcttcagcaaacagttaacagcaaaaataaatatatcttctcatggcagcccaaaaaaataaataagtgaaggaacattatacagggaaaccgcagtgcattgactttacctttatgatgattttatataccagcatcataaaaaatttcctaaaggctaagctgaaactaaactgctg

SEQ ID NO: 632770 - DNA, 478 bp, Homo sapiens
gttttctttcctcatggacttttttttttcttgttttttgagacggagtctctctcgctctgtcacccagtctggagtacagtggcgtgatctctgctcattgcaacctctgtcccgccgggttcaagcgattcttgtgcctcagcctcccgaatagttgggattataggcgtgtgccaccacacccagctaatttttgtattttcagtagaaacagggtttcaccatkttggccaggctggtctcgaatccctgacctcaggtgatctgcatgcctccgcctcccaaggtgctgggattataggcgtgagccaccgcacccggcctcctcatggacttttaatctagttgaagaaagaagaggaaaatttactaaaggaaatatgacagtatgtaaagcaaggcttttttcagtgcaagaaatagtacaagaattggataaatatgatagactgataaattttcatataatttggca

SEQ ID NO: 632771 - DNA, 591 bp, Homo sapiens
tattcctgctttcttaagaaacagaaaagactaatttattttctctttccaaagataacacttaaaaatccattaaaaggatgtcatgtttctccaaactctttcaagagtccatgtcttctattttctggccacagcattttcagtttcttcccactagcctggtcaaactaccaacggcaatggatagctcagttctatttaagataagcttggctgttctcttaagtgtcttgcagcagaaatactggcccattcaaaatagttgggctaacttttaaaacaacaactaagcgtcttccaagacagttayaaaagactaaataaaacacagaggaaaacaaaaaagagggagctcaaaatgggagcttggctctgacaggtgaattttcacacagaactgcggcactgagaacaaaactagcctagaaccacttgtgctatgtcatgtggaggtcattcaaatgcacaggatacagaaactcttcaacggtctagtcatttcacactacgtcgaagcaaaccacaaaagcaggcccaggaaattagatttctccaaggatggacccagacgactcagcctgaataaaa

SEQ ID NO: 632772 - DNA, 591 bp, Homo sapiens
tattcctgctttcttaagaaacagaaaagactaatttattttctctttccaaagataacacttaaaaatccattaaaaggatgtcatgtttctccaaactctttcaagagtccatgtcttctattttctggccacagcattttcagtttcttcccactagcctggtcaaactaccaacggcaatggatagctcagttctatttaagataagcttggctgttctcttaagtgtcttgcagcagaaatactggcccattcaaaatagttgggctaacttttaaaacaacaactaagcgtcttccaagacagttacaaaagactaaataaaacacagaggaaaasaaaaaagagggagctcaaaatgggagcttggctctgacaggtgaattttcacacagaactgcggcactgagaacaaaactagcctagaaccacttgtgctatgtcatgtggaggtcattcaaatgcacaggatacagaaactcttcaacggtctagtcatttcacactacgtcgaagcaaaccacaaaagcaggcccaggaaattagatttctccaaggatggacccagacgactcagcctgaataaaa

SEQ ID NO: 632773 - DNA, 633 bp, Homo sapiens
cgaattcatgtaaagatattagttcatgcttttcacataggaagtgccagatacctgctggagctagagtagcaagagcaagagtagcaatagcagtagcttcattccagcattcacacttaggagaacacagatgtaacatgaaaaagaaataatttcaaggcaaggagatggtacagataatttaacaggatagaggtagatctattagctaatcaaaaatctgtaattttttaccctaccacagaataaactgagctgtgccttatatyttacaacttacacagtttatttttatattattgacgtttctatcacatttcctgacaatttcaaatttcctcatcagaaacatttggatattatattaggaggaccccagagcctccatcttccataatgtacattttccttctgatgctgatctcaggtcagaaacatgcaggtctgttatactgggttggagttgcagtcaatagtcaccaaatattaaattctaatttttactcattcacattatctacaaaaataaaaaactaagaaacttgtattttttctaattttcttcctatctttcacatgccacaataattatctgactcagttccccactaaagaaatttcacatgcaga

SEQ ID NO: 632774 - DNA, 573 bp, Homo sapiens
tgatacctgctcttctatttctgtaatctaagaatggactgaacattaggacaaccaactctyacactatatgaccaagccccatcctccccttctactgagtaccctattagatcattccattatcccttggatttactgatatgtgggaaaaattcttggctaagacttaggcacctgtgagccataattgaaacatcaccaaatggtatggctttcctttctatggaagctattatttcttccattctcaccaattcagttcagaatgctgtaaactccttgctcccttttgctacttctagactttcttcctctactatcactaatatttttgttttgaagcctatatcatcatcttaagtccttttggagcctggcttaatgtcagagtgtcctagaagcttttacaaacttcccaggcctgaattacatacctttccttagactcttgaaagacttcatagtctcattatctttgcactaaaaaggtggtttaacaattacctatccacttgtacgactccccatcagtgacttgagggtaaggactgtgtcttcttatcccttgta

SEQ ID NO: 632775 - DNA, 439 bp, Homo sapiens
ccagacttctgaatgctattctacatttgtctcactctaactaaactggttatctttctggtttttttttatttgtatkaatttaaggggcacaactgcaattttgttacatgaatatattgcatagtggtgaagtcttggcttttactgtatcccatcacctgaataatgtacactgtagctattaagcaatttatcataaactttcaactcttaaacctgccctactctcccccaactctgaactgtccactctggtgctagtggtctgcacttccttccaccacatcttcacctggctcagacaagtccttcaaagttgaagcataaacttgacttcctcaggcacctcttccattcaaggttatattcttctctaattagatgtcccaatttaagtttataacttcagtttcacagcactcttcacacttaaaat

SEQ ID NO: 632776 - DNA, 618 bp, Homo sapiens
acatcttattttaggatatattcccagaagttagttcaaatggtaaatccatacataaatttgcctaatatggccacatacccatccatgagtatgttggcattttgcaatccaatcagcaatgtatgtgagtgcctgtttttcccacagcttcatccgtggagtaagttgtcagacatttggattgttgccaacctgttaaataataaatagtatttcagttcagttaccattttttattgctatattatgaatgggattgaaaaacttttcctatgcatcaattgtatatgtaatgttttatttattttttaagttaggtgagtataaaagaatgttaggattggttgtgaggtattgttaaagaaaaaaaaattctgacgtttgttaaaatggtaaggaagactttatttcaggactgtgcaatcacaacattgtaatagggaagcaagattggctcaactgggaatacagccaggacagctggggtatttataaccmacaggtagagtaaggagggtcagtggatagaaaagtactaaaaggagacatcaggggtggtaggattcttgctgaaggcaggctaagggcttatacttcagaagtggagaatgagga

SEQ ID NO: 632777 - DNA, 552 bp, Homo sapiens
cagttcactgtaacctctgcctcccaggttcaagtgatcctctcacctcagcctcccgagtagctgagcttgcaggtgyatgccaccatggccggctaatttttgcatttttagtggagatggggctttaccatgttgccatactggtctcgaactcctgacctcaagtgatcctcctgcctcagcctcccaaagtgctgcgattacaggcatgagccactgcacccgaccacttcagctaattttgaaaagttctaaaggtttatcttaatttgggcaggactaatccagccatttgtagactggctatttcaagtgagtataaacatacatataatcaatttactcttaatatattgtgaagtataaatatttcaaatgagtataaatgtacatataatcaatttactattcatttagcatatagggaatggtcagagatattgcagtgaaaggcaggttgatataagcaagaggaaggtgattactagttatctaccaaggctcaagtggacaagggtcaggagcccctcagtctactgaggtcaagta

SEQ ID NO: 632778 - DNA, 552 bp, Homo sapiens
cagttcactgtaacctctgcctcccaggttcaagtgatcctctcacctcagcctcccgagtagctgagcttgcaggtgtmtgccaccatggccggctaatttttgcatttttagtggagatggggctttaccatgttgccatactggtctcgaactcctgacctcaagtgatcctcctgcctcagcctcccaaagtgctgcgattacaggcatgagccactgcacccgaccacttcagctaattttgaaaagttctaaaggtttatcttaatttgggcaggactaatccagccatttgtagactggctatttcaagtgagtataaacatacatataatcaatttactcttaatatattgtgaagtataaatatttcaaatgagtataaatgtacatataatcaatttactattcatttagcatatagggaatggtcagagatattgcagtgaaaggcaggttgatataagcaagaggaaggtgattactagttatctaccaaggctcaagtggacaagggtcaggagcccctcagtctactgaggtcaagta

SEQ ID NO: 632779 - DNA, 614 bp, Homo sapiens
agcattactactaagagtcaatgccaaggcaagttggggcaaaaagtatttagagcttaaggaatatacataaatcaaatagtaaacaagggaaaaaccatcaagaggtttttttgtttgtctttttgttttttgagaccaagtttcactcttgttgcccaggctggagtgcaacggcatgatctcggctcaccgcaacctctgcctcccgggttcaagcgattctcctgcctcagcctcccgagtagctgggattataggcatgcgtgaccatgcccaactaattttgtatttttagtaaagatggggtttcgccatgttggtcaggctggtctcgaactcttaccccaggtggtggtccacttgccttggcctcccaaagtgctgggattacaggcatgagccatcatgcccagccaagagttgtttttttttttaaagaaaaaaaaagtcaaagtcagatgtatgttattattagaaackgggggtactgcagagaatgcatatacaattctgcccttagattagtaacactgattatctgccactctgatcttcccagaaaatagaatctcaattgtagcccagctctcatcaaaagttttaagaaaaaa

SEQ ID NO: 632780 - DNA, 469 bp, Homo sapiens
aacatattccaacttgagtaataagtggcatggtaacttcctcagggagcttaccaagagtaaaggtaagactgttaagtgctgaagttagttcacacaatgtagtgagagagcacagtctatgggaagattacttcctcctaggatgatcagggaaagcttgtacaggttctatttaagctgggcattgagtggttatgactaacccaacagaagtggtcagtggcagagaaagcactaggtaaggaaaactaagaatagttggaggaatgggaagtgtattagtccattctcacactgctatacagatactacttgagaccggtaatttacaagcaaaagagatttaattgactcacagttctgcacggctggggaggcctctggaattggaaacttacartcatggcagaaggtgaaggggaagcaaggtacatcttacatggcagcaggagagagacagagtgca

SEQ ID NO: 632781 - DNA, 520 bp, Homo sapiens
aagagcataaggtacagatataggcatttagaatctgtaatgaacatacaagttaactgacatttatttacttttggtattttgttttgttcttgtttttgagacagagtctaactctgttgcccaggctggagtgcaatggtgtgatctcagctcactgcaacctccgactcccaggctcaagtaattctcatgcctcagcctcccaagttgctgggattacaggtgtgcatcaccacacctggtttcggtatttwtagtagagacggggtttcgtcatgttggccaggctgctcttgaaatcctggcttacagtgatccacccacctcagcctcccgaagtgccgggattacaggcgtgagccaccacgcccagcttgagtagtttatggaactcaaatgtactaagtgtctatattcattatctgatgtgagacactgtaatttaggagatgcagtagcacaggaattgaaagttcagtcttcggattccaatcacagcagagtaagcttgggcaat

SEQ ID NO: 632782 - DNA, 474 bp, Homo sapiens
aggcagaaacactttctccctcaatcctgatttccaggaggtggtggaatttatcttatctacctatcagggaagcataagctaggctcatggctttctccttcctcttgagtgagagctgcaaccccaggagtactttttatctttacttgcatgtctgagtcttaccttgagagggcccacccatcaggaaacgtgccctgatccagagctgcctgcagctgggtgtggaagtctgcttaattctaggcctccagtgtaaggcctgtttgtctctctctcaaagctacaacatccaacttagcctttagcagaaacaaggggatgtttggcttccatacaacttccttgttttatttctctctctctctctttttttttttaaattttcaaaaaacaatkggggaagagatgtgctatttatgggccctgctatggttttaatgtgtcccccagagttcacgtgtgggaaac

SEQ ID NO: 632783 - DNA, 378 bp, Homo sapiens
tttcttcggtgctttggagaaatgcatggcaatttgcaaatatatcatgggagggtatgttcagactgtagatataaagcagaactaaaattatagattaaaggagttcaaaaagtatcctgtacttaccarctgaacatcaggatcaacatattgctgtatagctctaacaaatgcagctggattttcttgtacttttatgctacataaaaagattaattttgaagctatgtaacttccttcttagtagcacatacttatatggcattagaaataatacaaataaattttcataacaaactagtagttttaggaaaaattattagagaaaataaccttttgagtctaaaattgtttcttaaactacaaaatatgaca

SEQ ID NO: 632784 - DNA, 528 bp, Homo sapiens
cctaataaattttggtcagaccggttgctctcaaaaccttgtctcctgataagatgttatcagtgacaacggtgcccgaaactttattagcaattttaatttcgcccggtcctgtgatccygccctgcctccatttgccttgtgatattctattaccttgtaaagtacgtgatctttgtgaccgacaccctattcgtacactccctccccttttgaaaatccctaataaaaacttgctggttttacggcttgtggggcatcatggaacctaccgacatgtgatgtctcccctggacgcccagctttaaaatttctctattttgtactctgtccctttatttctcaaaccagccgatgcttaaggaaaatagaaaataacctatgtgactatcggggcaggttccctgatagttaagattatatattaagctaggagtaggtatgcttagaagcaaagatgaagccaggatggagactcctttctcactctcaaaaggtctctcatgtgaccaggaaaaacaggtttcc

SEQ ID NO: 632785 - DNA, 596 bp, Homo sapiens
agcttttccaggtgcacagtgcaagctgtggtggatctacaattctagggtctggaggataggatagtggtcctcttctcacagctccactaggcagtgccccagtagggactctgtgtcggggctccaatcccacattttccttctgcactgccctagcagaggttctctgagagccttagccctgcatacaacttctgcctgggcatccaggcatttcaatacaacttctgaaatctaggcagaggttcccaaacctcaatttttgacttctatgcactcacaggctcaataycacgtgaaagctgccaaggcttgaggcttgcactccctgaagccatggcctgagctctacgttggctcctttcagccacagctggagtgactgggacacagggcaccaagtccctaggctgcagacagcacagggaccctgggcctcacccacaaaaccactttttccttctaggcctccaagactgtgctaggaggggctgtggcaaagatctctggcatgtcctggagacattttccccgttgtcttggtgattaacattcagcttctcattatttacacaaatttctgtagctggctt

SEQ ID NO: 632786 - DNA, 443 bp, Homo sapiens
cacaagaacagcatgagaaagacttgcacccatgattcaattactcccaccaggtccctctcacaacacgtgggaattcaagataagatttgggtggggacaaaggcaaaccatatcactggctttgagttaacaatttcctttgggaaaatttactcttaaatctttctaacacacttcaakatctcagacatgaaatgtaaacaacttttgagagctgttgtcaaaaggctgtatgttgcactgttaacctgtatgttgcactttcatctgacccagggcccactggccaagaataatccaacagctcctactggaagataaggaaaggacttattttgaagggacagaggatgaggaggactaaagaatttatgactgaatcaatatccttccaatttattgggaaagcttttttcaaaaaatcattgactttaaaatta

SEQ ID NO: 632787 - DNA, 544 bp, Homo sapiens
ctgccaccaaactttcaggcttcccctccactctaacaataaccgactgaggtcaagactcagctcctttgtgacttgtggctgtgaccctttggttgatggtgatgatgatgatgtaaccctacagatagggctatgtgtcctgcttggaataagatgctttccaaatattttaagaagctgacttwagattattgtcctctcctattttccatttccaacattttcttgaacttgccatttcacataatcactgcagaaaattttgtactgaaacacagacaacagtggagcaagaagcctggtgttcaggatggtctgatttccatctgcagctcagctttcatggcactcaaaccctttgagaaccttccatagaccttaagtgcacatcagtgcctgcaactcagaggctttggttctgtgtgtattagggccttgaatttgaaatcacggtttgttttcttccatgtgatattaatatgtatgaagtattttcactgccagcagccctgcaggcttcatgctgaatctgtgtcagctg

SEQ ID NO: 632788 - DNA, 510 bp, Homo sapiens
atatgacaccaaaaatacaacaatataataaaagtttctgyatagcaaaggaaataattaacaaaatgaaaagcaacttacataatgggagaaaacatttgcatcacatatctgatacggggatgatatccaaaatatatgaagaacccatacgattcatagaaaaaaaatcctattaaatagacatttttccaaagatgacatataaatggccaacagatacatgaaaaggtgctcaacatcactaatcatcaaggaaatgcaaaatcaaaaccacaatgagatatcaccttacacctgtaggatggctatgacccaaaagtcagaagataaatattagggagaatgtggaaaaatgggaacccttatacattgttggtgggaatgtaaattagcatagccattatggaaaccagtaaagaagttcctcaaaaaatttcaagtagaactactatatgatccagaaatcccactctggctatatatccaaaggaaaagaaatcagtatgt

SEQ ID NO: 632789 - DNA, 630 bp, Homo sapiens
agttaccttgactgtggtaattatttcacaatgtatacatatatcaaaacatcacactgtacattcaaaatatatataatgtatgcatcaattatcaaaactgataaaaattataataaattttctgataaatggtgaccatttcagaaaaaaactaaagtggatccctacctcactccctatatcaaaataaattttagatatacaaagaaaaaaatgaaagtcctttatcaacttgattaatgatgtggcatatataagaagcatctcatacaacctggaatgaagttgtaggcatgcaagtatggtgttattatggtgttcctttttctgtttcccacaatccaaaatacatacctgatcatgaatttaatggagtaaataaaatagcttaagccaggaagaaaacattttgcaaagggctgctataggctcaaaacayattgttcaattacaaaggtggaaacaattctaagacccatagtttaatgagtactattagccaatgtttaaggcattatccctgattttgcctgtttttaatagctgtctgaacaacagccacgtcaaatgtctgcaaatattaataatcataacaagaagtatgtattgagtatttactatgggtgg

SEQ ID NO: 632790 - DNA, 579 bp, Homo sapiens
ggagggggagccgtcttgtgcgttgtagaatgcttagcatcatctctgccctctacccaggatcgctgccctctgtctgccagtaatacacacacacacatacacacatatgacacagacacacacaacacacacatgaacacagacacacacataccccccacactattaatggcaatacaaagtctctgccaaatgtcccctaggcagcaaaatcgccccagttgagagtccctgctttaagctgttccagggcagcaatgacattttcttcatctctgaatccctggtgcccaggacatttctgtcactgcgaaccaaacagaatatggcttggagggatgagggaagccttaaataagagaactatctgattcgaagtataaagaggaatcatctaggtcagcactctcctatagaactttctgtgatgatggaaatgttctatgtcttcactttccaatacagtggctgctacgtgtggcctttgagtacttgaaatgtatgactgaggaactggattgatttcarttactttaaatgtagccttcaaaggccacatgtgattagagcctccat

SEQ ID NO: 632791 - DNA, 574 bp, Homo sapiens
gcttaagaaattttcccctactttaatatcttaaagatattccctatattttcttctagttgttgcaattctttttcatgttttctttaagctacatgaagtctctttttgtttttcatgtgagctaggagtctaattttctttctatatgaarcctagctatcccagtatcttttattaagtagttcatcctttcaactgtaatgccaattctactaaatgacagattcatatatgcagcaatttgtttctgggattttaatctgttcacctgagcttttatctatgactcagccgaaaccacagttttacttaattagcttcataataaactctgatacccggtagaataagcaaccctttcttgttattctttttcagagatttatcagatatttttggacttttgttctgccacataaattttaaaatgtttataaagttttatgggaaaccatgttaggatttatattggaatcgcattgaaattatagatgcatttgggggaggattgccatctttaccatattgaatcttcctattcatgagcagtttacctgtccacttattaaga

SEQ ID NO: 632792 - DNA, 407 bp, Homo sapiens
tctttcacacatgaaccatcaataagagctatcaatgctcagatcctctacgggatgaaatccttggatgatctgaccatgtaaatgacttaggttctgctgagtcagtgatttgcaaagtcgggtactggaccagcagcatcaatatcacctgggaaatttgtaaaaatccaaattcttgggctccactgcagacatactgtgccaaatatgctaggggtagggctcagcaatctgcttttaamaagctcccaggtaattctgataaaaatctaaagtttggaaaccactgttacttgtcatacctatattgataaagattgaagttattattgtgtttttcaggcacttggaaaaaatggtacatgtcattaaatagaaataactccaccaagaaagtgggacag

SEQ ID NO: 632793 - DNA, 573 bp, Homo sapiens
atgggcaaggcttaattggaagatctttaatctagtactcagctcatatggcctgtgctcacccagggatccccagtgataggcagaagatgggggctggtaggggggaggtatccatcgtggcatctactactccagattggagttgctgagtttggagaagttgcaaccattatttagaactcttggagatatcactggaatactaatgaagaaggcaaaggaaatcccttaggataatttcagggttgtctgtgaagaacataaacatatgatatgataatagagtgataacatttgaactgataattttttaaagtatataatagaagaatatttgcataatatctctggagattggagagaaatgaaatgtgtcaaacagaaggaactggatatgatgtcagcagcctttcgtcccactgttctctcctctctagactgtcttccatttggctgtccaagcaatagcactaaaatataaacctggccawgccacttcctacataaagccattcagagactgtagtcacttccattcaggaaaatattcacccgcttagcacaacccat

SEQ ID NO: 632794 - DNA, 595 bp, Homo sapiens
gctgacaatgtccgtgaacaccaaacagcaatatccatgtagatgatctaatagacgtctcaaatgtgaaatgtctccaacgttctatcttctccttcaaayctcattttcagctttgtacagcttagttgatgacaactactatccttccagttgcttagacaaaaaccctggagtcttccttaactcctttctttcccttatgcttcacatccaatcttccaggaaattctgttagctctaacttcaacatctctgtagaatatagccacttttcaccattgctaccctagatcaaataaacctcatgtctctcctggactatacaagcacatcctaattcattttctttttttcaacacttgccacaaacccacaaacccacaaaccctactgtctattctcaaaacagcagtcaaagtggtgctttcaaaacatagatcatgtcacttctttgttcaaaaacctcttaagacctccattgttaaaaatcgccatatttctcagagtagaagccaaagtccttacatcaacttataaggtcctatgtgatttttgcaccccacatccttgcctactgatatatcatatatta

SEQ ID NO: 632795 - DNA, 595 bp, Homo sapiens
gctgacaatgtccgtgaacaccaaacagcaatatccatgtagatgatctaatagacgtctcaaatgtgaaatgtctccaacgttctatcttctccttcaaacctcattttcagctttgtacagcttagttgatgacaactactatccttccagttgcttagacaaaaaccctggagtcttccttaactcctttctttcccttatgcttcacatccaatcttccaggaaattctgttagctctawcttcaacatctctgtagaatatagccacttttcaccattgctaccctagatcaaataaacctcatgtctctcctggactatacaagcacatcctaattcattttctttttttcaacacttgccacaaacccacaaacccacaaaccctactgtctattctcaaaacagcagtcaaagtggtgctttcaaaacatagatcatgtcacttctttgttcaaaaacctcttaagacctccattgttaaaaatcgccatatttctcagagtagaagccaaagtccttacatcaacttataaggtcctatgtgatttttgcaccccacatccttgcctactgatatatcatatatta

SEQ ID NO: 632796 - DNA, 616 bp, Homo sapiens
aacattccctaaattcatgaatgtagaatgcatgaggagagcttactcttcaaaggaccctgagagggggtttggggggcaaagagagctcctgctgtgtgctgggctgtgcagagccccagttctcccatttctaaggagcctcctcaccccttccgtaaaacgggttcatggtatctaactcatagggttattgagaagattatctggatatatatgaaaatgatgtataaagtataaagtgatgtctaaatattggtctatgactaagcagaaaaacattttcataaatcaaagcactcctctgtaataatgggagtaaatatgtaaatatgggaaataatcctcctataatttttccaccttggaagtctggatttttcacataccaagctgggtcagatttctgttatcattgttgcattcttgttctttaatcactcttgcaaaaaaccacttgtacccccaaagctaytgaaataatttttaagagaacttttaaaaagtaaataaataaaaataatcaccctatcagctatgaaaactgaaaatgtgcctagtcagttcatcatcttgcttcattggtcaattcaaagatcaggtatttcaggtcaac

SEQ ID NO: 632797 - DNA, 505 bp, Homo sapiens
gtttattttataataaataatttaaataatttagcattattttataatgataaatttgcattagtgaaaaagttaaagatgtttatctcaacctcaaaacatgctgtcagaggaacagtcagaaagcaacttagcaaacttctagtccagtggtccacaattctggctgtacgttataaccacatggagccctttaaaaataccaacacctagatcccacccctagtgcttctgatttgattgatacaaggtggggcttgggctttggtgttttttttttttaaatgccccagatcatkgtaacttgtaatcaggattgagaaccagagaactggtccaaccctttcattttacagaagagaatgttgaggccaagagaggttaatgacttgtccagttcaaacagccaagctccctgccactgcatgtgccatgctgaccccacagtaacctgcccctccttcactaggataactcctggtcatgagtcacagcttggcttaat

SEQ ID NO: 632798 - DNA, 544 bp, Homo sapiens
ctttggggcaagaaatagccatgtggagggaaactaataggaacttgttccaaagtgcaacaaaggaggattccaaatcacttccagtttcctaattcataagtaattcatactgtcagattcatctctgcctgttactagtgtctcttgcttttttgcttgcatttatttaataatgcttattgaacttctgattataaaagtaattcacactcatggtggggaatttggaaaacattcacaattacacaagtaaaataaaattcccacagaatcaccaccygagggcctgttattgatgtgcttcctcaattgatcaagcatttattgagtacctatcacatgccacttggtgtcagaacactatgttcaagccagccctcaacctcagtggcttcactctctttatttgtaacataagctccatgtttgaaattttgtcctcacaacaaccccatatagtaagtattatttccacacaagcaaaaagaaattgcctaggtttcttagcctggttccgggattagcacgtaggtcaggctga

SEQ ID NO: 632799 - DNA, 544 bp, Homo sapiens
ctttggggcaagaaatagccatgtggagggaaactaataggaacttgttccaaagtgcaacaaaggaggattccaaatcacttccagtttcctaattcataagtaattcatactgtcagattcatctctgcctgttactagtgtctcttgcttttttgcttgcatttatttaataatgcttattgaacttctgattataaaagtaattcacactcatggtggggaatttggaaaacattcacaattacacaagtaaaataaaattcccacagaatcaccacccgagggcctgttattgatgtgcttcctcaattgatcaagcatttattgagtacctatcacatgccrcttggtgtcagaacactatgttcaagccagccctcaacctcagtggcttcactctctttatttgtaacataagctccatgtttgaaattttgtcctcacaacaaccccatatagtaagtattatttccacacaagcaaaaagaaattgcctaggtttcttagcctggttccgggattagcacgtaggtcaggctga

SEQ ID NO: 632800 - DNA, 544 bp, Homo sapiens
ctttggggcaagaaatagccatgtggagggaaactaataggaacttgttccaaagtgcaacaaaggaggattccaaatcacttccagtttcctaattcataagtaattcatactgtcagattcatctctgcctgttactagtgtctcttgcttttttgcttgcatttatttaataatgcttattgaacttctgattataaaagtaattcacactcatggtggggaatttggaaaacattcacaattacacaagtaaaataaaattcccacagaatcaccacccgagggcctgttattgatgtgcttcctcaattgatcaagcatttattgagtacctatcacatgccacttggtgtcagaacactatgttcaagccagccctcaacctcagtggcttcactctctttatttgtaacataagctccatgtttgaaattttgtcctcacaacaaccccatatagtaagtattattyccacacaagcaaaaagaaattgcctaggtttcttagcctggttccgggattagcacgtaggtcaggctga

SEQ ID NO: 632801 - DNA, 599 bp, Homo sapiens
ctaacccctccgagtgatggtattagggggtggagcttttgggaggtgataccccatgaacaggataaatatccaggaggccccagagggcatccttccccttctacagtgttgggacacagccagaaggcagccgtctatgaaccaggaagcaggccctctccagacaytaaatcagccagtgccttgatcttagacttcctgaccccagaactgaaaaaaacaaaattctgttgtttacaaagcacccagtctatggtattctgttatagcagcttgtgcagactaggtcagtggacctaactgagagcctgcctatggtgttgggtgggccacagggttttgatggtactctgtggttggggtctccacacgcttcagatacctctgttagtcctaagacctccccaagtgtttggatttgtcccaagatgagcttggcatgtagcgtgggggcccttacgacttataatgggagagttccaggtcctaacagtgagtagctctgcccaccaatgtttgttgagtgaagaatgaacatgagggtcaatcccagcctcaccctggtcagagattctctatcctgacccctggtatga

SEQ ID NO: 632802 - DNA, 599 bp, Homo sapiens
ctaacccctccgagtgatggtattagggggtggagcttttgggaggtgataccccatgaacaggataaatatccaggaggccccagagggcatccttccccttctacagtgttgggacacagccagaaggcagccgtctatgaaccaggaagcaggccctctccagacactaaatcagccagtgccttgatcttagacttcctgaccccagaactgaaaaaaacaaaattctgttgtttacaaagcacccagtctatggtattctgttatagcagcttgtgcagactaggtcagtggacctaactgagagcctgcctatggtgttgggtgggccacagggttttgatggtactctgtggttggggtctccacacgcttcagatacctctgttagtcctaagacctccccaastgtttggatttgtcccaagatgagcttggcatgtagcgtgggggcccttacgacttataatgggagagttccaggtcctaacagtgagtagctctgcccaccaatgtttgttgagtgaagaatgaacatgagggtcaatcccagcctcaccctggtcagagattctctatcctgacccctggtatga

SEQ ID NO: 632803 - DNA, 638 bp, Homo sapiens
tagggggtggagcttttgggaggtgataccccatgaacaggataaatatccaggaggccccagagggcatccttccccttctacagtgttgggacacagccagaaggcagccgtctatgaaccaggaagcaggccctctccagacactaaatcagccagtgccttgatcttagacttcctgaccccagaactgaaaaaaacaaaattctgttgtttacaaagcacccagtctatggtattctgttatagcagcttgtgcagactaggtcagtggacctaactgagagcctgcctatggtgttgggtgggccacagggttttgatggtactctgtggttggggtctccacacgcttcagatacctctgttagtcctaagacctccccaagtgtttggatttgtcccaasatgagcttggcatgtagcgtgggggcccttacgacttataatgggagagttccaggtcctaacagtgagtagctctgcccaccaatgtttgttgagtgaagaatgaacatgagggtcaatcccagcctcaccctggtcagagattctctatcctgacccctggtatgagatcccagtcttttggcttctcccactcgtgcttggcccttcctttcctgcccttgctggat

SEQ ID NO: 632804 - DNA, 638 bp, Homo sapiens
tagggggtggagcttttgggaggtgataccccatgaacaggataaatatccaggaggccccagagggcatccttccccttctacagtgttgggacacagccagaaggcagccgtctatgaaccaggaagcaggccctctccagacactaaatcagccagtgccttgatcttagacttcctgaccccagaactgaaaaaaacaaaattctgttgtttacaaagcacccagtctatggtattctgttatagcagcttgtgcagactaggtcagtggacctaactgagagcctgcctatggtgttgggtgggccacagggttttgatggtactctgtggttggggtctccacacgcttcagatacctctgttagtcctaagacctccccaagtgtttggatttgtcccaagatgagcttggcatgtagcgtgggggcccttacgacttataatgggagagttccaggtcctaacagtgagtagctctgcccaccaatgtttgttgagtgaagaatgaacatgagggtcaatcccagcctcaccctggtcagagattctctatcctgacccctggtatgagatcccagtcttttggcttctcccactcstgcttggcccttcctttcctgcccttgctggat

SEQ ID NO: 632805 - DNA, 548 bp, Homo sapiens
ggtacagcccacagaactgtgagccagttaaacatcttttttaaaaataaattacccagtctcaggtagttctttatagcagtgcaagaacagactgatacacccctcaaggtattttctgacttctaagaggcagccaagagacccaaaaactgggcagaaaatggtggctaaagagctgagaagctaagcaaagctttcagtggtcattttttggaagttaaaaattgggattaagagcccaccaaggtggagggacactggtaaacacatggaaggtcaacactccaggagcaatgatgaattggaaacaggctggacatcacaaagactaaagcacagattcaaatcggttcaattacggagttgattaactgacttgtctcgatctggattgccttcagaagcagaagyaaatcctctctggaaaaacatatcatccagagccttgaaaggcctccaccattttcatgcaaaattactggcgttcaacttcagatcatcagatatactagagatcaagaagaaaggatgaaaacgagaaaaat

SEQ ID NO: 632806 - DNA, 548 bp, Homo sapiens
ggtacagcccacagaactgtgagccagttaaacatcttttttaaaaataaattacccagtctcaggtagttctttatagcagtgcaagaacagactgatacacccctcaaggtattttctgacttctaagaggcagccaagagacccaaaaactgggcagaaaatggtggctaaagagctgagaagctaagcaaagctttcagtggtcattttttggaagttaaaaattgggattaagagcccaccaaggtggagggacactggtaaacacatggaaggtcaacactccaggagcaatgatgaattggaaacaggctggacatcacaaagactaaagcacagattcaaatcggttcaattacggagttgattaactgacttgtctcgatctggattgccttcagaagcagaagtaaatcctctctggaaaaacatatcatccagagccttgaaaggcctccaccattttcatgcaaaattactsgcgttcaacttcagatcatcagatatactagagatcaagaagaaaggatgaaaacgagaaaaat

SEQ ID NO: 632807 - DNA, 548 bp, Homo sapiens
ggtacagcccacagaactgtgagccagttaaacatcttttttaaaaataaattacccagtctcaggtagttctttatagcagtgcaagaacagactgatacacccctcaaggtattttctgacttctaagaggcagccaagagacccaaaaactgggcagaaaatggtggctaaagagctgagaagctaagcaaagctttcagtggtcattttttggaagttaaaaattgggattaagagcccaccaaggtggagggacactggtaaacacatggaaggtcaacactccaggagcaatgatgaattggaaacaggctggacatcacaaagactaaagcacagattcaaatcggttcaattacggagttgattaactgacttgtctcgatctggattgccttcagaagcagaagtaaatcctctctggaaaaacatatcatccagagccttgaaaggcctccaccattttcatgcaaaattactggcrttcaacttcagatcatcagatatactagagatcaagaagaaaggatgaaaacgagaaaaat

SEQ ID NO: 632808 - DNA, 559 bp, Homo sapiens
tggtaaaatagaaaattataaaaaccattcgatccagcaatcccactactgggtatctacccaaaggagagtaaatcattatactaaaaagacacctgatcayagcacaattcagaattgcaaagatatggaaccaacctacatgcccatcaactgatgagtggataaagaaaggtgagtacagaaatatagactaagacaactaaaataccttaaaagtaccttataacgttggatttggcaaggatttcttggatatgacaccaaaagcacagaccacaaaagtaaaaacagataaattagactatttcaaaactaaaaacttctatacatcaaagaacacaatcaacaaagtgaaaaagtaaccttatggaataagagaagatatttgcaaatcatatatctgataggggattaatatccagaatatagaaagaaactcctacaagtcaacaacaacgataactctaataacccaatttttaaaatagtcaaaggacttgaatagacatttttccaaagacaacatacaaatgaccagtaagcatatgaaaagatg

SEQ ID NO: 632809 - DNA, 264 bp, Homo sapiens
ttgttataaataaaaaattattcagaaaacaagaagaaaacgctcataaattaaaattatttttaaaatttwaaaaaattgatggaatatttggaacatcaagttgagaaactatctcaacacaatataactaagaaatgggaaattggatagtacaaataaaaaaaaaagactaatctaggaggtataatacccaactatatgaagtttcagaaagaaaaaaaaaacaaagaaaacaaaagagaggatacctttcaaatataa

SEQ ID NO: 632810 - DNA, 576 bp, Homo sapiens
caacagaagcaagaagacagagacaagaaatacaggtgttctccagcagctggaaaagtcagggaaatggatggtctcctggatcctccagaaggaaccagccctgcaaacaccttgactttagcccagttaaactgatttcctaaatctgaactccagaactgtaggagaatgaacctgtactgtcttaagccaccaaatgtgtggtagttgttacagtagacaatagggaactaaaacagctagtgatcaaaggaaataaaagtaagtggatataattactaagtccaggaaaaacaaatggtgatatatgaaaagaaatgtggtcacagtgcattatatggagcaaaagaaaatattaatatatttataataaaagttaaattttattttaacaaaaaattgttaygtatatattttcacagtgtaggggtgggttgcccctacacacctgtgggtgtttctcctaaggtgggacgagagatttggaaaagaaaaagacacagagacaaagtatagagaaagaaataaggggaacagaggaaccagcgttcagcatatggaggatcccgccag

SEQ ID NO: 632811 - DNA, 576 bp, Homo sapiens
caacagaagcaagaagacagagacaagaaatacaggtgttctccagcagctggaaaagtcagggaaatggatggtctcctggatcctccagaaggaaccagccctgcaaacaccttgactttagcccagttaaactgatttcctaaatctgaactccagaactgtaggagaatgaacctgtactgtcttaagccaccaaatgtgtggtagttgttacagtagacaatagggaactaaaacagctagtgatcaaaggaaataaaagtaagtggatataattactaagtccaggaaaaacaaatggtgatatatgaaaagaaatgtggtcacagtgcattatatggagcaaaagaaaatattaatatatttataataaaagttaaattttattttaacaaaaaattgttatgtatatattttcacagtgtaggggtgggttgcccctacacacctgtgggtgtttctcstaaggtgggacgagagatttggaaaagaaaaagacacagagacaaagtatagagaaagaaataaggggaacagaggaaccagcgttcagcatatggaggatcccgccag

SEQ ID NO: 632812 - DNA, 628 bp, Homo sapiens
tggtgaatttgtgtaggagataaatggcaagtttttgtacttctttgtgtttgaaattgatacaggagatagaaagaaattatttacgcagatartgagggcaaaagaatccttggtggaatgtcccttgtaacaaaaagcagcccaagaaatcatttcttttctaacaaagagcagcctgaaagatcgagctgcaaacatagataaggaagctggaagcttgcacaatggaatgcctgcagctgcaccgataggaagggctgcttggggccaggcatatccaccatgcgggctccaccttcccttttttgttaggacgtgtacagtgagaaagaaagaagcaacatggaggagccgcctacctgcataaccaaaattggggtgggggctgccagagattttgcaccctatgtagatcagacaccgcctccccactagctcatctataaaaacccctgcatttcaccatggatcggcaacccatttttccaggacccctctctgtagcagaaagctattctctttcgcctattaaaattctgccgtaaacctcaccctttgtgtgtgtccacgtccttgatctcagtggccatgagaccaagaacctctggtgtcaacccagacaacg

SEQ ID NO: 632813 - DNA, 628 bp, Homo sapiens
tggtgaatttgtgtaggagataaatggcaagtttttgtacttctttgtgtttgaaattgatacaggagatagaaagaaattatttacgcagataatgagggcaaaagaatccttggtggaatgtcccttgtaacaaaaagcagcccaagaaatcayttcttttctaacaaagagcagcctgaaagatcgagctgcaaacatagataaggaagctggaagcttgcacaatggaatgcctgcagctgcaccgataggaagggctgcttggggccaggcatatccaccatgcgggctccaccttcccttttttgttaggacgtgtacagtgagaaagaaagaagcaacatggaggagccgcctacctgcataaccaaaattggggtgggggctgccagagattttgcaccctatgtagatcagacaccgcctccccactagctcatctataaaaacccctgcatttcaccatggatcggcaacccatttttccaggacccctctctgtagcagaaagctattctctttcgcctattaaaattctgccgtaaacctcaccctttgtgtgtgtccacgtccttgatctcagtggccatgagaccaagaacctctggtgtcaacccagacaacg

SEQ ID NO: 632814 - DNA, 518 bp, Homo sapiens
acataaatgcagaaatcctaaacataatatttgaaataaaattcagttagtgatataccaaaaaaaagaaactatttcatgataaagttacatttatttcaggaatgsaagatagttttattatccaactcagtcagtgtaactttccacagcaacagaaaaaaaagaaaatatgaaggtctcaatagaagtagaaaaacatatatttataataaatccaatacctacttatgttttaaaacttgcaaaaaaagcaatagtttatttatatgtgttgcaaataaagagtatttatataattcttgtaacaaacatcatacttaaagttgaaatattaaaagctttattcctgatatctgaaatgaaaaaaattgtccattcacaccagtttgactaaatatgtcattggaggtcctatccattacaacaaggcaaaagaaaaaatacacatataaggcttgaaagagaagacataaaataatcattatttacagatagcatgtttggatacatagagt

SEQ ID NO: 632815 - DNA, 608 bp, Homo sapiens
ggagcaagtggaactcttatatattgctggtgagggtgcaaattgatacaacctctttggaaatatttctctttgtatttgctgaagctaaacatatgtatagcctatgacccagcctatccactcctaggtttatacccaaataaatgagtgtttatattcaccaaaaaaatacatacccaaatgtgtctaacagctttattcacatgagataaaaactggaagcaacagtaatatggataaattgtgcattctaaattaacgagastgcataactatttcatgcaaaattataatatcacagacaaaatgctgaaccaaagaagccagttacaaaaactttatactgtatggtgcaattcatataaatatgaagttcagacacagcacaaacaagctatcatgacaaagttccgaataatggttaccactgggggtattgtaaaagtattatgagagtgctggaaatattttaagtatgttgatctgggcttgtaaaagggctttatcatatgtcaaaggcttgtacatatgtaaaagttcaccaaggtgcactgtaagtttaccctcaaaaatgaatgcatacctatacacagcacaagaagata

SEQ ID NO: 632816 - DNA, 608 bp, Homo sapiens
ggagcaagtggaactcttatatattgctggtgagggtgcaaattgatacaacctctttggaaatatttctctttgtatttgctgaagctaaacatatgtatagcctatgacccagcctatccactcctaggtttatacccaaataaatgagtgtttatattcaccaaaaaaatacatacccaaatgtgtctaacagctttattcacatgagataaaaactggaagcaacagtaatatggataaattgtgcattctaaattaacgagactgcataactatttcatgcaaaattataatatcacagacaaaatgctgaaccaaagaagccagttacaaaaactttatactgtatggtgcaattcatataaatatgaagttcagacacagcacaaacaasctatcatgacaaagttccgaataatggttaccactgggggtattgtaaaagtattatgagagtgctggaaatattttaagtatgttgatctgggcttgtaaaagggctttatcatatgtcaaaggcttgtacatatgtaaaagttcaccaaggtgcactgtaagtttaccctcaaaaatgaatgcatacctatacacagcacaagaagata

SEQ ID NO: 632817 - DNA, 608 bp, Homo sapiens
ggagcaagtggaactcttatatattgctggtgagggtgcaaattgatacaacctctttggaaatatttctctttgtatttgctgaagctaaacatatgtatagcctatgacccagcctatccactcctaggtttatacccaaataaatgagtgtttatattcaccaaaaaaatacatacccaaatgtgtctaacagctttattcacatgagataaaaactggaagcaacagtaatatggataaattgtgcattctaaattaacgagactgcataactatttcatgcaaaattataatatcacagacaaaatgctgaaccaaagaagccagttacaaaaactttatactgtatggtgcaattcatataaatatgaagttcagacacagcacaaacaagctatcatgacaaagttccgaataatggttaccactgggggtattgtaaaagtattatgagagtgctggaaatattytaagtatgttgatctgggcttgtaaaagggctttatcatatgtcaaaggcttgtacatatgtaaaagttcaccaaggtgcactgtaagtttaccctcaaaaatgaatgcatacctatacacagcacaagaagata

SEQ ID NO: 632818 - DNA, 608 bp, Homo sapiens
ggagcaagtggaactcttatatattgctggtgagggtgcaaattgatacaacctctttggaaatatttctctttgtatttgctgaagctaaacatatgtatagcctatgacccagcctatccactcctaggtttatacccaaataaatgagtgtttatattcaccaaaaaaatacatacccaaatgtgtctaacagctttattcacatgagataaaaactggaagcaacagtaatatggataaattgtgcattctaaattaacgagactgcataactatttcatgcaaaattataatatcacagacaaaatgctgaaccaaagaagccagttacaaaaactttatactgtatggtgcaattcatataaatatgaagttcagacacagcacaaacaagctatcatgacaaagttccgaataatggttaccactgggggtattgtaaaagtattatgagagtgctggaaatattttaagtatgttgatctgggcttgtamaagggctttatcatatgtcaaaggcttgtacatatgtaaaagttcaccaaggtgcactgtaagtttaccctcaaaaatgaatgcatacctatacacagcacaagaagata

SEQ ID NO: 632819 - DNA, 542 bp, Homo sapiens
ccaaaggtggggtgccgggaaaaaaatggggagatgtaaatcaaaggatataaagtagcagatacgcagaatcaacatgtctggagacctcatgtacaacaagagcactgttgctaataaaattgtrctgcacttgagatttttgttaaataggtacattttaactcttgttgcgaactaaagagtaactgtatgagaagataaatatgctaattatcttcactatataggcataactctgagatgtagtgggtttgattccagaccaccgccataaagtgaatatcacaataaagagggtcccacagatttttttctttcacagggcatatgaaaattacattaccctatactgtactctaagtgcaataacattatggtttttaaaatttttttaatttccagaggtttttggggaaatggtggtgtttgattacatgggtaagttcattagtgttgatttgtgagatttggatgcacccatcacctgagcagtatacactgaacccaatttgtagtcttttatccctcacccccttgcc

SEQ ID NO: 632820 - DNA, 634 bp, Homo sapiens
tgttgctaataaaattgtactgcacttgagatttttgttaaataggtacattttaactcttgttgcgaactaaagagtaactgtatgagaagataaatatgctaattatcttcactatataggcataactctgagatgtagtgggtttgattccagaccaccgccataaagtgaatatcacaataaagagggtcccacagatttttttctttcacagggcatatgaaaattacattaccctatactgtactctaagtgcaataacattatggtttttaaaatttttttwatttccagaggtttttggggaaatggtggtgtttgattacatgggtaagttcattagtgttgatttgtgagatttggatgcacccatcacctgagcagtatacactgaacccaatttgtagtcttttatccctcacccccttgccactctttacctctgagtccccaaagtatcatccttatgcctttgcatcctcatacccaaataaatgagtattataaacagcttaactcccacttatgagtgagaacatacaatgtttggttttctgtttctgcattatgttttttaaaaatgagcataccttaatttaaaaatactttactgctaaaagatactatcgat

SEQ ID NO: 632821 - DNA, 498 bp, Homo sapiens
taagttaactttaggttcttctttcttgcatattcaaaaatataatgcatgtgagagttgagaaggaagaagaggcattggtttaaggctatttgtgtcaatctttctttcatcattggctcccatggagcatttttagaccttttcccctaatcataacccctcgtaccattttaataatagatatgctaggtatatttatatatttcatgcatatacatgtttcagacattaaaagaataagatattttttgccttccccaataacacatttttgccaccttggggattttattgytcctgttgaaagtgcatgttttaatgtttttagacaaatatgtttcatctgtcatacatggatatgatacatatgtatgatgttagataaaattctaagatctatactgacaaattttaaaatatgttttactcagcaagtacattaatcttaaactattatttttaaatttcagctacactgagaataagcagtctatt

SEQ ID NO: 632822 - DNA, 527 bp, Homo sapiens
acattatttcctctcacctaaagagaaaaataaataaaagataaaaatcatcagccccacagtgatagtgggctagtgccacaatggaagacagagaggcatacgaggttgcagagccagtccaagttccctgatgccccattttctaagagttggggcagatttcatatttttttattccatttaatctcctctcttggygtatcatttatacttctttcttttcttcttttagcagttgtcatataatttttataacagagtaagttatatatatattatatataatgcatatatatagcatattatatatagtatgtagacatattatatacctttatgatacagcatattatatatgataagctatatattatatataatagtgtgtatattatatacacaaacatgcatatgtatagtatatagtaaagtatatatacatatatagtatatagtatatagtatatatacacacacacatatagtaaatgtatgtatatcattaaataatttaagtctatctt

SEQ ID NO: 632823 - DNA, 584 bp, Homo sapiens
gactcctgtgattaataggcctgctcagaaaacttctttatcataaggtctaccatcccatataatataacagaatcagaggagtgattgattatcatatttacaggttccagggatgactgcatagaatattctacattatacaagaacatatgtatccaacatattgtacaatattggaatatcatcactattggatagcaggttactgcattcagtaagcgttggacagaggtgaaaaccaagttaggggaygtgaagagtcagagccagaatattcaggaaccaaagcaggtggaatcttgcaccaagaaacagaatccaaaaaaagtcacaagagatgtttctggtacttcacgagtgggcaagttgaagagaaactaccagagacattttgagaggtgtgatccaggaaggagaccaaaatccaaagctatggaatactgccatgtccaggaagaggcctttcttctctctgcctggctctgttctctccagatgtacccatagcttacacttgatacaacaaggagtatagaggtctggttatcccctgcttagacaaatattttttaaaaataaat

SEQ ID NO: 632824 - DNA, 562 bp, Homo sapiens
ctaccttgagttcatttcctgctaataggaggtggccctgcagtacctcccactgagagcctggggcattcactagaatccctccccgtggaatgtcctgaactctaacccttgtctcagcatcatgactgctgtcaactattccctgcatttccagggctttttgtttatcttcttgctctacttagcctcctaccccaygcagctctagaatcacacagatgtctcgaggggaaaaagcagtggtattggtgtcagttctttacccatctcttctcattgaggtcctggaatctcaagtctctaaatgttattttttcctgtatcttgacaaaatctctgattgtttctctgcctttcaccagtaatcctctgcatatgcccttcattaaactctcagccttttgacttgcatctataatcagcaacaccctaaaagaaaagtggctagatggtatcagcccacctctgcatgtggattctactctcccaagatcttgtgccctgaagtcttgttgtagaagctctctgatgccttcaaagaaatgttattgtttgtact

SEQ ID NO: 632825 - DNA, 562 bp, Homo sapiens
ctaccttgagttcatttcctgctaataggaggtggccctgcagtacctcccactgagagcctggggcattcactagaatccctccccgtggaatgtcctgaactctaacccttgtctcagcatcatgactgctgtcaactattccctgcatttccagggctttttgtttatcttcttgctctacttagcctcctaccccacgcagctctagaatcacacagatgtctcgaggggaaaaagcagtggtattggtgtcagttctttacccatctcttctcattgaggtcctggaatctcaagtctctaaatgttattttttcctgtatcttgacaaaatctctgaytgtttctctgcctttcaccagtaatcctctgcatatgcccttcattaaactctcagccttttgacttgcatctataatcagcaacaccctaaaagaaaagtggctagatggtatcagcccacctctgcatgtggattctactctcccaagatcttgtgccctgaagtcttgttgtagaagctctctgatgccttcaaagaaatgttattgtttgtact

SEQ ID NO: 632826 - DNA, 477 bp, Homo sapiens
tctttagttctcttctcttctccatttatatttattcccttgatgatctcatctcatctcatggcttttcatgccaaatatgtgccaataactcccaaatttggatcaccagccaaagagctctctcggccaagctccacacttttatatccaactgcctactcaaatctccatttagatatctaaaaaaaaaaaaaaagaaaatctcaaacccagaaatgtcccaaacagaactcttggttaccccttgaaaaacctccacatgcaacttattttaatctcgactgatacaaaattatcttagttgtttgggcaaaaattttggagctakccttgacttctttattttatatcccatttctgatctgactgaaaatcctatttgttctacatttaaaacctttttaaaatgcaattctttttaccatcttcatttttatcatcctagtcttaaccaccatcatcttttttctgtat

SEQ ID NO: 632827 - DNA, 432 bp, Homo sapiens
taaacagaaaactaggagaacatggaactacctacagaatcaaaggtataatatcataaggttgttcagtacaacaaaataatgatagtaacatttagttctttccacaatacagatattttttctcaaagtaaagagagacaagaagaaattaaggagctaatagcctctaattagcaacstatatactaataaatatgtagtatatattacatatataatctttgagtaccaataaatctaatgactctaaattaaatgttttttccactaaactctgttttgtcctgtcagttatattgcatttctagttaatattcaactatatagatatttttccttatagatactatctttggaatttatgaaacatattcttttatcttgtagctatgtatgggttcaagattatatgagtggaatatattatca

SEQ ID NO: 632828 - DNA, 609 bp, Homo sapiens
acatacttcatttaattcaaaaggagtgtcatcctttaggaaataattttcagggatgattagaaaacagtcccaaggatacataagaacatgtctaaataaacttcagagtaattcaatgaacattttgctgttgtgaacattttctcatgagctgttctttcattgtataacataaagaagttacatggaaaaaaggaaatgcaatgttcaaggcaaaataaaatttaccttatccatcaccataccaccttgcaggaggaagagaattccaaatactttagcataatgggacagaggtgagagagtgcatggtatattcaatggactagatgtcatttggtagaatgwcaatgaaagttccaattaaaagacaaaggtgggtaagagattaggctggataattaggagagtgtaaatgatgaaggcaataagatatttcttgctgagaagtttagacttattatgaggttaatgaggtacaactgatagctactagacagaggaggagcacgaccagaaatatatctttaaaagatgtttagtagctgtgtggaaggtagattggatgaaacagatatgggagaagatcaagtaagatgtagtaat

SEQ ID NO: 632829 - DNA, 609 bp, Homo sapiens
acatacttcatttaattcaaaaggagtgtcatcctttaggaaataattttcagggatgattagaaaacagtcccaaggatacataagaacatgtctaaataaacttcagagtaattcaatgaacattttgctgttgtgaacattttctcatgagctgttctttcattgtataacataaagaagttacatggaaaaaaggaaatgcaatgttcaaggcaaaataaaatttaccttatccatcaccataccaccttgcaggaggaagagaattccaaatactttagcataatgggacagaggtgagagagtgcatggtatattcaatggactagatgtcatttggtagaatgacaatgaaagttccaattaaaagacaaaggtgggtragagattaggctggataattaggagagtgtaaatgatgaaggcaataagatatttcttgctgagaagtttagacttattatgaggttaatgaggtacaactgatagctactagacagaggaggagcacgaccagaaatatatctttaaaagatgtttagtagctgtgtggaaggtagattggatgaaacagatatgggagaagatcaagtaagatgtagtaat

SEQ ID NO: 632830 - DNA, 226 bp, Homo sapiens
taattccttttttctttcttcttcatgttgcaatatgacctgtttgagagaatattgagctgaactccttgggcatgaattgggatctgtttctggaggggtaattgggggttagcatctctcrccttcaatgtctcattttaaaaagaagggattagactgcttcatctcaaatcttacaatgttataattacaggacttcttatgaagttgctggaggtgatga

SEQ ID NO: 632831 - DNA, 592 bp, Homo sapiens
tgggtcattgtggaggaatgttgtggagagtggctaacggcaccagggtccccatggtggaaaccactttttttctctaattaggatckaaagagtgcagagcagtattgggtgtgtgtgttgctgcgactcactgccttgccttttctccctagccgagaaatagaggattctttactcattactttatttggattttaaccaaggccaggatctgttacttgatataggaggttgaatttttcttaccttcctctaacctgattatgagggctgctattgtttttagtttaagctaatcagtccagggtttcttgatttaggcatctcactagaaaaatctttctgaacctttcccaggtgggagagaagtttcctggattaaataccagattataaaataaactggtcttaacaacaaaacttttttggagcccagagtgcgtaggttatatgaaaccaagtaggaatgaagcataaacattgaactacaatcctgccacatttcacataacttattttaaggaatattcatatttctcatagtaatcaaattaaattttatgagtgtctttgaaaaattgtacaatgc

SEQ ID NO: 632832 - DNA, 592 bp, Homo sapiens
taggtagcaagattttatgtaaaccatttttttttatgctggaactcgtttggaaaacattatttccattaagatgcgggtagcttcagttaatattccaaagcaaggcagtcaatgtcccatcaagcagaaattctctagttcagtcatcgccattgaaaggtacttacagtttttgccatcatccccagtaaaagctccacataaagggctatgcagtggaggggtcatcctgactagcactccagcttttaccctatattttgcrggcttagacaatttattagttcccatttagcatgtgcaattaagtatttcttgaaagaacagattcatatgccttcggtttatagtattagacagaggaaacacccccttagttacatacagtacccattttcataagacttttaggtaaaggggttacagataccttacataaagcttgtttaaacatcttaaattttataattctattaacctgtatgtttttatgttctggtctcaggaaccctttttcacccccagaccattttaccttttctggtgaaaatggttgggctcccagcagggagatgcatgcgtaagacct

SEQ ID NO: 632833 - DNA, 515 bp, Homo sapiens
tctttctctgtgctctgcttggctcccatatgtccctgtagactgatcaaatgtttttatatgygtggtacaactcacctcatcctctcaatcagtctttgaacctagatttgaatctactgatttatattggcccagcctggctccctttaggcaatgcaccaagacctctcctagaagttatgcactcagaggcatgtctaccaggattttgaaggtggacacacaatttctttcagatttatgggtcataaatctttagtcatattaatttcaaaaagtcttcagattcataaagatttgggtaaaattctggatctatcaattgccagctgtgtgacctggggcaagttcctaacattctctaggcctcaattctgtcttctgtaaatgtttttttttttttttgtgagacagagtctcactctgtcacccaggctggagtgcagtggcacaatctccactcactgcaagctctgctttccggggttcacaccattctcctgcctcagcct

SEQ ID NO: 632834 - DNA, 515 bp, Homo sapiens
tctttctctgtgctctgcttggctcccatatgtccctgtagactgatcaaatgtttttatatgcgtggtacaactcacctcatcctctcaatcagtctttgaacctagatttgaatctactgatttatattggcccagcctggctccctttaggcaatgcmccaagacctctcctagaagttatgcactcagaggcatgtctaccaggattttgaaggtggacacacaatttctttcagatttatgggtcataaatctttagtcatattaatttcaaaaagtcttcagattcataaagatttgggtaaaattctggatctatcaattgccagctgtgtgacctggggcaagttcctaacattctctaggcctcaattctgtcttctgtaaatgtttttttttttttttgtgagacagagtctcactctgtcacccaggctggagtgcagtggcacaatctccactcactgcaagctctgctttccggggttcacaccattctcctgcctcagcct

SEQ ID NO: 632835 - DNA, 631 bp, Homo sapiens
tttgaattcaagcatagcagaactctgcatgtgaaatttctttagtggggaactgagtcagataattattgtggcatgtgaaagataggaagaaaattagaaaaaatacaagtttcttagttttttatttttgtagataatgtgaatgagtaaaaattagaatttaatatttggtgactattgactgcaactccaacccagtataacagacctgcatgtttctgacctgagatcagcatcrgaaggaaaatgtacattatggaagatggaggctctggggtcctcctaatataatatccaaatgtttctgatgaggaaatttgaaattgtcaggaaatgtgatagaaacgtcaataatataaaaataaactgtgtaagttgtaaaatataaggcacagctcagtttattctgtggtagggtaaaaaattacagatttttgattagctaatagatctacctctatcctgttaaattatctgtaccatctccttgccttgaaattatttctttttcatgttacatctgtgttctcctaagtgtgaatgctggaatgaagctactgctattgctactcttgctcttgctactctagctccagcaggtatctggcacttcctatgtgaaaagcat

SEQ ID NO: 632836 - DNA, 588 bp, Homo sapiens
ctccttgccttgaaattatttctttttcatgttacatctgtgttctcctaagtgtgaatgctggaatgaagctactgctattgctactcttgctcttgctactctagctccagcaggtatctggcacttcctatgtgaaaagcatgaactaatatctttacatgaattcggttatttgattctcacaaaaatcccctgacatcagcagtttcaccaacttcctttcatgaatgaggacactgaggcttagaaggatttgagcyaggcaattcagtggcttaacccacatcttatcagctagtccatagtagtaacactccatttgcctttagaaaagcccttctcttaccatcattgtcaaggctccatcagggctgctttcataggatgtagttttctggcttgtttgatatcatacacatcactttatacttgatttctcagcccagctgtcataagaaactctttaacttgtacctatgctctcctcctcccagtatgaacctgtgcatgtgcacgggctattacttactaattaaacagctatttgcatgtctactattggtgctaatttgggagacccaaaaa

SEQ ID NO: 632837 - DNA, 588 bp, Homo sapiens
ctccttgccttgaaattatttctttttcatgttacatctgtgttctcctaagtgtgaatgctggaatgaagctactgctattgctactcttgctcttgctactctagctccagcaggtatctggcacttcctatgtgaaaagcatgaactaatatctttacatgaattcggttatttgattctcacaaaaatcccctgacatcagcagtttcaccaacttcctttcatgaatgaggacactgaggcttagaaggatttgagccaggcaattcagtggcttaacccacatcttatcagctagtccatagtagtaacamtccatttgcctttagaaaagcccttctcttaccatcattgtcaaggctccatcagggctgctttcataggatgtagttttctggcttgtttgatatcatacacatcactttatacttgatttctcagcccagctgtcataagaaactctttaacttgtacctatgctctcctcctcccagtatgaacctgtgcatgtgcacgggctattacttactaattaaacagctatttgcatgtctactattggtgctaatttgggagacccaaaaa

SEQ ID NO: 632838 - DNA, 283 bp, Homo sapiens
ctccataggcaatgtacaattttgggtttgacagtttcctgaaatagtctgagttgggcaagagtggttgtagtcttttctggcctctgtagtttattgcaaaagacttgaatttgtagagaccttctggagtattcctgggggaatatctgaataggatcagaatcatacttggatcattttattcaggctgagtcgtctgggtccatccytggagaaatctaatttcctgggcctgcttttgtggtttgcttcgacgtagtgtgaaatgactagaccgttg

SEQ ID NO: 632839 - DNA, 648 bp, Homo sapiens
ctccctcttttttgttttcctctgtgttttatttagtcttttgtaactgtcttggaagacgcttagttgttgttttaaaagttagcccaactattttgaatgggccagtatttctgctgcaagacacttaagagaacagccaagcttatcttaaatagaactgagctatccattgccgttggtagtttgaccaggctagtgggaagaaactgaaaatgctgtggccagaaaatagaagacatggactcttgaaagagtttggagaaacatgacatccttttaatggatttttaagtgttatctttgraaagagaaaataaattagtcttttctgtttcttaagaaagcaggaatagaattaatgggtggaagttggaaggaggcagaggaagcactttctaacaaatattgtcttgcatttaaatgagctgttgtgctaatgtgttccatctgattaacatgttgaaggataatcgaggtgtctacttagtttgaggtattttgccttcactagaggactggatggaagaggttgcaatgttggtgctccccaatgaccgcactcctgatatttatactctgtgcaatcctcttcatgactgctgctgagctcagccatgggacttgctctggccattggtacatgca

SEQ ID NO: 632840 - DNA, 465 bp, Homo sapiens
attttttgtcctttccactggtgtttcaaaccaggagtataagggaaaggcacggatcttcctgatgtgtttgatttattttgaatgttggtatattcatggatcagagcagcagtttagtttcagcttagcctttaggraattttttatgatgctggtatataaaatcatcataaaggtaaagtcaatgcactgcggtttccctgtataatgttccttcacttatttatttttttgggctgccatgagaagatatatttatttttgctgttaactgtttgctgaagattgggtgactaatacttttaggtagctcagtcagtccatgttttggggtttcttaaaagttttgttacactgtgcagcagagcaaaaccctgtctcaaaaaaaagttttgctacaaacggttattaaaaatattgataggggctgagcatggtggctcattcctgtaatgtcagcac

SEQ ID NO: 632841 - DNA, 564 bp, Homo sapiens
cctgtctccaacaaacaaacaaacaaacaaacaaatcctaatataagtcgtgtctgtgtttagttacttccatgctggtgtggtcaagatctagagttcagcccatgaacaggcyggtgtacattgtttcctgacttcctgactagagctggacccacagctctaatcatccaccttgcagatggagcacctggcaactcaaaggcaacgaaatgagatactggggatagcccagggcttagtcatcactgcctctggaaaagtacctcaagatggaggccctgcatcaaatttgaagggcacttcatcagataaactgaaaaagtgcactgtagcacatctcatgaatggcctgtgaggggaaaattgctgaaatggtgatgagaggatgctggcttcttttcccatatgctagtcaaggacagtggtatcatgttctgtgcagccaatgttggcatgaaaagactctcaggggtcattattggtggggggtgttcaacactggagggctagcaggtgaggatgttcaggactgatctgacacaggagcaggtggggaggaag

SEQ ID NO: 632842 - DNA, 564 bp, Homo sapiens
cctgtctccaacaaacaaacaaacaaacaaacaaatcctaatataagtcgtgtctgtgtttagttacttccatgctggtgtggtcaagatctagagttcagcccatgaacaggctggtgtacattgtttcctgacttcctgactagagctggacccacagctctaatcatccaccttgcagatggagcacctggcaactcaaaggcaacgaaatgagatactggggatagcccagggcttagtcatcactgcctctggaaaagtacctcaagatggaggccctgcrtcaaatttgaagggcacttcatcagataaactgaaaaagtgcactgtagcacatctcatgaatggcctgtgaggggaaaattgctgaaatggtgatgagaggatgctggcttcttttcccatatgctagtcaaggacagtggtatcatgttctgtgcagccaatgttggcatgaaaagactctcaggggtcattattggtggggggtgttcaacactggagggctagcaggtgaggatgttcaggactgatctgacacaggagcaggtggggaggaag

SEQ ID NO: 632843 - DNA, 558 bp, Homo sapiens
gtcacttggctgaagccccagacatcatggcaggcagatgagcattatctcttttgccttgaaagaattcctgactcacagattcatgagtaaaataaatgactattgttttaagccacagagtgttaactaatttgttttgcagcggaagataagcagaattgtcacacagctattacctgagcatgatggattccatccaagtattcaggctccagagtgcatgtgcrtaacaaatattctatacaatataaggtatccagaacgttttaccatcaccgttcacacagcccctctctcacctctcccacaccttccccacgggcttttcccttagcctgtttgactttcctctgaagccagctgacatgttgcagatgatgatcttgcttgtttactgaccatttctcaccctcagcccttgaatggatgctacacaagggcagtggtttgcttgagctcttcttcactgctacattcccagcatctggaatagggcccagcatgaagtcaacactaaagatttttgagtgagtgagtagataatagacatttttc

SEQ ID NO: 632844 - DNA, 654 bp, Homo sapiens
tgaaggtagctcatagtcttcttaaggatgattttcaaattttaggaaagtgaatagaaaacatatacttcaggtaattctgttaagtacatttttttttctcaataaggttttcagtcagtattgagtggcagtgaatttcactttatcctctcaagtgaatgtttaggcatgcagagagtctgtttcctgttttttttwaaattaatttattaaacgaagacccagatacccataagcactcagagttctctgaagctgaggaggcttacccgtctctttgcaggagctcttatactctcctttgcacgtattttccccagcctaatgtttatactttgcctttttgataatgtaattttccatgtagttatgaatttgcatgtgttagagtaggaggccactgcaaactcacagagtgatgggctgagcaagtactgaggagtaagccaagattttccctaaaaataattttaagtttattccagtacatgaacagatgggtgaccgaggcccccaaaacatggccacaagaatttttgtttggaacagtttcaaagtgggtggtaacaaatgcccactatggccataaaaataaacctcaggaagagatccatagaacatctaaactttgagcaatgtaacctcctacag

SEQ ID NO: 632845 - DNA, 541 bp, Homo sapiens
ttatctataaacacaacgaggaagttagtgacctatgtcccagcctatgagacttttggttagtaagcagctccggtgaagtgggtcagagggcagcttgattaatgcttaatgrtatttcagtccagagcctggcatcctatttttattaaccctgtggaaaggaattcatttgggattgaagactctatgtattttatttgttttgctcttcctgattccttaagaaaatgtttcaaagaaagcccttctgtctctctgctctgctgttccccagctgtcacgaagataaactcagagtcatatgggggtaatcggtcccaatagccaataggtaattcctgtttgtttacctatataagtagctccatttctccatttctcacaacaccaaaggctcagactttggacacactattgttgttctgtgattttaacctactattaataaataatagttttcatttgttgggctataagtttgccagacctagtgctttaatacaacatactaatagttctacttctatccacacaaaag

SEQ ID NO: 632846 - DNA, 541 bp, Homo sapiens
ttatctataaacacaacgaggaagttagtgacctatgtcccagcctatgagacttttggttagtaagcagctccggtgaagtgggtcagagggcagcttgattaatgcttaatggtatttcagtccagagcctrgcatcctatttttattaaccctgtggaaaggaattcatttgggattgaagactctatgtattttatttgttttgctcttcctgattccttaagaaaatgtttcaaagaaagcccttctgtctctctgctctgctgttccccagctgtcacgaagataaactcagagtcatatgggggtaatcggtcccaatagccaataggtaattcctgtttgtttacctatataagtagctccatttctccatttctcacaacaccaaaggctcagactttggacacactattgttgttctgtgattttaacctactattaataaataatagttttcatttgttgggctataagtttgccagacctagtgctttaatacaacatactaatagttctacttctatccacacaaaag

SEQ ID NO: 632847 - DNA, 555 bp, Homo sapiens
atgagtctatatgaaagaagaaggttcaagtgagttaggtagaagcattctactaaaaccgagggcracagacaaggaaggtgtgtgtatgttcacagaaagaacaaaactctctaagccagatgttcaaaacaaccaatccatttaaaaatggctatttttgctgggttgatttttcctctctggtaaattctgaattttgtttacagtattagcattttttcaaaagtttttcactgtgctttttgaatatttgaatgcttttttgtttacttttcagacagtttttaaaatgtattctccaccaattatgcatgctctgttcatttagcaatgccttcatgaatttatatttttcttgtcagattttacttagcgtttgcaactactggttgatgtattagtaacttttctgtatcctggagtgcttttactatttataaaagattaatttttaaaattttctttttacattttcatttgaaagtcactttcatccagtgatgccagttttaactatttagcagagtttcttattttttaccacctttttag

SEQ ID NO: 632848 - DNA, 601 bp, Homo sapiens
cagtattagcattttttcaaaagtttttcactgtgctttttgaayatttgaatgcttttttgtttacttttcagacagtttttaaaatgtattctccaccaattatgcatgctctgttcatttagcaatgccttcatgaatttatatttttcttgtcagattttacttagcgtttgcaactactggttgatgtattagtaacttttctgtatcctggagtgcttttactatttataaaagattaatttttaaaattttctttttacattttcatttgaaagtcactttcatccagtgatgccagttttaactatttagcagagtttcttattttttaccacctttttagtgcgctttatatttaagcagcattcttcattaaaaaaatttataaatgggagttgaacaatgagaacacatggacacggggaggggaacaacacacactggggcctattggggggtggggttggggaaggaagagctttggggaaagagctaatgcatgctgggcttaatacccaggtgatgggttgataggtgcagcaaaccaccatggcacacgtttacctttgtaacaaacctgcacatcctgcacatg

SEQ ID NO: 632849 - DNA, 498 bp, Homo sapiens
aaacaaccaatccatttaaaaatggctatttttgctgggttgatttttcctctctggtaaattctgaattttgtttacagtattagcattttttcaaaagtttttcactgtgctttttgaatatttgaatgcttttttgtttacttttcagacagtttttaaaatgtattctccaccaattatgcatgctctgttcatttagcaatgccttcatgaatttatatttttcttgtcagattttacttagcgtttgcaactactggttgatgtattartaacttttctgtatcctggagtgcttttactatttataaaagattaatttttaaaattttctttttacattttcatttgaaagtcactttcatccagtgatgccagttttaactatttagcagagtttcttattttttaccacctttttagtgcgctttatatttaagcagcattcttcattaaaaaaatttataaatgggagttgaacaatgagaacacatg

SEQ ID NO: 632850 - DNA, 634 bp, Homo sapiens
attttttttttttagtataaaggtgagccattggctttcaaataaatagaagataagaatgggagagttgatcatactagggaggatggtcaaatgtttcaaaatctatggtgctgtgccaagttactaggataaagggtgggcagtgagcacacttagagtaatttgaaagctcctgtattaattacatattactgtgtaacccattactcccaagcatagcttaaaacaacatgtatttattataatacaatttatgtggattatgaatctggtcacagcttagctgagttctctgcattagagtttctcacaaggccacagttaaagattcagccagggmtgcagtcttacttgaaggcttgactggggaggatctgattctcagatcacccacatggctattggcaggaatcaattctttgaacattgttggattgagggctcagttactcaggagctgaagacctcccttagttgcttgccatataggcctttccagagagcatctcacaacttggcagctggcttcaatcagagagagagagcaggtgagagagctagagatagtctagtgagaaagacaatgctggcagatggaggacatcattttttataacccaatcatgaaagc

SEQ ID NO: 632851 - DNA, 612 bp, Homo sapiens
acctgctgccaagttctctgcattcttgttccacccacttgaaagccagcctcccagatgatgaagtgtgagatcatctgtcagcgtcttttcaggagatgacacagcctttgtcctgtcactattggctaccttctgcattgtctgttgtatcctgccatgctccatttctgacctgttctgggtttgacctaactggataatcagtgtcccccacactacctgtctgttacatcgctcactgaaaatgagtttccttccaccttmtgggaggtaattataataactgcctaactggtctgtctgacagataattcagctattctgtacaccatatgagtcacttttttagtctttaaatgagactttggaaacatgcccatattgggaaaccattaactaaaacgcctaagtgtgaacttcttatccaagtgtttaaggtcctctccaatctgacactcatccaccttaccttctgcccgcttgactcctctgccccagctagaaaagtcttgctaacaactttctaaaattacctgacatattcttttttcttgcccttgagtattatgtcctgctaaattacagtgtccactgagtcctctttaacca

SEQ ID NO: 632852 - DNA, 534 bp, Homo sapiens
aggaatacctatgtcttttctggaaatggctggtggacctctcagaaccagcatgccaccttcctttttgtccttttacagcttcttctggttattgtcatggtgattgtcaactgtcatgatgctggtaggagtgtcatttagcatggaaatgaaattaaaataaagcatcaggtatttggggggtccttcagtcagctgtctcacttctaaccattctcagcttgtctagttacaaggggaacttcttaccgaaggcatgctgtattttaaagataagcagcatgagaacaaggtagaaattcagctaggtcacacaagctttacactgggcaacagtaygttagttaaacatgttttgaagaaagcattagagtaggggaggagtgttgttcagagaagatggttggaggggcctctccaaaatggtgacatttgagcagagacctggataaaatgatagagagttacatggccacatagagaaagcccattccattaacgggaggaaaagtgcaaaggctctgaggcagg

SEQ ID NO: 632853 - DNA, 472 bp, Homo sapiens
atccaactgggcgcctgaatgtcaaaaagagaaaagaagatcctttaaccttgaccctgggacattataggcttgcccctttcctgtgattcttcttttcaggtgggctttctgtatgcgyggtgccctccttacccttgggaattgagcacatgcagtgtgtttagggagttataggcatgcccatctgaggctttcttcccttttccagtggagtgtgcctctggaagatcattcttctccatttttgtctctttacacacattcccaggaagttgcttctccctggggcctgcattcaattaatattgtgatgttaacaggtgtgggccatctggaaatgaactctccctggcactgccaaattatcatttttagagaggcaaagcgataactgccaaaccgtcacctgacatttctaatggcttgcacatgactacctgtaacaagtccatacagcaaagtgaaagca

SEQ ID NO: 632854 - DNA, 456 bp, Homo sapiens
gcccatctgaggctttcttcccttttccagtggagtgtgcctctggaagatcattcttctccatttttgtctctttacacacattcccaggaagttgcttctccctggggcctgcattcaattaatattgtgatgttaacaggtgtgggccatctggaaatgaactctccctggcactgccaaattatcatttttagagaggcaaagcgataaytgccaaaccgtcacctgacatttctaatggcttgcacatgactacctgtaacaagtccatacagcaaagtgaaagcaagtttactaagaaagtgaaggaataaagaatggctactccatagacagagcaggcagttcccaaaaggggagggacatgcccaccttaggtacaatgcttgtttatatcatggggagatgtattctattacaagggtttgtgataacagattaatttttctaatt

SEQ ID NO: 632855 - DNA, 574 bp, Homo sapiens
tcaggatattcctgagtctgggtctgtttagtaaatgttatcaatctgttcccttaactgtaaatatctagaggttaggaacatctaacttctgggaaatgcagcccagcaattcccagcctcattttacccagcccctagtcaagatggagttgctctggttcaaacacctctgactcaaggacctctgccttcattgacgattttgtctcttcatttttgctgtaacaatcctactctgacacaatggaaacctaatatctaacagaaagaataatgaggtgaaaaaagaatttgcacaagaaaaaagaaacaagtaatttattatttcaaataataatccagaaaactctactatttccattttataggtgagaacactgagccctaaaaaggttaaaaaacttgcttacattacatagttcattgacagcagatttagtactcaaattgatatctaacttyctcaaattcatgttgttagttaccacatgaccagtatcgtccccattgttatgcacgagaaacctaaacctggagggattaagtgatttattcaagatcacatcattaa

SEQ ID NO: 632856 - DNA, 613 bp, Homo sapiens
ctatactaacaaagctgtctttcaagaatagtaatgaaattttgttttcagcaaaaaaaaaatctaaatggaatgtttactataaattctcattagagatctaaacatctgcttcattcaaaaagaaaattatcatagaagttctgagatgcaaaaagagaataatgggtagtaattttggtaaatctatgaatcattatttttaaaataattataatgtttaaagaatggtattaaaaacacagattaagggaaaacattagatagaaatagaatacaattaagttggagagttgtgatgagttaaagcattttaacataccagttaaaaagggtaaagtagaaggtaaagatattgatcaactttacacattatttagttacatatgcatataaaactatctaaagttatttaaaataaatatataaaaaagaaggtggtgcaagatggcagaataggatttttcagtaattgtcctgcagaaacatcaatttgaacaactattcacacacaaaaaaatcttcayaagagctaaggaaaccagatgagagattacagtacctgactatagcacaataataagaaaagatgcattgaagagggtaggaagac

SEQ ID NO: 632857 - DNA, 439 bp, Homo sapiens
tggtgcaagatggcagaataggatttttcagtaattgtcctgcagaaacatcaatttgaacaactattcacacacaaaaaaatcttcacaagagctaaggaaaccagatgagagattacagtacctgactatagcacaataataagaaaagatgcattgaagagggtaggaagacagttccacattacccatatcacctcttctccaatcccaggcaacacygtgtggaaaaagataccatcttattggaggaaagaaaggaaagtgaaggaatttgctttggaccccaatagtgggtctgccaccataaaacaaggcattgagcagaactccatggcctctgacttcaggctggtattcatggactcaacctccagacacgacctggtagcagacagaaacctgtatcccctgtgaggtggatctgaactccagttca

SEQ ID NO: 632858 - DNA, 607 bp, Homo sapiens
aataactattttttatcaaacatcaaggaaatagaaacaattcaacaaaatgatgaagacaataaatgaccaaaataagaaaattaacagagagattattataatttcagaaaaatctaacagaaatcctgaaactaaaaaatacagtgaatgaaattaaaagtaaaatagcatcaacagcagaattatcaagcagaagaaagaatgagtgaactcagggatgggtcatttgaaaatatgcaatcagaagagagaaaaaamtgaaaggaacaaagaaacttttgttgctcaagatttatgggacaacatcacaagagtaaacgtcataggagttgaaaaaggagaaggaaaaaggagtagaaagtttaagaaaataatatcagaaaactttccaaacctggagaaagatataaatattcaggtacaagaagggcaaagatcttcaataataatgaattcaaataagacataatataatccaagacatggtttttgtgatctacattgttgttatcagcataaaataatataactataagatgttttttgtaaaactcatggtaaccagaaagcaaaaacctatagtgaatgcacaaaaaaaagaaag

SEQ ID NO: 632859 - DNA, 516 bp, Homo sapiens
agattcaacataaaacatgggggaaaatatgtgcaaactatatatctgatagatcaatatctaaaatatacaaggaactcaatagcaagaaaagaatattctggattaaaaatgggcaaaagatttgaatagacagttctcaaaacaagacataaaattggccaacaagtatatgagaacatgctcaacatcattaatcatcaaggaaatgcaaattaaaaccacaatgagataatcacctcacacctgttagattggctactatcaaaaaggtgaaagataacaaatgttggtgagaatgtgaagaaaggggaacatgtttacattgtttgtggatatgtaaattagtatgtatcctgtttcaaaaacagtrtacaatttgcataaaaaattaaaaatagaactaacatatgacccagcaattccactactatgtatataatccaaaagaaatgaaatcagtatgtaaaagagatacctgcactcctatgtttattgcagcattattcacaatag

SEQ ID NO: 632860 - DNA, 652 bp, Homo sapiens
gttttacatgatacatacatacaattttatctgtaaaagtaaaataaataaataagtaaaaaagtttgaattgacaaatgaatagtgtaattttcaaaatattaaattataatggagagccaatgagaaaaatatgcaaacaaaacaaacaaaaacccaaagcaataaaacaatccaaatgaaagtttaacaaaaagggtaaaacacaaaatttctcaaaagtaagaactggtaaaaattaagatatagaaataaatccaagtataccaataattataaaaagggataaactttyctgttaaaaacaaaactgtctcaccaagttctttaaaactccagtttaagtcatttataagtgactctgtgaaatacatacagacacagaaagtttatatgaaaggataaaaaatatgtacaaggcaaatacaaaccaaaagaaaactggtgttgctttataaatattgtataaaatagattttgagacaaagcattactagatttaagaaaaataacagcttttttacaaaagattaaattcactaagaagataaaataattcaaaatcttgatgtatttaagaacaaaacctcaaattatatcatcaaaaaattgacagctctgcaagaggaagataaattccaacaagatttga

SEQ ID NO: 632861 - DNA, 652 bp, Homo sapiens
gttttacatgatacatacatacaattttatctgtaaaagtaaaataaataaataagtaaaaaagtttgaattgacaaatgaatagtgtaattttcaaaatattaaattataatggagagccaatgagaaaaatatgcaaacaaaacaaacaaaaacccaaagcaataaaacaatccaaatgaaagtttaacaaaaagggtaaaacacaaaatttctcaaaagtaagaactggtaaaaattaagatatagaaataaatccaagtataccaataattataaaaagggataaactttcctgttaaaaacaaaactrtctcaccaagttctttaaaactccagtttaagtcatttataagtgactctgtgaaatacatacagacacagaaagtttatatgaaaggataaaaaatatgtacaaggcaaatacaaaccaaaagaaaactggtgttgctttataaatattgtataaaatagattttgagacaaagcattactagatttaagaaaaataacagcttttttacaaaagattaaattcactaagaagataaaataattcaaaatcttgatgtatttaagaacaaaacctcaaattatatcatcaaaaaattgacagctctgcaagaggaagataaattccaacaagatttga

SEQ ID NO: 632862 - DNA, 542 bp, Homo sapiens
cagcttctcctaactgtgaatcaagcagctgcacatcacacacatctccccagccctggccctccgaggccctggccctctctacagctggccaggttagcaggttagctttcagagccttcargaaatccaatttattcccaggaactgctctcacactatttaaatcccctaatctcattgtgaccttcttggaggtaacaaggtggtcacatgaataacaatgagtcctaggtgggcactacaaaagaatacaaagaaataaaaatgtccctggtaaaaaagaatcaggagtggagtggattggaggacagtggacatttccaggatttgagtgatttccaagtgttagcacagagactaacaaactaactgtcaactcatggaggtaatgatgatggtgataatagtgataatgatgacaacgacgatgataatgatggtgataatggagatgatgtgttttcccaagcctatctccaaagtatgggagaaataaaattcgaacccctatttgtgactcctagtctgatgctctaatt

SEQ ID NO: 632863 - DNA, 564 bp, Homo sapiens
ctttcagagccttcaagaaatccaatttattcccaggaactgctctcacactatttaaatcccctaatctcattgtgaccttcttggaggtaacaaggtggtcacatgaataacaatgagtcctaggtgggcactacaaaagaatacaaagaaataaaaatgtccctggtaaaaaagaatcaggagtggagtggattggaggacagtggwcatttccaggatttgagtgatttccaagtgttagcacagagactaacaaactaactgtcaactcatggaggtaatgatgatggtgataatagtgataatgatgacaacgacgatgataatgatggtgataatggagatgatgtgttttcccaagcctatctccaaagtatgggagaaataaaattcgaacccctatttgtgactcctagtctgatgctctaattcatgctgcctacactcattcaatggtaaacacaccttgctactagtttactttgtgtattcatagacatgaatctcctcaaagaccccagaactaaacttcagtgaacagaatgtacactggataaagtc

SEQ ID NO: 632864 - DNA, 594 bp, Homo sapiens
aatgtctgacctttccacctctgtagatttgtttccatttaaaaagcctggaggatttacaatagcacttcctgtagtaccaatgtgataaaagcaaggacacctggggraaactatctttttttttttttttcacttttacattcatttcagatttaaggtcgtcaacctcatgtatccactaaaatggaacttgtgcctccattcaaatatatgaggaaatttatacttctcttgaattttgagatattctctttcaaaagcttcatcacataaaaatctatccattttgctatcacctattcatattcaggaatctggatttacaatgtcacacgcaatattataaaagtattctacaaactgatcatatgccatctgcttatgaataataattagcagccccctctcccaccccaggaacacctgtctcattttaccgccagcctatttagagccaagcgtcattgttacctggatcttgatcctctttttcctgattaatgtacttatttagacctactatttaaagtttatagacaagctctgagcactactggatagagagcccagaaggaaagtcaagatgccaat

SEQ ID NO: 632865 - DNA, 556 bp, Homo sapiens
ggcctttcacttattaagttattttttatgaagaccttggcataattttatcactagtggtaaagattgttttctgtyatacaccatgaatgaatgaagttctttcccatatagtatttattgtacagtaatttcacatgcaaatctatacaaaatacacacaaaacacaacagtgaaaaatgtgacataatcagtagtcagaaggcatcatgccacatgtctatcccattgccagcatcttctacttcaatatctattccacctacatttttctccaatttccaccctttttcacatcatatgatttgttgtggtatgtaagaataggagaattactcatgaacttttctaatttttttattaaaaagagagaaaatattaaaataatcattcctgacttacagccaaagcttttataaactatttcattcaatatttatctggggtgctaggttgagaagtttaccaactgaagctccttcttattaagcaatagggcaaaataaagattttgcctacagctcagttattgctcttaaaaagcttttaatttaa

SEQ ID NO: 632866 - DNA, 568 bp, Homo sapiens
tgaaatctattttctcagcccattttcaaaacaatgacccttttaccataaagatacgattctaggagcattctgtttaaagcacaggtctttctgtctctcttctcagacaaaaagctgaagcatttaatttgccttggctcatctcaagtatgagttttagactgaaaactactcttcatttattcartggcagaatctctattagtcagctctagtctgtctagtatttcaaagctccatttaaggaaaaaagaaaaacaggaaccagcttcattcttagattttacacagagaaatcccacaaagtaatcttctagtggaccaaagatggctaatctatgcttccctcatgtaaaggtttgatcctttgaagagaaatctaagtaacatggaggaggctagctcactgataagctgaagatagaattcatgagatacgtaaatccttcttccagacagggccccagagagacagtcttctgccccttcacagtctgggtacctggcaattacttctgatgacctcagtgcctcatgtggtaatgatcttgtcaaaggtttagcc

SEQ ID NO: 632867 - DNA, 568 bp, Homo sapiens
tgaaatctattttctcagcccattttcaaaacaatgacccttttaccataaagatacgattctaggagcattctgtttaaagcacaggtctttctgtctctcttctcagacaaaaagctgaagcatttaatttgccttggctcatctcaagtatgagttttagactgaaaactactcttcatttattcaatggcagaatctctattagtcagctctagtctgtctagtatttcaragctccatttaaggaaaaaagaaaaacaggaaccagcttcattcttagattttacacagagaaatcccacaaagtaatcttctagtggaccaaagatggctaatctatgcttccctcatgtaaaggtttgatcctttgaagagaaatctaagtaacatggaggaggctagctcactgataagctgaagatagaattcatgagatacgtaaatccttcttccagacagggccccagagagacagtcttctgccccttcacagtctgggtacctggcaattacttctgatgacctcagtgcctcatgtggtaatgatcttgtcaaaggtttagcc

SEQ ID NO: 632868 - DNA, 568 bp, Homo sapiens
tgaaatctattttctcagcccattttcaaaacaatgacccttttaccataaagatacgattctaggagcattctgtttaaagcacaggtctttctgtctctcttctcagacaaaaagctgaagcatttaatttgccttggctcatctcaagtatgagttttagactgaaaactactcttcatttattcaatggcagaatctctattagtcagctctagtctgtctagtatttcaaagctccatttaaggaaaaaagaaaaacaggaaccagcttcattcttagattttacacagagaaatcccacaaagtaatcttctagtggrccaaagatggctaatctatgcttccctcatgtaaaggtttgatcctttgaagagaaatctaagtaacatggaggaggctagctcactgataagctgaagatagaattcatgagatacgtaaatccttcttccagacagggccccagagagacagtcttctgccccttcacagtctgggtacctggcaattacttctgatgacctcagtgcctcatgtggtaatgatcttgtcaaaggtttagcc

SEQ ID NO: 632869 - DNA, 568 bp, Homo sapiens
tgaaatctattttctcagcccattttcaaaacaatgacccttttaccataaagatacgattctaggagcattctgtttaaagcacaggtctttctgtctctcttctcagacaaaaagctgaagcatttaatttgccttggctcatctcaagtatgagttttagactgaaaactactcttcatttattcaatggcagaatctctattagtcagctctagtctgtctagtatttcaaagctccatttaaggaaaaaagaaaaacaggaaccagcttcattcttagattttacacagagaaatcccacaaagtaatcttctagtggaccaaagatggctaatctatgcttccctcatgtaaaggtttgatcctttgaagagaaatctaagtaacatggaggaggctagctcactgataagctgaagatagaattcatgagatacgtaaatccttcttccagacagggccccagagagacagtcttctgccccttcacagtctgggtacctggcaattacttctgatgacctcagtgcctcrtgtggtaatgatcttgtcaaaggtttagcc

SEQ ID NO: 632870 - DNA, 605 bp, Homo sapiens
catgtcaccctgacccgggttttggccgttttctctccctgtttggggttttctgttatgctgtggtttccttgcctagttcttgttttaactgttgtttgggtttttgtatcctcctgtgaccayccagtactattcctatctcaaaggtacttgaattctctattcgaaataggaatatctgataagcagtgtatttgaaccgtaccatggaaaacactgtattgattctaaaacatgagagaaatttaaggtaacaaacaatgacaaaaatttacttgacatttaaattaatatgaacttaatactggaatctttcttacctgatgaggcagtggaaactctgctcaagggtaaaacacaaattttatcatgtatctataaatttcttcctctaccagaattctactcaagaatataacacttgaaatcaaggccaggcacagtggctcacgtctgtaatcccagcactttgggaggccgaagtgggcagatcacttgaggtcaggagtttgagaccagcctggccaacatggtgaaacctcatctctactaaaaatacaaaaattagccaggcgtggtggcgtgctcctgtaaacccagct

SEQ ID NO: 632871 - DNA, 605 bp, Homo sapiens
catgtcaccctgacccgggttttggccgttttctctccctgtttggggttttctgttatgctgtggtttccttgcctagttcttgttttaactgttgtttgggtttttgtatcctcctgtgaccacccagtactattcctatctcaaaggtacttgaattctctattcgaaataggaatatctgataagcagtgtatttgaacygtaccatggaaaacactgtattgattctaaaacatgagagaaatttaaggtaacaaacaatgacaaaaatttacttgacatttaaattaatatgaacttaatactggaatctttcttacctgatgaggcagtggaaactctgctcaagggtaaaacacaaattttatcatgtatctataaatttcttcctctaccagaattctactcaagaatataacacttgaaatcaaggccaggcacagtggctcacgtctgtaatcccagcactttgggaggccgaagtgggcagatcacttgaggtcaggagtttgagaccagcctggccaacatggtgaaacctcatctctactaaaaatacaaaaattagccaggcgtggtggcgtgctcctgtaaacccagct

SEQ ID NO: 632872 - DNA, 504 bp, Homo sapiens
aagcttttattgcaaagctgaagtacccacttaagagagaagtgcaatgtgcttgtgagaaggagtcccacactatgaagtttgggtttccaattgtatcagtgtttctttaattaggggatagaaaaggaggagatttcagggacaccccccagttaccatcccctttttcctttatttgagtttgacaggaagagtcatggacatgtcaccctgacccgggttttggccgttttctctccctgtttggggttttctgttatgctgtggtttccttgcctagttcttgttttaactgttgtttgggtttttgtatcctcctgtgaccacccagtactattcctatctcaaaggtacttgaattctctattcgaaataggaatatctgataagcagtgtatttgaaccgtaccatggaaaacactgtattgattctaaracatgagagaaatttaaggtaacaaacaatgacaaaaatttacttgacatttaaattaatatgaa

SEQ ID NO: 632873 - DNA, 491 bp, Homo sapiens
aaccgtaccatggaaaacactgtattgattctaaaacatgagagaaatttaaggtaacaaacaatgacaaaaatttacttgacatttaaattaatatgaacttaatactggaatctttcttacctgatgaggcagtggaaactctgctcaagggtaaaacacaaattttatcatgtatctataaatttcttcctctaccagaattctactcaagaatataacacttgaaatcaaggccaggcacagtggctcacgtctgtaatcccagcactttgggaggccgaagtgggcagatcacttgaggtcaggagtttgagaccagcctggccaacatggtgaaacctcatctctactaaaaatacaaaaattagccaggcgtggtggcgtgctcctgtaaacccagctacttgggaagctgaggcaggagaatcgctcraacttgggaggcagaggttgcagtgagctgagatcacgccactgcactccagcct

SEQ ID NO: 632874 - DNA, 422 bp, Homo sapiens
tcaactgcatagacgtatgtttccattccattcaatggcggtcgctttgcatcattcacagtacaagtaatttggtatctccttttagtcatgtgtacaaaaataataacaaatattggttaccttggtgtttggaaggctgaagggattatcagaaaataattgatcacttacctaatcaagaattaatgtgatccttgtgtggaattgttacgcttgggaagacaagggttttagctctataaagcaatgattttttttattgttaaagctacttaagaatctatatttgtttacaaatctttttattctttattagcataaacctgttagagattccctagcagattaayagttccttccctcagaattactcgtgaaaacaaagttgaagaaggactagattcaagataacaaaagaa

SEQ ID NO: 632875 - DNA, 507 bp, Homo sapiens
actaaaaatacaaaatattagccaggcacggtggcacgtgcctgtagtcccagctactcgggaagctgaggcaggagaattgcttgaatctgggaggcrgaggttgcagtgagctgagatcatgccactgcactccagcctgggcgacagagcgagactccgtctcaaaaaaaaaaaaaggagacacaccccaaccccaggtatttctaatgcagcttctttgggaaacaatgaatctagttgattcccctgcctcctggcaggagttggaactaaatgacggtagctagaaagatgtaccatttttggcgggggggcttgtctttggggatttgggatggtcattaaaactctaggatatactgatgatatatgctacaatgtggctgaacctcacaaacaatatgctaagtgaaagaagccagatacaaaaggtcacatattgcatgattgcatgacaccatttatatgaaatgtcccgaataggtaaatccatagggagagaaa

SEQ ID NO: 632876 - DNA, 614 bp, Homo sapiens
tattaaatttttggtacttttataggcaattcttaactctctgtatggcttatttatttatatgctgttggtggcaaaattgtagttatgagctggctcctccttctgcacatggatgagccaccagattccagggtcagtggtrttagtgagaggatgtaggtaagatgagttaggccaccactgagaggtgtttcccaaattgtggtcttaggagtacccacgtcagcatcaggcaaggacagttgttacaagtgcagattgcagggctcaaatgcacttttccccagatcatcccaaggttgtctaacaatcaccagtttgagaaactctgccctgagccttctacaggcagatgcttcaaatgacagagttgtactactgtctagggaatatttctcaagggatggattgatgggaaaagaaacacaactggctgtggatagcacacaaaatatgtgctttcctcctttttattacatcagactgctaaacgacaaggataaacaaagttggcctcggtcagataatcccctcccagtaagagtgttgaaacctgcaagtgtaactttttatctggggtctgcctagctctaaggctgcctgagcttggg

SEQ ID NO: 632877 - DNA, 554 bp, Homo sapiens
agttgccttgtttaatttttattccttgctttttgacatgaagttcacttatttgtcttcatagtgtacatcaaaatgatagggccattaaagaaacaatgaggttcctctgtgatttgttaatttggtaatatacaactgttaggctctttcagtagataacagtaattgctgaaaagcttgaggtgggtcagggttagctactcccctacaacctcacaacctcataacctcactaccagattaagattatcatgcaagccaggcccagatatttcttgcacaaatgtgtatcagtaagcaaagacatgatctgtggacttgaagtctcttctgtgaccttacagatgatgcagccacccacrccttgcatgctgcagacgctgtgttctagagtggatgctaggaaactatggcccaccacctgtttttgtaaatgaagttttactgggacacagccatgctcattgcttatttgtggtctaaggttgctttcatgcccagtggtagagttgcataggtacctatacagaggcaatatggctccaaaagcc

SEQ ID NO: 632878 - DNA, 550 bp, Homo sapiens
ccaaggagaacaaggttttcccaaaccatccctttgcatggcytaaatgctaggtatgcaaattgcctctcactgtcccctttcaagactgtgttctcactatatttagcaggcttattatcctccctggactgctcacctcagaaggaaagctgaaatctagtttacgagcactcccggaagagaggcccagttcatggaatctcagctcactcacttgacttttgagtttgctcaagatgcttcacctacagaactcctgaactactttgctgatgaattcaggctgcccattttccagatgaggaaacaaggagagaataaccttggactagaacttagcattcactactatctccttcactggagccatgaccattctacagagaaaaatacacatatgccctttcctttctctttgctaaaaggatgataatcataatctcactgccttataatatcagtttagagagcttatttccctttctgattgatccttggcagcgagaacctatctactgtttacctctgtgtgccactctgtcctggt

SEQ ID NO: 632879 - DNA, 508 bp, Homo sapiens
ccctgtgtcgcttggcacactgacttacagacagtcaggcacactcactgaatacgtccaattggcactgctgatttggaaatatgtttttcattcatgcatttatctacatattcagcagacatatatttaaacttcttatgtgccaggaactgcatgaggaaactaagatacaaagaatarcacccagtcttactaagaagaattgagcaggccttcaattacctccctatgctttttgctaactcttatgggcccatctcccccaatgaatgtcaggctcttctgagtacacagtatctaagctggtgctttgcacataacaggaagtccacgcatatccatgtgaaaaggtccaaggaggcagcagcttacccaaggcatccgtggcattgacctggaggatcagccagctgtggacattctctttgttcgagccaaagatggtgaagacagtgctcttctccccaggttctgtgaggaggccatacacaaacactggcttctc

SEQ ID NO: 632880 - DNA, 508 bp, Homo sapiens
ccctgtgtcgcttggcacactgacttacagacagtcaggcacactcactgaatacgtccaattggcactgctgatttggaaatatgtttttcattcatgcatttatctacatattcagcagacatatatttaaacttcttatgtgccaggaactgcatgaggaaactaagatacaaagaatagcacccagtcttactaagaagaattgagcaggccttcaattacctccctatgctttttgctaactcttatgggcccatytcccccaatgaatgtcaggctcttctgagtacacagtatctaagctggtgctttgcacataacaggaagtccacgcatatccatgtgaaaaggtccaaggaggcagcagcttacccaaggcatccgtggcattgacctggaggatcagccagctgtggacattctctttgttcgagccaaagatggtgaagacagtgctcttctccccaggttctgtgaggaggccatacacaaacactggcttctc

SEQ ID NO: 632881 - DNA, 522 bp, Homo sapiens
aaaaaatttgagtcactcctctcacaaaaatatgccccccaaaacacggaatcagccaggcacatcctgcatagctggtggaactattctggtgtgtcttggttatggggctaacccaggccccaggggcctcttacctccacaatccttctcatcagaccagtccccacagtcgttctccctgtcacatttccatctgttggggatgcagtggccattctcacaccgaaactggaagtagcgggagcagtttggggcttctgtggggttttctgcagagatcaaccacatcatcagttgctttccctgcatcagtgtgaacacagggctccaactctaggcatcctcctccagacycaagttccagggcaacccacacttcccacccataaagagataaggcagcttcatggacccaatggggaacaaaaaatacacctacaaactaaacaaaaccccatcttcccagcccctaacccatgttcctctgatctatactacaatatcctgagaacaatcacc

SEQ ID NO: 632882 - DNA, 633 bp, Homo sapiens
ctttaatacttactagatgttaaggttagaagaggccaagacagagcctctgcctttatctgagtcacagttgaagaagctattggaacacacagtatgtgttcccaactaccagatacacagtaaggagctgccacaaaagcagcttcagaaattgtgcaggctgagagttcacagataatctgagtgggtaaaatgacgaagtagcactttctcacttctattctgccggccaagaatggacattagtgtcccggttaggttcaaacatcacatggagcaaaataatggcttctcaggaaggaaactaaagtcccttccagctctgacatcccataatttgataaccccccacgtatatcttcaggggcacaaaggtgatagtttacattaaggtagcatttttcagtatgtaatactcctttacaaacattctctctcttcatctgaaaaaccggagttagtctcacctttgtctctttcagtgtacctggggcatagcaggtgctcaacaaagatttctaggatgaataaatatcattataaaccaaagagcaartaaacaaatgtgataaataaatgaatagaaaagaatgaattgaatgaatcagtgagtcactaagagatttccat

SEQ ID NO: 632883 - DNA, 621 bp, Homo sapiens
gagccctctagtcagtttacagaacagmcattttctatgtgtgacctgcactttttggtatagcagggtgatgaggggaagcagtgtcccaggtgttctcctaggtctggagcgatcaccactttgtgatagtatgtcccccacacagatactgtgaacagcaagcatgtagactgtgggcttttgaatagccaggtttcctggagcatagaagttattattgaaatgcttgccctagttcaaggaattactggatgtaagagaactgagttctccactcaaatgatgtggaattgtgggtgtagaactcaatcaagtttctcttactaataatggtcatggtttattgggcatttagctaagtgattttcatctagaatctcatgtaattcttgagacaaggctgtgaagtaggtacaacagtgctcattttctagatggagacaatagaaggttatctagtaaatagcacagcaaagtctggaacttgggtgtgtctggttgtgaagctggctctttcaactggacactctgttgtccctgtttgttctcttagtgtgaaagctgcactgatacctactgacttgtctcatttgccattgtaggccgaaggctggtgtg

SEQ ID NO: 632884 - DNA, 621 bp, Homo sapiens
gagccctctagtcagtttacagaacagacattttctatgtgtgacctgcactttttggtatagcagggtgatgaggggaagcagtgtcccaggtgttctcctaggtctggagcgatcaccactttgtgatagtatgtcccccacacagatactgtgaacagcaagcatgtagactgtgggcttttgaatagccaggtttcctggagcatagaagttattattgaaatgcttgccctagttcaaggaattactggatgtaagagaactgagttctccactcaaatgatgtggaattgtgggtgtagaactcaatcaagtttctcttactaataatggtcatggtttattgggcatttagctaagtgattttcatctagaatctcatgtaattcttgagacaaggctgtgaagtaggtacaacagtgctcattttctagatggagacaatagaaggttatctagtaaatagcacagcaaagtctggaacttgggtgtgtctggttgtgragctggctctttcaactggacactctgttgtccctgtttgttctcttagtgtgaaagctgcactgatacctactgacttgtctcatttgccattgtaggccgaaggctggtgtg

SEQ ID NO: 632885 - DNA, 529 bp, Homo sapiens
cacattaaaacatatcctttaagagtgtcattcaacaatgatggcttatttcaatttggttattctgattttttttccccttgaaactgttttcactacgtctccagtgtagaacttcaaccaattttctctaaacatatgaacttttcttctaaagagattctgtaagcagtctcaaaggcagctttgagcactcttcttatttgcttggtggagttttgtatcatattgctcctggctaatacatgtccttttttggtttcaaaaaattctggcagtttctcttttgattttgcatgattggttttataaaatgtcattctaaaatgaatggctrtgtgtacttcttggacatattttcacgcacaagagtcatccatgtgatccttattggcatctgcacataattaaactcatattttaaagacagcctttgcctttttgattgactgctgctattcactagggattcattcattgtggtaaggggaatcctacactatcaactcattctggggactctcaggga

SEQ ID NO: 632886 - DNA, 642 bp, Homo sapiens
taacagaacataaccaatgttgtaggaatttaaaatattagtgtcttgtttaatgacatagataacacacaacaatggtgctttgcatgtgaagtyccattatagtatgatgagtctcagtacaggtatggaagctgctactcaatattaggttaattttggtcttcatcaagacctttaaagatgatttcctggattttagttcttataatcactgttctgccttcagcaaggacttggtaatgataaattgttggtgtagataagtcattggcatgaaagttgatctcaaacagcttctttcggcatttaataattactgcagtgaattttcacctgaatgtgtaagaactgtctcaccctgaactgtcaaatctaggaaattataagatgagacacttccaaataacgaaagacctgattcatatgactcccatgagctaacttttctaagaaggagtttctttaataagattttatttcaatttaaggtaatttaaatcaaactttttacattcctggtcttgatgctaatgtaacttaccagaaattgactacgtgtcagcgttttgattcatatagaatagaaaggaaggacataatgttatatgaaaccagccaggcacagaaagacagctactt

SEQ ID NO: 632887 - DNA, 642 bp, Homo sapiens
taacagaacataaccaatgttgtaggaatttaaaatattagtgtcttgtttaatgacatagataacacacaacaatggtgctttgcatgtgaagtcccattatagtatgatgagtctcagtacaggtatggaagctgctactcaatattaggttaattttggtcttcatcaagacctttaaagatgatttcctggattttagttcttataatcactgttctgccttcagcaaggacttggtaatgataaattgttggtgtagataagtcattggcatgaaagttgatctcaaacagcttctttcggcatttaataattactgcagtgaattttcacctgaatgtgtaagaactgtctcaccctgaactgtcaaatctaggaaattatwagatgagacacttccaaataacgaaagacctgattcatatgactcccatgagctaacttttctaagaaggagtttctttaataagattttatttcaatttaaggtaatttaaatcaaactttttacattcctggtcttgatgctaatgtaacttaccagaaattgactacgtgtcagcgttttgattcatatagaatagaaaggaaggacataatgttatatgaaaccagccaggcacagaaagacagctactt

SEQ ID NO: 632888 - DNA, 550 bp, Homo sapiens
gtggcgttttcttccttccaggagcacataatgatgttttaatcccattcttatattccttacgccatttttctgtgtccctttgagaagtgttcgagacttacagcttctacctgtagggattcaatttaagaaaagagtggaagtggaggtttgttttctatgcagtaagtttcctgaattccaggggaaatgagctgattattttcttwtacttagctggatatttcaacagagtcttttccaaaattgaaagagttttctaaatgaaatgacttgatttaaaattaaaatagatgcagagatgtatttttccccctcaataaattttctgagtcaggttcttgcctcccataattgaaggcaaccataataacgaatttgattgcatggcttttactcttacttttgaggtaattgccagattggcatccacagtaatttgtatgtgagaggtgatcagatgtgaacatttccattcagtcaactccctggaattcagacacatcactgcttctggttttagaattaggaccagtaattgcagctg

SEQ ID NO: 632889 - DNA, 566 bp, Homo sapiens
ttcatcacactattttaaattccttcccccattttgaatggaatggtagttcataccaaatgatggtttactgtaaatataccctctgaaggaggtaggtgtgtgggacctaatctgtagtttaattagcatctgaaataaagagggggaggggtcttgtttttgtttttatttttggctcagtccatcaagaatgaaactatgatggtcatgtgtctttgaagtatagaggaaactctttagctttgtttttaaaacacgttactttatttggcagaatccaaaagttcaaaaaaccattttaactgatggagaaattcccctgaaagtaatgttctggatgagaaagtaaaaaagagatctgggcacacacgattaaatcgtgtgtgtatgaaagacattcggaatttatggtaagaatagggtagataatcgttttgagtttttgactaaaaagtggtaactgaarctgggagaaaaggaaagcatcttagtgtcgagagttgtttggaaagtagtaaatgtttgtattttaaatggcagtgaacacaagcaggatagatggg

SEQ ID NO: 632890 - DNA, 537 bp, Homo sapiens
catacctacacttaatagtacygtgattgtatactgaaagaagttgttgagggtagagctcatgttaaatgtccttaccacaaaatagaagacagtgcctatgttaagcacatagttttataaaccatatataaaataatgctaagtaggaaaagttagacatcatattacacagtttacaacaatgcaaagtgtacaaacacacagatgaaaaccagaagcaaacataatgttttgaacagagatttaaatgaattatattcccttttctctgctaaattgattcagtgtttaatgacttttaaaaaaaatcaaaacagtggacaaaggggaggaggacaggtcctcaggtacaaatgccaccaggagttttgacttgcacaaagagcttgattcttatgttcaatgataactcaatgcctcagccctgccggtggtcaggctccaccacactcccatccagtcaggcagagttgattgattacttcaatagaactagccaaacagaaacagacatgggtcagtagatttttacca

SEQ ID NO: 632891 - DNA, 508 bp, Homo sapiens
agaatcatggattcctctttaataagggatttcaagatttgatactctctttgggtatcagagagtgcagacactaaaaaaacttcagaaggtcacataggcagacaatgaaagggcaaaaaagactagtagaaactgtaataattcttcataggaaaggaaatacaataatcgtataccacttggctcctcagtgaacaatatttacttgttcatcataatgtaaaaagtacagttttcaactttttaaactataatcactgataacttaattatggataaagaacaaaatgtagatgttattgacatcaataatataaaaattttaaaaacaaatgttaacaattggaagaagaatgacaaaaaggagagctgaagggagtacagggatgctattaatcctcatctcacaaaatgaggaatcaagagacatcatctacagttgacaactgatatastttggatatttgtccctgcccaaatcttatgttgaattatattccccaat

SEQ ID NO: 632892 - DNA, 558 bp, Homo sapiens
tgggcaacatattgagactttaccaaaaaaaattaaaarttagctggatgtggtggtgtgtgcctttattcctaactacttgggaggctgaagtgggaggtccacttgagcccaggagtttgaggctgcagtgagccatgatcataccactgcactccagcctgggcaacagagtgagattccatctcacaaaaaaggaaggaaaccaggtctgtgaagaatgggaggaaggaatgttccaatagaaggaataacatttgcaaaggccccaatgtcataaagaatcttgcagcctccgaaagaaggccaggtttctgaagcagccggagggaccagagtggcagggaaggctctgggttttactctgaaggtaaaggaatatcagtgaaagattttaagcagaggaggattatgagtaaactcacctggtgctgtgtggaacactcaatggctgttccagtggtttgcagagggcagatagcactttcctgagattcatagccatatggggtacacagctgggtgtggcctgccgttaatgccgagatagccttcctc

SEQ ID NO: 632893 - DNA, 552 bp, Homo sapiens
tttatcctgtgagtgtaggatgaacatatgaatttattaaagtggagattgagagataagtaatttttgtaaaaggaagtcgtataaagatcccttgaacccatccaactttagaatatggacagttcagtgagaaaaaaaaaatctgtaggcaagaaatgattctctaattttaatctcgtaaatgtccacataaaggtattaagattgtttatgtacagaaatatatttatttttgtaatagttgtattaatagattttaaattagcatttggtcttttctattttgcttcactaattacgtaaggctttgactattaaattaggttaatttatctctattgcatccatccaggattgggtagaaaaggtaaaaaggccaagtgttttcctaggatcactcaggatcaaaaccaggcttcaggcctctcaattcctsgtttctgtgctttgcctaccataaagatattggttgaccttcaaatcgcatactcctttaatcatcttttctcttatgactctaattttcattttcccttgtgattttacaag

SEQ ID NO: 632894 - DNA, 305 bp, Homo sapiens
caagggtttattcccacatcaaacaaaccaataaacaacaactttttctttgtattggttctatttggagcaattgtcaatgcattcttctgtcctcttttttcctactttcttggtacataatacacatactagtcagacagtggcattaggttrttcggaagttgtaacttttttaaaatcaccctctatatcattaactctaagtatttttggttcaggcttctctatactcctacacattactgaggaccccaaagatcttttattctgtcggctttctgaatcgatgattataattatgg

SEQ ID NO: 632895 - DNA, 305 bp, Homo sapiens
caagggtttattcccacatcaaacaaaccaataaacaacaactttttctttgtattggttctatttggagcaattgtcaatgcattcttctgtcctcttttttcctactttcttggtacataatacacatactagtcagacagtggcattaggttgttyggaagttgtaacttttttaaaatcaccctctatatcattaactctaagtatttttggttcaggcttctctatactcctacacattactgaggaccccaaagatcttttattctgtcggctttctgaatcgatgattataattatgg

SEQ ID NO: 632896 - DNA, 569 bp, Homo sapiens
tcattccttctcattaattaacatgttttgctgagatgtgtagtagacatgctgtacatagctgtccagtgaacattggatgaatgaggtggatgagagcctctcctatttattgggttaagtagggttgttgagggtatatttttgctcarttgaattattaagacaaacaacatcacccaataacagcagacagcttaataactgtgtttatctaaaacatcaagttttgtgtttcagacatatttctttagtaataaataacaccacactatttctaacaatagttatctctagagaccagtgctaccaagtaaaacgtaaagctcagcatctcctttgatgcaagatgagggtttttagatacagtgtagacctttatagagtagtgatttaatctttctaaattacatactgatgcctgtgagatttccacaagattaatcatctaatatcatcgatagcttgttgcagcttatttgtaaaaggtaacaagataatttaaaaaaaacttacattcatctgttttctcaaatttgatagtcataaatatcgtagttgataattag

SEQ ID NO: 632897 - DNA, 531 bp, Homo sapiens
gtattatagctcttttataatttgtctagcagattttctggttttcaccaygaaagaaatgtcatttcttagtcttcatttggaatttataaaaaattttaaaaatcaccacattttccaaaagtttatgccagaaaatcattcactatttaaaaatgaagtgcaatttcttaatagaaaagtatagattgagtcttgtcccatataaatgagtttcctagatttggaaaaaaattaatacattggaatcaatagttgaccacagatttaaatatgatacaaaaggtttaaaaatctaaattgtcattgtttacaaaatactggcaaattagagctacagcgcttggtgttattgtgtaatcttctgtttaaaaataaacagtggaaataattgtagaaacctctgggcttagaaaggcttgttggtggttcttcacatcctactaaaaaagcaggctgtctttgcatattaatcactctgtgaaaggaagcttgccttatttgcattgtgcatgcactaagaagtccaat

SEQ ID NO: 632898 - DNA, 531 bp, Homo sapiens
gtattatagctcttttataatttgtctagcagattttctggttttcaccacgaaagaaatgtcatttcttagtcttcatttggaatttataaaaaattttaaaaatcaccacattttccaaaagtttatgccagaaaatcattcactatttaaaaatgaagtgcaatttcttaataraaaagtatagattgagtcttgtcccatataaatgagtttcctagatttggaaaaaaattaatacattggaatcaatagttgaccacagatttaaatatgatacaaaaggtttaaaaatctaaattgtcattgtttacaaaatactggcaaattagagctacagcgcttggtgttattgtgtaatcttctgtttaaaaataaacagtggaaataattgtagaaacctctgggcttagaaaggcttgttggtggttcttcacatcctactaaaaaagcaggctgtctttgcatattaatcactctgtgaaaggaagcttgccttatttgcattgtgcatgcactaagaagtccaat

SEQ ID NO: 632899 - DNA, 635 bp, Homo sapiens
ataaatgagtttcctagatttggaaaaaaattaatacattggaatcaatagttgaccacagatttaaatatgatacaaaaggtttaaaaatctaaattgtcattgtttacaaaatactggcaaattagagctacagcgcttggtgttattgtgtaatcttctgtttaaaaataaacagtggaaataattgtagaaacctctgggcttagaaaggcttgttggtggttcttcacatcctactaaaaaagcaggctgtctttgcatattaatcactctgtgaaaggaagcttgccttatttgcattgtgcatgcactaagaagtccaatagtgtgcctgagaaaaaaatggggggattgtaattgttgttctcaaaagggtttttattccattcaagtggaaaagctgaatactggagaattagtgcagtgttttgtggaagaagagtcccttttgcgccactgcattgcatgtggtgcaatcccagtgtgtwaggatcctgaacgttggggtgaagaggaaagtgactcatctttctatgatgcaatagtctatgttcttgtacatctctataattttgtaagcattttctccttgttatgtatccgaaaagaggtagaatgaaattctgagaata

SEQ ID NO: 632900 - DNA, 647 bp, Homo sapiens
tgattgtgtataatcatggagacaaagcttattgttttaaatgattttgttaaatactagaaagtagttcactgagttaaaaggtttcatacaggtttcctaaaaaccatttggcttagatatatttaactatctgtgaaactacttgttattatcctctttactattgtatggrtttggttggattttgtctgttgaacacagatcctctgattttatttcgattttatttgaattgctttctgtaatattcaactacatggaaattgtgtttaatttgggcttatgtagagtggtccatagactttgagtgtgtgtttgggttgctgttctgaagaacagaagtagccaagaagtagtctgaaaaagtaggaccataaaaaattagactggtagaacaaaaaagaaaaaaaaacaaacaaaaaaaacctgtaatttttaccattcaaaagtccttatataggtttcataataaatttttttccaaaatattactgatgtacttctccaaatgtttattatagacatgtcaaaagacaaaattatgacaaatttagttataaatcaaattgtcttttatttgtgattcataaattggggcagcctccattcaacaaaatagaatgagagctcccactgagcaatgg

SEQ ID NO: 632901 - DNA, 647 bp, Homo sapiens
tgattgtgtataatcatggagacaaagcttattgttttaaatgattttgttaaatactagaaagtagttcactgagttaaaaggtttcatacaggtttcctaaaaaccatttggcttagatatatttaactatctgtgaaactacttgttattatcctctttactattgtatgggtttggttggattttgwctgttgaacacagatcctctgattttatttcgattttatttgaattgctttctgtaatattcaactacatggaaattgtgtttaatttgggcttatgtagagtggtccatagactttgagtgtgtgtttgggttgctgttctgaagaacagaagtagccaagaagtagtctgaaaaagtaggaccataaaaaattagactggtagaacaaaaaagaaaaaaaaacaaacaaaaaaaacctgtaatttttaccattcaaaagtccttatataggtttcataataaatttttttccaaaatattactgatgtacttctccaaatgtttattatagacatgtcaaaagacaaaattatgacaaatttagttataaatcaaattgtcttttatttgtgattcataaattggggcagcctccattcaacaaaatagaatgagagctcccactgagcaatgg

SEQ ID NO: 632902 - DNA, 647 bp, Homo sapiens
tgattgtgtataatcatggagacaaagcttattgttttaaatgattttgttaaatactagaaagtagttcactgagttaaaaggtttcatacaggtttcctaaaaaccatttggcttagatatatttaactatctgtgaaactacttgttattatcctctttactattgtatgggtttggttggattttgtctgttgaacacagatcctctgattttatttcgattttatttgaattgctttctgtaatattcaactacatggaaattgtgtttaatttgggcttatgtagagtggtccatagactttgagtgtgtgtttgggttgctgttctgaagaacagaagtagccaagaagtagtctgaaaaagtaggaccataaaaaattagactggtagaacaaaaaagaaaaaaaaacaaacaaaaaaamcctgtaatttttaccattcaaaagtccttatataggtttcataataaatttttttccaaaatattactgatgtacttctccaaatgtttattatagacatgtcaaaagacaaaattatgacaaatttagttataaatcaaattgtcttttatttgtgattcataaattggggcagcctccattcaacaaaatagaatgagagctcccactgagcaatgg

SEQ ID NO: 632903 - DNA, 552 bp, Homo sapiens
caatatatatttcaaaatagttagaagatttgaaatatcccaacacaaagaaatgataaacgttcctggcgatggataatctaaacaccctggtttgatcattacatattgtatgtatgcatcaaaatatcacatgtaccccatacatatgtacaaatattaatgtatcaatttcaaaataaaaataaaagacttggattggggagggggtgcttactctttccatcttcctccccttcccttgccttggaaaagggtaaaggaatttgatttagttctgggacactcttactctgttcttcttctcattctccttcccttcctgtattttagggtggggcggagatagtgtctctcacaccactgaccatggctgccatcctctctctggagatgtgcctgcttctgtggtamccctgactggtggtgggtgcctgccaggtgggagacatccaaatactggccttttcatggtactcaagggaggtctccttagagccccttcagggcgactccctgtcctgtgtttcctggctgtaggagatacaatgt

SEQ ID NO: 632904 - DNA, 550 bp, Homo sapiens
tgaaactcttaattcaagtttatatggacaacatattatatgacacatctcaccttgagatgagacaattgagcagcagacagcagaatcactaacaataatgacatcgagatcttggatcccttattgaatgggtgagtaactctgcacatctcaccacccctgaaggcattctcgtactatattgtccaggatagtgacagatttttataaagatgaccccaagacacsaaggagatattaaattatgctcagcctactggggaaatgtattgttcttttttaagagcccgccactgaaatattttttaaaggccttggtgttctaggaagaaagcttcattattgggtaattcacatgtgtgaagcccatatcatctaacagagctggatataagaagcattggaatattttctagatgaaatgtaacactacccctgctttccatatttgcatttattaagtatgtttggtccaaataattactatgtcactgttattttattattactgtgatctcctctttagttttattttcctcttaacatc

SEQ ID NO: 632905 - DNA, 550 bp, Homo sapiens
tgaaactcttaattcaagtttatatggacaacatattatatgacacatctcaccttgagatgagacaattgagcagcagacagcagaatcactaacaataatgacatcgagatcttggatcccttattgaatgggtgagtaactctgcacatctcaccacccctgaaggcattctcgtactatattgtccaggatagtgacagatttttataaagatgaccccaagacacgaaggagatattaaattatgctcagcctactggggaaatgtattgttcttttttaagagcccgccacygaaatattttttaaaggccttggtgttctaggaagaaagcttcattattgggtaattcacatgtgtgaagcccatatcatctaacagagctggatataagaagcattggaatattttctagatgaaatgtaacactacccctgctttccatatttgcatttattaagtatgtttggtccaaataattactatgtcactgttattttattattactgtgatctcctctttagttttattttcctcttaacatc

SEQ ID NO: 632906 - DNA, 550 bp, Homo sapiens
tgaaactcttaattcaagtttatatggacaacatattatatgacacatctcaccttgagatgagacaattgagcagcagacagcagaatcactaacaataatgacatcgagatcttggatcccttattgaatgggtgagtaactctgcacatctcaccacccctgaaggcattctcgtactatattgtccaggatagtgacagatttttataaagatgaccccaagacacgaaggagatattaaattatgctcagcctactggggaaatgtattgttcttttttaagagcccgccactgaaatattttttaaaggccttggtgttctaggaagaaagcttcattattgggtaattcacatgtgtgaagcccatatcatctaacagagctggatataagaagcaytggaatattttctagatgaaatgtaacactacccctgctttccatatttgcatttattaagtatgtttggtccaaataattactatgtcactgttattttattattactgtgatctcctctttagttttattttcctcttaacatc

SEQ ID NO: 632907 - DNA, 355 bp, Homo sapiens
ttgctcttatacacaaaagcaaggctgcatgtgaataccacccgcatcaaacttgactgacaggcaggcctttaagaaaaaaaaaaaaagaaaaaaaacccctctattcagagcatttaattttcaggtatttatgtgtttgatttgacaatcggtatgtgatttagatggaatactttcagatttttactttgcgaacctaaattttcatcaggaaacagtgtttctttagggacatttcagactttgggsaaagatatatgcttacctgaggacctgtttcaaattatcaagtaaatcacatttctgtagcgggcacttgaaaatcacaccctatattactaactcaataggg

SEQ ID NO: 632908 - DNA, 472 bp, Homo sapiens
aggggtttccccttataaaaccatcagatctcgtgagactttcattaccacgaggacagtatggaggaaacggcccccacaattcaattatctcccactgggtccctcccacaatatgtgggaattatgggagctacaattaaagatgagatttgggtggggacacagccaaaccatattacccctagtgttgaccaaatggcataaattaagggagtgtagtcctctgcagtaattctaggacataacccagcagaaktccacaagcaaactgcaacttctgtgttattaaacctgcattatccttttgtcagagattattattgttaactcctaggtcaagttagaatttcctggaaattttatggtcatttggagataagttcccccaagctccttagcagttagaaaatgggttgtattccttgagtcaattgaagatgaattaaaccaacgttgcccataagtcccc

SEQ ID NO: 632909 - DNA, 628 bp, Homo sapiens
caaatggagagtgtcttttgttgtcgttgcttgtttcagcatccctggaaggataatttactttccaaagcttcattagctaaatgaaactcaagtcttgcctctttagtttaagacaggttcttttaaaaaaaaaaaaatcttgatgtgtcttagatagatattctcttggattatcttcccttttacatgatacagggctttaaaatcaaccttgtgtttgacacgatcaatggatggagatccaggaagaggactggtgctttaggatttcacttcacrttgctgtcctctgcagagccttctcttccagttgacatgctgagggacttggaaagggctaacaatctgcttttaaactagcgatgtattctgatgcccagtgcttcaagctgtttccctttttaggcttaagtttgcctggagaggaaagtggagaccttgaatattaaactctttttgccttgtgtgatttgatggtggttttgtggagaattatttgtccttaggtggactctcagcccagtttggaatgaagtcatcatagccacttgtgccaggccccaaacaacccatatagctgatcttttccccggagtcagagacacaaatagaactgtttcagagc

SEQ ID NO: 632910 - DNA, 552 bp, Homo sapiens
ctaatgtgtgagctgtcttttccccaattctgtgctaaggaagtgaaattgccatcagttttagtttttataatttctgagcatccacatgaaatagcaagaaagaaaataccctaccctccacctcactggcaagggtgccagcagtgtcttttagattctgtaagggacacggtgaccagaaagtcaggacaaatggattctaccattagccaaccaacaaaatgaattttcagattgttctagacatgagaacaaaagatcagagaagccacaacaatgagatacctgttacacatgtattcttggatctccttcttccactctgtggatgctctgaaggaggctttatttacatgcactagycgagaaacagtttttgttgaaaacagataacagttacgagaatctggccaagcttagactcacagattctgcccagctaaatggtgggatgtctctttcttagtttttaattgtgggaaaatacacatgacataaaacttgccatcttaaccatttttaactgtagagtttagaatatggatctcc

SEQ ID NO: 632911 - DNA, 562 bp, Homo sapiens
ctccaatcacttttttttttcttttcaggccatgcactagagaaaatttaacagcaaaaaatcacttagtggatgtaatcagttcatagccattaacacgtacttattgtgaaagtcagatgaactataatagcctataaaccacatcacattgttgaacctgagtgaagttactgaggctttttcaaagtgctgcctctaaattctagtttgtttatttaattgatcatttgatgtgcccctggggtagcagactgaggacctaagtgtgaatttkgcttttattcctattaaatttaatcatgtttagctcattaatcgaacttactgagatactgaatcctgatactattacccatcatattaattctcagttccaatccatgccacctataatggcattctacctaaaatactaatgtaaaaattgaataagaaaacacaagagaacaccagtaagatggcaaaacacgtgcagaaaacacaagagaacaccggtaagatggtggaacagatgcacgtagctcccaacagtaacaataatttgagagccctctacagc

SEQ ID NO: 632912 - DNA, 507 bp, Homo sapiens
tcaaaataatcatattaatgaagytcaatgagatgcaaaacaatacaattagacaactaaatgagtttaggaagacaatgcatgaacaaaataagaaatgtaataaataaacagaaacataaaataaaaaagaaccaagcagatatcctggagctgaagaatacaacagacctgaaaaattcaagagtgcttcaacaacagactcaatcatgcagaagaaagaatgtgcaaactcaaatatagataggtcatctgaaattagccaattatagggaaaaaaggaaaaataatgaaaaagagcgaagaaaggataaggggcctatgggacaccaccaagcatacaaatatacaagttatgggaattccagaaggcaaacagagctagaagggaccagaaagctcacttaaagaaatcatctcaaaactccacaaatctcataagaggtacacacatctagattaatgaagctcaaaggatcccagtcaagatcaatccaaagaagaaca

SEQ ID NO: 632913 - DNA, 551 bp, Homo sapiens
atcatgcagaagaaagaatgtgcaaactcaaatatagataggtcatctgaaattagccaattatagggaaaaaaggaaaaataatgaaaaagagcgaagaaaggataaggggcctatgggacaccaccaagcatacaaatatacaagttatgggaattccagaaggcaaacagagctagaagggaccagaaagctcacttaaagaaatcatytcaaaactccacaaatctcataagaggtacacacatctagattaatgaagctcaaaggatcccagtcaagatcaatccaaagaagaacattccgaggcacattataatcaaattgtcaaaagtcagccaggtgtagtggttcatgtctgtaatcccaaaactttgggaagccaaggtgggcatatcacttgaggccaggaattcgagaccaccctggccaaacatgagaaaatcctgtctctactaaaaatataaaaattggccaggtgtggtggtgcacacctgtaatcccagctacgtgggtggctgagggatgagaatcacttgaacctaagagac

SEQ ID NO: 632914 - DNA, 551 bp, Homo sapiens
atcatgcagaagaaagaatgtgcaaactcaaatatagataggtcatctgaaattagccaattatagggaaaaaaggaaaaataatgaaaaagagcgaagaaaggataaggggcctatgggacaccaccaagcatacaaatatacaagttatgggaattccagaaggcaaacagagctagaagggaccagaaagctcacttaaagaaatcatctcaaaactccacaaatctcataagagrtacacacatctagattaatgaagctcaaaggatcccagtcaagatcaatccaaagaagaacattccgaggcacattataatcaaattgtcaaaagtcagccaggtgtagtggttcatgtctgtaatcccaaaactttgggaagccaaggtgggcatatcacttgaggccaggaattcgagaccaccctggccaaacatgagaaaatcctgtctctactaaaaatataaaaattggccaggtgtggtggtgcacacctgtaatcccagctacgtgggtggctgagggatgagaatcacttgaacctaagagac

SEQ ID NO: 632915 - DNA, 551 bp, Homo sapiens
atcatgcagaagaaagaatgtgcaaactcaaatatagataggtcatctgaaattagccaattatagggaaaaaaggaaaaataatgaaaaagagcgaagaaaggataaggggcctatgggacaccaccaagcatacaaatatacaagttatgggaattccagaaggcaaacagagctagaagggaccagaaagctcacttaaagaaatcatctcaaaactccacaaatctcataagaggtacacacatctagattaatgaagctcaaaggatcccagtcaagatcaatccaaagaagaacattccgaggcacattataatcaaattgtcaaaagtcagccaggtgtagtggttcatgtctgtaatcccaaaactttgggaagccaaggtgggcatatcacttgaggccaggaattcgagaccaccctggccaaacatgagaaaatcctgtctctactaaaaatataaaaattggccaggtgtggtggtgcacmcctgtaatcccagctacgtgggtggctgagggatgagaatcacttgaacctaagagac

SEQ ID NO: 632916 - DNA, 579 bp, Homo sapiens
cccagggcctgatggcttcaatggtgaattctaccaaacatttaaataagcattaataccaatycttctcaaactcttccaaaaagttaaagaggaaggaacacttccaaactcattttactaagtcagcattaccctgatatcaaagccagacaaggacactacatagaaaagaaaattacaggccaatatccctaagtaatatagatgcaaaaatcctcaaaaaaatactagcaaactaattcaacagcacattaaaaggataactcaccataatcaaggggatatattcctcgaaaacaagcatggttcaacagatgcaaatcaataaatgtgatatactatattaaaagaatgaaggacaaaaaccatatgatcatctcaataagtgcagaaaaagcatttgacaaaattcaacattcttttgtgattaaaaactctcaacaaattaggtatagaaggactgtatctcaacataataaaggtcatatatgttagcctacaactaacaccatacttaaccttaaaaagttgaaagatattcctctaagatcaggaacaagatatggatgcctattc

SEQ ID NO: 632917 - DNA, 579 bp, Homo sapiens
cccagggcctgatggcttcaatggtgaattctaccaaacatttaaataagcattaataccaattcttctcaaactcttccaaaaagttaaagaggaaggaacacttccaaactcattttactaagtcagcattaccctgatatcaaagccagacaaggacactacatagaaaagaaaattacaggccaatatccctaagtaatatagatgcaaaaatcctcaaaaaaatactagcaaactaattcaacagcacattaaaaggataactcaccataatcaaggggatatattcctcgaaaacaagcatggttcaacagatgcaaatcaataaatgtgayatactatattaaaagaatgaaggacaaaaaccatatgatcatctcaataagtgcagaaaaagcatttgacaaaattcaacattcttttgtgattaaaaactctcaacaaattaggtatagaaggactgtatctcaacataataaaggtcatatatgttagcctacaactaacaccatacttaaccttaaaaagttgaaagatattcctctaagatcaggaacaagatatggatgcctattc

SEQ ID NO: 632918 - DNA, 549 bp, Homo sapiens
aacaccatacttaaccttaaaaagttgaaagatattcctctaagatcaggaacaagatatggatgcctattcttaccacttctgtttaaaatagtactgaaagtcctagccagagcaattagacaagaaaaagtaaaataaaataaaagacatccaaatctgaaaggaagaagttaaactgttactatttgcaggtaacataatcttttatattaaaaaacactaaagattccaccaaaaggctgttagaataaacaaattcagtgaaactgcaggatacaaagtcaacatacaaaaatcagtaatatttctatacactaaaaacaaactacctgaaaaagaaatctaaaaacaatctcattaaaatagcatcaaaaattataaaatacttaggactaarcttaactaaagaggtaaaaatctgtatacagaaaactacacaacattgatgaaagaaattgaagaaggcacaaataaatggaaagatgtcccatgttcatggactgaaagaattaatactgttaaaatgtccatactaccaaaagggag

SEQ ID NO: 632919 - DNA, 450 bp, Homo sapiens
attaatactgttaaaatgtccatactaccaaaagggagctaccgattcaatgcagctacagattcaatgcaatcactatcaaaactacaatgacattttctacaaaaataagaaaaaaatcttaaaattcatctggaagacaaaagactctgaatagccaatgtaatcctaagcaataagaacaaagttgaaggcatcaccctatctgatttcaaaatctactacaaagtgataataatcaaaacagtatggtactggcaaaaaaaaaaaaagatacatagaccaatggawtaggacagagaatcagaaataaacccaaggatatgtggcattacatgcattatgtggcattatatgccctaattttcaacaagggcaccaagaaatcataatagggaaaagacagtctcttcaataaatatccacaggcaaaagaatgaaattggatac

SEQ ID NO: 632920 - DNA, 502 bp, Homo sapiens
gaattcagatatatctattccttttttagatcttacctctcagtcaaaggcataaatacatgtagaatgcaggaatgaataaaggctayctacaaggggctcagagtgaaactgagccaactctgacaacttgcacctatgtgcaagaccctttgctaggcactatagaggatatgaagatttgcattttggttaatccggacaaaaccaccacataaaacatcttatagggaagtgcatcccaattgccaaaggaagttacaaacttcttgcggaggaaaagtcacataatgggcttgatgccacctgtatcataaaataagctgtctgtctgaacaggcacatcaaaacttgattgtttacttgaataaatactgaactcattctaaaaaaaagagagccacctagtgaaagacaacaactaattttatttgaatgcaaaaaacctttgaactttaacctccatctctatgtctaagatgtcttatttttaaagacagat

SEQ ID NO: 632921 - DNA, 421 bp, Homo sapiens
tatatctattccttttttagatcttacctctcagtcaaaggcataaatacatgtagaatgcaggaatgaataaaggctatctacaaggggctcagagtgaaactgagccaactctgacaacttgcacctatgtgcaagaccctttgctaggcactatagaggatatgaagatttgcattttggttaatccggacaaaaccaccacataaaacatcttatagggaagtgcatcccaattgccaaaggaagttacaaacttcttgcggrggaaaagtcacataatgggcttgatgccacctgtatcataaaataagctgtctgtctgaacaggcacatcaaaacttgattgtttacttgaataaatactgaactcattctaaaaaaaagagagccacctagtgaaagacaacaactaatttta

SEQ ID NO: 632922 - DNA, 502 bp, Homo sapiens
gaattcagatatatctattccttttttagatcttacctctcagtcaaaggcataaatacatgtagaatgcaggaatgaataaaggctatctacaaggggctcagagtgaaactgagccaactctgacaacttgcacctatgtgcaagaccctttgctaggcactatagaggatatgaagatttgcattttggttaatccggacaaaaccaccacataaaacatcttatagggaagtgcatcccaattgccaaaggaagttacaaacttcttgcggaggaaaagtcacataatgggcttgatgccacctgtatcataaaataagctgtctgtctgaacaggcacatcaaaacttgattgtttacttgaataaatactgaactcattctaaaaaaaagagagccacctagtgaaagacaacaactmattttatttgaatgcaaaaaacctttgaactttaacctccatctctatgtctaagatgtcttatttttaaagacagat

SEQ ID NO: 632923 - DNA, 455 bp, Homo sapiens
aaaggcataaatacatgtagaatgcaggaatgaataaaggctatctacaaggggctcagagtgaaactgagccaactctgacaacttgcacctatgtgcaagaccctttgctaggcactatagaggatatgaagatttgcattttggttaatccggacaaaaccaccacataaaacatcttatagggaagtgcatcccaattgccaaaggaagttacaaacttcttgcggaggaaaagtcacataatgggcttgatgccacctgtatcataaaataagctgtctgtctgaacaggcacatcaaaacttgattgtttacttgaataaatactgaactcattctaaaaaaaagagagccacctagtgaaagacaacaactaattttatttgaatgcaaaaaacmtttgaactttaacctccatctctatgtctaagatgtcttatttttaaagacag

SEQ ID NO: 632924 - DNA, 557 bp, Homo sapiens
tacaccaaagcatcctagtggaaaatttgcaagtgatctacagcagttccagttagctcaagaccactagtaaagatttgtgcttttagtgaaagggcagtcccataagatattcagtattctatggggtatctatggtatcccatagataccagtattctagaaaagcaatgtggtgttagcccaacacaatamataccatctaagaattatgtaaccattttcatattaatcactgcagaattatctaattaatattttatttaagaccactgaggaggacgtttcacatgacaagaaatacatcttaaatccatcttagccttgctttaaaatgcaaccgtatctattgtgtaccgctttatgatgaatgggacaaaacccaaacacttttcttctgcaattcatgaaggaaagattacaaaatactggaaaacatcatttcggtttttttttctatgcacagagaatgaatgataagccttaagctatcaaaatggtggagatgaggagaagagattgacaatcaatgcatacaacataagatactactgtag

SEQ ID NO: 632925 - DNA, 557 bp, Homo sapiens
tacaccaaagcatcctagtggaaaatttgcaagtgatctacagcagttccagttagctcaagaccactagtaaagatttgtgcttttagtgaaagggcagtcccataagatattcagtattctatggggtatctatggtatcccatagataccagtattctagaaaagcaatgtggtgttagcccaacacaatacatrccatctaagaattatgtaaccattttcatattaatcactgcagaattatctaattaatattttatttaagaccactgaggaggacgtttcacatgacaagaaatacatcttaaatccatcttagccttgctttaaaatgcaaccgtatctattgtgtaccgctttatgatgaatgggacaaaacccaaacacttttcttctgcaattcatgaaggaaagattacaaaatactggaaaacatcatttcggtttttttttctatgcacagagaatgaatgataagccttaagctatcaaaatggtggagatgaggagaagagattgacaatcaatgcatacaacataagatactactgtag

SEQ ID NO: 632926 - DNA, 645 bp, Homo sapiens
ttttattgaactgtgtgacatgatgcagaaagaatgctgtagtgaaacacaaaactatatgttataaacgtcaacataagagaagtagtttggggtgcattttctgatgtctaccttactataagatgttttgacggataagttatagtagtaaaaggctgtctccatagtattggaaatacctgctggatttttctgaggtcgtcttggttgtaaggacagaaatacattcaggctagcacacagctgagacgttaagtgaaacataagctcacgcaaatctgagagtgggaaccaggggacagggcctagcagtgctgggagcttgaggctttattctggatccagagctgctatctggggcccagagcagcaggtgcttctggatcttgcactcaaaggctgtgagtggatgtggcccagccaccgtctgcttgggtgtgctgccgccagctggcttccagccttctgctctgtttcatcaccttgcagtctccaccccctcaccatttctagyttctcttaatgctctccatgcatctctggctcattgcagtccctctaaaccatttactccctcttatccttacagcttctcttcttgcacctcaccctctcattccctcagtattttctagttcagcc

SEQ ID NO: 632927 - DNA, 523 bp, Homo sapiens
ccaactgtagttggagtaagtttccactgggcgaggcatagaaatcgaaatacttctgaggtttagatcttacttctcttatgctgtcctgttggcctatgacttakccaggcttgtggaatgccatggcatattctctgtctttaattaaaagaagttttaattgtggtaaaaaaaaaacacacacattacacaaaatttaccatcttaatcattttcaagtatacagtcctgtactgttgggtatgttcactttattgtgtaacagccatgccatttctcttacttttacattttttaaaaccttttttttttggcctgaaagaagtggggaatgaaaagggatttttctaaaaggtgcctgcgtctccaagggaacttatttctcagcagtataacctgttgggccatgtagatgaatctgtttgggcaacccttcccttgagataatattgttcatgtgtgcgttccccatagagcaacatctattctgcttttgatgattcttaccttggggctgtgg

SEQ ID NO: 632928 - DNA, 523 bp, Homo sapiens
ccaactgtagttggagtaagtttccactgggcgaggcatagaaatcgaaatacttctgaggtttagatcttacttctcttatgctgtcctgttggcctatgacttagccaggcttgtggaatgccatggcatattctctgtctttaattaaaagaagttttaattgtggtaaaaaaaaaacacacacattacacaaaatttaccatcttaatcattttcaagtatacagtcctgtactgttgggtatgttcactttattgtgtaacagccatgccatttctcttacttttacattttttaaaaccttttttttttkgcctgaaagaagtggggaatgaaaagggatttttctaaaaggtgcctgcgtctccaagggaacttatttctcagcagtataacctgttgggccatgtagatgaatctgtttgggcaacccttcccttgagataatattgttcatgtgtgcgttccccatagagcaacatctattctgcttttgatgattcttaccttggggctgtgg

SEQ ID NO: 632929 - DNA, 590 bp, Homo sapiens
cactgcaaaggatcatgagttagcatgctatagcccattctctgtccatctaagttctcagaccacttttatggggcattcagtgaatggaatcagttgttaggactgcaggagtccaggaagttaacatgaatggagaagacattatataaatgtgtctagagacatgtttggaagaataaagctattatgacatcctttggctattcatttgggtttaagtcatatagtagttggtataggaaaatggtcttaagagacaaactggagtatgtttgttttcatccttcctaaatctcagagacaatcagctttgrtaattcctgtggattttttccatgcttaagaatgtgaggaaaatatttcctatttatacattatatcaattaaagccctcaaaatgtctctgttacacaaaatgcaactaataatgccacagcgattttcccattgtcatgtcactaaataagttggcttatgcaggcttacacaaattgtcattttgcatgattatagtattacaagaaatttttgtggctttaaaaacctgctgtagaccattttgctttgcttggctagcctttaggata

SEQ ID NO: 632930 - DNA, 497 bp, Homo sapiens
ccatagctctccagttgctttcagggatttaaaaagttgggtccggttttcttcatggcaggtaccttgatcactttggagggttcccttggggtaacacttactcagcttgaggtaggtgagtgggcaaggtcagagcactgcttatgcttgtgcattgcttgtgcctcagagaatctactagcaacaacctctagtctcttacagaagtgtggctgggccaaggagcagtttcagtatctcaggaaggtctgcggtgatgtgttcaaagttagggtaatttgtgatctactgccctcggttttgaactttagcgaaaatttggagscaacaggcaaacttccattccatatccagtcatacatgtagtaagttttatattttaggtattttttactctctcatttactattcacccatttttgtagtctcctctcaattcattgttcacttcattctgtgtttgttggagtagtttatttgcttatctctagtat

SEQ ID NO: 632931 - DNA, 611 bp, Homo sapiens
ctcccaaaatgtgggcccaagccctccacagcaccgtctctctgtcatgtcttcaactacccatcaccaaattggtaccagccccaagccaagcagatctactatgctggatgctaagggataccaatggtgaacaaatgaaattcttgcttgatctaaagatggttagaatcagtagggagataagacgagaataaaaataaatacaatgcaagtcagaccaagtcaagtccggactaaagaagcaaagtgctatggggctctcagagatgggagagtccctttcttttcaactacaaataatcaggaaattttccttggaaaggatggcatgagaggaagatgatgaagggattctgcacagagaggattatctacaaaaggcaaggaggccagagagcagtgggcttgctggagaacagtgagtggggcactttggctgggacatcgatttagggattagtgagcgataattcgaacaacatgttagaactgggtcatggagagggcctcaatgctggacaaagaaacctggacttcmtttttggctggggagaattggtgcagacttcagatggagggactgacaagatgcacaatgacacagaggc

SEQ ID NO: 632932 - DNA, 631 bp, Homo sapiens
gctaagatgaagaaacaactaaaaaagtctgttgagaaatgaataaagaaatacaataatttgtttttttcttcttcccactttcaacttgtgagaccccatcactgccttttggactcttgcttcttttctgattcatgttcctgttcaccatcacctgccccacagcaccctcacaggaaaagaaaaaaaaaagccaaaacaaaaccgatctcttkgttcactggatcaaaagtcttttattatagtgcattcagacattcagaatacatatatgaggcctgctattcctcacatgtttgaggggaagcaagtagtgttttttacttttattttcttttgcccttgttactaccaaaactacacacacacacacacacacacacacacacacacacacaccctgtgtgcatgaatctgcagaaactattttgtgagttccttttactattttactgagacatagcattagtctcacttgttggtggaaaatatttgtatttatcaaggaacctgacatcagaaaccagctggtcaatcttacttgctttctagttgagtcaactctatgttgttgaaaggtcataggatttggggaaaaaaaagacaaagatttaggccaaaaagacct

SEQ ID NO: 632933 - DNA, 539 bp, Homo sapiens
tcattaacaaaatactaacaaaccaaattcagaaacatatgaaaggaattatccaccatgaccaagtgggctttatcttagtgtaaggttagtttaacataataacaaatcaattaatgtaatataccaagttaataaaagaaagtacaataagcacatgatcatttcaaaaggagcagtaaattatttaacaaaatacaatctctttcctgatttggggaaaaaaaaaaaactctcaacaaactaggaataaaagagaatattctcaacccmatgacaggcattcataaaaaaaacaaaaaaaaacccaaaaaaacaaaaaatatgtttcttagggaaagattgaatgcttttcctctaagatcagaggaaggtaagaatatccactatagccactttttaaaacatattactggagattataaccagtaaaattagggggagggcagtgctctagagtggaaaaaataaaactgctctttttgcagatgacatgatcctatatatggaaaatcctaaaaaatccactaaaaagctat

SEQ ID NO: 632934 - DNA, 571 bp, Homo sapiens
atgtagattgtttagcatcgtcgttacttgcacctggtttgtaatcagacatcctgactcttccattttctcaccttgggatcttaggactgtgaaatcactccctatgtataccagtttcttcctccatataatgtgtgcaattattcctgcctcattgtgctcttgtgaggattagatgaaataatatatcttaagcrcttagaacagtgtttagcacatcctaggcacgcattgaactgaagcttttattattattcatattgtgttcacttatggagacatacaggagtcaatcaattcattttcattttccagcactaacatttcttctgcttttctggcaacactgccatcacagatgtgctccttatatactaaattgtgggggggtggcgggggcagattccatgtgatccaaattattttgtgccattaaagcacttatgctctaaatgatgggcaatcaaatctcatgcttcagagactaggttgatcattaaagagtctccattctttctaaatgtgggtgcttcacagcagatggtgctgtcagtgatatagtgtcctt

SEQ ID NO: 632935 - DNA, 590 bp, Homo sapiens
accatttgcattcccaccattaataaatgagagttcctgtttctctatattcttgccagtaattggtattatcaggctttttgccctgaattttagccattttaatarcatatgctggcatctcattgttttaatttgcaattccctaatggcaaataatgttgtgcttctttttatatgcatatttgtcacctgtatattttctttcggaagtgctagtgagacctttctggaatttttaattggtttactttttattgagttttaaagagagttattagtatattttgaatacaagtcttttatcaaatatgtgtttggttaatattgtcctccagtctatggttttcttttcatttttttagtagcatcttttctccagtagaagtttttaattttgataaaagccaactatcaattttattcttccatggattacggtcttggtgttatatctaaaaactcattgccaaaactaaggtcacttaaattttcttctgtttattttttttttctagaagttttataatttttatttcacctttaggtctgagatttattttgagttcattttttaacaaaaggggtaa

SEQ ID NO: 632936 - DNA, 498 bp, Homo sapiens
aatatgtgtttggttaatattgtcctccagtctatggttttcttttcatttttttagtagcatcttttctccagtagaagtttttaattttgataaaagccaactatcaattttattcttscatggattacggtcttggtgttatatctaaaaactcattgccaaaactaaggtcacttaaattttcttctgtttattttttttttctagaagttttataatttttatttcacctttaggtctgagatttattttgagttcattttttaacaaaaggggtaaagtctgtgcctaggtcaattttttttttaacatgtgaatgcctaattgtcccagaacagtttgatgaaagactatcctctctgcattgaattgcccttgtgcctttcttgaagatcagttgactgtatttatgtgagtctttttatgggctttctattctgtcccattaatctacatgtcgttgtttctctagtaaataccacgctgtcttgatta

SEQ ID NO: 632937 - DNA, 536 bp, Homo sapiens
gtccagtctactaatgagcccatcaaagacattgttctttatgttatagtgtgtctgacttttaacattaatttttaaattcttttttggcatattcatgtctctgcttacaaaacacatcttttcttgcatattgtctactttttccattatagctcttaatatattaattatagttatcttaaatatccaatgtgataattctgactctttgttgtatctgagtctggttctgatgcttgctttatctctcagactttgtttcttcttgccttcagacatgctttgtatttgtttttcttttttgttgttaaaaactaggcatgtctgagatactgagaattactgagaattgagataactggcccctgagtgatgatttatggtaatagggctaaacgtaaggctgtgcttaatatttgctgtagttatatgtaccacaggcttcaaattcttctaatgctctggtttttggtttccccatgaactcctgctgagagagagcctgtatawggcattcactgcaggattcagct

SEQ ID NO: 632938 - DNA, 541 bp, Homo sapiens
taggcaaacaaattgacccacagagaacaaagaaaggcagggagtgggggtggggcaacagcccatccagaagcaatacggagccaaaggaaccttccccccacagccaagggaagcggtgagtgattgtgcgatctcayctggggaaccatgcttctctcatggatctttgcaacctgcaaatcaggagatctccttccgagcccatgccaccagggctttgggtccaatacacaaagctatatggagtttcagcagagcagctgctcactaactccagtcccaggatctggcaaagtggaaaattcatctgtacatattcctaggaagagggctgaatccagggagccgaacagcacccctctgcaggccccacttccatggcacctcacaacttaatacccactgacttggaaccccagccagccaatggcagcaggctggagtccacctgagatgggagtgagttccttgggggaggagtggaccccatctctatggttcaatagaagcagccattccagcttgccagctgtggaga

SEQ ID NO: 632939 - DNA, 594 bp, Homo sapiens
ccaataataataataataaaagcaataaatattgcaagtattaatacaacagatggatacctcagtgtgacagtttcaggagtgaagggcgtttccccatagctgctagcagctgactgcctcagctttcagacctctttgacgactgccttggctgaagaaaattgtttcacccaaagtcacacatctccttctcagggcaggcttcatctaaagcttgatcaatgcagggttataaagatgtggctcccttgttccaattcatgacaactccartgaaccagcctagctctcaagcttcctatggcattggctgtgaggcttccttgcaaatcaactcaactttctgtccaatcttgcttcctctccctctttcccccatgtgttgatccaacaatactctctgatacacattctgctctcttatctctgcctcagggtctgcttcctgggaacctacttgtgattttaactaacattcattgcaacctattgcttcaggatctgtgataggctttccgcatgcatcatctcatttaacccctttaacagtcttgcacaggaaggtaaaatggggtacaggataatattgta

SEQ ID NO: 632940 - DNA, 559 bp, Homo sapiens
tttgagtctgagcgccagagggtaggtgtaactgaaggaatggggcatggagaagatagactggaatcttatctccccatcctgttccccaccatgaaaacaaatgcctgagctctcttgggaagagttactacatgcttgctgagagggctcttttcttcgaaaactctgtgagacacaggacacaggcatcatgatgtccaggtgaaaaagtatgacagagtgggacagatgatccatgtccttattttttcagagaaaacagcctggctgtagagaagggaggctaaaagaatgaaaagggattctgaagcactaccctggtttctttgagaagaactgtcaggacgtggtgtccatagaacctacatctcaggaagcactagagccacggtagctggaagcgcaratcactgctctcccctgccttcatggacactgaacaccaggaaaaataaggggatcctgtaaccccaggttttggcaccattgcaaacaagacacctctgggtatttccagaaatgattggtatagagaaagaagaggaatcttgatgta

SEQ ID NO: 632941 - DNA, 542 bp, Homo sapiens
ctggggaagagaaccaacaagggagagcaaaaaaagagtaaaaattggaaacattggcctggccagccagctaattttcccctgcgtggaaataatacccacaggtcctgtctcccactgcttttcacgttctgctttcaatcatttaggattcctattgaagacccttcactgaattcacgctcatatattytctagttctctctgtatttagaacacagaaagacaaaaataaatgtggctttatgacacttttcatttttctgttagattcttttttaaaaaagatgtgcaaacactcaataattgttttatgatctactagttgagtatgaaatatatctgtcaacaaaatatcaagtgcattttatgaactttcccaagtcaatttggttatgtgcaactcttgattcttgtagggaacgctaagagtttgaaataggtgatggttagctacttatctactatacagtcttactaccaatttgcaataaattaaaacttcagaccaaattctctccaacacacaaacatgtataaag

SEQ ID NO: 632942 - DNA, 492 bp, Homo sapiens
accagatggatattttagactttataaatacaattattgragaaaaagttcaataaatgggcattcatgaaaaaaatagaagaactggaagatagaaaaatagaaaataatcaatgaggaacatagacaacaaaacaaaacaaacaagtgaaaaccagagtcttagagacttgtggaactataatgaaagacttaacatttgtgtcatcaagtccaggaaagagaggataaagaaagcagagctgaaatagtacatgaggaaataatggctgaaaacttcccaaatttggcaagaaacataaacctagagatttagaaagctgagcaattcccaagcatgataaaaccaaagaaatgcaggcacatcataattatgcaattaagatgaatcataaattatacttctgataattaagactaagaaaaattttgaaaacagagaaaaatgatactttatctgtagggaggaaatgatacaaaggaatgtgaatt

SEQ ID NO: 632943 - DNA, 563 bp, Homo sapiens
tttaacatatgtccttttttctattgtgatatttaaattgtgagttatgtagcagtatattaatttttaaatatttgaacattttctagttagcttttaaaaaattgtgttgctaaattctgctcacattttaagctgtgttattagatgtgtacatatatagaattgttatatctttctcttaaatttttatttaattatgtagtgaccctctaaactctatgcattccacaataaagtatattttatcttactaatatagctataccaaattcattttgttcaatatttgcttggtatatatttttctactatggacatagtagatatactatggacaagtagtagatataccataatttccagcatrtctataaaaagaagttgcatctcttgaaagcagcatgtagtcatagtaattgctgttctttaagtcagaccattttacattttaattatgaccttcagttggatttatacctaccatttatcatttgttatttgacccacatattttatatttcctttttctcttctttgatgctttcttttgggttaaaaac

SEQ ID NO: 632944 - DNA, 642 bp, Homo sapiens
cttctctgcctccagaactttgagaaatactttatttgttgattataaataaccyagtctaagatattttcttataagagccttaactaatggaacagtcataaaacttaatcctatggcttgattcccttcgccagctttttaaaatttttaatcattgtctcttcaaataatgctatcctctttagcatttagcaggggaaaacctgcacatagtcctaggatcacttctttgcatatatcctctccctgggagtctgtgctctcatatcccagatgttcttgccctaatcctgaatacctgtaagtaaatcacattacatggcaaaaatgtatatgttgcattttagtgccctgtaggaacattatactaccttatattctggagctgtaattgtatacattagaaaattacactatatcatacattttttatttctttttctcttatttttataattttctcttttctccattattcgtcatttttgtattcatgctttagtctgaatattttctatggcttctggttcactaattttctcttcagctagttccaatttgtaattaaatgtatttatgagttcttaatctaatcagttatattttcagatatagactgtccatttaatctgttttaat

SEQ ID NO: 632945 - DNA, 500 bp, Homo sapiens
ccaccatttctttctgaggaacaaaaatcttccctaaactgtagtagactttcccagaggtcccattggccagagttggatgacatttttgctaaaatggaggctaagaaatcagatatctggcattgttggcctccgttatgggagaccactttgtaataaggaagagggatcaggaaaagatggctatgaaggcagcctggagatcttatgccccatactcaatacacatctcctggaagttaacaccctcagcaacctcagaatcatggatagcagtttggtcctgccttctaccatatgaggccaatgttccctccttctcagccttccttttggtctctggctaccccacagcttttattgggatacccaaaaccgtgaagtaacccaagttctaagattacacctcactctaccagagtcttctcaaacmaaatttgcattccaggaggtgtttagccaactgagataactaacccatgcttaaaaatgcaaga

SEQ ID NO: 632946 - DNA, 592 bp, Homo sapiens
aaatatggtttctaatgaatgtgtattgctttcacacaattgtatagtcaaaaaatcgtaagttgaaccaatgttagttaaatcagggaccttttttttgtactgtcatcttgcacgtatactcttgataggaaaacaaataaaccatttttctttgtgcatcatcaaaatttccttattttgtttctttctaaacactatcttttctgcagtagcttcatgaacttcaagtttaaaaacaatatgtaatagagctgaaatcttataattccttccctagtcacacctgctctgtgttgttttgtcaagcccaccaatgaattatcttgattggactgaaacaatattttacgtagcgcaggtcctaaacacccacactcagcaaagtaccctgagcagagtrggagcttactcagacaattatctgaagtggaagagggtgatgacagtgacactacattaacctgactggagatattggataaaacacatatgcatagctccccagttctggctgaatatctttctaaccaccagccactatgccttcaggtgactacccagccaatctgagaaacagtacttagagcta

SEQ ID NO: 632947 - DNA, 563 bp, Homo sapiens
aaatttttttttctaagttaatatatttgttatataaacataataaatataaattaatacaggtgtaattttaatgtaaacctaataattctattggttgtttttgttttcaaatctgatttttaaaatttgattatcattttattttrtattgaatttatttagacattttatacattttatattctatatctgataattgaaaatcttaagttcttgagagtctaacttgactattttatttgaattggctattttttttagccaaccattcatgttgttttgtgtccttgcatacataacaattgatgagtagtagctcaaaatttggcatcctaagagctcaaattttgaacagtttactctagagacagttatttgcatcaaacaagagctgcggaatgctatttggacttactttggtttatatattattgtatgcagaactaatacaaaagtattatgaccccattcccctctcttagagagacaaaaagaactacttttttcctttggtgtgaatattgacgtttactcataagtcaatttttgactttgcattt

SEQ ID NO: 632948 - DNA, 563 bp, Homo sapiens
aaatttttttttctaagttaatatatttgttatataaacataataaatataaattaatacaggtgtaattttaatgtaaacctaataattctattggttgtttttgttttcaaatctgatttttaaaatttgattatcattttattttgtattgaatttatttagacattttatacattttatattctatatctgataattgaaaatcttaagttcttgagagtctaacttgactattttatttgaattggctattttttttagccaaccattcatgttgttttgtgtccttgyatacataacaattgatgagtagtagctcaaaatttggcatcctaagagctcaaattttgaacagtttactctagagacagttatttgcatcaaacaagagctgcggaatgctatttggacttactttggtttatatattattgtatgcagaactaatacaaaagtattatgaccccattcccctctcttagagagacaaaaagaactacttttttcctttggtgtgaatattgacgtttactcataagtcaatttttgactttgcattt

SEQ ID NO: 632949 - DNA, 604 bp, Homo sapiens
ataaaatgttacagtttaaaaatatgtaacagctgcgtttattttgtaaaactatgttacatagctagcagttcttagctgttctcattgtgatgatactccttaggatgatctgtgaggtttctgatcccctgtgggtttatcctcgttaacttttatactttgaggttggttcctcctgctttcagatgctggcagcaatgcctgactttaacccatcagattattaagaggatgatattcacaatctttcttatacccatcaacaaaccaatcaatrcaagctaattattcattagtgtaaatacaaacactatgtattgataatcaattctgttggtactgcctctgtcagcttgcgccaaagtactgcagtgggaaagctcagttgtgttaagtctgcttcaaagggagcttgacctcaccagtgaatctagaaatgatctatcgttagaaatagggagtcgctacattcactaagtacaatttgcctatccctcacacacatgaagactgtcctctctattcccattttgctctagtttctatctttgctgtttacttcaaggatcaaagcctacggctgggattttgacaaagtgcc

SEQ ID NO: 632950 - DNA, 552 bp, Homo sapiens
tgcttgggttccaaatcctgactcggaggcactgagaggttaactagcacaactggcaagtacattttcctctgtgtgaaatgtgagaatttagtttgtaaatataagtgcttagaacaattactggcacattataaaatgtttgctataatgatcacatctccactaaatcaagtaaaatctacttccaagttctcattcaccaaagttcttaagatgtgcaatacaaatgttttggtagctccttcttcctcccacattagaacaaagactctgagattatgcagtccaggtgagaatgagcaaggaggcccatgattgtaattattaagcacacagaggtgctggctctaatacraatttactacgtggatccttcctacagctctcaagaatgtgatacctagtgcccatcctccacaagctccagagaaccatagacaatctgaggtccaggtactgcctggcacagtgtgcaaaggaagtacatgtcttttccacattacattccaaagactgtccctttctaatgagaaagatatcacctttgac

SEQ ID NO: 632951 - DNA, 552 bp, Homo sapiens
tgcttgggttccaaatcctgactcggaggcactgagaggttaactagcacaactggcaagtacattttcctctgtgtgaaatgtgagaatttagtttgtaaatataagtgcttagaacaattactggcacattataaaatgtttgctataatgatcacatctccactaaatcaagtaaaatctacttccaagttctcattcaccaaagttcttaagatgtgcaatacaaatgttttggtagctccttcttcctcccacattagaacaaagactctgagattatgcagtccaggtgagaatgagcaaggaggcccatgattgtaattattaagcacacagaggtgctggctctaatacgaatttactacgtggatccttcctacagctytcaagaatgtgatacctagtgcccatcctccacaagctccagagaaccatagacaatctgaggtccaggtactgcctggcacagtgtgcaaaggaagtacatgtcttttccacattacattccaaagactgtccctttctaatgagaaagatatcacctttgac

SEQ ID NO: 632952 - DNA, 588 bp, Homo sapiens
cagtcttttttaaaaccttttattttaagtttaagggtacatatgcaggtttgttgtataggtaaacccatatcayggaggtttaatgtatatattttttcatcacccgggtattaagactagtaccaattagttatttttcttgatcttccccctcctcccaccctccactctcaggtaggttccggtgtctgtttttcccctgtatgtgtccatgagttcttatcatttagttctcacttacaagggagtacatatggtatttggttttctgttcctgcattagtttgctaagggtaatggcctctagctccatccatgttcctgcagagggcacaattttgttattttttatgactgcatagtgttccatggtgtatatatggcacattttctttatccaatctaccattgataggcatttaggttaattccatgtctttgctattgtgaacagtgttgcaatgaacatatgcatgcatgtgtctttatggtagaataatttatattcctttgggcatatacccagttatgtgattgctgggttgaatggtagatctgctttttagctctttgaggaatcaccac

SEQ ID NO: 632953 - DNA, 440 bp, Homo sapiens
gtatattgtagaggatttttgcatcgatgttcatcaaggatattggcttgacattttcttttttatgttgtgtctctgccagattttggtatctggccttatagaataagttagggagagtccctccttctcaattttttgaaatagtttcattaggaaactaccagatcatctttgtacctctgatagaatttggctgtgaatttatctggtcctgggctttttttggttggtagaatgtttattactgataaacattactatctgttcagagctcattatttgtctattcagggattcaatttcttcctgcttcattttggggagggtgtataagttcaggaatatatctktttcttctaaattttctagtttgtgtgcatataggtattcataatattctctgatagttatttgtatttctgtgggcttagtggtaa

SEQ ID NO: 632954 - DNA, 440 bp, Homo sapiens
gtatattgtagaggatttttgcatcgatgttcatcaaggatattggcttgacattttcttttttatgttgtgtctctgccagattttggtatctggccttatagaataagttagggagagtccctccttctcaattttttgaaatagtttcattaggaaactaccagatcatctttgtacctctgatagaatttggctgtgaatttatctggtcctgggctttttttggttggtagaatgtttattactgataaacattactatctgttcagagctcattatttgtctattcagggattcaatttcttcctgcttcattttggggagggtgtataagttcaggaatatatctttttcttctaaattttctagtttgtgtgcatataggtattcataatattctctgatagytatttgtatttctgtgggcttagtggtaa

SEQ ID NO: 632955 - DNA, 706 bp, Homo sapiens
catctgccgttcccatgacacctgaagatccttcattttgggactgtttttgcttcacagaagaaattccaatacgaaatggtacaaagtcatgatgattccctgagtaacaaagggaaatgaaaactgtttgtgatcttccgtattcactgaaaaataaatgcttgtttagtatcaaattttatttcacgaaagtttttttaaagaacagaaacttttccmattaaaaaaaaaaagcagacttctggttcaagatagctcactggaatacatgtttacctctttctttcctaaattgcattgaattgataggaaggatggcggaatcttaaagtgatacatgctaactgtagaaaaaaatagaaaatgcacataagcaaaaggaaacatttaaatgctatctttcaaagataactactcttaaaaccttgagtatcttttcagacctttttcttggcaaatgaatccatattgacatatttgatttttttaaaaacatggaaacgtactgttttgtaaattctttttaactgcacatctactgttcataaatatacctctgtaacataactttttgtggttctaatgtactctgttgtatagctaatacaagttaggatgcttttggccagaggtaacagtgtccaaatataattggcctaagtaacctaggaaattgtttgacataacacagggttcaggggtg

SEQ ID NO: 632956 - DNA, 560 bp, Homo sapiens
taaatttgtgtgccacttctcctattaacctgtcttttatcagttgatttttcagcaatccttcagagggtgaagggtaagttttcccttggtccctaaactatgaagcacacaaactgccaagaccctttctatctaccctttgtgataggtcaaatatacttctttattaattcccaataatttaataagttaattctcattagtaaagtaaaatagcatagaggtaaaaatttagatttcagggttttttaaatatatgtttgtttttccccttgcaagtggatgtcatttwatgaatagtgttatggcccagagggttcttcctgcctactgcacagaaaagccaatacactgagacaatggtgttgcaatggagaaagcatttgattatcacaagggagctgagcagcaggacaaaagatatttctcaaatctgcctctctaaggacttggaggctaggatttttaaggataatttgccaggcaagggactagagaattggtgctgccaattggttggggatgaaattataggactgttgaaactgtcttcatga

SEQ ID NO: 632957 - DNA, 579 bp, Homo sapiens
ggatgaaattataggactgttgaaactgtcttcatgagctaagtcagctmtttgaaagtagggagtcacaagaatcagagtggctgcctataaaccctgaagccacattgctaccaggctgcttgcagccaaggctgagtctaagagggtaaatagtctgtcctgtttatgcccaatgtaggactcttttcattagcaactttgactcaggatctctttatcaacatggccaaaactttctcagaaaggtgtcacaaactgagacctttcctacccaatttttttttctctctctcttttcatagatttcagacctggatcatggcctgaaggctctctctgcctacttttcctccttcccactttatctttcaaaggagtttccacaataaatcccctgcatatctaatcccacataagtatctgtttatctgaaggatgtgaataagaattgattttgttagcataataaaccaccaatattataccctgattagggcaaggaggagaaagacttgtttgccttctagatattttattttgaaaagtatagagggcatagcttcacacagtgcttac

SEQ ID NO: 632958 - DNA, 579 bp, Homo sapiens
ggatgaaattataggactgttgaaactgtcttcatgagctaagtcagctatttgaaagtagggagtcacaagaatcagagtggctgcctataaaccctgaagccacattgctaccaggctgcttgcagccaaggctgagtctaagagggtaaatagtctgtcctgtttatgcccaatgtaggactcttttcattagcaactttgactcaggatctctttatcaacatggccaaaactttctcagaaaggtgtcacaaactgagacctttcctacccaatttttttytctctctctcttttcatagatttcagacctggatcatggcctgaaggctctctctgcctacttttcctccttcccactttatctttcaaaggagtttccacaataaatcccctgcatatctaatcccacataagtatctgtttatctgaaggatgtgaataagaattgattttgttagcataataaaccaccaatattataccctgattagggcaaggaggagaaagacttgtttgccttctagatattttattttgaaaagtatagagggcatagcttcacacagtgcttac

SEQ ID NO: 632959 - DNA, 579 bp, Homo sapiens
ggatgaaattataggactgttgaaactgtcttcatgagctaagtcagctatttgaaagtagggagtcacaagaatcagagtggctgcctataaaccctgaagccacattgctaccaggctgcttgcagccaaggctgagtctaagagggtaaatagtctgtcctgtttatgcccaatgtaggactcttttcattagcaactttgactcaggatctctttatcaacatggccaaaactttctcagaaaggtgtcacaaactgagacctttcctacccaatttttttttctctctctcttttcatagatttcagacctggatcatggcctgaaggctctctctgcctacttttcctccttcccactttatctttcaaaggagtttccacaataaatcccctgcatatctaatcccacataagtatctgtttatctgaaggatgtgaataagaattgattttgttagcataataaaccaccaatattataccctgattagggcaakgaggagaaagacttgtttgccttctagatattttattttgaaaagtatagagggcatagcttcacacagtgcttac

SEQ ID NO: 632960 - DNA, 579 bp, Homo sapiens
ggatgaaattataggactgttgaaactgtcttcatgagctaagtcagctatttgaaagtagggagtcacaagaatcagagtggctgcctataaaccctgaagccacattgctaccaggctgcttgcagccaaggctgagtctaagagggtaaatagtctgtcctgtttatgcccaatgtaggactcttttcattagcaactttgactcaggatctctttatcaacatggccaaaactttctcagaaaggtgtcacaaactgagacctttcctacccaatttttttttctctctctcttttcatagatttcagacctggatcatggcctgaaggctctctctgcctacttttcctccttcccactttatctttcaaaggagtttccacaataaatcccctgcatatctaatcccacataagtatctgtttatctgaaggatgtgaataagaattgattttgttagcataataaaccaccaatattataccctgattagggcaaggaggagaaagacttgtttgccttctagatattttattttgaaaagtatakagggcatagcttcacacagtgcttac

SEQ ID NO: 632961 - DNA, 569 bp, Homo sapiens
tttaggaggcaataaatggattagcagaccaggttcaaggccatcctgctgtgtgcagcttcaggatttggtgccctgtcccagccactccatccatggctaaaaggggccaatgtacagctcagaccattgcttcagagggtgctagccctaagccttggcagcttccatgtggtgttagtccagcaggtgcacagaagacaaaaattgagatttgggacccttgacctagatttcagagtatgcatgaaaacacctgaatgtccaggcagaggtgtgctgcaggggtggggccctaatgaagaacctctgctatagcagtgcagaagggaaatgggaggttggagcccccacagagtccccactggggcactgcctagtggagctgtgagaagaggatcactgtcctccatactccagaatggtagatccactgacagtttgcaccatgcgcctgaaaaatatgcccaccagctgtgaaagccaacttgaaagaacatgaaacatagaagayattcaataaataatgaaatcacaattttgaagattgtatcttacaatccatattt

SEQ ID NO: 632962 - DNA, 567 bp, Homo sapiens
ttaatttcagttgcaaggtggtagtggcagcagtagtagcattgtttaacattaattgggcatttaatgtatgtacagggttaccaggttaaaaagctgagtcctcatgtaaatttaaattttagacaaataatgaataattgttaggatacattccatctcagataaataatgactaattattagtataactatgtccaattttagataacctgaaatttaaatttaactgggcatcctgtatttttatttgttaaatctggcaaccctacatacaccaagcactatgctgaacattttgcatacctaactcatttaatccttttaacagttttgtctgttctttgcattactataaaggaatacctgatttccattcttgaatcagttttaggtaacatttagctcacaatttcctagtcggtttattttccaatttcatggaattttatcctatgtatgygtatttagcaaagactcataaaaacccctttgcagatttatggagctcttttctggtataattttctccttgtcagagctctcctctgaaacttccagctactt

SEQ ID NO: 632963 - DNA, 529 bp, Homo sapiens
tgaatttcttaccagtgtctggcctctttgtgtaaactggttaatcaaacattttgtcagaaaagtagaatgtgtaatatgttttagttcacgtgactttagcagtctttgggaaatagacacagttttaaagattattggtaaaatacaattgtcttcaaaatgtaaatatgtgttctaaattatgttcaaatattaggtttgctwaataccttaaggtcataaactgcttcttttgcttttgaaaattgtttaacttgcctgcctttcagctaggtaagggctggggccatgtggagttggccaggccctagctatgctggaaacagtcaaaccttatggaaacataacttaccaggttttatgttaaagttaaaattgctaagattgtaattgtaacatgcaattaagactattagaaacagttttacattcaaggtgtgtaaaaacggtagaatgcattttttaattttttttaaagattataaaaggtttttgctttaacatttctgagtcattttggcaaaat

SEQ ID NO: 632964 - DNA, 379 bp, Homo sapiens
atgaagccaatattttaggtaaaaataggattcttaatttctggaaaactgagttccttctggcttataytttaggcctgggaggcagcaacgtcttgagagaaatggcaaaatcttactaaagataataggagctgaaagaaatgtgtaaccgtgagggcaccataacctataaatgatgtgctgaaacccaaaatgatggtaactgagagtggcactaaggccctaaatcttggttacactctcacctaagtgagagcctgaacaaaaaggaaaatttttttaaaacaaaattatgagaggacattgttttagactaggctcatgcactagtgcccaacaaagcaaaccaaaccaaaatggagttgctcatgctaag

SEQ ID NO: 632965 - DNA, 629 bp, Homo sapiens
ggtacctcatacatgtccccatagatttcaaatagtccttgtgcagagacttaataaaatggagatggcagctctgctctttctgagcttccttccttccaacacataaacacaacacaacaaatgaatattaaaatgggaatataaataacatgatacaatgtgaaacttaggggtgaggtaatgtaaagcaatgaatgaatcagaaacaaagctatattcaaagatcattgtctttttaagatgcacagatttgtacagaggtattaagactttctggtcatctaaaatgcataagcattctagttctaagccaatcaacatgtgactagtaatgctttaacaaaaatcagcgtgccaaccatttactcacagagcaaaactatattattacccaggagattcctatagaaacaaagccattttaactaaattttttcctacagtttctgtttccaaaaatatctcaccrtggaatacaattatcctcagaactattcttcccaagtgatgtcactgtataatcatagggcacagccttgccagctgaggtgctcaaaaagcttttggctgatggtaaggttttaccctatattaattttctgtcactacattcaaatgcaaatgtt

SEQ ID NO: 632966 - DNA, 540 bp, Homo sapiens
atctatacgtcttcttgaagcctaagtttgattatgttacatttagcacaaatgactccattttagtttggtatggtttgttatggcctactgcacgaactcagtccaatataatggcctcctataattttgtttaaaaaaatttcccttttggccaggttttcacttaggtgaagtgtgaccaaaacttcgggcctcactctcagttaccatcatttgggtttctgatctcagcatgtcattcataggttattttgtcctcatggtcacacatttctttcagcttttgtcattccagttgaagagaggccatttgacttctagacatggctgcttgcaaacatttaaaacctttgagagaatacagtgcaccaggaagactattatgactaccgggaggttaacaccaagagtttggaatatgctccttacccagggtccccataaaccaaaccacctaacaytaaatagattaaagaatgagctaaatgaagagtttactcacttgactaagtgggtcttttcattaatcccctacaa

SEQ ID NO: 632967 - DNA, 520 bp, Homo sapiens
atatcttacaaaaatacattttattctccttaacacaccttgcatgaaaactttttcagtagtcttaattacatattacaatgttactcttagagacttacttttggtgaaaaccttggtaagtaaggaattttaattatgtactaggtttggagcctaggacccagacagaaatgcagataaggtctgagtctttccagygtctaactccctgtgtcccaggccttatctagctataaatcaggcaagctctacaattaagagtcatatggcattttatgatgcatttaggaggcccaatcacgtttaaattgtacaaaatttctggcataaatttcttttcataaattctttcacaacttacacagaccatgtatgacatgtttagactttctgacttgccctaaacatcactctttttaaacaagccactttacttcaagacaaaaattttccatacaatgttcttatataaaatcttttttatttttatttttatttttttgagatggagtctcac

SEQ ID NO: 632968 - DNA, 608 bp, Homo sapiens
tgtgtttcttttacgaacaatattcaccttttgaattcagtattcctgaaggagtaaaatattatcacagtattcttccattcaatttcttttacaagaacaaattaatatgcacccttgtttctaagaatttttacaaagaaaactattcaatagtttaaagcatctacatttctttcattgataaatgaaatattgaagctccaaccaatacttttgtaaatgtctaccatgcatgcagtgttaggcaatgctcctcagacttgcttcaaaaataaatcatctaggacaggcatggtggstcacgcctgtaatctcaatcctttgggaggccaacgtgggatgattgcttgaggccaggcattcgagactagcctgggcaacatagcaagaccccatttctacagaaacaaaatgtttaaaaacaattagctgggcatcgtggttcacacttgtagtactagctactcaggaggctgaggcaggaggatcacttgatcccaggagttcaagttacagagagctatgattgtgccactgtactccagcctgggtgacacagtgaggccaggtctcaaaattcaaataaaaataatggcccggtgcag

SEQ ID NO: 632969 - DNA, 585 bp, Homo sapiens
caaaatgccagtgtagtcatcaggctaacctcatttgtttcttttctctcagggatcatggtcttatgcttccagttgtttaatgtctgaaaacagttgttttatatgctttttcaagttttctagtagtttaagacagaaagttaaatccagtccctttacttcatcatggacagaaacagaatttgtcatatcatggtttaatctggaataattaattcttcagtcttattgtttttcttaacactcatgtttgaagagtacagaccagttatttttaaactattggtcaatttggtttgtctaatccatytccctgtaactagattcaccaactctcagtacaaatatcagaagcatatgatgaattgatcatttttgcaatatatatttgggttctcttcacacctttgatgcaggattttttgctccttggttcagcttaatctgggttcttgtctcacgaccaggaaaaaataggcacacagacacattgaaaggtgaggagggcagaattcatttagcaaaaggaaagctctcaacacaaacaggggtcctgcatgcaggtttccacctcacaaatga

SEQ ID NO: 632970 - DNA, 536 bp, Homo sapiens
gaattcagttgcaattgaggattcagtaaatctcatggggaacttcaaagctggaagactctttagagatgtctcaaatgtagggaggagagcaggtcatttgagccccaccttaaccagtcattgaatgccagctgtcctcagtgaagggtcatagccttgggtgaggtggctcctgggaaggggctctgctatgagccagcactagagctaacactccaaactagagaaacgagtgcctttgttctgcagttgtccctaggtgacaccagagcctccactgtaatgtgttcacaattaatgagataatcaaaaggacttaaatctgtttcaaatatgatcttagaacatatgttcacagtcactcactcacttcagtgtgacacatacttgaatatccaatgtacgcaaggtgttatgcaaactacgatgacaaatataaggatgatttggatatatgttcagttctcaagagaacaaaatgtagatgayaatgatgtatcatgcaaggctgaaaatgacatttgtaataaaag

SEQ ID NO: 632971 - DNA, 485 bp, Homo sapiens
cacttcccatctgtgcacctctacctcgtgcttccyggctctctgtggtggtccctgggcactcctgcttgtctccaggttatgtctggctccctccaccctctccaactgctcatgtgcagcctgcacctcaagctcttcttcctcctcctccttcttgcccttatctctcttctggatttttttctccaccagaaatcttaattcatcatatggcttcaaaatccacatccaccaagctaactcctacatctctatctctagctccaaaatctcacctaagctccagcttcatattttcgaatgtctgccaggaaccttctgatatttttcagacttctccaaatgaatgcatccaaaatgaagcttaccagcctactttccaaacctgctttctcttctaaagttccctataacacaatgctccccgacatttgtactcaaagtctaattgttattcattcattcactgaaagaaagcccta

SEQ ID NO: 632972 - DNA, 546 bp, Homo sapiens
aagtctaattgttattcattcattcactgaaagaaagccctaactgaatatcttaatgtcattacattaccttaatgtcatgctccacacacagttagcctctggttacacattcctgcctcagcacctttaactcattttttcgttattagtccatctattgctaaattctaacaactctatcttggtaatatctttcaaattcattctgtcttatggagtcckgcttttactattcaaatccagacctttgtgagtttttaggtggatcattgctatggcctcccacagtatattcctcctttctaattcatttgacagttcatccccaaattaatctttccaagacacaattttcatggatcagaagccaacatagagagtggaaagacagctgcatcccaacaagctatgtgaccctttgcaaatcacttactaccttttcttagcttgtttcttcttttgtaaaatgagactaatgattctttcctcatcagggatgttgccaagattaatgaaatgataataccattattctaagtactt

SEQ ID NO: 632973 - DNA, 630 bp, Homo sapiens
ctagctttattaaccatccgagtaatccattactttaaatcttcccaatggcttcccatcatgtatagaataaaattcaaatcccttagcctaataaattgttgatgaccaccaccctacctaccattcacatctcactgtagccctccttgcagataactcacgaaccttagaagctaagtcttccgcctaacccacccacatccaacacagagagccaatgttctttttcctacctccgagcctttgctgctgcttccctttgcctagaatcacttctcyctcctattagcccatcaaataacactttcaagatcaggttaaatataaactccttcatgtagctccctcaggactctattcccacccagcgagagttgacctgcttctttgttttcaaccatactgtgcatatgttcttataatgacatcagtaacactttattaaacttatttacctatatgtatatcaccattaagagattatgaactccttgagtacagagaccattttatttatctttatactcagtgattaaaacatagctcacatacattagataataaatggtgagtggataaacaaacacataaataaataaactttgcttctacactaaaattgaaaac

SEQ ID NO: 632974 - DNA, 511 bp, Homo sapiens
gagtttttgaataatgagtcaaatgttcaaacaatagtttttttctgaggttagtgccacaattgcaaaataaaccatttccaaggaagtctaatggcgatcattcctcaaattcttctcttcttagaaaaatgggctgtgccttgaggtggttgcatgtttttatttgycttttcagtgatttcattgaagagtagatataaagtttacttccacttataaattcatgaaactgtagtatatatgagccagtgggacttttgaggttaacttctttattcaaggtaaggtcagtggcaaaaatgggactacaatcagctctactctttctacggtaaccaaataccccattttcctaaaaattatcttcaacctcttttccttttccctgtttgttcaccttttacttagctcttcaggaatgcaattaaaacctttaccttcactccactaggcacttactgcactgcaagtttatctacgtgtttactcagaagttccagggaggagt

SEQ ID NO: 632975 - DNA, 511 bp, Homo sapiens
gagtttttgaataatgagtcaaatgttcaaacaatagtttttttctgaggttagtgccacaattgcaaaataaaccatttccaaggaagtctaatggcgatcattcctcaaattcttctcttcttagaaaaatgggctgtgccttgaggtggttgcatgtttttatttgccttttcagtgatttcattgaagagtagatatawagtttacttccacttataaattcatgaaactgtagtatatatgagccagtgggacttttgaggttaacttctttattcaaggtaaggtcagtggcaaaaatgggactacaatcagctctactctttctacggtaaccaaataccccattttcctaaaaattatcttcaacctcttttccttttccctgtttgttcaccttttacttagctcttcaggaatgcaattaaaacctttaccttcactccactaggcacttactgcactgcaagtttatctacgtgtttactcagaagttccagggaggagt

SEQ ID NO: 632976 - DNA, 640 bp, Homo sapiens
attgtatgataaatagcattttattaatatttatactaatagaaaatgattttagctttttatattttttctttataaaatcaaaatatatgacttcatatttttatttgatcaaaatttgacttctttcccgctctgtgattcatagctcttgacagataagaggttctcaatggttggtgtatgtactgccccatttacaatggcagttttcattaaaaattataaatgaggatataaaatgtcttaaaagcatcatttgaataataggatcaaatacattgctaaggatatcaggcctgttacaggtttttatgcgtaaagaaacagaaatatcatttaacatagttgttagcacagcatacaccttaactagacagtatactcttcacactgtctctctcctctctggtcaaggggatatcacaatgcccccatagcaaaataaaaaatgtttgattctgacacctgtgttcctctcttctaacactaatcttgcatgtggctaagatttaatacaaaactagcccaatagtgttcyttttgccaatcccaatattaattttcaaaagcacattttaatctaaagtggcatgctggagccacttcatgatacagtgagcactggctgtgtatggaa

SEQ ID NO: 632977 - DNA, 640 bp, Homo sapiens
caatgccatgtgaaacaccatgatggtggataaggcattccatgagtccatgaatggtagtcttggcagaagcatagaatgcaggataggcaaagctatatctagagcaactgtctattccagttaggacaaaccactgtcctttccatgatagaagaggtccaatataatcatttcatgttgttaacttgccaccaagtagctggctgatcaccctgaggaatggtgacacactgaggactcagcgttgttctctgctgctggcaaattgggcactcagcagtggttgtagccaggtcagctttggtgagtggaagttcatgttgctgagcccatgtgtaacstccatccctgccaccaaggccactttgttcatgggcctattgggtgttgacaggggtggatggggaaagaggctgagtagtgtccatagaatgagtcatcctatccactttattaaaatccccctttgctgaggtcaccctttggtgagcacccacaggagacacaaatatcttcacagtttttgaccacttagagaggcccatccacatacctcttccccaaatttctttgtcaccaattttccaatcatgcttcttccaagtccctgaccatccagccaaaccattggctacag

SEQ ID NO: 632978 - DNA, 571 bp, Homo sapiens
agcttggctcatattaattctttgattgttaaataaaataggtctccaacaatgatataaaccgaatttcatcagattatgcttacctcttccrtgttactaagtgattaatgttttcagtcaacttcatgaccaactgcactcatttatatatgaggggttcctaggaaaacaacaggaatttatacttgaaaattcagagtatttctttgtttcaattatcattcactgcaaatgtttcactgtctacaggtctattttaaatccctaaattaatatcagatttcacaggtattgattattatctaagtctttagctccttcacagtgttcatatgctctgaaaagatatttatttggataaaatgctctaaccttttatttttaggagcttcatatacacagaaataaaaaaccagtaacattttccttatacttaagagtcaatgaaagcaccatctctgcccttccacctcttgacaccaatttaaaaactaccattaaatggccactagatcatcatccacaaactctgagcaacagtttgtttggaaatgcaaaataaaaacca

SEQ ID NO: 632979 - DNA, 467 bp, Homo sapiens
tttaattagagtgtgatcagagtgctgaggagcacaaagagaaaaggggtcatatcacaattgtaagaatgtaacttagaggatgtgaaagcatatcggcaatcattcagagaaacagaaccagtgtatatagtaaaagataactctgacatatgaaattaaattaggctgaggatgagaccattaagagtgaatctgtataccaaaagtcacaagcctatattggttatcaatgaaacaaaagattcatattcatctgtcaacaaaagaaaaggcaacagyttgtttatctcagtataggtatagtatctcaagtgtagcccaactttcccctggaatatagtgaattcacacatggctgctacttgaattctttcaaatgcatactaagctctgtagcttcatattccattataataatgcaaacagacaaacacaaggaatttctggtacttggggtctacctg

SEQ ID NO: 632980 - DNA, 556 bp, Homo sapiens
accctgggagcatctactgtgattctaccagtgggtctygccacagtctccatagtgtaacttgatcagctgaagatacctaaagtatctttgggtctactggtttataagggccaagtaacagagctgcttatactgcagtctacaccatctcttgctctgaacctcactccaagctagcgtcaatttggattgcttattaatttttgagcagtaatttcactttgttgtatgttagcttcaaaattcatagaggcttaaaggggatatatccctttgttaatggtagtgccttctttagagaggatatcatgtcatgttctagacactggatgcccagaaaccaagattgtagctctttcttggtggcattgagtattttaaaatggatatcctgacatgtctagatcctgggtgctatgaatttttatggcagttttctcctatcctctggaatgggtatagtgtagctagggcttctagggaatctgatacttcatgttcaccagattctgcagtatgtcatcaatatagtggaccagcatggtgtcttgtg

SEQ ID NO: 632981 - DNA, 556 bp, Homo sapiens
accctgggagcatctactgtgattctaccagtgggtctcgccacagtctccatagtgtaacttgatcagctgaagatacctaaagtatctttgggtctactggtttataagggccaagtaacagagctgcttatactgcagtctacaccatctcttgctctgaacctcactccaagctagcgtcaatttggattgcttattaattttygagcagtaatttcactttgttgtatgttagcttcaaaattcatagaggcttaaaggggatatatccctttgttaatggtagtgccttctttagagaggatatcatgtcatgttctagacactggatgcccagaaaccaagattgtagctctttcttggtggcattgagtattttaaaatggatatcctgacatgtctagatcctgggtgctatgaatttttatggcagttttctcctatcctctggaatgggtatagtgtagctagggcttctagggaatctgatacttcatgttcaccagattctgcagtatgtcatcaatatagtggaccagcatggtgtcttgtg

SEQ ID NO: 632982 - DNA, 556 bp, Homo sapiens
accctgggagcatctactgtgattctaccagtgggtctcgccacagtctccatagtgtaacttgatcagctgaagatacctaaagtatctttgggtctactggtttataagggccaagtaacagagctgcttatactgcagtctacaccatctcttgctctgaacctcactccaagctagcgtcaatttggattgcttattaatttttgagcagtaatttcactttgttgtatgttagcttcaaaattcatagaggcttaaaggggatatatccctttgttaatggtagtgccttctttagagaggatatcatgtcatgttctagacactggatgcccagaaaccaagattgtagctctttcttggtggcattgagtattttaaaatggrtatcctgacatgtctagatcctgggtgctatgaatttttatggcagttttctcctatcctctggaatgggtatagtgtagctagggcttctagggaatctgatacttcatgttcaccagattctgcagtatgtcatcaatatagtggaccagcatggtgtcttgtg

SEQ ID NO: 632983 - DNA, 638 bp, Homo sapiens
tcctttcttgtcttctgttaatctattctgtttttgagaagattatacacttggggtgaaaaaggtagaaggagcttggactggtgggaagccccggattaagagtttaaagagtcaagatgtagtcccagttgtgctactttaaaatttggaataattagatgtgtacaaattttagtttggcagcaaagggcttttgagctaatgggtcttagcttggaatgaggaaataacccacagaggccacctttggctcacttatataaatgtacctacttcacaggatgtttgtagggattcattatgaatatatgattgggcrtggtggctcatgcctgtaatcccagtgtttcaggaggctgaggccagaggatttctcaaggccaggagttcaagaccagcctgggcaacaaagggaggccctgtttctacagcatatttaaaattttgtcaggcatggtggtgcatgcctgtgcttccaactacttgggagacgaagatgggagtattggttgggccaggaggtcgaggctgcagtgaaccatgattgcgccactgcattttagcatgggtgacagcaagaccctgtctcagtatatatgaatacatgtgaagtgcttcgcacagtacttgatgca

SEQ ID NO: 632984 - DNA, 622 bp, Homo sapiens
aaaaccaaactaccagaaatcccaaaatacgtagtaatgacctattcgaattgataatgtagaattggcccctctcttaatttaaatcttccaaactatgatgatctgaacaataagcaaataaataaaattttcattgtttattctgcccttaatggaaacttatttaatatcagtaaaattagatctgaacctgtaaggtaataaataaataactggacaataaacataaggaaatattatcttccaaccacattcacatccccatgccaagcacaaatgtgtcagttgggaaatctaatctctcctggggactaaggtcatcaaacgttgtgagctccattaaaggcttcacattttactttaaatttacccatgrtgccatcaagttaaaactccacagctcatatacaagtgcaatgtaactcagattcttattaaactgactcaaaacattttaaaatgaaagcaattgttctaaaagaaaatgtgctctacaaatgaaaatggtgaaataaaaacattggttctaatatacccaagtccaagagttgatccaaaagaaaactacaaaaggcccaagggaaaacagcaacattaaccactttgcataacagctccc

SEQ ID NO: 632985 - DNA, 534 bp, Homo sapiens
ctgcctcacaaatcaagaggctgtttcacagcacttaaatcctatttcctgttcctatatctttccctaaaagcttgtaagtgccctggcctattaactctttrttaatgctattttttcaaagctaaacccacccaacagctctgccagctctctgactctgcagaaaagaatatgtgggtgggtttgggaaagtgggtcagataagcacacagactaatctggagtcctgatagatgaggttgtggaaaaaaaaaaataaaccacattggtgtcatggatttccatttgagatgctttactatagaagaatgtaagcactcttcctatcttcacattgtctccccagggctgtgcagggtggaactcaggcaatgaatgcagtgcagtgaaaagaatgtgacctgcagaggcattctgacttgatttcaacttctggctttgtgactaactggtagtgtcagctttgagaaatgatttaatgcttctgaccctcagttttcctcatctgtaaaatggacctgattttcagag

SEQ ID NO: 632986 - DNA, 534 bp, Homo sapiens
ctgcctcacaaatcaagaggctgtttcacagcacttaaatcctatttcctgttcctatatctttccctaaaagcttgtaagtgccctggcctattaactctttattaatgctattttttcaaagctaaacccacccaacagctctgccagctctctgactctgcagaaaagaatatgtgggtgggtttgggaaagtgggtcagataagcacacagactaatctggagtcctgatagatgaggttgtggaaaaaaaaaaataaaccacrttggtgtcatggatttccatttgagatgctttactatagaagaatgtaagcactcttcctatcttcacattgtctccccagggctgtgcagggtggaactcaggcaatgaatgcagtgcagtgaaaagaatgtgacctgcagaggcattctgacttgatttcaacttctggctttgtgactaactggtagtgtcagctttgagaaatgatttaatgcttctgaccctcagttttcctcatctgtaaaatggacctgattttcagag

SEQ ID NO: 632987 - DNA, 561 bp, Homo sapiens
gaatgtaagcactcttcctatcttcacattgtctccccagggctgtgcagggtggaactcaggcaatgaatgcagtgcagtgaaaagaatgtgacctgcagaggcattctgacttgatttcaacttctggctttgtgactaactggtagtgtcagctttgagaaatgatttaatgcttctgaccctcagttttcctcatctgtaaaatggacctgattttcagagttatggtgagtgcgctgcattttgyaatgttttggtcttctccctcctacatgtgtttcactcagccttttccctggaacacagcattcgagacaaagcttacctgctgccagagtctgaatgtttgtgtcgttgccaaattcctgtgttgaaatcctcacccccaagatgatggtattgggaactagggccttttaggaggtgatggaattagtgcccttataatggagttagtgcccttatgatggagttagtgccattataaaataggcccaagggagcttgttcgccccttcaaccatgagcagacacagtgaagaggcactatttttgaaa

SEQ ID NO: 632988 - DNA, 531 bp, Homo sapiens
attcagggtattggtggtagaaagcttccattggagaatcacagaacaaacctctggggctctggagcaaagccatgccacttgctgtgaagaattatgtaccttttttttttttttttttgagacagaatctcactctgttgcccatgctggagtacagtggagtgatctcagctcacttcagcctccgcctcctgggttcaagcaattctcctgcctcagcctcccgagtagctgggactataggtgtgtgccgccacacccagctaattttkgtatttttagtagagacagtgtttcaccatgttggtcaggatggtcttgatctcctgacctcgtgatttgcccgcctcagcctcccaaagtgctgggattacaggcatgagccaccacacctggccacttatatactttttgagaaacaactcgtgtgctagtgggctaggaactccagtgcaatattgcataacagagacattaagaagcactcttgacttgttcctgttcttaaaaggaaaatgttcaatgtct

SEQ ID NO: 632989 - DNA, 598 bp, Homo sapiens
agcactcacttttgacattcacatgacccataatgaccattatggtagttaccctattatacagatgtgaaattgggcatgcagaaaattcaaatttattgtcaaatgatacatagtaaatggtagagttaattggaactcagatatgaaatattgaaggtgcccaataaatatattttgaacaaataaatgaatgggttctgaagcttatattggcaaagctcatactcttttcactamatgttcctatctgacatgtaaatatctataaagcatttactacatgccagctctaataaatttttaaagagctatagaaatccagtaattgcttccatactgtgttagtcagggttctccaaaaacatttattatagaggctaagtcccaagcaagctgataagtagttccatccaagtctgaatgcctaagaacaggaatgccattggtgtgagttccagttcaaaagccagcaggctcaagacccaagtagagccaatgtttcagtgtctgagaccaaacactaatgtttcagcttaagcaatcaggcaggaagaggtccttcttatttataacagagtcagactttttgttctgt

SEQ ID NO: 632990 - DNA, 558 bp, Homo sapiens
tcctatctataggaacaatgaggttgcagatgggcagtatctagtggtgtgtgacattcagcaacaaggaagtgagccaaagtgtatcctgattgatgcttaattataggtattaatatcttttctggccaggacctggcatgcaattattgtcaaccctgtgggaatgktttcaactttagtgactaaaccatgttgcttttcatgttattgtacagtcagatctctttctttcatatgtagagcttaccacatggtgttcaataattttcaagtctaaagacctctctgtttgacatagagagataccactaaaaatggtaactaaaatgactacatgaagcactagccagagttaaaataataacatccccaagctagccagaatttgtaacacactctatgttgaaaaaagcaaatgcctaaaatatcaggggcatacatattctaaaccaaagggagcagaagaaactggagtcccgttctacagacatttattttgcatgcattatgtgtcagatacattgctaggaggataatgtagaatggatggaacat

SEQ ID NO: 632991 - DNA, 558 bp, Homo sapiens
tcctatctataggaacaatgaggttgcagatgggcagtatctagtggtgtgtgacattcagcaacaaggaagtgagccaaagtgtatcctgattgatgcttaattataggtattaatatcttttctggccaggacctggcatgcaattattgtcaaccctgtgggaatggtttcaactttagtgactaaaccatgttgcttttcatgttattgtacagtcagatctctttctttcatatgtagagcttaccacatggtgttcaataattttcaagtctaaagacctctctgtttgacatagagagataccactaaaaatggtaactaaaatgactacatgaagcactagccagagttaaaataataacatccccaagctagccagaatttgtaacacactctatgttgaaaaaagcaartgcctaaaatatcaggggcatacatattctaaaccaaagggagcagaagaaactggagtcccgttctacagacatttattttgcatgcattatgtgtcagatacattgctaggaggataatgtagaatggatggaacat

SEQ ID NO: 632992 - DNA, 558 bp, Homo sapiens
tcctatctataggaacaatgaggttgcagatgggcagtatctagtggtgtgtgacattcagcaacaaggaagtgagccaaagtgtatcctgattgatgcttaattataggtattaatatcttttctggccaggacctggcatgcaattattgtcaaccctgtgggaatggtttcaactttagtgactaaaccatgttgcttttcatgttattgtacagtcagatctctttctttcatatgtagagcttaccacatggtgttcaataattttcaagtctaaagacctctctgtttgacatagagagataccactaaaaatggtaactaaaatgactacatgaagcactagccagagttaaaataataacatccccaagctagccagaatttgtaacacactctatgttgaaaaaagcaaatgcctaaaatatcaggggcatacatattctaaaccaaagggagcagaagaaactggagtcccgttctacagacatttattttrcatgcattatgtgtcagatacattgctaggaggataatgtagaatggatggaacat

SEQ ID NO: 632993 - DNA, 590 bp, Homo sapiens
ataatggacattgatttaagaaatgatatatcactaatgctctaaacagagaatgatattatgaaaataaaacatggacacagagactctgagttgaaaatcaatgaaaagacactttgaatgttaagaagttttaggaatgcctcagccaatgaattttgctcatattgttctttgtatgtaggtgcaagggtgttatatgatttttttaaaagggggctctttgcatgagtagaaaaaattcttagtgataaagagttgtgccatagttggcattttttttcttagtagtatataaaatagtgtacttttaagattacaccccagcttcaatgaaacaccttcctgcccaaaacactgactcaatttttaaaatgattgttattcttttttttaaaagccttccattaaaatttgatttaaagaattgaatgaataaaggtagaagagtcaagcctaagaaccaagcctttgataaaaagtaatgacaaaartcatatgccacttgataaaagcagaacgttaaactaaagctgtgctctgcctgatctgggctttgatttcactgggtcctacagtgatcttagttt

SEQ ID NO: 632994 - DNA, 567 bp, Homo sapiens
tggtctaattattcaaatttgagggcctatctctatctctcagtgcctattaccaaacttttctttttttcacctttttgcttgatgtggtacactgttattgtttagttttaggaaatcacattccccttctcctaaagaactatataaaatatctttttagacatgtatcttatttggtgaattttccccrcccaatagagtcattggagacatcaggtatcttactgtactcttttctgtttcattaatgtgaaatcaaagatgaatttgaaagacacttttaaatcctaagccctaaataattatattttaagtaattttagttatcaccagcacagctgttactaattaatccataaataaagaaatttggccatcagcaagattttgccccaatagtattaataataaacaagtatacaaaatttgaatctttttatagtctttttttattagttgctatagctcagctgtaatgtacatttttgtaatataggcattttgtaatatgtttgttggcagataaataatatattatataattattctagatattaattagga

SEQ ID NO: 632995 - DNA, 585 bp, Homo sapiens
agcagaacactacaaaaattgaacttctgagatatgatactaagaagttgcttaaagaaacacttataaaacttcttacaattttattaagagcagattaataccttaagaaaaccttgctttaatataagggatcatcattagaaagactgcctaaataatctcctttcaattataaccaacttaatcacatgtaaaattcctctcataaattccccttcatgaaccttctcacaacttacgcagaccatctatgacatgcttggactttatgacttgtcctaaacatccttcttttttttttagacagaattttgctctcattgcccaggctggagtgcaatggcacaatcttggcttaccacaacctctacctcctgggttcaagcgattctcctgcctcagcctcctgagtagctgggattacagtcatgtgccaccaccccctgctaattttgtatttttagtagacatggggtttctccatgttggtcaggctggtcttgaactcccgatctcaggtgatctgcctgccttggcctcccaaaatgctkggattacaggtgtgagccaccacatctggcc

SEQ ID NO: 632996 - DNA, 512 bp, Homo sapiens
ttaacatgtaaccctcaattggaaatttttggattctgggatggcagtactaaaatactttttatgtatcattgctaggttccagcctaattaagracatagaaaattgacctctaattaagtggatcattattatggcatttcttaagctttatccaaatttcagctacataaaacatttcaggatttaaattagtaccatatcaattttctgtgatgatgtataccaactataaagcactatgttggtttactacttcagtaaattattcttagtgaattattttctaaattaaaaaaaatgacttggcttttggtattgataatagtattcacaacctgcatctgttaagatgtttgatctttaacccacacaatgtaagggtactgttgtcattgttctcaggtaggtgattctgccttccaagagtatatgtttctttaatcagtttaaaagataaaggcattttgggttttaagacccctgctttacatctcaggtaatgtgtaga

SEQ ID NO: 632997 - DNA, 512 bp, Homo sapiens
ttaacatgtaaccctcaattggaaatttttggattctgggatggcagtactaaaatactttttatgtatcattgctaggttccagcctaattaaggacatagaaaattgacctctaattaagtggatcattattatggcatttcttaagctttatccaaatttcagctacataaaacatttcaggatttaaattagtaccatatcaattttctgtgatgatgtwtaccaactataaagcactatgttggtttactacttcagtaaattattcttagtgaattattttctaaattaaaaaaaatgacttggcttttggtattgataatagtattcacaacctgcatctgttaagatgtttgatctttaacccacacaatgtaagggtactgttgtcattgttctcaggtaggtgattctgccttccaagagtatatgtttctttaatcagtttaaaagataaaggcattttgggttttaagacccctgctttacatctcaggtaatgtgtaga

SEQ ID NO: 632998 - DNA, 607 bp, Homo sapiens
cttgaaaaattttcaggtgctacttaatatagcaccagaatgctgtactaagatatttggaacttgtgttatatgtgatgggaaatcatcagaaagaggaaaaccacctgtttacatgaattactgtcataaatgtagaaataatagatccaagggggcaaaaatgaagttatttctattgattgagaaaaacttcaaattcacagcataattataaaatttattttcaatagagaatgtagttttgcaaaagagtagtacaaacttaaaaatctaatcctggaagattcaccttttgtgagtaatgaaaattctgccttatgtaaattctgccataatagataagaaattaggagtgtcctgaatctttaaattatatgaagatcttctggaatctgagggagcaaaaataaagagaaaatgagaggaatgtgcagttgacagggcagaagacaatgtgtttagaagggttaatatctgcagaagcacagaggtacsgaagtgcatgcacgcttggtgaaccaaacttgttttcatttataaataatagatccatatggaaaaaatgcagatgtattagattattaagcatgtatccacttatgta

SEQ ID NO: 632999 - DNA, 607 bp, Homo sapiens
cttgaaaaattttcaggtgctacttaatatagcaccagaatgctgtactaagatatttggaacttgtgttatatgtgatgggaaatcatcagaaagaggaaaaccacctgtttacatgaattactgtcataaatgtagaaataatagatccaagggggcaaaaatgaagttatttctattgattgagaaaaacttcaaattcacagcataattataaaatttattttcaatagagaatgtagttttgcaaaagagtagtacaaacttaaaaatctaatcctggaagattcaccttttgtgagtaatgaaaattctgccttatgtaaattctgccataatagataagaaattaggagtgtcctgaatctttaaattatatgaagatcttctggaatctgagggagcaaaaataaagagaaaatgagaggaatgtgcagttgacagggcagaagacaatgtgtttagaagggttaatatctgcagaagcacagaggtaccgaagtgcatgcacgcttggtgaaccaaacttgttttcatttataaataatagatccmtatggaaaaaatgcagatgtattagattattaagcatgtatccacttatgta

SEQ ID NO: 633000 - DNA, 583 bp, Homo sapiens
aacattgatctcataagatagatatgacagctatctctctctctctctctctctctctctttctctctctcacacacacacatacacaccacaccacacatattttcagccctgtatctggtaaatcatatatgataaataatgattacttaytatattaataagaacaatgattagtattttacacttagcatagaatgagggttggaatttttagtgattttgtggaacccattcttcaaacaaataattgtgcagtactttaattactaacttatctatcttataaattctagttatgtatggattttcttaaacttttaaaaccatctcctgtaaataacagtaaacatatttacaaagatctgaacttatatcaaaaccagtcctgtaaagttctaagactgtgttatttttcctctaacacaaaatagtaacaattacttttcttaaactatttcctgccttctctaatttaaattggagaccacaaataagtggacacttcatatcagcttatttcattctttgtggccaggaaacatctcaggtatttacctggtgagccatagcagctgttatt

SEQ ID NO: 633001 - DNA, 399 bp, Homo sapiens
ctaagactgtgttatttttcctctaacacaaaatagtaacaattacttttcttaaactatttcctgccttctctaatttaaattggagaccacaaataagtggacacttcatatcagcttatttcattctttgtggccaggaaacatctcaggtatttacctggtgagccatagcagctgttattgtacttaagataaaattcttataacacaataatattgaaattaacttaacatatatggtatgctgatatagtttaaaaatatctctgatgatagtgtcatgatttttctaaagaaagggtaaatccccttccctttcccaataaatattaccaatacgcacatgaggattccagttgagtcttacsagagcattttattagacaaagcccctgc

SEQ ID NO: 633002 - DNA, 526 bp, Homo sapiens
aaagacctgcccccatgattcagttatctcacaccaggcccctcccacaacatgtaggaactatgggagctaccagatgagatttgggtggggacacagaaccaaaccatatcagggaggatgtcagtaaagagagacyaggaggcaggagggagaaatggaggtaggtctctatgacatgcttagcaagctttttaaccataaagaatcatgattgtttaaatcatcatagaagccagaggaatgaaacaagggtagaagaccaatttattaaatattacctatcagctactatgctaagtatgaactaactcaatgtaacccatttaggctttgtgctactaggctcaatagaacatcactgctgcaaccaaggacacttatgaaaaaaagtcaaataaatattttaatgataaattagttacgttgcaaaacttttcagaaatatatattcttcaacttttattctcaatgtagatttcaaacacagctgctaataaaaacattcaccctaaatccaagatct

SEQ ID NO: 633003 - DNA, 601 bp, Homo sapiens
cttgacaatttttcatatgattatttgtttctttttattgagtagtttgataatcttatatgttttggatattgacctcttatcagatctatagcttacaaatattttctcccaatccataggttgtctcttgaattagttgttttatttgttgtgcaaaagcttttcattttgttttaatcccatttgtctatttttgctttttttgcctgtgcttttggagtctaatcsagaaaaccattgcctagaccaatgttgtgtagtttccccctaagtttttctctagtagttttgccatttcacatcttttttaaagtctttataatccactttgaattgatttttgtgtatggtttgagataagggttcaattttattcttctgtgcatggatatccagttttctcgaaatcatttattgaagatattgccctttttattgtgtattcttggcacctttgtttaaaatcaattgactctttatgttcagtttattttaggctttctattttgttccattagttaatatgtctactttatgccagtgtattgctgttttaattaatattactttgtattatagtttgaaatcaaatagtatg

SEQ ID NO: 633004 - DNA, 632 bp, Homo sapiens
tttttgtagctattataaatgggattgctcctttgatatctttttcagaaagcctgttatcatatagaaattctactgatttttgcawgttaattttatatcctgtaactttaatgtatttacttctaacaatctttttgtatgcatggaatcttttggggttttctgtatataagatctcatcattggcaaacagtaagaatttcacttctttcttccatatttacatgcctttatttctttctgttgcctaattgctatagtaaggccttccaataccatgttgaatggaagtgataagagtgggcacacttgtctttttctggatgttagtggaaaggatttcaactttttactgttgagtataatggtagctgtgagtttctcaaatatgacctttattgtgttgcagtacattttgtctatatctaatttgttgagtttttattataaaatgatgttgaattttgtcaaaatcatttttctgcatcaaattacatgatcatgtggtttttgtccttcactatgttaatatatgtgtcacatctattaatttgcctatgttgaaccattcgtgcaggaatgaatcacactagatcatgatgaataacccttttaatgtgttgttgaat

SEQ ID NO: 633005 - DNA, 621 bp, Homo sapiens
ctgacaaatttctgaagctaagtgtggactagcattagaatgagaaattcctattgactgaagtcttaagagaactcccacacatttgtgaccaggattcctaacctgttcaaatgttgaaactctggaaaaggttccctcatgattcrggaagtggaggtaaaaactaatcattgtgaaatatgctcagagctttgccttttggaaagattctgacattgtcgtataccattgggagaaatgcatttttgtcactccagtctcttctagtcttttatctcaccagcggggaataaaatacatagttactgaggtttaggctgtcagatagatagactggagttctgtagctagggaggaagtaatgagaatgtttgggggcaggagggagaatgttacaccactggagtaacacatgtgaagatcacagcccttagaaataggcccattaaaagacagatttaattataagattgtagaaagccctcccttgtcatgtcacccgcacaccaagaggcttccattataataactatgaataacagcttaaagagttgcaagatacagattctctgtgatgagtgtacttagaaaagtccaaactgaagatgagagacaaaa

SEQ ID NO: 633006 - DNA, 621 bp, Homo sapiens
ctgacaaatttctgaagctaagtgtggactagcattagaatgagaaattcctattgactgaagtcttaagagaactcccacacatttgtgaccaggattcctaacctgttcaaatgttgaaactctggaaaaggttccctcatgattcaggaagtggaggtaaaaactaatcattgtgaaatatgctcagagctttgccttttggaaagattctgacattgtcgtataccattgggagaaatgcatttttgtcactscagtctcttctagtcttttatctcaccagcggggaataaaatacatagttactgaggtttaggctgtcagatagatagactggagttctgtagctagggaggaagtaatgagaatgtttgggggcaggagggagaatgttacaccactggagtaacacatgtgaagatcacagcccttagaaataggcccattaaaagacagatttaattataagattgtagaaagccctcccttgtcatgtcacccgcacaccaagaggcttccattataataactatgaataacagcttaaagagttgcaagatacagattctctgtgatgagtgtacttagaaaagtccaaactgaagatgagagacaaaa

SEQ ID NO: 633007 - DNA, 576 bp, Homo sapiens
tgaactcatttactcattatttcaatgactgatgttttgctctcccttcagcctgagtcctctctattttattttgctttccttaatggcccctcacctatcgcttttcttattaatttcctgcttttccttgcttttgctagtctgttggacctctggtaatgtattatctactcaggattaaaaaaaatagtgcattcaatttgaagatcgccgaatgcacagacaaatgtgtttccatctcatcatcacmaaccattttgcacataatcgtagacctttctctgttattcagaatattttagatgtcagaagatgaaataggaggaatatttggattcaagttcatgtaactgaaacagcaatattaaaatgtcattttatgaggtaataaaacaacttgctgaattcaacacaagagacagagataatccatacacttcccaccctaccacactcactacctttcttataacagaaatttgcttaaatcaatacatcataaatattcacgatatactcaggccacagagttaaaatatacaggcaatttgttttgcagtaaaaacagagcaa

SEQ ID NO: 633008 - DNA, 621 bp, Homo sapiens
tttgtgcaagggtctaaaggcaatgaagactatagattggtcagtaacaatagttctgagcaagcagtcggcagattatacttaaattgtgtttgataaaaaatgaatatgaggatatagaagtacaacttttcatttagcaacacttacaggacatatatcagaagcccttttgtagccttgtttctttcatgcrctgctcctcaacttaccgcatccaggatactaaatggggtagacacacttagattggctctcactgcttgcattcctcttcctttctaattggaaaggtaaaacaaacacacaacattgtttcccagactgttgtgagacaaagtggaagctggttttcaattcctgttgctgtgatagatacagatttctagagacaattgaagcatcaagactcagtgttccatgttttcatccctagcttcatgggtataaaaaatagctgtgcaggacacagcagaagcagctgcagcctcctagtctctgaatgtaactgcggtagttatagttgagttctcttaaccataatagggtagggatggtctcttaacttctgccccaccaggtaattcagtgatttggcaggacccgtaattccttatgtta

SEQ ID NO: 633009 - DNA, 532 bp, Homo sapiens
atgttttaccctacacaggtacaatttagtattcaacagactcatgttatttcttaagcagattgctcaagttcctccctttcggtaatttgccctctaccttgaagcagtgacaacttccctagactgtagtctttgccttgccaactcagccagatcaccgtgtccttcttgtatttcttctctctgtgctactcaggaaagtgaatcatggcataaaacygaagaattttagctctttttagagctgttttaaaactcacagttatctctgggtattatgtggttgtatccttcaataggaaaaaaataaatgggtaaatgtagccttaatttattgctactaggttttttgaatactaatggaaatcaagagtgcttttagaagaccatattctactttgtatacaattataaaaagacttggaatttggattcatgcattcataacaatggacaccaatgattatacctggctttctgtcactaataatcaacaacagattgcccaagatgtgcagctgctaggctg

SEQ ID NO: 633010 - DNA, 505 bp, Homo sapiens
aaaacatcttttcagtattatctctgtcattcagttttcagtctcccattacctcttacttggttcttctggttaatttgcccaactgtcagttcttagaaggcactctgctgagtcttacattcatgtatattatctacaattcttccactgcctagaatattcttcacaagctaccaccaggtctatccccacctactcaactcttcctcttcttacaaattattttgaccttatcacacttttcctgatgctcttcttgctataaacaaaattggaactgccctcatttgtgtctcatacatccgtatctaaytgcctataacagattgtttcatgtgactttataagtatgaatcactccaccatcatgtgattcttaaatataaagactgtaacttatttgtccttgtgttcacttgactggcaaaagtgattatacacagcaggccatatattttaatttattgagtcagtgaatgaattaatgaatgaatgaatatat

SEQ ID NO: 633011 - DNA, 388 bp, Homo sapiens
ggattctcacacctcagcctcctgaatagctgggattacaggcgtgtgccaccatgcccagctaattttgtatttttagtagagatagggtttctccatgttggtcaggctggtcttgaactcctgacctcaggtgatccacctgcctcagcctcccaaagtgctgggattacaggagtgagccactgcrcccggcccattcttactaaatttttttttgtttcagaaaatataggaggttttttaaaatttttttgtaattttttttaatttacagttttagtagagatggggtctcactatgttggccaggctggtctcaaactcctggactcaagtaatcctcctaccgcagcctcccaaagtgatgggattatatggtttaaaa

SEQ ID NO: 633012 - DNA, 613 bp, Homo sapiens
ggggaactcaagttcacgctgctgggattggcaattcccctctggctagggctgctttaaatgctccccccatgggtgggcattaactgagtttggtctggttttgttttctgctataacagggcaccactgagttcagtacttcaaaattgccgtgctctacctctccccagtgcacaaaaacactctccacaccaagctgctgctgctgggggatggagggatggcgtcagcgattcaagactgtttttcctacctgttcagcacttctttcagcgatatgaagttaaatccaggtactatgagtgctcacttgatttttgtttcttatgaaggagctttttgtgtgtgtgtgtgtgtgtgtagatagttgttaaattggtgtccttgccagggaggaggggacaattagtggagtctcttattctgccatcttgctcttcctcaatatgctctttcttgcagatcttttacaactctctatatttgttcagtttgcatcttacttgttttcttctttattattctggracaatcctcttgtttttaagataacatcattctctttttcctttaaaggaaacacattccttatatactttttcttgctaaa

SEQ ID NO: 633013 - DNA, 589 bp, Homo sapiens
cggctcactgcaacctctgcctcccgggttcaaacaattctcctgcctcagcttcctgagtagctgggattacaggtgcgcaccaccacgcctggctaatttttgtatttttagtagagacggggtttcaccatgttggccgagctggtcatgaactcctgacctcaagtgatccgcccacctcagcctcccaaagtgctgggattacaggcgtgagccaccacgcccggcctattacctctgttttataggtgaaggaccttaagcctagagaggtcaaatgactttccaggactgcaaagttaataaatgacaatgtggggctttgtcttacagcaaaacccatgcttttaacaggaaattctgggatgtacttcctgctctctgccaattacctacttgtaaattctgcctaaaatttgcatcttccaaaagccttccctaattaactccacccatctctaaactctccattactgcatatcgtcagtctatgcgcattcagtttgcatggtgttaatctatcttaatatgtttatctttgytttataagtgtttcaaagagtcctataaatggtcttgtgtgtgg

SEQ ID NO: 633014 - DNA, 315 bp, Homo sapiens
agcctgggtaacacagcaaaatcctgtctctgcaaattagctgggcctggcagcacacacgtgtagtcccagctacttgggagaactgcttgaatccaagagtttgaggctgcgatgagctatgattgattgtaccactgcacaccagactaggcaagagagtgacatcctgtctcaaaaaaaaaaaaaaattaaaacgacaaaacctaggattttttttttttatacttaaaaatacaagcttgatgcataactcamcctatttaatatatagagagacaatacagcaaaacggaaagggttagcccacagacg

SEQ ID NO: 633015 - DNA, 315 bp, Homo sapiens
agcctgggtaacacagcaaaatcctgtctctgcaaattagctgggcctggcagcacacacgtgtagtcccagctacttgggagaactgcttgaatccaagagtttgaggctgcgatgagctatgattgattgtaccactgcacaccagactaggcaagagagtgacatcctgtctcaaaaaaaaaaaaaaattaaaacgacaaaacctaggattttttttttttatacttaaaaatacaagcttgatgcataactcaccctatwtaatatatagagagacaatacagcaaaacggaaagggttagcccacagacg

SEQ ID NO: 633016 - DNA, 579 bp, Homo sapiens
gaatttggtgagaacatggactagaggactctagcctcttccccctttagggtttcacttcagtaagtcttaaaattagagtgtggtgactcacgcctgtaatcccagcactttgggaggccaaggcaggtggatcacttgaggtcaggagtttgagaccatcctggccaacatgcagaaaccctgtctctactaaaaaaaaaaaataagtaaataaataaaaattagccaggtgtggtggtgcacggctgtaatcccagctacttgggaggctgaggccaggagaatcacttgaacccaggaggcggaggttgtgggccgagatcatgccaytgcactccagcctgggtggcagagtgagattcagtctcaaaaaaaaaaaaaaggattagagcttggtgcagtggcagccacctgtaatcccaacttcttgagaagctgagatgggaggccccccttgagcccagaagtttgaggccagcctaagcaacactgtgagaccttgtctcaaaaaaataataaaaacaataattcttaaaataagctgactgggctgaaatcatgtatttgtacaacaaa

SEQ ID NO: 633017 - DNA, 215 bp, Homo sapiens
cctctggttttactctgcttgctgtaacccccaagaatgcagaggcacattgatcccacctagaatctgcacataaaagctggcctctgcctaggattcacaagacagggccagactttgggttgaagacatacagaaaactcacagaagacattttctgcatcatragaggtcaacatagacatcttaagcatcagtttcagagtggagccctt

SEQ ID NO: 633018 - DNA, 523 bp, Homo sapiens
gctctgtgagaggcttctggtgtcaacagaatcctgtaagttaaacaagcaccttagcagtgggaggtcagagctacaaaataaccagagccataatcacaactgtgcctccytgtaaactgttagtggagtagagtatttttgttcttccccttacctcagacttagctggacagggacaggggatattacagctagattcgggatctgttgctccaccagggcagaaccattttctataatatttgcaccccacaaagcctgagtgtctcctgtctcaggatcattatggaggcgtcagcccatagtcactggggacgctctcaccagcacctgtgaattttggagacatttgaggatgtcctgtgcaaattggggtcagtctgactacaaggtttaattctgcccccattttagaggaagagaaatggttcagccagggtttgttcctcccctcacagaaataatttccttgatttgtacccagatgggagttgcttcagttttctggttctttggtgaa

SEQ ID NO: 633019 - DNA, 523 bp, Homo sapiens
gctctgtgagaggcttctggtgtcaacagaatcctgtaagttaaacaagcaccttagcagtgggaggtcagagctacaaaataaccagagccataatcacaactgtgcctccctgtaaactgttagtggagtagagtatttttgttcttccccttacctcagacttagctggacagggacaggggatattacagctagattcgggatctgtygctccaccagggcagaaccattttctataatatttgcaccccacaaagcctgagtgtctcctgtctcaggatcattatggaggcgtcagcccatagtcactggggacgctctcaccagcacctgtgaattttggagacatttgaggatgtcctgtgcaaattggggtcagtctgactacaaggtttaattctgcccccattttagaggaagagaaatggttcagccagggtttgttcctcccctcacagaaataatttccttgatttgtacccagatgggagttgcttcagttttctggttctttggtgaa

SEQ ID NO: 633020 - DNA, 523 bp, Homo sapiens
gctctgtgagaggcttctggtgtcaacagaatcctgtaagttaaacaagcaccttagcagtgggaggtcagagctacaaaataaccagagccataatcacaactgtgcctccctgtaaactgttagtggagtagagtatttttgttcttccccttacctcagacttagctggacagggacaggggatattacagctagattcgggatctgttgctccaccagrgcagaaccattttctataatatttgcaccccacaaagcctgagtgtctcctgtctcaggatcattatggaggcgtcagcccatagtcactggggacgctctcaccagcacctgtgaattttggagacatttgaggatgtcctgtgcaaattggggtcagtctgactacaaggtttaattctgcccccattttagaggaagagaaatggttcagccagggtttgttcctcccctcacagaaataatttccttgatttgtacccagatgggagttgcttcagttttctggttctttggtgaa

SEQ ID NO: 633021 - DNA, 495 bp, Homo sapiens
gctctgtgagaggcttctggtgtcaacagaatcctgtaagttaaacaagcaccttagcagtgggaggtcagagctacaaaataaccagagccataatcacaactgtgcctccctgtaaactgttagtggagtagagtatttttgttcttccccttacctcagacttagctggacagggacaggggatattacagctagattcgggatctgttgctccaccagggcagaaccattttctataatatttgcaccccacaaagcctgagtgtctcctgtctcaggatcattatggaggcrtcagcccatagtcactggggacgctctcaccagcacctgtgaattttggagacatttgaggatgtcctgtgcaaattggggtcagtctgactacaaggtttaattctgcccccattttagaggaagagaaatggttcagccagggtttgttcctcccctcacagaaataatttccttgatttgtacccagatgggagt

SEQ ID NO: 633022 - DNA, 495 bp, Homo sapiens
gctctgtgagaggcttctggtgtcaacagaatcctgtaagttaaacaagcaccttagcagtgggaggtcagagctacaaaataaccagagccataatcacaactgtgcctccctgtaaactgttagtggagtagagtatttttgttcttccccttacctcagacttagctggacagggacaggggatattacagctagattcgggatctgttgctccaccagggcagaaccattttctataatatttgcaccccacaaagcctgagtgtctcctgtctcaggatcattatggaggcgtcagcccatagtcactggggacgctctcaccagcacctgtgaattttggagacatttgaggatgtcctgtgcaaattggggtcwgtctgactacaaggtttaattctgcccccattttagaggaagagaaatggttcagccagggtttgttcctcccctcacagaaataatttccttgatttgtacccagatgggagt

SEQ ID NO: 633023 - DNA, 451 bp, Homo sapiens
tcaataagctacctgcttctatttcgtatgtcattagaaaaagagatgaagcagtcatggtccctaccatgaaggagcttgcaatctagagcacatgaataagtagttgaattcagcatcrtgtgttaagcacaaagacggaaggtgtagaggagacttaagcttcatttgggtcacatcccttgttttgagttttgatgccaccaactgaaggtctattcatggacagaagagaagttattatttgtattatttttaccttgctaagaataaatatttaccttctaatataattgctctaggaaaacgtaagggttttggttaaattccttcttatcgtatgttacaaaatagggaagtggctaaaataggttaaaattgcacaaactctgaaaatcagatttctcttggtcaggcttagaaaagataaaactgaaagttcttagcagca

SEQ ID NO: 633024 - DNA, 451 bp, Homo sapiens
tcaataagctacctgcttctatttcgtatgtcattagaaaaagagatgaagcagtcatggtccctaccatgaaggagcttgcaatctagagcacatgaataagtagttgaattcagcatcgtgtgttaagcacaaagacggaaggtgtagaggagacttaagcttcatttgggtcacatcccttgttttgagttttgatgccaccaactgaaggtctattcawggacagaagagaagttattatttgtattatttttaccttgctaagaataaatatttaccttctaatataattgctctaggaaaacgtaagggttttggttaaattccttcttatcgtatgttacaaaatagggaagtggctaaaataggttaaaattgcacaaactctgaaaatcagatttctcttggtcaggcttagaaaagataaaactgaaagttcttagcagca

SEQ ID NO: 633025 - DNA, 449 bp, Homo sapiens
gaatgacataaaatattgtttcccacacctttacattcattttgtaccacttatttatttatttatgtattttgcaaacggagtcttgcttgtcacccaagctggagtgcagtggcacagtcttggttcactgcaacctctgccttctgggttcaagcacttctgcctcagcctcccgggtagctgagactacagacatgcaccaccacgcctggctaattttttgtattttagtagagacagggttttgccatgttgcccaggctgatcttgaactcctgagctcaggcagtcctcctgcctcggcctctcaaagtrttgagattacaggcgtgagccaccattcctggccctgtaccagttatttttgattcgatagtactgggtagtggaacttagaacccgcagatttaaaatacttaaatattctaaagattctgtcaggaaac

SEQ ID NO: 633026 - DNA, 380 bp, Homo sapiens
ggttacgataatccaggtaagtttatcagctcagattgtgaatcctgagcaaattctacagaacacartgtggctcccaggatgaatgagggagggtgagatagagcagaagtttccctctccagctgggctttctgctgccttaggaattggaagttgattgagttagcactggctccaatctgatcaattcaacgtgatcatatctgatctaattatccttccaacattcaagggataaaggaatattctatttggggtttacttttctgcagccctgtatatcttaatggcacacgcagcccaactaggccttcaagatgccacatcccctatcatagaattttattttatcatatatatatatatttaatacaatc

SEQ ID NO: 633027 - DNA, 380 bp, Homo sapiens
ggttacgataatccaggtaagtttatcagctcagattgtgaatcctgagcaaattctacagaacacaatgtggctcccaggatgaatgagggagggtgagatagagcagaagtttccctctccagctgggctttctgctgccttaggaattggaagttgattgagttagcactggctccaatctgatcaattyaacgtgatcatatctgatctaattatccttccaacattcaagggataaaggaatattctatttggggtttacttttctgcagccctgtatatcttaatggcacacgcagcccaactaggccttcaagatgccacatcccctatcatagaattttattttatcatatatatatatatttaatacaatc

SEQ ID NO: 633028 - DNA, 613 bp, Homo sapiens
tatctaactgttcttagttcatttgaactaaaccaatgaatttgtcaacagaacaagccttaccagtggcttcagaggaagaacagcaaaggcgtgaaagaagtgaaaagaagcaaccacaggtatatgaaaatttaagtttcttgtttaatattaggttttttttttttgctttagtaacaaagtgtagtccaaatgacatgaccttttagactatacctttagaatccaataggtcataattttatatttaatttttaaaacattttaaccagttatgaaacttaagatattcttactatctctagtaactattcgttattctagtaattcttactatctctagtaactcttagctgtttttacccttggaattgaggcaagaatttttcacaattatctkgctcttttatttgtataaccttactcataatacagaaggtaacatgaaatattgggtcatattactaaggaatagaaattatgaacaatttaataaagatggccactgagttaaactagtgttaaaagagtcatcattgccagtggttcaaatgttgcagttttatattgctggtcaccagtgccgagtttaaagatttattctctttca

SEQ ID NO: 633029 - DNA, 380 bp, Homo sapiens
catttagaggattgaattacatttatttaatgatagaatggtaatacaatgggagggaagcaatgactgcgacaagccacaaaaacacgtctagccttgagagttgcaatgratattcccagccaaatgagtctgtttaatgtgttttcatgcatgcaagtttatctgcttagctcaaactgtttgaacttatagtcccatcatggttatttccaatattttgaaaacaaatatatacttccacatattttaaaaaatcaccactctccaatatttctgttgaatcagaccttacattatgttgtttaataaagtatggtaagttttggcatgtatgatttttatcatgtaagaagcataatttcttagccaaaaattta

SEQ ID NO: 633030 - DNA, 380 bp, Homo sapiens
catttagaggattgaattacatttatttaatgatagaatggtaatacaatgggagggaagcaatgactgcgacaagccacaaaaacacgtctagccttgagagttgcaatggatattcccagccaaatgagtctgtttaatgtgttttcatgcatgcaagtttatctgcttagctcaaactgtttgaayttatagtcccatcatggttatttccaatattttgaaaacaaatatatacttccacatattttaaaaaatcaccactctccaatatttctgttgaatcagaccttacattatgttgtttaataaagtatggtaagttttggcatgtatgatttttatcatgtaagaagcataatttcttagccaaaaattta

SEQ ID NO: 633031 - DNA, 438 bp, Homo sapiens
tttctgtattcatttagaggattgaattacatttatttaatgatagaatggtaatacaatgggagggaagcaatgactgcgacaagccacaaaaacacgtctagccttgagagttgcaatggatattcccagccaaatgagtctgtttaatgtgttttcatgcatgcaagtttatctgcttagctcaaactgtttgaacttatagtcccatcatggttatttccaatattttgaaaacaaatatatacttccacatattttaaaaaatcaccactctccaatatttctgttgaatcagaccttacattatgttgtttaataaagtatggtaagttttggcatgtatgatttttatcatgtaagaagcataatttcttagccaaaaatttagcctttgactctttagtagaaaattsagttctgtacattgtgttctaa

SEQ ID NO: 633032 - DNA, 609 bp, Homo sapiens
gggaagacaatttttccatggacaggatcaggtgttgttgcggagatggtttcgggataaaactgttccacctcagatgatcaggcattacagtctcataaggagtgtgcaacctagatccctcacatgagcagttcacaatagggtttgctgcttctgtgagaatctaatgccactgctgatctgaaaggaggcagagcccaggcagcaatgctcgctctccaaccactcacctcctgctgtgyggccagtttcctaacaggccatggacaggtactggtctgcagcctgggggttgaggacttctgcacataggagcctgaagtcatgtactgatacaaaaaattaataggggagaagctgtataattcaatgcaaattaacatgtacatgtacattatatatattctaagaatacatattttatcaatttactgctgtagagactccaaactgcacaatatttacagaaaaaaatagacatttatcaaatagtccctttcacacaaaaatgtaccatgttcatatgatccagagataaattttactaataaacaaatgctaactaaattattcaagagttttaaagaataatttttaggaagacta

SEQ ID NO: 633033 - DNA, 603 bp, Homo sapiens
cttgctctgtcacctaggctggagtagagtggcatggtcatacctcactgcagcctcaaacacctgggcttgagcaatcctcccatctcagtctcccgagtagctaggatcacaggtgtgtgcaaccacacccatctattcatgtctccaacctttaagagctttcaatattaaatatttgggctcaagtgaagttaagttttggagagtaaatctctcttgtgcaaaacagaaaacaacagtggtgttcctatagatgaaagagggagaggacagcattgcccactgctcccaggtatcaagggctgagttcccttcctgtgagttcagctcaccctattccgacttgctgggaagtggacacagatgaaggatccargttgttggccatttggaagtgaaggggtgctgatatctcaacgcttcatttcatttttctccaactctttctctgcttatatacgagttgagtgatgttgctctgctgtgtaaaccatcagtttccaaccaccttctccatcaaaccttatgcactcaagtttatacatagtgtgtgctcctggagtctccaaatcaaatgaagtagttccttttggctacaaa

SEQ ID NO: 633034 - DNA, 543 bp, Homo sapiens
atacctgtaatcctaacactttgggaggtcaagtggaaagactgcttgaactcaggatttggagaccagcctgagcaatatagtgagaccctgtctcaaaaaaaaaaaattatttaggtggagcatgatgacgtgtgcctatagtttcagctactctgaaggcagaggcaggaggatcacttaagcacagaaagttsaggctacagtgagttgaggctacagtgagtcatgatcacaccactgcactgcagccttgatggcagagtgaaactgtctcaaaacaaaaacaaagacaaaaataaatgacagaaccttgcgctgtcctgaaaaaggaacttgaacaatatactcagaattgggaaatctgggttcccttgagggctaagattactacatattttatattttctgttagatatttgatgtattttggatctcttatgacagtcagttgctaaataataattatttagaaagaacacccatcaagaagctctgaatttaaaagtaaaaataaagtcctaactgaaagacagacaagaa

SEQ ID NO: 633035 - DNA, 543 bp, Homo sapiens
atacctgtaatcctaacactttgggaggtcaagtggaaagactgcttgaactcaggatttggagaccagcctgagcaatatagtgagaccctgtctcaaaaaaaaaaaattatttaggtggagcatgatgacgtgtgcctatagtttcagctactctgaaggcagaggcaggaggatcacttaagcacagaaagttcaggctacagtgagttgaggctacagtgagtcatgatcacaccactgcactgcagccttgatggcagagtgaaactgtctcaaaacaaaaacaaagacaaaaataaatgacagaaccttgcgctgtcctgaaaaaggaacttgaacaatatactcagaattgggaaatctgggttyccttgagggctaagattactacatattttatattttctgttagatatttgatgtattttggatctcttatgacagtcagttgctaaataataattatttagaaagaacacccatcaagaagctctgaatttaaaagtaaaaataaagtcctaactgaaagacagacaagaa

SEQ ID NO: 633036 - DNA, 429 bp, Homo sapiens
ggctttgaagttttttgtactcccatgttcacagtagcattatttataatagccaaaaggtggaaaccgaaaaatccattggcagataaatttagataaatagaatgttggtatatacatacaatggartatcattcagccttaaagaggaagagaatctgacatgctacaacatggatgaatactatttcagccataaagaaataatgaaatcctgtctttcaaggcaccgtgaatggaactggaggacattatgctaagtaaaataagcccatgtcaaaaaggcaaatactgtatgattccacttatgtgaggtatacaaattcagacagacagaaagtagaaggatggttgcaggagttgcgggtagggaagaatggagagctgttgaatagatacagaatttgttttgcacaatgaaaaggtttt

SEQ ID NO: 633037 - DNA, 350 bp, Homo sapiens
acatcaaaacttatacgcccttaaatattaaaaaataatacaaatgtaagcaatattttaaatayaatatttaattgttagatacattaggtatattatattacttataacattccattatataaaaattcatttgtctatttattcagattaaacaactattaaggctgaatgtctcatgcctgtaaccccagcactatgagaggctgaggcgggcagaacacttgagcccaacagttaaagaccagcctcggcaacaaggcaaaaccctgtctctacaaaactcagccgagcatggtgacacaggtctatggtgacatacctctattgtttcaactacttggatggct

SEQ ID NO: 633038 - DNA, 242 bp, Homo sapiens
ataaaaattcatttgtctatttattcagattaaacaactattaaggctgaatgtctcatgcctgtaaccccagcactatgagaggctgaggcgggcagaacacttgagcccaacagttaaagaccagcctsggcaacaaggcaaaaccctgtctctacaaaactcagccgagcatggtgacacaggtctatggtgacatacctctattgtttcaactacttggatggctgaagtgtgaggat

SEQ ID NO: 633039 - DNA, 242 bp, Homo sapiens
ataaaaattcatttgtctatttattcagattaaacaactattaaggctgaatgtctcatgcctgtaaccccagcactatgagaggctgaggcgggcagaacacttgagcccaacagttaaagaccagcctcggcaacaaggcaaaaccctgtctctacaaaactcagccgagcatggtgacacaggtctatggtgacatasctctattgtttcaactacttggatggctgaagtgtgaggat

SEQ ID NO: 633040 - DNA, 350 bp, Homo sapiens
acatcaaaacttatacgcccttaaatattaaaaaataatacaaatgtaagcaatattttaaatataatatttaattgttagatacattaggtatattatattacttataacattccattatataaaaattcatttgtctatttattcagattaaacaactattaaggctgaatgtctcatgcctgtaaccccagcactatgagaggctgaggcgggcagaacacttgagcccaacagttaaagaccagcctcggcaacaaggcaaaaccctgtctctacaaaactcagccgagcatggtgacacaggtctatggtgacatacctctaytgtttcaactacttggatggct

SEQ ID NO: 633041 - DNA, 435 bp, Homo sapiens
taatcacttccttcaggaagcctcacctcccctctacttcccaccaacctagcctccctgctacttcccaccaacctagcctcccccgacctgcctggagtaacagcccctcctcaatacttatctctaccaacattcaaaaaataaatgtaaaaaatacttcttccttatttgcttggtgatgggcacataaaagtaatgaagaaatacttgtgatttaatctccaactagtatatttgctctgtgaggaaagcattataactsatcttttagctctagtagcatgcaagtacatagtagctgcccaataaaagcatttcttacaccaatacttattatgtatattatacatacagccagctcctaacatctcctcagaaatcaaaatattaacattcaaattaatttgtatattaatagaaagtgactggttt

SEQ ID NO: 633042 - DNA, 644 bp, Homo sapiens
cctatatgccaatgctcttagtcttccatgggaaacttgtgaatgacgtcatgagacatgtgaatgatgacatgtgaatgagacatgtgaatgatgcctacctaacgtagaagggactctcatgtcagagacagcaataatcaaccacagtggggaaaaaaaaggttaatttgaatttaattacatcaataatactttctcaatcatgaatactgtgattacaaaaataagtgaacattgaatataattatgcctctccatcaatgtcgtcmctctttttaaacatacaatttaattatctaattgagtttgaattatttgttataataaacacactgattcagagtaatttacggaagtgctagcaccttagttctttctaaagtgacacttctaatttttatttaatcttcattttgatgtttcaaaaatcattacacatatgggatttctatccagtattgattttctaatgttgagtaaggtgtgagcaccagtttagggttttagcacattctttacacttgcagggtttctacctggtatgaattatttgatgttgagtaagggttgagcgtctgttaaaagctttgccacattctttacatttgaaaggtttctctccagtatgaattctctgatgt

SEQ ID NO: 633043 - DNA, 646 bp, Homo sapiens
cacatatgcattatctgtatcttttctgagattctactaactttatggtgaaatcaacaataaaaggttttcattttgataaattggttttcaaaagagaaagatgttacaagaccctttcaacttgtcttgcaagtgaaggctatatctgaggctgccaagaaaagttattgacaaaggcatggcaaaatgttaatgtggttttgttgaccactgtgtttrcagcacagtggagaaacagcgtggttttctgtccttgctgagttttatgcattttaaggaatcatatttgttcattccacattgcagaatgtttcttgcattttcatttcctaatgcagactaaatatcttatgtggtttgcaataattctctccttttaaaggtatttctggagtaactgcctggtctgtaacatgtttgatggatacctaacccttaaatattacaaaattttatgcacaatcactacttgattttgatggacataaaaacacgtttttaagttacagtagcaagatattatcgttgcctgtgttaactcattactgatactcggtttataatcatagccaccctttgtgaaaaggttagcttgttacattatggttatgctgagggaagaacaggctatcctggatgcttg

SEQ ID NO: 633044 - DNA, 556 bp, Homo sapiens
  misc_feature 29, 30: n = A,T,C or G
attttctttaatggtggcagttttaaccnnccaagaatcattacttcttaaaatgcaactcaaattagcatgaaacatttgcagtttaaggaaaggcttatggcatcagaatacttatttataggattcattattttgtgtttttttgagatagggtctttgtctgtcatccaggcagaagggcagtgatgtggtcataattcactgcaaccctgaactctggtacaagctatccttttgcctcagtctcctaaatagctgggtcttcagacatgagccaccrtgcctggctaatttaaaaaaaattttttttgtagagatggggcctcactatgttgctctggctgatctcaaattcctggcctcaagtaatctttctgccacagctttttaaagtgctaggattacaggcatgagccaccatgcctagtatagagtgttatattattttcaaagtcttattcctagagccatttattgactttggcttaaataactcaatgtgatatttctgaaactttttttgacatattatggggaatgataatgagggaag

SEQ ID NO: 633045 - DNA, 586 bp, Homo sapiens
gaatcactggctcaaaatgaaagacaacaaacatatcataacttagagttataattgttttaaagtatattcatttgttttagaaacaagcacaatatgaaaaacaattagagcagttaaacaaggtataatacggcttcactaaatatgaaggaactcacacttaaagatgtggaatgtaaattctccaaaatgaaaactacttatgaagaggttacaaccaaattagaagaatataaagaagcctttgcagcagcattgaacgctaacaattccatgtcaaaaaaattaacgaagtaagtccaaacatacactcatagaaaatgaattcagctcattaatttgttttgaaagcataatttttagtgagatggcttcagaatattagtaggaagtgaatgctaatttgacaatgtaatttggggaaaataatgttagtaagtaatcttacctttaaaatgttagtcaaggatagtttctgtctctcctctcatttttttttttttttttgcttttgtatggctttttycccctgaaaagtctcttgtagttaatctgttagttttttttactaagtatttttgaa

SEQ ID NO: 633046 - DNA, 592 bp, Homo sapiens
acatcaaaaacaataccataagggaaaaatttatagctataaatgataaaaaataagataccgaataaacaactttactcctaaggaactagaaacagagggaaaaagagggactactaaaagagggacaactaaaagctagcaaaattttaaaaatgataaagacagcagtggaaataagtgaaatagagaagagaaaaacaatatgaaaaatcaacaaaaccaagtttgttctctgaaaaagatcaaaactgacaaaattttatctagattgactaaggaaaaaaagggaatactcaaattactaaactcaaaaataaaatgggtacattactaacaaatttttggagtaaaaaaaggatgtatgagagtaccataaggaactatacastaaaaaattgaataacctaaataaaatgaacaaattcctagaaacaaaaaacctactaagactgaatcagaaaagttgaataaacctattcagcaaggagattcaccaagaagatgacatcagtaatcaaaaacccagcaacaaagaaaagcctggacaagatggcttcactgttgaaatctacccaacgtttaaagcaga

SEQ ID NO: 633047 - DNA, 536 bp, Homo sapiens
taaggaaaaaaagggaatactcaaattactaaactcaaaaataaaatgggtacattactaacaaatttttggagtaaaaaaaggatgtatgagagtaccataaggaactatacactaaaaaattgaataacctaaataaaatgaacaaattcctagaaacaaaaaacctactaagactgaatcagaaaagttgaataaacctattcagcaaggagattcaccaagaagatgacatcagtaatcaaaaacccagcaacaaagaaaagcctggacaagatggcttcactgttgaaatctacccaacgtttaaagcagaattaacaccagtttttctcaaactttttcaaaacgttgaagaggaggtaacattttctaacatattctaygcagacagtattaccccgacaccaagtcagacaaaggcaccataagaaaactacaaacaaacatcccttacaaatgctgatgcaaaaatcctcaacaaaataccagcaattcaaatttagcagtacattaaaaggattatacactatgaa

SEQ ID NO: 633048 - DNA, 536 bp, Homo sapiens
taaggaaaaaaagggaatactcaaattactaaactcaaaaataaaatgggtacattactaacaaatttttggagtaaaaaaaggatgtatgagagtaccataaggaactatacactaaaaaattgaataacctaaataaaatgaacaaattcctagaaacaaaaaacctactaagactgaatcagaaaagttgaataaacctattcagcaaggagattcaccaagaagatgacatcagtaatcaaaaacccagcaacaaagaaaagcctggacaagatggcttcactgttgaaatctacccaacgtttaaagcagaattaacaccagtttttctcaaactttttcaaaacgttgaagaggaggtaacattttctaacatattctatgcrgacagtattaccccgacaccaagtcagacaaaggcaccataagaaaactacaaacaaacatcccttacaaatgctgatgcaaaaatcctcaacaaaataccagcaattcaaatttagcagtacattaaaaggattatacactatgaa

SEQ ID NO: 633049 - DNA, 581 bp, Homo sapiens
ctccagcctgggcaatagagcaagactctgtctcaaaacgataatgataataattaataaataaaaatctcattgtgttccagacaaaatttcttttgcatatcaactgtgtcaacttgcatattaactataatcatttgttactttatatccaatcttgagaaatctttgaggactaatttcactcttttctgccattatggtaaacataccaaatgccatcaaataaaatgcacaaaattcytgagaaatacattttctccttgaggagtagacttgctgtgttagaggaactcatggttatcaagcttctagtttaataaacatgactagaattctctatcttaatatgagtagctaggtactcacaaggcatctagaaggttaatacctatagtctgaaaatagccacatttttttactggccacaaattacaactgcagaatatttatggccatacaagacatcttccaccaagcctgaaaaatgtataaatgtcctaggagtgcagcattttttcttaaagataatattaatgagctagcttaggtcaacgggttaattgtcattgttaaaacga

SEQ ID NO: 633050 - DNA, 581 bp, Homo sapiens
ctccagcctgggcaatagagcaagactctgtctcaaaacgataatgataataattaataaataaaaatctcattgtgttccagacaaaatttcttttgcatatcaactgtgtcaacttgcatattaactataatcatttgttactttatatccaatcttgagaaatctttgaggactaatttcactcttttctgccattatggtaaacataccaaatgccatcaaataaaatgcacaaaattcctgagaaatacattttctccttgaggagtagacttgctgtgttagaggaactcatggttatcaagcttctagtttaataaacatgactagaattctctatcttaatatgagtagctaggtactcacaaggcatctagaaggttaatacctatagtctgaaaatagccacatttttttactggccacaaattacaactgcagaatatttatggccatacaagacatcttccaccaagcytgaaaaatgtataaatgtcctaggagtgcagcattttttcttaaagataatattaatgagctagcttaggtcaacgggttaattgtcattgttaaaacga

SEQ ID NO: 633051 - DNA, 556 bp, Homo sapiens
tcaatcttaaaaactaacaaaattagaggactaacacctcctggtttcaaacttactgcaatgcttcagtacccaaaacaatgctgtaccaccatagagacagacataaagaccaatgcaatagaaataaagaaccaaaaaacacagtcatgatttttaacaagggagtcaaaactatggggaaaggacagtatatttttaaacggtgttaagaatgaatatttacatggaaaacaatacagttggagccttattttacaccatataaaaaacttaatttaaaatggactaaacatctaattgtaagagctaaaactataaaacccttagaagaaacataggaaaaatgtttcataacatagaatctggcaataatttcttggatatgacagtgaaagcacagacaacaacaacaccaaaaatacataaaaagaacttcatcaaagtgacaagctgttatgtatctgaagayacaatcaatagattgaaaatggaataggaacagctctggtctacagctcccagcgtgagcgatgcagaagacgggtgatttctg

SEQ ID NO: 633052 - DNA, 389 bp, Homo sapiens
attgcatttcagtccagggcccctcaggctgaatgatggtaataaattactaatgccaagtaccaatcacaggagtataactcagcactttcatgattcttttcaccctagaagggattctttgtttctgttaatgtctcatttgtttataggggtaaatcttttcaagacactaaaacaggtgactcagccctgtgagctctgtgcctgacatgacccaaacggccagcaattttctccttctccagttaaacctgtccaamattgaggaacctatccaggtgagaactggcaactctaatgtactccgatacctttctgcaggagattcaaatatttgctaatgcttactgataccttcactggttagatcgaggcattccccaccc

SEQ ID NO: 633053 - DNA, 389 bp, Homo sapiens
attgcatttcagtccagggcccctcaggctgaatgatggtaataaattactaatgccaagtaccaatcacaggagtataactcagcactttcatgattcttttcaccctagaagggattctttgtttctgttaatgtctcatttgtttataggggtaaatcttttcaagacactaaaacaggtgactcagccctgtgagctctgtgcctgacatgacccaaacggccagcaattttctccttctccagttaaacctgtccaaaattgaggaacctatccaggtgagaactggcaactctaatktactccgatacctttctgcaggagattcaaatatttgctaatgcttactgataccttcactggttagatcgaggcattccccaccc

SEQ ID NO: 633054 - DNA, 389 bp, Homo sapiens
attgcatttcagtccagggcccctcaggctgaatgatggtaataaattactaatgccaagtaccaatcacaggagtataactcagcactttcatgattcttttcaccctagaagggattctttgtttctgttaatgtctcatttgtttataggggtaaatcttttcaagacactaaaacaggtgactcagccctgtgagctctgtgcctgacatgacccaaacggccagcaattttctccttctccagttaaacctgtccaaaattgaggaacctatccaggtgagaactggcaactctaatgtactccgatrcctttctgcaggagattcaaatatttgctaatgcttactgataccttcactggttagatcgaggcattccccaccc

SEQ ID NO: 633055 - DNA, 279 bp, Homo sapiens
taatgttgggagaaggaagttgtggacaatccatgaatatcccaacatctgttgtaggaaggttaagattactttttttttttttgctgtactkaactgaatactcttatttataatgtcagacaaatgtaatgttgtatataaatagaactaggaaaatgtgccatttgtcttagtatttaatcaagatggaagtctgggcctacctcctctcttttattaatatgtagacaggacaccaacacaaattagaatgaagacaaacaaaatgttagcaaa

SEQ ID NO: 633056 - DNA, 279 bp, Homo sapiens
taatgttgggagaaggaagttgtggacaatccatgaatatcccaacatctgttgtaggaaggttaagattactttttttttttttgctgtactgaactgaatactcwtatttataatgtcagacaaatgtaatgttgtatataaatagaactaggaaaatgtgccatttgtcttagtatttaatcaagatggaagtctgggcctacctcctctcttttattaatatgtagacaggacaccaacacaaattagaatgaagacaaacaaaatgttagcaaa

SEQ ID NO: 633057 - DNA, 279 bp, Homo sapiens
taatgttgggagaaggaagttgtggacaatccatgaatatcccaacatctgttgtaggaaggttaagattactttttttttttttgctgtactgaactgaatactcttatttataatgtcagacaaatgtaatgttgyatataaatagaactaggaaaatgtgccatttgtcttagtatttaatcaagatggaagtctgggcctacctcctctcttttattaatatgtagacaggacaccaacacaaattagaatgaagacaaacaaaatgttagcaaa

SEQ ID NO: 633058 - DNA, 279 bp, Homo sapiens
taatgttgggagaaggaagttgtggacaatccatgaatatcccaacatctgttgtaggaaggttaagattactttttttttttttgctgtactgaactgaatactcttatttataatgtcagacaaatgtaatgttgtatataaatagaactaggaaaatgtgccatttgtcttagtatttaatcaagatggaagtctgggcctacctcctctcttttattaatatgtagacaggacaccaacacaaattwgaatgaagacaaacaaaatgttagcaaa

SEQ ID NO: 633059 - DNA, 602 bp, Homo sapiens
acataaatttctgatattgaaactgtcacaaatgtttaagttggtagtggaagacaaaggacatataatcttgggagtcctaaggccctgcccactgccagtccctccacactactacagctgatgctttctggaaatcaccacctcctggcaggagcccaaccagcacaaatatagagcattaaaccaccaaagctaaggaggctcacagagtctattgcacccttcaccacctccactggaacaggcgctggtatccatggctcagagacccaaagatggttcacatcacagggctctatgcagacaacccccagtascagcccaaagccacgtagacctgctgggtggctagacccagaagagagacaacaatcaatgcactttggcttacaggaagccatgcccataggaaaaaggggagagtactacgtcaagggaacaccccgtgggatgaaagagtctgaacaacagtcttcagccctagacctttcctctgacagagtctaccaaaatgagaaggaaccagaaaaccaaccctggtaatctgacaaaacaagaatcttcaacaccccccaaaaaatcacaccagttcatcacca

SEQ ID NO: 633060 - DNA, 602 bp, Homo sapiens
acataaatttctgatattgaaactgtcacaaatgtttaagttggtagtggaagacaaaggacatataatcttgggagtcctaaggccctgcccactgccagtccctccacactactacagctgatgctttctggaaatcaccacctcctggcaggagcccaaccagcacaaatatagagcattaaaccaccaaagctaaggaggctcacagagtctattgcacccttcaccacctccactggaacaggcgctggtatccatggctcagagacccaaagatggttcacatcacagggctctatgcagacaacccccagtaccagcccaaagccacgtagacctgctrggtggctagacccagaagagagacaacaatcaatgcactttggcttacaggaagccatgcccataggaaaaaggggagagtactacgtcaagggaacaccccgtgggatgaaagagtctgaacaacagtcttcagccctagacctttcctctgacagagtctaccaaaatgagaaggaaccagaaaaccaaccctggtaatctgacaaaacaagaatcttcaacaccccccaaaaaatcacaccagttcatcacca

SEQ ID NO: 633061 - DNA, 578 bp, Homo sapiens
ctgtcaaattaacagcagatttcacagcaggaaccttacaagctagatgggattggggccctttcttcagcctcctcaaacaaaacaattatcagccaagaattttgtatccagcaaaactaaacatcatatatgaaggaaasatacagtcattttcagacaaacaaatgctgacagaatttgccattaccaagccaggactctaagaactgctaaaaggagctctaaatcatgaaacaaatcctggaaacacatcaaaacagaacttcattaacgcataaatcacacaggacctataaaacaaaaatacaagttaaaaaacaaaaacaaagtacagaggcaacaaagagcatgatgaaagcaatggtacctcactttttaatactaatgttggttgtaaatggcttaaatgctccacttacaagatacagaaccacagaatggataacaactcaccaactaactatctgctgccttcaggagactcacctaacacataacgacttacataaacttaaggaaagtggtagaaaaaggcatttcatgcaaatggacaccaaaagcaagcagcagtaact

SEQ ID NO: 633062 - DNA, 604 bp, Homo sapiens
ctcactttttaatactaatgttggttgtaaatggcttaaatgctccacttacaagatacagaaccacagaatggataacaactcaccaactaactatctgctgccttcaggagactcacctaacacataacgacttacataaacttaaggaaagtggtagmaaaaggcatttcatgcaaatggacaccaaaagcaagcagcagtaactattctcatatgagacaaaacaaactttaaagcaacagtagctaaaagagacaaagagagacagtatatcatctgtcacctgacagtctcatccaacagaaaaatatgacaatcctaaacatatgtgaacctaacactggagctcccaaatttataaaacaattactagtagacataagaaataagatagacagcaacacaataatagtgggggacttcaatactccactgacagcactagacaggtcatcaagacagaaagtcaacaaagaaacaatggatttaaactatactttggaacaaatggacttaacagatatatatagaacatttcatccaacaaccacagaatacacattctattcaacagcacatggaattttctccaagatagacc

SEQ ID NO: 633063 - DNA, 604 bp, Homo sapiens
ctcactttttaatactaatgttggttgtaaatggcttaaatgctccacttacaagatacagaaccacagaatggataacaactcaccaactaactatctgctgccttcaggagactcacctaacacataacgacttacataaacttaaggaaagtggtagaaaaaggcatttcatgcaaatggacaccaaaagcaagcagcagtaactattctcatatgagacaaaacaaactttaaagcaacagtagctaaaagagacaaagagagacagtatatcatctgtcayctgacagtctcatccaacagaaaaatatgacaatcctaaacatatgtgaacctaacactggagctcccaaatttataaaacaattactagtagacataagaaataagatagacagcaacacaataatagtgggggacttcaatactccactgacagcactagacaggtcatcaagacagaaagtcaacaaagaaacaatggatttaaactatactttggaacaaatggacttaacagatatatatagaacatttcatccaacaaccacagaatacacattctattcaacagcacatggaattttctccaagatagacc

SEQ ID NO: 633064 - DNA, 558 bp, Homo sapiens
aagatcaagtgggtttcataccagtgatacaggaatggtttaacatatgcaagtcaataaatgtgatacaccaaataaacagaatttaaaaaaaactcacatgattatatcaacagatgcagaaaaagcattcaacaaaatctwgcattgctttatgattaaagctctcagcaaaataggcatacaagggacataccttaatgtaataaaagccatctatgacaaacccacagccaacataatactgaatggggaaaaggtgaaagcattccctttgagaattggaacaagacgaggagactactctcaccactcctcttcaacatagtactggaagtcctagccagagcaatcatacaaaggaaggaaatagaggaaatccaaatcggtaaagaggaagtcaaactgtcactgcttgctgacaatatgatctttcaccttgaaaaccctacagactcctctagaaagctcctagaactgataaaagaattcagcaaagtttccagatacaagataaatgtacacaaatcagtaactcttctatacatcaacagctac

SEQ ID NO: 633065 - DNA, 558 bp, Homo sapiens
aagatcaagtgggtttcataccagtgatacaggaatggtttaacatatgcaagtcaataaatgtgatacaccaaataaacagaatttaaaaaaaactcacatgattatatcaacagatgcagaaaaagcattcaacaaaatctagcattgctttatgattaaagctctcagcaaaataggcatacaagggacataccttaatgtaataaaagccatctatgacaaacccacagccaacataatactgaatggggaaaaggtgaaagcattccctttgagaattggaacaagacgaggagactactctcaccactcctcttcaacatagtactggaagtcctagccagagcaatcakacaaaggaaggaaatagaggaaatccaaatcggtaaagaggaagtcaaactgtcactgcttgctgacaatatgatctttcaccttgaaaaccctacagactcctctagaaagctcctagaactgataaaagaattcagcaaagtttccagatacaagataaatgtacacaaatcagtaactcttctatacatcaacagctac

SEQ ID NO: 633066 - DNA, 560 bp, Homo sapiens
taaaatgctgaattgtataataaattaattatatctcaattaagatgctaaagaaagcaaaacaaaacaatactactcatccaaatgtgaacatcccttacccaaaaaagactgcagtcttaccttttaagggcatctttgagttcaggcacagaacgaatacactgaactgtggcattcatgtaacaagtgttaccaaggtttgtcaatccacatggtaactccatctagttggaaaaaaaaaaaaaaaaggattaaatcattaaaccatttttacaaaatgacatggcatatataaatcactaaaattctcattttgaatcaagtaccatttactagcttctaccaatttatattctgccttcacgctaaagaaacagttttatttcccccmaaaaaaagtttacttggatcatgctggccatcatattatgttttagtttccttcttaaatataataagagaataatcatactagtcttgccttttttgcaggtttatcaagagaagagaataggcaaaatatgcaaagaaacacttcaaaacaaaaagcaaaataa

SEQ ID NO: 633067 - DNA, 542 bp, Homo sapiens
tcctggggtacaggggtccaggccaaacccaatccacgcatggttggtgaaaccagcacgtatccaagggcctttcccccacctgggccatgtgcccactgcatagataggcctgtgcttgctcccctaggacagagactcccttttcttccattggaatgaggagtggggagatttratggtgtcctgtacaggttgggtgttaatctgatgtggtgctcttggagaagcttgcttgagttcggcgctttctcagcacgtggtgtgtgctgccccttcaagctgcaggagtcccagaaagtaagtgctgctgcaacccccatttactggtgaacagaggtcaggtgatctgcagccaaccaagcagctgctaagtggccaacaggctggatctgcatctaacttgcagaggccctgcctggatgctggggctgtcctgagactccctcctcctcctcctcttccctccacagctctcctggcttctatccaaagctgtgttccaggtggggaacacctatggatgcaccagggtgcaacta

SEQ ID NO: 633068 - DNA, 542 bp, Homo sapiens
tcctggggtacaggggtccaggccaaacccaatccacgcatggttggtgaaaccagcacgtatccaagggcctttcccccacctgggccatgtgcccactgcatagataggcctgtgcttgctcccctaggacagagactcccttttcttccattggaatgaggagtggggagatttaatggtgtcctgtacaggttgggtgttaatctgatgtggtgctcttggagaagcttgcttgagttcggcgctttctcagcacgtggtgtgtgctgccccttcaagctgcaggagtcccagaargtaagtgctgctgcaacccccatttactggtgaacagaggtcaggtgatctgcagccaaccaagcagctgctaagtggccaacaggctggatctgcatctaacttgcagaggccctgcctggatgctggggctgtcctgagactccctcctcctcctcctcttccctccacagctctcctggcttctatccaaagctgtgttccaggtggggaacacctatggatgcaccagggtgcaacta

SEQ ID NO: 633069 - DNA, 547 bp, Homo sapiens
ggtgtgggcaggttccagtggttgctgcagctgaaccttcctaaccaggtccatgcgagaccatctcagatgggtgtgcacctgggttgggcaaggacacccctcagacagtgagagccactgaggagggctgtcacagaggccccttttcctgctcttagaacaggttgggcgagtatgggggagtgtgggggagtatgggggagtatgggggacctctcccacctcccagctgcttccaggagccacttctttcgagatgagactctcctgccygcctgttcccatttggctgcaatagaccattgacaacattcagagaacaagaaggggcctcacctgttttccctgacacgtaggaggcagatgggcattcccaggggacctggggtagagcctgttcatctgcccacccccaggctatgctggcttcatcttatctgtgcgatagggctgggggtgggggtgggaattaccaggagaccatcacacaggccgtggacaagttctacaagagccagggagaagaacactgtccgtgcatgcg

SEQ ID NO: 633070 - DNA, 548 bp, Homo sapiens
cagcacgagtccctacataaaagcagatgttttgagatcagttatatttcttctgacaaaaattgaagacagaaacgaaagtttagcctgagactacaattaattgggcaataagccagaggcacatatggcatagrcagatttaaacatttctcccttatattaatacaaatactaaaattacaaatactttgattccaaataaaacaaatatttaaaaaatttaatgaataaatactggggtctacagtagtatttgaaggagatctcacaaacaggtttggtttttgaaggttagaactagtggtctggagaattcatttcattccgagacagaaagagaggaatttcttgggttccttcaggaatgcgtctagttttgcctcatctttgtttgaactatagatacagcagaagaaaacgtgaggatttcacagatttaaggtgcaaaaagtcactgggttctctaagaagtctgggattcttctgctggaaaaataagtttgttgagaaaaaatgagttggaggaggctgttattgaagtgaag

SEQ ID NO: 633071 - DNA, 548 bp, Homo sapiens
cagcacgagtccctacataaaagcagatgttttgagatcagttatatttcttctgacaaaaattgaagacagaaacgaaagtttagcctgagactacaattaattgggcaataagccagaggcacatatggcatagacagatttaaacatttctcccttatattaatacaaatactaaaattacaaatactttgattccaaataaaacaaatatttwaaaaatttaatgaataaatactggggtctacagtagtatttgaaggagatctcacaaacaggtttggtttttgaaggttagaactagtggtctggagaattcatttcattccgagacagaaagagaggaatttcttgggttccttcaggaatgcgtctagttttgcctcatctttgtttgaactatagatacagcagaagaaaacgtgaggatttcacagatttaaggtgcaaaaagtcactgggttctctaagaagtctgggattcttctgctggaaaaataagtttgttgagaaaaaatgagttggaggaggctgttattgaagtgaag

SEQ ID NO: 633072 - DNA, 608 bp, Homo sapiens
ttttgggtaatgttattatttgtataaatatcttccaatacttgcttaaacacattacacataaatatgcaaatattgcttagctatactaaaatgttattcattgctcatcccaattttaaactttactgtgttccttatattttctttcagtaaatctgacacattcattttaaaagtatcataggatttacaataacatagtacagatgtgaggaaaaaagaataaaataaaaatcyttagaggtcatatgggttggtaagagtataaaagaaaactgagtcccatatgatacattaaaaacataaatcaggatgtacatctcagctctcaccaggagacgtggcaaccagaatgtccttgggctgagggtgaagtccctgaccactctcagagacagacaatgcaaatcaagttcattctaactgtgcttgattaaccttcaaaattgtgtaagtccctaagcatatatataatcatgagtagttgtggggaaaataacaccattaaatgtaccaaaacaaaagaccgatcacaaacactgccgatgtttagatcagatgtgtgaagcaaagaaagagagtataataaaaaataatttaaagaa

SEQ ID NO: 633073 - DNA, 598 bp, Homo sapiens
acaatagggtgacaatggtcaataataacataattgtacattttaaaataacttaaagtgtaattagattgttcacaactcgaaaaataaatgcttgagaggatggatgtcccattctttgtgatgtgattatttaattttgtatgtctgtatcaaaacatctcatttatgttataaatatatacacctatgtacccacaaaaattaaaaattaaaaaattataagacagttgactcaatttgaattttgggtaatgttattatttgtataaatatcttccaatacttgcttaaacacattacacataaatatgcaaatattgcttagctatactaaaatgttattcattgctcatcccaattttaaactttactgtgttccttatattttctttcagtaaatctgacacattcattttaaaagtatcataggatttacaataacatagtacagatgtgaggaaaaaagaataaaataaaaatccttagakgtcatatgggttggtaagagtataaaagaaaactgagtcccatatgatacattaaaaacataaatcaggatgtacatctcagctctcaccaggagacgtggcaacca

SEQ ID NO: 633074 - DNA, 498 bp, Homo sapiens
gaaaggttgatataattcttttaaaagaacacttgcggtgtttgaagcgacaaaggctgctgtgacaaaaaagcagtgaaagggaattttttttwaaaaaagcaaacaacaacaacaaaaaccccacagaaaagcaaacaacaaacaaacaaaaaacagaggaagaagtcaaacaccctgggctatgactacttcaaggaaggggctacaagaggcagttggaaattccatttgctttgcaactgtgggttttccagcctgcttcctttctaaagtatattactctgcttttggttcatgaaattatcagtttctgttttctggaacagctatgtactttctttatctatcatctatctatctaccttcctatcatctatctatctgtttactatctgtcttttctaccttttgctatcaaaagcttgggtcaagcagtatagaattccagtgtatgttcactctaccatttaaaacaagaactcttgtaggaattct

SEQ ID NO: 633075 - DNA, 498 bp, Homo sapiens
gaaaggttgatataattcttttaaaagaacacttgcggtgtttgaagcgacaaaggctgctgtgacaaaaaagcagtgaaagggaattttttttaaaaaaagcaaacaacaacaacaaaaaccccacagaaaagcaaacaacaaacaaacaaaaaacagaggaagaagtcaaacaccctgggctatgactacttcaaggaaggggctacaagaggcagttggaaattccatttgctttgcaactgtgggttttccagcctgyttcctttctaaagtatattactctgcttttggttcatgaaattatcagtttctgttttctggaacagctatgtactttctttatctatcatctatctatctaccttcctatcatctatctatctgtttactatctgtcttttctaccttttgctatcaaaagcttgggtcaagcagtatagaattccagtgtatgttcactctaccatttaaaacaagaactcttgtaggaattct

SEQ ID NO: 633076 - DNA, 498 bp, Homo sapiens
gaaaggttgatataattcttttaaaagaacacttgcggtgtttgaagcgacaaaggctgctgtgacaaaaaagcagtgaaagggaattttttttaaaaaaagcaaacaacaacaacaaaaaccccacagaaaagcaaacaacaaacaaacaaaaaacagaggaagaagtcaaacaccctgggctatgactacttcaaggaaggggctacaagaggcagttggaaattccatttgctttgcaactgtgggttttccagcctgcttcctttctaaagtatattactctgcttttggttcatgaaattwtcagtttctgttttctggaacagctatgtactttctttatctatcatctatctatctaccttcctatcatctatctatctgtttactatctgtcttttctaccttttgctatcaaaagcttgggtcaagcagtatagaattccagtgtatgttcactctaccatttaaaacaagaactcttgtaggaattct

SEQ ID NO: 633077 - DNA, 608 bp, Homo sapiens
ttttgggtaatgttattatttgtataaatatcttccaatacttgcttaaacacattacacataaatatgcaaatattgcttagctatactaaaatgttattcattgctcatcccaattttaaactttactgtgttccttatattttctttcagtaaatctgacacattcattttaaaagtatcataggatttacaataacatagtacagatgtgaggaaaaaagaataaaataaaaatccttagaggtcatatgggttggtaagagtataaaagaaaactgagtcccatatgatacattaaaaacataaatcaggatgtacatctcagctctcaccaggagacgtggcaaccagaatgtccttgggctgagggtgaagtccctgaccactctcagagacagacaatgcaaatcaagttcattctmactgtgcttgattaaccttcaaaattgtgtaagtccctaagcatatatataatcatgagtagttgtggggaaaataacaccattaaatgtaccaaaacaaaagaccgatcacaaacactgccgatgtttagatcagatgtgtgaagcaaagaaagagagtataataaaaaataatttaaagaa

SEQ ID NO: 633078 - DNA, 507 bp, Homo sapiens
acaactctttaccacaatcaacacagcttcagccctgcttctatatccagcctcatctatttctgctcctcctccttattttcctyctggacatgctgatggattgtcagcttcccagatgtgtgagagtctctcctgccttcctaacattctcatgctctccctctgcctctcaagaacttcctgccccatctctcatgacaaatcccttcttcattctttaagatgaagcccctttgctccttccttaaggatgtctgtctggcttcattttgggggacgtgctccttctgcatctcccagagccagcctgtgtgtgtcagctacaacatttctttgcatctctgtgtcatatatcaccaaatctgcctaagcttgagtgagtcactacatgacaatttcagactccagaagcaatgtccccactaaccacgaggcttagacatttgtccagtatgctcggggttgtggggtggtagcagtaaccagctggtgagcatcatttct

SEQ ID NO: 633079 - DNA, 507 bp, Homo sapiens
acaactctttaccacaatcaacacagcttcagccctgcttctatatccagcctcatctatttctgctcctcctccttattttcctcctggmcatgctgatggattgtcagcttcccagatgtgtgagagtctctcctgccttcctaacattctcatgctctccctctgcctctcaagaacttcctgccccatctctcatgacaaatcccttcttcattctttaagatgaagcccctttgctccttccttaaggatgtctgtctggcttcattttgggggacgtgctccttctgcatctcccagagccagcctgtgtgtgtcagctacaacatttctttgcatctctgtgtcatatatcaccaaatctgcctaagcttgagtgagtcactacatgacaatttcagactccagaagcaatgtccccactaaccacgaggcttagacatttgtccagtatgctcggggttgtggggtggtagcagtaaccagctggtgagcatcatttct

SEQ ID NO: 633080 - DNA, 507 bp, Homo sapiens
acaactctttaccacaatcaacacagcttcagccctgcttctatatccagcctcatctatttctgctcctcctccttattttcctcctggacatgctgatggattgtcagcttcccagatgtgtgagagtctctcctsccttcctaacattctcatgctctccctctgcctctcaagaacttcctgccccatctctcatgacaaatcccttcttcattctttaagatgaagcccctttgctccttccttaaggatgtctgtctggcttcattttgggggacgtgctccttctgcatctcccagagccagcctgtgtgtgtcagctacaacatttctttgcatctctgtgtcatatatcaccaaatctgcctaagcttgagtgagtcactacatgacaatttcagactccagaagcaatgtccccactaaccacgaggcttagacatttgtccagtatgctcggggttgtggggtggtagcagtaaccagctggtgagcatcatttct

SEQ ID NO: 633081 - DNA, 507 bp, Homo sapiens
acaactctttaccacaatcaacacagcttcagccctgcttctatatccagcctcatctatttctgctcctcctccttattttcctcctggacatgctgatggattgtcagcttcccagatgtgtgagagtctctcctgccttcctaacattctcatgctctccctctgcctctcaagaacttcctgccccatctctcatgacaaatcccttctwcattctttaagatgaagcccctttgctccttccttaaggatgtctgtctggcttcattttgggggacgtgctccttctgcatctcccagagccagcctgtgtgtgtcagctacaacatttctttgcatctctgtgtcatatatcaccaaatctgcctaagcttgagtgagtcactacatgacaatttcagactccagaagcaatgtccccactaaccacgaggcttagacatttgtccagtatgctcggggttgtggggtggtagcagtaaccagctggtgagcatcatttct

SEQ ID NO: 633082 - DNA, 364 bp, Homo sapiens
gcctcccaaagtgctgggattacagaagtgagccaccgcgcccagccaacgtttcttttttaaagtgtgcaagctctttgaccatcatgtctctgtgcatcactgcrataagataaccagagcaactgtttccaccgtggagttgggaggagataaagacacatcctttgtgctttgggcgctcttatcaggatcagggaggcccctgccctctgattttctctctcttaaatgtacaaagtacagagatttttatcatgaataattttaagagaaattaaaaattctatattgttcaaggacatgcaggttttctattgatcatgtttcctcttgatattattaggccctggccagccgcaaa

SEQ ID NO: 633083 - DNA, 362 bp, Homo sapiens
gaaagttagattctacactcacagttatccaggcaaatgaaccacttaattcaatttaatagccaaaccatcctacatggtacaagaaaccaatttataggatcaacctacaagtgtcactttattcacartctttgaattatacactttatttctaagcatttatatttttcccttgaatctccaacatctcaaatactttatgggaaacagtatagcttgggagcaagtatcatatcttaattctcataagacaattcattaacattcggcaaaagaaaggagatatttaatctctttgtatgttagactttcaatatgtgaagtggaattaatgttattcttttcctacctcacaaaaa

SEQ ID NO: 633084 - DNA, 362 bp, Homo sapiens
gaaagttagattctacactcacagttatccaggcaaatgaaccacttaattcaatttaatagccaaaccatcctacatggtacaagaaaccaatttataggatcaacctacaagtgtcactttattcacagtctttgaattatacactttatttctaagcatttatatttttcccttgaatctccaacatctcaaatactttatgggaaacagtatagcttgggagcaagtatcatatcttaattctcataagacaattcattaacattyggcaaaagaaaggagatatttaatctctttgtatgttagactttcaatatgtgaagtggaattaatgttattcttttcctacctcacaaaaa

SEQ ID NO: 633085 - DNA, 573 bp, Homo sapiens
aagatggattaagaacttaaacctaatacctgagctataaaaattctagaaaataacactggataaacccttctagacattggcataggcaaggatttcatgaygaagaacccaaatgcaaatgcaataaaaacaaagataaatagttgggacttaattaaactaaagagcttttgcatggcaaagggaacagtcagcagagtaaacagacaacccacagagtgggagaaaatcttcataatctatacatctgacagaggactaatatccagaatccacaacaaactcaaacaaatcagtatgaaagaaaaaaacaaccccatcaaaaaatgggctaaggacatgaatggacagttctcaaaagaagatatgcaaatggccaacaaacataaataaaaatgcttaatatcactaatgatcagggaaatgcaaatcaaaaccacaatgcaataccaccttacctcctgcaacccaaaaataaaaaaacagtagatgttgccgtggatgcagtaaacagggaacacttctacactgctggagggaatgtaaactagtatgccactatcaaaaata

SEQ ID NO: 633086 - DNA, 531 bp, Homo sapiens
catccgtgcattcccctaggaagggggctgaatccagggagccaagtgacatcattctgaggccccactcccacagcacctcacaagtcccattggcttggaattccagctggccagcrgcagcaggctggagacagccggagatggaccgggttcccggggtagggcagccactctatctgtggtttgagttggccgctctagcctgctggcaccagggaccaggaggagtcccccataacacagcacagctgctgtgactgaccgtggccgggctgcttctttaagtgagaccgaaatccatccctcctcaccggacagggcctccccatcggaattttagcaactccagccagagttctatggacagaactctgatttctccctgggatgaagtccccagggagaggggtagctgctgtctccccagttcagccgactgagcctttccagcctgctggctctggagactcctgggagtcaccacagcacacctgctctgccgaagggcagccagactgcttctttaag

SEQ ID NO: 633087 - DNA, 531 bp, Homo sapiens
catccgtgcattcccctaggaagggggctgaatccagggagccaagtgacatcattctgaggccccactcccacagcacctcacaagtcccattggcttggaattccagctggccagcagcagcaggctggagacagccggagatggaccgggttcccggggtagggcagccactctatcwgtggtttgagttggccgctctagcctgctggcaccagggaccaggaggagtcccccataacacagcacagctgctgtgactgaccgtggccgggctgcttctttaagtgagaccgaaatccatccctcctcaccggacagggcctccccatcggaattttagcaactccagccagagttctatggacagaactctgatttctccctgggatgaagtccccagggagaggggtagctgctgtctccccagttcagccgactgagcctttccagcctgctggctctggagactcctgggagtcaccacagcacacctgctctgccgaagggcagccagactgcttctttaag

SEQ ID NO: 633088 - DNA, 531 bp, Homo sapiens
catccgtgcattcccctaggaagggggctgaatccagggagccaagtgacatcattctgaggccccactcccacagcacctcacaagtcccattggcttggaattccagctggccagcagcagcaggctggagacagccggagatggaccgggttcccggggtagggcagccactctatctgtggtttgagttggccgctctagcctgctggcaccagggaccaggaggagtcccccataacacagcacagctgctgtgactgaycgtggccgggctgcttctttaagtgagaccgaaatccatccctcctcaccggacagggcctccccatcggaattttagcaactccagccagagttctatggacagaactctgatttctccctgggatgaagtccccagggagaggggtagctgctgtctccccagttcagccgactgagcctttccagcctgctggctctggagactcctgggagtcaccacagcacacctgctctgccgaagggcagccagactgcttctttaag

SEQ ID NO: 633089 - DNA, 473 bp, Homo sapiens
ctaatacaatgtaaatgctatggaaattgttattatattatattgtttagagaataatgacaagaaaacaaatctgtacatattaagtacagacacaaccacaataggcctaactacattttcaatccatgkttggatgaatatacagatgcagaacccatggatacagagggctgactgtgtgtagaaaagctctgtggaactgatcccaaaaccccacaaccctataaaactgttaagtgcaaagcaagattaaatgattcaaggtcaacatataaaaacaaatactgttggaacaaccagatacctatgtggggggaaaaaagccaacctgacctaaacaactacctcttaccaaacacagaccacaaaaggcagaaaacattttaaaaattggtacactgatcctcattaaaagacaccattaacaaaatcaacaggtaagcaacagattgggaaatatttgcattaca

SEQ ID NO: 633090 - DNA, 473 bp, Homo sapiens
ctaatacaatgtaaatgctatggaaattgttattatattatattgtttagagaataatgacaagaaaacaaatctgtacatattaagtacagacacaaccacaataggcctaactacattttcaatccatggttggatgaatatacagatgcagaacccatggatacagagggctgactgtgtgtagaaaagctctgtggaaytgatcccaaaaccccacaaccctataaaactgttaagtgcaaagcaagattaaatgattcaaggtcaacatataaaaacaaatactgttggaacaaccagatacctatgtggggggaaaaaagccaacctgacctaaacaactacctcttaccaaacacagaccacaaaaggcagaaaacattttaaaaattggtacactgatcctcattaaaagacaccattaacaaaatcaacaggtaagcaacagattgggaaatatttgcattaca

SEQ ID NO: 633091 - DNA, 473 bp, Homo sapiens
ctaatacaatgtaaatgctatggaaattgttattatattatattgtttagagaataatgacaagaaaacaaatctgtacatattaagtacagacacaaccacaataggcctaactacattttcaatccatggttggatgaatatacagatgcagaacccatggatacagagggctgactgtgtgtagaaaagctctgtggaactgatcccaaaaccccacaaccctataaaactgttaagtgcaaagcaagattaaatgattcaaggtcaacatataaaaacaaatactgttggaacaaccagatacctatgtggggggaaaaaagccaacctgacctaaacawctacctcttaccaaacacagaccacaaaaggcagaaaacattttaaaaattggtacactgatcctcattaaaagacaccattaacaaaatcaacaggtaagcaacagattgggaaatatttgcattaca

SEQ ID NO: 633092 - DNA, 473 bp, Homo sapiens
ctaatacaatgtaaatgctatggaaattgttattatattatattgtttagagaataatgacaagaaaacaaatctgtacatattaagtacagacacaaccacaataggcctaactacattttcaatccatggttggatgaatatacagatgcagaacccatggatacagagggctgactgtgtgtagaaaagctctgtggaactgatcccaaaaccccacaaccctataaaactgttaagtgcaaagcaagattaaatgattcaaggtcaacatataaaaacaaatactgttggaacaaccagatacctatgtggggggaaaaaagccaacctgacctaaacaacyacctcttaccaaacacagaccacaaaaggcagaaaacattttaaaaattggtacactgatcctcattaaaagacaccattaacaaaatcaacaggtaagcaacagattgggaaatatttgcattaca

SEQ ID NO: 633093 - DNA, 558 bp, Homo sapiens
aatcttaaaaacataagcaacccaatttaaaaaygggcaaaagacttgaaaaaagaaaagatatacaatggctaataacgacatgaaagattcttggtattattagttatgaggagaatgcaaattaaaataacaatgaaatagcatttaacatccactagaaaagctaaaatcaaaggttgatatcaccaaatgttggtgaggatgtggagcaactgaaactcatactgttggtgaatataaaatagtgtgacataataatttttgagaattgtttggtagatttttaaaaagttaaacacagatctactttataacccaggattccaatcctgggtatttacccatgagaaatgaaaacataagttaaaaaaaggaatgctcataagccttatttacgatagccccaaattggaagcaacccaaatgtcaatcaacacaaaaatggataaacaaattcatgcaatgttatactattcagcaatacaaagaacaatcaatacatacaccaccacaggtgcaggctgagtgaaagatgctaggcacaaaagtgtacat

SEQ ID NO: 633094 - DNA, 559 bp, Homo sapiens
aatcttaaaaacataagcaacccaatttaaaaatgggcaaaagacttgaaaaaagaaaagatatacaatggctaataacgacatgaaagattcttggtattattagttatgaggagaatgcaaattaaaataacaatgaaatarcatttaacatccactagaaaagctaaaatcaaaggttgatatcaccaaatgttggtgaggatgtggagcaactgaaactcatactgttggtgaatataaaatagtgtgacataataatttttgagaattgtttggtagatttttaaaaagttaaacacagatctactttataacccaggattccaatcctgggtatttacccatgagaaatgaaaacataagttaaaaaaaggaatgctcataagccttatttacgatagccccaaattggaagcaacccaaatgtcaatcaacacaaaaatggataaacaaattcatgcaatgttatactattcagcaatacaaagaacaatcaatacatacaccaccacaggtgcaggctgagtgaaagatgctaggcacaaaagtgtacatt

SEQ ID NO: 633095 - DNA, 558 bp, Homo sapiens
aatcttaaaaacataagcaacccaatttaaaaatgggcaaaagacttgaaaaaagaaaagatatacaatggctaataacgacatgaaagattcttggtattattagttatgaggagaatgcaaattaaaataacaatgaaatagcatttaacatccactagaaaagctaaaatcaaaggttgatatcaccaaatgttggtgaggatgtggagcaactgaaactcatactgttggtgaatataaaatagtgtgacataataatttttgagaattgtttggtagatttttaaaaagttaaacacagatctactttataacccaggattccaatcctgggtatttacccatgagaaatgaaaacataagttaaaaaaaggaatgctcataagycttatttacgatagccccaaattggaagcaacccaaatgtcaatcaacacaaaaatggataaacaaattcatgcaatgttatactattcagcaatacaaagaacaatcaatacatacaccaccacaggtgcaggctgagtgaaagatgctaggcacaaaagtgtacat

SEQ ID NO: 633096 - DNA, 559 bp, Homo sapiens
caatcttaaaaacataagcaacccaatttaaaaatgggcaaaagacttgaaaaaagaaaagatatacaatggctaataacgacatgaaagattcttggtattattagttatgaggagaatgcaaattaaaataacaatgaaatagcatttaacatccactagaaaagctaaaatcaaaggttgatatcaccaaatgttggtgaggatgtggagcaactgaaactcatactgttggtgaatataaaatagtgtgacataataatttttgagaattgtttggtagatttttaaaaagttaaacacagatctactttataacccaggattccaatcctgggtatttacccatgagaaatgaaaacataagttaaaaaaaggaatgctcataagccttatttacgatagccccaaattggaagcaacccaaatgtcaatcaacacaaaaatggataaacaaattcatgcaatgttatactattcagcaatacaaagaacaatcaatacakacaccaccacaggtgcaggctgagtgaaagatgctaggcacaaaagtgtacat

SEQ ID NO: 633097 - DNA, 573 bp, Homo sapiens
aagatggattaagaacttaaacctaatacctgagctataaaaattctagaaaataacactggataaacccttctagacattggcataggcaaggatttcatgatgaagaacccaaatgcaaatgcaataaaaacaaagataaatagytgggacttaattaaactaaagagcttttgcatggcaaagggaacagtcagcagagtaaacagacaacccacagagtgggagaaaatcttcataatctatacatctgacagaggactaatatccagaatccacaacaaactcaaacaaatcagtatgaaagaaaaaaacaaccccatcaaaaaatgggctaaggacatgaatggacagttctcaaaagaagatatgcaaatggccaacaaacataaataaaaatgcttaatatcactaatgatcagggaaatgcaaatcaaaaccacaatgcaataccaccttacctcctgcaacccaaaaataaaaaaacagtagatgttgccgtggatgcagtaaacagggaacacttctacactgctggagggaatgtaaactagtatgccactatcaaaaata

SEQ ID NO: 633098 - DNA, 229 bp, Homo sapiens
tttaagcttttacgctatgcttcccttgcaagtaaaaatarattacaacttacttttttttgctccaacatgtgagcataggttgttagaagcagccaggccacatcttcaatgctttagtgcttagatattttttcaacagaaaccctaaatcatcactttcaaattcaaacttttatataaccctagggcataacagaaattcagccaaccactttgctaagacaac

SEQ ID NO: 633099 - DNA, 229 bp, Homo sapiens
tttaagcttttacgctatgcttcccttgcaagtaaaaatagattacaacttacttttttttgctccaacatgtgagcataggttgttagaagcagccaggccacatcttcaatgctttagtgcttagayattttttcaacagaaaccctaaatcatcactttcaaattcaaacttttatataaccctagggcataacagaaattcagccaaccactttgctaagacaac

SEQ ID NO: 633100 - DNA, 229 bp, Homo sapiens
tttaagcttttacgctatgcttcccttgcaagtaaaaatagattacaacttacttttttttgctccaacatgtgagcataggttgttagaagcagccaggccacatcttcaatgctttagtgcttagatattttttcaacagaaaccctaaatcatcactttcaaattcaaacttttatatawccctagggcataacagaaattcagccaaccactttgctaagacaac

SEQ ID NO: 633101 - DNA, 229 bp, Homo sapiens
tttaagcttttacgctatgcttcccttgcaagtaaaaatagattacaacttacttttttttgctccaacatgtgagcataggttgttagaagcagccaggccacatcttcaatgctttagtgcttagatattttttcaacagaaaccctaaatcatcactttcaaattcaaacttttatataaccctagggcatracagaaattcagccaaccactttgctaagacaac

SEQ ID NO: 633102 - DNA, 604 bp, Homo sapiens
ttaaaaacaaacagaaagcaacaacatcaacaaaaaagaccccacaaaaaccccattcaaaggtcagcaatgtcaaaaatcaaaggtagataagcccacaaagatgacaaaacrtaacacaaaaacgctgaaaactcaaaaaggcagaatgcctcttctcctctaaatgacaacaacacctccccagcaagggcacagaacggaccccaggctgagatggctgaattgacaaaagtaggctttaggaggtgggtaataacaaaccacactgagctaaaggagcacattctaacttaatgcaaggaagctaaaaatcataaaagaaattacagaaggtgataaccagaatattcagtttagagaggaacataactgacctgatggaggtgagaaacacaacacgagaacttcgcaatgcaaccacaagtatcactagcagaaaaggccaagtggaggaaagaatctcagagcttcaaaaccatctgtctaagacaggaagagaagaatagagaaaaaagaacagagaacaatagagaaaaaagaccaaaaaagaatgaataaaaccttcaagaaatatgggattatgtaaaaagactgaacttaa

SEQ ID NO: 633103 - DNA, 573 bp, Homo sapiens
aagatggattaagaacttaaacctaatacctgagctataaaaattctagaaaataacactggataaacccttctagacattggcataggcaaggatttcatgatgaagaacccaaatgcaaatgcaataaaaacaaagataaatagttgggacttaattaaactaaagagcttttgcatggcaaagggaacagtcagcagagtaaacagacaacccacagagtgggagaaaatcttcataatctatacatctgacagaggactaatatccagaatccacaacaaactcraacaaatcagtatgaaagaaaaaaacaaccccatcaaaaaatgggctaaggacatgaatggacagttctcaaaagaagatatgcaaatggccaacaaacataaataaaaatgcttaatatcactaatgatcagggaaatgcaaatcaaaaccacaatgcaataccaccttacctcctgcaacccaaaaataaaaaaacagtagatgttgccgtggatgcagtaaacagggaacacttctacactgctggagggaatgtaaactagtatgccactatcaaaaata

SEQ ID NO: 633104 - DNA, 588 bp, Homo sapiens
caaatgctaatagtagttatttctatatggaaacattatggcttattttaactattatttcttttttcttcctacaatgaccatattgcatatataatgacaaattaaaagttaaaaaatgactttgaatcacaaattctttactttttaaagatactccatggctagaatttgttgttgcattcctgctatcccatgtcccacttttaaaacaaaaaataaaaagaggaaaaggaaatgaagtaccattggaaggtaaaccaagcagtgttgtgcaagagagataataatggctactaattgttgattgtcggctatgtatgcttagataacaattgctgaagggcaagtcctaagattaccacaaactgtaggatttctatgtgaaagtagaaagtaatatattgattgatttaatatctctccataatgactgccctatatgcatgtcctttgccctctratttgtaactctatttttattctggactcagcaagtgacttgttttggtcaatggaagatgtctttgtcagcaatagttgccataacaaaataccatagactgggggcttaaataacaggcattt

SEQ ID NO: 633105 - DNA, 528 bp, Homo sapiens
tattcccagaactcaataagaaacagggaaaattgaggaagaatatgaaagagaaaaagagtttggagcaagcaaaatggaagaaagaaaaaatatttgaaaataaaaggcartagaaagaacaaaagatgaaaaataaagtattccaatgtttaataatgtacttacatgaagaataaagtcaaataaaaacatgtgcaagtgtctacaaattctttttaatctagtgactccaataagattgattgtgtaattatcaaccaatagtttttctctaggatttttcttcctagaggaaggtgaagatatgaagagaggtttataaaaatacactgttcaggtatattttgtgctgtggttacttgtagagtatctgattatttttgctattaattaatgcacattttgaaaatggattaaaagtttgtaataatgataatagtatatgtaaaatcaatttttaggagtttcaaagagccattaaatatagatggcagtttggatattgacttttctaccacaaaggtt

SEQ ID NO: 633106 - DNA, 614 bp, Homo sapiens
tgtactgtttcattattttgatgtttccaatgtgaggaaagcagcttgaaaatagtttaaaaggaaggagataatacaattcaaattcttaccatgggcttgctttttttttaagcctctattgtatgtcttttgtgaaattctgtaatttctggaagcaacattttagaatatactcctaaccatatattttcaatactttaacatttaaattgagatactaaaagcaaatgggatatgtttgccaagaacctatttgttgttgattttctaggtgggaacagtatgtaaaacatctactttctagtctattatgttacctatattattctataagacataattttacgccttttaaaagtagaaaaattctaatttaagaaggctggcatagagtctagtcttagataaacgtttttaagtgaytccaggaatgctgctctgaatctcagtcatctcatcattaaatgggagtcatgtgttgtatgtatataacaacattttggccaacaaatatggcatatacaatggtggtcccataagattataatactatatttttactgtaccatttctatgtttagatatatttagataaacaaatacttaccatt

SEQ ID NO: 633107 - DNA, 614 bp, Homo sapiens
tgtactgtttcattattttgatgtttccaatgtgaggaaagcagcttgaaaatagtttaaaaggaaggagataatacaattcaaattcttaccatgggcttgctttttttttaagcctctattgtatgtcttttgtgaaattctgtaatttctggaagcaacattttagaatatactcctaaccatatattttcaatactttaacatttaaattgagatactaaaagcaaatgggatatgtttgccaagaacctatttgttgttgattttctaggtgggaacagtatgtaaaacatctactttctagtctattatgttacctatattattctataagacataattttacgccttttaaaagtagaaaaattctaatttaagaaggctggcatagagtctagtcttagataaacgtttttaagtgactccaggaatgctgctctgaatctcagtcatctcatcattaaatgggagtcatgtgttgtatgtatataacaacattttggccaacaaatayggcatatacaatggtggtcccataagattataatactatatttttactgtaccatttctatgtttagatatatttagataaacaaatacttaccatt

SEQ ID NO: 633108 - DNA, 612 bp, Homo sapiens
atggggaaaaaaaaaccacgctccgatgatctgggaccaaagaaaggttgtaagattaaaaaagaaaaagaaaaaaaaaagggraaggagaacgaaggaagtggtcaaagaaagcattacataccacttattggtttatctattttgttatgtaacatagacgtgtgtatagcatagtacaaagaacagagaatagaagtgggagatgaatttgaatcctgactctttactagataccacttgagaaaaaaaaaaccattgtaaaggattttctcacttatgaataaattgtatgttctttcaccagatatgtgctgaatacctattatgtgccaggtattgtacttgttattccatttattcctctccccagcccccaaatcctcccaagtccctctacataccacagatttacaaaagaggaccctgggacttagaaagttaaataaatttactcaaggtcacaaagccagtaagcagtggagcttggattgaaattcagatcagcagtactccaaaacttctcattttcatcatatctggttactgatcctgtttctaagaaacaaaattaattaaatgtgtttagctatcagtcccagaaacatgcaa

SEQ ID NO: 633109 - DNA, 612 bp, Homo sapiens
atggggaaaaaaaaaccacgctccgatgatctgggaccaaagaaaggttgtaagattaaaaaagaaaaagaaaaaaaaaaggggaaggagaacgaaggaagtggtcaaagaaagcattacataccacttattggtttatctattttgttatgtaacatagacgtgtgtatagcatagtacaaagaacagagaatagaagtgggagatgaatttgaatcctgactctttactagataccacttgagaaamaaaaaaccattgtaaaggattttctcacttatgaataaattgtatgttctttcaccagatatgtgctgaatacctattatgtgccaggtattgtacttgttattccatttattcctctccccagcccccaaatcctcccaagtccctctacataccacagatttacaaaagaggaccctgggacttagaaagttaaataaatttactcaaggtcacaaagccagtaagcagtggagcttggattgaaattcagatcagcagtactccaaaacttctcattttcatcatatctggttactgatcctgtttctaagaaacaaaattaattaaatgtgtttagctatcagtcccagaaacatgcaa

SEQ ID NO: 633110 - DNA, 633 bp, Homo sapiens
gccaactgtcactttcccacaatcttacttaaaattggaagctctaggacccccccaatcactcttaccttgtttatgttttaaagagcaacagcgtgtctatttctagcacactgcataatttatcacgcttgttgtttgtttcttccttctcatcccacaagaagctctatggcagaaaggttttgttagaggttctgctgtttactaagacacacattttctaaatgaactttagactctgccagaaggaaacaagaacaagaagaagatatttgtgttgatttcaaggataaggcaacattaaaaactctgttcaatagactcagaattgaggtggtgtagggaatactgtgaccccatatagacttcatcatgacaaatgaagtgagcagtcccagtaaagtcaacatgtaggtgtgatgtttggtcatgttacgagaagtttaaaatacaacaacagcwctagaagtatggctttaccatatactaggccaactttacttaagatgaaagaagaatgaaagatcacaagacagtcaaaaacctaccttagacacggctcaagaaatcatttctgggtgaaaactaaagggacatcactttcaataaaatggaaattgttattttaaa

SEQ ID NO: 633111 - DNA, 482 bp, Homo sapiens
ctaaacactaagtagataataggccagtgcaaaagaaattgcatatttaccattaaaaatacttctagccyccaaaattgtgagaaaataaatttctgttgtataagccacccggtctgtggtactttcttatggcatccctagaaaattcatataaatagtaaggaatgagaagaagaatggatgaaaaaagtattcaggaggcagagatggtaagacttagtgactggatatgtgaatggtgaagaaaagaaaggacttcaggattctttttcagctttgtctgcagtccctcaaatgcatttacagatattctgagagaagggattctccggtgagacatggtaaaggctgtctttactatcttctcttccttgagctcagtgtttcacatagcactataaaagctcagaggaaaggccaggcatggtggctcacgcctgtaatcccagcactttgggaggcgggaggccgtcaggtgg

SEQ ID NO: 633112 - DNA, 619 bp, Homo sapiens
gattctccggtgagacatggtaaaggctgtctttactatcttctcttccttgagctcagtgtttcacatagcactataaaagctcagaggaaaggccaggcatggtggctcacgcctgtaatcccagcactttgggaggcgggaggccgtcaggtggatcgaggccaggagttcgagaccagcctgaccaacatgggaaaccctgtctctactaaaaaaaaaaaaaatttttttttttttttttttttttacaaaacttagttgggcatggtggcacacgcctgtaatcccagctactcaggaggctggggcaggagaatcgcttgaacctgggaggtggaggttacagtgagccgagattgcgccactgcactmcagcctgggagacagagtgagactctacctcaaaaaaaaaaaaaaaataaaataaaataaataaataaataaaaataaaaataaaacctcagaggatctggagtgatctcttccttctgtaaagacaaatagcattcatttttttaacccagctttatccaatcttattaaccacaaaataccttccttccgtcttttctgtgttccataaagatgcgtatttttgtgtcagaatgcctatcaa

SEQ ID NO: 633113 - DNA, 631 bp, Homo sapiens
ttcttttttaaaaaatcctcgtgctgctttcaactgagcacttaacgctataaaaattaaatatttaatgtctattttatttgtagtattacagctggaatccattttgcaarcatgtttgtttcaccagtcatgcatacagatagagctttactattttcaggtgtctgcgctctctggttcctgcctctcagcagcattttgctgtgggcctgccctggcatgttccaccctacaactgattcctctaggtaatttccaagcattagaatttgcaaaaccatcaacgccccatattgtggcctttctaatagcattcttcattcattaaatattctgggttgttaactatgatacacatagttatagacaataatctgtaccaggaggaaaccctcaactgcagaacttcaacccctagaaagcgtagacaaatatgttaagagtaacctatgttataaatagtttgctgtctcctgaacactcagtgtattagagacaaggcctcttgattgagatagaaatagaccctcaaaatgggacttagagaaagtgtctatcactagaaattactttgcccccattgtaataattccaggagaccccagggaagatatgtgatggtgcaacc

SEQ ID NO: 633114 - DNA, 581 bp, Homo sapiens
aaatatttcataactctttctatgaggccagcattgctctaatactaaaaccaaacaaagacattacaagaaaagaaaactacaggccaatatttatcatgaacgtagaggcaaaaatcttcaacaaaatactagcaaattaaatccagcaatacattagaagaattatacattacraccatgtcagatttatctcagttatgcaagactggtttaacattcaaaaatcaattcaatctatcatatcaacaagctaaagaagaaaaattacatgatcatatgaatagctgcagaaaaaaaaccctggacaaactccaacgcctattcatgataaaatctctcagaaatttgtgaatagaaccatgaaaggaaaataaatcttggggccccaaatcactaagctaaagggaaaagtcaggataggaactgcttagggcaaacctgcctcccattctattcagtcacccctctgctcactgagataaatgtgtatcttattgccatctttggagaagttaatcagaaactgaaaagaatgcaaccatttttctcttatctacctatgacctggaagcctctcc

SEQ ID NO: 633115 - DNA, 453 bp, Homo sapiens
tccctgctggagaatgacaacccatgtggaggaaagcccagtttcagctgaagacatcttagacaagccaagggtcagctgagccccacatatgtgagacagtcctgtcaagatcatcagaacagactacctacctgtcttatagttgactgaaaattcatgaattagcccgtccaaagtgggcttccctggtgacctacaaaatttagaataagtctttgtttgtagacttagaaggaggaaaatgtatatggtaaacttttgaaattggccaagatgataaccaggcagaatattaaaagtgtcagctgactgttcttatctgtgcawggcacagaactgaaaaaagaaaaaagagagagggagatgacctagtaggagaactggccactgcactagtgtaatttagaggaaatatagagagttggaaaatagatacatttttaatctcca

SEQ ID NO: 633116 - DNA, 576 bp, Homo sapiens
tatacaatccagtgatcatactctttgatataaacccaaatgggttgaaaaattaagtccaggccaggcgcggtggctcacgcctgtaatgccagcactttgggaggccaaggcaggtggatcacaaggtcaggagttcaacaccagcctggccaagatggtgaaaccccacctctactaaaaaatacaaaaaattagccgggtgtggtggcgggtgcctgtaatcccagctacttgggaggctgaggcagagaagtgcttgaacccaggaggcggaggttgcagtgagctgagactgcgccactgcactctagcctgggccacggagtgagactctgtctcaaaaataaataaataaataaataaaaattaagtccaaacaaaaactttcacaatatggttctagcatctttattcataattgccaacacttgaaggcaatcaagtagttcctcaggaggtgaackggtaaataaactgtggtatatgcagacaatggaatattattcagtgataaagagaaataagctatccaaccatgaaaagacttggaagaatcttaaatgcatattacta

SEQ ID NO: 633117 - DNA, 508 bp, Homo sapiens
cccgtgcctaacagatggtggacactcagtaaatattgattgaatgaataaatgctgccatccccacagccagtatcactatactttaaaaaacaggctgtgaaattatcycttttttatattgcatcagtctgctattctgcagactccacattgatcattttccaggcagcatcttatttggtttcctctggcaggagctacaaaaagattaagagagggaggaacccaaggggaactcccagctgtcctatctaatgttctatctcagttcttcactggttgagagtttattatcattttaacaattatctgggacccacaagtaagaggtcggccacaggcaattcttaattgtgggagcagtgatgatgctttgcataagctgactcttgccatgcaagagaagcagcccgaaacgagagtggtcaatgccaaactgggaggagttgtgtctgactaaagaacagatgttcttgtgtataattagtagagacttgcagtgacc

SEQ ID NO: 633118 - DNA, 624 bp, Homo sapiens
tttgatttttgacaaaagcgctaattcaattcattgaggaatggatagccttttaaaacaaatggtggttggacaattgaatatcatatgcaagagtatgaacttggaccattatcccacaccaaaaacaaaaattacctcaaaatgggatataaacttaaatgtaaaaactaaaatgataggaagttctcattatttcaaaagataacatagaagaatttctctgcaaccctgagttaggcaaatatttcttgtatataataccaaaagtgtgatctttaagacacaaaattgatcagttggtttttatcaagcataaaaagtttttctcttcaaaaggtatcagttagaaaataaaaagacaaacaagagtytaggaaaaagtacttgtaaaacacacatcttatacaggacttaggtccaaaacataccaaggagtctatacctcagtagtaagaaaactgtcaaataataaaaatggataaaatatttgaatagacatttcaccaaagaatatatatgaatggttaataaacccatgaagagatgctcaacttattagtcatcagggaaatgtaaattaaagctactagaatggctatacaaaaaacaaaagacaatggc

SEQ ID NO: 633119 - DNA, 624 bp, Homo sapiens
tttgatttttgacaaaagcgctaattcaattcattgaggaatggatagccttttaaaacaaatggtggttggacaattgaatatcatatgcaagagtatgaacttggaccattatcccacaccaaaaacaaaaattacctcaaaatgggatataaacttaaatgtaaaaactaaaatgataggaagttctcattatttcaaaagataacatagaagaatttctctgcaaccctgagttaggcaaatatttcttgtatataataccaaaagtgtgatctttaagacacaaaattgatcagttggtttttatcaagcataaaaagtttttctcttcaaaaggtatcagttagaaaataaaaagacaaacaagagtctaggaaaaagtacttgtaaaacacacatcttatacaggacttaggtccaaaacataccaaggagtctatacctcaktagtaagaaaactgtcaaataataaaaatggataaaatatttgaatagacatttcaccaaagaatatatatgaatggttaataaacccatgaagagatgctcaacttattagtcatcagggaaatgtaaattaaagctactagaatggctatacaaaaaacaaaagacaatggc

SEQ ID NO: 633120 - DNA, 537 bp, Homo sapiens
atgtattgtatcctatatgtgttgtctttttcatttctttttccctctattgcttccttattgtgttacatatatactttctggtttgccatttaaaatcctttaattttttagctatacattttgagttattagtagcttatctgtagattacaatatgcatcttaatttaagaaaatctacttcagattactrttcagtaaatccaatagtacatagaagctttgctatatactcctttgctatgtatcttggctgtatacacagacatacctctttcttttatcccccaacttttgtgctagtattgtcacacaaattatgtctttcacattataagcctattggtttatttttataattattgtttcatgcagttgtcctttaatcaattagaagaagaaaataattttaaaatgccatacttcttttttgtatttacccatgtgattccctttaagtttgtttttcttctttgaataggtataagtctccatttaagttttttcttttctgtctgaaatgctccatttagta

SEQ ID NO: 633121 - DNA, 537 bp, Homo sapiens
atgtattgtatcctatatgtgttgtctttttcatttctttttccctctattgcttccttattgtgttacatatatactttctggtttgccatttaaaatcctttaattttttagctatacattttgagttattagtagcttatctgtagattacaatatgcatcttaatttaagaaaatctacttcagattactgttcagtaaatccaatagtacatagaagctttgctatatactcctttgctatgtatcttggctgtatacacagacatacctctttcttttatcccccaacttttgtgctagtattgtcacacaaattatgtctttcacattrtaagcctattggtttatttttataattattgtttcatgcagttgtcctttaatcaattagaagaagaaaataattttaaaatgccatacttcttttttgtatttacccatgtgattccctttaagtttgtttttcttctttgaataggtataagtctccatttaagttttttcttttctgtctgaaatgctccatttagta

SEQ ID NO: 633122 - DNA, 607 bp, Homo sapiens
cctaccatgcccttgatagaagtagccccgatactcaaaatgactcatcttcttttgtttacttaaatcttacccaaattcagactcctagctctattgtcatgtccagaaatccttctgggactcctttagctttaatgtatctcttctttctctgaaatcctatagagtgagggaggtctgtgtcatctaaagttaaagtctattagagaatttcttttgttatttgttcttttgtaatgtgtggtaatattcttaacagaatgtaggtttgttgaaactaagggtcatctgctattttcatttatctatttaacatgtagtaaaaatctgctcacaaggtattcacactttgataaggaaattggaataattaacagataattccaatagtgtaattagtgatcycatacaggcaagcatatggtgttatgagtgcagaggttaggaaagcgttaaagagttgctccagaagtaagcagcttaaaacaacaaatatttattatctcgcaatttttgagggtcaggaatctggaaacagctcagctgcctggttctggctgaagatctctgatgagagatctgtcaagctcctcattgaatgtac

SEQ ID NO: 633123 - DNA, 503 bp, Homo sapiens
ctcgctgcaccaattccatatttctatcacttatcgtacttaatcctaccccactctactatttgrtgagcttgagagcaagtattttgttttttatgttggtatcctcagtgccttgcatacaatagtaatcatgaatgaatgaatgaatgaatgagtgaatgaatgaatgccttaaaagaggtgtagccagttaattaactgtcaagttcaatgaaataaaagccatgcaggtggaatggagcttgtgaattttccctaaattgaagtagtcactacttatacattcattcattgatgaacattcaagttgtttttattatgagtaatgctggtgtgaatactcatgtacaaatttttgtgtgaaaaatgttttcatttctcttgagtatatatctaggagtgaaattgatgggtcatatggtaactctatgttgaactcattgggaaatcactaaactgttccacagaatctgtgccatattacattctcatcagcaagg

SEQ ID NO: 633124 - DNA, 503 bp, Homo sapiens
ctcgctgcaccaattccatatttctatcacttatcgtacttaatcctaccccactctactatttgatgagcttgagagcaagtattttgttttttatgttggtatcctcagtgccttgcatacaatagtaatcatgaatgaatgaatgaatgaatgagtgaatgaatgaatgccttaaaagaggtgtagccagttaattaactgtcaagttcaatgaaataaaagccatgcaggtggaatggagmttgtgaattttccctaaattgaagtagtcactacttatacattcattcattgatgaacattcaagttgtttttattatgagtaatgctggtgtgaatactcatgtacaaatttttgtgtgaaaaatgttttcatttctcttgagtatatatctaggagtgaaattgatgggtcatatggtaactctatgttgaactcattgggaaatcactaaactgttccacagaatctgtgccatattacattctcatcagcaagg

SEQ ID NO: 633125 - DNA, 595 bp, Homo sapiens
attttagaaaagtttactgctatagaaaggctgttgttgggtaataaaaagatggattcttacagagacagtttccttaggctgaaggagacatcattcctatttactctctaaggcaggttcttttccaagacattgattattgcacataaggtgcagtacaacttgtcgcactccttgaacatgcttttttaacaaaagctacaaagaggccytgagaagagctcagccaaaattagggaaacaaatgaaggcaagattttgtgatgaagtttacttatattctcctggctgcctgaggtaaccttatgcataacctgaacttttccaggtgacataaacaaaactcatgactgagaagcattctttgcaaccaacaatgtgccctatttgttctgtttcaaatagggcacattgttgcttgcttatttcatatatgtttcttaggcacatattgtgctgctaggagttgggcatgagaagatatagatagataggtaggtaggcagatagatagatggatagatttaggtatagatatgtaagaagatataaagaaatggatatagatatatagactgatataacataatgc

SEQ ID NO: 633126 - DNA, 190 bp, Homo sapiens
gaattaaataaattaggacatagacatcwgtaaagatttccattgccactcctattgaggattagggagaagttaagaggcttctatttgattttagttttcccctcacagtcttaaatgtttgagatacatgaagagaaaatataaataaaatttaagggatattgcagaaaagtagaaaataagtaag

SEQ ID NO: 633127 - DNA, 478 bp, Homo sapiens
gccattccttcctggcatcacagggatcctttgggagggtggccagaggcatggggaaaacaccacatggggaaggaagtctccagctgaactttgtaacagtttgaaccagtcgagaagcctcctggccagaactcaggggagggcgcaaatcctgtgtgcagactccacaggttggggaagaactaaagcccttttctttcacagctgggaggtgggtaccctggggcaagttctcagccctgcttgcccactgcctggaaacagactcggtgctgttagcgggggcatggtgggagtgagaccagccctttagattgcatgggagctgagtgaggcctgtgactgccggctttcccccacttccctgacaacctaacatgactcaacagaggcagccataatcctcctaggtacacaactccattgacctgggaacctcacccycttcccccacagcagccccagcaagacctgc

SEQ ID NO: 633128 - DNA, 449 bp, Homo sapiens
tagaacccttgtttgtgactggtaaaaatgtaaaatggtatagccactgtggaaaatggtatagcagttcctcaaaaaatcaaacgtagaattagcattcgagtcagcaattccattgctgggcatacactctaaagaactaaaagctgggacttgaacakatatttgtgtgctcatattcatagcagcattatttacaatagccaaaaggtggaagcaacccaagggtccactgacagataaatatataaacaaaatgcattttggaatattaaatttacagtattacaatattacaaattatgtggaataaaatgcacaatggaatattattcagccttaaaaaggaatgtaattctaacgcatgccacgacatggctaaactttaaagatattatgttaagtgtgataagccaggtacaaaaggacaagtaagcattgtatgattc

SEQ ID NO: 633129 - DNA, 519 bp, Homo sapiens
gatagttattattaaaaacaaaaacacaggcagtaacatgtgttggcaagggtacagagaaattagaacccttgtttgtgactggtaaaaatgtaaaatggtatagccactgtggaaaatggtatagcagttcctcaaaaaatcaaacgtagaattagcattcgagtcagcaattccattgctgggcatacactctaaagaactaaaagctgggacttgaacatatatttgtgtgctcatattcatagcagcattatttacaatagccaaaaggtggaagcaacccaagggtccactgacagataaatatataaacaaaatgcattttggaatattaaatttacagtattacaatattacaaattatgtggaataaaatgcacaatggaatattattcagccttaaaaaggaatgtaattctaacgcatgccacracatggctaaactttaaagatattatgttaagtgtgataagccaggtacaaaaggacaagtaagcattgtatgattctacttac

SEQ ID NO: 633130 - DNA, 572 bp, Homo sapiens
gaaatggtggttgtcaggaactgtgggtaggagggaatggggagctattgtttaatgaacacagtttcatgttgtgatgagaaactatctggagaagtttagtggtgattgaggcacaacgatgtggatgtgctgaatgcaattaaactgtacacttccaaagcagttcaaatgatacatcttacagatattttaccaaaataagaataataattcagccttccaaattcacatgctaatacaccgtaagtggctgaagaccttcaaagtatttgtgaaattattgaaagtaagtaataaattttttgatagaaaacaaataaatgaatcaagaagtatttttaaatcaatgaggttcaattcaatattttaatagtaagttattaatgtgaaggttatgataggattaatgtgaagttagaaatactcaagtgatgtcctctaaaataaaatttagtttttctaattttatatttttgtatatatatatatagtagaaaatttggaaaatatatgaatgtaataayatgaggaaggaataaaattattacctcaataaaaccactgtttgt

SEQ ID NO: 633131 - DNA, 633 bp, Homo sapiens
gataacagaggaaagagaatgattccccacaggccagcaggcagttcccagtgtagaccctcactgggacacagaatcagaacatggagattggttctgcagacatttgctaacttgcatgctacaaggactaaggaaaactaggaagaagcctatgaattattcaatgatgtccactataacacagggaagggaagaaaatcctactgcctttctggagagactaagggaggcattgagaaagcatacctccctgtcacctgactctattgaaggccaactaatcttaaaggaaaagtttattactcagtcagctgcagacattaggaaaaaacttcaaaagtccaccttaggcccggagcaaaacttagaaaccctattgaacttggcaacctcggttttttataatagmgatcaggaggaacaggcagaatgggacaaacaggataaaaaaaagaccaccgctttagtcatggctctcaggcaagtggactttggaggctctggaaatgggaaaagctaggcaaatggaatgcctaatagggcttgcttccagtgcagtctatggggatactttaaaaaagattgtccaagtaggaataagccacgcccttgtccacgctccttatgtca

SEQ ID NO: 633132 - DNA, 550 bp, Homo sapiens
gacattgaaggcacccctcccgaggaaatctcaactgcacaacccctactatgccccaattcrgcaggaagcagttagagtggtcgccagccaacctccccaacagcacttggttttcctgtttagagggggtactgagagacaggactagctggatttcttaggccagctaaaaatccctaagcctagctgggaaggggactgcatccacctttaaacagggggcttgcaacttagctcatacccaaccaatcagagagctcactaaaatgctaattaggcaaaaacaggaggtaaagaaacaaccaatcatctatcacctgagagcacaacaggagggacaatgatcgggatataaacccaggcattcgagctggcaatggctacggctcgagctgagctttcactcgccatccaccactgctgtttgccgccgccaccgcagacccgctgctggcttccatcccttcggatccggcagggtgtctgctgcattcctgatccagcgaggtgcccattgccactcccgatcgggctaaagacttgccac

SEQ ID NO: 633133 - DNA, 550 bp, Homo sapiens
gacattgaaggcacccctcccgaggaaatctcaactgcacaacccctactatgccccaattcggcaggaagcagttagagtggtcgccagccaacctccccaacagcacttggttttcctgtttagagggggtactgagagacaggactagctggatttcttaggccagctaaaaatccctaagcctagctgggaaggggactgcatccacctttaaacagggggcttgcaacttagctcatacccaaccaatcagagagctcactaaaatgctaatyaggcaaaaacaggaggtaaagaaacaaccaatcatctatcacctgagagcacaacaggagggacaatgatcgggatataaacccaggcattcgagctggcaatggctacggctcgagctgagctttcactcgccatccaccactgctgtttgccgccgccaccgcagacccgctgctggcttccatcccttcggatccggcagggtgtctgctgcattcctgatccagcgaggtgcccattgccactcccgatcgggctaaagacttgccac

SEQ ID NO: 633134 - DNA, 550 bp, Homo sapiens
gacattgaaggcacccctcccgaggaaatctcaactgcacaacccctactatgccccaattcggcaggaagcagttagagtggtcgccagccaacctccccaacagcacttggttttcctgtttagagggggtactgagagacaggactagctggatttcttaggccagctaaaaatccctaagcctagctgggaaggggactgcatccacctttaaacagggggcttgcaacttagctcatacccaaccaatcagagagctcactaaaatgctaattaggcaaaaacaggaggtaaagaaacaaccaatcatctatcacctgagagcacaacaggagggacaatgatcgggatataaacccaggcattygagctggcaatggctacggctcgagctgagctttcactcgccatccaccactgctgtttgccgccgccaccgcagacccgctgctggcttccatcccttcggatccggcagggtgtctgctgcattcctgatccagcgaggtgcccattgccactcccgatcgggctaaagacttgccac

SEQ ID NO: 633135 - DNA, 550 bp, Homo sapiens
gacattgaaggcacccctcccgaggaaatctcaactgcacaacccctactatgccccaattcggcaggaagcagttagagtggtcgccagccaacctccccaacagcacttggttttcctgtttagagggggtactgagagacaggactagctggatttcttaggccagctaaaaatccctaagcctagctgggaaggggactgcatccacctttaaacagggggcttgcaacttagctcatacccaaccaatcagagagctcactaaaatgctaattaggcaaaaacaggaggtaaagaaacaaccaatcatctatcacctgagagcacaacaggagggacaatgatcgggatataaacccaggcattcgagctggcaatggctacggctcgagctgagctttcactcgccatccaccactgctgtttgccgccgccaccgcagaccygctgctggcttccatcccttcggatccggcagggtgtctgctgcattcctgatccagcgaggtgcccattgccactcccgatcgggctaaagacttgccac

SEQ ID NO: 633136 - DNA, 603 bp, Homo sapiens
gacagtcagctgctgagctcaggctagaaatctgtcaggacaaaagctgaacctttcagaagtcatctatatgcttagtgatctttgttggagtcytgagaaaggacaatgtagagggaaaagatgaggcctgatgatagacagcaaatggatgtttaaagggtgaaaaaaggaaactagcctacagaggagggaaggagtccttatagagactggctcaacacaagaccaaaaactatctataatctcctcagaatatatgagggtgctaaacccagaataaccacttactacaaacttgctgttggctggctgacctgttcattcgcatttattaaagccaactccaaacctgtctgtggaatgaatccatttcagaaagcattcagctccccatcttaaatatacggagctaagattcattttgaaaatacttcccgggtttcattttacaagcttaaccactatggttaataatcctttccaaaacgtcgcaaaagttccattggattaaatattggtgattataagagataaaaacttacattaattcactaaaaagcacaactattgtgttttttggttcttggacagaaatcctga

SEQ ID NO: 633137 - DNA, 603 bp, Homo sapiens
gacagtcagctgctgagctcaggctagaaatctgtcaggacaaaagctgaacctttcagaagtcatctatatgcttagtgatctttgttggagtcctgagaaaggacaatgtagagggaaaagatgaggcctgatgatagacagcaaatggatgtttaaagggtgaaaaaaggaaactagcctacagaggagggaaggagtccttatagagactggctcaacacaagaccaaaaactatctayaatctcctcagaatatatgagggtgctaaacccagaataaccacttactacaaacttgctgttggctggctgacctgttcattcgcatttattaaagccaactccaaacctgtctgtggaatgaatccatttcagaaagcattcagctccccatcttaaatatacggagctaagattcattttgaaaatacttcccgggtttcattttacaagcttaaccactatggttaataatcctttccaaaacgtcgcaaaagttccattggattaaatattggtgattataagagataaaaacttacattaattcactaaaaagcacaactattgtgttttttggttcttggacagaaatcctga

SEQ ID NO: 633138 - DNA, 607 bp, Homo sapiens
ggaccattacaaaccaatggggccagattattcaaagttagtgttggggaaaattgacccttgcagagataatgatcaaatttaaacctcactttacatactctaacataaagaaataaatattttaaaamacgggaagaggctggaaaaatatatttaactgatctttggatgcgcaaagacttcttacgagtacaggaaatgaaagaaaacacaaaggaaaatataaataaagttatccacgtaaaacttttaacataacgtttgtcaattgcaggctgtcttcctgtgcctctccctaacccagcactgaggctttccccgtgtctgacatcagaaagaggaggtaacttctctcatttccagttcctaacgttccttctgacattgtatctctgagcttgcttgtcagtcttgttccctgagctccagtatgtcccaagggcctagtatctccttcacttctatagttaccttcacaaaagcaagaatctagaaggatcattgtgtgagtagtagagtccagatttgttcaataatgcttagctataaattgctcctacactaactagatttaggtgctactgacttgacaggctgagctgca

SEQ ID NO: 633139 - DNA, 607 bp, Homo sapiens
ggaccattacaaaccaatggggccagattattcaaagttagtgttggggaaaattgacccttgcagagataatgatcaaatttaaacctcactttacatactctaacataaagaaataaatattttaaaacacgggaagaggctggaaaaatatatttaactgatctttggatgcgcaaagacttcttacgagtacaggaaatgaaagaaaacacaaaggaaaatataaataaagttatccacgtaaaacttttaamataacgtttgtcaattgcaggctgtcttcctgtgcctctccctaacccagcactgaggctttccccgtgtctgacatcagaaagaggaggtaacttctctcatttccagttcctaacgttccttctgacattgtatctctgagcttgcttgtcagtcttgttccctgagctccagtatgtcccaagggcctagtatctccttcacttctatagttaccttcacaaaagcaagaatctagaaggatcattgtgtgagtagtagagtccagatttgttcaataatgcttagctataaattgctcctacactaactagatttaggtgctactgacttgacaggctgagctgca

SEQ ID NO: 633140 - DNA, 607 bp, Homo sapiens
ggaccattacaaaccaatggggccagattattcaaagttagtgttggggaaaattgacccttgcagagataatgatcaaatttaaacctcactttacatactctaacataaagaaataaatattttaaaacacgggaagaggctggaaaaatatatttaactgatctttggatgcgcaaagacttcttacgagtacaggaaatgaaagaaaacacaaaggaaaatataaataaagttatccacgtaaaacttttaacataacgtttgtcaattgcaggctgtcttcctgtgcctctccctaacccagcactgaggctttccccrtgtctgacatcagaaagaggaggtaacttctctcatttccagttcctaacgttccttctgacattgtatctctgagcttgcttgtcagtcttgttccctgagctccagtatgtcccaagggcctagtatctccttcacttctatagttaccttcacaaaagcaagaatctagaaggatcattgtgtgagtagtagagtccagatttgttcaataatgcttagctataaattgctcctacactaactagatttaggtgctactgacttgacaggctgagctgca

SEQ ID NO: 633141 - DNA, 607 bp, Homo sapiens
ggaccattacaaaccaatggggccagattattcaaagttagtgttggggaaaattgacccttgcagagataatgatcaaatttaaacctcactttacatactctaacataaagaaataaatattttaaaacacgggaagaggctggaaaaatatatttaactgatctttggatgcgcaaagacttcttacgagtacaggaaatgaaagaaaacacaaaggaaaatataaataaagttatccacgtaaaacttttaacataacgtttgtcaattgcaggctgtcttcctgtgcctctccctaacccagcactgaggctttccccgtgtctgacatcagaaagaggaggtaacttctctcatttccagytcctaacgttccttctgacattgtatctctgagcttgcttgtcagtcttgttccctgagctccagtatgtcccaagggcctagtatctccttcacttctatagttaccttcacaaaagcaagaatctagaaggatcattgtgtgagtagtagagtccagatttgttcaataatgcttagctataaattgctcctacactaactagatttaggtgctactgacttgacaggctgagctgca

SEQ ID NO: 633142 - DNA, 565 bp, Homo sapiens
tgaatggttgagaagtgtgtgcagcacttacccctttgctgtctttctctcctgttgacatgattgtaagtctcctgaggcctycccaatgatgcagaactgtgaatcaactaaacctctttcctttaaattatccagtctcaggtagtcctttatagcagtgtgaaaatggagcaatataattatcttttttaaaaaacaagtttttgttttgttgatccttttgtattgttgaggttttttggtcatacttttatttagttctgctctgatctttgttatttctttctttctgtttgctttatatttgctttgtttttgattttttaattccttgaggtgcaacattagggtattaatatgtgatgtttccattttccatttttttgatgtaggcatttaatgctacaaacttcaatcttttttttttttgagatggagtctcgctctgtcacccaggctggagtgcagtggcataatcttggctcaccacaacctccatcttccaggttcaagtgattctcctgcctcagcctcctcagtagctgggattataggtgtgtgc

SEQ ID NO: 633143 - DNA, 622 bp, Homo sapiens
ttaccctcttcttttaattgatttttttaaagactgaaatatttaatagtagggctgtttttaattcaaggaagagtatctgtttagagacatcaagtgctttccttgagattgactaaaaagaaagatgcctgctatatctggttctgttcagcattgcactggaagtcttggccagggcaataagacagaataataaagttttaagaattgaaaggacaaaataaaaatgttattattgtgtttgaatatttagagaatgcagaagaatctagagatacattattaagtatttaggaatattacgtcctaaagtatgcacgttttgaccaaaaaaagaaactataaaactgtagtgaaagaaatatccaaagaaatggggagaggggataaaccatgtttatggattggtagattcaatattgtaaatgttgtcaaattgactcgtagttccagtgtgcaattttagtcaaaatctgaactttttatttaatataaactattttttgrtggagcttgaaaggttgattctaaaatgtatatgaagtacaatgatagaaaatagtgaagaaactctggaagagttgagaagagaggacctgctatactgccagcatttaac

SEQ ID NO: 633144 - DNA, 595 bp, Homo sapiens
aatctacaagtaactcaaacaaattagcaagaaaaaaaaatcccatcaaaattgggctaaggatatgactagacaattgtgaaaagaagatatacaaatggccaaaaaacttatggaaaaataatcaacatcagtaatgaccagggaagtgcaaatcaaaaccacaatgtgataccaccttactcctgcaagaataaacattatcgaaaaataaaaaaataatagatgttggcatgttkgtggtgaaaagggaacacttgtacactgctggtgggaatgtaaaccagtacaaccactatggaaaacagtgtgaagattccttaaagaactaaaattagaactaccatttgatctaacagtcccaccaatgggtgtctacccagaggaaaataagtcattataagaaaaaataattgcacacgtttatagcagcacaatttgctgctatatatatatatatatatgcaatatatatgtttgtgtgtgtgtatatgtatatatgcaatatctatctatctatctatctatctatctatctatctatctatctgtcatctctatctaatggaatacttactactcagccttaaaaagg

SEQ ID NO: 633145 - DNA, 595 bp, Homo sapiens
aatctacaagtaactcaaacaaattagcaagaaaaaaaaatcccatcaaaattgggctaaggatatgactagacaattgtgaaaagaagatatacaaatggccaaaaaacttatggaaaaataatcaacatcagtaatgaccagggaagtgcaaatcaaaaccacaatgtgataccaccttactcctgcaagaataaacattatcgaaaaataaaaaaataatagatgttggcatgttggtggtgaaaagggaacacttgtacactgctggtgggaatgtaaaccagtacaaccactatggaaaacagtgtgaagattccttaaagaactaaaattagaactaccatttgatctarcagtcccaccaatgggtgtctacccagaggaaaataagtcattataagaaaaaataattgcacacgtttatagcagcacaatttgctgctatatatatatatatatatgcaatatatatgtttgtgtgtgtgtatatgtatatatgcaatatctatctatctatctatctatctatctatctatctatctatctgtcatctctatctaatggaatacttactactcagccttaaaaagg

SEQ ID NO: 633146 - DNA, 593 bp, Homo sapiens
tactaattaattttgaatgaaaatagctaaattttttaggagtagaattaaatgagattctattcaaatatattaattttactaaagtatactgatttttttaagtgtccaccaamtttctggcattgaataataaaactcagtaacaaacaatataattttgtttgtttcttaaaaagagagagcttgggtattttcttagtagcaaaaatatggaagctgaagatgatacagctacaatggcacagtctcacttatgagatgtgtgaagtgctacaatccttgagtaaatcatatcataatttacttgcctcactgagagagctgtaagaaagagagggaataaaaagactgaattaggccaggcacagtggctcacgcctgaaatcccagcactttgggaggctgaggcgggcagatcagctgaggtgaggagtttgagaccatcctggtcaatgtggtgaaaccccatctctactaaaaatacaaaaattagctgcgtgtggtggcacgtgcctgtaatctcagctactcagaaggctgaggcaggagaatctcttgaacccaggagccggagattgcagtgagccaag

SEQ ID NO: 633147 - DNA, 623 bp, Homo sapiens
tatagcatggtttactgaatattttaagttcactcttgagacctactgctaagaaagatttcctttcaaaatcttactactcattcacaatgcacctctttacccaagagcactgttggagaggtaccatgagattcgtgttgttttcatgcctgctaacctaacatccattctgcagcccatggatcaaggagtaatttaaactgtaagtcctattaagaaatgcattttgtaagcctatagctgtcacaaacagtgattcctctgatgaatgtgggcaaagacagttgaaaacctggaagagattcaccattctgaatgccactaagaacatttgtgattcattggagaagttcaaaatctcaatatgaataggagtttggaagaacttaatgccaaccttcatgaaggccttagggggtttaggacttcggcagaggaagtaactgcagatgtggtagaaatagtaaaagaastataattagaagtggggcttgaagatgtgactaatgaattgttgcaatctcatgatctaacctgaatggatatgaagttgctttttacggatgagcaaagaaagtcgtttttgagatagaatttactccgggtgaagattatgtgaa

SEQ ID NO: 633148 - DNA, 573 bp, Homo sapiens
aaaaaaaaaaaaaaggtgttaccactccagatctccccattcttacttcctaaaagctggaaagcagatataccgatgtgagatatcttggaccagaacaaagacaacaccttaaaacacagcaaggcagcaggatggagggaccccaagtctctgatgatctggtgaaggagagttgttgtagccacctctacctcagcagttcaccactgatttgggtagctaattgagaaaacacaagttcatttgtctgttgtgtactctgataacctctaggctcttatgtggaaaacaaatatttccattaactttatttgaaccactatattttaaagtattttttgttatactaactcagcctacacactyaattacaaatatttgtaaactatcaagttctagctgatgttcatttataacagtttgactcattcacatatagctattcgcaagaactctgctctttcatcatgccctaccaagttcccatcccttctaaaaattagagcaagtcggccatgcaaattagcacagaaataacaatttaccaaatagatcccaggcggttttatg

SEQ ID NO: 633149 - DNA, 383 bp, Homo sapiens
aattccagaaaatgcctttaatagcctcaacctgggcctcatccacaactctgtctgaggattacaggagggtacagggactgaaaacttcagcccatggggcaggagtggcccatttccycaaggaaaagatatcccccatagcactcaatcaatagttcttaaataaatgaatgaatgagtcaaccaatcaataaaataatttctacaatactggaagttttccaaagcaatcaaatttctgtactacctccctcttaacactttgtgtgttttcattaaaacacgcttaacaactagaaagtaagatgttctgggcaggaataaaaatattgggaggagtgcctactgcaggtgggtgtgaagacattaacagtgaggta

SEQ ID NO: 633150 - DNA, 490 bp, Homo sapiens
gaattcataattgtaactctgtattttattacatccaagtaaaaattcatttcaaagccatcaggtgactctcttgctaggggtggagctaggataagcagagactgggttataaccctttcagcccaaatattctatctctctaagtagcccctgtttttaaatatgtcttcccgcttctctctcatgccaygccttgccctaaacatatactgcagcccaatctcgacttccccagactgtgttaaattaaatcactgcacatttattgggcacttaaaatctacaagatacttaaaaagatgaaaatacacatgtaacctaacccctaacttccatcttcaaggactttaccctctaaatggaaaggcaatttatgaaaagaaaagtaacaataaaagttaaataataatgaagattacaatgcaggagacatcacctgatggaacaggattaattaatcactgaatgagtggcacagattctatgt

SEQ ID NO: 633151 - DNA, 490 bp, Homo sapiens
gaattcataattgtaactctgtattttattacatccaagtaaaaattcatttcaaagccatcaggtgactctcttgctaggggtggagctaggataagcagagactgggttataaccctttcagcccaaatattctatctctctaagtagcccctgtttttaaatatgtcttcccgcttctctctcatgccacgccttgccctaaacatatactgcagcccaatctcgacttccccagactgtgttaaattaaatcactgcacatttattgggcacttaaratctacaagatacttaaaaagatgaaaatacacatgtaacctaacccctaacttccatcttcaaggactttaccctctaaatggaaaggcaatttatgaaaagaaaagtaacaataaaagttaaataataatgaagattacaatgcaggagacatcacctgatggaacaggattaattaatcactgaatgagtggcacagattctatgt

SEQ ID NO: 633152 - DNA, 626 bp, Homo sapiens
gatgtaaaaatccacaacaaattattagcaaataacacccaatggtgtataaaaagaattatacatcatgaaccagtgggatttattccatgtgtggtttcaaaaatcagttaatttaattcattacatcaacaggctaaataagaaaaaacatgattttatcaatagatgcagaaaaaacatttgagaaaacccaaaacccattaatgataaaaaaaaaaaaaacccctcagcaaactaggaatagagagggacttcctcaacttgatataaaacatctacaaaaamcatacagctactgttatacttaatggtgagaagcaagatctacccctaagatcaggtaggaaaaaggcaagaatgtctgttcttaccactcctatttaacatcctactgggaagtcctagctgatacaataagataggaaaataacataaaatgtatacagattggaaaggaagaaataaaaatgtatttgttcatagatgacatgaccatcaatgtagaaaatcccaaagaatcaacatcagaaaaccctgaagctaataagcaattttaacaagattgcaggatacaaggttaatatataaattgctttcttatataccagcagtgaaaaattgaa

SEQ ID NO: 633153 - DNA, 509 bp, Homo sapiens
aatctctagccagatggatcagaaagaaagaaaatacaaattaccaatattaagaatgagaaaggtgatatcactagattctacaggcattagaaagatattaagatattaagagaaatattagtaatttaacgtgaatcactatttatacttttattcctatacattgcatcagtgatttcagacagtgcaataagtcaagaaaaaggaaaaaatcattcagttggaaagaaaatataaaattgtcttcactcacaaatgacatgaytgtctatgtagaaatctaataaatgagcttaagaaagttgcaggatacaagatcaatatacaacaattaattgtatttaatatttccacagagtaacaatgaaccttagaaattgaaattttttaagtgtcatttataaaagcattgaaatatgaaatgctgtgggataaatctgacaaaatatgtgatggtctatacactaaaaactataaaacattgctcagtaatagtaaagaactat

SEQ ID NO: 633154 - DNA, 624 bp, Homo sapiens
ggatagcaacagcaacaaccaccaccattagaaagctcaacctggtcaggtgcagtggctcacacctgtaatcccaaagcactttgggaggctgaggtgagagggtctcttaatgccaggggtttgagaccagcctgggcaacatagtgagaccctcatctctacacaaaattaaaaattaaaaaaaaawttttaaaagctcaactcaaatgccaccaccttctctgagaagacttctcaaaatctctcaaagtccctcttcctcttctaaacttgcataatgttttattttgtaccacttttggtaaaagataccatattatggcttatattaaaattatttttatcttttctattagacttttaagttcctgagggaatattgcccaattgttttatttctatacttttccacagaacttcatattatgcctatgacagccagatcttaaggtgactctggtgatttttgacttctggtattcatgtcctcatataatccacccccccttgagtgggggtgggactgtgacttgcttctaccaaggaaaatggcaaaggtaataggatgtcactcctatgattatgttacattatatacgactccattttgccagcatgctg

SEQ ID NO: 633155 - DNA, 564 bp, Homo sapiens
agattctacatccattagaacactaggtaaaggatatgaagacagttcacagaaaagtaaatacaaatggctctacaacatatgaaaaggagctcaacctcatttaaacaaaaagaagtcaaaataaaactacaatgacatattatttttcacttaccacactggcaaaactttttaaaaaattgataatacactttgaaaatacgcaataacaggcactcattgttgtagtaacctctatgaaaggcaatttatgatatttattaaaattaaaaaacaaacataccatttgacccagcagttatacttctatatttagatatgctcatttacagatatgctcaccttctgttaaaggacttattattgcagtattgtttgtaatatcacaagwttggaaacaacctaaatttttatcctgaaaggactaattgaatgaaatttggtatagtaatacaatggagtgttctgcagcagttaaaaataatatattgatatggggtgtgctctaaagtatatcactaagtgaaaaaggcaagatttggagcaccttgtataatatac

SEQ ID NO: 633156 - DNA, 627 bp, Homo sapiens
caaggcatggtgagagggaggaaggaggaattataaaagcatagagtaacttttgatcatgtttattgtgctaattgtgatgatggtttcatgagtgtttacatatgttyaaactcataatattacatattttcaatacatattatttactttatgtcaataaagctgttttaaaatgtcttgatccttgaaactcatatgggttctgtttttccctctctttcttctgtagtaactcttctctaaggcaatggatgccaccaactgaagggcaaagaatacaaggacaagcacaagggaaataaacctgtttgtatctgaaaatacattatgttatacaagcaccagagtccattggagggaacagtgtacaaatggtggctaatctggctatgtgacatagcttccattttgaaagggttctgttgatatcatatgcatgtccaactttgttgtgaaaatgttaggggtcagggagcttgctcatagcaaaatcgtgaggtgaataaatcttgtctttagcattcctcaattcttctggaatttctcctcacctataactttccattattactcttcctcttctcccatccttgcttctcctctaatcaagacccactgcattta

SEQ ID NO: 633157 - DNA, 520 bp, Homo sapiens
ttagcattcctcaattcttctggaatttctcctcacctataactttccattattactcttcctcttctcccatccttgcttctcctctaatcaagacccactgcatttatgcttccaccaaccatcccactcccttgtattctggcagacactgaaaagttatatgataaatttagcctgacaaagatattagtaatttaatgtgaatcactatgcatggcataggatttcaaagcatagatgctggagccagggtacctgcatccaaatcccagctgtcactgactagctgtgtgaccttgggcatggtacttagccactcagagtctcagtgtcttcatctataaaatacacataattttacctacctcacaggttatgaggattaaatgagtcaataattataaagtactcaaaacagtatctggcccatggyaagcacaatgtaagcgtttatgatataaattaattaaataccacttcccatggactattgttttaaaatgaaaaagaatgcttg

SEQ ID NO: 633158 - DNA, 586 bp, Homo sapiens
ttccacactcctgtctggctgtactctgtcaccttctggccctttgatgacccctgtgcctcctcacactgttgctcccttcctctcacccttttccccaagtgtgggcacagatctgtctcccaattctccaaaacacagctaagaccagacaactgtattaaaccaaatcttactcttggcttaagaattgcaaaagggaattaaagcatagaaaacttataaaattggtagaaagcttaaatgtgctcaaggtccccatgcctagcagagtcccatgttactgtctccctccttaggtcatggccttcttcccaggggccattgccagcctggccttgtctccactccccagcccaagccctcaactcctcaaaggcttcctctcactcccaggctcagagcagcttctgctgggatatgattcctctcacaaggagacaaacttgtgactgaactgtagagcccatcacccctaccacttaaaaaaattatttttgcttcatctttgcttaaccagagagctaaaatagatgttttcccaatatacaaaamaagacaattttatcttaaagtagaattcata

SEQ ID NO: 633159 - DNA, 405 bp, Homo sapiens
attacacaacaactttaggcagtcaaaatttcaaatttgagaaggaggcaagagtcttgtcgtgcaaggcactggtccattttctgcagcaggtttggttcaattaatttctgacatattctttcctttgtaaaggtacaaagataacacagagagagacccwcagctttttcaaaggtacaaaaatttgggcaatttgagggaaaatacaaggaagagaggggagatttactctacacctccacacccccaaatagagaaagccagagatgtgtattatctgtgtgtatgtgtgtgtgtaggtgtgcacatgcatgcatgaacatgcacacatgtgtgtgacttgtgactccaaagtaatgtagcagattttcagacgtggtttttggaacctttcttattaca

SEQ ID NO: 633160 - DNA, 652 bp, Homo sapiens
atctttgctacgaccgtggctcagcaaagcactgaggcctcagctttcagcgggtggggtcttccttactatgctaagcacatgtgggagccaatgtgaaatctgaataatactttgaaggaatgtagttcagtctaggaagatgaaagcacttcacagatagcattatctctttaattcacatacattctctatgcaagcagtagatgggaagtgggtatttattcctggattctgactccgttagtgttgaatgatttgcatatttatgggagcagaagaacccctgaaattaacacagtgaagggagaaatggatgggagtgaggttagccaccatcaaggtgatgtggtggccagtggatgactctgttttcctgccccagggcaatggcactgagatgggagggcacgggctcattcatggaaagcaaattgtctagcttgaaagaaactctgggtgtgtatagagaaggagtgcaacagggggaatggaagggatgaaaggaacacaggagggagaaaatgtgggcaaggaaggcggagaggagctggaatagaaagagctttgaacaccatataagcaaagagtttgaacttaatttagtaaaccatyggaagttgttgaaggttttagaataaggggttgacat

SEQ ID NO: 633161 - DNA, 619 bp, Homo sapiens
tttggcaaactgcttttaaaaagaaagttttctgaaagccatcagaactgagaaacaaattttatcactcactagaaagcaccaggttatatccattcattactcacttggtcttgtcttagaagtttccacatatatttgaaacgatttaagggagatgtgtgaatacatgccaatctaacactttcaagactttctgaaattggtttaccccctgaaaaaaaattaagcacataaataccattgggcattataaattgctttatacacgaaattacttttttttttcctgagacaggatctggttctgtcacccaggctggagtagagtggcatgatcttggctcactgcaatctctgcctcctgggctcaagccatcctcccacctcagcctctcaagtggctgggactacatgcacatgccactgtgcctggctaattaaaacaaaatttkgtagagatggaggtttcaccatgttgcccagcctggtctcaaactcctgagctcaagtgatcctcctgcctcggcctcccaaagtgctaagattacaggtgtcacaatactactttaaaaagcaacctccagttttaaaaatcaactatatgctggaagttatc

SEQ ID NO: 633162 - DNA, 601 bp, Homo sapiens
atgaaattaaagggaccgctttactacggaattttgagggaacttttaatacactagtaaaataacatgctattgtgtacattcgcattgatctaagatgtaaaaacattttaacatctttaaaatcagaatacatttacaattgataacatgtcataaattaattggcagtatttttcctttttagagtacataaaatgtacttcttacagtccataaattcgtggatttgatgkaatatagtggtatacaatatttcccaaacttatttgaccatggaactttttggggaagcatggggaaagtttctggaggaaaataaaaaatcacattttagcataaatgatgcctttaaatatttagattcataaaatgtctgatattaaatatagagaggagaacctattactgaccaaatctccatttccaagcaagatgctctctttagattgtcacactttttgtaacaagaacttaactctcctaactgatctcagaattccagagttggcctcacatcaccacaattgagagaaataacaaaacatgggattagctacatgttgaaccgtgtcccatgttaagacaggctaagaaagag

SEQ ID NO: 633163 - DNA, 518 bp, Homo sapiens
aaatgaatgataaagatacaacgtagcagaatctgggacacagcaaagagtgttaagaggaaagtttacagtgctaaacacccatattaaaaagttaggaagatctcaaatgaacagcctcacatcatacctagaggacctaaagaaacaaggccaaaccaaccccaaagctagcaaaagacgagaaataaccaaagtcagagctgaaccaaatgaaattgagatgtgaaaaaccatacaagagatcaatgcaaccagaagttggttccctgaaagaataaataagactgatagactgccagctagactaataawgaaaaagagaagatccaaataaacacatagatgacaaagaggacattaccgctgaccccacagaaatacaaaaaatcctcagagactgttacaaacacctctatgtacaaaaactaaaaaacctacaagaaatggataaattcctggaaacacacaacccttcaaaattgaaccaggaagaaattgaaaccctgaacagatca

SEQ ID NO: 633164 - DNA, 608 bp, Homo sapiens
tcatctacgtatatagttttgtgtgaacctacatgaggaggataattttacaaaaatggaattgttgagggcaaatgtgtatgcatgggtggttgtgatagatgttgtcaggctgccttccataggggctatccyggttgacatcctcaccagcaatgcctgagtgcctgccccttccctagcctcttcagtgcaaagtgctgtcaggcttttggattattgccaatacacatctggggactgtttcagcatcttactttggtctatattcttgctgtggagtctgtgagccctccttttggtggctttgacattccagttggggcaatcacactgccattcctgcaggctcacagcattttggcccttcgggtcttggcctcttacttgtttcagtgcccaggaacacatctgacccatcccacctcaacatttgacagagggagggagtggcattttctctttgtgcatgacctgtctttattactgattagtgcttctatttcttggtcctgaattcaaacagagaagaaaaagactggaaaaactaagcagcaaaataagctaaagatgatctaataaagaagagataaaaaatgggaaacagg

SEQ ID NO: 633165 - DNA, 595 bp, Homo sapiens
ttggcccggagctccaggggtggttagcaccctgggaaggctgcatgtgggactgaaagtgcaggggactaggagctgaaataccactggcactagcaaattctgtgagaaggtggaggagccatccgcaacagcaacaccatgaggcagcgagaagcaaggacagtagtagatcagataccagactggtcttgctcagatttggactccataagtctctaggttttagaagattcagggggacagaggcagcccagaggaagatastggctctttttttctcacatattagattggtatttgaatatttaattcgaatattaagagatatgactattttaccactactttgtggagcaactcatattggttacataaggtctatgtcaaaatgtgaaatctatgaggcacacaggataaaaagcacgatgttgttctaataaataagagttagtatatatcatgattaaaaagtataaggccaagattctcaatgtaaagggatgaaaatttttactaatgtcagatttctggggttccatttggtgcaaatcaaaaaagtagcacagggagttaagaaaggtgatgtgacacc

SEQ ID NO: 633166 - DNA, 518 bp, Homo sapiens
cccttccagctgggtccccgctggaggccccggcaggcgatgcggaggcagccggagagaggctgggtgctgcccgtggccactccctgcgctggtgcagccttggttctggtggagcgctagcgcccccgggcccgcaggtgtcgggacgggaatgcttcccgctgaggccggtttctgcggcctcagtgcgctccgcctccgctctggatagtccctgcctcttcagttgcgccttttgagcagaaccccgccttatgctgagattttgcccagtacgttagacatgggctggtttccctctccgaatcctgtagtcattcttacttctcttttgctacattctgggttatgtgattttcattctgggcttctctctttctgcttcgtttcgctgtaaacggcctgaggacaaagcaggtctccctgacgtttgcgsccctcgggaaacccagcccctagctgtgcacgggagcccagtgagcgctgaaatcgacacattcatggagaaaggcagt

SEQ ID NO: 633167 - DNA, 690 bp, Homo sapiens
tgggaggaaaggggcctatggaaactctggatttgatgcacaatttttttgtaaacccaaactgcttaaaaagtagtctcttaaaaaatataggagaggactcataagactgcacagagtacactcacatgtggcttgctctgaaggctctggagytggcacagcaggggaaaaagggtgatgagaattgggcagagccctccaggtgagctcccagggccctttcttattcacggagaacgcatgccttctctggactgggaagccccaccagtggtgggaggaatgttggtttcaggagaattccaaaagtttccagcagagtctttcacgcccttgtgaaaggaaaataaatctcaggaccccaaaatcactaagccaaaaggaaaagtcaagctgagaaccgtgtcaggcaagcctgccgcccattttattcctaaataagatagatacaaagataaagctacatgcctctctcacaattggcccacgaggaaattcactgtgggcctcacgatctttgccctaaaacagttctattgaatttcaccctggcaatgtaaattggtagcttatcttcacaggtgcaggacaaagaacagaactcaaggtcatccctctgctcacctgagacctggaagcccttgctttgagttgccctaaaccaatgtacatcttacacttattgat

SEQ ID NO: 633168 - DNA, 690 bp, Homo sapiens
tgggaggaaaggggcctatggaaactctggatttgatgcacaatttttttgtaaacccaaactgcttaaaaagtagtctcttaaaaaatataggagaggactcataagactgcacagagtacactcacatgtggcttgctctgaaggctctggagttggcacagcaggggaaaaagggtgatgagaattgggcagagccctccaggtgagctcccagggccctttcttattcacggagaacgcatgccttctctggactgggaagccccaccagtggtgggaggaatgttggtttcaggagaattccaaaagtttccagcagagtctttcacgcccttgtgaaaggaaaataaatctcaggaccccaaaatcactaagccaaaaggaaaagtcaagctgagaaccgtgtcaggcaagcctgccgcccattttattcctaaataagatagatacaaagataaagctacatgcctctctcacaattggcccacgaggaaattcactgtgggcctcaygatctttgccctaaaacagttctattgaatttcaccctggcaatgtaaattggtagcttatcttcacaggtgcaggacaaagaacagaactcaaggtcatccctctgctcacctgagacctggaagcccttgctttgagttgccctaaaccaatgtacatcttacacttattgat

SEQ ID NO: 633169 - DNA, 517 bp, Homo sapiens
tattcaaaaaaaaaaaacaaaacaaaaaacagcctgcactatcttttcagcctttgcttgaaaatatkgggctacaaaggtgctagctcagaaaagttcctttcttcaagttatttaacaggatgaaggaaaaggaaagctgttgttagaagctgcagcaactagcaatctatgctgaaaatgaccagcacaggtactgtcctaatgggattggacctgggagtgccatgagccatgctgagcagtgcactcagacagctcctcctctagagtggtcttgtatttcagccactccaggagattccagatgttggagcagatttctgggattcttaatgaccactgcctcaagatatctgcaatggatactgttctaactttgtgggtgagtgggcacttgaaagcactgggcaggattggcttcctctattttatgctgtgggtgctgacctgcaggggtgtgggtctgctcttcccatgggcttccccacagccctgctgtgattccaagtggtgc

SEQ ID NO: 633170 - DNA, 550 bp, Homo sapiens
cctctttgcttcagcttctaactggcctcgggcaaatccttcatttacatagggtgtaaccaactggagacctctgttaccaaactcttttagcttaataaaaaccctaaagagcatcgcaaytggggctcttgtgccacttgctccagccgctcccaccctgtggagaacactttcacttcaatagtctgggcttttgttgtttcattctttcattgctttgtgcattttgttcaattctttgttcaacacgacaagaacctggacaactcaccctcaagactatctatctggtaacatttggattgtttccacctttggccattataaataatgttgctgtaaacatttatgtacacatttttatgtagacgtatgtttcaattctggagaggcattgttgggtcacacagtggctctgtaaccatctcaggaaccaccagtcagttttccaaagagacttcaacattttccatttccaccagccgtgtatgagggttctgattttcccaccttctccccagcatttgctattgtctgatgttctggt

SEQ ID NO: 633171 - DNA, 550 bp, Homo sapiens
cctctttgcttcagcttctaactggcctcgggcaaatccttcatttacatagggtgtaaccaactggagacctctgttaccaaactcttttagcttaataaaaaccctaaagagcatcgcaattggggctcttgtgccacttgctccagccgctcccaccctstggagaacactttcacttcaatagtctgggcttttgttgtttcattctttcattgctttgtgcattttgttcaattctttgttcaacacgacaagaacctggacaactcaccctcaagactatctatctggtaacatttggattgtttccacctttggccattataaataatgttgctgtaaacatttatgtacacatttttatgtagacgtatgtttcaattctggagaggcattgttgggtcacacagtggctctgtaaccatctcaggaaccaccagtcagttttccaaagagacttcaacattttccatttccaccagccgtgtatgagggttctgattttcccaccttctccccagcatttgctattgtctgatgttctggt

SEQ ID NO: 633172 - DNA, 595 bp, Homo sapiens
cggccattggttggccaatttggatttagcaagaggggcggggaaaagtagttagggcgtaggtcttgctcaggtcaattgaaaatttcagttctcaacatccctcacactagcatgatataaatgagtttaacttttttcttaaaagcctattttgcaaaataaattattctatcaaaaagacatatgcgctcgaatgttcattgcatgaccgttcataagagcaaagacatggaatggacctagatgcccatcaatggtagactggacaaaggagacatggtaatatacaccrtggaataccatgcagccatgaaaagaacaaaatcatgtcgtttgcggtaacatggatgcagctggaggccattatcctaagtgaaacacaggaacagaaaaccaaatacttcatgttcttactgagaagtgggagctaaacaaagatggtaacaataaacactggggttactagaggtgggaggggagagagagagagagtgtgggctgaaaaactaaccagtgggtacaaggctcaggtgatgggattattcatactccaaacctcagcatcacacaatttacctgtgcaacaaacctg

SEQ ID NO: 633173 - DNA, 595 bp, Homo sapiens
ctgaagagctcagttttaactttagatatagaaaaccaaaagagaatatcactctaatatcaagagaaaaaaagataacatagacaattatacatttttgtttgagtctatcagaaaaccgaagtcacaagtcaaacaagtgaactgactcacacagaatggtaagaagtctctttcttttggcagagcacaggaaaggaagaggtggcttccatatgagtggtaagaagcaaacacattaaacaaacaacaacaaaaatcacaggcccagygcgatggctcacgcctgtaatcccagcattttgggaggctgagatgggcagatcccttgagcccattagcgaccagcctgagaaacatggtgaaaccctgtctgtgcaaaagaatacaaaaattagccaggcatggtggggtgtgtttgtggtcccaactactagggaggctcaggtgggaggtcgaggctacagtgaaccgagattgtgccactgcactccagcttgggtgacacagtgagacctggtctcaacaacaacaacaacaacaaaccccacaaaggggcacaaagaaacacttggaggtgataaatatgtttatt

SEQ ID NO: 633174 - DNA, 531 bp, Homo sapiens
tgactggagagaggtgacttgacttcagagggactgctggacttcaggggaagatwacctgcctgtcccatcccttctccagcttccctgtccactgagagccatttccatcgcttaataaaactctctgtcttcaccatccttcaagtgtctgggcaaccccattcttcttggatgccagccaagagatcgggaccccccaagtgtgggtacccaaagaaaggctgtcacactggtcctttgccctcactggcagagggcagccaccccacacagtgaggcaaggggcccactgaactgataacacactgctgtccacggagagtggagctaagagagcattataacatgccctcagggactttggggatcacaggcacccccacctgggcactaccgcagggtctgcatagagcttgctcctgctggcacccaaagcagctggctggatcctgcactcacttaatcacgtgctcccttccacaggggggttgagcgctgtgggccgagtaaatgtggaacccccattgc

SEQ ID NO: 633175 - DNA, 552 bp, Homo sapiens
cgaattggcagaaagaccaaaaccattctggatatcagaatgaccagttcaaacaggtggtctgctccttccattttattaaccatttccttgaacacacgtttttacatcaaacaaatttcctacagaagcagatattaacataccatatcatacaatatttgacagttatatgtattctttttgggggagacactttgtgttgggtgctaagggttggctcatttatgtacagatatttaccaagtcactacacacatgtattccttccaaatgaagacacatctaaatactagggttatttctgcactatttataaagattaaaaggcatttgagcatttccataaagacctttttatgaaaggtcagatcttgtagcaactcatgaagcaccagagcagaaaattagcctaaagagaattgggttccyagacggggccagtgtcaaccacagggttgaagtttctgcccataggattggaactcatttagtactcaggtctagcaggcagaagagtcaatacacatttgttttgcaacaataacaagc

SEQ ID NO: 633176 - DNA, 413 bp, Homo sapiens
atacccagtagtgggattgctggatcatatggcagctctatttttagtgttttgagtcacctccaaactgttctccacagtggctatagtagttgaccttcccaccaacagtgtacgggggttcctctttctccacatcctcaccagcatccgatatcgcccgtttytggatataagccattttaactggggtgagattatatctcattgtagctttgattttcatttctctgatgattagtgatgctttgaaatttttcatatacctgtttggccatttgtatgtcttattttgagcaaagtctgtgcagatattttgcccatttttaaattggattatttgttggttttcttttgctgctaagttgtttgagctccttatgtaatctggttattaatctcttgctggatgg

SEQ ID NO: 633177 - DNA, 413 bp, Homo sapiens
atacccagtagtgggattgctggatcatatggcagctctatttttagtgttttgagtcacctccaaactgttctccacagtggctatagtagttgaccttcccaccaacagtgtacgggggttcctctttctccacatcctcaccagcatccgatatcgcccgtttttggatataagccattttaactggggtgagattatatctcattgtagctttgattttcrtttctctgatgattagtgatgctttgaaatttttcatatacctgtttggccatttgtatgtcttattttgagcaaagtctgtgcagatattttgcccatttttaaattggattatttgttggttttcttttgctgctaagttgtttgagctccttatgtaatctggttattaatctcttgctggatgg

SEQ ID NO: 633178 - DNA, 378 bp, Homo sapiens
ctcagggactcctaacccatgctcttctcaccatagctcaacacatgtgtggctgcaggggcagctgcggtgtttgctgaacttctcttgtctgtccatgacstggtgggaaaatgaggagaggaagaggaaacatccttccttttttattagacagggctcagaattactatcagcttgagtacacatcctgaacattttcagctatctggtccaaggctaggtcatcgataaagctgaacactcacagtatccacacagcagtttaaaaattgggtaatttgataaaagaattaagtcctcatgggaaaagtctgaagcttgttgatcttcctcacacaaatatgtgcagtttggtggtgctttcatttggaattc

SEQ ID NO: 633179 - DNA, 378 bp, Homo sapiens
ctcagggactcctaacccatgctcttctcaccatagctcaacacatgtgtggctgcaggggcagctgcggtgtttgctgaacttctcttgtctgtccatgacctggtgggaaaatgaggagaggaagaggaaacatccttccttttttattagacagggctcagaattactatcagcttgagtacacatcctgaacattttcagctatctggtccaaggctaggtcatcgataaagctgaacactcacagtatccacacagcagtttaaaaattgggtaatttgataraagaattaagtcctcatgggaaaagtctgaagcttgttgatcttcctcacacaaatatgtgcagtttggtggtgctttcatttggaattc

SEQ ID NO: 633180 - DNA, 378 bp, Homo sapiens
ctcagggactcctaacccatgctcttctcaccatagctcaacacatgtgtggctgcaggggcagctgcggtgtttgctgaacttctcttgtctgtccatgacctggtgggaaaatgaggagaggaagaggaaacatccttccttttttattagacagggctcagaattactatcagcttgagtacacatcctgaacattttcagctatctggtccaaggctaggtcatcgataaagctgaacactcacagtatccacacagcagtttaaaaattgggtaatttgataaaagaattaagtcctcatgggaaaagtctgaascttgttgatcttcctcacacaaatatgtgcagtttggtggtgctttcatttggaattc

SEQ ID NO: 633181 - DNA, 602 bp, Homo sapiens
acgatgattagcatcgtacctggcagagcctcttcacatttgtggatttcagtggctatgtgagttttgaaagaccagtatcttttttttttttggagatggagtcgcactctgtcgcccaggctggagtgcagtggcactatcttggctcattgcaacctctgcctcccaggttcaagtgattctcctgcttcagcctgccaagtagctgagactacaggtgtgcactgccacacccggctaatttttgtatttttagtagagacgggtgttcaccatgttggccaggctggtctcaaaatactgacctcaggtgatccacccaccttggcctcccaaattgctgggattacaggcatgagccaccacgcctggccaagaccagtatctgttttatgtgtgtctttgatatgtgtggaaatgaggaaattcaagaagtaaatggcaggaccatgaaaattcttccttagtttctacttaaacaaatttagattcagcasagtatttagtaaacggtgcatgatggcaggagtctaaaagctaacctacattagctcagaaggtgtggtccacagaatggacctggaatgccttgggctact

SEQ ID NO: 633182 - DNA, 567 bp, Homo sapiens
ggaattccactgcatatattgttcagagcagtgattcttaactggctgcagattgcatccaatctgcggtattttattttaccaataccaatacctaggtttcatttcaggctaactaaatcagaaggaggtagacctagtatctgttaactttaaaactccccagatgattttagtaggcaaggttaagaatcactattttagactgggttactactgattgttttctttatttttaacattctgtcgckgtcttcctctctcgagaataaacaggcagacacacacacacagagacacacacacacacacagacacacacacacacatacacacacatctctttggaatacatcccttcatgttgcagctgacttcaggaagaaagaaaaatcaaatgtagacttaatctcttcattcctattctaactacctggtgatattaaatatgaaactcaaaaaatctttgaaagcaaaccagtttctacaataacagtcttcaatttagaccaatcattacttttgacattcttaaggaatccccaagagtttttatttatatggctt

SEQ ID NO: 633183 - DNA, 675 bp, Homo sapiens
atggctcatcaaaaggagcgagaggtgcggggtcacataagcacttagatatcccctgggctcacttctttgctctccaaactgtagttttctcagctatgaaaagaggggcttggtctagaaaacacctctaattgcctttccataatcccatgacctgagctctcccctcagcctttgaaagcctcctctttgtttccaaagatcaacatccaagccatgctgcctgcacagagtcaggttttctccgcttgggcttctgccagtactgaagagaaatgcatgacaagtatcccgcctgatagaggcaggtgggagggctcttctagaagcattctgctactgtttctcatgggtcatggaggcagctgggtggccacagaggacctgctgctggatgctttctcgggtkagcgtgcatttcccacctcatggacctccttccttgttcttctgaccatggttccatcaacaaacgcccatgcccaggaaggtcagggccccagctttttttaggccaaggagcagaagtctaacaccacagctgtcttgctagaagataaagtgaggcctaaaagaaggacccctctggggaaaattagggcccaatcctcctggtattccttgtttcattctttaccacagaaaaattccaccaaaattactaatattcat

SEQ ID NO: 633184 - DNA, 675 bp, Homo sapiens
atggctcatcaaaaggagcgagaggtgcggggtcacataagcacttagatatcccctgggctcacttctttgctctccaaactgtagttttctcagctatgaaaagaggggcttggtctagaaaacacctctaattgcctttccataatcccatgacctgagctctcccctcagcctttgaaagcctcctctttgtttccaaagatcaacatccaagccatgctgcctgcacagagtcaggttttctccgcttgggcttctgccagtactgaagagaaatgcatgacaagtatcccgcctgatagaggcaggtgggagggctcttctagaagcattctgctactgtttctcatgggtcatggaggcagctgggtggccacagaggacctgctgctggatgctttctcgggttagcgtgcatttcccacctcatggacctccttccttgttcttctgaccatggttccatcaacaaacgcccatgcccaggaaggtcrgggccccagctttttttaggccaaggagcagaagtctaacaccacagctgtcttgctagaagataaagtgaggcctaaaagaaggacccctctggggaaaattagggcccaatcctcctggtattccttgtttcattctttaccacagaaaaattccaccaaaattactaatattcat

SEQ ID NO: 633185 - DNA, 575 bp, Homo sapiens
aggatagacaatttcacatcacctcaaaatgagaacatctcccttcaattaagggaaacaggaggccaagcggcccggcagaaactgcataaggatgctggaccccagctgcacgcagattcccacctgaaccacagtgggcagagctttggaagagtcaatgcttatctttaaagtgacagtgtctcaaatagtccttctactgatgttggcactgctcagaatgtttgggaattaccttcaggttttggggttatttttaagtgacaagatctcactttgttgcgcaggctggagtatagtggcatgatcataactcactgcagcctcgaacatttaggctcaactgatccccctgcctcagcctcctgcgtagctgtgactataggcacgcrcaaccatgcctggctaatttttaaattttttgtagagacaagatctcactgtgttgcccaggctggtcttgaactccttgcctcaaacgatcttcccacttcagcctcccaaagtgctaggattacaggcctgagccactgcacctgactgggttgtttttatttgtttgtttgtttttt

SEQ ID NO: 633186 - DNA, 557 bp, Homo sapiens
catttcttgaaacttcaccatgagtttctctatagatgctataaacttttatgccatcaaatactctctttttcctttatggcctctaaacatcctgtttgattgggaaggtcctctttaatattctaaacatatttttttcctaagatttttggagtttgaattttatgttagatctttatttgctctggattttattcctcttttggtctgacacagcacatggaacatgtgatattgactgaaaggtgtgcatcttctgagctaatatatctgattttaaaattcaggcaaggatragaaagatctcagttgtatgaaacagtgcatggaattactctctgtaaaactaaactccaggccaggcgtgcctggaatctcagcactttgggagaccaagacgggggaattgtttaagaccaggagttcaagatcagcctgggcaatatagcgagaccctgtctcttaaaaaaaaaaaaaaagtaaaggccccaccatctttctttttaaggggactgctttcttataaacctgccacacacaggtaccgccctgcc

SEQ ID NO: 633187 - DNA, 557 bp, Homo sapiens
catttcttgaaacttcaccatgagtttctctatagatgctataaacttttatgccatcaaatactctctttttcctttatggcctctaaacatcctgtttgattgggaaggtcctctttaatattctaaacatatttttttcctaagatttttggagtttgaattttatgttagatctttatttgctctggattttattcctcttttggtctgacacagcacatggaacatgtgatattgactgaaaggtgtgcatcttctgagctaatatatctgattttaaaattcaggcaaggataagaaagatctcagttgtatgaaacagtgcatggaattactctctgtaaaactaaactccaggccaggcgtgcctggaatctcagcactttgggagaccaagacgggggaattgtttaagaccaggagttcaagatcagcctgggcaatatagcgagaccctgtctcttaaaaaaaaaaaaaaagtaaaggccccaccatcttyctttttaaggggactgctttcttataaacctgccacacacaggtaccgccctgcc

SEQ ID NO: 633188 - DNA, 564 bp, Homo sapiens
cattccctctccctctgcctcacatcattattccccatgtatggtagcacaaaaacaccacagagactccttcaaagtcaggatgctcaatgttcctaggcagttttagtttataaggatcagaaattagagaacagaatcccaggcaattcaaacatgaaagcagagacatgtctcaggagggcgctttctcctggttcattttgttcaagcacagtctcttttccccgaggtctaaacagtttgtttcatctgagtgtaaaacatctcccgtgcattcggatgcccccaggctgtgtgaagaaaattcagggcaggctgcgagtctgtcrcagttttcagagaaaatcacggggtggccgtggtggaaagggcagcctgccatggtaacgctgcaaataacccccaccacaagcactgccgggagcccagaatagcctttgtttttccttatttagggtaaataggaatgacatgtgggccataacaatagttttggctgtaggaggagttgtcaaagcaaaactaaactctgttggttactaccagcgttagaagccagga

SEQ ID NO: 633189 - DNA, 609 bp, Homo sapiens
aagtgatagaacctagaatctgtccgtctccctcttcatgggccacctgagtaagtgggtgtgcacggttctttaccgagcttcagtttgggattgcctagggatctcctttgcctggctttatttctctcttgttaagaaaaagtcagagtttgcygcccaaaaaagttcctagagttattattggttaggttgaaattaaccaataatcattgtatctggttcatttacttcctttatgatgttgctcatttaagactttactcatcctctgcgtatttttaaggaaggatctgaaaaatgataagaggttagtattttgttattttatatttttagtaaatgtgacattctagttgagactaaatatgtacagacgtggaacagagttaaaagtgtttatgagtgggaaatagatggaaataaataataaagacttatagcttgtgatttgttcagtatcacttagcaacatcaatatttttgtctacaaataaaggtctcctgtttggtacatgttgaaaatatttgtacgcttgcgtgtttgtgaccttgtgtacacatcatctccagcagaaggatcattttggttgtggctgggtttacagt

SEQ ID NO: 633190 - DNA, 609 bp, Homo sapiens
aagtgatagaacctagaatctgtccgtctccctcttcatgggccacctgagtaagtgggtgtgcacggttctttaccgagcttcagtttgggattgcctagggatctcctttgcctggctttatttctctcttgttaagaaaaagtcagagtttgccgcccaaaaaagttcctagagttattattggttaggttgaaattaaccaataatcattgtatctggttcatttacttcctttatgatgttgctcatttaagactttactcatcctctgcgtatttttaaggaaggatctgaaaaatgataagaggttagtattttgttattttatatttttagtaaatgtgacattctagttgagactaaatatgtacagacrtggaacagagttaaaagtgtttatgagtgggaaatagatggaaataaataataaagacttatagcttgtgatttgttcagtatcacttagcaacatcaatatttttgtctacaaataaaggtctcctgtttggtacatgttgaaaatatttgtacgcttgcgtgtttgtgaccttgtgtacacatcatctccagcagaaggatcattttggttgtggctgggtttacagt

SEQ ID NO: 633191 - DNA, 609 bp, Homo sapiens
aagtgatagaacctagaatctgtccgtctccctcttcatgggccacctgagtaagtgggtgtgcacggttctttaccgagcttcagtttgggattgcctagggatctcctttgcctggctttatttctctcttgttaagaaaaagtcagagtttgccgcccaaaaaagttcctagagttattattggttaggttgaaattaaccaataatcattgtatctggttcatttacttcctttatgatgttgctcatttaagactttactcatcctctgcgtatttttaaggaaggatctgaaaaatgataagaggttagtattttgttattttatatttttagtaaatgtgacattctagttgagactaaatatgtacagacgtggaacagagttaaaagtgtttatgagtgggaaatagatggaaataaataataaagacttatagcttgtgatttgttcagtatcacttagcaacatcaatatttttgtctacaaataaaggtctcctgtttggtacatgttgaaaatatttgtaygcttgcgtgtttgtgaccttgtgtacacatcatctccagcagaaggatcattttggttgtggctgggtttacagt

SEQ ID NO: 633192 - DNA, 429 bp, Homo sapiens
tattcctcaaacttgtcaagatcatcaaaaacagagtcaaagacactgtcacagccaagaggagcctaaggagacacagtgactaaaggtgatgagacatcctgggtgggatcctgggacggaaaagggacattaggtgaaaacgcagaaaatagaaataaactatagactttagttaactttttaaaaagataatcagcaagaggaaagaatgtcattcagtggaaccatttaacctcagcactatctttctgcagtagttggggatacattttaagtctgattgcaaataacacagaagtaaaatgagtcacagcctaccttctccctccttcccctcatctcttactcttctttttctctttgtagaaatgattcagctgctttacttttgattaaagagcttakgttctcttacctatggaattc

SEQ ID NO: 633193 - DNA, 447 bp, Homo sapiens
aaatacacacacgtagggaagaaacacaagtaccttgcgtcttcctaatctaacagtgtctggattgcttcagattcctggagtagctggactgaaggcagagatgaggggcttgttgacctgggagctctttatagctaatgctgctyggcttcagttcctgaggcctgctgccgtagggcctgcctgcaaacgcactgtcaccaccccccgccgctgcagccccccaggagttacgcttttgcagaagacccagctgcctaagtaaaattaaacaccctcaagctgtttgaggctcttaaaaacattttctcagcactgaacttctctgaagatctgagactattagcacaaaaccaagagttctctctaaactgcttttctctttcccctgaatgcaaatgaacttcccctgctggtttccattcatctgacaggtcataattg

SEQ ID NO: 633194 - DNA, 447 bp, Homo sapiens
aaatacacacacgtagggaagaaacacaagtaccttgcgtcttcctaatctaacagtgtctggattgcttcagattcctggagtagctggactgaaggcagagatgaggggcttgttgacctgggagctctttatagctaatgctgctcggcttcagttcctgaggcctgcygccgtagggcctgcctgcaaacgcactgtcaccaccccccgccgctgcagccccccaggagttacgcttttgcagaagacccagctgcctaagtaaaattaaacaccctcaagctgtttgaggctcttaaaaacattttctcagcactgaacttctctgaagatctgagactattagcacaaaaccaagagttctctctaaactgcttttctctttcccctgaatgcaaatgaacttcccctgctggtttccattcatctgacaggtcataattg

SEQ ID NO: 633195 - DNA, 483 bp, Homo sapiens
aaactattattaattaatcattgttaacctaagtgaagagtgttcaggattcattctttggaccagccagcattttaactgtacagtaagtcccccccttaacattgtcaatatatgattagaaactgtaattttaaatgaaatgacatgtgacaaaatcaatcacaaaaacaaagttgaaggaaacagcgttacccgaggacttgctgtatgtcatttcgtttacagttgcagtttacatgaacctatcggcagccttaagtgagcatgtactacattgggsgtagtgaaatgggtttaagtttatagtgctttcgttgatggttttcaagtaacaaaagaaacaggcctgctgctgagccacccctggccccctttgcagccggctgtccttctgtgatcactgtgaatgtgaatgtcctcagcttccctgctccagggtcagtgatcggagtgcctgtgatgtgcttacagcctgggctg

SEQ ID NO: 633196 - DNA, 483 bp, Homo sapiens
aaactattattaattaatcattgttaacctaagtgaagagtgttcaggattcattctttggaccagccagcattttaactgtacagtaagtcccccccttaacattgtcaatatatgattagaaactgtaattttaaatgaaatgacatgtgacaaaatcaatcacaaaaacaaagttgaaggaaacagcgttacccgaggacttgctgtatgtcatttcgtttacagttgcagtttacatgaacctatcggcagccttaagtgagcatgtactacattgggggtagtgaaatgggtttaagtttatagtgctttcgttgatggttttcaagtaacaaaagaaacaggcctgctgctgagccacccctggccccctttgcagccggctgtccttctgtgatcactgtgaatgtgaaygtcctcagcttccctgctccagggtcagtgatcggagtgcctgtgatgtgcttacagcctgggctg

SEQ ID NO: 633197 - DNA, 570 bp, Homo sapiens
atttcctttttaaatacagtcatgcattgcttacagaagggggtaggtgtacttacataaacctagatggtatagctgactgcacacctagggtatatggcagcagtccccaacctttttgacaccaggaccggtttcatggaagacaagtttttccatggactgagggtgtgcaggaggatagtttcaggatgaaactgttctacctcagataatcgtcatcaggcattagttagattctcataaggagcatgcaacctagatccctcacctgcacagttcataatggggctcacacacctgtgagaatctaatgctgctgctgatctgacaggaggcagagctcaggagataatgctccctcacccaccgctcacctcctgctgtgcggcccagttcctaacagtccatgaaccggtactcgtctgcagcccagaggttggggacccctgccgtacrgtatagcctgctgctccaaccaccattataaatgtggtccatcattgaccaatacattgttatgaggcacataactgtatttaataggattcatcagagaaaccacctggg

SEQ ID NO: 633198 - DNA, 531 bp, Homo sapiens
gagacctggaatccagcactgccatgaggatggggacggggatggggatctcaggggttgccatccattgtccccacaccagacgatgtgccagcattgtccctggcatgctgtgggggctctaagagatggtgattccttctgaataaggaaatataaaaatgtctcttaattcccctaggcagtaggagctggttacccacaagcgaagcctcagttagattctcccagcagagaaaaggagatcttcaggctagtcccaataggaacmgaactaagcagaagaactttgtacttggatgctggagatgatactgcgtatctaatgctcacgactctcactttgcacagtaatgtgggaccataaaaatggccctgtgaattgaaaccatgcaaagtgatgttaatagcaggaaaaattataattgctgccctgacctttaagcatatttttggtcacagcattaaaaacttttctaccatcaattgtaaatgcatagggaaatggcaagtgatagtagaactggtatt

SEQ ID NO: 633199 - DNA, 421 bp, Homo sapiens
gaggaaaggcaaagtcagttgggttggccttyctggtgcagaatgacagtgtcaacacctgttaagtttcccagccagggctggtgatggactgtctgtctccacggcagagtatggaagcagagaggcactacctggggcagagggagatacggctgaaagcatggagaggattaatgtggctggggtgaggagtgagagggaaacttcaacacaaaacaaaacaggaagatagtggagatggtgctccagtgatctttttatctgcttggaaaaaaatggaattaaattcagatcttccaaagaaaagctaatacatgtaagttaggaaaacggcagtgatttctgggagcaacattcttcaagcctggattagttcacccatagaagtcatggaactcatgtcctcacacacaggatc

SEQ ID NO: 633200 - DNA, 421 bp, Homo sapiens
gaggaaaggcaaagtcagttgggttggcctttctggtgcagaatgacagtgtcaacacctgttaagtttcccagccagggctggtgatggactgtctgtctccacggcagagtatggaagcagagaggcactacctggggcagagggagatacggctgaaagcatggagaggattaatgtggctggggtgaggagtgagagggaaacttcaamacaaaacaaaacaggaagatagtggagatggtgctccagtgatctttttatctgcttggaaaaaaatggaattaaattcagatcttccaaagaaaagctaatacatgtaagttaggaaaacggcagtgatttctgggagcaacattcttcaagcctggattagttcacccatagaagtcatggaactcatgtcctcacacacaggatc

SEQ ID NO: 633201 - DNA, 421 bp, Homo sapiens
gaggaaaggcaaagtcagttgggttggcctttctggtgcagaatgacagtgtcaacacctgttaagtttcccagccagggctggtgatggactgtctgtctccacggcagagtatggaagcagagaggcactacctggggcagagggagatacggctgaaagcatggagaggattaatgtggctggggtgaggagtgagagggaaacttcaacacaaaacaaaacaggaagatagtggagatggtgctccagtgatctttttatctgcttggaaaaaaatrgaattaaattcagatcttccaaagaaaagctaatacatgtaagttaggaaaacggcagtgatttctgggagcaacattcttcaagcctggattagttcacccatagaagtcatggaactcatgtcctcacacacaggatc

SEQ ID NO: 633202 - DNA, 313 bp, Homo sapiens
catgaattctgtaatcgttttctgataggtagaaatttccctcaaggactgacttgaatggacggggatgagaaagacagtgattgtttctggcccctcagtaggaaaggcgrgggcatgggtacaggtgccggaacagccccagcattggttctccctcgggcgtgctgggccaagaaacgttggctctcaggaataaaaatccccagacctcaaacaaagagaagaccttggccgcctctctgtttgctcagcttaatgcccccaaatcagactgtatgaggaaacacacaagaaatgtatttttagcgtc

SEQ ID NO: 633203 - DNA, 313 bp, Homo sapiens
catgaattctgtaatcgttttctgataggtagaaatttccctcaaggactgacttgaatggacggggatgagaaagacagtgattgtttctggcccctcagtaggaaaggcgaggrcatgggtacaggtgccggaacagccccagcattggttctccctcgggcgtgctgggccaagaaacgttggctctcaggaataaaaatccccagacctcaaacaaagagaagaccttggccgcctctctgtttgctcagcttaatgcccccaaatcagactgtatgaggaaacacacaagaaatgtatttttagcgtc

SEQ ID NO: 633204 - DNA, 313 bp, Homo sapiens
catgaattctgtaatcgttttctgataggtagaaatttccctcaaggactgacttgaatggacggggatgagaaagacagtgattgtttctggcccctcagtaggaaaggcgagggcatgggtacaggtgccggaacagccccagcattggttctccctcgggcgtgctgggccaagaaacgttggctctcaggaataaaaatccccagacctmaaacaaagagaagaccttggccgcctctctgtttgctcagcttaatgcccccaaatcagactgtatgaggaaacacacaagaaatgtatttttagcgtc

SEQ ID NO: 633205 - DNA, 313 bp, Homo sapiens
catgaattctgtaatcgttttctgataggtagaaatttccctcaaggactgacttgaatggacggggatgagaaagacagtgattgtttctggcccctcagtaggaaaggcgagggcatgggtacaggtgccggaacagccccagcattggttctccctcgggcgtgctgggccaagaaacgttggctctcaggaataaaaatccccagacctcaaacaaagagaagaccttggcckcctctctgtttgctcagcttaatgcccccaaatcagactgtatgaggaaacacacaagaaatgtatttttagcgtc

SEQ ID NO: 633206 - DNA, 579 bp, Homo sapiens
aagcttgaaacatttaaaagtatttagagatcttgttgatgaagactctgattcaaagtcagaacttggagaaattcagatagacatcctgagaattttcagcagaaagtaatataggctttttcagctagaagggccatagctcaccattgtggatcaattcagggaactggggtgctggagaaagcatgatccatacagtcccamcagacttttgcctcttgccaggaagttggagagattggagattattgttgttgtatttcatgtgtactttgtcgtatatgttaactcttgtactaacttctagtaaactgtatataggtctcattccataataggggcccacccattttcaaagaatccataataactcgtggagggctgaagtcctgggttgtatcctgactctctctgtgaactgtgaccttggaagagtaaaccgtttctttaaacctcagtttcctcctctctacaatgagataataaaccaatttcacataattactgtgggaattagatgaatacaaataaatcacctagcacagtgtctagcatataataaatatacaacagata

SEQ ID NO: 633207 - DNA, 680 bp, Homo sapiens
atcgattccatttataaagcttccttcctccatttataaagctaagagttaaataacccattctcgtataattgaccatggatatccgagtcaggtgggcctcgctgacaggtgagccaggattctagggccaaatagagacagacgaggtaatgggaaaggctgacatcataggccgtggtagccctctctggggactacttgttaacactgtcttaagactatttaaattccatatttgtgtctatgtgtatatttatttaaagaagccgtgggttcgcttggtcttgtaacttccaccttggacagctgtgtctctgagctaatcccaggatcacaggcttaatgcaatgcagcttgatgagctaagctcatgcagaagccctggtgaaacccaggctggtgttgctgcccagcctctgcaaacatcctggtgcacaggtgagagttgtaggttcaacgtctctgctcaaacccaccytacactatttgtaggtgagcaagccattgacagaggctctttcaagccctgggctgtaacatctctccatgctttcactgaaaggcatgtttgcccacccccaccccctcgtctattaccactgtgggcaaagcatggaaggtatttaggtgggtgggcaactttttttctttgtggacattttgctatatttaaatgg

SEQ ID NO: 633208 - DNA, 680 bp, Homo sapiens
atcgattccatttataaagcttccttcctccatttataaagctaagagttaaataacccattctcgtataattgaccatggatatccgagtcaggtgggcctcgctgacaggtgagccaggattctagggccaaatagagacagacgaggtaatgggaaaggctgacatcataggccgtggtagccctctctggggactacttgttaacactgtcttaagactatttaaattccatatttgtgtctatgtgtatatttatttaaagaagccgtgggttcgcttggtcttgtaacttccaccttggacagctgtgtctctgagctaatcccaggatcacaggcttaatgcaatgcagcttgatgagctaagctcatgcagaagccctggtgaaacccaggctggtgttgctgcccagcctctgcaaacatcctggtgcacaggtgagagttgtaggttcaacgtctctgctcaaacccaccttacactatttgtaggtgagcaagccattgacagaggctctttcaagccctggrctgtaacatctctccatgctttcactgaaaggcatgtttgcccacccccaccccctcgtctattaccactgtgggcaaagcatggaaggtatttaggtgggtgggcaactttttttctttgtggacattttgctatatttaaatgg

SEQ ID NO: 633209 - DNA, 559 bp, Homo sapiens
ttcccatctgtttcttttgtttaaggtgataaatgctgtggcattccattgccttgctttttagcagtggctggccaggctgacttcttgctctctggacaagctgcataattctctattagcctgtagccttgctgttttctagaaccaaaggacctctcctcctgctatccaggcagacccttgaaagtggaacattatacatgattctagaaaatctcctacaacagacctttttttgttttttgtttttttaacatttgtgtagcattgcactgtaccctcatcgtataatgttgcttaagagcatgccttttacatatctttcccctgcaggtccttggaagggctagtctgcatatctcrtatctgcactgagtggtcctaaggggttgtttgtttgtttaaactgcaaatgtgatctgttttcagagatgtgactgacttgctgggcttcatgtcctggaacatggcacctgcttgaaatcctcaacagtctttgtcctgtgtcatccaggtagaagcttacatgctacaaaaaaaggactagaatgatatg

SEQ ID NO: 633210 - DNA, 407 bp, Homo sapiens
agaaaattccagcctgaggttgagtctctttgatgtcagctccagggctgcaggcagcaaatgctaagcacttactatgtgccggccaccacgatgcactgcaggagacaaagagagccaggaaccgcccttgtccctgctgtccctrcttcacatctctagcaagagctagcggggtcgtgaggcctgtgaaacttggcgtggcacccagcagcgtgctcagcgtggagtgggtgaaggcaccagtgacggatgtgctgcaggagcacacaggaggggtgcctaacctaaatactgacaacaactaacactgagatggcgcttcctgtgggccaggcagtgctccagggcactctaactcattcaagtaggccatttaataattacaactatcatgagatgaattc

SEQ ID NO: 633211 - DNA, 400 bp, Homo sapiens
caaataaaagcaaaacataccaaaacttatgggatacagctacaggaatactctgaaggaaatttatagctgtaaaagcctacattaagaaagatatcaaattaataacctaatcttctataataagacactggaccaaaaggaataaattaaaacaaaatcaagaaaaaaagaaggaaataacaaagattacagtaacaaaacagagaatagaaaaatagagaaaatcaacataatttggttcttgaacaagacagaaaaaattaagaaatctttagtagactgacataggaaaaaaagaaaagactactaaaatcaggaatgaaaggggcaacattattatcagccttacaatgataaaartgactataatgtaatattatgagcaactgtatgccaa

SEQ ID NO: 633212 - DNA, 589 bp, Homo sapiens
gagctggttttgactcccaggtcagcactttctacacatcatgatggctayaaaatattgttgtagacccaatgtttgtgttccctgccccagcattcatatgttgaagccttaacccatcaaggtgatggtattaggaggcacggcctttggaggtagttaggcttaggcgagatcatgaaggcagggtccctatgatggaattagtgcctgtagaagaagaggaagagacatcagagctttctccctccaccatgggaagactttcaagtatataatacattgccattaatgatagtcaccatgatgtacaatagatcccttgaacttatgcctcctgtgtaactgaaatttggctgaagtgatctgcccaccttggcctcccaaagtgctgggattacaggcatgagctaccaggtccacggcctgtaaattatttttttttaaataatggttaatatactttaaaagcacataaaccaatttcagttctgtacactttttagataagctgactttttttccctcatcgcaatatttccttaatgagagaagcagcttgctgatttacattctgatgccagcagct

SEQ ID NO: 633213 - DNA, 589 bp, Homo sapiens
gagctggttttgactcccaggtcagcactttctacacatcatgatggctataaaatattgttgtagacccaatgtttgtgttccctgccccagcattcatatgttgaagccttaacccatcaaggtgatggtattaggaggcacggcctttggaggtagttaggcttaggcgagatcatgaaggcagggtccctatgatggaattagtgcctgtagaagaagaggaagagacatcagagctttctccctccaccatgggaagactttcaagtatataatacattgycattaatgatagtcaccatgatgtacaatagatcccttgaacttatgcctcctgtgtaactgaaatttggctgaagtgatctgcccaccttggcctcccaaagtgctgggattacaggcatgagctaccaggtccacggcctgtaaattatttttttttaaataatggttaatatactttaaaagcacataaaccaatttcagttctgtacactttttagataagctgactttttttccctcatcgcaatatttccttaatgagagaagcagcttgctgatttacattctgatgccagcagct

SEQ ID NO: 633214 - DNA, 484 bp, Homo sapiens
caccattgcactccagcctggagcgaaactccatttaaaaaaaaaaaaatattggaactagatgcttgcttctttatctgacaaaggatgcaggccagtgacaatacagcttgtgcttggagtctcagtccattgtttgtatgatcttttattttttaattttttatagagacaagtcttgacaccacgcctggcctaaaccttatcttaatgagatttagttgttatctagaaagagatttgaaaaagaattgaaactgaagatagaagatagaagaaatgagattggactcgtagtttattttttaattcatctctttaaacttcccttaagttgttctggtttcctctgacttytgatgataagtaattttaatagtcctttcttgaggatgatcagccatatctaccgagggtgctccctgactgcttagtattatggtgaagtcacagagtaggacatcttttccctaattaatattaa

SEQ ID NO: 633215 - DNA, 562 bp, Homo sapiens
tttagcatgattctttaggaccctaggatttttggactgggaaatgagcattggctgcaatttaaagtctccagctgcattagcccctagtgagaaatttagcctgtcctttgaagctttgaggccaggcattgacctctccagctatgaaaaccctacatggcatctccttccaatagagggytattccacctacactgaaaatctgttatttagtgcagccaccttcatcagtgatcttagctagagcttctggataacctgctgcagcttctaccccagcacttgctgctttaccctgcactttgatggtatgtagatgttttctttcattgaacctcatgaacctacctctgctagcttccaacttttctcctgcagcttcctcacctctctcagccttcatagaattgaagtgagttaggatcttgctctggattaggctttgtcttaagggaatgttgtggctggtttgaccttctatccagaccacttaaactttcttcatgtcaacaatgaggctgttttgctttcttatcatttgtgtgttcactggagtagc

SEQ ID NO: 633216 - DNA, 562 bp, Homo sapiens
tttagcatgattctttaggaccctaggatttttggactgggaaatgagcattggctgcaatttaaagtctccagctgcattagcccctagtgagaaatttagcctgtcctttgaagctttgaggccaggcattgacctctccagctatgaaaaccctacatggcatctccttccaatagagggttattccayctacactgaaaatctgttatttagtgcagccaccttcatcagtgatcttagctagagcttctggataacctgctgcagcttctaccccagcacttgctgctttaccctgcactttgatggtatgtagatgttttctttcattgaacctcatgaacctacctctgctagcttccaacttttctcctgcagcttcctcacctctctcagccttcatagaattgaagtgagttaggatcttgctctggattaggctttgtcttaagggaatgttgtggctggtttgaccttctatccagaccacttaaactttcttcatgtcaacaatgaggctgttttgctttcttatcatttgtgtgttcactggagtagc

SEQ ID NO: 633217 - DNA, 562 bp, Homo sapiens
tttagcatgattctttaggaccctaggatttttggactgggaaatgagcattggctgcaatttaaagtctccagctgcattagcccctagtgagaaatttagcctgtcctttgaagctttgaggccaggcattgacctctccagctatgaaaaccctacatggcatctccttccaatagagggttattccacctacactgaaaatctgttrtttagtgcagccaccttcatcagtgatcttagctagagcttctggataacctgctgcagcttctaccccagcacttgctgctttaccctgcactttgatggtatgtagatgttttctttcattgaacctcatgaacctacctctgctagcttccaacttttctcctgcagcttcctcacctctctcagccttcatagaattgaagtgagttaggatcttgctctggattaggctttgtcttaagggaatgttgtggctggtttgaccttctatccagaccacttaaactttcttcatgtcaacaatgaggctgttttgctttcttatcatttgtgtgttcactggagtagc

SEQ ID NO: 633218 - DNA, 562 bp, Homo sapiens
tttagcatgattctttaggaccctaggatttttggactgggaaatgagcattggctgcaatttaaagtctccagctgcattagcccctagtgagaaatttagcctgtcctttgaagctttgaggccaggcattgacctctccagctatgaaaaccctacatggcatctccttccaatagagggttattccacctacactgaaaatctgttatttagtgcagccaccttcatcagtgatcttagctagagcttctggataacctgctgcagcttctaccccagcacttgctgctttaccctgcactttgatggtatgtagatgttttctttcattgaacctcatgaacctacctctgytagcttccaacttttctcctgcagcttcctcacctctctcagccttcatagaattgaagtgagttaggatcttgctctggattaggctttgtcttaagggaatgttgtggctggtttgaccttctatccagaccacttaaactttcttcatgtcaacaatgaggctgttttgctttcttatcatttgtgtgttcactggagtagc

SEQ ID NO: 633219 - DNA, 546 bp, Homo sapiens
gtctaagtctccaatgcccaaagtaggaaggactcacccacctagaaggagaatccaggcagtgccaggtagtgtggtgtggcggttaagggcatgggagccaggatacctgcctttgaatgtggccttcacttctttgctgtgtgaccatgggaaggaactcagcttctttgtacctaggtttttctcatctgagaaacaggaataataatagtccatatcttctaatgtcctgtgargattaaatgagttaaccttggtgaaggtcctaaaaaattgccaatcttataccatgtgcttgttagaaatgtttatgtaataaataagcaatattaaggtacacaaactgtatcttttctaattctcccctagctggagcgggaggacaagggtataccctaggagccagcggtagaacagaaagtttattgccccagattgaagaagacatctaagtcaatggggggaaacaccactaacagctgaggtgatggctgatgagtggagggattttaagtggacggaaggagtatggaatgtcaggtc

SEQ ID NO: 633220 - DNA, 588 bp, Homo sapiens
attgtcccaactccatgatggcctcccccagcctcaacacagatgacaaaagagatttttaacgatgtagcaccacggtagttaggacccacagggccaaggcagagaggcagctgatcagaggcacagggaggattctgatagtgtttcatggtctggcaacgtaaaaccactagactgtgttatcagtgatagggtgtttgtcctctaaggcaggacattgcagcaggctcccaggagagagtgccacagactgcctaatggtggaagagcactttctattctgttccttaaggctaagtactcaacagttttttaggcaaacattttttcagtcgcattgaaggtcacagctgcatttgacatgacttgaattggctgtttgaggtgtgtctcaaacttgtgctattggcagcagaggtctgaatgtctaggttgaaacctgytccccattttaaaatcagttcatgctggatcaaaggtgagacccctgtcagggttagcaacgagttgctgatctgtgtggtaataaatagctctgagtctgggaggaatggctggtgaggctggagtgctgtagcatgtaga

SEQ ID NO: 633221 - DNA, 437 bp, Homo sapiens
tagcttttctgtgggaggtgggctcctccactaatcacgtccatggagttccctagttgggaggccagaaaaaatgaaaaatgtctactacaagaccctgrcagatgtccctagggtttcctgtaattgtctacttactgtctgcacactcagcttgtaataatgaactgattccctagaggcaatgatagactgatgtttggagtatttgacaaggcagaaaattttctctcatatcctggattatgttcattgcttttatgcccaaagtgaagggagtaccatttcctcacagcctcagaagtgggaagtgagctcgcatgtttaaagaccttctacatacctgacagttgagacagactgtggatggcggaaagaggactggacagagtcaggagacctggtgcaacccgggctatcacttactagctttgtga

SEQ ID NO: 633222 - DNA, 437 bp, Homo sapiens
tagcttttctgtgggaggtgggctcctccactaatcacgtccatggagttccctagttgggaggccagaaaaaatgaaaaatgtctactacaagaccctgacagatgtccctagggtttcctgtaattgtctacttactgtctgcacactcagcttgtaataatgaactgattccctagaggcaatgatagactgatgtttggagtatttgacaaggcagaaaattttctctcatatcctggattatgttcattgcttttatgcccaaagtgaagggagtaccatttcctcacagcctcagaagtgggaagtgagctcgcatgtttaaagaccttctacatayctgacagttgagacagactgtggatggcggaaagaggactggacagagtcaggagacctggtgcaacccgggctatcacttactagctttgtga

SEQ ID NO: 633223 - DNA, 586 bp, Homo sapiens
aaaatcccttacgggagcctcatgctctgggtttgggcttcctgtctccaacagaatccaagttttctttgatcatgagaaaagctgtgtcctgaaccaggaaagaggtcaaggataggaggaaaagacagagaaggcatagagtccaggtatggggacacgaaccgagaggcaatggggcttaggcaggggctgggtctgtgtgaccacctcacaagacacagaaatgagagttcctttcttactaactgcattaggcataggaggactccctttgtgttcctgggggctttctgccttggggccccttgaagttactcaggctttctgcatggctgccccatggggctgcctgattctgcactggagctcctgagtggattccggcccctgcgactgtgtcaagaggaagccaggtttgaggactggctgatcctgggctctgcaggcccacgtgttttcctttgactcaacccacttgaaattccctccatcttctctaaagctcagaaggaggaaactggcaggcctccttatagaaggtatcyaggagatgaagccagggaaaacaaattgggaatagaaa

SEQ ID NO: 633224 - DNA, 565 bp, Homo sapiens
gaaaccattgcccaactgaagtgagaccgaacaaacatgatttgatatttccatgaagaaattcattaacgcggcttttcatgatatgaccttgctgtgaacaccaaaatgaagtttggtgaaaaggtctctggcagggagcgtgaggcttctccttagatagcctggaacaggtatcaccctggtgaggcctggtacagccgcaagtgtggagctggcccctcatcagtcactcttgagaatcacccagttctgtgggtagagaagggagctttccctgtccactcatgatgggagaatccacaggcccccaggtcctgaaggaggaaagtccgcaggaacttccctgagtcctcagcccatcttagtcagttccctttkgtctccaacttccaaaatgtacattgcattcatcctcccaactctttatttaaatagttctacgaggttataaattgaagagttctttagaaacacagcagtgcacgcagggcagcattctgttcctaggatttggtgtgggaactgtccattccaaaccctgtagcactttcaggcaggaatg

SEQ ID NO: 633225 - DNA, 499 bp, Homo sapiens
ggatgggcacacgcctcaggcacagatgacttcactccccaaagactgaaccagagaactccaaggttcaactgatcatctgccttattktatccattagtctactttcatttgttagaagagacacagtttctttttatctctgtcttctcctgactaattctattagatcagccctcaaatacatcatgtgatttgtacagggatatcatttttattcttttttttttcggtcccctttcacgtacctctaatcatttttatccttgaatggcataagtcaaacttttgaattttctaatagaatgcctttttttaaattaaaacttgccttttgacttcctatttacttatttatttttattgttagataaagcagataaaatgtattgacaatttaaaattttgaaaaacacagtgcagaagtttggcctcatggacatatattaaacctgggctttatttcacatttttcagcacatatggaacaattgaaatg

SEQ ID NO: 633226 - DNA, 408 bp, Homo sapiens
atcatctgccttattttatccattagtctactttcatttgttagaagagacacagtttctttttatctctgtcttctcctgactaattctattagatcagccctcaaatacatcatgtgatttgtacagggatatcatttttattcttttttttttcggtcccctttcacgtacctctaatcatttttatycttgaatggcataagtcaaacttttgaattttctaatagaatgcctttttttaaattaaaacttgccttttgacttcctatttacttatttatttttattgttagataaagcagataaaatgtattgacaatttaaaattttgaaaaacacagtgcagaagtttggcctcatggacatatattaaacctgggctttatttcacatttttcagcacat

SEQ ID NO: 633227 - DNA, 408 bp, Homo sapiens
atcatctgccttattttatccattagtctactttcatttgttagaagagacacagtttctttttatctctgtcttctcctgactaattctattagatcagccctcaaatacatcatgtgatttgtacagggatatcatttttattcttttttttttcggtcccctttcacgtacctctaatcatttttatccttgaatggcatargtcaaacttttgaattttctaatagaatgcctttttttaaattaaaacttgccttttgacttcctatttacttatttatttttattgttagataaagcagataaaatgtattgacaatttaaaattttgaaaaacacagtgcagaagtttggcctcatggacatatattaaacctgggctttatttcacatttttcagcacat

SEQ ID NO: 633228 - DNA, 603 bp, Homo sapiens
acattttttatttcaaatttgttattttaagtacacattgtgatttaatgactctttctgggayttcagtttgtggttgaggtctgagagctgaagaatgcatgtttaatttttttcatcctataaccagtgtttcatcttagactaaagagatgcacattttaggaatcccacagaatcactgaaaaaaacattgatgtttatacaaatgcttgcatgtttgagtgaatttaactaaaggaaacaatcagatctggttccaaagactttgtgggaccctactaaatccttaatttctcccttacttctgacttcacaggactttacgtggatgtacagtgctgggctttatttgtgggcactagggtctcctccgttgacactggtctttgtggcttcagcttgtagcacaggggacattttctcattggagggaggctgagctctggctgagttttgacgagcaggtggaattttcatcctcgctttggaagtggtgaagagaactggctgaagctggatggataaggagacagagagtatgatgacagaactttgagagtccaaaaccatacccttccccaggaagaaagggcagagggc

SEQ ID NO: 633229 - DNA, 603 bp, Homo sapiens
acattttttatttcaaatttgttattttaagtacacattgtgatttaatgactctttctgggacttcagtttgtggttgaggtctgagagctgaagaatgcatgtttaatttttttcatcctataaccagtgtttcatcttagactaaakagatgcacattttaggaatcccacagaatcactgaaaaaaacattgatgtttatacaaatgcttgcatgtttgagtgaatttaactaaaggaaacaatcagatctggttccaaagactttgtgggaccctactaaatccttaatttctcccttacttctgacttcacaggactttacgtggatgtacagtgctgggctttatttgtgggcactagggtctcctccgttgacactggtctttgtggcttcagcttgtagcacaggggacattttctcattggagggaggctgagctctggctgagttttgacgagcaggtggaattttcatcctcgctttggaagtggtgaagagaactggctgaagctggatggataaggagacagagagtatgatgacagaactttgagagtccaaaaccatacccttccccaggaagaaagggcagagggc

SEQ ID NO: 633230 - DNA, 583 bp, Homo sapiens
acctgtccacccagccatggcagagccatgtgacaccgaagggccaggggatcagtgcctctctctatagcctttccattgctaaaatgggcagggaaaggagctattatttgttgtttactatatgtggatggtgttagatgtgtgattttcattcagtcttatcaccttagggggagagatttttcctaccagctcacacacagccacaccctacccacacctatgtctgtccctgctgttctgttctcatcacactgatcactgtgcagtgggtatttcacttcattctttattctttcttcccacctagaaggcaaactgcaggacttatttacccctttttttccaactcttgggtggaacatggtctctagaacatggcatgtagttggtgatcaataagaaatcgtcaaaaacatatgtgttttgcagatgagaaaacatgctcagagtcattgtctaaygtgcctgtggtcacagaggtggtcagtcacaaacctggaatttgaactctgggtgttctcacctggagccacttttttttttccaccattctaattattggaaaacacttcatttc

SEQ ID NO: 633231 - DNA, 604 bp, Homo sapiens
ttgggtttctttacgttttcatgtaaattttagtattataaaattacaatttgtcaatttttgcaaaagaaaaacaaagcagctggtattttgatagagacttgttgaatctgtggatccctttgatgactactgccattttaacaatattgtttcaatccatggaaagattcatggaaagatgtctttccagttatttaggttttctttaatttctttcaatgacgtacaaatgagtatacaaatcttgcatttgttttactatatttattcctattttagtctgccttcttaggtttctttctcagattcttaggttttccttcagaatacctagtgctagaaattaaacctggacacatttctttgttcttatttgagtagcctttgaggcttcaaatctttactgcccttttctatatttaaatgggacatttttttctgagtctgtgattctccaagtcctgtggtcaatataagtaaaacagtaactgcttctttgactggtagagttattacattggyctgtcaccgtagaaatctagaagcctaacttagtgaatgagatggtgaagtggaaatatgattgtgaagttcaggctgt

SEQ ID NO: 633232 - DNA, 602 bp, Homo sapiens
atatattcatggagccataaagtgaaaggcgtagatagatgttggagtggtgattaacgagaaactagatggaagtgacaatatattggtgaatcaaaagtaggcaggtaaacaaactgaaaattcaaatgctgctgtattattatctccacaggagtatgccaatttaaaatcaattaaatattaatcataaagaactcagttaaaataaccagatttcagtgaacatacagaatatgcaaatctttgcaatgaagttaacatggcatacactatcctgaacagactaatgcaggaaaagaaaaccaaacactgcatgttctcactaataagtgggaactaaacattgagtacacaaggacacaaagsggggaacagcagacagtgaggcctacttaagagtggagggtggagaggatcaaaaaactacctgctgggaactatgcgtattatgtgggtgttgaaataatctgtacaccaaacccacaagacatgcaatttacctatataacaaatctgcacatgtattcctaaacttaaaatcaaaggttttttatttaaagttaatgtggcataaacattcaccaaaattccactttaca

SEQ ID NO: 633233 - DNA, 558 bp, Homo sapiens
gaaaggcacaggacttggagctctgagaattgctgagaattgatgtaatgatctctggcaaagcacaagtgtggagcccatctgtctccttagggcgagaaagggtaataaagaatgctaagtraaggaaaaccctgggacagagaagtcactgagcagcagctctctgcaatgtgggtcttgacacggacacacacacacacacacacacacacctgtccacacacatcaggttgttcaaatgtgggtggttgttcaaatggtcttgtgtgtctctgctggcacatttcttcttatgatttctttttataaacttcaacaataaaattgacttctatgatcttagacccttagtaaatgaaacctgttcattttcactagtagatttaaatgtcacaaagctggtattttacatgaaaaaggtcaagcttataaaatacttctacatgaaatcccctgaaacagagaccataggattttccccccttttgtcagaggcacaacagacaaatacgtgggttcaaaaatattaaaggactgcctatcctcccccgcttc

SEQ ID NO: 633234 - DNA, 533 bp, Homo sapiens
ttatttgatagaaatgtaaaacgtagtctaagtgtcttacatgtgaaagtttcgggttcagcccagagcctcctggggcgccctgccctgtggacaccccgggcaccttagtggattgctttgggagcgctgcaatggtgccaggcctcctcagcaataaagtttgagagacgctatgaagaaaggataaaacttttacagaggcttaaagaaggtcttcatttcataaatgaacaattgcccagagaaacttacaggcaagagtagcccttttatctaaactgagatctggatttcaatccaagggatatttagtgtgaatgacaaaggagcctctgccgccytttccaggctgtgtcttctcagcagtctgagggcagattctctgcagctcccctgagccgagccaccaggagttgacagtcccagagaggcctgggggaggctttgtgggtgtctggacatagggcttttccagtgcgggctgcattccttcccattccaggggtccctggcacctcagctcaagctgc

SEQ ID NO: 633235 - DNA, 441 bp, Homo sapiens
agttgcaggtggctacagtgcttgatgtcagattggatccatgcatctcaaatgcaagtgagaggccaggtggaggtctgagtcattgaagggggcataaactggtggtctcagggagataacatagactaagatattcttcaagaggaaattaatgcttgagaggaaggggagagtcagcagaggagactaagacacagccagagagatgagaagaactgagggagggtggaatccagaagaccagagaagagcacrtcaactattagtcaatagttgtgtcaattcctgctgagaggtcaaataaaataatggcctgtggaatttagtgctcttggccttcaccaaggcactttcagcagaatgatggggtgacaggtggactggagggggctgggagaaggggaggtaagaaaaggcagacagtgggcagatgcacaa

SEQ ID NO: 633236 - DNA, 548 bp, Homo sapiens
tatcctgctttcaataagtacacagtcagactggaatatgaggtgtgtacacattaaaacaaacaaaacaactaacaaaaaggcaatgcacagcaaatgcaaaatgagtagaaactttccaggtacaaaaagtccaaaacagtgaagggagatcactgtgttttggagaaaatggagaattccaaggtctcaaaatagaatgtggtgaaaagaaggagaggcgaaaactcagagagggagaatggtgaaggcaagactatggatataaaagggcagtatttctagtatccaaaattagcagagtcatattcaaatccttgcccatttccatatgaagagtcccttgaagccacctgggctgttgctaaccatctcagtggctttatatttcaccttcctgaacccaagatgctgttcactgtggccacctcattcccaggtttcagggcctggagaacaacaasaaccagttgcacttacagtttgcagtgttttgtcttagacttagatgttttcctgttgcaaaacacacacgacgttttagaatc

SEQ ID NO: 633237 - DNA, 576 bp, Homo sapiens
tgcctggttaatttttatactttttgtagagacggggtttcstcatgttgcccaggctagtctcgaactcctgggttcaagtgatcctcctgccttggcctcccaaagtgctgggatgacaggtgtgaaattttttctttgtacatatgaaacatgttttcttttaacatatgaaacacttaacatttataattcattttaaagaatctccttcacttaaaggagtgtttttaaaaatcactgatatttcatcttctcattttacagacaggaaaagtgaggcccagaaaggttaagccatctgccccagggacacacaatggcagagctgcggaggctatttctgatattcttgcttcagtgctctgtccacccctttgttgttggtcaggcagatgctggaatgttccacaaatataaccaagagaaaacaactcaagttcctaccctgcagtgtagatacaccccttgcaaaggaagagccatgtggtttgtaaaccacagtttgcccccaggactgtggagtgagtctggaaggcgtgggggtggtgctgcggggctcacatggtggccatg

SEQ ID NO: 633238 - DNA, 598 bp, Homo sapiens
aacatattaattagttaatatttatttattaagcacttaatatatcccaggcactgcgcttagtgcttcacatacattctgtcatttaatcttcatgacaaccttaggagtcagtattattattaacactacatctttatgaggaaatggaatattaggatagttttattactcattaaatgtcacactgttatttcccttttaaggaagcacaccagagatgcagcatccaaatacgtagagcaattttaggagctactggatatcttctgaaagttgacctctgtccctttgtggaaaatattatcagaatgagtatattaaccacaaaagaaaatctgtttagtacttcatacttctttcatttcttttgccccaaaatgttattgcccaggttgttcacctacttttatcactaggttcagctcaaaatgattttattttataccacaaatttcagcaccattcacaggctggccatggcttagcatttgacagaacctactttagggtctatagtttctccacaaaggaagttttgagccatggaagcaamgctgggctgagcataaaacttcctaaagtgatttgggtttca

SEQ ID NO: 633239 - DNA, 566 bp, Homo sapiens
cattgtgtcttcttggtagccttgttgaaaattaggtaaccatatatgcatgagtttatttttgggctctctattctgtttcattggtctatgtgccatttttataacagtaccatactgtttgtttattcttgctttacaatataatttgaaactgggcaatgtgatgcttccaactttgttttactttctcaacattttttattttttggcaactaagggtcttttcyggttccatacaaattttagaattgttttttctatttcagtgaaaataccgttggaattttgatagggatggcatttaatctgtatattgccttgggtactgtggacattttaataacatttattattttaatccacaaacatggatatcttgaagctgatggagcttcagtttcgcaattcctcacttccatgagctcctttcaaagcccgaagaagagtcctagcaattttgtattcataattttgcattcttttcctttgaaggtccccaacgcttggagtgtaacttgagtggagtacctgttttcctttacttctcccacctagacctgagt

SEQ ID NO: 633240 - DNA, 566 bp, Homo sapiens
cattgtgtcttcttggtagccttgttgaaaattaggtaaccatatatgcatgagtttatttttgggctctctattctgtttcattggtctatgtgccatttttataacagtaccatactgtttgtttattcttgctttacaatataatttgaaactgggcaatgtgatgcttccaactttgttttactttctcaacattttttattttttggcaactaagggtcttttctggttccatacaaattttagaattgttttttctatttcagtgaaaataccgttggaattttgatagggatggcatttaatctgtatattgccttgggtactgtggacattttaataacatttattattttaatccacaaacatggatatcttgaagctgatggagcttcagtttcgcaattcctcacttccatgagctcctttcaaagccygaagaagagtcctagcaattttgtattcataattttgcattcttttcctttgaaggtccccaacgcttggagtgtaacttgagtggagtacctgttttcctttacttctcccacctagacctgagt

SEQ ID NO: 633241 - DNA, 566 bp, Homo sapiens
cattgtgtcttcttggtagccttgttgaaaattaggtaaccatatatgcatgagtttatttttgggctctctattctgtttcattggtctatgtgccatttttataacagtaccatactgtttgtttattcttgctttacaatataatttgaaactgggcaatgtgatgcttccaactttgttttactttctcaacattttttattttttggcaactaagggtcttttctggttccatacaaattttagaattgttttttctatttcagtgaaaataccgttggaattttgatagggatggcatttaatctgtatattgccttgggtactgtggacattttaataacatttattattttaatccacaaacatggatatcttgaagctgatggagcttcagtttcgcaattcctcacttccatgagctcctttcaaagcccgaagaagagtcctagcaattttgtattcataattttgcattcttttcctttgaaggtccccaacgcttggagtgtaacttgagyggagtacctgttttcctttacttctcccacctagacctgagt

SEQ ID NO: 633242 - DNA, 557 bp, Homo sapiens
ttgatattaacccagtcttgcgggtgttgttgctgtgttatttcaccccagtcttcacatctgcaagcactcactctcatctgtcaattacgcaactgcaattttgatcaaaatgaaacactccgcactgagataaaaacagggcgtggtattcttttttggactaggagatttggataaaacgtgataacactgtggttgaactctgcaaacactcccgatcattcacacaatttcggcttcactctgtggtttggatgcagattgtggaaatcacagcctggacccggagaacttgtcgcagcagcagcagggtttccggacccagyatctcccttccctttgctctcctgacagctgcctgcatctggaaaacattaaataacctcatcctttatgtggattcattatgctcttcaaattcattatcaattatcaactgactgtgaagaatgtttgaaatcaaaatgaagaggaagtaattaatgatgaagagtaggatctagaaggaaaggtgagccctcctggggttaggacacggagctgaatgctgcagc

SEQ ID NO: 633243 - DNA, 524 bp, Homo sapiens
ggttgtggagcccagagctgctgctcccaccgctacggtatcacagtgtctcttagcactagagatggtctcattcctcttccttattttaaaagcatcttgttcttcgctgaatttctttttgcctcctcttgtccggtgcctcctcaggaagctcttgagaaaacaggtaagtgataaaataagcagctggagaggcggctgccaagtgagctatgtaggaaggaccatcacccctggggtacctcccagtaggaaccctactcccagcaacacgctgttgacatctcaggaccctgttggggagcagagccagccagcctgctgctggagaagcctctagaaatgtcctcgcctctagaagtccccttcatttcrtggataattgaactgtggtgtgaggcagtctgggcctgtctggaaaaggttttctttcagccagtatgctggggagcaggcagcttgttcactaaccggagtgaaccctctcccccttcccttgctcaggtgctgaaggaggcagc

SEQ ID NO: 633244 - DNA, 541 bp, Homo sapiens
gatcttgtgattctaaaacgtcgtgtgtgttttgcaacaggaaaacatctaagtctaagacaaaacactgcaaactgtaagtgcaactggttsttgttgttctccaggccctgaaacctgggaatgaggtggccacagtgaacagcatcttgggttcaggaaggtgaaatataaagccactgagatggttagcaacagcccaggtggcttcaagggactcttcatatggaaatgggcaaggatttgaatatgactctgctaattttggatactagaaatactgcccttttatatccatagtcttgccttcaccattctccctctctgagttttcgcctctccttcttttcaccacattctattttgagaccttggaattctccattttctccaaaacacagtgatctcccttcactgttttggactttttgtacctggaaagtttctactcattttgcatttgctgtgcattgcctttttgttagttgttttgtttgttttaatgtgtacacacctcatattccagtctgactgtgtactt

SEQ ID NO: 633245 - DNA, 680 bp, Homo sapiens
cacgcaccttgacacttgtccctctaagaatcacaagaatacgcatagggctaggtcattgtgaattcaataggcacawcggccactggaaggtgaagggtagccatgagggccattttcaccagatgaactccagtctccaaaagtaaatagagtagaaaaccatttatccaacagtctaaacactagaaacatccacacacagggatcgttatatagggacttaaaaatgagcagtgactttaaatttttcacctctatggtaatggaagaatcatatacaatggtttgtgggtgatagagatgtcataatctgtggattgcaaatgacctgttaccaggagttacccaggtaacattgtctaagtatagacacatgtctaagtatagagacatggtgaagtgcctcctaacagagcagaagtgaccccatcgaagactacttcttggggaggatttcacacagttcatcatcaagcaaagatcattgccttctgagcagaagagactctaaataaatatagaagaatagaaatctgaagtggaaagttgtagccagagcatgcatatgatactggcagatcttttctaaagagaaattcattttccataaatgctttacaatggatcctgacgataagacatcttgccaaatgatttgctgctcatcataaagattt

SEQ ID NO: 633246 - DNA, 680 bp, Homo sapiens
cacgcaccttgacacttgtccctctaagaatcacaagaatacgcatagggctaggtcattgtgaattcaataggcacatcggccactggaaggtgaagggtagccatgagggccattttcaccagatgaactccagtctccaaaagtaaatagagtagaaaaccatttatccaacagtctaaacactagaaacatccacacacagggatcgttatatagggacttaaaaatgagcagtgactttaaatttttcacctctatggtaatggaagaatcatatacaatggtttgtgggtgatagagatgtcataatctgtggattgcaaatgacctgttaccaggagttacccaggtaacattgtctaagtatagacacatrtctaagtatagagacatggtgaagtgcctcctaacagagcagaagtgaccccatcgaagactacttcttggggaggatttcacacagttcatcatcaagcaaagatcattgccttctgagcagaagagactctaaataaatatagaagaatagaaatctgaagtggaaagttgtagccagagcatgcatatgatactggcagatcttttctaaagagaaattcattttccataaatgctttacaatggatcctgacgataagacatcttgccaaatgatttgctgctcatcataaagattt

SEQ ID NO: 633247 - DNA, 578 bp, Homo sapiens
taacattaaaatacactggatagcaaataacaacttggatgaatctccagggaattatgcttgyggggagaaacagtcccaaaacattacagtataattctattgacaaaacattttgaaatggcaaaatttcaggaatggagaacagatcagtggttgtcaggacttagagatgaaagaggtggtagaggggcaagagagaggtggctgcaattataagaggacagtacaaaggggacttgtagtgttagaactgttcagtattacaactatggtggtgaatacatgaacctgcacaggtgatcaaattgtatgcaacgtaatagacacagatagagacacctacacacagggtgcaagtaacaccaggaatctctggataacattggtacattgtatcaatgtcagtatcctggttgtgatattacagtcaaccccctgtagcctgaggttctgcatctactgattcaaacaactacagatggaaaatatgtgaagaataaagcaataaaaaataatataatcaaaaaccaatacagcataacagctgccatacatagccttgacattacattagg

SEQ ID NO: 633248 - DNA, 578 bp, Homo sapiens
taacattaaaatacactggatagcaaataacaacttggatgaatctccagggaattatgcttgtggggagaaacagtcccaaaacwttacagtataattctattgacaaaacattttgaaatggcaaaatttcaggaatggagaacagatcagtggttgtcaggacttagagatgaaagaggtggtagaggggcaagagagaggtggctgcaattataagaggacagtacaaaggggacttgtagtgttagaactgttcagtattacaactatggtggtgaatacatgaacctgcacaggtgatcaaattgtatgcaacgtaatagacacagatagagacacctacacacagggtgcaagtaacaccaggaatctctggataacattggtacattgtatcaatgtcagtatcctggttgtgatattacagtcaaccccctgtagcctgaggttctgcatctactgattcaaacaactacagatggaaaatatgtgaagaataaagcaataaaaaataatataatcaaaaaccaatacagcataacagctgccatacatagccttgacattacattagg

SEQ ID NO: 633249 - DNA, 578 bp, Homo sapiens
taacattaaaatacactggatagcaaataacaacttggatgaatctccagggaattatgcttgtggggagaaacagtcccaaaacattacrgtataattctattgacaaaacattttgaaatggcaaaatttcaggaatggagaacagatcagtggttgtcaggacttagagatgaaagaggtggtagaggggcaagagagaggtggctgcaattataagaggacagtacaaaggggacttgtagtgttagaactgttcagtattacaactatggtggtgaatacatgaacctgcacaggtgatcaaattgtatgcaacgtaatagacacagatagagacacctacacacagggtgcaagtaacaccaggaatctctggataacattggtacattgtatcaatgtcagtatcctggttgtgatattacagtcaaccccctgtagcctgaggttctgcatctactgattcaaacaactacagatggaaaatatgtgaagaataaagcaataaaaaataatataatcaaaaaccaatacagcataacagctgccatacatagccttgacattacattagg

SEQ ID NO: 633250 - DNA, 582 bp, Homo sapiens
aacattaaaatacactggatagcaaataacaacttggatgaatctccagggaattatgcttgtggggagaaacagtcccaaaacattacagtataattctattgacaaaacattttgaaatggcaaaatttcaggaatggagaacagatcagtggttgtcaggacttagagatgaaagaggtggtagaggggcaagagagaggtggctgcaattataagaggacagtacaaaggggacttgtagtgttagaactgttcagtattacaactatggtggtgaatacatgaacctgcacaggtgatcaaaytgtatgcaacgtaatagacacagatagagacacctacacacagggtgcaagtaacaccaggaatctctggataacattggtacattgtatcaatgtcagtatcctggttgtgatattacagtcaaccccctgtagcctgaggttctgcatctactgattcaaacaactacagatggaaaatatgtgaagaataaagcaataaaaaataatataatcaaaaaccaatacagcataacagctgccatacatagccttgacattacattaggtatta

SEQ ID NO: 633251 - DNA, 578 bp, Homo sapiens
taacattaaaatacactggatagcaaataacaacttggatgaatctccagggaattatgcttgtggggagaaacagtcccaaaacattacagtataattctattgacaaaacattttgaaatggcaaaatttcaggaatggagaacagatcagtggttgtcaggacttagagatgaaagaggtggtagaggggcaagagagaggtggctgcaattataagaggacagtacaaaggggacttgtagtgttagaactgttcagtattacaactatggtggtgaatacatgaacctgcacaggtgatcaaattgtatgcaacgtaatagacacagatagagacacctacacacagrgtgcaagtaacaccaggaatctctggataacattggtacattgtatcaatgtcagtatcctggttgtgatattacagtcaaccccctgtagcctgaggttctgcatctactgattcaaacaactacagatggaaaatatgtgaagaataaagcaataaaaaataatataatcaaaaaccaatacagcataacagctgccatacatagccttgacattacattagg

SEQ ID NO: 633252 - DNA, 593 bp, Homo sapiens
ggatgttttgaaaagagagtataagtgatgggttaaaacttttatgttgaattagctatgagtgagattacagttttaaaattggaatagtgtaaagtagtttggaaacctagaaagggccttcatttgggttgatttccacagtgttttaaataccattcttcactaaaaatattaggaatcttagatattgctttatgggtgtagtttatgcaagaaagacactgcaaaaggcagaccgacaaagaaaatggtttatccttagatcaaaagagtggcagaaatctaygcatacttttctttaaaggaaagtgattaaaacatgaacatattatcaatttatgattccctaacttgccaactttcttcaacccacatttctactaccagtctggattttgacagacaaatgggatttcattgtagtacttacctgtgaagcagtagttctcaacacttttggttgcagaacctgttaactcctttaaatattattgaggaccccaaaaagtccatattaatttaccatattagaaagtaaaaataagaagctctcaaatatctttaatatgtttatttaaaactaacaatat

SEQ ID NO: 633253 - DNA, 560 bp, Homo sapiens
tgatggttttcttctatgtgcagtagaagtactttgagaacttcccatttgtctcacagaataataaaaagatgggaactcaagggtggagatttaataaaataaaaaattgttacacctttatcaaaaactttcttaagtaaaactgacttctttttaaatgtgggtagtgaggaatgcaatggccacccatacagkttcataccgctgcactggtttgtgctaaggcaccagcaatttcccccaacattccttgtgtgccatcagtacaaatgtccgtgcagtgaactggttccaggcaagatggccgaatagaaacagctccagtctgcagctcccagcaagaccaacacagaaggcaggtgattttgcatttccaactgaggtacctggttcatctcactgggtgcagcccacggagggtgagccgaagcagggtggcggcgtcgcctcacctgggaagtgcaagggatcggggaactccctcttctagccaaaggaagctgtgagagactgtgcagtgagggaaggtgctatctggcccagattctatgcatttc

SEQ ID NO: 633254 - DNA, 578 bp, Homo sapiens
tgggttgactgaatagaggaagtaaaaatagacaaagtctattattttcacataagagaaatgatgacagtcttacactattggtgcccaaagaaactgcaatttatcaaaaaaaaaaaagaattcctcaagaaaagggaaccaattaatatggaaattttttatcaaagcaaattatggtttkgctgccttcccagttttataggccacatcatttaaaattccaaagaaaaaggaggaagattattgaaataccatctataaagcagattttacttcttggaagaaaatatatgtacatacaagttattgccatagtttaagcagccattatcatttttagacacaaccctccatccatctgagtgatcctggaaggactcatggaatagtgagacggggagcggttcaacagaccatcaacggcaggtctgtcttgtccattcctcaacaaatgctgaagtgcctcagctgcggccccacgctcaggttccagccaaggctgacttcactggagcatgctgcgctcagcaaagacagcgacaaggatcccatcattcgaccacacagcaatactg

SEQ ID NO: 633255 - DNA, 615 bp, Homo sapiens
ataaaatcatgcaattttaaatgtcatctagttgagtcccaaagaaattggggcccaattttctcagatgaaaagaaaattgaacagtattatatacaattgttcttaaaagagcaaaataatttttcttctgaaaatacaaagcaaattgttacaaaataaatggagtgtttcacacttaggtttgtaaaatgtaatagcttgaattggattttcaaatatgctgtcacctagaaaactgatatgaggccatttcgacaccagcagcccaagcgkgggttttagtgcagcattaaaagaagtaaccttccaaagccaacaacagaaactcaaagaatgactttcaggtactctcagatagctggaaatgtgagtttggggctagagtggggagaagtgggaaggaagcagtcaagagaaccgaagaagtaattttgtcagattcactgctcagcacattcacagaaagcagcattttttagctcctctcctttcgtgatccaacattatccacttttctcatgcttacatcagcaactaaacacatatcctcttagtgtcctgtttgtaatccattatttaaggagcttatgcataatccatcactaccattgc

SEQ ID NO: 633256 - DNA, 430 bp, Homo sapiens
gaattcaatgcttgggtcacctccagattcattttcacagtctttcatgttttggtcatattacattgtattttgctgccatatgactgatctttttttgttaaatgtgagatacttgttamaaaatatttagcaatgaattgaggcctagcagcatgttatcttgctgcagaagagatgggagtctacttctgggggatggtcaggggtcctccatacaggctgcaattgaggtcgtcggtgcaggctcagtccctacaaaggccagggtatttcctgtccacctttattctgatgcatgactcttctgggtctcaaccagagccagtggacttcagtatgggtagctttcattggcagaccctcaatccacttgttttccatctaatcccacgcatgtgtgcaaaagctgctgtgcttctttgcatct

SEQ ID NO: 633257 - DNA, 430 bp, Homo sapiens
gaattcaatgcttgggtcacctccagattcattttcacagtctttcatgttttggtcatattacattgtattttgctgccatatgactgatctttttttgttaaatgtgagatacttgttacaaaatatttagcaatgaattgaggcctagyagcatgttatcttgctgcagaagagatgggagtctacttctgggggatggtcaggggtcctccatacaggctgcaattgaggtcgtcggtgcaggctcagtccctacaaaggccagggtatttcctgtccacctttattctgatgcatgactcttctgggtctcaaccagagccagtggacttcagtatgggtagctttcattggcagaccctcaatccacttgttttccatctaatcccacgcatgtgtgcaaaagctgctgtgcttctttgcatct

SEQ ID NO: 633258 - DNA, 414 bp, Homo sapiens
tcacctccagattcattttcacagtctttcatgttttggtcatattacattgtattttgctgccatatgactgatctttttttgttaaatgtgagatacttgttacaaaatatttagcaatgaattgaggcctagcagcatgttatcttgctgcagaagagatgggagtctacttctgggggatggtcaggggtcctccatacaggctgcaattgaggtcgtcggtgcaggctcagtccctacaaaggccagggtatttcctgtccacctytattctgatgcatgactcttctgggtctcaaccagagccagtggacttcagtatgggtagctttcattggcagaccctcaatccacttgttttccatctaatcccacgcatgtgtgcaaaagctgctgtgcttctttgcatct

SEQ ID NO: 633259 - DNA, 414 bp, Homo sapiens
tcacctccagattcattttcacagtctttcatgttttggtcatattacattgtattttgctgccatatgactgatctttttttgttaaatgtgagatacttgttacaaaatatttagcaatgaattgaggcctagcagcatgttatcttgctgcagaagagatgggagtctacttctgggggatggtcaggggtcctccatacaggctgcaattgaggtcgtcggtgcaggctcagtccctacaaaggccagggtatttcctgtccacctttattctgatgcatgactcttctgggtctcaaccagagccagtggacttcagtatgggtmgctttcattggcagaccctcaatccacttgttttccatctaatcccacgcatgtgtgcaaaagctgctgtgcttctttgcatct

SEQ ID NO: 633260 - DNA, 541 bp, Homo sapiens
agctttcattggcagaccctcaatccacttgttttccatctaatcccacgcatgtgtgcaaaagctgctgtgcttctttgcatctcagtagttccttctggaattcagcaatgaaactcagggaaatgggttccaaatgcgaggctgactttcgtcctgggtttccttcttctccatcttcacctcatgtctgtttactgccatgttagcaatttgatgtattcaatcatgggttttatattctgtttggtgtcccccattgttctcatcggagatcagaagcttcagatgcacttatgtcaactcaagagtagaatgcttccttagcttccctccagagtcaggttttgtgtttctagttcccaagtgcacagcaggagtagtgatgtcctcactggcttctcatttgcattaaactgtgagcttctttagcgtggggacaggaccctgctcccattgcattctcagcaccwcaccacacactccttgtttgaggccactccagacagcatgtgctgaaggatgccctgtggtcagaaac

SEQ ID NO: 633261 - DNA, 601 bp, Homo sapiens
ttggtaaggtcatagtgcgacacattacttcactcgtttgtggtgctgttgatataaactaacctactgtgctgccagtcatataaaatccagcacgtgcgattatgcacagtacagtattggcattgtgctagcggtggcagcagcagcaagtccaggggccaggaagggggagtaggaactctgcagggccggcccggtggtgttagtctgttagtttttaacaaaaaatgttaaaaagtaaaaaaaaaggtaacacatttttaaaacagaaraaagtttatagaataaggatataaagaaaaaaatatttttgtacagctgtacaatgtatttgtgttttaagcaaagtgtcattacaaaagagtcaagtttaaaaaaattgaaaagtttataaagtaaaactgttacagtaaggtagggtgaatttattactgaagaaagaaaattttaaaaacaaatgtagtgtagcctaagtatacagtgttcataaggtctgcagtcatttacatgatgtcctgggccttcccactcactccctgctcactatctgactctcccagagcagctaccagtcttgcaagctccattcatggttatt

SEQ ID NO: 633262 - DNA, 601 bp, Homo sapiens
ttggtaaggtcatagtgcgacacattacttcactcgtttgtggtgctgttgatataaactaacctactgtgctgccagtcatataaaatccagcacgtgcgattatgcacagtacagtattggcattgtgctagcggtggcagcagcagcaagtccaggggccaggaagggggagtaggaactctgcagggccggcccggtggtgttagtctgttagtttttaacaaaaaatgttaaaaagtaaaaaaaaaggtaacacatttttaaaacagaaaaaagtttatagaataaggatataaagaaaaaaatatttttgtacagctgtacaatgtatttgtgttttaagcaaagtgtcattacaaaagagtcaagtttaaaaaaattgaaaagtttataaagtaaaacygttacagtaaggtagggtgaatttattactgaagaaagaaaattttaaaaacaaatgtagtgtagcctaagtatacagtgttcataaggtctgcagtcatttacatgatgtcctgggccttcccactcactccctgctcactatctgactctcccagagcagctaccagtcttgcaagctccattcatggttatt

SEQ ID NO: 633263 - DNA, 552 bp, Homo sapiens
catagaatatctactcttgtatgttcacctctgcaagccttttatgagttcttccattctctgcctcagcagttctgatatttcaacttcatttaatgtgggccattgctacccaggctttcaagaaccatcctaccatgctccttgctgtatattcagttctttattagaggaaagtgctctcatttcagtgagcttttccaactttatgctccaccaatcctgatgcagccccctcagcatatccagtcccctacagagtctcctggcttttgctggtgcaagttggctgtgacctgcagtaacttcagcatataattttcaaatgtagtggctcaacacaacaattgtattatagcttacatatttcagggttaggaatacaagccaggctcggccaggtgagtcttattccatacatcactggagttcatttggyggtgtttatctagacagtgggctggcctggagggtctcagatagctttactcatgagtctggtgtctcgacaggcatctgcaaggcttctccagtgtgatgatctgtgggtga

SEQ ID NO: 633264 - DNA, 609 bp, Homo sapiens
ccataatctgttatgggtcatcatcaggaggaagagttttggaaatttgggggatgattacaaccataaaagaatcttctttgttgtgcaaaatttttctcaaattcaggaagttgtcacctaggttcaaggccactaaaattacatgcagttcttaaaaatgtcagtacatttttggggagaggtttgatcactttcatgaaattttcaaagggactcatgatctccaaaagattttgaaccatggctccagtcaagtcacttgacagtgggacagagaagaaacagaaaattaccttggcaaatcttcaaaagtgagataagaaaattgctacagtagagtggacttaagatttcctttctatagtggaggtaaaaaactggaaacagtatatgctcatcaatgcaaaaagccttaaattttatggtatattaaaactatgagattaataataaagatattttatgaggatgaagacatttattctrtaccagttgatttgcaggattttccatgctgtgatcaaaaagtgagacgagcaagaatcagagaagtctttgtaatgtaattccatttttatagaataaatcatgacaagcttcctttcc

SEQ ID NO: 633265 - DNA, 406 bp, Homo sapiens
gacccattcactatcatgagaacagcatgggaaagacccacccccgtaattcagtcatctcccaccagatccctcacacaacacatgggaattatgggagctacatgatgagatttgggtagggacacagagccaaaccgtatcacccatgtttactgtggcactattcacaatagtgacaatgtggaatctacttaagtgtccatcaatagatgaatagataaagaaaatatggtatgtatacagaatggaatattattcagccaaaaaaattaaatcctttgaccatgtttgattatgttaaaaaaaaaaaaagaatgaaatcctgccatttgcagaaaaatggatggaactggaggtcattacattaactgaartattgcatgttctcactcacatatgggac

SEQ ID NO: 633266 - DNA, 552 bp, Homo sapiens
actaagtcatttgcagtctaaattgttattttttatatctaggtcttgtgtctttaattgggttgtgagttttctgagggaaggcacctcatacttgtttgtaaatgctctaaagaccaagttcattggtgaaaagcaagtgtgataaatgttgattagaagaatcagttttgcccacgatgatcttggtcacagggagctgtagatggtkggaggagattggtgcttctagtatgtggaagatctaggcagaaacagtgggaacagaagactcaggaaaatccttgaaagacagccagaaaatagagttggattcaatattgaactttaagatagagagaaactaggaagtagatgtctctttttcatccaagccatgaaatcaaagtgaagtcaggcagtaaaaaccaaactcctgggcagctgcgtttctgcaatgctctagtatatctttctggatcaaatattcacaagggaattactgagcatttctacaactggtcctttggctaaagtgcatcttcctacctttgacctcgtgctccaatcgac

SEQ ID NO: 633267 - DNA, 552 bp, Homo sapiens
actaagtcatttgcagtctaaattgttattttttatatctaggtcttgtgtctttaattgggttgtgagttttctgagggaaggcacctcatacttgtttgtaaatgctctaaagaccaagttcattggtgaaaagcaagtgtgataaatgttgattagaagaatcagttttgcccacgatgatcttggtcacagggagctgtagatggttggaggagattggtgcttctagtatgtggaagatctaggcagaaacagtgggaacagaagactcaggaaaatccttgaaagacagccagaaaatagagttggattcaatattgaactttaagatagagagaaactaggaagtagatrtctctttttcatccaagccatgaaatcaaagtgaagtcaggcagtaaaaaccaaactcctgggcagctgcgtttctgcaatgctctagtatatctttctggatcaaatattcacaagggaattactgagcatttctacaactggtcctttggctaaagtgcatcttcctacctttgacctcgtgctccaatcgac

SEQ ID NO: 633268 - DNA, 583 bp, Homo sapiens
aaaacatttcccaaattgtgtcattcaattactaaatcatttttggattaattttcttgatatgttacactttaaatgaaatgttacacaaggatcataacttaaagcttgaaatgctgtcagattttcaggcatattagaagaaaacttatcttcttcttacttatctccctttagccagtctcccctcactggcattctcattgcattggcatgctttaaccatttatcctggtgtcaaaattctttatcatctttcacttaaacttgatttcatcaccttttaaagttttgttcaaaatgctgctgctccaaaaagtctctgattgattccacctgactgaccgtagagacccaaagaatagaaactctttggacctcgcactggttgtcacattatttagaatttgttcaccgtttccttcatcaatcttcattactttcttgtaaatactttaagtcaatcccataaattcctctctgaaactagatattcagttctctgagactgagtcattttttttttcttagaattttccacaacacttttkgcaatgcacaatactggatgaaatttctgtta

SEQ ID NO: 633269 - DNA, 599 bp, Homo sapiens
  misc_feature 1, 2, 3, 4, 5, 6, 7, 8, 9, 10, 11, 12, 13, 14, 15, 16, 17,18, 19, 20, 21, 22, 23, 24, 25, 26, 27: n = A,T,C or G
nnnnnnnnnnnnnnnnnnnnnnnnnnntctaaaaattttcgccgccccaacactttactattttgttttatttttcttattaatataagaatacaggaatgtcaggcctctgagcccaagctaagccatcatatcccctgtgacttgcaggtacacatccagatggctggttcctgccttaactgatgacattccaccacaaaagaagtgaaaatggcctgttcctgccttaactgatgacattctcttgtgaaattccttctcctggctcatcctggctcaaaagcccctaaaacggccccacccytatctcctttcgctgactctcttttcggactcagtccgcctgcacccaggtgattaaaagctttattgctcacacaaagcctgtttggtggtctcttcacacggacatgaatgaaacaaaactcttggcatccaaattaagccatcaaagcctcagcttccacagtcaaggctcttttagaatttgcctagtgggttttctggtgaaaactagactgcccccaaaaagtgtgggctaccttttatcactgacctttgcttgagtccctttctagacattattagatggcaac

SEQ ID NO: 633270 - DNA, 560 bp, Homo sapiens
gaattccaggaagaaacagtggagcccaacagataaaatattgagaggttaaaagtgtagaagctgtggcagctctaattccttctatattaaggtttatcctttgtaaattttctctggagttataacttataaaacatatttaaagtttagaggaaagcctgatagataatatgtttgcttttccaactgttaagatgtgattggcaaaatgggccatgctgttcctgaactaaatacaaaagtttgctatattttaaaacagcttcgacgacttccctgraagatgtttcccaagtcccaggaagagtcattaatcattgttcaatggtaccttgtacctgcctctgctactctattttccacactgaactgtagtgaaatggtttatctgtctctctcattctaatgtaagctacttgagggtatggaccatgcctcatttgattctgtattcctagtacttagcatggtatctgatatatagtaggtaaccaaaaattacttagagaactaaataatatattagttatgagtgaaaggctcatagcaaatgtcaa

SEQ ID NO: 633271 - DNA, 584 bp, Homo sapiens
ccatcataaccagtgagagagaagagcctgttgaatcaaaatgtgaaaatgacttttaaaacrtgcatacataaaaggtaatatgatgatttgtatctttacttgtacttgtttctcttgcctgtctcagaagaagcattcatttttccaaaatgaatgcttctacctgtgcacttgatcccatttcctcctgggcattccgtcatcctctgatcccttgcctggactgttgtatgtaattgctttctgcctgggctccttgcctccaggctctgtttactgtccaaccagcgctaacactattgccagaggtatatttctgacacaccactctgattatatcaccctatgcctccatttacttatatggaaattatctgtgtacctgttgctcttgactagaatgtgaactcttagaaggctagtgtcactttataccagtgactgatatggcacctgtcacataactgtattcaaaaatcttttttttgttttccattttctaaatactaactcacttaaatgttattccaagtgctctgtaattttacccaacctgctttttagaaaattactatctcctc

SEQ ID NO: 633272 - DNA, 609 bp, Homo sapiens
acagcttttggtccatgtttcttaactgggtggaattaatcctttgrtggtcatgtgatcacatatttggtctcttttcttgttccctctccactttgaccagtgggaggtaagacctgagttaagtgtgtctactttgaaaactcaaatctttccctctattgggctgttccaaggtctagactgggaataggaaacctgatttggcttttacatgtttatgcttcaaccgagtctctgttggtaataaaactgatatattacttatctatttctgtgttttatcttatttctcaatttgtccagaattctaatagggaagatgatgccagtttcctagaccccttcaaacttgtcttctctaccttatctattaatcttttagggttgaggccatgtcagattcatcttgtagctcaaggactagcacatggtcagtgacatatttttttgatcgaattaaggaaatgttcaaatcagaagcttcaaactatgctgaagcagagaaatgctgggttgtcttcccgaacatattgagcgccagcatttctttgtgtaatttcttgtatgctttaggcattatttaccgttgagtcagagaattactct

SEQ ID NO: 633273 - DNA, 590 bp, Homo sapiens
gggcagagagatttcctgcatgttctcactctggtttgcttttctgtgttatggttgatgacttgaagtcctacttccctttcagagaattctgaagatgctgtcactgcttcctcaaagccagcttttttgccaccaccaggcagtaaacacctaagctgtgaatagggttcaatacagtgttctcatgacctaatgcaaaggcttatttaaaaaaataaataaatataataacttcaggtcagccaagaatgtgagctgaaaacaaaccagtcaaagaccaacaagaaaagatgaattcatataagcatttactgaaaaaaatttaaaatcccgacaatgtaaatctagactgctgtggtctcacttcccaaaacacccagggtaggaaccggaaagccagcaaaccacttctcatgctctataatttggaagaggagagaactagatttcacagcatttggacacctttgctcaaatatactataacctttttccccccttcaaatttctgggaaactagcatttctctaaatatacgccccgattttacccmaacctgggcccaaaaaaaaaaaaaccacacactt

SEQ ID NO: 633274 - DNA, 506 bp, Homo sapiens
gtgagcaattccttgggctcagttttgacttctggcctcttctctttatatccttcccatgagagctcatccactcagagcctctgctcttcctyccctgctatgtggatgcttctgaatttatattgctatacagtccatgccttcacaggatattttccttgatcagttctccttcaacttgacttaacaagtgtaaagcaaaactcattgtcttaacccctaaactaagttcccttccagtttgttctcatcagggaaacattcttctgcagcattatccttcattcctcataaccagctagacattcaattctgcagacttttttctttgaaatgtctattatatctctttcttcctcttttgtgtgcaccaccatcacacaagtcacacaatggattattgcaccaattttctggctggtcacacagaatttatctgatcagtcaatatatctggtctccttctttccagtatgcttgcatcatggtacccaccttatcaa

SEQ ID NO: 633275 - DNA, 445 bp, Homo sapiens
gttttggtctttagttagaagttcggtgatgtttttgtgacttagaaatatgccatagaaatttaactcttgtttgtatcaattagcctatggtaaaaatggtttccttatgcatccctttgcttaaaatcasagtttccaagaacttatccagatgttaaatgaggacttttcaacatattggttttgccagtaagactgtgaacttcatcattgttgttgaactgctgggtcaaaactcaaatgaggtgaattttgcctttaaagggattatttgctaagaaccaaccttaaatagtcacagaaaatcaaatattagttgtcagtataagtcgttcatatatttaaccatttagtttgaggctctatattacttgattcttttttattgatacataataattgtacatatttatgggaattattgagtcttaaatgaatgtgg

SEQ ID NO: 633276 - DNA, 503 bp, Homo sapiens
ttacacaaatctcgctactttatcttatacatgcatataaaatcaaagtgctccagtgtcacttacatctcgagctaacatgtggagtcaagctcgactttcagattaccatgttagcataaaaatcccatcaagtggtgtggccaggtttaatgttggttagctggccttctcctccaccctatcttattgctgctactaattcccagggagattttttgtctgtctttcctgagttgtcagtcattgcccatgccagtcatttgcaaatacttacctttccatgtgcccaaagtttaaaaaaaaaaaaagatttkgttttctactcaaggtaaggaagtggaggctgatgatctttattgaaaggtaacctgatcaccatgtttgcagagcactaaagggtcccctggtgttttgaaatagttgctgtgcttcctaggctgcaatgcagggaaaagggaggaggattttgggggaagaaagaaataggtgatgagagtttc

SEQ ID NO: 633277 - DNA, 584 bp, Homo sapiens
aagtactaatggttttatttttttttattgtgtaataattatcaacgagaattgaactttaggaaaaagctaaaattagttgtctctttactgtggtagcttggtacaacaaatcatcttccaaatttagaaagttcagaatcaacaaatattagcccatatcattgagtggagctgattctttctcaagtgagattctaaataacaactcaaatgaagtgaaggattaagacatgagctaattctaacaaaaaaaaaatctgtagataatcttcttgagcctttcctttgtctccatttatttattcatttgttcatccaytcagcacattttaatacagtgcctaatatgcaacaggcctagggctaatctctagggatatacagatgaataagaaacatttttgcactcaacttcaagtacatctgaaagatatttctctactagtgaatgtcttttaaagaaaaatctattgatttaaaggctgctaatagatttgaatattttatatagtgtgcgtaaaactcatttagcaaaatgttggagaaaggatacacttcaaagtctttctgtgttaatgctt

SEQ ID NO: 633278 - DNA, 510 bp, Homo sapiens
accctgcacccatctatgcaggacagatgacagtgtgagagtttttgtttctgttttctactgagatgttatgtttatgtttattgaacagaaaaatacgtaacacatgctgatataacaataattttacatatttcttggcaaattctagcatggtttaagagagagaggtcaaggaactaaaatcttccaagaatgaggtagagtgacagtggcagggaaggggtggtaaattgtgtagtctgataatctgagagtcatagctagggactttgacagagaagggagggggaaaggcttgaaarggaaggagggtgtcctgctctactccaaagaggagcaccagtagggttccagggagaacaattcagactcaaattattaaattctggaacacctaagaaggtgatactttgttctgcaggatggactgatgtgaaagggataaggacatctccactaaattatttattccattcaaggtatctttatgcaaacctccaactttcc

SEQ ID NO: 633279 - DNA, 568 bp, Homo sapiens
gtctgataatctgagagtcatagctagggactttgacagagaagggagggggaaaggcttgaaagggaaggagggtgtcctgctctactccaaagaggagcaccagtagggttccagggagaacaattcagactcaaattattaaattctggaacacctaagaaggtgatactttgttctgcaggatggactgatgtgaaagggataaggacatctccactaaattatttattccattcaaggtatctttatgcaaacctccaactttccatggtcagtccaaagtcctgtctagagattagctggcatcctttaccttccctgtcttgcaaatatgaccagagatgaggtcaacttggataagttgaaggttcgttttcttctcacaatttgtttcagaatcaatcaaatttatctgcataactaaccttcacattggatctaaattccagtttttctttgtgatgaacaggccaagcatgaatttaagcaagttaatttattagctgctactatattcaaactgcagcataataaaastaatggatgaccctaaatattacatgac

SEQ ID NO: 633280 - DNA, 616 bp, Homo sapiens
tggtgaatgaattcagcaaagtttcatgataaaaatttaatgtacacaaattagcagctctgctatccaccaacagtgaccaagctgagaatcaaatcaagaactcagtccctttcacaatagctgcaaaacaaaacaaaacaaaacttaggaatatgcctaaccaaaacaatgaaaggcctctacaaggaaaactacaaaacactgctgaaataaatcatagacaacacaaccaaatggaaacacatcccatgctcatggatgggtataatcaatattgtgaaaatgaccatactcccaaaaacaatctacaaattcaawgtcattcctatgaaaataccaacatcattcttcacagaactagaaaaaacaatcctaacattcatacagatccaaaaaaaaaaaagcctgcatagccaaaggaagactaagcaaaaagaacaaatctggaggcatcacattacccaacttcaaacaatactgtaagtctgtagtcaccaaaacagcatagtactggtataaaaataggcacatagagcaatggaacagaacagtgaacccagaaatgaagccaaatacttacagccaactgatttctgacaaagcaaacaaaaac

SEQ ID NO: 633281 - DNA, 573 bp, Homo sapiens
cctggaagctaacaatctatataggggtattattttaaggatcttttgttttgtgtataatttttaatatttcaggtgaaatttacataagattaaccatcttaaagtgaacaattagtggcatttagtacattcgcaatattgtgcattttcatcaccccaaaaggaaaccctgtactgataccatttgcacccaattcttctccctgtccctggtaaccactaatttatgttgtgtctgtatggattttccttttctggatatttcttataaatggaattatataataggtaaactttagtatctgccttctttcatttagcgtgtttttagggttcacatattgcagtacgtatcagtacatctttcctttttatggttgatattccattgtaggtatatatcacaatwtgttattccattcttctattggtggaactttagggtgtttccaccttttgattattgtcaatagtgctggtaggaacatgtgtgtacttatacttgcttgagtacctgttttcaggtcttttgagtagatacctagtaggaaaattgctaggttgtatggt

SEQ ID NO: 633282 - DNA, 640 bp, Homo sapiens
ttaaactcctgggctcaagcaatcctcccaccttggcctcccaaagctctgggattacagctgtgactaatattaatacacttgtattaatgaaagtttcccagccctctcccacccccgccagatgtttattttacattcccgaagtctaagccaacctaaactatgaagatttttcttcccccasccaaccacccccactcacaaatggtgaggggtaagggttggtcagagtattggaaagaaagttatctagtaacagggtagaagaaggtgggggttttcctcagacttgaaagtctgtgggtagtagggtgaggaaaaagagaggggagtgggtggtgctatctgcctggggtccagctgtactccctaccccatcttaaagaataccccaggttctgagaagaatgtatattctgttgatttggggtggagagttctgttggtgtctattaggtctgcttggtgcagagctgagttcaattcctggatatcctttttaactttctgtctcgtttggtaactatactctgggtatgatatggttatgataactgacactaagtcagataatggctcttttaaaacatgaagataagtgtgagtgtgtagacatattcacacacacacgtacata

SEQ ID NO: 633283 - DNA, 640 bp, Homo sapiens
ttaaactcctgggctcaagcaatcctcccaccttggcctcccaaagctctgggattacagctgtgactaatattaatacacttgtattaatgaaagtttcccagccctctcccacccccgccagatgtttattttacattcccgaagtctaagccaacctaaactatgaagatttttcttcccccacccaaccacccccactcacaaayggtgaggggtaagggttggtcagagtattggaaagaaagttatctagtaacagggtagaagaaggtgggggttttcctcagacttgaaagtctgtgggtagtagggtgaggaaaaagagaggggagtgggtggtgctatctgcctggggtccagctgtactccctaccccatcttaaagaataccccaggttctgagaagaatgtatattctgttgatttggggtggagagttctgttggtgtctattaggtctgcttggtgcagagctgagttcaattcctggatatcctttttaactttctgtctcgtttggtaactatactctgggtatgatatggttatgataactgacactaagtcagataatggctcttttaaaacatgaagataagtgtgagtgtgtagacatattcacacacacacgtacata

SEQ ID NO: 633284 - DNA, 640 bp, Homo sapiens
ttaaactcctgggctcaagcaatcctcccaccttggcctcccaaagctctgggattacagctgtgactaatattaatacacttgtattaatgaaagtttcccagccctctcccacccccgccagatgtttattttacattcccgaagtctaagccaacctaaactatgaagatttttcttcccccacccaaccacccccactcacaaatggtgaggggtaagggttggtcagagtattrgaaagaaagttatctagtaacagggtagaagaaggtgggggttttcctcagacttgaaagtctgtgggtagtagggtgaggaaaaagagaggggagtgggtggtgctatctgcctggggtccagctgtactccctaccccatcttaaagaataccccaggttctgagaagaatgtatattctgttgatttggggtggagagttctgttggtgtctattaggtctgcttggtgcagagctgagttcaattcctggatatcctttttaactttctgtctcgtttggtaactatactctgggtatgatatggttatgataactgacactaagtcagataatggctcttttaaaacatgaagataagtgtgagtgtgtagacatattcacacacacacgtacata

SEQ ID NO: 633285 - DNA, 583 bp, Homo sapiens
tggccttctgccatgattgtaagtttcctgaggcctccacagagggagaagcctgtacagtctgcagaatcgtgagccgactaaagctctttaaaattttcccagtctcagggatgtctttagagcagtgcaagaatggaataattcaaacacatcctcaattggaagagtgaatgagaggtgaactttttgaggtccattttgccttcatgctttattgatggtttggctgggggtagaaaataatttgtagggaagtgaataatttcatgtttctccatagttagggctttccgagygcttttaataacacctacgttgagaaactagcctgggaagggtaaaattgaatagccagagacttgcagaaagatttagagacttacctccaaatgcattcaaatttcaaagggggatgaccccaagagccagttattcatgttccaaaggatgaggaatgactagggagcaaaggtttctctgcttctctcagatgatgatagggccactggtggcctgtataagccccccagataatttcaggcagattctcatatgtgcagggtgacgtggctttcatcat

SEQ ID NO: 633286 - DNA, 583 bp, Homo sapiens
tggccttctgccatgattgtaagtttcctgaggcctccacagagggagaagcctgtacagtctgcagaatcgtgagccgactaaagctctttaaaattttcccagtctcagggatgtctttagagcagtgcaagaatggaataattcaaacacatcctcaattggaagagtgaatgagaggtgaactttttgaggtccattttgccttcatgctttattgatggtttggctgggggtagaaaataatttgtagggaagtgaataatttcatgtttctccatagttagggctttccgagtgcttttaataacacctacgttgagaaactagcctgggaagggtaaaattgaatagccagagacttgcagaaagatttagagmcttacctccaaatgcattcaaatttcaaagggggatgaccccaagagccagttattcatgttccaaaggatgaggaatgactagggagcaaaggtttctctgcttctctcagatgatgatagggccactggtggcctgtataagccccccagataatttcaggcagattctcatatgtgcagggtgacgtggctttcatcat

SEQ ID NO: 633287 - DNA, 561 bp, Homo sapiens
cattgtctatggaggataaacaagtagtaggaatatattagggcggggggtgaagagtactatggaggaaaatagagtaaagagatagactgtgctgggtagagggttccagatattttatataggatagttagggaaagctgagaaaaggacatttgagtaaagacctaaaagaatatgaagttttggagttcaaagaagtatttcagtctggagatataattttgggatcatcatagacaaggccatgagactcgaggagagcaaatgggaagagaataagacaaataagagttttaaggattgaatctgaaatattccagtgtttgaaaattaggaagatgaggagaaaccaataaaggagacaggagaagcagtcaatgaagtagcttaataccactgcctcttttctctctctctcyctctgtctctctgcttctttcttatttctgcctgaaggaataacttaattcactgataagtttggaggaaaacctgatcatggattgtcccactccttcttctctccttgcctttaaggagctggctgcctacagaaag

SEQ ID NO: 633288 - DNA, 561 bp, Homo sapiens
cattgtctatggaggataaacaagtagtaggaatatattagggcggggggtgaagagtactatggaggaaaatagagtaaagagatagactgtgctgggtagagggttccagatattttatataggatagttagggaaagctgagaaaaggacatttgagtaaagacctaaaagaatatgaagttttggagttcaaagaagtatttcagtctggagatataattttgggatcatcatagacaaggccatgagactcgaggagagcaaatgggaagagaataagacaaataagagttttaaggattgaatctgaaatattccagtgtttgaaaattaggaagatgaggagaaaccaataaaggagacaggagaagcagtcaatgaagtagcttaataccactgcctcttttctctctctctccctctgtctctctgcttctttcttatttctgcctgaaggartaacttaattcactgataagtttggaggaaaacctgatcatggattgtcccactccttcttctctccttgcctttaaggagctggctgcctacagaaag

SEQ ID NO: 633289 - DNA, 561 bp, Homo sapiens
cattgtctatggaggataaacaagtagtaggaatatattagggcggggggtgaagagtactatggaggaaaatagagtaaagagatagactgtgctgggtagagggttccagatattttatataggatagttagggaaagctgagaaaaggacatttgagtaaagacctaaaagaatatgaagttttggagttcaaagaagtatttcagtctggagatataattttgggatcatcatagacaaggccatgagactcgaggagagcaaatgggaagagaataagacaaataagagttttaaggattgaatctgaaatattccagtgtttgaaaattaggaagatgaggagaaaccaataaaggagacaggagaagcagtcaatgaagtagcttaataccactgcctcttttctctctctctccctctgtctctctgcttctttcttatttctgcctgaaggaataacttaattcactgataagtttggaggaaaacctgatcatggattgtcccactccttcttctctccttgccwttaaggagctggctgcctacagaaag

SEQ ID NO: 633290 - DNA, 561 bp, Homo sapiens
cattgtctatggaggataaacaagtagtaggaatatattagggcggggggtgaagagtactatggaggaaaatagagtaaagagatagactgtgctgggtagagggttccagatattttatataggatagttagggaaagctgagaaaaggacatttgagtaaagacctaaaagaatatgaagttttggagttcaaagaagtatttcagtctggagatataattttgggatcatcatagacaaggccatgagactcgaggagagcaaatgggaagagaataagacaaataagagttttaaggattgaatctgaaatattccagtgtttgaaaattaggaagatgaggagaaaccaataaaggagacaggagaagcagtcaatgaagtagcttaataccactgcctcttttctctctctctccctctgtctctctgcttctttcttatttctgcctgaaggaataacttaattcactgataagtttggaggaaaacctgatcatggattgtcccactccttcttctctccttgcctttarggagctggctgcctacagaaag

SEQ ID NO: 633291 - DNA, 581 bp, Homo sapiens
tttttttttttcctccatagtaaaaaacctacaggataccaccamcaaaggaaaaaacaagtttttttcagtaaacctcacaagagcatacatttgatagaatacacggattttctaatgaaagctcgccgtcaccattttataagtcagaacatgaaagtcaaaatatctcatacagatgtcttttttttttgagaaggtacacaaggcttgcttgtagagatggagttacatggagggacagaaggtcactggtcagtgattttaggtttttatacttctgaaaacaggtaattacagattctgatcagtttatcattttctttagtcttttattttctgctgaatgctctcaagggaacggatccatacctgtttatcaggctcacctggaagagccaagtcatccactcaggtcttcctctggacctgcataatttcctcatttactagattgggtttcttttatgtgtgggcttttaatgcttggtatctctggtcttcctaatatgtaatgcttagcataataattttagccattattcatttttgtagtaggcttcactagcttcctgcttctc

SEQ ID NO: 633292 - DNA, 581 bp, Homo sapiens
tttttttttttcctccatagtaaaaaacctacaggataccaccaccaaaggaaaaaacaagtttttttcagtaaacctcacaagagcatacatttgatagaatacacggattttctaatgaaagmtcgccgtcaccattttataagtcagaacatgaaagtcaaaatatctcatacagatgtcttttttttttgagaaggtacacaaggcttgcttgtagagatggagttacatggagggacagaaggtcactggtcagtgattttaggtttttatacttctgaaaacaggtaattacagattctgatcagtttatcattttctttagtcttttattttctgctgaatgctctcaagggaacggatccatacctgtttatcaggctcacctggaagagccaagtcatccactcaggtcttcctctggacctgcataatttcctcatttactagattgggtttcttttatgtgtgggcttttaatgcttggtatctctggtcttcctaatatgtaatgcttagcataataattttagccattattcatttttgtagtaggcttcactagcttcctgcttctc

SEQ ID NO: 633293 - DNA, 581 bp, Homo sapiens
tttttttttttcctccatagtaaaaaacctacaggataccaccaccaaaggaaaaaacaagtttttttcagtaaacctcacaagagcatacatttgatagaatacacggattttctaatgaaagctcrccgtcaccattttataagtcagaacatgaaagtcaaaatatctcatacagatgtcttttttttttgagaaggtacacaaggcttgcttgtagagatggagttacatggagggacagaaggtcactggtcagtgattttaggtttttatacttctgaaaacaggtaattacagattctgatcagtttatcattttctttagtcttttattttctgctgaatgctctcaagggaacggatccatacctgtttatcaggctcacctggaagagccaagtcatccactcaggtcttcctctggacctgcataatttcctcatttactagattgggtttcttttatgtgtgggcttttaatgcttggtatctctggtcttcctaatatgtaatgcttagcataataattttagccattattcatttttgtagtaggcttcactagcttcctgcttctc

SEQ ID NO: 633294 - DNA, 614 bp, Homo sapiens
ttaatgggttattttgtgtagttatctgtaagtcatttggaaggtgggattcattgtcacatagtaatgctattagtggtgttttgttctcaggattagcaagccttagggtgcaattgtagtasagctggcacatagtaaggattgtggtgcagggttgagtcctaggcggaggcagagaactgttacagcaaagagaacggaaagctctcactccctttgaagtctgtctccatttttgcttaccctcttgtaactggagctctttccccctgggaactatttataatagggttaatcctgcatctacttaaggtatgtaaagatagcatgttgcctacttgtgttgagcatcatatgcgaggcactgggctggaccctggagatgcaaaggcagaagcagtttggtccctggctgttagagtgagtgtgccccttcccagtctggtcttacatgttctttttgaaaatgtttttccatcacctgttatccatgattccttaaaggttgccatactgatctcatcttaggggccctgggtgtaatttatctggattgtgacagattttagcagttgggtgttttcatgatctcttcaaaagatgttcccacc

SEQ ID NO: 633295 - DNA, 614 bp, Homo sapiens
ttaatgggttattttgtgtagttatctgtaagtcatttggaaggtgggattcattgtcacatagtaatgctattagtggtgttttgttctcaggattagcaagccttagggtgcaattgtagtagagctggcacatagtaaggattgtggtgcagggttgagtcctaggcggaggcagagaactgttacagcaaagagaacggaaagctctcactccctttgaagtctgtctccatttttgcttaccctcttktaactggagctctttccccctgggaactatttataatagggttaatcctgcatctacttaaggtatgtaaagatagcatgttgcctacttgtgttgagcatcatatgcgaggcactgggctggaccctggagatgcaaaggcagaagcagtttggtccctggctgttagagtgagtgtgccccttcccagtctggtcttacatgttctttttgaaaatgtttttccatcacctgttatccatgattccttaaaggttgccatactgatctcatcttaggggccctgggtgtaatttatctggattgtgacagattttagcagttgggtgttttcatgatctcttcaaaagatgttcccacc

SEQ ID NO: 633296 - DNA, 597 bp, Homo sapiens
tgtgatgcattgtcatttttaygtagttggatttgatttactattttttttgtttagaatttgtacatcgatatttatgagaggtattgactatacacattcttttatttcatttaaacttctctatagcagcatgtgttaatacatttgcatcactataaaggaatacttaaggctgggtaatttataaagaaaagagatttaataagctcttggttctgaaggctgtacaggaagtgtggtgccagcatctgcttctggtgagggcctcagaaacttaccatcatggtggaaggtgaagggggaccaggtgtgtcacatggaaagagtgggagtaagcagggaggaggtgccacactcttttaaacaaccagatctcacatgaactcagagcatgaactcaccaattattgtgaggatggcaccaagtcattcatgaaggatctgccccagtgatccaatacctcccactagaccccacctccaacattgaaggtcgcatttcaacattagatttggaggggacacacatcccccaccatatcatagcaacaataatttaatgcttctcaataagattctctttgtacaaataaa

SEQ ID NO: 633297 - DNA, 519 bp, Homo sapiens
tagatgcttctcagtaatagggtgcatggtaagaccagtgaattgcacggcatgagttcattactgctgtgaattgctttttttttttttatyagaagctatattgtgtgggatactttggtgatgaataagttgtttcctgtatcagtgagaaatattttgggtggaaaaattgtgagcaaggaaggtaaatccagatccaaaatgaatggtatgccattgcagattaattactactattatcaggattaaaagagtttaatataaacaacctactatcaagtggttagttggtctcccttggaaagacatcacattgtcagtcatcatactgttggcaatggtgttaggttaggcacctgggatggtgttaccaagatcagacttaatgaagggatacgtgcttaatgagctaattcataacctccgtcccttttgccatgtattttgtacaagagcctattcattaggaacaagggtggctagaaaaatgtgaaaacttatacccacagaatgggt

SEQ ID NO: 633298 - DNA, 533 bp, Homo sapiens
atgcttctcagtaatagggtgcatggtaagaccagtgaattgcacggcatgagttcattactgctgtgaattgctttttttttttttatcagaagctatattgtgtgggatactttkgtgatgaataagttgtttcctgtatcagtgagaaatattttgggtggaaaaattgtgagcaaggaaggtaaatccagatccaaaatgaatggtatgccattgcagattaattactactattatcaggattaaaagagtttaatataaacaacctactatcaagtggttagttggtctcccttggaaagacatcacattgtcagtcatcatactgttggcaatggtgttaggttaggcacctgggatggtgttaccaagatcagacttaatgaagggatacgtgcttaatgagctaattcataacctccgtcccttttgccatgtattttgtacaagagcctattcattaggaacaagggtggctagaaaaatgtgaaaacttatacccacagaatgggtcattttgtcaacctgac

SEQ ID NO: 633299 - DNA, 620 bp, Homo sapiens
ggtgcatggtaagaccagtgaattgcacggcatgagttcattactgctgtgaattgctttttttttttttatcagaagctatattgtgtgggatactttggtgatgaataagttgtttcctgtatcagtgagaaatattttgggtggaaaaattgtgagcaaggaaggtaaatccagatccaaaatgaatggtatgccattgcagattaattactactattatcaggattaaaagagtttaatataaacaacctactatcaagtggttagttggtctyccttggaaagacatcacattgtcagtcatcatactgttggcaatggtgttaggttaggcacctgggatggtgttaccaagatcagacttaatgaagggatacgtgcttaatgagctaattcataacctccgtcccttttgccatgtattttgtacaagagcctattcattaggaacaagggtggctagaaaaatgtgaaaacttatacccacagaatgggtcattttgtcaacctgactattgagatctttatctgcagaggaaaaaaagtagctttacaatggaaagatgaggctgaccaactgccaaactgatcaaacagtattactaatcatgagcaat

SEQ ID NO: 633300 - DNA, 533 bp, Homo sapiens
atgcttctcagtaatagggtgcatggtaagaccagtgaattgcacggcatgagttcattactgctgtgaattgctttttttttttttatcagaagctatattgtgtgggatactttggtgatgaataagttgtttcctgtatcagtgagaaatattttgggtggaaaaattgtgagcaaggaaggtaaatccagatccaaaatgaatggtatgccattgcagattaattactactattatcaggattaaaagagtttaatataaacaacctactatcaagtggttagttggtctcccttggaaagacatcacattgtcagtcatcatactgttggcaatggtgttaggttaggcacctgggatggtgttaccaagatcagacttaatgaagggatacgtgcttaatgagctaattcataacytccgtcccttttgccatgtattttgtacaagagcctattcattaggaacaagggtggctagaaaaatgtgaaaacttatacccacagaatgggtcattttgtcaacctgac

SEQ ID NO: 633301 - DNA, 538 bp, Homo sapiens
tagatagacacacagaaagataacagtatggcaaatgttaacacctgttgaatataggtggtgggtatatgtgaggtattttaaattacttcaaaaattccatatgagtaagaagtacgataaaatgggctggttaaagatgaaaattggaacaaactttcaaaatatattctgaaaatttctagtaaaagacagttaaaatacagaaaattttatggaatctgctaaaaactattcgaatttagaaatgagttcagcaaggtttcaaaatacaagatcaatataaaatatcaattctatttttatatgttaatggtaaacacatcaaaactgaaagcaagagaacaaatccatatacagtagtataaaaatgaacaaagtacttaggtataaatttaacaaaacaagtgcaaaattcatacactggaaagtaaaaaacatagttgaaagaaattaaataagatttaaataaatgaaaaggcattcaatattcatgactcagraaacttaatattgttaagacaacatgacctacatt

SEQ ID NO: 633302 - DNA, 400 bp, Homo sapiens
ttgttgcatttctgcttgtgttttcctttataacaatgaataataaacatcaaatatatttgtgatccactgatttaagcagaaacttttaattggtttaatatcattattgtctacccacctgaaaaatagacaacttaaaatcaaggaatacaaagccaatattaccataagcatttatttttaaaaaamcatatgagatgcatagcagcctgacaatgaagtctcaattgcatttgcatagctgttttatgtattgctagaaaattcatagccaagaaggaatgtaaaattgagtaattttggtattaaatgaatgatgttttaaaattgttttaattttacatatttttacagctatttgtttcatacctgagaaaaagttaaggcaacctgaata

SEQ ID NO: 633303 - DNA, 577 bp, Homo sapiens
caaatgctggagaagtgatatgggaaatcaatagaaaactgagatctaaagagcttggagttgctcagattgacaagaagagaaagtagacaattatggcaggaaggaaagttcagtgatggagtcctgtgaagatggtaacttaaacacrtacctttgacttcaactccctcttaactccttttctgtagggatacttcagcaaaggatgaaagctagcagagcacctaggacacgtatgaagctgtagagtctaacaggatctcaggaagaaggtaaattaccttcagagtagagtgcttgattgtcactgaggccagagattaaaaaccagatcgtgtgatttcagagggtccagatgtctctaacactatttgtattcctgttaccctagaagggtctgtcagcctttgctcactcaagtccattgaaggaaagtctattgagtgactgagttatttagtgtccattgttgaggaaaagctacatcttattcttaggaaggcctgacagcaaagagggttcttccttctgtcttaagtgggtgtttggattctgacaaggtttattttaacca

SEQ ID NO: 633304 - DNA, 562 bp, Homo sapiens
aaaaattgagaatataatgaaaggacagaatgaatcccatcaggattaatggtcacacacacacacacacacacacacacaccctagtaaaacttctgagctccaagttaaagagaacacattggatactacacagaaggagaaaaaaacagactagtgtcagacttctcatgggtaacactagttgaaaagagaacagatctaaaaaaaccattatacatcagagctatatttcatctcttccagaataaaagscattttcagataagccaatatacatattttatgctgcccaaataccgtatccaaggaacttactgaagcatgcaattaaatcaagtgaaatgaaagttgagtgcaattaaatcagaacatagatctcaagatagggaatgatgaagacagaacataaaggtgcacaataaatatatatacacatatatatgtttgtaatgaaaatattgaaagaaaaagagcatattgtgtgagggtccaagatggcagattagaagaagctgcagtccatggctgtcatggagaagaatgaaaacagtgagtgaat

SEQ ID NO: 633305 - DNA, 585 bp, Homo sapiens
catttaacagattggaagctaagattgagcatttaaatattcactctggatcacaaacctaggggctgcatcctaggcgtgaactcaagttttygcacactgaatgtactgtctctgcattgccccccaggtgattaagtacatgtggttagtatgctccacagtagccttgtaggacctatggtaaagtccaaagttggagttcaatagaaattttctcggtttcttgcttttttgataaaaagtcttgatgattaagagatctctaactgatagaacatttctgccatgatatacttgtgtaaacatacaaataaacatatagatacaattatctcaaattctgtaagtcatttaggtttctatgtaggattttggtaactgaatcggtttcctcatctagcacagaaattaaaacagtacttccatgaccaactcaaaggcttgttagtgaaaatgaaatgagagacttgctgttcaaatacagtaagaaaatacatgtgcaaagcaagatataaatttcattaaaatatatacaaataaattacttgattatctcacaggcctatctacctaaaattaatt

SEQ ID NO: 633306 - DNA, 544 bp, Homo sapiens
ttaacaattatattcttcatgaatatattgataagagtgtttttaagaggaatatttacaagagaaaatattcacaaagaatatattctcaaatattaagaatatattcataggaacacttcatagtctagaacacattcttcagccttaggaattgcagagacaaactgaatattccttaaaatgaagcaaaattcaacattccaaaagaaataagtaaatatggcaagtcagtcatgtgctgggtggttaagactgacttctacaacaagacaaggtgtaggactcagggttcaaccctgggcctcactccaaagccccagcactttccatgatccttcaccgcctccaactcttactcaaaagwtggagattctttggacaaagatgacttgtccaagaaatcccaggtgtatttgaaagtcagtgctgagcaaaagaaagctgtcatgacttggaatcctgtgttaacaacgagtcaatctcttttgctgtcagtcttagaaatgctttggtacgtgggttctacaaggtcaggaattct

SEQ ID NO: 633307 - DNA, 646 bp, Homo sapiens
atggttcacagttgatattagtatgctttaaaaataaacacaaagtcccttatacagagaagaggctgaggacaaaagcttagtcatctgtgattcacatacatatcatgaagtataatagtggaaggatccttccctgggggtctgagaatctgggttccaactcagtcactgtttctctggcactgggcacccctcccccggaccactgtgagatgatgctttgtgcttggctaaattgcagaggtttttaattgtttccttattatattttrtatcaaaagatggtttttaaaatcacttctgttaacatgagggttggagaataacaagttttcaaagttgtaactcttgtttgagcattgttttctatttagccttaatataaaaaacctttgctgaccaagctgtctagattgccccagcaaaaaaatcaatcagtcaatcaatcaatcaatctgtgcctttaacatactatcgaagaaaacttactttcaaatatatctggtcaggtgaatggttcttcctcttaacggttggggcatagaaccctacacctctatcccagccttgacaacttttaagcctagtgatttgaaagataatgaggtctgagcaaagtgaacatggtcataatatcagatgt

SEQ ID NO: 633308 - DNA, 552 bp, Homo sapiens
ctttttctgcatttattgaggtgatcatatgatttttgtttttaattctgtttatgctgtgaatcacatttattgatttgcatttgttgaaccaaccttgcatcccaggaatgaagcctacttgattctggtgaattaactttttgatgtattgctggattcagtttgctagtattttgctgaggatttttgtgtctatatttatcaggkatattggcctgaaatcttttttttcattgtgtttttgccagattttggtatcagggtgatgctggctatgtagaatcagttagggaggagtcagtctctcctcctcaattttttggaattgcttctgtaggattggtactagctcttctttgtacatctggtagaatttggctgtgaatccatctgctccagggctttttttggttggtaagatttttattaccagttcaattttgggactagatgttggtctgctcaaggtttcaatttcttcctgattcaatctggggaggttatgtgtttccaggaatacatcagtttcctctagattttccagattgt

SEQ ID NO: 633309 - DNA, 526 bp, Homo sapiens
ggtctgagagtactgttggtatgattactaattttttttaatttattgagacttgctttatggccaatcatgtagtttatcttggaatgtgttctgtgtgcaaatgagaataatgcatattctgttttgattggtggagtattctgtagatgcctattaggtctacttggtcaactatcaaattcaagtccagaatttatttgttagttttctgccttgatgatctgtctaacactgtcagtggcatgttaaagtcctccagtactattgtgggatggtgtaagtctttctgtaggtctagaagtagttgtttcatgaatctgggtgccccagtgttgggtgcatatgtgtttaggatagctaagtcttctagttgacttgaactctttatcattatgtaataccctactttgccatccactttttttttaactgttgttggtttaaagtctgttttatctaatatgggaataacaacctctgctattcttatattatttttgtttyctgcttgcatgatagatct

SEQ ID NO: 633310 - DNA, 567 bp, Homo sapiens
gtgtccagcctgttgtttaaattgtttattacatttaaaaatattaataacatttttttatgtcsagaatttcaaactgaatgttagtatagctagatgaccttgtttttatttttgcctctttttctttcacatattgttctttttatgagtattatgggcatactaaatatacctattttaatatatttctcagactgatagactgttttaacttctggacttaattcatgttaattatcaatttttttgttgttagcatcaaatgtctttgtgaattttacaaaccaaaaagtcttttgaaagatttgcaggattatttcgaagttttagtttggttgttttgttttgatttctcccttcctctgtgctccaaacttcctgtctagaagtttaggagttgccctcatccacctgtctgagccacagcccaaagttaggtcttatattattatccagacctgcttttcagtataattatcttcatttctgtctcctggtcaacaggacatttcatgaggctccgtgttgtcccactatgcctgcaatcccccttggttacgtaag

SEQ ID NO: 633311 - DNA, 535 bp, Homo sapiens
tttaggagttgccctcatccacctgtctgagccacagcccaaagttaggtcttatattattatccagacctgcttttcagtataattatcttcatttctgtctcctggtcaacaggacatttcatgaggctccgtgttgtcccactatgcctgcaatcccccttggttacgtaagctgtagatgttagcagcagttttttacagcttctcctcatgagaaatgggttagcacccaggcttcaaacactgacrttggtgctagactccacctcaggtgaagggctttggtctcccttattctgcaggaaccagactgcacctacccctgcctgcttccaatcccaaaagcagtgaacccacatctccaacctaactgctgttttacattgttattccatttctggtctcgggaaatttcatagggaattgtaagccagctttggttatttgccttttccttttattttatttatttattttggaaacaaggtctctctatgttgcccaggctggcttccaactcctgggttcaaga

SEQ ID NO: 633312 - DNA, 559 bp, Homo sapiens
gattaaaacaaacaaacaaaaaaacctcccacaccagccatattgttgtcatgcaaggacacctccaagctccaggagcatctgtgctagtgagtgcctctgctggcccgggctcttagtattacgagctaattcacctgagaacctgacactctggcagttcaggcagaggaagccgagctgtttgttgggctaatacagttttcttgttctaggtgagaaggaagcatgtagagcacgtgctcagtatttgctgggagctagtgaaagctgtggaatgccgctggtcaagctgcagagacagggcaactggggcaggtgatggcagtggcagtgctgttggtggcagatggctggggcccaggacactgagggtggcctggctccgtcattcctcagacaactgtgctggctatatatactccaaccctgtctatgtgtgaggcctcatgctggctgctggaagagctgccctgggagctggtkgtgcttgaattttcaatgagttgatttgattagcggtggaggattgaggggaacagggaggacaggaaagctt

SEQ ID NO: 633313 - DNA, 593 bp, Homo sapiens
gctgagcctgtagatatgtgcctgactctactggctaatcgtccactggggaccatgtttccagcctgagtcttattctttaacagcagagtttatttgccttttttttttctaagggcccaattgtataaggctgctctgcttatgagcaataccccgaatttttcaaatcaccccttcctgtgtaaaggctgcttttaaagtgactgccatctttcaaagttaatgaacatttagggagcacttggttgaggctagggcaatttatatgtggtgctttaagaagtggtttttaataagagaaataaaagtacccatacgtgcaccaagcatacctgagtcatacctagggkggtaaatgtgcacaccacatatcacgccctgcctgcccgcgtgtgcctacacatatatacctggcagaatcagggaacagactacataaaacccacctgcctattcattcatgaactcatctactcactcgaacatttgtcaaacacctcttctgtgcaagatgctttgcaataagatagcaaaagattcaaagatataaaaatatatgaaactatattagtccctactcataaaagctt

SEQ ID NO: 633314 - DNA, 595 bp, Homo sapiens
atcagaaaggttctaaactacgagcgagcttgtccatcactgggcttctctgtgcaacaccactctcgtggatcggaacagacatcctcatatttaacagtgcttgctgtctacacagataaagagacagcaaaattgccagcttctccccaattcttatgctccaggtgcaagcagcagcaaattcmtctctaactgctgattgtccaacactgacctttttagtatgtaaataggttatctcttctgtgtagttcagccaacagtatgtaagcctgcaggttctgaaaggaaacttcacatcttccttgaaaaggcagtatgttggcaaatgtgaatgttttttaatgaagttgtcaggctggacaaggggcatgtacaaaacaagcccttgaaacccggagtgggaaagtcacagggtcagtctgcagttgcagtgacacagaaatgatcaagaccttgctgggaagccaggagttaaagccctgcactcttagggattaagacctgggccaaaactgggctgtattctggaaaagaataaccacatcactcaatcagttgtttttgctgaaatagtgtggacttaaactca

SEQ ID NO: 633315 - DNA, 595 bp, Homo sapiens
atcagaaaggttctaaactacgagcgagcttgtccatcactgggcttctctgtgcaacaccactctcgtggatcggaacagacatcctcatatttaacagtgcttgctgtctacacagataaagagacagcaaaattgccagcttctccccaattcttatgctccaggtgcaagcagcagcaaattcctctctaactgctgattgtccaacactgacctttttagtatgtaaataggttatctcttctgtgtagttcagccaacagtatgtaagcctgcaggttctgaaaggaaacttcacatcttccttgaaaaggcagtatgttggcaaatgtgaatgttttttaatgaagttgtcaggctggacaaggggcatgtacaaaacaagcccttgaaacccrgagtgggaaagtcacagggtcagtctgcagttgcagtgacacagaaatgatcaagaccttgctgggaagccaggagttaaagccctgcactcttagggattaagacctgggccaaaactgggctgtattctggaaaagaataaccacatcactcaatcagttgtttttgctgaaatagtgtggacttaaactca

SEQ ID NO: 633316 - DNA, 604 bp, Homo sapiens
agaatctgttatatgttgaacacagataatgttttactattatcaattttaccatatcaattatacatcatgagacagaaagttttaaagttgagcttttgaaaactcataaagacctgagttggtctaggagggagtccctggatagggaatctggaataaccattctgtcatctcgaagacatgggactggaggtgacagtgtctgtcatgcagggctggtgtgagggaaaaggagaagttggcagaaggtgcttggcaaggtccccagygtgttgtgaatactcagtggcaggtactactttaactgcgatttgcaaacctcttgaggtcaggattgagaaagggaagcggcctgattctaaattaacacaacgcaagactaatttgcatttggggagtgtttcgcgggggctgttttgccttctttgtactctttagcaggtctaatgtcttctacagctgatgattttggggcgggatagtcaggtctagctgaaaaaatgcttgtgtgtacttgcctcaggagctctgtggcctagtgatctccctacataatagctgagtgacctgggattaggtacttaatttctacatatcaagg

SEQ ID NO: 633317 - DNA, 593 bp, Homo sapiens
ttttagacctttactggcagaggagacaccataactgaakgaacaccagcatcaacctgaccaggagactggagtggctcttattttgaagtttcttctttttaggcatcctcctgcccggtcacttcctaccctgctctccacgtgcagatactgagcaacaagtcctgctgggttgggcatgcacaaaactgaaaggccctactcccttatacatctgtgagtaggacacaaaataagccattacagtgcctgaggacgtggtttaattgtactttaattccaacagtagatgtagcactggttgtgaggagctaatggatgtggaagttagccctggcttcagctatatgggcacccaggcctacggtggagggcagtgcaaccagtccaaaagcctgagcaggtctgcgtgctgctctctcaactcccacaacgggaggggcaggggaacgaatataagctatcagccttaaaatctgagcacgacctacctctgggagggcagacaccatattctatttgtttttgtaacctccaccccccggcacagcacctggtacacagaggtgctcaatagctgtttgctgaca

SEQ ID NO: 633318 - DNA, 543 bp, Homo sapiens
atcttgttctacaggaaggttacgtgtattgctggactatcgattttccatacttgccacacaaaataaatcttctaaaatggcaactactttataactctgctcttgtttaagtgcctagttatatatagatttctgagggcctttaactcaaagaaatctatgtctccttacaaaataaatccaaacaaagcaatagtacaaagagaaaatgtttggcatgttattaattcacatgggggacttcaggatacactgaaaacacttgtagaaaagaatttcttgcacttcactaaaagtggacaatttcacctccaaacaaatggaatttagtcacaaacccagaatcatctgtatcatatatatgaaaaagggctgggatgaagrgaatgaatgtgttctactctccacatgccatcaatattaattttgcttatgtgcgtggatagtaattgagtcccatgtttcctctataaaacatcatctagacttagctagcaaatatagacatcagctcagccagagagctattacaaagtctaa

SEQ ID NO: 633319 - DNA, 543 bp, Homo sapiens
atcttgttctacaggaaggttacgtgtattgctggactatcgattttccatacttgccacacaaaataaatcttctaaaatggcaactactttataactctgctcttgtttaagtgcctagttatatatagatttctgagggcctttaactcaaagaaatctatgtctccttacaaaataaatccaaacaaagcaatagtacaaagagaaaatgtttggcatgttattaattcacatgggggacttcaggatacactgaaaacacttgtagaaaagaatttcttgcacttcactaaaagtggacaatttcacctccaaacaaatggaatttagtcacaaacccagaatcatctgtatcatatatatgaaaaagggctgggatgaagagaatgaatgtgttctactctccacatgccatcaatattaattttgcttatgtgcgtggatagtaattgagtcccatgtttcytctataaaacatcatctagacttagctagcaaatatagacatcagctcagccagagagctattacaaagtctaa

SEQ ID NO: 633320 - DNA, 550 bp, Homo sapiens
agccctgtggcaggcagctgtgccaacaatctgggtgcaacttgcatgtggctttcaagaaccagggtgggcaataagtaccttgtcctccaaatattgaggatctgtgtcctcataactgactatgaaggtgcaggccagaggcctttatagcaatccccattgcctaaagtggcttccagggtatgtgaagataattgccttaaaaaaatttccstccagttttccccttctggggagccaaacatttaaggattagcacatttaaaagcaataacatatacaagggaatttagtaagtcaccatgcacgaccaaggaaagcagtgggctcagaaatgacctgagaagaccttaagtttacacctcatgctgatgtctggcatggagctaccataaaacaattaaaaaaccccaaacaaacaaaaaccaaaatcagaagcagcaaaccctggggaaggcggggaatctgattaatagagatactatattatgagattcaaatggtcagtttcaacaacaaaaaaatacgtggtatatgaaaacaggaa

SEQ ID NO: 633321 - DNA, 609 bp, Homo sapiens
aaagtgaggatattcatactgattctatagaaatgaaaaggattataagagagtagtgtgaacgactgtctgccaacaagttggataacacagatgatatggacaaattctcagaaacacaaaacccaccatgacttactcataaagaaacagaaaatctgaatggacctatarctagttaggagattgagtcagtaatcaacacccccttgttaaagataagccctggacgagactgcttcactggtgaattttaccaaatatttaaagaactatcatcaatttttctcaaacttttacagaaaactgaagagggggaacactttctaactcatagaaaggcattcaaatagaaaaggaagaaggagaattatctctcttcacagatgacatgatcttacatgtagaaaaccgaagaaatcctaacatgtccactgatagatgaacagataaattatgtcatatatatccaacgggatattatttacctttaaaaaggaatgaaattccaatatgtacttcaacatgggtgaaccttgaagacatgacattaagtgaacacaaaaggacaaatattgtatgattctgtttatatgagatagtgagagt

SEQ ID NO: 633322 - DNA, 473 bp, Homo sapiens
tggggtggacgtgctcactaagcagaggaaggtcaaggtggggataggagctggagacagaactttggaagccattagccataagactgagtgaaattactcagagactgggagagaagagagctccatgaaataatatttgaagtcggatagagaaagaggaggcagcaaaggaawctgagaaagaaggaaaggccagatgggagaaaattgagtctaggatgatgtctgggaagccaaagtagatttcaagaaggtgggaatggtctcaccgggcccaacgcttttccacggtcaagtaagtgaagccctggacacagtcctcgagttttgcaatgaggtgctcagtgggcaccttgacagcagggccaggctgtgaggatagaggagctagcctgctgtaggctgagggcggggaggagctctgcagaggcaaaggaatatcttgaacccaagtctcctcattgaaatgc

SEQ ID NO: 633323 - DNA, 373 bp, Homo sapiens
ttaaactcaaactctgacccagtaaacaattctccattctcccctcctcccagccctggcaagccccactctactttctgtctctatgattttgactattataagtacctcatatgagtggaatcataaagtatttgtctttttgttactggcttatttcatctcacagttcatccgttttgtagcatatgtgcaaattgccttcctttgttaggctgaataatattccgttgtatgtatatgcctcattttgacttaatttgtgacctaacctatgttttgtcctggagaatgtttcttgtgcacttaagaagactgtatgccgctgktgggtagtgtcctgtatgtatcggttagatagctgcttcattgt

SEQ ID NO: 633324 - DNA, 560 bp, Homo sapiens
tagaactggctcctgcaccaagtgctctgggtaataaaagagaaaaccccttcactgtgttagataatctacaggttagctgaaaagcctaaaacttaatgaattaagacagaggccaggcatggtggcttatgcctgtaatcctagcactttgggaggccaaggtgggaggatggctcaggcccaggaattcaaggccagcctggccatcatggtgaaaccccatctctacaaaaaatacaaaagttagctgggtgtggtggtgcttgcctgtagtcccagctactggggaggctgaggtgggaggaacacttgagcctgggaggtcaaggctgcagtgagctgagattgtgccactgagctccagtctgggtgacagagtcaagaccttttcgaaaaaaatattaaaagccaggcgtggtggctcacactgataatcccagtactttgggaagccmaggcgggtggatcatggtgaaaccctgtctctactgggaaaaaaaaaaattagctgggcgtggtggcaggcacctgtaatcccagccacttgggaggctgag

SEQ ID NO: 633325 - DNA, 567 bp, Homo sapiens
taacagaagcattttgatctttatctaggagtttggtgattgtttttgtgaccagaaataggccataagaacctaacttttgtttgttagcctatgggaaaattgatttcatyatacatcatttcacttaatgttgcagtttctagaacctatctatgccactgaggattgcttttggaaagaaagcacagggctacagaggaggagataagaaacagttttaagagcaaggggagagaaggaggaaaggcttcttaacttgcctatttcattaaaagttagcccaatacacacaggcactgggtccacaagtttaatggaagggattaaggggaggagctcctaaggctgcctgtggttggcttttcaaatgctgggattatgcatagggtagtctatataaacaatgaactgtctgcacataatatagaaaccagcagataaagcccattagtgatttacgatttattaagtaatatacatgaaaattacaaatgaaagaaatttcttataatttctttcctccttgtctatctcctcactccagagaggatactcaataaatta

SEQ ID NO: 633326 - DNA, 627 bp, Homo sapiens
attgcttttggaaagaaagcacagggctacagaggaggagataagaaacagttttaagagcaaggggagagaaggaggaaaggcttcttaacttgcctatttcattaaaagttagcccaatacacacaggcactgggtccacaagtttaatggaagggattaaggggaggagctcctaaggctgcctgtggttggcttttcaaatgctgggattatgcatagggtagtctatataaacaatgaactgtctgcacataatatagaaaccagcagataaagcccattagtgatttacgatttattaagtaatatacatgaaaattacaaatgaaagaaatttcttataatttctttcctccttgtctatctcctcactccagagaggatactcaataaattaggagattatctctgtaaatcaaaaagcttaggctctgaaaactcaccacgttgttggagcttcctcrtctcccatttcgccttcttctacatccattccttcttctctatcttcagtgtgctaaattgaaaaaaaaatgtatagcctgtcatgaagcagtcatcagacagaagagataaatgctagaataagtggtcagttacacattcctaggcaacccacagtta

SEQ ID NO: 633327 - DNA, 527 bp, Homo sapiens
ccaatatgacacctaattcagctatttcataaaccgagctttctccacaatcccatctatttgttgcttgtcctcatcttcatggtaagattctcaaggaaagttctattttagataaattgtggactagataaatctggcaatataaaacatggaggaaggttatgtaaaatattataaatgcatagctgaacttccaagacagtaaagaaaatcttcaggggccaagatgacaggcagctgtgatgaaggaaattgccagattgggtaggctgattggtcatttaatgctttcccaagaacagaagctttgggttcagtcaagtcaatacataaagccagaccagtgaagggcaacagcccaataaaagggtatagctgaaaaaattctgtcccctgtacagagtcaactaagtgttttctgccttggcctaggcttagtttgrtgaggaaaatatcttccttgagaatctgtcgtcacagccttgttcttgaggcagattgtattttgaatttacatcatatac

SEQ ID NO: 633328 - DNA, 638 bp, Homo sapiens
aacaatataaatatagttctaataagatgtagaattattagaaggggtggaaggggtaattccttcctttcataaacaattacattaaataaatatagkcattaagtgatgaagctggaactccagctgggtcttttgactatagtttccatactgttttcactacaccctgttcccttctttagaccacaggaattcagacttatttttagccaatgttaatatatctttcataagagaaaaatgaataaaatatatacctgtgagaataacattgtctatcatattagataattgatgaataccaaacctgtttatgagaaatccaagctttctcataatgaaacaaagacacaattctttccttacaaataatctcttgtctgaacatattgctgatttgaataacagtatatatacaaagtactcctaattccattttgtatggggctaagacagggacacacaggtggagaattatcaggtaaactttaatgcatcctagtctgggtttgcagtttcttcatatatgcataataaagcaaattagcagaaaagcttaaataacttggatttatttttgtgtagcttgtacttttccaaatgtatattgaaaatgacagttcatgtacgtatcc

SEQ ID NO: 633329 - DNA, 679 bp, Homo sapiens
tgtagcttgtacttttccaaatgtatattgaaaatgacagttcatgtacgtatcccaaatgtaaggcaaatacaactcagtccaataggtaattttatttatgtacaacaagctcaaagtaatcaattaaaaatgaaactaccggggacctgggcaagatggccgaataggaacagctccggtctgccactcccatcgagatcaatgcagaaggcaggtgtttctgcatttccaactgagatacctggctcatctcactgggactggttagacagtgggtgcagcccacggagggtgagcagaagcagggtggggtgtcacctcacttggaaagcacaagaggtcagggaactccctcccttagacaagggaagctgtaagagaatgtgccatgagggatggtgcattctgtcccagatactacgctcttcccacagtcttcacaacstgcagaccaggagattccctcgggtgtctacaccaccaggactttgggtttcaagcacaaagctaggcagccatttgggcagacactgagctagttgcaggagtttttttcataccccagtggcacctggaatgccagtgagacagaaccatttactcctctggaaaggggggctgaagccagggagccaagttgtctagctcagtggatcccacccctacggagcccagc

SEQ ID NO: 633330 - DNA, 607 bp, Homo sapiens
ggagcacaccatagcccagcaaagccactgtagccagactccctctctagattcttcctcaccatacagggcatctctgaaagaaaggcagcagtgccagtcatgagcttataggtaaaactcccatctccctgtgacagagaacctgggggaaggggtggctgtgggcacagcttcagcagaattaaacattcctgcctgctggctctgaagagagcagtggatctcccagcacagtgcttgagctctgctaagggacagactgcctcctcacgtgggtccctgacccctgtgcctcctgactgggagacacctcccagtaggggccaatagacacctcatacaggagagctccagttggcatctggcgggtgcccctttgggatgaagcttccagaggaaggaacaagcatcagtctttgctattctgcagcctccactggtgatacccaggcaaacagggtctggagtgracctccagccaactgcagcagacctgcagaaaagggtcctgactgttagagaaggaaaactaacaaacagaaaagaatagcatcaatatcaacaaaaaggacgtccactcagaaaccccatctgaaggtcacca

SEQ ID NO: 633331 - DNA, 598 bp, Homo sapiens
attatgaattctagtgagagctatattttacagctgtatattccagaccctaaatgcccttgcagggaataaaatgaaaattaatgaactgaagagcaattgtaaaacaggacctttgcattaagaacaaactattcagtaacagcttttaataaggtaaatatccaaccacagcataatgtagtctttgtacatttttaggacttatgtcactgggaaaatatgttaagaattatttctccaaagatcctaaaagtttcaggtaatggttcctttatctagaattttttattaccatcattagtgctatccagactttattactgctgctgctgctaccattactgctactattactattagtactactaccactactgctactactattgcacacacacaaacacacttaytattctgtgcatctatatatagaaacctgtgtttctctatgcaggcttctgcggtttatagaagacagtaaacaggagcagtatggcacagcgggaatgtaggtgattaagtaagactgcctaggcatgtgttcaggctctgcttagtagttgtgtgaccttggtcaatgttctggtaatctatt

SEQ ID NO: 633332 - DNA, 580 bp, Homo sapiens
  misc_feature 531: n = A,T,C or G
cattttcaaattgctgattatttaaaattttattgcatataaattgttttgacaacacctgtagttaatttggaagaagtgaggaggaagaggtattgattaaaatgacttcagaaaatatttacatacatattcatttcttaactccttgcaaaatggatctgaggtggcttaatatacaatgaatgcatgtatacataatatattttgtaatgaacatatatgtaattacatatatgtaattcacacacatatgactattacacacataaatatgtacaaattattttaaaagaaatagaagccaaagccatgaaaaacaaggaaaaaacaacttgcaaaaacaagggctgatacaacaatgataactgaatataatatttgctctgaacttcttggtaatcagtgaggaaaacaaaattattgatgtgtaattcctattaccacaaaaaatatttagtataccwactctccaagaaggatcatcctaatgatggaatcataaagaaaagttaaatgtgagaccttttnttggagaacaattggtaaaaaatattttctttaaagagctttacaacca

SEQ ID NO: 633333 - DNA, 549 bp, Homo sapiens
cactagaatatttaatagcatagaagacagaacatatattttattactttctaagctttcatgggaaagtagtaatagctctttgttcgtgcctacatacagcacttgagagattacatttccattttaaatgtatttatttataatcttctcactcarttcagcttaacaattataaacaacaaaatgtgctactccttaggccagctttaacttttgtatacttgaatttctgtaagatatttatcctttttaaagaaaatttgattatagtatcctaatatactttagatgtttacataatatcatatcaagagcaaatcactcaaaaactcaaattcatccctgggcattgtttagaaaagaaaccagacaatgaacaatgtacttgtcaacaatttggagtattattaggtataatctaagatgtataagttaattacaaaacacttaatagattttcttaaaactgtaagtaatattcatgacagtagatttgattaacaatagtctatggataaacttgattaaacaaactttttttaactt

SEQ ID NO: 633334 - DNA, 609 bp, Homo sapiens
tgtggcgttcagaggcttccatcggaaaaaaacataataagcctgtgaatccttcacaggcaaccaaggtatccaggctctctctcatcaaaattgtctagaaggctggcatgacccactgagagaaggaagagcactgtggtgtggtggcccacaccgggaaggggaacctcctctccacagccacgggaggcggtgagtgagtacgctacccatccggggaaactgtgctttttcccatggaacctgtgcaacccacagatgggaaggtcccactcgcgaacccacgccactggggcctagcgtcccaaccttggaacatgcagattcttacagcctctcagctggaatctgcttgaacctacggaactcccggggggaggggcaaccagcaccagctgctgctgcctgctgtcgaagcygtttcagctccttgggggaggggcggcagccagtactgggactcacaattgcctaacatgctaaactacctgggtgggggaagggcagcacccatttctatagctccaggctgtgcttttcccctgctggagccagggaggctggacagcttgctcccaagacttgtccccacagcccactcccaag

SEQ ID NO: 633335 - DNA, 609 bp, Homo sapiens
tgtggcgttcagaggcttccatcggaaaaaaacataataagcctgtgaatccttcacaggcaaccaaggtatccaggctctctctcatcaaaattgtctagaaggctggcatgacccactgagagaaggaagagcactgtggtgtggtggcccacaccgggaaggggaacctcctctccacagccacgggaggcggtgagtgagtacgctacccatccggggaaactgtgctttttcccatggaacctgtgcaacccacagatgggaaggtcccactcgcgaacccacgccactggggcctagcgtcccaaccttggaacatgcagattcttacagcctctcagctggaatctgcttgaacctacggaactcccggggggaggggcaaccagcaccagctgctgctgcctgctgtcgaagctstttcagctccttgggggaggggcggcagccagtactgggactcacaattgcctaacatgctaaactacctgggtgggggaagggcagcacccatttctatagctccaggctgtgcttttcccctgctggagccagggaggctggacagcttgctcccaagacttgtccccacagcccactcccaag

SEQ ID NO: 633336 - DNA, 532 bp, Homo sapiens
tgttctttttaacaagcacactaggtgattctgatgtggatgatttaaaagccacactttgagaaatagtcttaaatgatattgtgcagggatgaatttactatatgtgtgtatatttcttctaatactgatggctttgattttatattttatgtgtatgataacccaatcaacatttttatagtagtcttgacctagcagcatgtattagtccattctcacactgctataaagaaatacccaagactgagtaatttataaaggaagaggtttgattgactcacagctctgcatggctggggaggcctcaggaaacttacaatcatggcagaaggggaagaggcacatcttacataatggcgggcaagagagaggagcattcgtgaaggaggaactgtcaaacacttataaaaccatcagatctcattagaacttactcactatgacaagaacagcatgagggaaaccacccccatgatccaatcacttcccaccyggtccctccttcgacaagtggagattatggggatta

SEQ ID NO: 633337 - DNA, 611 bp, Homo sapiens
ccacctgtttagatgcacagggccttcatccacccccatccatgcatgcaccggccccctctagctttccctctactgccaaggctgagttcccttcctgtctgacatyatgaagacatacattatatgacagtttctactaactctggaaaatgagacaggatattgttgctgagcactcaaattccatgtactactttccactttgtatggaagatgtttatgtacctgtcatctttgtggctattgagtaggatacctgcctcctttgatgtagtgtgagctgttcataggcagggaacatatttactcttctttgcatgtctaaatccctgatatgccttccattatgtttactgaaataatgagcaccaaggaaatactattctctcaattctcatttctattctgacagtgacttcctttttttttttttttttacctttttagatcatgtaatcgctatctcattttattttgctataaaatggaaaaacgttactcttccttacaaaacacatatttctgtgtgttttatcaaaatcttttataagcacaaccaataatttctgagaattaatggattaatggttaaaaataagaaccccagc

SEQ ID NO: 633338 - DNA, 611 bp, Homo sapiens
ccacctgtttagatgcacagggccttcatccacccccatccatgcatgcaccggccccctctagctttccctctactgccaaggctgagttcccttcctgtctgacattatgaagacatacattatatgacagtttctactaactctggaaaatgagacaggatattgttgctgagcactcaaattccatgtactactttccactttgtatggaagatgtttatgtacctgtcatctttgtggctattgagtaggatacctgcctcctttgatgtastgtgagctgttcataggcagggaacatatttactcttctttgcatgtctaaatccctgatatgccttccattatgtttactgaaataatgagcaccaaggaaatactattctctcaattctcatttctattctgacagtgacttcctttttttttttttttttacctttttagatcatgtaatcgctatctcattttattttgctataaaatggaaaaacgttactcttccttacaaaacacatatttctgtgtgttttatcaaaatcttttataagcacaaccaataatttctgagaattaatggattaatggttaaaaataagaaccccagc

SEQ ID NO: 633339 - DNA, 575 bp, Homo sapiens
ataaccaatttctacccacaataaagcaggtaatattgtcaccaaaacatttattcttctgtactggatacatctacatgattttcatttagaattctgaaaccgtccctcaaatttgacagcataactcatgggaactttataatatggcaggggaacacgaactgacttattttaacagaaatgtccaaatatatctgcagtatgtgtgtgaggcattttagaaggcaccctgttgtgctgtataatattggtggcacagtgccatgctgtcatagacttaaaaggyttgagaaatgcggtttctatacgatattataagactctccagaattgcttcagaggctctcaaacaatttcagaattccctctttaacttttattaaacttaaaatagtacaaacatctcactgactcaaaatatggtgaaaaattgtgcatttcttagaaagctacagtctcctaaaaaagtggaatctgaactgcttctccattttagtgtttatatggtttcagaaattgtctcttttcatctattattaaccaaaaggttttgacctttctttacttttgta

SEQ ID NO: 633340 - DNA, 580 bp, Homo sapiens
tttatccagtacctactaatttccaagcactgcatataagttacatcaattttagtcgatgctgtgaaggaactctgaatgcaaagaaaaacagaagaacacaatcaaataacgcagcacaatgtggraaggtacaaaaaaaaaaaagacagaagcaaattattgaaaggggagttggatttccccaggcagagacgctgggaaagagcattcaaggaagatggcatgtgtgagaacagggtaataggagagagcttcgtgtcctgggaaagaagtgaatgtggatggagcctaaccacagagggtatgagattgccaaggcaaattaaaggcagattatgagtggcctcatgggctttactaggaagttttaaattcatcattgcatcatagatgtcatcggatgtttttaaacatgattgacgtcgtgttttagagccataattccgatgacaacatagagaatgaaccagaaagaaggtagaaagccaagtgactgagcagtgtacctggtgactaaggagtgtagcaaataaacaatgatacttcatctgtagactatattttttatagtcacatt

SEQ ID NO: 633341 - DNA, 578 bp, Homo sapiens
ggagctacaggaggttaatagaactcttagtggcctagaaagaagacttgctgtttcacacatatttatatagacaaggtgagtcttttcccttaggctgaattaaatgaatgtgactgaatagccttgagtcctgcttagtgtgctatttacaaaaaaagaaagagtttatatctctgttttcagaaaaacagatttatggctagcaactatgttctttccctaacaagtattagagaccctaagaaaaagtcttttttttttatttgtttgtaggagttaaaaaatacaatttatttttatattctatcatgctacatatttattttatacctttcttgaaatcaaactaaaattccagattggaaaactcatttgatttaagcttkgttagcagcaaatgtgtgtgtgtgtgtatgtatgtatatatatgtgtgtgtgtgtgtgtatgtgtatacatgtatatgtgctacagttttcccagaaccatgctaataagaaaatagtaatttcatgaaatatgaataaccaactctacatagactattcattctgttattaaatatagctgcattgtc

SEQ ID NO: 633342 - DNA, 599 bp, Homo sapiens
agtatacaatgtatgtggagctctatacctttttgggtgaaactctcaagtcaagatttaaatatatttaaaaagtagttatatgtttaaaggaagtttaccagtacttctgtaaaaattaaaattatcaatatagatattgagggacaacctgtatcaagtgaatcagagaggyaatatttttcagaacttgtaaaatgaaagagtttgttctctggaacagaactctatttttagagatggaatgaatgaagcatggcaacatggcattcctagtggattctgtacttgaggatttggaatccaagtactcatcagtcctggaaggatatagaatcactgaaattttctaatatgaggattctgttgccagaagtatcctgtcattgcctaaatacacacacacacacacacacacacacacacacaccaatcttcatatcatgagatattttttcaagtgttaatagcataaaaacattataaaaaatactaaaagatgtcaatttcccaccttgatatttatcaacatttgaatataagttactggccaggtgtggtggctcacgcctgaaatcctaacactttgggaggccgag

SEQ ID NO: 633343 - DNA, 596 bp, Homo sapiens
caagttatttatttttcatcaaatatttacaatgtggcaattagtcagttttgctttgcttttttttcacaatggtaccgtgtgccaccgacattttggtagaaactcattaaggttttcgaagtttactttcatgaaactgataggcacaatcaaatgaattgtgctggtgaattaaattgttatacatatttgggcaaacactggtatcatacctctaaaactggcaagtttagttgcagtgtgacagaacacagaaaatacattaagtaatttgttagttcaaatccttttaataaatttggcttaaaaaacccgagaacaacaaattccagtaaagaatcctagggttgttttttagagctaattatgactgtaaagtttgagatattaatgcctatgttatatgtttggtagttaagcttgcagaaagaaaaggataaccrctgttgtatgaaattctatttatactggcttaatagtcctgggagagctgcttccaagcttatagagcttagcactctccttatctgaggcttctgcactggtcctgcctcatttgatccatcacctgacagtgaaaactactttggctg

SEQ ID NO: 633344 - DNA, 600 bp, Homo sapiens
ttgcccaggctggagtgcagtggtgcaatcttggctcactgcaacctccacctcctggattcaagtgattctcctgcctcagctcccgagtagctgggactataggtgcaccaccatgcctggctaatttttstattttttgtagagtcagggtttcgccatgttgcccaagctggtctcgaactcctgaccttaactgatctgcccgcctcagcctcccaaagtgctgggattacaagagtgagccactgtgcccagtgccttcctctgttcttcagtccttctgtactctaccaccacgctgtcagctaagagggccctgggatcataaggggaggaatccactgcggtgtgattttaatgcttctcttcttgggctgttgtaagagtgaatgtaagagttaaggtctctcagaagaaggtaatggttcctccttctgctcagcctgtgctgagccacctagggtgccttcttcctggcactctttcctttaggaacgtcaatctggagaatagaagccaacacaaatgatgtgcaaacaacaacaacaatagcgaatatgtcacttgacttttgctgctgttctgaagataaattga

SEQ ID NO: 633345 - DNA, 600 bp, Homo sapiens
ttgcccaggctggagtgcagtggtgcaatcttggctcactgcaacctccacctcctggattcaagtgattctcctgcctcagctcccgagtagctgggactataggtgcaccaccatgcctggctaatttttctattttttgtagagtcagggtttcgccatgttgcccaagctggtctcgaactcctgaccttaactgatctgcccgcctcagcctcccaaagtgctgggattacaagagtgagccactgtgcccagtgccttcctctgttcttcagtccttctgtactctaccaccacgctgtcagctaagagggccctgggatcataaggggaggaatccactgcggtgtgattttaatgcttctcttcttggsctgttgtaagagtgaatgtaagagttaaggtctctcagaagaaggtaatggttcctccttctgctcagcctgtgctgagccacctagggtgccttcttcctggcactctttcctttaggaacgtcaatctggagaatagaagccaacacaaatgatgtgcaaacaacaacaacaatagcgaatatgtcacttgacttttgctgctgttctgaagataaattga

SEQ ID NO: 633346 - DNA, 543 bp, Homo sapiens
tgaaaggtttttatctacactgtttacatagaagatcatatgaagaatttcattaaatgaatttcataaaaatgcagaaatgcatttctttaatcttgttccctaagtcatatgaaatctcaattaatgatatatattttgataaatgcaataagcgcttcaaaattttccagatatttcattaagtcatatggaatctcaattaattgcacatattctgataaatgaaatagcttcaaaaatttccagatatttcaaaatgtagggtcggccaaactcagyggctcacacctgtaattgcagcacttttggaggccgaagcaagtggaccacttgaggccaggagtttgagaccaccctggccaacatggtgaaatcccatcactactaaaaatacaagaattaaccgggagtggtggtgtgcgcctgtaatcccagctacttgggaggctgaggcaggagaatcgcttgaacccggaaggcagaggttgcagtgagccgagatcgcactactacactccagcctgggtgatagagcacagc

SEQ ID NO: 633347 - DNA, 569 bp, Homo sapiens
acaagcaactccaagtcctcattacttcttactctaactgcaggattattgctacatattttattcccaccaaaaaataaacmaaacactctccttcattccctcagcaaattgaagcatattcacatttgcaaaagaacctttactaaatactaagagaaaacaaaaagaaagcaattacaaaagctacgagctcatgcgtgtgtgtgtgtgtgtgtgtgtgtgtgtgtgtatgtgatttacttctctctgagctaatacctatggctttattaattcacttccttaataggctttgcgctctcttcttgctattatctgttttacactttttattgagtgtggatttttataaggtacctaaaatagtggcaataaaagggagccaggtataaaacaaaggtgataaatgggtagatatatagatggaagatagataaaagacagataattggtagataggtgatagataatagatacatgatagataatggacagatatagatacatacatacatggatagataatagaaaatgtgtacacaatagatatgatacatgagagggat

SEQ ID NO: 633348 - DNA, 487 bp, Homo sapiens
tgtccttgccaaatgttggtttcagtatgatactagtttcatagaatgagttagtgagaaataggagactttttgatgcaatcatatttatctcctgtatccccctttatacttcataaaaggcaatcagaggcattcaagaaatacttgatttgaactgaaataaaaacatatctttgtctcatgtattggattttgaattacagaatttaacagctaaatagacataattagattttccacatcttttattatcattttccacatttttagccattgctttattaaaaatcttttaatatgtataggttattaatttatgttactattgaagagctgccatgtataataaactaaatttaacaatcttttgtatyaatttttatagggattcaaggatatttctcttgagaggtttatacatggtggagccaatgttactggattccagttggtggattttaatacacctatggtaatcaaacta

SEQ ID NO: 633349 - DNA, 285 bp, Homo sapiens
actttctacaattggaatttcaaatgatttttcttcatttgaaagcacaaaatcaaggagatcatcctccactttctacagcacaaatctactgctcaaacaggcatggaaggtgttaattataaggaactgaccatatggaatttctaaaggagayaatgtagtttttgccatgattagtagttagtagttgatactatttagcacagtgactagtacatacccattttttgaataagtagatctgtcatgcttcaagaaaattgtgccccatttccatgtgtt

SEQ ID NO: 633350 - DNA, 271 bp, Homo sapiens
cagccctcctggggttcaaccacagaaaccgactacaaggcagattacaaagctgcattagcctttgatacrttagctatttgtactgggacacaacagaaaggccttgcctaggggtctttcttctccaaattgatggaaaactgttttattggaatttctatttttcagaatggtttttctcctttttaagtcaggatgataagatttggtatacaggctttatattaaagcaagaatagaaatttctgaagctagagtcaattaatta

SEQ ID NO: 633351 - DNA, 487 bp, Homo sapiens
tcataaacttacaaagaccccagaccatttctggcactcgataagattttaacatttaccattatgttcattttcatttggttagtacacctctgctctgacttatgatggagtccttgtgatggctgaaactttccgaagtcttaggaggcagaaaattgatatctcaaggagaggaaatgctggggattgtctggcaaatcctgctgctccatggggccagggaattgacatggagaggacactcaaacaggtaactcacaattttatttaagttcarttcatttcatggtcttgttttaactgaatgttcaaaaaacagactaatttatccaagcacaaatacatattacaattgctacttaaatatatcaagccatcatttttggaacatttctacataaaatacaaggtagaatcttgctgtttacattttatgtggatgcataatcaggataagctaggttatgttgcagtaataaaaaac

SEQ ID NO: 633352 - DNA, 481 bp, Homo sapiens
tacttcctattactagaggaaagaagtggacatttagatttttttttaaatctccaactcctatattttactgaatgcttacaattttttattatgccatgatgagaggatgtgagtaagtggggctracctggattgcttaaaagcaatggaaatgaaaaaaaaaatagtttgtaatgactcactgcaatttttatctttttctgaatctttcctataggacacaaatattgctgacgtctctgatggaaaaactgctgtattgcctaaaatgtctatttaccttagtgatactttgagcataaaagttgaatttcatctaataaatgtgaattgtagtcaaaattctgatgatcactcttccttaaaggtctggctcaaggactaccatcaggtaaataaaaagtgggatttcatgttttaaaaatgtagaatgatggctaatgtaaaacaaattagaagaggagccaaaattcattga

SEQ ID NO: 633353 - DNA, 524 bp, Homo sapiens
aaattctattaatcagcttgtgagaccttcatccttcctcatccagaaagtcctaccactcactgttccaggtgcattgccaaattgtcaagaactgtgatggatctcagactttacactactgacaagctaacaagttatcctrgctcctgctctaaatcataaagtgaaaatgatttccaggcttgggtaattccatagtttctacttcaaatcagcagtttccaaaagtatttattcagactaagaatcaagaaaatattgtcatagtaaaataatatttgttatatatgatacaatatcaaatcagtgacattactttagtggagatttttaaattatgttgctgattcattactattaagcagaatagaaaatatttagaagaaaaaaaccagtaaattgaaggaataacctgaagttgaatttctatttcaaaaaattttctcatgttaaataaacttatcttaaaataaatcttcttcatttcagaggtttactaaaatgttctataattttatttt

SEQ ID NO: 633354 - DNA, 486 bp, Homo sapiens
tgatcaactacccacagagagttagtcctagtgccmgagggaccacttaaagtggcctagctataagaagacatattcctccacactatgtcgacatatactaacagaggtgctggtgtctgtttggggagaagtttgcagaaagggagaaatgcatgtaatccattgggactggttccactttctgtagatgatagaaattgaagagagagaagcagaaagctattttatccatatataagtttaaaattatagactcaaggaaagacaggcatagggagggctgagttggggaggcatgtgaatgaatgtgaattggagaaagagaaaatgtgcagaagagagctggaaaagtataaaaatagaagcctgcagaaaattatttgatcactataaaacaaaactaacagactgatagacctggctaaaatctaagcagttcataaatctgatactgaaaggactgaaaggacattttcaaaatac

SEQ ID NO: 633355 - DNA, 615 bp, Homo sapiens
gttacccaaagttaaataacaatagcacatgatcttgtatgggttcaggctcattcttggtctccactctccttcatgtctcacagaattcaatcaattgtctggtatttgtttttttatgggagccaatcacccaccatctctgaaattatgccmaagggtaactaggacctgattctaagctctgttaattagacagtagcctcaacagagataaagtaattcaaataagaaaacaccatatcagagactacataaatgggaaaaaaaaaggaaataaaaatttaataactactatgtagcacacccatatatactggaatttgatccccctaactccttgtagttgttgcttttatcttcatctggacagatgctgctgctgcaactcgggttaaatagctgatgagtgacagaagtggaactggagcccattactgcctaggtcccaagcccatgagcctctcactatgttgccttgtttctctccaaattcacagaatcctacttagagacaaattaagaaaaaaaaaatctcatctttattcatcctgccatttcccattgtgaaaaaatacaagcacatagtgtctgataatatccatttctcagatg

SEQ ID NO: 633356 - DNA, 565 bp, Homo sapiens
tgccatttcccattgtgaaaaaatacaagcacatagtgtctgataatatccatttctcagatgtttttctagctctcccagctaatgaccatttaattccttttttattttcacaataattattgttcatatcagatttagtattgcttcaatcatggtgctgcttgtagcactatcattttactctcaaaaaacaaaagaaggtcagggagatgagctgagaacaccccagcataccccttcttcctaaggaactccaggtgcccaccatgatgcrccctccattattcactccagctgaaaaaattacccaagcaatgcccttctgtgaactcctactctaagccaatcttcaaggtattagagctctctggcaagacagactgaagggcagacaatatttttttcctcttcccctttggcttaattcttaaaatgggttttaaattcaattcagtgaaagccccagtatatcagacatttggtagtgtcttgtgagacctgaggaaagggttgaccagaactgaacttgactttaatacaagaccatgttctattattgttt

SEQ ID NO: 633357 - DNA, 536 bp, Homo sapiens
tttttaatttaaaacaagtatatatttgagacccaccctctcctcaattcttatgtgtacttaagtcagttgattcttgttaactctgctttccacatgacagttatatgacatgaaaaggggttttacagtttagcactccattaaaatgcacccaccctgaagatctcatcagccaattttcaggaaagacaatttttctttattaatgagttccacaacagagagaatcacagatctgggatacatttttggagagtacctagatattggcmagaccttgacattttgcatttaaaaactaaaccatgggtttgcagttattctccttttaaagataaatgattcagaagtgctggcaaattaaaataataagcaaactttattttttttttttgccttatacctatatgcaattctggttaaaaaaaaaaaagagaaagtcatattttgtgatatgggaccaattaatggtagatttcatgtggaccatgggcttatttagaagtaagtccacatgaggggtcagttcctaa

SEQ ID NO: 633358 - DNA, 570 bp, Homo sapiens
ggggttatgctttgatgtaagtcacataaattgtttttatttcttcacctttatggtggggataatatctacttcacagggctgttatgaggttcaactgtattgtgaaatactaataaagcataatgtagtttatgaatacattactccagcagcctgctctattaactatcaatgattaataatttattaagcattctccaagctcctgcctctgtgcctttgctttatgatgcagcagctccttcctcctcaccatctttattcatcaaccctttccatcctttagggaccatactacagtccaagtcattctctccatggtgaaaccccctttgaaaggrtctaatcttttgcttaacactgctttcccaaggtatcgcaatattgaataggtttgacactcaaaattatgtcttacataccttacatgcttaatattagacaaagaccttgtttgagtgcctgttaactcacaaacatatattttaattcccttataaaaatacaatggttgtttttacacacattggaactgtgagctttatataatgtgatataaaaaagtat

SEQ ID NO: 633359 - DNA, 605 bp, Homo sapiens
aactggacaatatagtgagaccttgtctctaaaaaaaataaaaataaaaaatgaaaaaataaaaatgtaaaaattaaccaagcatggtggcatgaaattgtaatcccagctactcaggaggctgaggtgagaggattgcttgagccaggaggcataggctgcagtgagccaagaccatgccactgcactctagcctgggcaatagaatgagaccttgcctcaaaatatatatattttgaaggatgactctgactaaatatatacagtcagagagacagagaatgagagagagagactagctgaatggattttaaaaattactgaactatatgctgcctataaaaaaactcatctcacttgtaaagacacaaaatagaccgacaagaaagggatggaaagagatagtccatgcaaatggaaaccaaaagtgagcaggatatacttatatcagaaaaagcagactttaagtaaaagacagtaaaaagagacattatacaaaaaagrgcattatataataataaagggatcaattcagcaagagaatataacagttctaggccgggcatggtggctcacacctgtagtcccagcactttgggaggcca

SEQ ID NO: 633360 - DNA, 609 bp, Homo sapiens
ttggtcctactttatatcttgcatttctcttttcacagtttttatgtttccttcaagtctttgagcatgcttataatagcttttttgtttttgttttgagatggagtctctctctgttgcccaggctggagtgcagtcacgtgatcttggctcactgcamcctctgcctcccaggttcatgcaattctcccacctcagcctcctaagtagctgggattacaggtgcacaccaccacgcctggctaatttttgtatttttagtagagatagggtttctccctgttggccaggctggtctcgaactcctgacctcaggtggtccacccgccttggcctaccaaagtgctgggattacaggcgtgagccaccgcgcctggcctataacagtgttttaaaagcctgccaattccatcatctctatgatttgtggacatgtttctaatgactgggttttgtttttttttcccctgattgtggatcgctttttttttgttgttgttgttgtttctcatgtctagttattttcattccccataaaaaaaaacccagctctttatttggaaataattaggagtttacccaagatttgtaagaataagaatggtacgt

SEQ ID NO: 633361 - DNA, 609 bp, Homo sapiens
ttggtcctactttatatcttgcatttctcttttcacagtttttatgtttccttcaagtctttgagcatgcttataatagcttttttgtttttgttttgagatggagtctctctctgttgcccaggctggagtgcagtcacgtgatcttggctcactgcaccctctgcctcccaggttcatgcaattctcccacctcagcctcctaagtagctgggattacaggtgcacaccaccacgccyggctaatttttgtatttttagtagagatagggtttctccctgttggccaggctggtctcgaactcctgacctcaggtggtccacccgccttggcctaccaaagtgctgggattacaggcgtgagccaccgcgcctggcctataacagtgttttaaaagcctgccaattccatcatctctatgatttgtggacatgtttctaatgactgggttttgtttttttttcccctgattgtggatcgctttttttttgttgttgttgttgtttctcatgtctagttattttcattccccataaaaaaaaacccagctctttatttggaaataattaggagtttacccaagatttgtaagaataagaatggtacgt

SEQ ID NO: 633362 - DNA, 609 bp, Homo sapiens
ttggtcctactttatatcttgcatttctcttttcacagtttttatgtttccttcaagtctttgagcatgcttataatagcttttttgtttttgttttgagatggagtctctctctgttgcccaggctggagtgcagtcacgtgatcttggctcactgcaccctctgcctcccaggttcatgcaattctcccacctcagcctcctaagtagctgggattacaggtgcacaccaccacgcctggctaatttttgtatttttagtagagatrgggtttctccctgttggccaggctggtctcgaactcctgacctcaggtggtccacccgccttggcctaccaaagtgctgggattacaggcgtgagccaccgcgcctggcctataacagtgttttaaaagcctgccaattccatcatctctatgatttgtggacatgtttctaatgactgggttttgtttttttttcccctgattgtggatcgctttttttttgttgttgttgttgtttctcatgtctagttattttcattccccataaaaaaaaacccagctctttatttggaaataattaggagtttacccaagatttgtaagaataagaatggtacgt

SEQ ID NO: 633363 - DNA, 610 bp, Homo sapiens
tactttatatcttgcatttctcttttcacagtttttatgtttccttcaagtctttgagcatgcttataatagcttttttgtttttgttttgagatggagtctctctctgttgcccaggctggagtgcagtcacgtgatcttggctcactgcaccctctgcctcccaggttcatgcaattctcccacctcagcctcctaagtagctgggattacaggtgcacaccaccacgcctggctaatttttgtatttttagtagagatagggtttctccctgttggccaggctggtctcgaactcctgacctcaggtggtccacccgccttggcctaccaaagtgctgggattacaggcgtgarccaccgcgcctggcctataacagtgttttaaaagcctgccaattccatcatctctatgatttgtggacatgtttctaatgactgggttttgtttttttttcccctgattgtggatcgctttttttttgttgttgttgttgtttctcatgtctagttattttcattccccataaaaaaaaacccagctctttatttggaaataattaggagtttacccaagatttgtaagaataagaatggtacgtagaacacc

SEQ ID NO: 633364 - DNA, 631 bp, Homo sapiens
agtttggccctaaatggcagtagtttaaagcactttcagttcattttcttccagatgtttagtttaaaggaaaagtctttactgtttctgttttaataatgaagctgtttcatctgtgaaacaatgatggaatctaaagaatgaaactggagtggaaagttcgcattttgaagtgcactttcccctcctttcgtggtttaggtaacgctgggctccgatcagcctcttctgcgtgtggtttctcagagtaacttgaggggcacgacygagggggtttactaccaggcccccgacttcctgctggatgccgccaccgtccggcagcacatccgtgcagagccgttttactggcggctgccgcagcagttccaaggagaccaggtgaggtgcacgcccagccgagagccagtcggtgcttcctaggatatacagaaattgtttaaaatcaccatagtctgggccggcctgtcatttaaagaagtagttattaatttcctcttttaagtgggatcagagaagtttaatgctcataaaagtctcctcaaatatatggttccttaaaatttttcattaattttaaaagttttttaagttcacgttatattaatttggttcttcctaaagcagtcat

SEQ ID NO: 633365 - DNA, 509 bp, Homo sapiens
aagcaaactgaaagaatttgactcacttcacttccattacctactatttttattaatccatgtagttcagttccttaccaaaacattgttaaatattaatatcattatggaatgtgcgaattataacttaaagtatccacctagcatgctaatgtcgatataaaatataaggacataatgttggaatcttagctgaagataaaatgcaaaaaaaacaattgctgtttctgcacatgaaaactgaaatgcccatgtcttcgtagtgatgtataaagaatgctgtcacctactcatctcatactttagcccawaaagaaagccattaggtcttggccaaatcagcacttcaagaggtcttttaggtgtacttgtgtcacattatttttaaattctaaaatgtctaaagtgtgtcatgacagttagtaatgtgctttaacacacttcacttacaatcacaagcaggaactactccaaacagggaagaaagctctggtttcatatatatgcaa

SEQ ID NO: 633366 - DNA, 633 bp, Homo sapiens
tttatcatcccaaacgcaaactctgcactcattaaacactagctccccatttcctctctccccagtgccccaaaaccaccattctccttttggtctctatgtatttgaccactctatggccctcttatatgatatatatatatgcatggcacatgcctgtaatcccagctactcaggaggctgaggcaggagaatcacttgaacctgggaggtgaaggctgcagtgagccgagatcgtgccattgcactccagcctgagtgacagagagatactccgtctcaaarataaataaataaataaataaataaataaataaataaataaataagtggagtaatacagaacttgtctttttgcgaatggcttgtttcacttagcataatgtcctcaaggctcatccatgttgtagcatgtgtcagaatttccctccttttaaggctgaatatatccatgtacatacatgccacattttgcttttcgttattctgtcagtgaattaacttgggtggctttcccattcttggcttttgtgaataaagccgctatgaacatagggggtcaatatctctttgagattctgcttccagttcttttggttgtgtacccaaaagtggacttgcagaatcatatgg

SEQ ID NO: 633367 - DNA, 577 bp, Homo sapiens
aaaaagagaaaaaagaaagctcaaaacagaggccaaatttttatctacaagatgactcttctatctaaactacaatcaggtgaaatgacatagtcctcaatgacttgaacaagattaatcaacaaaaaaaccccactcagcacttcattagcttcttctagcaaaattaacagaggaaactggtgtttctcaaactatgttcctctacaacaccaatgtcccatgaactgccaggcagattccttgaacaaatattccagggtgaaagaagtgagccggatcctccacggggctgctgatgtgcgtcagcrtactaaaagctttgagaagacctgcagtacagaacttggctctccttagtagacactgtgtcttggaatgtgcttctttaatgacatatctttggtcgggcgcagtggctcatgcctgtaatccccgcactttgggaggccaaggcgggcagatcacctgaggtcaggagtccaagaccagcctggccaacatggtgaaaccctgtctctacaaaaatacaaaattacaaaaattagccgggcatgatggtgggtgcccgtaatcc

SEQ ID NO: 633368 - DNA, 600 bp, Homo sapiens
cctttctaaaatggtaaaggatttgtcacccaaaccatgtacctttctcaatccctattctacatccacctgaaccaagacttcctccagggacagtgccccttttgagtggaagagcaggtacccgtacataccaggatagccaccaacataaatgggattgttggtgtccactgaggtagactgggtgtgtggactttcagcgccaactgcgttcccgtcaacaatcagagtgatacggtgtttgcttttgttagcttgaagagtgtgccattttccatcacagagcacagtggcggttttgggctcatatgcagctgttatcctgccagcaccattgttgacatggaacaagacctaaaagcaaatatcttggtgagtttttstgtatttaaggaacacagtccatttgtataagctcttggagtagataaaattgcagcattatgtttaaaaggagagctaactaggagaaacagaaaatagttttgaaaagtaaccttttaaaggattcagatgatggctgggcatggtggctcacacctgtaatcctggcattttaggaggccgaggcaggcggatcacctgaggtcaggaatt

SEQ ID NO: 633369 - DNA, 631 bp, Homo sapiens
ttttacttaggtttcgattatagcgacatgattctacactgccatcctttgcattatatttctgatatagatataaatttaaaatctgttgtgttcagcagaatctgatactgctgcaattctcagataaaagtctggctttatctcaayagcagagtcacacaaatttaactataattgcaacacctaagaaaaaaatgccttttaggctaaactacaaaagaattcaataaagaaagactttataaatactaaaaataaagaaaaataaagtgcttaatttatgccaacagccttctaatttcttgtataattttatttcaaccttaaaacttgatgaatactttacataaacacaaaaagttatttaaagaaaacggacaagtggtttatttagagcaaatcattcaaaatgagttaaaatttaaatcaaatatttgtcttatttgatatacataaaatagttatatccctgggaccaagactggcagatattatactgatcgtgtatatagtgattggaaaaaaaagttaaatattcttttttttatagaggtaaaagctctcatttttcaaaaacactttgtgacgtttgaggaaagtataacataaaaacatctcttagaggtcc

SEQ ID NO: 633370 - DNA, 495 bp, Homo sapiens
ctcatataagatttaattccttaaagacaaggatcttatcaccttggaatctttccgcctgacacaaagaaagagggtatttgataatcatctgttgaataaatggagaggtaatatatttattcactcagcagatatttatagagcaattattgcacttactacatatttctttgactagtaattcgttgcatatgtatcttacattaaagagtctaagtttggtattaacctagcatcaagaagcattccttgggcttayatttatttatttatttatttatttatttatttatttatttagggtcttgctgtgttgcccaggctggagtgcagtggcgtgatcatagctcactgcagccttgaactcctaggcttgagcaatcctcctgcctcagcctcctgagtagctgggactacaggttcacaccaccaagcctggttattattattattttttttagtagagacaggatcttattatgtttcctaggc

SEQ ID NO: 633371 - DNA, 631 bp, Homo sapiens
ttttacttaggtttcgattatagcgacatgattctacactgccatcctttgcattatatttctgatatagatataaatttaaaatctgttgtgttcagcagaatctgatactgctgcaattctcagataaaagtctggctttatctcaatagcagagtcacacaaatttaactataattgcaacacctaagaaaaaaatgccttttaggctaaactacaaaagaattcaataaagaaagactttataaatactaaaaataaagaaaaataaagtgcttaatttatgccaacagccttctaatttcttgtataattttatttcaaccttaaaacttgatgaatactttacataaacacaaaaagttatttaaagaaaacggacaagtggtttatttagagcaaatcattcaaaatgagttaaaatttaaatcaaatatttgtcttatttgatatayataaaatagttatatccctgggaccaagactggcagatattatactgatcgtgtatatagtgattggaaaaaaaagttaaatattcttttttttatagaggtaaaagctctcatttttcaaaaacactttgtgacgtttgaggaaagtataacataaaaacatctcttagaggtcc

SEQ ID NO: 633372 - DNA, 631 bp, Homo sapiens
ttttacttaggtttcgattatagcgacatgattctacactgccatcctttgcattatatttctgatatagatataaatttaaaatctgttgtgttcagcagaatctgatactgctgcaattctcagataaaagtctggctttatctcaatagcagagtcacacaaatttaactataattgcaacacctaagaaaaaaatgccttttaggctaaactacaaaagaattcaataaagaaagactttataaatactaaaaataaagaaaaataaagtgcttaatttatgccaacagccttctaatttcttgtataattttatttcaaccttaaaacttgatgaatactttacataaacacaaaaagttatttaaagaaaacggacaagtggtttatttagagcaaatcattcaaaatgagttaaaatttaaatcaaatatttgtcttatttgatatacataaaatagttatatccctgggaccaagactggcmgatattatactgatcgtgtatatagtgattggaaaaaaaagttaaatattcttttttttatagaggtaaaagctctcatttttcaaaaacactttgtgacgtttgaggaaagtataacataaaaacatctcttagaggtcc

SEQ ID NO: 633373 - DNA, 552 bp, Homo sapiens
atacataaaatagttatatccctgggaccaagactggcagatattatactgatcgtgtatatagtgattggaaaaaaaagttaaatattcttttttttatagaggtaaaagctctcatttttcaaaaacactttgtgacgtttgaggaaagtataacataaaaacatctcttagaggtccctaacctttctkaactaccattatagagaaaagaccactgcaaatcaagacggattcaagaaccagccccatcccagcgcacacataaacacacgcacacacctaaggaagtcctaagtttgaggaaaactcttatctaagaaaaggcatttaggaatggccatcccttttattgctacctggcgcactgcatagattatgtcaaattctaacgcatatataaagcaaaatttaagaatcacactgttttccaattagaattaaaagtaggtcgggcgtggtagctcatgcctataatcccagaaatttgagaggtcaaggtgggaggttctcttgagcttaggagttcaagaccagcctgcacaacatagt

SEQ ID NO: 633374 - DNA, 495 bp, Homo sapiens
ctcatataagatttaattccttaaagacaaggatcttatcaccttggaatctttccgcctgacacaaagaaagagggtatttgataatcatctgttgaataaatggagaggtaatatatttattcactcagcagatatttatagagcaattattgcacttactacatatttctttgactagtaattcgttgcatatgtatcttacattaaagagtctaagtttggtattaacctagcatcaagaagcattccttgggcttacatttatttatttatttatttatttatttatttatttatttagggtcttgctstgttgcccaggctggagtgcagtggcgtgatcatagctcactgcagccttgaactcctaggcttgagcaatcctcctgcctcagcctcctgagtagctgggactacaggttcacaccaccaagcctggttattattattattttttttagtagagacaggatcttattatgtttcctaggc

SEQ ID NO: 633375 - DNA, 552 bp, Homo sapiens
atacataaaatagttatatccctgggaccaagactggcagatattatactgatcgtgtatatagtgattggaaaaaaaagttaaatattcttttttttatagaggtaaaagctctcatttttcaaaaacactttgtgacgtttgaggaaagtataacataaaaacatctcttagaggtccctaacctttcttaactaccattatagagaaaagaccactgcaaatcaagacggattcaagaaccagccccatcccagcgcacacataaacacacgcacacacctaaggaagtcctaagtttgaggaaaactcttatctaagaaaaggcatttaggaatggccatcccttttattgctacctggygcactgcatagattatgtcaaattctaacgcatatataaagcaaaatttaagaatcacactgttttccaattagaattaaaagtaggtcgggcgtggtagctcatgcctataatcccagaaatttgagaggtcaaggtgggaggttctcttgagcttaggagttcaagaccagcctgcacaacatagt

SEQ ID NO: 633376 - DNA, 487 bp, Homo sapiens
tcccaccgtgaaacaagctagcgtgtgagataagtaagtaagtgcctgtcactggtcacagtcaaggaaagactggacacctgcccgcaggggctgatggaagttgggctctcacaatgtggggaggacacatggaatgactcccaccattcccaatgactatatcccttaatgatacaagtgtctgttcatctctgtatttccagtacctacctggagatatttagttgtattttccaggtttgacamaattccatatgggacagggataatgccagtgaggttcagagaaagaacggcatcaccaatctcatccaagtcattcagcagcacacctacacactcatcatcacaggctacaagacaaatttttaaaaaggagagttaaagttaatgcgatgtggtctgcccattttatcatggagttgcgcaagttgttttgtgaaaatgacacatgcggtcagagtacactccaagaccccgtgca

SEQ ID NO: 633377 - DNA, 578 bp, Homo sapiens
ttaagtggaagaagactgaccttagggattatcactaattggccacccaacaagagagtgtcccaaggaaaaagggtctttgcttactaagtgataaggtggtaagagagctgaaacaactatgagcaagcatgaaaaacagcagagggaagatggctgaacacacgctgacgaaaagaactttattgactgtaacgaaaggcgaggaaggaaagccagggaggcaaaggcaaggaaatarggcagaactggagaacggatgcacctaaaggcaggcagggagttatgtggtaggctgccataagcaaaatgacagagcctctcaaagtttaatcatcgactgggatttgatctcctcattcatggatttctgcttttgttttactcctttttctcaacatcctctaccctctgccttcacgttttaaattaccaatgtgccatctagaggctgagctgggtgcatgcaaactactggagacaaccattaaaaaccaaaccagttagagccaagtctggttccttttcgttagcaagatgaagtttccatccaggcttttatgcgaaaactctcaaat

SEQ ID NO: 633378 - DNA, 620 bp, Homo sapiens
aaaacttgctgaaaaagagagaagagctactaatttccttcattcatttttgtttcagacattgtattttttcagttctagaattttcagttggtgcttttaaaatactttctgtttttctgttgaggtgacctatcttttcattcattataatcatattttccttcacatcattgagcacaggtacaatagctgcttcaaaatccttgttggcggccaggcgcgggggctcacgcctgtaatcccagcactttgggaggctgaggtgggcagatcacgagttcaggagatcragactatcctggctaacaaggtgaaaccccgtctctactaaaaatacaaaaaattggccaggcgtggtggcgggcacctgtagacccaactactctggatgctgaggcaggagaatggtgtcaacccaggcggtggagcttatagtgagccgagatcgtgccactgcactccagcctgggcgacagagcaagactctgtctcaaaaaagaaaaaaaagtccttgttggcagttctaacacctgggttatctcagggttggtctctgtcttctttgagaatgggttacactttccttgttactttgtatgtcaagtaagtttaaagct

SEQ ID NO: 633379 - DNA, 386 bp, Homo sapiens
tgacagggcaggatgcagacaagaggagccaggcgggaagggcccctgaaccccacgcaaccatctgcgggctgccctgggagtgcccaagtcatgggggtcccagatgctgttttctgcttcagcacaggcagatgctaccatgaaaactgccccgaactcaaagcctcgccctgctcagaaggtcctgctcttgaatgcttctgccatcttctaaattattagagtgcacactttaaaccagggaaacagagaaagcaaaaggggagaamatgaaaaatagcaatggctgccattcaaaatatttggccagaactggcttttcctaatgaattgaatcttttttttttttaaagcaacaaatatgtgcacaagggctttacatg

SEQ ID NO: 633380 - DNA, 517 bp, Homo sapiens
gtattaatacattctttcagcacttctcagatgttaacagaataacatactatgtgctaaaccgtgacgacatcttaccttccgaagcacccacggcacttgccttccctttcaatatagttccataggcctatggattttccattcaggaaggcctcycccaagcagcctttaaaatgagtaaccttcacagcaggagatttctaatgcaaacaagcaaacaaacataaccaatatataagctgaccaagcaaaatacattctccaagtgcacaaaacttctctctgggagcttcaatctaacagatccaaattttgagagagccacattagaaaaaagccagtttgtaatcactggatttccttccagttatgaagtggaatcctagaatgagtaacaactgggcaggatcttaaagatcatctcagtgactagggttgatggagaaaatcgtgttgtacgagtgagaaaacagagagccagagaatgtgattggtagtgagggcccagctggac

SEQ ID NO: 633381 - DNA, 517 bp, Homo sapiens
gtattaatacattctttcagcacttctcagatgttaacagaataacatactatgtgctaaaccgtgacgacatcttaccttccgaagcacccacggcacttgccttccctttcaatatagttccataggcctatggattttccattcaggaaggcctctcccaagcagcctttaaaatgagtaaccttcacagcaggagatttctaatgcaaacaagcaaacaaacataaccaatatataagctgaccaagcaaaatacattctccaagtgcacaaaacttctctctgggagcttcaatctaacagatccaaattttgagagagccacattagaaaaaagccagtttgtaatcactggatttccttycagttatgaagtggaatcctagaatgagtaacaactgggcaggatcttaaagatcatctcagtgactagggttgatggagaaaatcgtgttgtacgagtgagaaaacagagagccagagaatgtgattggtagtgagggcccagctggac

SEQ ID NO: 633382 - DNA, 517 bp, Homo sapiens
gtattaatacattctttcagcacttctcagatgttaacagaataacatactatgtgctaaaccgtgacgacatcttaccttccgaagcacccacggcacttgccttccctttcaatatagttccataggcctatggattttccattcaggaaggcctctcccaagcagcctttaaaatgagtaaccttcacagcaggagatttctaatgcaaacaagcaaacaaacataaccaatatataagctgaccaagcaaaatacattctccaagtgcacaaaacttctctctgggagcttcaatctaacagatccaaattttgagagagccacattagaaaaaagccagtttgtaatcactggatttccttccagttatgaagtggaatcctagaatgagtaacaactgggcaggatcttaaagatcatctcagtgactagggttgatggagaraatcgtgttgtacgagtgagaaaacagagagccagagaatgtgattggtagtgagggcccagctggac

SEQ ID NO: 633383 - DNA, 605 bp, Homo sapiens
acatgctaaatattgcacagctcctgtgttwttcatttgctgaatctggcaaccctactttggagcccaagggcataaaaagattatgataccctttccctcactgccaagcgattccaaataaaagcaaatctatgtcttaaagcacatgcaacaaaacctattgacgatcatgtttttctcatgacgactttactgagagactgatttctttccaaagtctaattttggtgccaaaagtccttgtttagtctgtcaattaatgtagtacttttttttattctggcaaaatatagaaaatataaaatttaccattttaagccatctttaagtgtacatttccatgaaattcaatacatttatacggtatgcaaccactaccattcatctccagaattcttttcatcttgtaaacctaaaactctgtaccaattaaacagtaggccctcattccttccttccctcagctcctggaaaccaccattctttctgtctctacacatttgaccactctgggtacttcatataagtgacttaccataatagcttcaaggttcatctctatttagcatgtgtcagaatttcctcccttttaattctgaata

SEQ ID NO: 633384 - DNA, 605 bp, Homo sapiens
acatgctaaatattgcacagctcctgtgttattcatttgctgaatctggcaaccctactttggagcccaagggcataaaaagattatgataccctttccctcactgccaagcgattccaaataaaagcaaatctatgtcttaaagcacatgcaacaaaacctattgacgatcatgtttttctcatgacgactttactgagagactgatttctttccaaagtctaattttggtgccaaaagtccttgtttagtctgtcaattaatgtagtacttttttttattctggcaaaatatagaaaatataaaatttaccattttaagccatctttaagygtacatttccatgaaattcaatacatttatacggtatgcaaccactaccattcatctccagaattcttttcatcttgtaaacctaaaactctgtaccaattaaacagtaggccctcattccttccttccctcagctcctggaaaccaccattctttctgtctctacacatttgaccactctgggtacttcatataagtgacttaccataatagcttcaaggttcatctctatttagcatgtgtcagaatttcctcccttttaattctgaata

SEQ ID NO: 633385 - DNA, 605 bp, Homo sapiens
acatgctaaatattgcacagctcctgtgttattcatttgctgaatctggcaaccctactttggagcccaagggcataaaaagattatgataccctttccctcactgccaagcgattccaaataaaagcaaatctatgtcttaaagcacatgcaacaaaacctattgacgatcatgtttttctcatgacgactttactgagagactgatttctttccaaagtctaattttggtgccaaaagtccttgtttagtctgtcaattaatgtagtacttttttttattctggcaaaatatagaaaatataaaatttaccattttaagccatctttaagtgtacatttccatgaaattcaatacatttatacggtatgcaaccactaccattcatctccagaattcttttcatcttgtaaacctaaaactctgtaccaattaaacagtaggcccycattccttccttccctcagctcctggaaaccaccattctttctgtctctacacatttgaccactctgggtacttcatataagtgacttaccataatagcttcaaggttcatctctatttagcatgtgtcagaatttcctcccttttaattctgaata

SEQ ID NO: 633386 - DNA, 605 bp, Homo sapiens
acatgctaaatattgcacagctcctgtgttattcatttgctgaatctggcaaccctactttggagcccaagggcataaaaagattatgataccctttccctcactgccaagcgattccaaataaaagcaaatctatgtcttaaagcacatgcaacaaaacctattgacgatcatgtttttctcatgacgactttactgagagactgatttctttccaaagtctaattttggtgccaaaagtccttgtttagtctgtcaattaatgtagtacttttttttattctggcaaaatatagaaaatataaaatttaccattttaagccatctttaagtgtacatttccatgaaattcaatacatttatacggtatgcaaccactaccattcatctccagaattcttttcatcttgtaaacctaaaactctgtaccaattaaacagtaggccctcattccttccttccctcagctcctggmaaccaccattctttctgtctctacacatttgaccactctgggtacttcatataagtgacttaccataatagcttcaaggttcatctctatttagcatgtgtcagaatttcctcccttttaattctgaata

SEQ ID NO: 633387 - DNA, 675 bp, Homo sapiens
ttaatactatgtggcttaaatgtaattctgcacccttgaggtctgattaaatcgaacatggaatttaagaagtgtgagtaaaaatgacaaaagaataagtaggaaatgatcaagaccattcactaagtcttgctaggaaaaaatgttcaagcttggaagaagactcagtggaaagcttttgatttaggtagcattggaagcaaactaaagaaaatcttttttagtaagctaacctaaaaggaaacacatttctcttcttttattaggtgttacattgaaattgagtgaattggagggaaggaatcctaaaatgataaaatcaccaggcaaatcattgaattactgctgattctcacagtacttcccaaagttaagtggaaaggggtgtgtgtgtgtgtgtgtgtgtatttaaactgatataaccacagaagatgggatataacttatagtctgaacataaygtagtctaattttttactaaaacagacatcaacattttccagaggccgacaatagatccagagtctgcaatacacaacattcacaatgtccaggaaacaattcaaaatctcttgatatacaaacaaccaggaaaatggtactgattctcaaggtggaaagacaatcaaacaaataccaacctcaagagaaaattatcagacaaagactttaaag

SEQ ID NO: 633388 - DNA, 577 bp, Homo sapiens
agaatgctgcttttgccacttctatttaayatagtcttagaagtcctagctagagaatttagggaagaaaacaaataaatgaaaggcatccaaattggaaaagaaaaagtaaaattctctctgttagcaaacaatattatcgtatatgttagaaagctctaaatattctataaaacaaactcttacaattaatcaataatttcagcaaagttggaagatacaaaattaacccacaaaaatcaggtgcgtttctacatacgaacaatgaacaatcccaaaagaaatagagaaaacaatttcatttacaatagcattagaaagaataaaatacttaggaatcaacttagccaaggagctgaaagacttatacactaacaaccttgaagcattactgagagaaattaaaactaagggcagcaataaacggaaagatatccttgttaataaataagacttaatactgttgagatgtcaatatcacccaaagcaatctacagattccagcaatgtttttagcagaaacagaaaacaattctgaaattcataccgaatctcaaggatcctgaatagccaaaac

SEQ ID NO: 633389 - DNA, 577 bp, Homo sapiens
agaatgctgcttttgccacttctatttaatatagtcttagaagtcctagctagagaatttagggaagaaaayaaataaatgaaaggcatccaaattggaaaagaaaaagtaaaattctctctgttagcaaacaatattatcgtatatgttagaaagctctaaatattctataaaacaaactcttacaattaatcaataatttcagcaaagttggaagatacaaaattaacccacaaaaatcaggtgcgtttctacatacgaacaatgaacaatcccaaaagaaatagagaaaacaatttcatttacaatagcattagaaagaataaaatacttaggaatcaacttagccaaggagctgaaagacttatacactaacaaccttgaagcattactgagagaaattaaaactaagggcagcaataaacggaaagatatccttgttaataaataagacttaatactgttgagatgtcaatatcacccaaagcaatctacagattccagcaatgtttttagcagaaacagaaaacaattctgaaattcataccgaatctcaaggatcctgaatagccaaaac

SEQ ID NO: 633390 - DNA, 259 bp, Homo sapiens
gaattcaactgaaaaggaacaaaacagagaaagtaaaaggacgaggtaactaagaagactgattgcttctggctttaacactttgacacagtggaataagataatgcttttctaattctttttttttttccccctttactgtctcacaatgaagacaatgggattttkggagttccacttacagtcctcctggacggtgaccgaaagaaagaccctggagtgaaagttcccctggtattacaaaaagtgagtagcaggc

SEQ ID NO: 633391 - DNA, 416 bp, Homo sapiens
actctgtcacccaggctagagtgcaatggtgtgatcgtggctcactgcagcctctgcctcctgagtagctgggactacaggtgcatggtgacacctggctaatttttaaattttctgcagagatgaggtcttgctatgttgcgcaggctagttttgaacccctgggctcgagcaatcctcctgccttggtctcccaaagtgctaggattacagacatgagccactatctgtaatgcgcccatctctcccttccctccttccattcactgtttaattcattcccatctaacgtctttccttctgaaaccactgaaacacaaayactaaaatcacaaacaatctctatatatgaagtttaacccattctcatcctaaatgactgcttaatagcatccaacacaagtgactcacttctt

SEQ ID NO: 633392 - DNA, 613 bp, Homo sapiens
atgttcattaaaacaagtatttattgataatctgttactgtactaagctaggtagttgaaaaattaggttacaaaccactatgtccacatgtgatataattcttaggaaaatcacacatatgtccataagaaaaaatgattagaagaatataaaatgctaacaacagctattattgttggggaatggggttgcaagtgatttttcctttgcttttgcttatmtttattttctaatctttccctcttattataaaaactagtatggttgacccttgaacaacacgtttgaagtgcatgggtccacttatacacgtattttgttttcaataaaaattactcttgagtgttttgcctgtctctcttgcctcctcttccacctcctccacctcttcagccactgacacccctgagcaacaagaccaatccctccacttcctcagactattcaatgcaaagatgaagaccattatgatgatcaatctccacttaatgaatagtaaatatattttccttatgaggttcttaataacattttctttactctagcttactttaaaaatacaggtctgggtgtggtggctcatgcctgcaatcccagcactttgggaggcca

SEQ ID NO: 633393 - DNA, 598 bp, Homo sapiens
aattttttatcataattttaaaataaaaggctgggcatggtggctcacgcctgtaatcccagcactttgggaggccgaggtgggcggaccatgaggtcaggaaatggtcaacatggtgaaaccctgtctctactaaaataaaaaaattagccaggtgtggtggcacgccacctgtagtcccagctactcaggaggctgaggcaggggaatcgcttgaacccggcaggcggaggtcgcagtgagctgagatcccgccactgccctccagcctggtaacagagcaagactctgtctcaaaaaaataaaaaattaaaataaaataaagaaattcttttcaccttacttatttgctagcagattctaggaggacaaaattacttatccaagcaggccagcaataagagaaaatctcagaaacgtggttttaaaaaaattaccacatgcattactgattattgaaatgaaacctgtatktaataacacagtcatattatctgctacttgaattactcctaggtacaaaggaattaaatacgtaatggtacacaaataaatatgaatatctgtattagagtactactagctgctgtaataaact

SEQ ID NO: 633394 - DNA, 559 bp, Homo sapiens
taaaaatatttctagcgaaggtgagctgaagtacacgtgtgaggcacagggatggtttctgctgttttaatcagggtagcagataattatttgggaagtattgtgtatgactcctcagcagataattatctgggaagtactgtatatgactcctttgttccttttctaagagacactctctgcttttatttcttgtctgaccttctgtaaacagaaaaagattgttctaattgcatgctaggttttggagattactatgactgacctacatcgtatctgggatagaggcttgcttacagtgcttgatttggtgttcatgataagtcccaaaagtgtggaggtsactatttaaaccttttttgggttttttggttttgttttttgagacagagtctttgctctgtcgcccaggctggagtgcagtggcacgatcctggctcactgcaacctccacctcccgggttcaagtgattctcatgcctcagcctcccaagtagctgggattacaggcgcctgccaccatccagctaatttttatatttttagtagagacaggatt

SEQ ID NO: 633395 - DNA, 372 bp, Homo sapiens
tgagtcacttgtgttggatgctattaagcagtcatttaggatgagaatgggttaaacttcatatatagagattgtttgtgattttagtrtttgtgtttcagtggtttcagaaggaaagacgttagatgggaatgaattaaacagtgaatggaaggagggaagggagagatgggcgcattacagatagtggctcatgtctgtaatcctagcactttgggagaccaaggcaggaggattgctcgagcccaggggttcaaaactagcctgcgcaacatagcaagacctcatctctgcagaaaatttaaaaattagccaggtgtcaccatgcacctgtagtcccagctactcaggaggcagaggctgcagtgagcc

SEQ ID NO: 633396 - DNA, 478 bp, Homo sapiens
gggttcagatttaggtttttccaaatataagatcataccatctgcaagcaagtatgatttgacttcttccttttcagtttcaatggcctttatttctttctgttgtctgattgctctagctaggacttccagtactgtgttgaataacagtgatgaaagtgggcatccttatcgtgttcctgatcttagaagaaaggcttttagtttttccctactcagtatgatactagccatgagttactcatatatgccttttattgttttgagatatgttccttatatacccagttttttgagggtttttatcatgaagggatgttgaaktttatgaaatgctttttcaacatcagttggaataatcatatggtttttgtccttcattctgttgatatgatgtgtcagattgattgatttgcatatgttgaaccatctttgcatccctgggaaaaatcccacttggttaggatgaatgatcttt

SEQ ID NO: 633397 - DNA, 513 bp, Homo sapiens
agctcactgcagccccaaactcaagcgatcctcccgcctcagcctccggagtatctgggactacagcaccgtggttgatttttaaaaagtttctggagaggccaggcgcggtagctcacggctgtaatcccagcaggcgggtggatcacgaggtcagaaaatcgagatcatcctggctaacacggtgaaaccccatctytactaaaaatacaaaaaattagccgggcgtggtggcgggcgcctgtagtcccagctgctcgggagactgaggcaggggaatggcgtgaacctgggcggtggagctggcagtgagccaagagcgggccactgcactctagcctgggcgacagagcgagactccgtcccaaaagatagggttcaccatcttgcccagttgcccaggctggcctggaactccaggacccaggcgatcctcccgcctcctcctctcaaagtgttggaattacagacctgagccacagctcctggcctctacaaattgttttttttttt

SEQ ID NO: 633398 - DNA, 596 bp, Homo sapiens
ggcatacaatgaagattgatatacataataatgactataaatcactgagaatttcaaatgcctctgaatcactaaaaatttgattgtgctcagtatcattttaggaataaatgtatttatttctgaataaagagacttaaatttttttttttttttgcaagcagctatttcactaaggatcatacaatttcagagctagaaatgccctgttgcagtacaaagttgagttgttaattcagtataaaacatcagaccaaatggttgttgggaagattggaaaatgggggaaaatttaaagcctaggctacatagcaggggtgaagggagaggtggggttccagggaggcatggttggttggcatgggatccaagaataacaaacatgatttgacaaattcctaacaggataaattcatacagctgaacccatgtggtctatgtggacaaaaatccatggacaaaccaccaaagcatgggaaaaaatagtggccagtagtccgataggatattcagtgggattgcttagaatctgcaagggatcttagtagtctgtcttctacgttaccycattttgccaatgagggaaactaaggttt

SEQ ID NO: 633399 - DNA, 591 bp, Homo sapiens
tatgtagagcagagcttggaacatggcagatgctcaatgcatgttagttgtgctcaggcatgaaactttcccagtcctaccattcctaatttcatgatatgttataaccatgattccctttaacagtggtgccatttccctgaagaaaaattggtagtataggaaagcctgaaagttgccacattgggaaccatggtttccaggaatgacatggagtccaagctgtgtgataaatgctgaatagtttaaatatcacctgccatggctctctgggcctaaaggacggttctccattttggcagaatcaggtctgtttgatcactggcacctgagccaaggtgtaatgacttcaggacattgctccctgtggtagatttcacttaaaggtgctcaatttgcattctgtaaatgagggtaaaggaaatcatgataaaaatgcaaataattctctctggttgtaacaaaattgcttgttattgtctctttttcctcctgactacaatattacacaragacttgcacaatgttctcaaggactatttgtataatacattaataaatacacagtgtagccctgcacaagaagcaata

SEQ ID NO: 633400 - DNA, 521 bp, Homo sapiens
gaccagcctgggcaaatgagtgagacccctcatctctacaaaaaatacaaaaattagccaggcatggtggcatgtgcctgcagtccctgctactcaggaagctgaggtcggagaatggtttgagcttgggaagaagaggttgcagtgagtcaagatcatgtcactgcattgtagcctggggaacagaaccagacactatctcaaaaaaaaaaaaaaaaaaaagagtacgtgctactaacataacttattgttgatgatgtcaacttgatcacctgggtgaggtagtrtttggtaggttcctctactgtaaagttactctctcttcccttgctttttatactgtactctttagaagaaagtcactatgtgtaacccacagctaagaaatggggaattatgcttcctctcctttcggtcagagtatctacataaattatttggaattcttctgcaagggacattttttaattctctcctatgtatttacttattcaattatttatattcatataatgaataca

SEQ ID NO: 633401 - DNA, 584 bp, Homo sapiens
gtgcctggcttattttacttaatataatgacctccagttccgcccatgttgttgcaaatgtctggaactcattcctttttatagccaaatagtactccattgtatctatgtaccacattttgtttatccagtcatctgttggtcaacaattagtttgcttccaaattttggctattgtgaacagtgctgcaacaaacatggatatgcgattatctgtttgatatactgatttcctttcttttctttccttccctttctgttctccttagtggttgtactaatttacattcccaccaacagtatatgagggttccctttcctccatatccttgccagcattcgttattgcctgtctttttaatacaaggcattttgaccggggtgagatatctcattttaattttgatttggatttctctgatgatcagtgatgtcgagcaacttttcatatgcctgttggccatttgtrtgtcttcttttgagaaatgtctattcaaatcttttgcccattttaaaatcagactattagactttttcctgtagagttgtttgagctccttatatattctggttattaatccctt

SEQ ID NO: 633402 - DNA, 498 bp, Homo sapiens
aatttgttagattatcattacttgatttccttaatacattagtcaaactgtgtagcaagacacacatccacactcacactaattcgtaatcactttgagtggatcctttcggctttgacaaatttatgagtcttcacatttttatcaggtttctctgctcattatgcgaatggaaaccactcttctacctgtcccagtgcagaggcagccttatcctactagctctctagacaagcatgaacatgtctgagcctacagtgtaaacaaacaacttgagtcttacttctgtaatgatattacaagtgtgtgtgtcctttgkgtgtgtttatgtatacaacacacaccaacatggcacactgaaatataccacaatttttctctaagtaaataaaccagaactcagctgctatacttccaaaagccaacatctcatgccaactaatggaaataattccatggaaaaatatgaacagtattgttgtatttttacaccgataa

SEQ ID NO: 633403 - DNA, 498 bp, Homo sapiens
aatttgttagattatcattacttgatttccttaatacattagtcaaactgtgtagcaagacacacatccacactcacactaattcgtaatcactttgagtggatcctttcggctttgacaaatttatgagtcttcacatttttatcaggtttctctgctcattatgcgaatggaaaccactcttctacctgtcccagtgcagaggcagccttatcctactagctctctagacaagcatgaacatgtctgagcctacagtgtaaacaaacaacttgagtcttacttctgtaatgatattacaagtgtgtgtgtcctttgtgtgtgtttatgtatacaacacacaccaacatggcacactgaaatataccacaatttttctctaagtaaataaaccagaactcagctgctatayttccaaaagccaacatctcatgccaactaatggaaataattccatggaaaaatatgaacagtattgttgtatttttacaccgataa

SEQ ID NO: 633404 - DNA, 472 bp, Homo sapiens
attaagtctttattaacatttattgaatatggtcagaatcacctaatcaaattccattattatgaaaagagtatatatcacactattcaattattcattcattcaacaaatacttactgagcatcgacactgttttaagtgttagagatttgacaaygaactagaagataaggtttctgtttttcagcagcttacatgcttggtgtatagctaagatccaagcacacaaatcttattttaatataatttcagataatgataagttcaattttaaaaagtaagagttaagtttagcagagtttaatctaggcagggagggctgtttttgatgtgtttgttgttgggttttttgttttttagtcaagatggttagagaaggtgtccccaaggaagtgacagttgagttgaatagagccctgataaaagaaaatgggaagggtcaggaagatgttgaagaagtttaaagctagat

SEQ ID NO: 633405 - DNA, 569 bp, Homo sapiens
tgcatccttcataattgtatattgtgccatcattggacgagatgagcagagtggctaatggaaaaagaaaagcaagattaatttgaataacagttattttccctgactatgcccagactcacacaaagaagctcaaattaaagttttatctttgtactttttccacttgcttgagagctcatgttttatgttactaataaacaatcaccagctgaggatttctcagatgtctactgccccttagccacagtcaagcactcaatatcttggaagcagttgacctytgataccacattatttgatggttttgatgtgttcatgtaaagaacacacaatcaaaaaaagggcaaaaatcttacaaggaggcagaccttgggtgacagactaatgggtctctgaaaaaccaaaggagaactttaagagttggaaattctgagaagggcggagagcagtgcagtttagagagagtgccgccattttgattgttacagtgcagtgtctataatagttacctaaaaagcatttcacaaactcatttactctttgaaatagtgttttctgttatggga

SEQ ID NO: 633406 - DNA, 619 bp, Homo sapiens
taaacaatcaccagctgaggatttctcagatgtctactgccccttagccacagtcaagcactcaatatcttggaagcagttgacctctgataccacattatttgatggttttgatgtgttcatgtaaagaacacacaatcaaaaaaagggcaaaaatcttacaaggaggcagaccttgggtgacagactaatgggtctctgaaaaaccaaaggagaactttaagagttggaaattctgagaagggcggagagcagtgcagtttagagagagtgccgccattttgattgttacagtgcagtgtctataatagttacctaaaaagcatttcacaaactcatttactctttgaaatagtgttttctgttatgggatgaagtataaatatagacttaagttcagcttcttgtaagtattgccttgttggcatcaaagaagaaattgaaagaagaactgaataaaatgtattatgaaatacaaaatttgctgaaagacaagagagggaggaagttggatatgagcattcattcattcaacacatatttatactctttgtcaaaccctgaccttgttacaaagaatgcratgattgaagatgcagagtttttccccaagaaactc

SEQ ID NO: 633407 - DNA, 532 bp, Homo sapiens
agattgagttgcattggaaggaaatgtaaaatgaagccagacccttaagagtttgagtattattccagtcttaacttgccacaagaacattttccggaagggaatgaggctacttttgaacttatattttaacagaatgattttggtagcagtgtgaaggttaaagagacagtgtgggagctaaggtcactgacatgataaaattcactatattttgtgttcctgaagtcaagagagagaacgaataatttgatacaagtgaaacagttgcgaacatatcaaaacataattttcacattaggaaaagtggcacaaaccataaaagaactttagattagggggaagttctatcatagtcaatggttatagaaaatcaccctacatactatctactcctgagcagaaaaacccaccagttcctgcctgttggagcagaggatccaatgggaagctgctttccaggccagcacrtaaatctcagctctgcgggggaaatcactcagacctaccactaagataagttataggtaag

SEQ ID NO: 633408 - DNA, 532 bp, Homo sapiens
agattgagttgcattggaaggaaatgtaaaatgaagccagacccttaagagtttgagtattattccagtcttaacttgccacaagaacattttccggaagggaatgaggctacttttgaacttatattttaacagaatgattttggtagcagtgtgaaggttaaagagacagtgtgggagctaaggtcactgacatgataaaattcactatattttgtgttcctgaagtcaagagagagaacgaataatttgatacaagtgaaacagttgcgaacatatcaaaacataattttcacattaggaaaagtggcacaaaccataaaagaactttagattagggggaagttctatcatagtcaatggttatagaaaatcaccctacatactatctactcctgagcagaaaaacccaccagttcctgcctgttggagcagaggatccaatgggaagctgctttccaggccagcacgtaaatctcagctctgckggggaaatcactcagacctaccactaagataagttataggtaag

SEQ ID NO: 633409 - DNA, 595 bp, Homo sapiens
cctaaaatacagatgttatgtgctttgtttaatgaatagaaaaaataaatcctagaaaggtaaaggaaaatgacccagtttatgttgtaagtagtgattgaagaaccaagacacaagttccctggtgttttagctgtaattactagaagtgaaaactcctagaasgactcaaaaggattcctatttctgaggaatcaatctccagggtacctccctgtatctcaagatatgcctagagcacaggaataagaatttgggagccaccgtaactgttttagaatgtaacatcttatagtttctttgaaaacaatggaagaaatgtcccaacagagtcacaggatggccaaattctgaccaacgtattcaaaagaaaaataataaagcgatatatgcattattctttcatttcttcttcttttttgttctgtattactgaacataatttcctcaagcataacacaaatgaactctctctctttttcagtcaatgtgctcccctcctacgatttaaaattacagtgctgttttggaggcatcattttgcttccatgctagcaatttgtctaaatctttgccttatggcctcaatgaatgc

SEQ ID NO: 633410 - DNA, 595 bp, Homo sapiens
cctaaaatacagatgttatgtgctttgtttaatgaatagaaaaaataaatcctagaaaggtaaaggaaaatgacccagtttatgttgtaagtagtgattgaagaaccaagacacaagttccctggtgttttagctgtaattactagaagtgaaaactcctagaaggactcaaaaggattcctatttctgaggaatcaatctccagggtacctccctgtatctcaagatatgcctagagcacaggaataagaatttgggagccaccgtaactgttttagaatgtaacatcttatagtttctttgaaaacaatggaagaaatgtcccaacagagtcacaggatggccaaattctgaccaacgtattcaaaagaaaaataataaagcgatatatgcattattctttcatttcttcttcttttttgttctgtattactgaacataatttcctcaagcataacacaaatgaactctctctctttttcagtcaatgtgctcccctcctacgattyaaaattacagtgctgttttggaggcatcattttgcttccatgctagcaatttgtctaaatctttgccttatggcctcaatgaatgc

SEQ ID NO: 633411 - DNA, 658 bp, Homo sapiens
ttctttaaacaactttaatgcaattactttacctttcaaaaggcaaaatggaaaaacaagwtggttgaataaaagtttcccctaattgtctcccccctccacaagaatatcaatttaacaactatctacaaaaagaaaaaacaacaacaacatacaacaacatatacaaacaaaaaaaaacccacctttataagaagaaaaatcaggtgagcactcacagtacctggttttaacttcatacagttgaaagaggcactgaagaggtaggaaaaacagtcttgaatgaccaacatcaccccttcctccatcctctggcagcggccagcggccatgtggtgcagagagcatttttttttccactggggagaagaagagcgcagcaattgtgaagcattgaactcagttttgtcctgtaatagcagaaaggaaaattgggccaaactcagctgattcccattcacagagggagcatttaaaccagccctagctagaggggaatcattgactccagctgtgggaacttgagttcctgcaaacctcgccagtgtaggctaaagtgctctggggctccaaatatacttgaaaggcagtctaggccataaggactacaacttttaggtgagtcttagtgctgaactgggcccagagccagtagact

SEQ ID NO: 633412 - DNA, 618 bp, Homo sapiens
tttaaacaactttaatgcaattactttacctttcaaaaggcaaaatggaaaaacaagatggttgaataaaagtttcccctaattgtctcccccctccacaagaatatcaatttaacaactatctacaaaaakaaaaaacaacaacaacatacaacaacatatacaaacaaaaaaaaacccacctttataagaagaaaaatcaggtgagcactcacagtacctggttttaacttcatacagttgaaagaggcactgaagaggtaggaaaaacagtcttgaatgaccaacatcaccccttcctccatcctctggcagcggccagcggccatgtggtgcagagagcatttttttttccactggggagaagaagagcgcagcaattgtgaagcattgaactcagttttgtcctgtaatagcagaaaggaaaattgggccaaactcagctgattcccattcacagagggagcatttaaaccagccctagctagaggggaatcattgactccagctgtgggaacttgagttcctgcaaacctcgccagtgtaggctaaagtgctctggggctccaaatatacttgaaaggcagtctaggccataaggactacaacttttaggtg

SEQ ID NO: 633413 - DNA, 658 bp, Homo sapiens
ttctttaaacaactttaatgcaattactttacctttcaaaaggcaaaatggaaaaacaagatggttgaataaaagtttcccctaattgtctcccccctccacaagaatatcaatttaacaactatctacaaaaagaaaaaacracaacaacatacaacaacatatacaaacaaaaaaaaacccacctttataagaagaaaaatcaggtgagcactcacagtacctggttttaacttcatacagttgaaagaggcactgaagaggtaggaaaaacagtcttgaatgaccaacatcaccccttcctccatcctctggcagcggccagcggccatgtggtgcagagagcatttttttttccactggggagaagaagagcgcagcaattgtgaagcattgaactcagttttgtcctgtaatagcagaaaggaaaattgggccaaactcagctgattcccattcacagagggagcatttaaaccagccctagctagaggggaatcattgactccagctgtgggaacttgagttcctgcaaacctcgccagtgtaggctaaagtgctctggggctccaaatatacttgaaaggcagtctaggccataaggactacaacttttaggtgagtcttagtgctgaactgggcccagagccagtagact

SEQ ID NO: 633414 - DNA, 658 bp, Homo sapiens
ttctttaaacaactttaatgcaattactttacctttcaaaaggcaaaatggaaaaacaagatggttgaataaaagtttcccctaattgtctcccccctccacaagaatatcaatttaacaactatctacaaaaagaaaaaacaacaacaacatacaacaacatatacaaacaaaaaaaaacccacctttataagaagaaaaatcaggtgagcactcacagtacctggttttaacttcatacagttgaaagaggcactgaagaggtaggaaaaacagtcttgaatgaccaacatcaccccttcctccatcctctggcagcggccagcggccatgtggtgcagagagcatttttttttccactggggagaagaagagcgcagcaattgtgaagcattgaactcagttttgtcctgtaatagcagaaaggaaaattgggccaaactcagctgattcccattcacagagggarcatttaaaccagccctagctagaggggaatcattgactccagctgtgggaacttgagttcctgcaaacctcgccagtgtaggctaaagtgctctggggctccaaatatacttgaaaggcagtctaggccataaggactacaacttttaggtgagtcttagtgctgaactgggcccagagccagtagact

SEQ ID NO: 633415 - DNA, 482 bp, Homo sapiens
taatggaataggtttagtgcatatgacaaaagcataatataaatatatacctatactataaattctaaaataatataaagaaacaacagaaattatcatgagttatgctacagttgtgtaacaagcagaaaatcttgatgtcataagacaatacatacagatttaactcatgagtctgtagcgttcagccaatgtaggctgagctcagcagggttggtcaaatatctgtggattatttccatagtaatgatgtctgrtggttggctagctatcagttggagcactagggacacgtgggccacatgtctttcattctctaccaggctagcctggacgtgttctcatggcaaagtcagggaagcaaaagaagagatggaaatggcaggtactttaacaagcctctatttgcatcacaactgtgaacatatgctggccaaatttagtcgcatggccaaactctaaatcaaggatcagggaaatat

SEQ ID NO: 633416 - DNA, 559 bp, Homo sapiens
tcaagaatataagaaatgcatgtacagtacaactgtttaagaaattgatattagccagtatactcaaaaacatctaattcaggagacaagtaatgttaaaatgatctacatggattttgagttgtcaattctttaaccattttcttagagaggcacacactgtaaattgagtcaaatctgcattcagatttatattagaatccttgaggaattaaatctagaatgaaaaaaatcacactcaatcaatgcccagactagtctgagtttatcttacatgttccacttcataggtgtgtgtgtgtgtgtgtgtgtgtgtgtgtgtgtgtgtgtttggaaagtttcagkttgatcagctttacatgtcactgaaagatgcattcaaaataatcaagagctttaagtgtaatgcaaacgcaagtgtcattggaatgacaatgatctcagcatgctatctctgtgggatatctatagtcatttcctcctaagtacacatgcatccgttccagggtcttgaatgatacaaagtcagtgcttcctcaggtaagcaaatgtttccaca

SEQ ID NO: 633417 - DNA, 582 bp, Homo sapiens
tgggcctagtgggatatgtttgagtcatgggggcagatccctcatgaacagcttagcgccctccccgtggtaatcagtcaatgcaagatctggttgggagcctgggaccttcccctctctctcactctctctcttgccttgtgatttgctggttctccctttgttttctgccatgattagaagtttcctgaggcctcactgggagcagatgctggcactgtgcttctcatatagcctgcagaactgtgaacccaaacaaacctcttttctttataaattaccaagccccaggtattccttcacagtgatgcaaaatggactaacacaatgctccaaatgattaattgcttttcaacatgattaactcattcccacagcatgtatgtatgcatgcattatgtatgtatagacatatttacacacatgtgcattaacttgtacttttcctgaaacaaagtataaattaattataaaaagcgatatatatcttagaataaattttttwaaatataagttttcaaatataattcagtactttaaaaattatctagaatttgctaagattttctggatattactgtc

SEQ ID NO: 633418 - DNA, 575 bp, Homo sapiens
tggttttgcccttatttcctcccctacccctaaaattcctctctactgattgggaccctttcactattgtttggtgctttcctgattagagtcaggctgcaaacaaagaactgggtgctgtaatggccaaaaaacagtagagtagaaggcactgaaccactgaaattaagggaaatgaaggtmaacataagttatcttaacctccagaaagggaagttgaacatcccagaagtgtttgctcaagctgttgcatcaacacaaatagaaatcatcatgcacaccattgactgaatacttaccatatgccaataaagagcaaactcattgaatatcctcataactatcctgaaggatagaaacagttagttttgttactttacaagtgacaaaattgaagctacaagagcatcagtgacttcctaaagtcatgtaacaactaagtagaacaatgactggcacccaggccctatagagccttcctgatcttccctccaacgccttctccagatttgtgttttcctcctctccatcctacagagattgtctcctaaccctgtcccttctgaaactcctac

SEQ ID NO: 633419 - DNA, 378 bp, Homo sapiens
tgaaactcactggtaacagtaagtacacagaaaaccagaatattataacactgtaactgtggtgtgtaaactactcttaagtagaaagactaaatgatgaaccaatcagaaataacaactacaatgacttttcaagacatagtacaataagatataaatagaaacaacaaaaagttaaaaaatggggggatgaagttaaggcatagattagtgtattcattttctttttgcttgtttgtttatgcaaacagtgctgagttgttaycagcttaaaataatgggttataagatagttttagcaagcctcatggtaattttaaaccaaaaaacatacaatggatacacacacacaaaaaaaggaagaaactaagtcatatc

SEQ ID NO: 633420 - DNA, 256 bp, Homo sapiens
catggctgttgaccctggcaggtcgagtttcttctctcactacctggaacctcaagatgacagcggcagctcttttgaatgaggcagcatgtctattggggcaaaaatttattttagccatttgacacaggacagaatcctatgctaggtattactggactctgcagtagtgagaggagatgaaaggagaaaatatatctgaaataygaactacttgggttaaaatagacggatgtgtagcattcaaagggatggt

SEQ ID NO: 633421 - DNA, 578 bp, Homo sapiens
caaaacagctttcttgaagttttattattttgatttttaaggaaaggagtccaatgaatttgcaaattaacgaagcagtgtttgaaaagaaaatatgcaagagatacttaagtgttaaaggaaactaaagctttgagaactagagataagatactttaaagtaactatccaaattggtttgtaggcagcaaacgttaactgtgtaaaatgtggagcatttgatgcaccaagaaatatttactgactgcccacttggaacttaaaagttcagttgggaaccaagaagataattataatgtaataagtgctctgcctgattaaaaactgctgtgttctcatgagaactaggaaaggcattcagaaggacattcctgacgtcttcttggaagaggtcgaacgtaagctcgtatctgaaggaaaaaccagaggaaagaatatccctaacgaggaatcgattgcacatgcaaacccagggaacttgatgggttgaataactaaaggaaaagtggtcaggmggaggcagaattctgagacctgaaaagggtgaacaggaactcttatcctgaggggagatttgt

SEQ ID NO: 633422 - DNA, 578 bp, Homo sapiens
caaaacagctttcttgaagttttattattttgatttttaaggaaaggagtccaatgaatttgcaaattaacgaagcagtgtttgaaaagaaaatatgcaagagatacttaagtgttaaaggaaactaaagctttgagaactagagataagatactttaaagtaactatccaaattggtttgtaggcagcaaacgttaactgtgtaaaatgtggagcatttgatgcaccaagaaatatttactgactgcccacttggaacttaaaagttcagttgggaaccaagaagataattataatgtaataagtgctctgcctgattaaaaactgctgtgttctcatgagaactaggaaaggcattcagaaggacattcctgacgtcttcttggaagaggtcgaacgtaagctcgtatctgaaggaaaaaccagaggaaagaatatccctaacgaggaatcgattgcacatgcaaacccagggaacttgatgggttgaataactaaaggaaaagtggtcaggaggaggcagaattctgagacctgaaaagggtgaayaggaactcttatcctgaggggagatttgt

SEQ ID NO: 633423 - DNA, 627 bp, Homo sapiens
ctagagacgaggagtggctctcataatatgtcaccggggctttccttcaacacctctgactcagtctgtgcattcacagatctactggaatggtaggtgccattcacaggcatatttaatgccagcattttttctctttcacattaagtatgtcctggaggtctaaatgttatgtgtaatgtataaaaggtatactaggagagaaggaggttgctccaccaacagaagatcagaaagagcagaaacttttatgcaaatcatcaaaatacgcatctgctcccatttccaccccactgaygtaaatgaaaagatcctggctttccctttaggtatacacacctctgaacacacaaagcttgctctagacattcactattagtcaatttcacctgtttattaaaaattgataaggctggagagttgatgaggcagaaaaagaggccacagagtagtttgccatccctttttctaggaaaagtgttctcttctgattttctggatgctgaaggaaaagagttctcgcagcaacactgaattccacttggatgatctctaaagatttcagacagtggataaatcatttgtaaaggcacagatgaaaatattaagtatacatacaccagaaaa

SEQ ID NO: 633424 - DNA, 614 bp, Homo sapiens
cttctgttacttacatgacattcacaatgatttccaaatagtgtcacaacaaccaacaaagtgttaaaagaataacagaattttaattccagagagcagctagagtttgtttgtttgattcatctattatatggctctaatttaatgaaatgaaataatttggtatgacatgaaaataaggactaagatgatgataaaaacagatacaattatgacaataatgcttctcatattaggaatgtaaaccttttagaaataaccttaaatcccttaagrtaatacctaacctcaacttagacaagagtaaaatgcagatcagatcacgcaaaagaacgctaacatggcacactttaaaacaatattcagcatcacagacaatgaaggcaacacaattttaaataaatataaggtactacctcatacctactgagctaggaaacacaaattaaaataataaatctaacactggcagaagttgcaaggagtcatatacattcctgtaaatgagtgcaataaacttggaaaacaaccacacaatagtcagtaagagccagaatattgattccagcctgggacttgggaattccaattttagaaccagtatcctgaagata

SEQ ID NO: 633425 - DNA, 524 bp, Homo sapiens
tatatcatatcctggagagttgttctgtttttattgttgttactattgttgttttttatgaaatgtatacatatgggctgggcgtggtggctcacacctgtaatcccagcacttttagaggctgaggcaggggatcccttgagccccgaaatttgagaccagcctgggcaacatagtgagaccccrtcacaaaaaaagtatatatatatgtatgcaggcttcacagtgaacattgaagaaaattaacctctgctttataacaatagtttgcagtttctctcagaacagggcatgacttagctacctgctttactgagttttgaaaaggcttttgtatataaaattacaccttaatttagtgactcaaacccatacctattttggttagaagattggaatataattaatgtccttagttgttggctggtttatccttcaaaggctaaatttagctgtatagaactattttatattaaaagccaatttatttgctatttgttaagttccatgtttttatttaaaat

SEQ ID NO: 633426 - DNA, 580 bp, Homo sapiens
ataaatgagtaacctaaaactggtatattattataacactaaaacaacgttttaatacacaaactacatatacttaaatatatattaaacacaatacatatttaaaaatattttaaatgtcatatatatacacataaatatgtgtatatatttatgtgtattatgtgtatgtaaatatgtgtatatatatatacacataaatcttgagaggaaaagtagaaacagtacatccatccattcatttattcaacaaattattagtcccatgttcatttttcaaatgagaaaagtacagtgttagaggtgaagtatattgcccaaggtcacaaaggctttggtggtgagcaaacaccaagagtccattacctggactgtgcctccaagaactaaaggttatctctccactgtaattaaagcaacagtttcctgtttgtctaggctttatgatgagttgaaaaaagcmattgcatctaagtaaaatcttgagacttgcattaataaatatgatgattttatttctgaagacaataaagagtagggccagttattacagatgtatttccaggcacccaaggattta

SEQ ID NO: 633427 - DNA, 620 bp, Homo sapiens
ctcagtctgtttgggctgctatgacaaaatgccacaaactgggtaacctataaacaacagaaatttatttctcacagttttggtggatgggaagtccaagagcaagcgccatcagattggtgtctggtgagggctcatttcctggttcacaggtggtgccttctcactgtgtccacatacagtgcaaggggtgagggggttcccttgggcccactttataaaggcactaatctcatttatgggggctccaccctcatgacctaattacctcgtaaaaggtcccatcttctaatagtatcactgcaggtgttaggatttcaacatatgaattttggggaaatacaaacattcagattctrgcaagggaagatattttcttggaggaagaaaagtggaagaaatattagaatataaaatttcaaagagcacagcaacaattgctaaaattttggatgtgtcatttttcttttgtaaaacatatgagaatctcactttattccgacccctcagtaaaggataaacaagaaatgtcaagagtaaaagtaaagtgaaatcaacaaaaactttcaaaatatttcaatctaccattttcaggaaagagaacactattaaatagatat

SEQ ID NO: 633428 - DNA, 620 bp, Homo sapiens
ctcagtctgtttgggctgctatgacaaaatgccacaaactgggtaacctataaacaacagaaatttatttctcacagttttggtggatgggaagtccaagagcaagcgccatcagattggtgtctggtgagggctcatttcctggttcacaggtggtgccttctcactgtgtccacatacagtgcaaggggtgagggggttcccttgggcccactttataaaggcactaatctcatttatgggggctccaccctcatgacctaattacctcgtaaaaggtcccatcttctaatagtatcactgcaggtgttaggatttcaacatatgaattttggggaaatacaaacattcagattctagcaagggaagatattttcttggaggaagaaaagtggaagaaatattagaatataaaatttcaaagagcacagcaacaattgctaaaattttggatgtgtcatttttcttttgtaaaacatatgagratctcactttattccgacccctcagtaaaggataaacaagaaatgtcaagagtaaaagtaaagtgaaatcaacaaaaactttcaaaatatttcaatctaccattttcaggaaagagaacactattaaatagatat

SEQ ID NO: 633429 - DNA, 297 bp, Homo sapiens
gtctgagtacgagtccaagcagtccacgaagcctcacgaaatgttgcagtcaaacatggaagctaagcaatactcttacaaagcgttaggttaggttagctcctcagtaaatcaagggcagtccagggtgcaaaagtctgtcattygttatttggttgtttttaaaacacctgcagatatagcgattaaaataaccttctgttcgaagtacaggtatatatccattttattgcccgagtatggattcctgttggctgagatcaggccatatcaaatgtagtttgccacattctacct

SEQ ID NO: 633430 - DNA, 587 bp, Homo sapiens
ggttattttggttttatacttgatgagccctataaacttaaatctggttttacatccatatatgtttagaaatattttctttcattaaaggatgagatttcagctcaataaaagaggaccatcattctaatatgggccaggctgttttataaacagtgagtttccagttagaatgtttaaggagataccagatgacatctgttagtaatgccccagaaggctkcttctatcaggagggcacttgggcaaaatcagctataaattcctgtccaactgggagatgaaattgtgttccaaatgtttgccactctggaaccagggcttgcctaccctgtttgaggtagcaactcaagcactgacttcatgaaggaacactcatgtacatatgtacatggtctttgaatccccaacaacttctcaattataggttgagattaatttgtcactggttccctgctttttctccataaatctcatgacagtttccaccacctcttcccctcccacgtcttctcagatccatcaactctaatctgcttagatttatacaagtcctcaacctctctaatcaaacctttctttacctc

SEQ ID NO: 633431 - DNA, 531 bp, Homo sapiens
tcaatattcattgaaatattccctccattttctgttttactagcacagacgggtggttctcaaccacagctgcatattagcagaatcacgtggggggattttttaaaaaacatccgctgaaggctgggcacggtggctcgctcctgtaatcccagcactttgggaggccgaggcgggtggatcacttgagcccaggagtttgagtccagcttgggcaatatattgagaccccaacaaaaaattttacaattagcctggcgtagtggagcatgcctgtggtcccaggtactcaggaggctaaggtgggaggatcacttgagcctgggagrttaaggctgcagtgagttgtgatagtgccactgtactccagcctgggcaacagagcaagaccctatctcaacaaaacaaaatttttaaggcactgaagtgaattatcacagctgggtgataggtacatgtggacttatacaattctctctgttttgtgtacatttgaaaggtttcataattgaaagtttatatttaaaaaat

SEQ ID NO: 633432 - DNA, 531 bp, Homo sapiens
tcaatattcattgaaatattccctccattttctgttttactagcacagacgggtggttctcaaccacagctgcatattagcagaatcacgtggggggattttttaaaaaacatccgctgaaggctgggcacggtggctcgctcctgtaatcccagcactttgggaggccgaggcgggtggatcacttgagcccaggagtttgagtccagcttgggcaatatattgagaccccaacaaaaaattttacaattagcctggcgtagtggagcatgcctgtggtcccaggtactcaggaggctaaggtgggaggatcacttgagcctgggaggttraggctgcagtgagttgtgatagtgccactgtactccagcctgggcaacagagcaagaccctatctcaacaaaacaaaatttttaaggcactgaagtgaattatcacagctgggtgataggtacatgtggacttatacaattctctctgttttgtgtacatttgaaaggtttcataattgaaagtttatatttaaaaaat

SEQ ID NO: 633433 - DNA, 554 bp, Homo sapiens
tatatctttaaaaaattacctgaagtccttgtagaagccactggatgacatgtgcatgtgcccattctctacgaagtgagtcaattttgaacaggctgtgtttgcttggcagtgcctgccatcagatttgttgattctcacaacctaggggaaacctattactgtagctggctacccagttcatagtaatgtgtcaataaaatgctggcatatttcacaacaggcataaagaactcatcacacgttaaatatcgtgactagaatttcaacaactcttcaaacacccaaaagaaaaaaatatcatttstggttttattccaagtttctgtgtaatgtgtagaagttacacacgcgtacttgtggttatctcagatgatgaataatagaaggttccaccaggtactttttgatgaaacagataaaaatatttgaaaaattagaggagccagtaggaaattgtgtctaagtgactataacctgacgttttatgaattgcatctagcgattttccccaggtgtgttcaggcattgggatactggtacatcacgatgcc

SEQ ID NO: 633434 - DNA, 569 bp, Homo sapiens
ccattctctacgaagtgagtcaattttgaacaggctgtgtttgcttggcagtgcctgccatcagatttgttgattctcacaacctaggggaaacctattactgtagctggctacccagttcatagtaatgtgtcaataaaatgctggcatatttcacaacaggcataaagaactcatcacacgttaaatatcgtgactagaatttcaacaactcttcaaacacccaaaagaaaaaaatatcatttctggttttattccaagtttctgtgtaatgtgtagaagttacacacgcgtacttgtggttatctcagatgatgaataatagaaggttccascaggtactttttgatgaaacagataaaaatatttgaaaaattagaggagccagtaggaaattgtgtctaagtgactataacctgacgttttatgaattgcatctagcgattttccccaggtgtgttcaggcattgggatactggtacatcacgatgcctggcccagggatctgttttcactaagagctaaaatttactgagcatttatcttgtatgaggaactgttttacaagc

SEQ ID NO: 633435 - DNA, 554 bp, Homo sapiens
tatatctttaaaaaattacctgaagtccttgtagaagccactggatgacatgtgcatgtgcccattctctacgaagtgagtcaattttgaacaggctgtgtttgcttggcagtgcctgccatcagatttgttgattctcacaacctaggggaaacctattactgtagctggctacccagttcatagtaatgtgtcaataaaatgctggcatatttcacaacaggcataaagaactcatcacacgttaaatatcgtgactagaatttcaacaactcttcaaacacccaaaagaaaaaaatatcatttctggttttattccaagtttctgtgtaatgtgtagaagttacacacgcgtacttgtggttatctcagatgatgaataatagaaggttccaccaggtactttttgatgaaacagataaaaatatttgaaaaattagaggagccagtaggaaattgtgtctaagtgactataacctgacgttttatgaattgsatctagcgattttccccaggtgtgttcaggcattgggatactggtacatcacgatgcc

SEQ ID NO: 633436 - DNA, 628 bp, Homo sapiens
cttcaggacatacccagaatcagccacttctcactgcacctgcctctggcaccctggtgcaaaccatcaccatctcctgtctgggttcctgcaacacctcagcacatctgtctctgttgccaccctgagacccctatagtgattctccaaacagaagatactgtcagcctggtaaaacataagccagatcacgtcactcttgttcaaagtctctgggggccgtgttatctgccctcaccccaaccagccccaccgttctgaacatatctgccagccacactccccgtcccactccaggcactctgtgcttgctgttcctcacacaaccaggtgcactctcaccgtcagctttggaatcagctcttctctaggaaatactaatgctcttgcctacttcaagtctttgctcccgtcgcctctcagagaggcctgccctgcacaccttaaatatacacagtaaaarcaaaactgtgacggggctaccccagcacctattctcttatcccactctccttttttcccatgacctaacatggcatatcatttccttatttatcatgtttattgtctgtcttctgtcattccagacataagtcccacaaaaacaggggtccagccacctggaaca

SEQ ID NO: 633437 - DNA, 595 bp, Homo sapiens
tggcacgttagccctaaaaggagctgaaaaatgtcctagcacaaggtagtagagagcttagtgaatgaaaccacaaatccccagtcatgcaaattagaaacccaggcatctcctggacaccttactctctctcccaaaccctcttgtcagatctattaccaagccctttgtacttcaccttaaataatctctgggctctgtccacatctccccaactccacaccaacatcctatcctgaaatagtctcttctcaggtttctaatccagcttccygggacatgagtgagcactcagagatacaaaggtgatgctctcacccctgcctagaactttccaatcccattgttctcaggtgaagacaacactctcaaatgcagcctcgatgctgtaagtgttcccttcctccactcccgtcggcccagccatctttccattcctctttttcagcttccttaactagatcacacatcctcagcaagggttctggtagcatcagtccctctgcttcaaacattgcacctatgcgtttgtgtgtgtggcgattccatgaaccattgtctcccttcactagatgcaagtcccaatagggaactt

SEQ ID NO: 633438 - DNA, 595 bp, Homo sapiens
tggcacgttagccctaaaaggagctgaaaaatgtcctagcacaaggtagtagagagcttagtgaatgaaaccacaaatccccagtcatgcaaattagaaacccaggcatctcctggacaccttactctctctcccaaaccctcttgtcagatctattaccaagccctttgtacttcaccttaaataatctctgggctctgtccacatctccccaactccacaccaacatcctatcctgaaatagtctcttctcaggtttctaatccagcttcccgggacatgagtgagcactcagagatacaaaggtgatgctctcacccctgcctagaactttccaatcccattgttctcaggtgaagacaacactctcaaatgcagcctcgatgctgtaagtgttcccttcctccactcccgtcggcccagccatctttccattcctctttttcagcttccttaactagatcacacatcctcagcaagggttctggtagcatcagtccctctgcttcaaacatygcacctatgcgtttgtgtgtgtggcgattccatgaaccattgtctcccttcactagatgcaagtcccaatagggaactt

SEQ ID NO: 633439 - DNA, 613 bp, Homo sapiens
catttttatagcatttacttgagaagttctctcaagaatacaggcctcatttggaatcacttaaaaaattgcaaatactcatgatattggagatggattggtttttggaaggagccaaaatgattttgcactgggctaataaataagggggtcaatggggtcagatccactgagcaccaaaataaacaaaacaaaaccctgagttttaactataaacaaactcaactaaattctttagaatagtttaatgtactagtttggaagggacttcaaaaagtagttccaacaagattttgaacaacagaatcatcttcattcacaatagcaactaatttattgagcacttagtatgtgccaggcactttgcaagtatttgacatacattctgtcacttacgtttcaggaaacctgccaatctcttatacccatcttacagaagataaggtaagtgacttctctgaggtcacaaccaggtaaatgatagaactgagcttatctgcrtggatttttacttgccagaagacaacattcctttgaacgaatgcactctgatacatttgtttaaaaaaatcatcatttaatggttgagtttcttttcatcaatgcagaaaca

SEQ ID NO: 633440 - DNA, 613 bp, Homo sapiens
catttttatagcatttacttgagaagttctctcaagaatacaggcctcatttggaatcacttaaaaaattgcaaatactcatgatattggagatggattggtttttggaaggagccaaaatgattttgcactgggctaataaataagggggtcaatggggtcagatccactgagcaccaaaataaacaaaacaaaaccctgagttttaactataaacaaactcaactaaattctttagaatagtttaatgtactagtttggaagggacttcaaaaagtagttccaacaagattttgaacaacagaatcatcttcattcacaatagcaactaatttattgagcacttagtatgtgccaggcactttgcaagtatttgacatacattctgtcacttacgtttcaggaaacctgccaatctcttatacccatcttacagaagataaggtaagtgacttctctgaggtcacaaccaggtaaatgatagaactgagcttatctgcgtggatttttacttgccagaagacaacattcctttgaaygaatgcactctgatacatttgtttaaaaaaatcatcatttaatggttgagtttcttttcatcaatgcagaaaca

SEQ ID NO: 633441 - DNA, 424 bp, Homo sapiens
agatctcaaaaaaagaataatttggcatgtgctccttataaagatgaataaacaattttttttttctggagaggacattttgatcttcaaaatatttggctacagttttacttttatacagttgaacagttacaccaaagttgcagactaagaacacagatgataaaggtttcgacaatgaaatgttcttatatcattaagtcttgacttattaaaagccctmtttacaaataaatggaggagggaaatttctcagatttcttaacttggaacacagactttttgcaaaggcaaaaacacaaagggagaagtccttacttctccacccgccttgcaaggacagagaaatcttacactggagctgtgaacacccagctaactcaatagccactagagataggatgctaaaggcagagcgtcatag

SEQ ID NO: 633442 - DNA, 424 bp, Homo sapiens
agatctcaaaaaaagaataatttggcatgtgctccttataaagatgaataaacaattttttttttctggagaggacattttgatcttcaaaatatttggctacagttttacttttatacagttgaacagttacaccaaagttgcagactaagaacacagatgataaaggtttcgacaatgaaatgttcttatatcattaagtcttgacttattaaaagccctatttacaaataaatggaggagggaaatttctcagatttcttaacttggaacacagactttttgcaaaggcaaaaasacaaagggagaagtccttacttctccacccgccttgcaaggacagagaaatcttacactggagctgtgaacacccagctaactcaatagccactagagataggatgctaaaggcagagcgtcatag

SEQ ID NO: 633443 - DNA, 317 bp, Homo sapiens
tgattttgttttcctacaagtcctctcaaaattcgtttgctggattaggtttttctgcaactatgacttacaaaaatgctgaaagtaatctaaggtgtttgtataaaaggatgatataaaaatggaaatagcacaagagctgattaaagctaaacctaaaattagatgggttccyttgattaatggcatagcaacagcctgatgagtgatgggtgaagaacagccataattgacactaatctagattcagcaactttaagagtgaagaactctcatccctaccataaagtttttttttaagaacaagcttcctcaga

SEQ ID NO: 633444 - DNA, 593 bp, Homo sapiens
gtgtggagctagcatggatcacatgcaaaagggaatgcagcagtgcactggccaggtctgggtcacctgcctatcatttagccagggaacagatggctccttgtgttgacagccccaagtcatccccacaaaggagtgaggagcagttctccaaagcaagtgggggaggggctggtctgaaatgaaagatgcacacaataaaagctcccactgtgagctcaaacctcttgattgaacttatttcagttcttcatttctaatcattcattygtggcagaaaacccagttttaacacagacatgccatatttcaatttattcaatctaaaacgacaggcaaaagtgagagaagctaagtgacaaaagtcccctctaccctgatccctgatgacctttcttacatttgctccaagctggacccaagtagagcaggcccctgacagcccagcagccacccgctctgagctggtcagtgtggtgcccagacagccaaagcaaccaggagttatccaagaggcgtgccatggccctaggaaagcgctcacagacgccagcactgggattttgaaacaaactctacaaagaatagtaata

SEQ ID NO: 633445 - DNA, 587 bp, Homo sapiens
gatgctggtatttctactgagaaatttgccacctcagtctctttgcagtatcagataaaaggccaccaagaaacgagacagctctatcaggcaattccattttacagaaaaccataaaaacaattatctatgtcattagagactctttaaaaagagcttcaaaacatccaatttgctgttccaggcctgagacataatcctgactgtccatgctaaagagtaataacatccaattgagaacagttattatcagacatcctaaaatcagtgaaatcaaatacagatggagccaaagaggagaagcgcctgtatttcttggtcaaacttaattcacgtggatcatcactgaggtagttcacaagaaatgattatggagggtccagatgtccccacaccttcacttattagaaaatatctaagttgacatcttctttaccactcaatcaacttccctttatcaacgagacacattcaaatcattgcactgatcygagtgcctcctccaagaacaagtttccactgacatcaggaagaaaggactgtaactgactataaatttaaaaatgaagagagaccattcgatttca

SEQ ID NO: 633446 - DNA, 572 bp, Homo sapiens
actgaagcttactgcttacctttgagtaatggtcaatacagctgcactatttctgctcatctgtgatcaagaatatkctaccactggtggaatcatttccatgatcatgagaagaaagagagcatattaagggaattaaacagctgtcatcactgccctggcactgctccgaaacgacacattagagccttttatgatctacagaaaagggctgcataaaagaaaatactgcaaatctatgtttagtgctttaagctgagctgcctgtcacaattttaaatacagcccctcagctacataggaggtaaacatttccaacaatgtcacctttgcctctcaatatacttctttaaaaaataaaacacggtggataaaaattacatcaaatacatacatatatatatatcttacctaacctacagtggcaaagacatctgtgctttggtttcttcctgagcaccaggtacccccgctgtgcgcaccgccctcctctcagccctagcccactgcagcctggcttccaccctcagaacacagggggttgaagatgaaagggaagcagaggtgaaaga

SEQ ID NO: 633447 - DNA, 527 bp, Homo sapiens
catttaaatgttcaagaaccacagtgaacactacctctttccaaatcacattgccccagctccatagaccttttcctcttctacttctcccttgcagattctctttactctgccctctctctagtgacctcagcttctatggctttcattaccttcctatctggaggattctgagtcttgatctttgagctggacctctctggcttgctggctgatrcatgaaggctactagacatgggttctgaaatgtcccacaggaacttcaggacaaactcctgaccatgccatcaccaaccccaccatcaactcatatatgtgtgtgtgtgtgtgtgtgtgtgtgtgtgtgtgtgtgtgtatctcagggaacagcaagtggggccattcccctctccctcacctcccaccatacccaacatgtcactaagtctcaaaattctacctcctaaacatttttcaaagtattcatttttctccatctcttctaccacttccttagttcagatcatcctcaattcttccctggatag

SEQ ID NO: 633448 - DNA, 427 bp, Homo sapiens
tcttgtttactactcatccccttgtttaaaatacagtttccaggggagtaaaacctgattgttcaccactgtaaccccagcactgagcacggtgccaggttcataacaagcattccgtaagtatttgtggaaaaaacaaacagataaaagaacagagaaaggaacaaaactttacaaaggctcaaagagtcacattttggcacatgccatcagtctcgtcttttcactttcagtgtgtatctcagtactttgatgagtcttttaactatcactggtgccaaatgagtatcctgcctggacaaatcttaatttcaaagacacgygtttgacaaccaagcagctgggaagaaacactggcagtaagcttaaggaggaaaccaggtcaaaagatgggttggtttaattttgcttggttctttatgctggg

SEQ ID NO: 633449 - DNA, 427 bp, Homo sapiens
tcttgtttactactcatccccttgtttaaaatacagtttccaggggagtaaaacctgattgttcaccactgtaaccccagcactgagcacggtgccaggttcataacaagcattccgtaagtatttgtggaaaaaacaaacagataaaagaacagagaaaggaacaaaactttacaaaggctcaaagagtcacattttggcacatgccatcagtctcgtcttttcactttcagtgtgtatctcagtactttgatgagtcttttaactatcactggtgccaaatgagtatcctgcctggacaaatcttaatttcaaagacacgcgtttgacaaccaagcagctgggaaraaacactggcagtaagcttaaggaggaaaccaggtcaaaagatgggttggtttaattttgcttggttctttatgctggg

SEQ ID NO: 633450 - DNA, 619 bp, Homo sapiens
caggtcaaaagatgggttggtttaattttgcttggttctttatgctgggagatgcttgaactagaatatttggagaagagatcattcagaagctggtttgagtagagaagacctggattcatcttgggggtcaataaagcattcactgagataaggcgcctaggggattgtccttgatctgagcagcacgaaggcccttacacactctaatatgaccgaataaaatgctttacagttctagtcaggagaagactcagacaaggagatcaagctggaatccaactcttaaataagagcatggagaaataagaggtatgatggtaagtcaataaagccattaaatgttttagaggaacattttactggacactgggcaaaaaaaaagaaatgaaatttaatttattaatatatgtatattcaccctttgtcaaagatcttttcacatgtcttgtcttaatgtgaaaaccctctcagaggtaactccaaaatcgcaatttttgatgacaactgggggaggttcaatgagggggaaaaaagccaacgtctgaaaatggttacacaatttrtcgggcttgctgcctctttgcgccaagacacggccatgctgtcagaaaagctt

SEQ ID NO: 633451 - DNA, 559 bp, Homo sapiens
agcctggctaacacagtgaaaccccgyctccactaaaatacaaaaaattagcaaggcgtggtggcgggcgcctgtagtcccagctccttgggaggctgaggcaggagaatggcatgaacctgggaggcggagctggcagtgagccgagatctcgccactgcactccagcctgggtgacagagcgagactccgtctcaaaaaaaagaaaaaagaaagaaaaaaagaaacccaagcattctgagtccaaggccaggtttctttgctctatgctaaacattttcttcaaccttagtactatttatttatattatatcttctttccaggttaaacgctcatttgacaatagtgaagaagctggaaagtcattaagacaaaagtcgttaagacagtgtgtctcaaaatgtggtcctgggaccacctggatcagatttcaccaaagtacttgtcgggacataaggaggtctggatccaactgcagatctattagatgataatccgtggattggtccccaaaaattcctttttaataaactcatcaggtaattctgttgtataacc

SEQ ID NO: 633452 - DNA, 559 bp, Homo sapiens
agcctggctaacacagtgaaaccccgcctccactaaaatacaaaaaattagcaaggcgtggtggcgggcgcctgtagtcccagctccttgggagkctgaggcaggagaatggcatgaacctgggaggcggagctggcagtgagccgagatctcgccactgcactccagcctgggtgacagagcgagactccgtctcaaaaaaaagaaaaaagaaagaaaaaaagaaacccaagcattctgagtccaaggccaggtttctttgctctatgctaaacattttcttcaaccttagtactatttatttatattatatcttctttccaggttaaacgctcatttgacaatagtgaagaagctggaaagtcattaagacaaaagtcgttaagacagtgtgtctcaaaatgtggtcctgggaccacctggatcagatttcaccaaagtacttgtcgggacataaggaggtctggatccaactgcagatctattagatgataatccgtggattggtccccaaaaattcctttttaataaactcatcaggtaattctgttgtataacc

SEQ ID NO: 633453 - DNA, 574 bp, Homo sapiens
aaaaattacgtagaaatatgcaactgtccgggccagcctgagacctctagatgccccgatggcatcatctcacagaagcctgggtgcaccattccagctagcaccaccttcaggatcataaagctattctccccaaattggtgaatgaagactggattccaagtaaatccaagatcagtcaaaatcatgggattgtgaataacataacagagcagcccacatccctgacgaggtggcataaaatctgtgaatggaatatgacatttgttaccattctrttgttgaggacgaaggaagggttgggaactcagagagagatcaaaggaagcttaatattttccatctctgggagcccagtgaccccgtacacctactaaactatcccagaccctggatattttgattctggagagtctagttcaggtccagactgctgcatctgctgtccctcgaggcatgccaagaggcacatgggagaatgatgggcacccaggaactcaggttaggctttgctggatgagctcgcccctctataaagagatgacattaaaatctaaatttaaaaaagtcagga

SEQ ID NO: 633454 - DNA, 383 bp, Homo sapiens
tcagctatagccacacgcaagatactttaacctctgaaacttgttttctcatttgtaagataggaacaatagtagtgcccacctgatggtgttattgtggggactaagtgaggtgcacacctaaagccatttgtaaagggcttatcaatatagtattcagaaaggattctaaaattttgaataaaggttatgttcatgaaaacagcaataaaatataaacattaattgaatgagatgctctttaaaaacaaaccttaaagacgaatatatacataagawctttttattgacgcaattttctgttacttttagttatttgttttcccatttcattccttcaaaagcaaatgttaaattttcacccaagctttcactttgaattc

SEQ ID NO: 633455 - DNA, 573 bp, Homo sapiens
ttgaggattatctccaagaaaaaaatcacacacttgcaaatctcacccactgtagttgatctttcaaggttctgcctgtgtttggccatttcaaatagttcaaatagttgtttgattttttatttgtcaagattttgtaattgtatcaggaagttatgtcttatcaagttattttaccattagcagaagctggagctcagagtctgtaaaacaatggatttaataaagaattttcttgacatagggatggcacatttcaattcatcttaatgttgtaatgtgtgagacttcttagcttactaatcctctatgtaatgcaagtacacaatattcactctgtaatctcccattattacatcacatattaagctcactttataggtttcatcttcactgtgatactctatgcaaaatattctattttwtgtttgtgtcgggggagaagtggagggtgagcagctttctttgtaacacataaatttctctaaaagttgaattatctattctgtttttcagaaggtctacattgctgagacatttaagtctcctatgattcctatttccccagatctc

SEQ ID NO: 633456 - DNA, 571 bp, Homo sapiens
tgaagccaattgataatgacaacaacaaaaaatccactattttgtttgtttattttatttcattyatttatttatttatttatttagagacagggtcttgctctgtcgcccaggctggagtagagtggcgcaatcttggctcactgcaagctctgcctcctgggttcaagcgattctcctgcctcagcctcctgagtagctgggattacaggcacctgccaccacgcctggctaatttttgtatttttagtagagacagggtttcaccatgttggccaggaaggtctggaacttctgacctcaggttatccacctgcctcagcttcccaaagtgctgggattgcaggcgtgagccactgtgcctggccactattttatttcatccaatcaaaaatttatctgaagtttcttcatagtgtttaagttatggtctgcctgtgaaagaaagaaaaaagactggttggtttcatcttcattagtagtttcctaaacctagagaggaattttaggttcttgttagtttttattaaatccttgggtattttattcggtagaagggaagaaagtagag

SEQ ID NO: 633457 - DNA, 571 bp, Homo sapiens
tgaagccaattgataatgacaacaacaaaaaatccactattttgtttgtttattttatttcatttatttatttatttatttatttagagacagggtcttgctctgtcgcccaggctggagtagagtggcgcaatcttggctcactgcaagctctgcctcctgggttcaagcgattctcctgcctcagcctcctgagtagctgggattacaggcacctgccaccacgcctggctaatttttgtatttttagtagagacagggtttcaccatgttggccaggaaggtctggaacttctgacctcaggttatccacctgcctcagcttcccaaagtgctgggattgcaggcgtgagccactgtgcctggccactattttatttcatccaatcaaaaatttatctgaagtttcttcatagtgtttaagttatggtctgcctrtgaaagaaagaaaaaagactggttggtttcatcttcattagtagtttcctaaacctagagaggaattttaggttcttgttagtttttattaaatccttgggtattttattcggtagaagggaagaaagtagag

SEQ ID NO: 633458 - DNA, 529 bp, Homo sapiens
ggcattggcaaaatgtcttttgaaaacatatatattcacacacacagtgattacattctgctaaaatactggaagaatgatgtggttatttctgttttttataaatgctggttctcattaggctttgaacaggaaaagtttacagtgttttacttgtgactattawataggactgaaatatggagaattaaaagatatgcttttcatttttctgacatacagtatcttaaaagttggaaatttaatgtttaagttaatttttcatttttagtgcttctggtaggcgttcttcatatgatatttcaatggaagcatgggtagaacagcccattttacaactactgatcagatggatgagagaactgcagtgattacttcagtcacttcacttaactattgcccaagtgaacttcagggacctactggccttctaagctgcttgttgactgacacaaacatttagaagttatttatggtgggcctgctcttgtactaaacactatgctaggtgctgagccacaagaaggac

SEQ ID NO: 633459 - DNA, 529 bp, Homo sapiens
ggcattggcaaaatgtcttttgaaaacatatatattcacacacacagtgattacattctgctaaaatactggaagaatgatgtggttatttctgttttttataaatgctggttctcattaggctttgaacaggaaaagtttacagtgttttacttgtgactattaaataggactgaaatatggagaattaaaagatatgcttttcatttttctgayatacagtatcttaaaagttggaaatttaatgtttaagttaatttttcatttttagtgcttctggtaggcgttcttcatatgatatttcaatggaagcatgggtagaacagcccattttacaactactgatcagatggatgagagaactgcagtgattacttcagtcacttcacttaactattgcccaagtgaacttcagggacctactggccttctaagctgcttgttgactgacacaaacatttagaagttatttatggtgggcctgctcttgtactaaacactatgctaggtgctgagccacaagaaggac

SEQ ID NO: 633460 - DNA, 534 bp, Homo sapiens
tgatggttgcatatcactagattgacttatgcatgttcctatacatgaagaagctcatgctgagtggataagtgccttgcccaagtscctcggtcagcaataggacagaggtaaaaacccatgttgcttaacagcctctgttgccttgcaccttccggttgcttttagaagcaacattcccagtatcatgtctgtgtgctgccactttcatttatggagcattttgctgctccactaggcaattagagaatgagcctctgcagtgtcacattgatctttcctgttcagatgtatctctagctgttaacatttcattataatcaaggttttcttgagttctccgtgacccttgactcatcaagttcccagacctctgaatgctgtgagttaattaattttgctgtctgatgtgaacatgtaaaactggcatggaacctggagtcttgatgggaagatagtttggtgatcacattatttttcatatgaagtcagatttatcggaaacaccaacagaggagcaatttaacaaaacag

SEQ ID NO: 633461 - DNA, 534 bp, Homo sapiens
tgatggttgcatatcactagattgacttatgcatgttcctatacatgaagaagctcatgctgagtggataagtgccttgcccaagtgcctcggtcagcaataggacagaggtaaaaacccatgttgcttaacagcctctgttgccttgcaccttccggttgcttttagaagcaacattcccagtatcatgtctgtgtgctgccactttcatttatggagcattttgctgctccactaggcaattagagaatgagcctctgcagtgtcacattgatctttcctgttcagatgtatctctagctgttaacatttcattataatcaaggttttcttgagttctcygtgacccttgactcatcaagttcccagacctctgaatgctgtgagttaattaattttgctgtctgatgtgaacatgtaaaactggcatggaacctggagtcttgatgggaagatagtttggtgatcacattatttttcatatgaagtcagatttatcggaaacaccaacagaggagcaatttaacaaaacag

SEQ ID NO: 633462 - DNA, 587 bp, Homo sapiens
taaacaaccaggacatgatgttggattacataagattatcaagacaaaactattgaaattgtaataggaaacatacggaaaataaggagaaaattatctttccygcaagaattaataaaaatcttgttaaaagactataaggcaatgccttatgagaaactactaagtatacagaattaatcaatccacactaggcacatagagaatatgcaatgtattcgttgttagatctctaaaaatgacccagcttttggcttctctaatgttgaagtaaaaatatagctcaaaattctgggcattgacttctgggcaaatggttataacttgctctgtaaagagaaccagcctaattgtttaagatccaataccctccattgaaagaaatgctttgtttccaagagaatccttggagctaaagcagagaattgacaactgtccatgttaaaataagtgcagaaggaaagattccacttcatctccttcaagagatttatatgtagccctggaagaaagcttagcaggagccacagattccacactgactgctcctccatcagtctgggctgtgcacgccctccccagaagcc

SEQ ID NO: 633463 - DNA, 461 bp, Homo sapiens
tggggatcatggaatactattgggggtaatctgtaatcctccaaaaattgtatattaatttaatgtatattccagtaggtggctcccatcttccactccatccccacattctctggggaatctttataacygtttttaagtctttaaggtaactgtaatccaaaaagcaatttaaaattcactgctctaaatttatttgtgtttaaacaatgaggtataagagcttcctgagatgcttaaacaatggaatgagccacctcacacagtgtccatcctctgaatatttctctgttcggattggtccagaaaaccacttacctgaaggccagaatgagccatatgacttctgagaatcttagatcattgaagctagaagtgttcctagcgatcacatcagagggcatggcagaacactgatttctgggtcccacccctgcagtctatgcttctgtaggtcctgg

SEQ ID NO: 633464 - DNA, 461 bp, Homo sapiens
tggggatcatggaatactattgggggtaatctgtaatcctccaaaaattgtatattaatttaatgtatattccagtaggtggctcccatcttccactccatccccacattctctggggaatctttataactgtttttaagtctttaaggtaactgtaatccaaaaagcaatttaaaattcactgctctaaatttatttgtgtttaaacaatgaggtataagagcttcctgagatgcttaaacaatggaatgagccacctcacayagtgtccatcctctgaatatttctctgttcggattggtccagaaaaccacttacctgaaggccagaatgagccatatgacttctgagaatcttagatcattgaagctagaagtgttcctagcgatcacatcagagggcatggcagaacactgatttctgggtcccacccctgcagtctatgcttctgtaggtcctgg

SEQ ID NO: 633465 - DNA, 588 bp, Homo sapiens
tgagatactcttcccttttccagcaacatttctgagtgaagttggattttctgtgcattttcttactatactacaaaacagtgtatcgtaacagattgaatgcagaagcagatgagaatacacttgtcttctattaagtcagacattaaagagacttataaaaatgtaaaacaatgccattctactcattaaattgttctattttggaaaatgtaattacttttcataaaagtatgtcattcgtttatgttaacatgtaatggtttactaatgttatttttaaatgaattaataaatattttaaaatattattagttttcatgttcaaaatggtaaatatcaataggtataatctacctaagcaaaagttytttgtggattctcagtagtgaaaaacggtgtcaaccctcaaaagtctgagaacctccatattagataatacagtattagaattcaacattagataatactccatggtttcattgtatcacctgcattccagaaggaaggctctcattgctggagaagaagaggcagaaaagcagatgtccttgcctttagaattctgccttgtcaattaacactatc

SEQ ID NO: 633466 - DNA, 626 bp, Homo sapiens
agctaattcatggcattccagttagagatacattgttgtcaaacaacaacaacagctcttaaaaaacaccagagcactaacaaatggcaaaatatccaaaatacatggatattttgctctttgctttccatgattcagatatataggaatatgcaggcatttgaagacgttgggagggggaagggcttctgaactgaacaaatcacatgttcaattatggttaagcaggacctgcagttaaaaataggctctaagtcttgagactcttaatggactgtaactagagaaggagataaggcttcagagataacaccatcaaacttaggtgatcagtcattgctgtaggataaaaccacccctacctccctccaatgctgctaagttgcctccccctgtgctatcccagggctggctttgcaacccaacctgctggaartgcaaagttcagaccagcagcaagaactcttgccccatgcttctgctgacatagcctgcagggatctgtcagttcactgtgtaataaaaccttgtagtgtgtgttgttgtttttttccttcagatttccacaaaatcttgggccaggcaagacaaagttctgctgacagctgaattacgcagcagagtaa

SEQ ID NO: 633467 - DNA, 552 bp, Homo sapiens
tgggatgcctacctagagtgcctttgttttagaataaagtgggatgtgaatttaaacaactaacaacaaacaaaacagtcacatggaagagagagaagttgattttcttatttgaacttctgagtttgtttctgtttttgttgttttggttttggttttgttttttagagacagggtctcactctgttgcccaggctgcagtgcaatggtgtcatcgtggctcaccgcagccttgaactcctgggctcaagcaatcctcctgcctcagtatcccaagtagctgggaatacaggtggacaccaccacactcaggtaattttttaatattttgtaaagayggggtcttgctatgttgcccaggcttatctcaaactcctggcctcaagcaatcctcccaccttggcctcccaaagtgctgggattacaggcatgagccactgtatctgtcagctcttctgctttgtgaatccaggtggaaagaaggacacccatgccctctccccacttcttgctgctgagagccctggtatttagagagatgttgagagctgg

SEQ ID NO: 633468 - DNA, 560 bp, Homo sapiens
aatattattacagtcacattatgcttacacaaataagaaaaaattaactacttatgtttttaaaaagtcaagaatagkttagagagctcagacgaagaattacctaacttcaatgagcagttgtgaattcaggtacttcaaaaaatttacctaatatatatacctttttttttttttttgagacggaatctggctctgttgcccaggctggagtgcaatggcacgatctcggctcactgcaaccttcacctcccgggttcaagcgattctcctgcgtcagcctcccaaacagctgggactacaggcacgcaccaccttttaataatattaatattttcatgttaagattatctcttaacagtgtgtccttcacagctaatacaaagtcaaaattccctctctattctatttctctaatcatataatttactttaattcgctagtgattacactagatgtaccatggatatgaaccttatattacagtcagatttttttcttgtttagaaatggggtcttgctacattgcccagactggccttgaactcctggactcaaat

SEQ ID NO: 633469 - DNA, 560 bp, Homo sapiens
aatattattacagtcacattatgcttacacaaataagaaaaaattaactacttatgtttttaaaaagtcaagaatagtttagagagctcagacgaagaattacctaacttcaatgagcagttgtgaattcaggtacttcaaaaaatttacctaatatatatacctttttttttttttttgagacggaatctggctctgttgcccaggctggagtgcaatggcacgatctcggctcactgcaacctycacctcccgggttcaagcgattctcctgcgtcagcctcccaaacagctgggactacaggcacgcaccaccttttaataatattaatattttcatgttaagattatctcttaacagtgtgtccttcacagctaatacaaagtcaaaattccctctctattctatttctctaatcatataatttactttaattcgctagtgattacactagatgtaccatggatatgaaccttatattacagtcagatttttttcttgtttagaaatggggtcttgctacattgcccagactggccttgaactcctggactcaaat

SEQ ID NO: 633470 - DNA, 529 bp, Homo sapiens
agatctgattgttaaaaacagctggtacttcctttctttttctcttgctccttctcttgccatgtgacacccctgcaccctcttcgacttcctccatcattgtaagcttcctgaggcctcaccagaagaaaatacatctagttggcccggtgctgtggctcatgcctgtaatcccagcactttgggaggccgaggtgggtggatcacctgaggtcaggagttcgagaccagcctggccaacatggtgaaaccccatctctactaaaaatataaaaagtagccaggcgtggtggtgggtacctgtaatcccagctacttgggaagctgaggcaggagaattgcttgaacccaggagacggaggttgcagtgagccaacatggtgccattgcactgcagcctcggygacagagtgagactccgtctcaaaaaaaaagcatctaatacagcctgcagaactgtgagccaaataagcctctcttctttataaattatccagcctcagatattcctttatagcagcacaaaaca

SEQ ID NO: 633471 - DNA, 561 bp, Homo sapiens
catactttacatgccagacaggatgctgtctctgttaggtggagagagaggataagacaaggaaattgccaaatggtgagatgaaggttatcgtcgaaatcctagctgttgttttggcaggtggttcataggtgcttcttatttaagatgtctaatagataagtaaagaggaaacaccgatgartacatatcattaaccaaagattattagtaatctaattttgtacctctgaggtcctaaaaacacccaaaggaccaagataaaaacaacaaatcaacataaatcaggcccaagtcatccagtgatgcttcaggagctcaaattcagtcctgccaggctccaaagcccaagctcttcctttctgaactagagatccaaagccatacaagttactcccattctctcatgatgatgagtgaccttgtctataggtcatagccagagctgataaacttattttttccaggactgtagaaagacaagaaagatattaccaatctgacagagacttctgggcaacagaaagtctgagctaggctagaatcctggacctaccacat

SEQ ID NO: 633472 - DNA, 563 bp, Homo sapiens
aaaaaaaaaaaaatagtaaaaagtagagaactagaattgtggtcaaaaatgttggtcaaaggatatataattacagttaggtaggaggaataagggcmagaaatccagtgtgactatagttaatgataatacattgtattcttgaaaaatgcaaagatggtggatgttaagtattctcaccacaaaaatgatagctgtgtgaggtagttaatgcattcactaattagctatatttaactactccacaatgtatatatacttcaaaacatcttgttgtacatgataaatacatacactttgatctgttaaaaaaaaaaacaaccaaataggtgttcaaacaaaaacttgtaaatgagcattcatagcacactactattcacaattgccaaaaggcagaaacaactcaaatctccgtgaactgatgagtggataaacaaaatgtagtatatataaacattggaatattattcagctattaaaaggcatgaaattttgataaatgctacaacatggaggaatcttgaaaacattgtgctaagtgaagaagccagacacaaaaagcc

SEQ ID NO: 633473 - DNA, 548 bp, Homo sapiens
ccccctgggtttttcaaaaattctgtctcttttaatgaacctttaattgaagaaaccttgttgccctcttaaaaatcttccaaaaaaattaccttaccaaaattttttttttttttttttgaaacaacactcatttattaactcatagttctgcaagtcagtattctgggtagcctcagctggttttctgcttagggtctcccaagactgaaatcaagttgttggctgtcctgggctattatctggagggccaggagaagaatccccttctaagatcattcaggttgtttgcagaactcagttccttgcagttgtagaactgatggctccatttctttgctggtttttgacaggcagctgctctcagctcctagaggcttctttctggtccttgcatgtggccccctccaccttcaaggccagcaatggagatgcattcaacccttatcatgattcaaatctctctgacttccctttctgcsatcagccagataaaactttctccttttaaagagcttaggggcttagattaggcctacccagataat

SEQ ID NO: 633474 - DNA, 519 bp, Homo sapiens
aacagctctgaatgagcatgaaaaaatcgggaactctttcgccattttacctaggagcttattccattctttaaaatttaatcatgtaatcagcaagccaaagttttgatatcctactacatttgagatggaaatgtatgtattgggtggagagagaragaaaagaaaaggtgattggaaacatgattaaaaatatgcaagtaagccaggcatagtggtgtgtgattgtagtcccagctacttgggaggctgaggccagggaattgcttgagttcaagagatggaggccagcctgggcaatatagtgagactcaatctctaaaaaaattttttaattaaaaaaatgcaattgattatgagaagggatggagcagtaagcctcagaacaaggaatgcttaaacattgtgagttcttcataggccagaaattaaggaaaagaaaataaaaaagaagtcaaggacatatgactgagagttactccagaaaattcagaagtgcgagagaaaattttgagaagg

SEQ ID NO: 633475 - DNA, 519 bp, Homo sapiens
aacagctctgaatgagcatgaaaaaatcgggaactctttcgccattttacctaggagcttattccattctttaaaatttaatcatgtaatcagcaagccaaagttttgatatcctactacatttgagatggaaatgtatgtattgggtggagagagaaagaaaagaaaaggtgattggaaacatgattaaaaatatgcaagtaagccaggcatagtggtgtgtgattktagtcccagctacttgggaggctgaggccagggaattgcttgagttcaagagatggaggccagcctgggcaatatagtgagactcaatctctaaaaaaattttttaattaaaaaaatgcaattgattatgagaagggatggagcagtaagcctcagaacaaggaatgcttaaacattgtgagttcttcataggccagaaattaaggaaaagaaaataaaaaagaagtcaaggacatatgactgagagttactccagaaaattcagaagtgcgagagaaaattttgagaagg

SEQ ID NO: 633476 - DNA, 468 bp, Homo sapiens
gttctttgaagtgtcagtagtttgaattgctggcacactctttttccaccaagctctgagacaatcctttgttaaaaacataggagagttttaggccgggaatttgaatgatcacttttgtgcttggaaaggacaacactgtttgcagtgtaaggaaaagcttatataagaaggtgtattagtttgttttcacactgctgataaagaaataccmaagactgagaagaaaaaggggtttaatgagcttacagttccacatggctggggaggcctcacaatcatggcagaaggcaaggaggagcaagtcacatcttatatggatgggggcaggcaaaaaaaatagagcttgtgcagggcaactcctgttttttaaaaccatcagatctcatgagacccattcactgtcacaagaacagcatgggaaagacccaccccataattcaatcatctcccaccaggttcctccca

SEQ ID NO: 633477 - DNA, 643 bp, Homo sapiens
agtcacatcttatatggatgggggcaggcaaaaaaaatagagcttgtgcagggcaactcctgttttttaaaaccatcagatctcatgagacccattcactrtcacaagaacagcatgggaaagacccaccccataattcaatcatctcccaccaggttcctcccacaacaagtgggaattatgggagctacaagatgagatttgggtggggacacagagccaaaccgtatcaggaggcaaaaatagatgagaaagcttctcggtaaataaggcagagtgaagcaagaacaaaattcaccctccaaaataccaaacaaaagaacaaaaactattcaaaaaaaaacagctttcaaactggcatccaagtagagaaacaaatcattctgatgctactcaaagctgaaaaaaagcacagcttttagacctggctcttgtttccctacaaacaaaactgaggaaagaagggaagccaaaaaaaaatactgagaagtctcactaacactctccagtctgtagctgagaaggctggggtggagagcagtcaattctgtgaaaggataaagcaaatcctgtatggtacaagaccatgagtagtacccaggacctcaggagacagaagaaagggcaacaccttcccataccc

SEQ ID NO: 633478 - DNA, 643 bp, Homo sapiens
agtcacatcttatatggatgggggcaggcaaaaaaaatagagcttgtgcagggcaactcctgttttttaaaaccatcagatctcatgagacccattcactgtcacaagaacagcatgggaaagacccaccccataattcaatcatctcccaccaggttcctcccacaacaagtgggaattatgggagctacaagatgagatttgggtggggacacagagccaaaccrtatcaggaggcaaaaatagatgagaaagcttctcggtaaataaggcagagtgaagcaagaacaaaattcaccctccaaaataccaaacaaaagaacaaaaactattcaaaaaaaaacagctttcaaactggcatccaagtagagaaacaaatcattctgatgctactcaaagctgaaaaaaagcacagcttttagacctggctcttgtttccctacaaacaaaactgaggaaagaagggaagccaaaaaaaaatactgagaagtctcactaacactctccagtctgtagctgagaaggctggggtggagagcagtcaattctgtgaaaggataaagcaaatcctgtatggtacaagaccatgagtagtacccaggacctcaggagacagaagaaagggcaacaccttcccataccc

SEQ ID NO: 633479 - DNA, 576 bp, Homo sapiens
ggagatgacaaaatagcagaagagcaagaaagcttaggacattgtaaaaaatattatttaaatgatggactgtggaatctaaactggataaggaaggaataatagtaataataaaagcaataataaagaaaaaaracagattgatcataaatggagaaatctgccttttctccgggagctgtcgtgacaatcaaatgagataatgttatatgaatatggtttaaaaatagcaaagtattgtccctttttgaaattttaatattattaaagaagccagaagggaaaaatataacaaaaagagtaggcagagaaatcaaaatcagggaagaggaagattagaagaacagaatttttgcatctgggaaagcagatgtattatgtcaggcaagagtcacataatttcaacgtcattggtctgcctaggtcccaactattcagcaactgggtgattggaaatgctgtgtccttcaccataaagctcaacagctcagcaaaagtgaagacaaagatttcatggtctaagggtctggaaaataaatggtgcctcaaaatgtgggggaggggatggtatattgt

SEQ ID NO: 633480 - DNA, 576 bp, Homo sapiens
ggagatgacaaaatagcagaagagcaagaaagcttaggacattgtaaaaaatattatttaaatgatggactgtggaatctaaactggataaggaaggaataatagtaataataaaagcaataataaagaaaaaagacagattgatcataaatggagaaatctgccttttctccrggagctgtcgtgacaatcaaatgagataatgttatatgaatatggtttaaaaatagcaaagtattgtccctttttgaaattttaatattattaaagaagccagaagggaaaaatataacaaaaagagtaggcagagaaatcaaaatcagggaagaggaagattagaagaacagaatttttgcatctgggaaagcagatgtattatgtcaggcaagagtcacataatttcaacgtcattggtctgcctaggtcccaactattcagcaactgggtgattggaaatgctgtgtccttcaccataaagctcaacagctcagcaaaagtgaagacaaagatttcatggtctaagggtctggaaaataaatggtgcctcaaaatgtgggggaggggatggtatattgt

SEQ ID NO: 633481 - DNA, 576 bp, Homo sapiens
ggagatgacaaaatagcagaagagcaagaaagcttaggacattgtaaaaaatattatttaaatgatggactgtggaatctaaactggataaggaaggaataatagtaataataaaagcaataataaagaaaaaagacagattgatcataaatggagaaatctgccttttctccgggagctgtcgtgacaatcaaatgagataatgttatatgaatatggtttaaaaatagcaaagtattgtccctttttgaaattttaatattattaaagaagccagaagggaaaaatataacaaaaagagtaggcagagaaatcaaaatcagggaagaggaagattagaagaacagaatttttgcatctgggaaagcagatgtattatgtcaggcaagagtcacataatttcaacgtcattggtctgcctaggtcccaactattcagcaactgggtgattggaaatgctgtgtccttcaccataaagctcaacagctcagcaaaagtgaagacawagatttcatggtctaagggtctggaaaataaatggtgcctcaaaatgtgggggaggggatggtatattgt

SEQ ID NO: 633482 - DNA, 587 bp, Homo sapiens
gcctctcactgcagttgagaaactatcccatctgtgctgagatctgctgggaaatgagtacctgtctgggccaacaagatgggctttccatcctacatcacataggagatcccaaaggagcccagtctcagctccagtcccttctrctgcagtcaaggaactatcccatttttgcagggtcctcctgtgagacatgtgccctctgagccaacaagactgggctctataacctttatcacacagcagatcctgaggggcccaatctcagctctggcccctctcactgcagaggtgaggaactatcctatctgtgcaggaacttgctgggtggcatgtacccctctacactgagattgacctcctcatcctctgtctcactgaaaatcccaagtgggcccaatctcagctcaaaactctcctgctacagtaaggtagctataccagcatgccagcctctgtttcacagcagatcttgaaggggaccaatctcagctctggcccttcctgtagcagtcaagaaactagcccacttgtgcaggaatctgccggatgatgcatgcttatctgaactgacatgggctcactag

SEQ ID NO: 633483 - DNA, 603 bp, Homo sapiens
ctcagctccagtgcctctcactgcagttgagaaactatcccatctgtgctgagatctgctgggaaatgagtacctgtctgggccaacaagatgggctttccatcctacatcacataggagatcccaaaggagcccagtctcagctccagtcccttctgctgcagtcaaggaactatcccatttttgcagggtcctcctgtgagacatgtgccctctgagccaacaagactgggctctataacctttatcacacagcagatcctgaggggcccaatctcagctctggcccctctcactgcagaggtgaggaactatcctatctgtgcaggaacttgctgggtggcatgtacccctctacactgagattgacctcctcatcctctgtctcactgaaaatcccaagtgggcccaatctcagctcaaaactctcctgctacagtaaggtagctataccagcatgccagcctctgtttcacagcagatcttgaaggggaccaatctcagctctggcccttcctgtagcagtcaagaaactagcccacttgtgcaggaatctgcyggatgatgcatgcttatctgaactgacatgggctcactagcctc

SEQ ID NO: 633484 - DNA, 589 bp, Homo sapiens
caatatttatcatagaaattttaagagagattaaaataattaaaatgaaacagaaatcctgaaggtataaaatacaactattttaaaccagcattattttttacacagtaaattgtgacttcaaaaattcaaaatgtggggagagaaggaagttaatgtgtacagggttgtttttttcttcatgttatgtgcaatcagttcagttggtgacagttttaaacaacttgctatggctataagatgctttatataagcgtcatggaaaccacagagtaaaaacctatcaytgatatcctaaaaattaaaagcaatgaattaaaacaatgctaccagagaaaaccacttacatacaaaggaaaacagtatgaaaggaagagaaaagttacacaacaactataaaacaagtagcaaaatggcagtagtaaggacttacctatcaataataacactgttattaagtaaattaaattatccaattaaaagacaaagagtggctgcatgaattaaaaacagaacccaactatatgctgcatataagaaattcacttcacttataaagatgcatgcagattgaaagtgaagggatgga

SEQ ID NO: 633485 - DNA, 665 bp, Homo sapiens
agtgaaattgagaccaaaaaacaatacaaaagatcagcaaaatgaaaagttgaattttgaaaagataaaacaaaattggcaaatctttagttagaataaaaaggagaataaaaaagagaagccccaaatgaataaaattggagaagaaaaaggaaacattacaactgaaaccaaagaagtacaaaggatcattagagactattatgagcaactatgtgccaataacttggataatctagaagaaatggataaatttctggacacatacaacctaccaagattgaactatgaagaaatagaaaatctgaacataccaataatgagtaacaagatcaaagcagttataatcagtctcccatcaaagaaaagcccaggatctgacagattcactgttaaagtctaccaaacattggaagaagaactaatatcaactctactmaaattttaaatttcaaaaaattaaagaggagagaatagtattcaactcatttataaggctagaattactctgataccaaaaccgaacaagaacacaacaaaaactacaggccaatatccctaatgaacatagatgcaaaaatcctcaacaaaatactagcaatctgaacaacatactaagagagattatttatcatgatctattggaattaaacctagagatgcaa

SEQ ID NO: 633486 - DNA, 567 bp, Homo sapiens
aataaattgttcacaatgacttagtgcccaatgcacagttatgctcaaagactagttggtagattagtaggggttatggaccacattagccgcaatatgataacaataagattttacatttgctggtgtccaaatcagcatgaatgttaaaatagagactcaggtgatcactcagtaccgcatttaattactcacactaactcctgcaaatatttttttatttttaaaggcacccctgttttcatgtccatccactgaataagatctcacagcctttatgggttttggtttgaatagacttttaagtccactcgtaccatcatgtactgagaagtttaaaaactgcctcactgttgttacctcatcttcattctyttccactcaaaatagttttgcatttttatcccttctggcctcctgtgcacctatctccgaggaagagtgctcttacttcccttccctctgtgcttttcagcccatctcagtccaaccaagctgttagcccttccaagaaattatttcttctttgcaccttcagtctcccaatttctggcaatatgtagcaga

SEQ ID NO: 633487 - DNA, 600 bp, Homo sapiens
aacagaaaattaaacaaaccattctttacttttacmactgacacctttgtcaacaatctccacaaacatttatcaaatacctcctggtttttatgctacttatgtcatttattatatgcctttaaatgccaaaatttttttgcaggtgcttatatccttatcaagtcatttattaaaactcaagtctgaataaatcttcaagggcagcagacattgaccacagtgcctggaatgaccacgtggtattgggaaaagaacattgcagtaatagaggagtttagattttcgttctgatttgcctttagtgaatataactctgggagaataattttctctctttgatactatttttctttaaatgcaaaatgaagtaattagcgatgatttctaaattctaaatctaacagtctggttctgaagcagttagtaatatatctattattggtctgtttttatttcccatttgtggagccctttaacctgttgttttggaagaggaattaggtgaaaaggagggaagaggggaatactgaaaaatgaaaccaaagaactagtgacttagccttcaaccttcaaccatcttgcttttacacactgtat

SEQ ID NO: 633488 - DNA, 588 bp, Homo sapiens
aagtcgactactaggtatatacccaagagaactgaaaatatatgctcgcacagaaacttatatacaaatgttcatagccataataaccaaacagtgggaacaactcaaatgtctattaactgatgaatggatacagaaaatgtggtatatgcatacactgaaacattattcattcatcagaaagaatgaagtacatgccacgaaatggatgaaccttgaaaacatcatgttaagtgcaaaaatccagatagaaaaggccatatatgtgygttactccattcatatgaaatgtccagaatagacaaattcatagaaatggaaagtagattagtggttgccagagactgggggaaggagaaaacggggagtgactgctaatgagtctaggtttcatttaggggtggtgaaaatattctagaattatatagtggtgatggttgtacaacttcctaatatatttaaaaacaaaggggtaatttttcaaattttatgaatacctaatagttgtacatgtttatggcatatatgtgatattttagtacaagcatacaatgtgtaatgattaaatctgggtaattaggatatcca

SEQ ID NO: 633489 - DNA, 446 bp, Homo sapiens
aaatcatttattcctcacctcaacccaacgaaggtgggtataatcctattttacagaggaagaaatagagtttaaagaaacatcacttcccaaggtcacacaatagaggaactggaattcaaacttcagcctaattataaaatattcattatttctcctactgtcttaggactaaaaaggaaaatctctctatcttccatctaaagacataacatattacattaactctttacttttttccactgtttaacatctttgagatcttacagtatcataggttaagtggctgaattttctttcttggtgttgyataaaataatggcacatcttaacaacaattatgtgatagattcaatgaactactcagatatatgactgacttttgatggaaattctggcagagatatttaaagaataatattaataaaatagtttagatttgaata

SEQ ID NO: 633490 - DNA, 437 bp, Homo sapiens
agacctaaaaattaatacctaaaatatatattttttaattaagtggatgacataagtttcacacaatcytttatgaatgttatttctctaaaccagagagtttgagcttatactctgtgatagggacttatcctccttaagctgataagtattttcctttttatttcactcttttcctttaactttcctttttatttagatcatttccttttcctccatattatacagggcccctctctgcctccagggctgttcccctcctccaggctgtcacctactgtctctgtgtacagctctcttttcccttcgtggtgcgaggcagtttgtgtgacatgtatcctcccactgggaactaaattaagacatcatagtcttgtcacatcaggcacctaataatcactagttgtttgctagcactgttcatttgggatgaattc

SEQ ID NO: 633491 - DNA, 626 bp, Homo sapiens
ctgaataggttgggtgactgtagagttgtattcaggacagtgactaagcatkttccatgttttgagatgatagttcaccattttctttaaggggctgaatccctttggcctgactgcctgactctaaagtctcagctttcggaccctacatcaataaggagctggagagaggatggagatctccccaataccctagggaaatggggactgggagggctggggtaatggagcagtcactgcctgcatcctagaatagctgcagccttcctggcatctgccatcctggctgcaaactcccatctcattggctgctccttgtccctgccgtctggcaggcactgctttccaggtttttgtggcaccgactaagcagcctccttgcaagctacagcatgctggcttctttctccacgtggttgggatcataatagcaactctcctctggttccctccatcctgcctcacttcacttccttgatgggtgtggacagagggatagtttaggacattggaaaggggcctatacttggcatcaagggtctcaagttcttcctacccattttttatgcacctgggcacaagtctaaacatctctcctggcttcagcatcttcacctgtgaaatgg

SEQ ID NO: 633492 - DNA, 626 bp, Homo sapiens
ctgaataggttgggtgactgtagagttgtattcaggacagtgactaagcattttccatgttttgagatgatagttcaccattttctttaaggggctgaatccctttggcctgactgcctgactctaaagtctcagctttcggaccctacatcaataaggagctggagagaggatggagatctccccaataccctagggaaatggggactgggagggctggggtaatggagcagtcactgcctgcatcctagaatagctgcagccttcctggcatctgccatcctggctgcaaactcccatctcattggctgctccttgtccctgccgtctggcaggcactgctttccaggtttttgtggcaccgactaagcagcctccttgcaagctacagcatgctggcttctttctccacgtggttgggatcataatagcaactctcctctggttccctccatcctgcctcacttcacttccytgatgggtgtggacagagggatagtttaggacattggaaaggggcctatacttggcatcaagggtctcaagttcttcctacccattttttatgcacctgggcacaagtctaaacatctctcctggcttcagcatcttcacctgtgaaatgg

SEQ ID NO: 633493 - DNA, 594 bp, Homo sapiens
actcatttaactaaaagattaaaaaaaattttgcaaactaaaaaccacttgatgaccttactaaatatttgtgcattctattcacaatagcaaagacataaaatcaacctaaatgcccatcaatgatagactggataaagaaaatatggtacatatttactatggaatactatgaagtcacaaaaaaaagagtaagattatgtcctttgcagggacatggatggagctggaggccattatgcttagcaaaccaatgcaggaacagaaaaccaaatactgcatgttcccacttataagtgggagctaagtgatgagaacacatggacatatagaggggaacagcacacactggagtctataggagagtggaggtgggaaggagggagaggatcaggaaaaataactaatgggtactagacttaatacctgggtaataaaataatctgtacaacaaacycccatgacacaagtttacctaagtaacaaacttgcactgtatccctgaacttaaaagttaaaaaacatttgttctttgaaaaatgaccatagacgagactatagtttctggaagtggttctcactatcacaatacag

SEQ ID NO: 633494 - DNA, 411 bp, Homo sapiens
gcttctggcctccagagaaatgagttaatcagtgggtgtggctgtaagccactatgtttgtggtgatttgctatagcggcaataggaaaccagtatagccctcaagctgaccacttcctggttgaatctgtgaatacaatgggatraaacgcctatgattaggttagttcacgttaatcgaaaggcaggctatctaggtgggccttacctaatcaggtgagccattaaaagttccccgcccttcctgaaagggtatttgactccagggatattctccattgctagctctgagaatagaggggaacatgtgggaagaacttgagagtggactccagttgctatgattgatcactgccaacagtcagcaagaaaatgggaacctcaattctacacccacaaggagctgaattc

SEQ ID NO: 633495 - DNA, 357 bp, Homo sapiens
tggctcaaaaagatcatccctgtaccaagcctcagggattctagtgtgacccaacctctcccagtccctataggcatctctttcaaacatcagaactggtgcagactcaatagaagaaaggtgtgactccaagatgtcctccctcacagccctttatcacaatggggctctcttcacygtagaagggaaggctgaggctcagaaatatggtgtaggcttggactttggaaggagaatgactaagctgaagttcttcctctgccatttacaagctgtgtgactttggaaaactttcttaatgtttttgcttttaatttcctcatgtgtaaaagatggggttgtcatacttaggtttaa

SEQ ID NO: 633496 - DNA, 498 bp, Homo sapiens
gttcttacttcccaagtgcctgggaagagagcttgcagctctttccaattcctgcctctcatctcttcctcctcggacactgcagctctccgtttctggaaaatctcagggcagaatctgggctccttcccactttcctctgtccagaattctaaggatgcctgggagaakgcatctgccctgaatgaatgggtcagaggcatgattccaagtgactggctggtaattggaagagctcagtggtctggctggggagatgagagcctgctaagcacatctggccagcatcagaatcacaaattgaagagagcttggaaggactcagcccccactgacattcacaaaggaaggaaaatgtagggagccagacagaaaggagtgatgctcttcaaagtcaacaggcttataacaaacaccatctcataggtgaaagtgggagcacagaacaggcacactcagctaacacacagctttctgagggaggtcatcctccaccaa

SEQ ID NO: 633497 - DNA, 528 bp, Homo sapiens
ctagactagcaccataatccagtgatttcatttaaaaagaaaaatgaatggtgaggaatgtgcctccctgatcctagtgagttttcagattctctagtatatagtaaacatacaagaaagcagagaaattcatagggaaaaaaatggggactttgccctaagaattgtcaaggggaagctggagagaatcaaacattagggaaaatctcctgcgaaatgatttgatagaagaatccctgactcatcacagcatcattccatggacaaagaccataggtgttcttctttcatgtaaggaagtttattataggcctggagaaataatcgggktattattagctaacattaggataggagttctaagtgccaacacatagaatatgtgttatttcattgaactttgacaaattatctctatttcagattatgaaaaatctgtgatccctatttgcagattatgaaactcagagcagttaaacaacctgctcaagccacataatcaagtggtaaaaccaggattttaattta

SEQ ID NO: 633498 - DNA, 561 bp, Homo sapiens
cactaaatctcatagggccttcgtgtcctcatctataacacagaggctgtaataacctatcaaaaatgattgttaagaggattctttgggaaaatatactcaaaaatgctatgaaaattcttagtatagagtgaagagccatctaggttgtaagatgaaagccatagactgaggatggtaaaaccccaaggtagaaggattctcagcaacacagtggactctcaacyacccatgcccagagatgggggtaaagttctatgtctttgaaccactgttagtgtggcttgttgtagtagctgagcctgtatctcaatccatggagatgttaactagactaaagaataaagtaaatcagctgtatctctagcagaaccatgttcacaaatatatttccttagagaatttctttctctaatcatttacctatagattattttactattgaaagatgtgtatgtgtgtaaatttttttgcaggaatgttctcacgaggaattggcagcctgaggggttctgttttcctttacctttttgtgaaagagatagactcagaaaaggaact

SEQ ID NO: 633499 - DNA, 578 bp, Homo sapiens
aattcaggcattaaaggaattccttttaattttcctgtatgacaagaaaggactgctggtgattaactctttcagcttgtttgtcttggaaatttgttatattttgctttactttttgaaagatatgttcactgggtataggattctaattcagcagtttttttctttcagtattttaaaggaatcattctgtgtcttctggcttccattgtttccagtgagaaatcagctgtaattctctgcattcaatgtctcttttaaaaaatctatggtggcttttaagaattagtctttatcactggctttgagctacttgatgatatgacctcatggtcattttcttagtcttccttttccttagagtttgtggagcttcttaagtctgcaggcttatagtttgtatcaaattaaaaaatgttttccatcattatttcttctawttattttttggttccctttctctctcctttcttttgaggactcaaactacacatatattaacctggttcaaattgtcccaaagttcactgatgctctgtcatttgttttcaatcatttttctctgtgtgtttcatttt

SEQ ID NO: 633500 - DNA, 305 bp, Homo sapiens
caggattgggctgaccctggtcagtctttccagcatcctttcccctccttcctgaactccctgtgctrggctattcacacagtaccctggctgtgccaggttttcctggcttcccctgatgtctttgtgccaggttctcctggcgtcccctgatgtctttgcacatgctgtgacctccttctggaaggtcctccttctaccatgttcagcagagtccaagttatcatttatcagctttggtatcactcccttcatgggacctttcctggcgctaggcagaattgggtctccctcttctatctccc

SEQ ID NO: 633501 - DNA, 364 bp, Homo sapiens
ctggtcagtctttccagcatcctttcccctccttcctgaactccctgtgctgggctattcacacagtaccctggctgtgccaggttttcctggcttcccctgatgtctttgtgccaggttctcctggcgtcccctgatgtctttgcacatgctgtgacctccttctggaaggtcctccttctaccatgttcagcagagtccaagttatcatttatcagctttggtatcactcccttyatgggacctttcctggcgctaggcagaattgggtctccctcttctatctcccaatagtgtgttagcacttagcggagtttcctaataactgttttcttgtcaatcttcctcattatatttggacctc

SEQ ID NO: 633502 - DNA, 432 bp, Homo sapiens
taatcttcaggattgggctgaccctggtcagtctttccagcatcctttcccctccttcctgaactccctgtgctgggctattcacacagtaccctggctgtgccaggttttcctggcttcccctgatgtctttgtgccaggttctcctggcgtcccctgatgtctttgcacatgctgtgacctccttctggaaggtcctccttctaccatgttcagcagagtccaagttatcatttatcagctttggtatcactcccttcatgggacctttcctggcsctaggcagaattgggtctccctcttctatctcccaatagtgtgttagcacttagcggagtttcctaataactgttttcttgtcaatcttcctcattatatttggacctcctttaggagagggctttttaaattattcttaatttatttccttta

SEQ ID NO: 633503 - DNA, 564 bp, Homo sapiens
tttctgttactgtctttatgtttaaatgtcatctaagcaacattttctacagtaaccactacaagtttattaagaatggattttgggggaaacccatttggaaactgattaatttttcagatgtcctatctcagcacttyagttgattgacaacacatagtgcagttgtcaagctacgttagaccaaaagacctcatgcaggcagttttggttttctattaaaatgtaatttataataggtattatttagctgtgctttttatttgcaaggtataaagcattacagttgacccttgaacaatacaggtttgaattgccccagtccacttgtaagcagactttttccaataaaatttatacttaatgtgcctgcctctcctgcctccccttcccctttctccacctcttctgcctcctccgaaacagcaagatcaaccctttctcttcctcctcctcagcctactcaacatgaagacaatgaggatgaagaactctatgataatccacttccacaatgaatagtaaatatattttctctgccttatgattttcctaataatattt

SEQ ID NO: 633504 - DNA, 522 bp, Homo sapiens
tagtgacatgatattcctttgagttgctcaaacatgccttgctttctcatttccagccttcatatatgctgttctctctgcctgggacactgttcttcccattactcctcattgctcaagtctagatttaaatctcacttctccctgaaggtcttctctaaactctaggcccggtaagatgttgctgcaatgtatcctcatagcaccctgtatttcyccacttagggagttatctgctttctccactgaacaataagattcacaatatctatctcggccaccaggaacatgcatgatatatatactctgtaaacattagctgaatacatatattgatgaatgcatcagctgtttcaatcaccttcacgtgttaagacaatatctcctttcacatatgaattgaccaaattctaatgagcttaagagatttgtccaacaccgctatagcattttggcatcagaactgttactcaagtctcccatttttattattatattatttatggttacaaaccaaaatat

SEQ ID NO: 633505 - DNA, 551 bp, Homo sapiens
cttttctttataaattacccagtcttgggaagttctttatagcagcatgagaacagactaatacactttcttattcaaatatcaagaaagagtcataggttttccccattactgattcccrtcaatttctctataacttctcgagagcaccacttgatgtctactaggctcttacaggtaccattctctgcacttacttgtatttattcatttgattcttacatctaaacaactggtctaaaacccactgctagaaagtaataaagtcgggatttgaattctgttcctctggcttcagaccctgagcatttagccacaataatacattatttccccctccatgcactggaatctgcttttgcatctaccatttgttcattcattcactcttttgacaattctagactgagtgtctacaatacgccataccctcgtgaagcttatattccaaaggaaagaaaaaatgaataaattaaataagttaaatatatatatacagtaggcaagctagtaatcaatgctaaggataaaaaaattaaacaggtaagaga

SEQ ID NO: 633506 - DNA, 615 bp, Homo sapiens
ctggcgaggttgtggagaaaaaggaatgcttatacaatggtggtagaagtgcaaattagttcaaccattgtggtaaacagtgtggcaattcctcaaagacctaaagtcagaaatcccattcaactcagcaatctcattactggatttatatgcaaaggaatataaatcattctattataaagacgcatgcacacatatgttcattgtagcactattcacaatagcaaagacatactctcaacctaaatgcccatcaataatagactggatacagaaaatgtggtacatatataccatggaatactatgaagccataaaaaagaatgaggtcatgtcctttccagagacatggatggagctgggggccattatcctcaccaaactaacacaggaacagaaaaccaaataccacatgttctcacttacaaatggaagctaaatggtgagaacacacggacacatakaagggaacaataaactctggggccttttggagggtagagggtggaagaaggaagaggatcaagaaaatcaactaatggttactaggcttaatacctgggtgatgaaataatctgtacaacaaacccccatgacacaagtttacctatgtaa

SEQ ID NO: 633507 - DNA, 615 bp, Homo sapiens
ctggcgaggttgtggagaaaaaggaatgcttatacaatggtggtagaagtgcaaattagttcaaccattgtggtaaacagtgtggcaattcctcaaagacctaaagtcagaaatcccattcaactcagcaatctcattactggatttatatgcaaaggaatataaatcattctattataaagacgcatgcacacatatgttcattgtagcactattcacaatagcaaagacatactctcaacctaaatgcccatcaataatagactggatacagaaaatgtggtacatatataccatggaatactatgaagccataaaaaagaatgaggtcatgtcctttccagagacatggatggagctgggggccattatcctcaccaaactaacacaggaacagaaaaccaaataccacatgttctcacttacaaatggaagctaaatggtgagaacacacggacacatagaagggaacaataaactctgggrccttttggagggtagagggtggaagaaggaagaggatcaagaaaatcaactaatggttactaggcttaatacctgggtgatgaaataatctgtacaacaaacccccatgacacaagtttacctatgtaa

SEQ ID NO: 633508 - DNA, 637 bp, Homo sapiens
ggctgcattccattctgaaggctctggggaagaatcagtttccttgccttttccaatttctagacggcattaaccttgcttgtctatggcttatgttctccatcttcaaagcctgcttttaaagagtcctgtgactagattgggcccaccaggataatccaagataaactatctcagggtccttaaccttcatcccgtctgcaaagtcccatatgcccttaacatagtcacaagttataggatcagacctgaacatctttgtkggggggcggggaagagaggactttattctgcctaccacacacctcaagctagtgaggcttccatacacttctatcagatctgtgtgggttatcaaagttcaggaagttttcaggtcagccctggccgttactctcaggtaggccatctttcatcttctctgcatgtgctctgcatcctcgtgcaccagggatctgtgaagcccctttaggactatctggtttcctgaatctccttgttaactttctggttagtcttccaccaggactgcaatctcaggttagtagagttgttggctttcccagtttactggtcacgaagattgctagcattactgacagggatgatggatatggatttttttttccctcccatt

SEQ ID NO: 633509 - DNA, 622 bp, Homo sapiens
caaatgccctggatcaggttgagcccttgagtacttcctagctgagatccaaagacaaggttcaaatacaagatccacaatttatttattggtgtggagtcttaggcaaacttcctcactttttgtagcttgtttccttgattgtaaaattgacatggcaattttttttctgtgcctctcatgtggcttgggtgaaaatcatatccaatgatggataagaaagaacttcctagaaatgctgtagatgactattgttatgatgataattgataaaaataaatgcatggaatgttgctatttcctgcattctttcatgaaagctgagggtaaaagaaaggtgcagtcaaggrattgagaaatatcacattggccaacatattgaaccaacttgaagaaattaactaagtttttagggctttttattatctcttagcaatgaaacagagtgggctagactgaatccaaagcgttcctgtacctcatgtgtaaaggcagtgtagactaatggtttggagtcaaattacctggattcaaatcccatctctggcaactaggtagagctacttaagcagtagcttagtgtctctgtgcctcaatgtgttagtaaaatgggaacgatttt

SEQ ID NO: 633510 - DNA, 646 bp, Homo sapiens
cgggcactgcctcgagttcctttctcctgcctatttgcatttgcgtttgagaaatggagggggtgggcagggtgaagccaagtcatcattaaaacttcttgaatagagaatttcatggtggaagaaagccctaaagatcacgtgcagcagacagcctttggggaactcacccagctcccaccgtataatctgagaacagttgttctgccttgctctccccatcccatgtaagcagaaatggactctagtccatgttcttagggaatatttcttattctctagtcacagctgattgggcaagtagtgggtacctggctcaggagaacaacccagaacctgggctggcccaatcataccctccccagaaaatttggaattgggttgcagagataattgtttagcttgctgtgtgtcttgaccttctcagatgatctagaattgagatctgaaggggccatcttgggtaatgggatgtatgtagtacaacaggaagagctcatttgcagagagaatgctttgaaaacaaactgaatgacwatgtaatgaaagagagtgaaaaagagagagagaaagataagcaaataaagaaaaaaaggaagcaagagaaagacagggagggatggccttggcagctgaatgacttttg

SEQ ID NO: 633511 - DNA, 577 bp, Homo sapiens
gctgattttgagataaaagggagattatgtgacttcatcagttaacagctcttaaaagaggaactgggcccctcctgagaagagagatactccttakgcctggaaggactaagctgccatgttatgagagggcctatgagacagtcgtgtgatgaggatctgtgagcagtggcctctagggctcagaatgacacccaactgacagcctgcaaaaaaacaagaacccttgtcctaaaactgcaaagaaattaattcttccaacaactacatgagcttgaaagaggactcaagctccagaaagaaacatggcccagccaacatcttgattgcagtcttgtgggaccttgagcagaggacccagttaagccatgcccagatgcccaatctatggaaacagtgagataatgaacatatgttgttataggccacaaaatttgtgataatttgttacatagaaataaaaaactgatatagattctagatacattccatcttgcccactaactctaatgattgatcatatctgcttggagcaatatattgaaaagaattctaagtctgcatctaagctcagtta

SEQ ID NO: 633512 - DNA, 433 bp, Homo sapiens
aaaaagcactctaaggagaaggactggcatatttaaatgcagtgtgataggagggggcacgacacagtctaggagayggacaatgagtgtggctgaagcatcaagatagcaaggaagagtagctcaaaatgaagataggataaagaggagtgaataggcaggagcagccccttgtgggccacagtgggaatcgatgagaagctgccaaatgattttcattctattggaattgactaacccaaaaggtgaggaagagagggatagcatgttcacatgaagtttaaaatatggttctggccatttgtgtggagaatggatgagaagtaaaagatagaacagatactgagagaattgttttgccattgttacagtggtctgggctagagacaatgatggcttaatatggcaatagaagaaatggcacaaagtaaag

SEQ ID NO: 633513 - DNA, 596 bp, Homo sapiens
aatcaggtcgaagaggtggaggggccagagcatgcagaacttggactgcagaatttataccaagtgtaacgagaaaggctgtaggaggctcacctggatgaggccagggtgcatttggtcaagtggagggtatgcagtgtaatggaaagagcactggacaggccaggagatccaggttccacttctgactttccccctaacatacattgtgactttgggtaagtcaatgtccttctctgggctttagtcactactagtcgtgacctgagagaatgactcagtgattcctaaggtccattcagtcctgacattccatggacatttgagcagagtcaaagagggcatcctgtgggccccagtctgaaagccttcgaagtctttcatatgtgaatataacttgcttttccagggccttccatcattccctccttcccccctagttttaycatgtagagcagcaccaagtgcacaagttcaaatcttgactctgccactacatttgtatgtaactttgggcaaggggcttaactttcttgaacttcagctttctcatttgcaaaatgccaataataatcacacccacctcatggggctgt

SEQ ID NO: 633514 - DNA, 572 bp, Homo sapiens
gcccaaacctcactcccacactgtattgatttagaaggaaaactcccaaaaggtcagggcagtagttctcccttctgcttctgattcattaaacctggtgcaggatgcagggatataaatttttaataaggctttccgagagattctgatgcaaggagccacyatactctgaaaatcacagcttaatggaacttgctcaaagttacccaggtaaaggagaccaagacaggattggccttaagaaatgactctgcctgcagagtccaaactccagtgagttctccttccactttgtgcacaacctaaaaatattttcaaataaattaaatttttaaaacttttcaaaattgctacatatagaaagaaatttcacatagagaaaactagaagagaatatgccaggatattagtaatagagtctcttggaaaacagaattgtaaccatcttttcacttttatctgcttttttatattttctgattttcatgcaataaatatatattctatgtaagacatctttgaaggtaaaccttatgcttaatatttatttttatattttagtttcgtggaca

SEQ ID NO: 633515 - DNA, 428 bp, Homo sapiens
gtcagggcagtagttctcccttctgcttctgattcattaaacctggtgcaggatgcagggatataaatttttaataaggctttccgagagattctgatgcaaggagccactatactctgaaaatcacagcttaatggaacttgctcaaagttacccaggtaaargagaccaagacaggattggccttaagaaatgactctgcctgcagagtccaaactccagtgagttctccttccactttgtgcacaacctaaaaatattttcaaataaattaaatttttaaaacttttcaaaattgctacatatagaaagaaatttcacatagagaaaactagaagagaatatgccaggatattagtaatagagtctcttggaaaacagaattgtaaccatcttttcacttttatctgcttttttatattttctga

SEQ ID NO: 633516 - DNA, 554 bp, Homo sapiens
atcacactcaataatttcaaattataacacaaagctacagtaatcaaaacagtatggtactgacatgaaaacagacagatagattaatgaaacagaatacagagcccagaaataaatctaggcatatgtggtaaactaatctttgaccaaagtgccagtacaaaattgggggggaaatccctttaataagtagtgttgcaaaaactrgatagccacatgcaaaaaatgaaataggactcataccatatacaaaaattaactctaaatggattaaagacttaaatgtaaaatctgaaaccatataactcctggaagaaaacataggagaaaagcactttcacattgctgttggcattatttttttcgataagacataaaaagcccatgacaacaataacaaaaagaaacaagtggaattacttctttgaaactaaaaaacttctgtacagcaaatgaaacaatcaacaacatgaaaagacaatgtagagaatggaagaaaatatttgcaaactatatacctgataaggagtttatatccaaagtatataaggtac

SEQ ID NO: 633517 - DNA, 551 bp, Homo sapiens
tggaattacttctttgaaactaaaaaacttctgtacagcaaatgaaacaatcaacaacatgaaaagacaatgtagagaatggaagaaaatatttgcaaactatatacctgataaggagtttatatccaaagtatataaggtactcacacaactcaatagcaaaataaatatgtaaacaacctgattttaaaatggtcaagttacccgaataggcatttctcaaaagaagacatacaaatggccaatgggtatatgaagaggtgctcaacctcactaattgccaaataaatgcaaatcaaaatcacaatgagatatcacatcacacttgttaaaatggctactaacaaaaagaaaaggatgtgttgaagttttgtgtgacaaaaatccttgtayacagctgatgggactataaactggtacaagcattgtaaaaatggtacagagcttcctcaaaaagttaaaaatagaactaccatatgattcagcattcccacttctgggtgtatatccaaaggaaatgaaatcagtatgtcgaatacatatctgcactc

SEQ ID NO: 633518 - DNA, 421 bp, Homo sapiens
actcttcaaagtcaggaagtcatatactgttaatcagtacatacatcatgtgaaacaacacacctccacacacccaaatctcattattccttcaagagctagtctctccctgtagtgttcccaaaccagtgtttgtttcctgccaaccctctactcctggaagtaatttcttcttcaactgaatatccatagcccttmaactatgtaaataaatattacttatcactatctaaattatttatttacataccagagcttccctaccatctataaggaagttgacatacattttctttctataaccttttaacatctggtatggaggcttagacacagttgatagtccataaatattgaatgcatgaatgatgataaaaagtaataatatgggcagcttcctaactagaagttaagtgaatgt

SEQ ID NO: 633519 - DNA, 514 bp, Homo sapiens
tctttgactctggttcacatcccaactctgccactcaccagcagtgtctctttacaagttaaatgagcttttatgcctggtttttctttatatatgtttcatggggtgctctaatttgtttgtttgcttgtttgttaggaatagataagataatgtataggaatcatacagcctcataatgtaatatataaaataatacacagaaattataaaccctcaataaatgttaatagtaatgagtattagaaaagattattttaacatgggtgtgacagccattacaacaacacttcaatgcacacgctcccacacacacacacacacacacacacacacacacacacactgagtcgagaatcaataagagttgccmaaggtttgcaacatgaacacttttcccctctgggaaactcctctctccttcagtagaaatctaactaatgaaaacaatcaattttttgtttgtttgtttgtttgttttgtgtgtgtggttttttttttttacctagagcca

SEQ ID NO: 633520 - DNA, 514 bp, Homo sapiens
tctttgactctggttcacatcccaactctgccactcaccagcagtgtctctttacaagttaaatgagcttttatgcctggtttttctttatatatgtttcatggggtgctctaatttgtttgtttgcttgtttgttaggaatagataagataatgtataggaatcatacagcctcataatgtaatatataaaataatacacagaaattataaaccctcaataaatgttaatagtaatgagtattagaaaagattattttaacatgggtgtgacagccattacaacaacacttcaatgcacacgctcccacacacacacacacacacacacacacacacacacacactgagtcgagaatcaataagagttgcccaaggtttgcaacatgaacacttttcccctctgggaaactcctctctccttcagtagaaatctaactaatgaaaacawtcaattttttgtttgtttgtttgtttgttttgtgtgtgtggttttttttttttacctagagcca

SEQ ID NO: 633521 - DNA, 652 bp, Homo sapiens
tcaataaatgctgataatgacagtagtgatgatctatatgatcagagaagtgattggaatccccacaatgctatgcacagaagtgggaaggggyaggaaggtggaatctcacattatctaaagcttgttggctggagtcatccatgcacccgtcaggaggttcagcccagtccaagtttagaggccatctgaccaggtaagcgagtgtatcagctgcctcagcccactgtctgccaggtgtctagtgcctggtaatacttaatactgtaccagcccatgtcatctatgtgcctacctttacatagattgttctgtctctgtggctaagcatctgatagatcattctggtccaatatcatttatatgtatctactatcttccatctatctatatatttatctctatcacttatctaatttctctcatctattatctactatcttctatctatcatctatcaattatctactattatctatcaatcatctatcttatctatcttccatctatctatgtatctatcacctatctaatctctcatctattatctatgttccatctaactaatctatttatctatcactagtctgtctatgtctttatcatctatgtatgtgtgtatggatggatgtatggatgtatggatgtatct

SEQ ID NO: 633522 - DNA, 652 bp, Homo sapiens
tcaataaatgctgataatgacagtagtgatgatctatatgatcagagaagtgattggaatccccacaatgctatgcacagaagtgggaaggggtaggaaggtggaatctcacattatctaaagctygttggctggagtcatccatgcacccgtcaggaggttcagcccagtccaagtttagaggccatctgaccaggtaagcgagtgtatcagctgcctcagcccactgtctgccaggtgtctagtgcctggtaatacttaatactgtaccagcccatgtcatctatgtgcctacctttacatagattgttctgtctctgtggctaagcatctgatagatcattctggtccaatatcatttatatgtatctactatcttccatctatctatatatttatctctatcacttatctaatttctctcatctattatctactatcttctatctatcatctatcaattatctactattatctatcaatcatctatcttatctatcttccatctatctatgtatctatcacctatctaatctctcatctattatctatgttccatctaactaatctatttatctatcactagtctgtctatgtctttatcatctatgtatgtgtgtatggatggatgtatggatgtatggatgtatct

SEQ ID NO: 633523 - DNA, 652 bp, Homo sapiens
tcaataaatgctgataatgacagtagtgatgatctatatgatcagagaagtgattggaatccccacaatgctatgcacagaagtgggaaggggtaggaaggtggaatctcacattatctaaagcttgttggctggagtcatccatgcacccrtcaggaggttcagcccagtccaagtttagaggccatctgaccaggtaagcgagtgtatcagctgcctcagcccactgtctgccaggtgtctagtgcctggtaatacttaatactgtaccagcccatgtcatctatgtgcctacctttacatagattgttctgtctctgtggctaagcatctgatagatcattctggtccaatatcatttatatgtatctactatcttccatctatctatatatttatctctatcacttatctaatttctctcatctattatctactatcttctatctatcatctatcaattatctactattatctatcaatcatctatcttatctatcttccatctatctatgtatctatcacctatctaatctctcatctattatctatgttccatctaactaatctatttatctatcactagtctgtctatgtctttatcatctatgtatgtgtgtatggatggatgtatggatgtatggatgtatct

SEQ ID NO: 633524 - DNA, 404 bp, Homo sapiens
actgcttatcacttgttgctgaagatattctgttyttcacccttaagaaaagggtgacttttctcctttcccagcatcacttcttaatagtatggatgaattacttttgcaggttaaaatcatcccaagttttagctttgagcattttcaagtcaaaattttttatctattaaaatattttcttttctgagaaggaaaaaatcctgccagtaacgcattaaaaagtattttataggttcagtgtgaagcttatttaacttatgtgagccaagttggcattttagattgtaaaactgaactgaaatatgaattatggaaaattaatttgtaaagttgaaattttatgaaatactttctgcattttgtttagaccagcatgttttggaaatttgatcttcactcat

SEQ ID NO: 633525 - DNA, 590 bp, Homo sapiens
aaatctccttgcataaagataatagccttgctttattatgatcaacttgagctgctgctgctgctaacagcaatgtcactttacatgtgcaacatcttgtggttgctgcaatgtatttcaatctacattaacttattgcacccttgctacagcacagcaagacagataggacaggtaacgttgtgctcattttgcagatgagggaggatgctgccatgaagtgacaggcacaagataggcagcattaaaataaggactttagacaaattaaatttagcagagtttacttgggtaaagaatgatttgcaaattgggaggccctctgagtcaggatacgttcggagcaactccagtgctgctgagtggttggaaaggatttacggacagaaaaaggaaagtgaggcacagaaaacaaacagacgtgaggcacagaaaaagccagactggttgcagctcagttttgccttagtggaacttgtttgaacagctggctgcctgtgagtggctgaagtctggttgctgtgtttggctgagacttagctattgtttcaaragtaggttacgtctagctatgcatccagttaggctac

SEQ ID NO: 633526 - DNA, 546 bp, Homo sapiens
cttcttttgttaggagacccactcaaaactggcagcctttctgggtgcttcaacaaatggctcagagtgacatgaccaaatgaggtatatattgtctttaagatccaaaaaaggcccattagattttgcatttctttctagagaagattctagatacagaaactcacctttcaccttggaagggatttttaaaatgccttggaacatgagactcctataccttttcactgagatggaaggcccctgaatttttgtgggacttatttctaccctctgttacacatatgtcttttcaaagtgtctaggtcagtttcccctcaactcacttcctgctcaccaggtccaatcagcatgatatcatcarttatcttcaatggagcggaccagcacgatgtcccatggaatggagaggcagtcaagatccctgtgaattagattatgacagaggaccagagagctgctataaccctgagttagttcagtgaaggtgtattgctagccctgccaactgaagacaaactgcttctggtgatctttaccaacagg

SEQ ID NO: 633527 - DNA, 546 bp, Homo sapiens
cttcttttgttaggagacccactcaaaactggcagcctttctgggtgcttcaacaaatggctcagagtgacatgaccaaatgaggtatatattgtctttaagatccaaaaaaggcccattagattttgcatttctttctagagaagattctagatacagaaactcacctttcaccttggaagggatttttaaaatgccttggaacatgagactcctataccttttcactgagatggaaggcccctgaatttttgtgggacttatttctaccctctgttacacatatgtcttttcaaagtgtctaggtcagtttcccctcaactcacttcctgctcaccaggtccaatcagcatgatatcatcagttatcttcaatggagcggaccagcacgatgtcccatggaatggagaggcagtcaagatccctgtgaattagattatgacagaggaccagagagctgctataaccctgagttagttcagtgaaggtgtattgctagccctgscaactgaagacaaactgcttctggtgatctttaccaacagg

SEQ ID NO: 633528 - DNA, 602 bp, Homo sapiens
ctgcctgacatctgatactttccatccaacctggatccaaggggaacggaggtctctgccctcctaatctcaggctcccaatcaacactggccttcacctgtctagtccacagggattttgcagaatatacagtcactacccaaacttcttgccttaaaaaaacacagggcattgagtaggaagtaagagagggagatgttgkcaaaatgaaacaaagtttcagttagacaggaggaatgagttcaagcaatctgttgtataacatggtgactatagttaataacttggtattgtattcttaaaaattgctgagagtagattttaagtgttctcaccacaaaaaagaagattatgtgagataatgcacatgttaattagctcaatttagccatcccacaatgtatgcatattttaaaatgtcatacacaataaatagatataatctttatttttcaactaaaataaatacaaattacttttaaaaaaacacaggacattgcattcacatagtcagagttaggtcccataagccagtggtccttaacttttttggcacaagggactgatttcatggaagacaatttttccacggaccaggggg

SEQ ID NO: 633529 - DNA, 602 bp, Homo sapiens
ctgcctgacatctgatactttccatccaacctggatccaaggggaacggaggtctctgccctcctaatctcaggctcccaatcaacactggccttcacctgtctagtccacagggattttgcagaatatacagtcactacccaaacttcttgccttaaaaaaacacagggcattgagtaggaagtaagagagggagatgttgtcraaatgaaacaaagtttcagttagacaggaggaatgagttcaagcaatctgttgtataacatggtgactatagttaataacttggtattgtattcttaaaaattgctgagagtagattttaagtgttctcaccacaaaaaagaagattatgtgagataatgcacatgttaattagctcaatttagccatcccacaatgtatgcatattttaaaatgtcatacacaataaatagatataatctttatttttcaactaaaataaatacaaattacttttaaaaaaacacaggacattgcattcacatagtcagagttaggtcccataagccagtggtccttaacttttttggcacaagggactgatttcatggaagacaatttttccacggaccaggggg

SEQ ID NO: 633530 - DNA, 563 bp, Homo sapiens
gaaataaaaatcaagagagaacaacaaacagaggacaggttatagtccccggcagtatgggctcctgtgtgtggggtctgcatagagagtcacaggcaagtcacagctgctgctgactggggactcgcagaaaaggccaaaaaggaagagctgatggctccgtagagagagtggaacaaagttcctggccacttccaaaactcaacatttgcaatcaagactgtagagactgggaggtggcacaraaaggtctgtgcagccctggggcccacgaatctgtagactcgggcacccatcaccttgcagggtgcctcctggcagtaatctatatgtgtgttgtacagcgccttcctgtccataaactccgaatgttgtttttcttatagtctcagaatggccctaggaaaggatcaggaccatgcctaaaactaataacctgaaggaagtaatggagtattgcaattgctctgtccctttcttgggaaggctcaactggaaatagacacatcatccccttcttggaaagtcggtcgatccaaaccacctcagatggaaatgatttc

SEQ ID NO: 633531 - DNA, 533 bp, Homo sapiens
gtgtgtgaagtactacggtattcctgttattgctactargtttgagtccatgacatctagtatcttcttgcctctcttccttttgacctgacagttaccagccatccactcccctctggaaactgaaatctgcacaggcacatttccttcacaaagagttcacttgaccctgacccaaacgtcctcaaccttgcatttgacccagatctggccctcctcactaaagcctcctgcactggcctccatctgccctggggcccttttcttctcccagggcagttgttttggagtctgtttatggcctgtgcagacacttggctgaaatttacctcagtctctttccttttttcattgaagttcttatccattttctaatcgtgtcctgcctccaaaagaaatttctctgttatggtcttcctcaagcatagttctctaaatttcaaatggtttagacagaataagctgtgactgtagaattcttgccagaataagctatgactgtagaatgtgacaggataggatgccacctcctc

SEQ ID NO: 633532 - DNA, 497 bp, Homo sapiens
ggtttgttgagggcacaaatgcagctggacttgggaaagtgagctcgggtcttgctggagaggactgggttctcagctcagcgctgccagttggagaggcagggacccgtcctggagacagtggctgacccatgcacccagaaaacctgactttctcttctcatgcgactgaactcttcctggacagcctgcgggaggcacaygtgacctgcagaggcaccagccttgtggcttcagggctgggcaggcgctgcccctcggggattgtaattatgttgatcagaactgtcttttccctgggggaaggagggcccttctttttcttcttcatttttccttaaaagaaataaaagacaaaaacaaaaaggactcctcttcatttccttcaacgtgctatggcatcttcggaactagggacttgaaacctaaagctgatcctaatttctgatggatagaatgtgcgtttggggttcttttccacatcaaattaaatctgt

SEQ ID NO: 633533 - DNA, 565 bp, Homo sapiens
tttgaagatttttttatttccatcttgatttcctttttgacccatcactcattcagaagcaagttatttaatttccatgtatttgcatggctttgaaagttccttttggagttgatttccagttttattccactgtggtctgacagagtgcttgatataatttcaattttcttaaatttattgaggcttgttttatggcttatcatatggtctatctcagagaaatttccatgagccrttgaatagaatgtgtattctgcggctgttggatgaaatgttctgtatatatctgttaagtccatttgttccaaggcatagtttaaatgcattgtttctttgttgactttctgtcttgatgacctgcctagtggtgtcagtgaagtactgaagtcccgcactattactgtgttgctgtcatctcatttattaggtctatagtaattgttgtataaatttggaagcgccagtgttaggggcatatatgtttaggattgtgatgttttcctgttggacaaggccttttaccattatataatgtccttctttgtctcttttaactgctgtt

SEQ ID NO: 633534 - DNA, 387 bp, Homo sapiens
gggagggcatcttagccttcactccttctactgcaggtttgaaactcaggctccyttaaaggtaaaccaggatatcacacagataataatagtatgataataaactcacatttgtatggtgagttaggatttacagtttccctacatttttttcatttaatcccagagccagagccaccagaacgtatgtggtcctcacatgttcctccacaaagagactgatggagagacaatgaggttaggtagacagcaagaacaattttggccgcctcattttctcaactaatttgagatttctcttccaggctgctggtgccaagagatgggtggatcgacaggtcttgttagcaaggacaaaggaaatgttttgttattggcttagctgtt

SEQ ID NO: 633535 - DNA, 323 bp, Homo sapiens
tcccccaaggcatgaatgtcttcatgcctttctcacagygcgagagctgcttgttacaatgaacctaccccccacccacccctctcttgctccctctttcctcatgtgatccccacaggccagctcccctttgtcttccaccatgagtggaagcttcctgaggcctcaccagaagcagatgctggtgccatgcttcctgtacagcctgcagaactgtgagccaaataaacctcttttctctgtaaattacccagcctcgggtattcctttctagcaacacagttggactaagatagccaggcagtgggaagttgggagacacc

SEQ ID NO: 633536 - DNA, 323 bp, Homo sapiens
tcccccaaggcatgaatgtcttcatgcctttctcacagtgcgagagctgcttgttacaatgaacctacccccyacccacccctctcttgctccctctttcctcatgtgatccccacaggccagctcccctttgtcttccaccatgagtggaagcttcctgaggcctcaccagaagcagatgctggtgccatgcttcctgtacagcctgcagaactgtgagccaaataaacctcttttctctgtaaattacccagcctcgggtattcctttctagcaacacagttggactaagatagccaggcagtgggaagttgggagacacc

SEQ ID NO: 633537 - DNA, 536 bp, Homo sapiens
tcatttgctagtgacttaagagtaccaactttccctgaaggaaaactactcaattttagtcaaatatttgacaagcaattaaaagtcgtatgacagaggcctatctgctgaagggaaggttattttagaagcacctgctatcgtttcaggtttctggttgacaagtcttggctggagtgggcctccccctctatgggcygaatgtgggaggagattgtccagtgtgaagaggctgtgacactcactcatggttagatctcacttcactgtctaagatttctttaggattcttgccagaaattggtcagcaggttaaaagcaacttgaatatcatgagggcaagatcgcaacgacatcctgacatggcaccatctttcccatttctgccctcccagtggccctcccctctcacagggtgccgccctgctccccacttgcccagccttccctcctgcttcatcatcctaccccatttcatagatctgtgtccctaggacacagatgcatttagcagaacactttctccacccttattc

SEQ ID NO: 633538 - DNA, 592 bp, Homo sapiens
tttaagagcaagagttcaaatctggctggacacagtggctcacacctgtaatcctactgctttggaggctgaggcaggtggatcgcttgagctcaagagattaagacctgcctgggcaacatggcgagaacccctctctacaaaaaaattaaaaaataaaaaattatccaggtgtggtgatgtgtgtctgtggtcacagctgctcaagaggctgaggtgggaggactgctttagcccaagaggttgaggctgcagtgagccatgatcacgctactccagcctgggcaacaggacaagaccctttctcaaaaaaaaaaagaagagttcaaagatcttagctttgccrgttgttggctgaataaccagataaccttaggcaagttacttaacctccttgagcttctctttctcagtctgtaagttggggatcatatgagctcactggatttttgtgagcaatttctcttcatgatatgagaagtgcttaagacagtgcctgaggcctaattagctttcatttgaattcacatttattcttttaaaaataatagcattattaatctgatacctaatttcaggaatgtcaggtgat

SEQ ID NO: 633539 - DNA, 486 bp, Homo sapiens
gaattcctaagtcacttctgagtctcctccaagccatacaaaaagtgtgacattttgtaaatgggctggaggcccacattcgccaaagccaggttcagcctgtgtttatgctggaagctcaagttctcaacagctccccacatggagaaagttcacctgggcctcctcagctggagaaagttctcctgggcctcaccggtctgcgactgaacacaaagtgctccagaaacwtccttcccccactctgtcttctgattccactccccacgatcacttatttttcctacaccctcctgcctcagatctcagctccctgactgcataaccacatgtcctaaagcatctaaagaagattaagtccatgttcatggggatcagcaaactgcggactcatgtggtactatcaaaaaagaaagactcacccaaaagtttttccctgtgtgttatatatttctaagaggcattctaactcacaaagtgaatctg

SEQ ID NO: 633540 - DNA, 466 bp, Homo sapiens
tctgagtctcctccaagccatacaaaaagtgtgacattttgtaaatgggctggaggcccacattcgccaaagccaggttcagcctgtgtttatgctggaagctcaagttctcaacagctccccacatggagaaagttcacctgggcctcctcagctggagaaagttctcctgggcctcaccggtctgcgactgaacacaaagtgctccagaaacttccttcccccactctgtcttctgattccactccccacgatcacttatttttcctacaccctcctgccycagatctcagctccctgactgcataaccacatgtcctaaagcatctaaagaagattaagtccatgttcatggggatcagcaaactgcggactcatgtggtactatcaaaaaagaaagactcacccaaaagtttttccctgtgtgttatatatttctaagaggcattctaactcacaaagtgaa

SEQ ID NO: 633541 - DNA, 472 bp, Homo sapiens
aaaagtgtgacattttgtaaatgggctggaggcccacattcgccaaagccaggttcagcctgtgtttatgctggaagctcaagttctcaacagctccccacatggagaaagttcacctgggcctcctcagctggagaaagttctcctgggcctcaccggtctgcgactgaacacaaagtgctccagaaacttccttcccccactctgtcttctgattccactccccacgatcacttatttttcctacaccctcctgcctcagatctcagctccctgactgcataaccacatgtcctaaagcatctaaagaagattaagtccatgttcatggggatcagcaaactgcggactcatgtggtactatcaaaaaagaaagactcacccaaaagwttttccctgtgtgttatatatttctaagaggcattctaactcacaaagtgaatctgagctaacagcagtctaaaatgaattc

SEQ ID NO: 633542 - DNA, 553 bp, Homo sapiens
tggaacacctagagactacatgacttgcccaggattagatatttagcaggaggcaaagctggaatcagacccacgtctctgcaactcccatctctgaatcctctgtattatttgtaggtatgatctggtcaaagaagaaaaaggaaaagaacatgcaggtactttaaagaagcctgggctgatagagattatgcaccatataaatagccaggaacatargtaggtaagtgggtgggtaggtgggaggtagatgggtataggtaagtaagaaaaaaaatacactcaaacataaacatttgaggcaactcagaaaattaaccacaatataaaacagaaaattaaataataaaaacagaatcaaaatcagttgaaaggagcaaataaatggatgccaccaagcaccaggatcggataaatgccaccactggggcaaaacccagtcctaagtccctggtgacagtaggggtgggatatgcttgacatcgataggccaattgaaggttaatttggagaaacaaacatttttttctgtcctgcaggttattgtgaaaag

SEQ ID NO: 633543 - DNA, 556 bp, Homo sapiens
ctgaccataaccactaaaccactcagtgtagggagctcagattacaggcactgtgaaatctgagtaatccttgaaggacccaggacactttcaccagccaatctcccttctttactgcacagttaatagcaatgtgaaagaaaacgtgcgttggcacagaaacagttatgtgacccaaataccacgggctcagctctgcagaccacagccggggtcacacgagaagcacatgggacagagggtgctgaggctacyaagatattgaaagagatttcactgccatggaacagtacataaacacagtttactgaagaatgcatagatgtctacaattatttaggagatagcaaagttgcaaagcactctggaagtatttttggcactcagtgtctgctccacatgtgtgaacacatcatctctctgaaagaggtttgggtaaacctaataaagccctgcagtcccctgatgtataggtagagcagcctttacgttggcctccatccacacccagaagttaatcctgcgacctcttatatgcccttgagtggagtgaggg

SEQ ID NO: 633544 - DNA, 556 bp, Homo sapiens
ctgaccataaccactaaaccactcagtgtagggagctcagattacaggcactgtgaaatctgagtaatccttgaaggacccaggacactttcaccagccaatctcccttctttactgcacagttaatagcaatgtgaaagaaaacgtgcgttggcacagaaacagttatgtgacccaaataccacgggctcagctctgcagaccacagccggggtcacacgagaagcacatgggacagagggtgctgaggctaccaagatattgaaagagatttcactgccatggaacagtacataaacacagtttactgaagaatgcatagatgtctacaattatttaggagatagcaaagttgcaaagcactctggaagtatttttggcaytcagtgtctgctccacatgtgtgaacacatcatctctctgaaagaggtttgggtaaacctaataaagccctgcagtcccctgatgtataggtagagcagcctttacgttggcctccatccacacccagaagttaatcctgcgacctcttatatgcccttgagtggagtgaggg

SEQ ID NO: 633545 - DNA, 382 bp, Homo sapiens
cttgggaaagctatgtgtaagctgctgtccattgttggggagaaacttctttggttaagtttaccttaagggtwctaacaggtatacagttttaagcatctggaggggcccttctgagttgtgagatcatgaacccaaggtctgaagtctcaaagttttgctgtaatgtgggtggtaagggcagtttttctttgatgtcatttttagaagactctatcttgggttctggattcgtgaagggtttgattatatttagttggtggattaagaacagctttctttaatctgaaaatatattttggcataacatgttaaagccttgcagcgtttagtcgtatcagaattcaggagcgaaagatatatgatgttctattattagggg

SEQ ID NO: 633546 - DNA, 582 bp, Homo sapiens
tttcaaccttggatgctcatagaaccagagattttccactgtggaattgtccccgactgtcttcctaaaacagcaccttgccttaaaggcctgcttagagcggacggccactctgccgaattagcagcagggagctagggccagctggcccctagtgattggcaaattgctgctaattattaccaacacgcttcctaattattatctaatccaagaaagctacgtttaatatcacctggtgggccacagaaaattcaattcatgtgaactttagaaacacaacagagcagcactggattcctttcctgttgtattttccttcattgaaatgaacccctgcacctgttcttgctctctccctccttctgtctctttcaacccccgcccaactacatggctataacacttggttgatgttttcctttaagtgcttggctggggtatatagctctgtggtgagaagcrcatctgcctcttcctggaaagctatatgtaaagcaaaggaagctcatcaaacgccccaaaaaggacacaaagacaccttggcagagtgcttttccccaaggctgttattagaagctt

SEQ ID NO: 633547 - DNA, 572 bp, Homo sapiens
attgctgagactttccagagcattttgtatttctaaaagtgtgtccaaagtttcctgaactttttattgttttttcttcaaactatccatttccacgaatatttctcccttcacttcttgtatcattttttggatttccttgcattgggctttggctttctctggtccctccctgattagcttaataactaacctcctgaattctttttcaggtgaatmagggatttgttcttggtttggattccttggtggtccactactggggtttttgtgggggtgtggacaagtcttgtttcgtcatattaccaggttgttttctggttccttctcatttgggtaggctctgtcagagggaaggtctagggctgaaggctgtttttcagatccttttgtcccatgggatgttcccttgatgtagtactctcccccttttcctatagatgtggcttcttgtgagctgaattgtagtgattattgtctctcttctgggtctagccactcagtgagtctacccaactccaggctggtactgggggttttctacagagtcctctgatgtgagctgtttatgg

SEQ ID NO: 633548 - DNA, 597 bp, Homo sapiens
tagcttttatatagagattttaattgctgtcttttaaatagttttttttcatttttttctttttcttttcttcttttttttttttttttgagacagagtcttgctccgtcmcccaggctggagtgcagtgatgtgattttggctcactgtaacctctgtctcctgggttcaagtgattctcctgcctcagcctcctaagtagctgtgattacaggcgcccaccaccacacctggctaatttttgtatttttagtagaggtggggtttcaccatgttgtccaggctggtcttgaacgcctgacttcatgatccgcccttcttgggcctcccaaagtgctgggattacagccatgagccaccacactggccaatagtttttttttctgtttagactatacatccttatacattttatcatcttgagtatttgttagcaagcaaccctaaatttgtatttttaaaggaatgactcttaagtgaaacaaagttgatgtggtttagatgtttgttccctctaaatctcatgttgaagtgtggtgatttttaatgtcggaggtggggcttggtgggaggtgattggatcctgggggtcgaacc

SEQ ID NO: 633549 - DNA, 487 bp, Homo sapiens
gttttagttactcatttcttcctctctttttgatgcagagaggcagatatctttataactgaatttttttatagatgtgaatttttttaaaaaagggtttgaaaatggccaccttaatgttgtaagctgtattttggaggcagatttagtttaataggtggtctttttaacttagttattattttttagctaaaattattgagcttaaggtggagctcattaaagaatagggcaaagaaaatattttstacgtctggactcagtatggacagctccgaaaaataagtatgcctgttctacctgagggtctatcttttataaatattttatctagaatagccttttaaaaagcctttatagaaggatagtaattaagccaaaaggctagcagatttaagtttctaaattaattagtcaattaagattttaatttgttttttatagtcttttgaaagaggcaataaaaatattgaaaaaattttagaag

SEQ ID NO: 633550 - DNA, 487 bp, Homo sapiens
gttttagttactcatttcttcctctctttttgatgcagagaggcagatatctttataactgaatttttttatagatgtgaatttttttaaaaaagggtttgaaaatggccaccttaatgttgtaagctgtattttggaggcagatttagtttaataggtggtctttttaacttagttattattttttagctaaaattattgagcttaaggtggagctcattaaagaatagggcaaagaaaatattttctacgtctggactcagtatggacagctccgaaaaataagtatgcctgttctacctgagggtctatcttttataaatattttatctagaatagccttttaaaaagcctttatagaaggatagtaattaagccaaaaggctagcagatttaagtttctaaattaattagtcaaktaagattttaatttgttttttatagtcttttgaaagaggcaataaaaatattgaaaaaattttagaag

SEQ ID NO: 633551 - DNA, 589 bp, Homo sapiens
caaaaagcactatatcacatactgtggaaatacaaatgaatcaaattctcagcccatatgcttaagaaactgaaatctattatggaaaaaagaaagtccaaaaagtggcttgaagataaatgcatggctcagatgacaagggagtagctgatgagatgtgcatcttcctgtgggcagggaggtcacggatgagaccacggaccatgagtaaggcrgggcccatgtgggacacgtccctggggcatgaccatgtggcaagcactgggggccatgagtggccagtttggttggagaagtctcataagaaagacaagggcagagtctagagaatcttgaatgccaacccaaagaatctgaaataaaaaaaaaagtggaatagaaaattcactgaatagttttgagctgcagtgtgatgggatgaaatggtatgttaggaaaagtaaattgatgaaatcgtggcactgaggcactggcttggagattctattttgtgctcccctcatccctttcgaaatgatgatgacacatggagcacacagattccactgcttctctctgctctaactctcgtgtttccagttgtgctttc

SEQ ID NO: 633552 - DNA, 589 bp, Homo sapiens
caaaaagcactatatcacatactgtggaaatacaaatgaatcaaattctcagcccatatgcttaagaaactgaaatctattatggaaaaaagaaagtccaaaaagtggcttgaagataaatgcatggctcagatgacaagggagtagctgatgagatgtgcatcttcctgtgggcagggaggtcacggatgagaccacggaccatgagtaaggcagggcccatgtgggacacgtccctggggcaygaccatgtggcaagcactgggggccatgagtggccagtttggttggagaagtctcataagaaagacaagggcagagtctagagaatcttgaatgccaacccaaagaatctgaaataaaaaaaaaagtggaatagaaaattcactgaatagttttgagctgcagtgtgatgggatgaaatggtatgttaggaaaagtaaattgatgaaatcgtggcactgaggcactggcttggagattctattttgtgctcccctcatccctttcgaaatgatgatgacacatggagcacacagattccactgcttctctctgctctaactctcgtgtttccagttgtgctttc

SEQ ID NO: 633553 - DNA, 574 bp, Homo sapiens
tggcgtactcgccatcatgctgggctgtcatcctgggtggrgtaaagtgaaatgactcttcttactcatttcaacgtggctgttcttaattttgcactcacctggggatactgcaacttaactggtttctggtatcctggtctataaattaaactggtgtctctgtggggtaatgaggactggtacttcctattttgccatcttgctgatgtcaacccccatttcatattttaaccaaaagggaaacagaaataggccacagaatccagcatgatttacatatcaaaaggaaacctttccggagtgctgggaagtagttgtatccttaaatattacaagcccttgtgttacagatgagagagccaaggcacagaggtaacacagtgaaatcgtacatcccaaagactaggggtgaacagtgactagtatgcagcaggcactcgaaaatgataactatttttattatttcttttatagtaaaattattctaaaatggggaaactatcctggattattggggtgggcccaatgcaatcacagggtccttttataactgagagatttgaagatgcta

SEQ ID NO: 633554 - DNA, 538 bp, Homo sapiens
ccaaggcaaaaagtttcctgcttgccaataaatgcaaaaattactcctaacaccctaaaaccaagaactatgagaaaaatgccatgccaaaacttgaaagcacgagactgacagagaagagagctacagaaataaaagtgagccgagttctaaggaaggaaaggcaccgaggagactctgatatatacattcggaagtctcagatgataccaggctaactttagtttctgtctctaaaaactacaaagtagaaactgttagcctcactcaccctagcccagtacttggttctcaaacaccttaggggctctcaatctttgtatggaaccactatgagctctgatggctcagaaaattccagttcctaaatgcgtctgctgtgatggcctcaggcaaggctctcgcctggagaaggctggctccsaggctgtgcttgcattttcaaggctctaacttggaaagcgcaggggtatgctcttcagcttatcgcgcctcttattagtttgtcacacagtgtgggataatcatttcaatatta

SEQ ID NO: 633555 - DNA, 384 bp, Homo sapiens
aaaccgggtgtggggcatataggaactctgtgttagcttggcaattgttctataaatctacracgaatctaaaatgtaacaattattggaaaggaggactgaaaagattcaagagaaagtgataatattgaagacaggggaagaaactgacatacagataataggagtccctgaagaagaaatccaaagtgaatagaacagtgaaatttgtaaatcaagaaaagtttcctgaaataaaatttgaaactacatactgagaaactatatatacatttatattttttaagacggggggggggtctcgctctcttgcccaggctggagtgcagtgcggccttccaagctgctccctgagcctggctcccaggcatcgcacaggcactt

SEQ ID NO: 633556 - DNA, 565 bp, Homo sapiens
gagatctgtcctagatatttggggttcacaaaagtaacacatgctagttgcaaaaatttcaaacagaaaacatgtgtaaaaacaaaaaggataaggccctgaaaacccctactaattttcatcccagtccccagggtaatgttttggagtgattctttccagttatttgcatgtgtgcatgtgtgtgcatgtaatttgttaatcatactacactcactgttactaaactcttttttttttttgagatggagtcttgctctgtcacccaggctggagkgcagcggcgtgatctcgactcactgccacctccacctcccgggttcatgcgattctcttgcctcagcctcccaagtagctgggactacaggtgtgtgccaccatgcccagctaatttttgtatttttagtagagacacagtttctccatgttagccaggctggtctcaaactcctgacgtcaagagttctgcccgcctcggcctcccaaagtgctgagattataggtgtgagccactatgcttggcccagtaaactgtcattttaattaacaatagatcaaacacatc

SEQ ID NO: 633557 - DNA, 590 bp, Homo sapiens
agtgtgactcggtgaccaaggagaagaaaagggtgcttccacagttttgaaaataaggagtttgccaaaaattgtaaagtctaaatgcagaccttgtttggaataaagatgaatttcgttttagctctgtatcctttggcaaccctttttttcccctctcattttttttcctgcgtgaaaaagagggaaaggggtccatccagtcatgcatatgaatgtttctataccagagtagtaaatatatgcatcttatgccttcgtgtggtcctttgtaactgtgaattatgattttggaaagctgtgtttttttaatcttgtttctgtaaggataaattaatcaaagttaacctctcaaaaaagtcctggttctgtaggggggaaaaaaaacaacaactgattttcaaaaatctattagtggggaagactatattatacaaatagtcatgagcatttctgggaactggcttccaatatcccagacagcgtgacctgaatgtgaaaaaarttgagaccactagttttgagccaaaatcatacaagcaaagagaaagcaagctgttgcccaagattgtggggtaaccatatgtttg

SEQ ID NO: 633558 - DNA, 625 bp, Homo sapiens
tgagaacccatgtgtgcacctgctagaaaaacagataaaccaatgtttatagaactggaactcctgcctgaacacagaaagaaatggactacatgcctaatgacatttggcttataatagactacatttttaaaaaacatatatttataaataatctttaaaatatctttatttttatatctattttatatatctctctgtatgtgtgtgtgtgtgtgtgtrtatatatatgtatgtatatatgtattatgagagacagagagagagagggagagagagacaaatatacagagagagacaagtctcctctactgcccaggctggagtgcaatggctccatcatagttcactgcagcctcaaacttctgtgcttatgtgatcctcctgcctcagcctcttgagtagctgggactacaggcacgtgccaacatacccagctaaatttttcttttttttttaagtagagacccaggctgatcttgaacaaactcctgggctcaagcaatcctcccaccttggcctcccaaagttctgggaatacaggtgtgagctactgtgaccagcaaagatctctttaaacatgtgtatctgaaaagtaaaaatcaaggcaggctagatttttaag

SEQ ID NO: 633559 - DNA, 557 bp, Homo sapiens
tctgttctctcagggtagaagtgcttgccacttttagagtgtgtttggagaggcttttttccctaattccactgtcaggtctctgatgaattactttcttcctgggtcttaaaagatcggcagattttttcattccttcacattggatttgccatccatgtttagttcttgccagtctttagttkggaggttctcattatctgctgacttgccgggatggcacttgtggaatggttctccttgattacatacaccaccctttactccaccctgcctgtcatattgttccttttacagacctgtggttagacgctagtgcttctccctcaggcaaacaatgtcctgccctgttttctttaaactttttttccttccttttgtaaactctcatctccctctaatctctagcttctgacatgtgtcatgggtggtatatatacctgaaaccacatagtgagaaccaactttgatgttactcaaataaatacccagccctgtgggaggctaaggtgggtggatcacttttgagtccagcagtttaggaccagcttgggcaa

SEQ ID NO: 633560 - DNA, 561 bp, Homo sapiens
tatcagatagatgatttgcaaatattttctcccattctgtgggttatcgtttcactttcttgatagtgttctttgatgcacaaagttttctaattttgtgtgaagcccmatttatctctcttttctttaggagtctgtgctataggtggcagaaacactgcttatagcgttttaaagatcaaaccaaaaaagagcctacctgtgaaaatcaaatagtaaaataaagttgccaggtattcttattatccccctagaaatagttttttaaaacaaaaactctcaaatattcagttgtttcagtcatgtgacttggcatataattaaacaacagttgctgctgttactgaatatttattgctcactgacaatgtgtcagacacagccagagactgaaatacgagtagatgccagttctggacttgtctgccttaagtgagatgagaggcatatttattagtaaaaactcagttgcaggtgacagaaaaccagtttaaaataacttggatcaaaaggggaattcactgacttttttaccaaaatgttgaggaggaatgtggaagt

SEQ ID NO: 633561 - DNA, 525 bp, Homo sapiens
ccagttccagccccctactcatctctctggttcccctccccacattttccgtcctgttccctctaatctctgggcgggatgaacagcatttmtaaactgttgtctagaaagaggaagcactgagtcagatcactccagaaaaagacaaatagccaaatgggcatacttgtctacaccagctccgtcacagccacttctgaaaaacaagggagcaggcatacaagcacaccttcagggggatcagagatgtggagggagcatcagacttcccaaagcgtttccctgttgtaacaaaccaagacatttatgtacattcttttaacgtgcatatgtttactgcctgtgtgtgcactgccatcctatctgtggcacatatgtagtatgtacgacctatctagacatgaaagcaatctaggtcagctgccaccacgtgttctaggtccttgtggaaagccactggcttcaccctgtgctgtctgcatgccctcttaagggagaggctcagaggtaagtagaagaaaaact

SEQ ID NO: 633562 - DNA, 525 bp, Homo sapiens
ccagttccagccccctactcatctctctggttcccctccccacattttccgtcctgttccctctaatctctgggcgggatgaacagcatttctaaactgttgtctagaaagaggaagcactgagtcagatcactccagaaaaagacaaatagccaaatgggcatacttgtctacaccagctccgtcacagccacttctgaaaaacaagggagcaggcatacaagcacaccttcagggggatcagagatgtggagggagcatcagacttcccaaagcgtttccctgttgtaacaaaccaagacatttatgtacattcttttaacgtgcatatgtttactgcctgtgtgtgcactgccatcctatctgtggcacatatgtagtatgtaygacctatctagacatgaaagcaatctaggtcagctgccaccacgtgttctaggtccttgtggaaagccactggcttcaccctgtgctgtctgcatgccctcttaagggagaggctcagaggtaagtagaagaaaaact

SEQ ID NO: 633563 - DNA, 537 bp, Homo sapiens
cctgacctcaggtgacctgcccaccttgacctccctaagtgctgggattacaggcgtgagccactgcacctggccttttctcatcagcttctaatttttactcttcagtgactgacattagactcctttgtggccccttcgtaaattctattaaactacctgagcaacatgcgagatgaaattccaagagccagtgagtgaactcttttcctatgcaggaaatagctcttaaccactgagggggtcacccacccatttgagaatctgagaaagttttaaatcctctcccatctgcaaaccatacagtcactcacacaaatgtgaccttttcagtttccatggacaccactgagacccatttttagaccacaggtttatctctgctctagataattcatttcttcccagaacgtggtaaatcaaaagttttctaatcagagcgtggttgaaatgcttgaataaaacacaaaatcacttccagtttggcmatgatacaaagcggaatgtctgtatttggaacttccccagtgcagaaca

SEQ ID NO: 633564 - DNA, 533 bp, Homo sapiens
ttcaaatggagaggcaagaggaaaactctctgaactagctcctatgtggggctgtaaatctgtaactactctatcatcctcctattctcttcactaggctacaactagctacattattagaagcsccaggtgagaattactttgggatatagaggaatgcgagtaggagggagagtccctttcaggtaacagacataattagtggaggcatgtagacttcaactagttaggaacaatttaccttccatgtttctttgttaagttggggaaagctatgagcagaaattactagttgagtttgcatcaaagaaatagtgatctgccccagagaatcttgaacagaacagttcaggccttcctcctggaactctaatccctctcattccctgaatttgtccagcactaaaactaaggaatggtggggatactgtcttaattcttctctgttttcactatttgggagggagagtgtctgctgaagtaaccttctacctcccagttagttactagacttcatttaggataactacttg

SEQ ID NO: 633565 - DNA, 533 bp, Homo sapiens
ttcaaatggagaggcaagaggaaaactctctgaactagctcctatgtggggctgtaaatctgtaactactctatcatcctcctattctcttcactaggctacaactagctacattattagaagcgccaggtgagaattactttgggatatagaggaatgcgagtaggagggagagtccctttcaggtaacagacataattagtggaggcatgtagacttcaactagttaggaacaatttaccttccatgtttctttgttaagttggggaaagctatgagcagaaattactagttgagtttgcatcaaagaaatagtgatctgccccagagaatcttgaacagaacagttcaggccttcctcctggaactctaatccctctcattccctgaatttgtccagcactaaaactaaggaatggtggggatmctgtcttaattcttctctgttttcactatttgggagggagagtgtctgctgaagtaaccttctacctcccagttagttactagacttcatttaggataactacttg

SEQ ID NO: 633566 - DNA, 508 bp, Homo sapiens
gatgggcagaagaacccgttctacctgagatggtataggtctggtagtcctgtcaatgagtcagccagccttctgggctgtgaccactccctaggcttttagagctttatgattattgccatagtctaaggacgagccccaacatctcctgttctgagctctggcctcatcttccatcaaaggcaacagattcagacaggccacttggsgtggtcacctaggaatctggcaaagtaccatagcaacggaaagcctctccttaaatcaagcagaatttgggatatggcaagaacgggctctgctcacacatgcctctccttggtggggtgttcccttatagtgctgattggaagcaatggttctgtgaatctaggagcaaatattgtccatgaagttgttatttgcatcatttctagattctggcactgtgggggcagactttattttggcaacagatactggaattccattccaggattacacactttatctggaccaagttgatatc

SEQ ID NO: 633567 - DNA, 536 bp, Homo sapiens
agccacacaatatgaactttgagaaacgtcagtcacagtgtatgttaaagttacaatgcagtcttgcaaactgagtaatatttttgataagagacctcatgaaccgactcagcctccagagatgtgtaccaaatggcctcaagtgatcttctccatgaacgcacatgaaatctggatgtggaaaaggtatgaagaaattctggaacaaccaaaattgatcagaagaagcacatgattttggacaaaatgcaaaatcttttttaaaaaatctctctcaatattccatagcaggcaaggcccaggtcctagtcctggcttctggaagtggagcagggtccgccccggaggcgggctggctggagtggcccaagcgcccagttgcactggcccttcccttccatcttctctcactctttcagcaagcctcttgggaaaaacatctctttcaaaataaaggcacgagaatcacgttctgtcagcgcagtcgccactgtcyggaccgctgcacaaaagcagacacgagtggagtgaggccc

SEQ ID NO: 633568 - DNA, 536 bp, Homo sapiens
agccacacaatatgaactttgagaaacgtcagtcacagtgtatgttaaagttacaatgcagtcttgcaaactgagtaatatttttgataagagacctcatgaaccgactcagcctccagagatgtgtaccaaatggcctcaagtgatcttctccatgaacgcacatgaaatctggatgtggaaaaggtatgaagaaattctggaacaaccaaaattgatcagaagaagcacatgattttggacaaaatgcaaaatcttttttaaaaaatctctctcaatattccatagcaggcaaggcccaggtcctagtcctggcttctggaagtggagcagggtccgccccggaggcgggctggctggagtggcccaagcgcccagttgcactggcccttcccttccatcttctctcactctttcagcaagcctcttgggaaaaacatctctttcaaaataaaggcacgagaatcacgttctgtcagcgcagtcgccactgtctggacygctgcacaaaagcagacacgagtggagtgaggccc

SEQ ID NO: 633569 - DNA, 572 bp, Homo sapiens
gttttgtcaagtgctatgatctcatcatctggcagccccggcgggcaaggagtccaagggaaacccagggcgttgacaagtgggtgactcaggtgccggccctgctggcggtgagcaactgcggggttggarcccgtgggaggggcagggagatgtgctgagctcctttctggccagtgctgatgtcatcaaagccccagggctaaggctgtgctttccacctgccctcagaagcaccagtactcctggtttcttatttatttattttttctcttctctctggttttctgggttgtgttgtcccctttgttcttaaatagttagtagggacctgtggtagctctttcaagggctctgctaacacaggacagccctggaccttggcttatagggactttatatcctcattgtcagtccctggggcagttaatatgcctgaaacgccctccactccctcttaaatgtgtgtgtgtgtgtgtgtgtgtgtgtgtgtggtttatttaatactattctgtagcataggtaaaaggctttaaaaaaaccttttctgctatctcatttgattctaaaga

SEQ ID NO: 633570 - DNA, 440 bp, Homo sapiens
tcaaaatatcatttttaaaatttttttaaaaatttcatttatttatttttattttttagagatgggggtcggtcacactatgttgcccaggctggcctgagactcctaaactggagcaatgctcccacctcagcctcctaggtagctgggactatrggcacacatcacagtgctcattgacgttttgattagtggaaatatttgtggcatttccctcttattttcacttgttaatgttttcctaaatttcggtctgtttgtttgtttgttttgagacggagtcttgctccatagtccaggctgcagtgcaatggcacaatcttggctcactgcaacctctgcctcctgggttcaagtgattctcctgtcttggcctcccgagtagctaggattacaggcgtgcaccaccacacacggctaattttttgtgttttcagtag

SEQ ID NO: 633571 - DNA, 610 bp, Homo sapiens
tgtgtgtgtgtatttcaagcaaaggcatagaaaaatccatgacatcaaattttaatggtggttatcactgggtggtagagctatgagctattttttaaataaacgttttattttagaacagttttaaatttatggaaaagttgcaaagatagtagagtccccacaaacctcacacccagtttagcatcttacatcatgttaacatcttacctgagtatggtgcatttatygcaactagtggaccaatattgacacactgttattaactaaagtccatgctttattcaaatgtccttaattttaacctaatgtccttttgtgtctctgggtctcatccaggacatggtattattacctttagccatcatgtctccttaggcttctcttggttgtgacattttctcagacttcccttgcttttgatgaccttgaaatttttaaggagtactgctcaaacattttgtagaattgccacaattgtgtgacatttttctcatgattagactggggttatggaccttgcgggaggaagaccacaagatgtaaactatcattctcattacatcacatcaagggacacgctatcaaggtgactcatgactggtgctaa

SEQ ID NO: 633572 - DNA, 618 bp, Homo sapiens
ggcagtgactgcatgctttctgggtgcaaacactttgcaggagtatgtgataatcagtatgcttttagttattgtttatcctgcaccccrtgttgctgcctaggaaggtggaggctgactgagctagtggttgagaaaggcacagaaagtgtgcgtgcatctcccagaactgtaacgtcacacgtgtggatggtggagttgcttagacaccaatgcctgaggttcaggaagctgccgcatgcccacgtctttgtggcgctaaaacccccgcactcttacacctagacaagctgatcaggtgaaggggctaactccagaagtgataatagaagcatgatttgtttcacccctaattctattaggaaaaaactggctgtagtccttgaatagagctcaatgacaatttgaagagtactagagaagccaataaattcattaatagggaagattgttttagctagacaaaaaggtaatagccttcattgtagtagtttaattagaaaaataataaactcccttaggaaggatgaaagcccataattaaaaagatgagctatttggaggaattctgaatagtacctcttctcagatttgttcctagctgctctattcatggtc

SEQ ID NO: 633573 - DNA, 618 bp, Homo sapiens
ggcagtgactgcatgctttctgggtgcaaacactttgcaggagtatgtgataatcagtatgcttttagttattgtttatcctgcaccccgtgttgctgcctaggaaggtggaggmtgactgagctagtggttgagaaaggcacagaaagtgtgcgtgcatctcccagaactgtaacgtcacacgtgtggatggtggagttgcttagacaccaatgcctgaggttcaggaagctgccgcatgcccacgtctttgtggcgctaaaacccccgcactcttacacctagacaagctgatcaggtgaaggggctaactccagaagtgataatagaagcatgatttgtttcacccctaattctattaggaaaaaactggctgtagtccttgaatagagctcaatgacaatttgaagagtactagagaagccaataaattcattaatagggaagattgttttagctagacaaaaaggtaatagccttcattgtagtagtttaattagaaaaataataaactcccttaggaaggatgaaagcccataattaaaaagatgagctatttggaggaattctgaatagtacctcttctcagatttgttcctagctgctctattcatggtc

SEQ ID NO: 633574 - DNA, 618 bp, Homo sapiens
ggcagtgactgcatgctttctgggtgcaaacactttgcaggagtatgtgataatcagtatgcttttagttattgtttatcctgcaccccgtgttgctgcctaggaaggtggaggctgactgagctagtggttgagaaaggcacagaaagtgtgcgtgcatctcccagaactgtaacgtcacacgtgtggatggtggagttgcttagacaccaatgcctgaggttcaggaagctgccgcatgcccacgtctttgtggcgctaaaacccccgcactcttacacctagacaagctgatcaggtgaaggggctaactccagaagtgayaatagaagcatgatttgtttcacccctaattctattaggaaaaaactggctgtagtccttgaatagagctcaatgacaatttgaagagtactagagaagccaataaattcattaatagggaagattgttttagctagacaaaaaggtaatagccttcattgtagtagtttaattagaaaaataataaactcccttaggaaggatgaaagcccataattaaaaagatgagctatttggaggaattctgaatagtacctcttctcagatttgttcctagctgctctattcatggtc

SEQ ID NO: 633575 - DNA, 642 bp, Homo sapiens
ctcaggctcctctgcaggacatgcccrcgctgctgggagtggttctgctgccggtccccaccgaagtctgggcaccacgccggctgatgaccatctgggcacagcctgcagtcacctcctctccccagagcggaatcctgagggaggcgccacctgggtcccgctgctttcctctaaaggaatcggtcggtgttccatggagaggaaaagggagaggaaaaggaagaggagggagtgagagggaagaaaggtttttgtttgcccttttgtttcactcctcgccttgtggccagggcacagctatggagagggtgtgtcagggactacctaagcgacagacacctgtctatagtcacagcatcttcacttctcccttctccttccttccactatccttcaagcccaaggagcatcttggggtgacttttctttccaggagaatcctcaggacttcgtctcagagctccatggagcactctcctccagacagcgagaggtgtgggtgtgccggatcctcagggaacacgggacgggaacctacctcccgtggggagtcacaaccgaaagaatatctgccaatttgcaaaactcatctttcactaaggaagcaagctgtgtactttagaacccatgtgcaatcca

SEQ ID NO: 633576 - DNA, 642 bp, Homo sapiens
ctcaggctcctctgcaggacatgcccgcgctgctgggagtggttctgctgccggtccccaccgaagtctgggcaccacgccggctgatgaccatctgggcacagcctgcagtcacctcctctccccagagcggaatcctgagggaggcgccacctggktcccgctgctttcctctaaaggaatcggtcggtgttccatggagaggaaaagggagaggaaaaggaagaggagggagtgagagggaagaaaggtttttgtttgcccttttgtttcactcctcgccttgtggccagggcacagctatggagagggtgtgtcagggactacctaagcgacagacacctgtctatagtcacagcatcttcacttctcccttctccttccttccactatccttcaagcccaaggagcatcttggggtgacttttctttccaggagaatcctcaggacttcgtctcagagctccatggagcactctcctccagacagcgagaggtgtgggtgtgccggatcctcagggaacacgggacgggaacctacctcccgtggggagtcacaaccgaaagaatatctgccaatttgcaaaactcatctttcactaaggaagcaagctgtgtactttagaacccatgtgcaatcca

SEQ ID NO: 633577 - DNA, 642 bp, Homo sapiens
ctcaggctcctctgcaggacatgcccgcgctgctgggagtggttctgctgccggtccccaccgaagtctgggcaccacgccggctgatgaccatctgggcacagcctgcagtcacctcctctccccagagcggaatcctgagggaggcgccacctgggtcccgctgctttcctctaaaggaatcggtcggtgttccatggagaggaaaagggagaggaaaaggaagaggagggagtgagagggaagaaaggtttttgtttgcccttttgtttcactcctcgccttgtggccagggcacagctatggagagggtgtgtcagggactacctaagcgacagacacctgtytatagtcacagcatcttcacttctcccttctccttccttccactatccttcaagcccaaggagcatcttggggtgacttttctttccaggagaatcctcaggacttcgtctcagagctccatggagcactctcctccagacagcgagaggtgtgggtgtgccggatcctcagggaacacgggacgggaacctacctcccgtggggagtcacaaccgaaagaatatctgccaatttgcaaaactcatctttcactaaggaagcaagctgtgtactttagaacccatgtgcaatcca

SEQ ID NO: 633578 - DNA, 516 bp, Homo sapiens
gccactgcacagcgcagcatggcctgtggagcggggatttcctgctcagcccgcctcaggtcccattccckccccgctcatcatttcagtaaagggttagtctctggcagacaactggggagaacacagatgtaagaatgagacactgagtttcctctgaattttaagacgaaattttaagaacaaacacaatcaaatgaagaaagtaagttttgattagaaagtaaaaccgttttaataacattaacaggtgcttttattacaaaaatgaacactaatttattgtggtaaatttagaaagaaacattaaaatacaaaataaaataaaagctttcataatcccacaatgcagatatatgctactagcattttgttgtgttcctattctaggcctattagttaagacagcccaattaattaacaaacagcccctaggtcctggggacgtcacataacaaagcgtgatttctgtcccctgctgcagtccagtgtggagggctggaaaggggaggaggg

SEQ ID NO: 633579 - DNA, 648 bp, Homo sapiens
gcacaattcttaagcagatgacagtgtctctctgcccagtcctcccatgcctgtgtgatcttgcagatggctacccaacaggctcgtaaaagctcaacctccaagcctcgtgtcagagatcatacagagagactgaaagagtctgggagggctgcttccctggaagagccacagtaccatcacccagtagctactgcatgggctgactgcctgaccacacgcaacccgtaaccccaacactggctgcccacttcctatggcttattgggtctttaattaattcctctgttgtgctgtactgtgacgtgtttggaaactatgttttgtgttacgataagccactaccacaagccaacataaagaatttttgaaaatcagatagctrtgtaaccataaattttttaaaaatcagatagctttgtaactaaataagatctcaagatcttattacaatgattaattctccagcatatcccacccaaggggtatcactctaggattaagaacatcattctatgagaaaatacagtcatcactcagtaactgtagtggtttggttccaggatctccagcagacaacaaaatccacagatgctccagtccctcatacaaaatggcatagtatttgcatataacttatgcatatct

SEQ ID NO: 633580 - DNA, 648 bp, Homo sapiens
gcacaattcttaagcagatgacagtgtctctctgcccagtcctcccatgcctgtgtgatcttgcagatggctacccaacaggctcgtaaaagctcaacctccaagcctcgtgtcagagatcatacagagagactgaaagagtctgggagggctgcttccctggaagagccacagtaccatcacccagtagctactgcatgggctgactgcctgaccacacgcaacccgtaaccccaacactggctgcccacttcctatggcttattgggtctttaattaattcctctgttgtgctgtactgtgacgtgtttggaaactatgttttgtgttacgataagccactaccacaagccaacataaagaatttttgaaaatcagatagctgtgtaaccataaattttttaaaaatcagatagctttgtaactaaataagatctcaagatcttattacaatgattaattctccagcatatcccacccaaggggtatcactctaggmttaagaacatcattctatgagaaaatacagtcatcactcagtaactgtagtggtttggttccaggatctccagcagacaacaaaatccacagatgctccagtccctcatacaaaatggcatagtatttgcatataacttatgcatatct

SEQ ID NO: 633581 - DNA, 488 bp, Homo sapiens
atctctcttttattgtgataaggcacttaaaaatctaatctcttagtaattttcaagtatacaacacattgttattaattatggtcctcaagttgaatttatttctcctgtctaactgaactttgtaccctttgaccagcctctcccttgtcctcctcaccctstaccctctgttcctggtaagcactgttctgctttctgctgctatgaaactttgtagattccacatataagtgaggccattacagtacttgtctttctgtgcctggattattttacttaacgtaatgtcttccaggttaattcatgttgtcacaaatgaaaagatttccttttttaaggctgagtagtattccattttgtatatacaacacattatttttatccatttatcagtggtggacacttcataaccatttatcagcgatagactgatttcataacttagctgttatgaataatgatgggatgaccatgggaatgcagat

SEQ ID NO: 633582 - DNA, 604 bp, Homo sapiens
agcactcagtgccaggcttgaggtgggggctgcagggagtggttctcctggccaaggctcagcctgtgagtttgagccttagaggtgggctttctcttccctctcctgcctgtggcaaccaaactctgccttgcatttgtgacagctgtggtgtgagagtgagtctccttcccctccttcaggagcagctggcctctgatttgtactcctgcaggaccctggtctgaagaggatttcctgccgcctccccgactgaggcaggtgacttttgtttctatccccatgagaattagtgggcctttgcctgggkactgttggttggggagtatccttccggtctttaccccagtggcttaagaattttgcttctcctaagagaagagtccagggaagtgggctgtgcctctcgcctcaccccaagggggtttgctccagccttccatctgccaccagtgtttctcatgagatcctggtagaatccaggacaaagcttgggagtgagttattctaaatagttatactgacccatacttcgcctttaagattttgttgaacttctacctagctgcttctttgtattttttattaacagctttatacaaaa

SEQ ID NO: 633583 - DNA, 475 bp, Homo sapiens
gtgagttaatatcttcttttctatttygtgtggaaattctgaagttcctgatgactggattttggcaagactagatctcaactttatatgctgcaggtgtttctcaaagtttatctccataggcagccttctcatttttctggaataccagtctctccaatttttaagggctaaatataaatataaaatgtttgggctcaaacggatttaaaatttgaaacataaatttatcttaggtaaggcggcagaaacaacctggtgttcacatagaggagatggggaagacagacctgcccacttctccccaggtctccatggctaagttcacttcccctgagctcggctcagcctactgtcacctgcagggaacagggcacagaggaaggagccgagctgttcaccatttgaaagtcaagaggtcctcatatttgaatgcttgtcttcagtccttcccctccttacacaggtgttaagt

SEQ ID NO: 633584 - DNA, 512 bp, Homo sapiens
gggaatagctattattttatataaacatttaaaaatagcaaaactggattttaagtttgtcaatagcctaattaactcttaatgtattttaatgtgaaatatgtgagttaatatcttcttttctattttgtgtggaaattctgaagttcctgatgactggattttggcaagactagatctcaactttatakgctgcaggtgtttctcaaagtttatctccataggcagccttctcatttttctggaataccagtctctccaatttttaagggctaaatataaatataaaatgtttgggctcaaacggatttaaaatttgaaacataaatttatcttaggtaaggcggcagaaacaacctggtgttcacatagaggagatggggaagacagacctgcccacttctccccaggtctccatggctaagttcacttcccctgagctcggctcagcctactgtcacctgcagggaacagggcacagaggaaggagccgagctgttcaccatttgaaa

SEQ ID NO: 633585 - DNA, 475 bp, Homo sapiens
gtgagttaatatcttcttttctattttgtgtggaaattctgaagttcctgatgactggattttggcaagactagatctcaactttatatgctgcaggtgtttctcaaagtttatctccataggcagccttctcatttttctggaataccagtctctccaatttttaagggctaaatataaatataaaatgtttgggctcaaacggatttaaaatttgaaacataaatttatcttaggtaaggcggcagaaacaacctggtgttcacatagaggagatggggaagacagacctgcccacttctccccaggtctccatggctaagttcacttcccctgagctcggctcascctactgtcacctgcagggaacagggcacagaggaaggagccgagctgttcaccatttgaaagtcaagaggtcctcatatttgaatgcttgtcttcagtccttcccctccttacacaggtgttaagt

SEQ ID NO: 633586 - DNA, 464 bp, Homo sapiens
gctagagtgagttagaggagagaaaccaaaccagctagctttttatagagaatttaatataaggaattattaactaggtgtgaagttgttaactagggatttaaaagacaaaaataaaacactaatgtatcatggaggtagcaactgaaagaagcagctaccattcctaggaccattaggactgttacaacttaaaagcttggkgaagggactccatggagctgaaacccagacctccgagaaggtggtcatggtcagtttgtgctggtgtctctcaggaagctgattctgtgaaggtagaaaaactgccacctagattcaactgatgttgcatagaaacaggaaggagcaacaggaaggacaacagacaggaaggagcaagtctcctatttctcctccatcctcatggtctttctctacatcccttttggtaaggcctcatagagggccagctggtagagcag

SEQ ID NO: 633587 - DNA, 464 bp, Homo sapiens
gctagagtgagttagaggagagaaaccaaaccagctagctttttatagagaatttaatataaggaattattaactaggtgtgaagttgttaactagggatttaaaagacaaaaataaaacactaatgtatcatggaggtagcaactgaaagaagcagctaccattcctaggaccattaggactgttacaacttaaaagcttggtgaagggactccatggagctgaaacccagacctccgagaaggtggtcatggtcagtttgtgctggtgtctctcaggaagctgattctgtgaaggtagaaaaactgccacctagattcaactgatgttscatagaaacaggaaggagcaacaggaaggacaacagacaggaaggagcaagtctcctatttctcctccatcctcatggtctttctctacatcccttttggtaaggcctcatagagggccagctggtagagcag

SEQ ID NO: 633588 - DNA, 613 bp, Homo sapiens
ggtttatttttggactctcaaatctattcattgacctatgtatctatccttatgccagaaccaccttgtcttgattaccattgccttgcaggaggttttgaaawtgacaagtgtgagtcctcctactttgtactgctttatcaggattgtttcagttcctctgggtcccttgcaattgtatattaactttagaatcagcttgtcaatttctacaaggaagtcagctaggattctgatagggaattcattgattctgtgggttaatttggagagtattgtcatcttaacaatgttaagttatcagatctgtatatattttttgttttgttaaaactttttaaatttctttcaacaatgttccatagcttttagagtatacatttgcatttcttttgttacatttattcctaagtactttattctttttaatgatattatgaatggaattgttttcttaattttcttttttttttttttggaaagggattctcgcaatttcctccaggtggagtttgcaggggtgcgatcttgctcactgcaagctcctcctcccaggcttacgccattctcctgcctcagcatcccgagtagctgggactacaggcgcctgcca

SEQ ID NO: 633589 - DNA, 613 bp, Homo sapiens
ggtttatttttggactctcaaatctattcattgacctatgtatctatccttatgccagaaccaccttgtcttgattaccattgccttgcaggaggttttgaaattgacaagtgtgagtcctcctactttgtactgctttatcaggattgtttcagttcctctgggtcccttgcaattgtatattaactttagaatcagcttgtcaatttctacaaggaagtcagctaggattctgatagggaattcattgattctgtgggttaatttggagagtattgtcatcttaacaatgttaagttatcagatctgtatatattttttgttttgttaaaactttttaaatttctttcaacaatgttccatagcttttagagtatacatttgcatttcttttgttacatttattcctaagtactttattctttttaatgatattatgaatggaattgttttcttaattttcttttttttttttttggaaagggattctcgcaayttcctccaggtggagtttgcaggggtgcgatcttgctcactgcaagctcctcctcccaggcttacgccattctcctgcctcagcatcccgagtagctgggactacaggcgcctgcca

SEQ ID NO: 633590 - DNA, 591 bp, Homo sapiens
agttttttggttttgttttcatttttctggctttattgaggtataattgacaaatgaaaattgcatatatttagggtgtacagtgagatacttttatatatgtatacatttttaaatgattaccacaaccaaactaattactgtgtgtatcagctcatagttacttgcgtgtgtgtataacaacacttgatatctactctcttagcagatttcaagtatacaatatgctgttaactatagtcacagtgctgtccattgatctccagcacttactcatcttatagctgatggtttgtactgtttgaccaatatccccttttccccatcccccagcccctggtaaccatcattttactctccattaayatgagtttgactttttaaaaaattttacatgtaagggagatcatgcattatttctctatctggcttatttcacttagcataatgcccttaaggttcatccattttgttgtaaatggcaggatttccttctttttaaaggctgaataatatttcattgtgtacatataccatattttctttatccatttatctatggaaggatatttgggttgtttctgtatcttg

SEQ ID NO: 633591 - DNA, 413 bp, Homo sapiens
tatgagataatatctcattgtggtcttgatttgcatttctctgatgattagtgatgctgaacatctattcatatacctgttggtcatttgtatgtcttctttggaaagaatgtctatttgggtcttttgcccattttttaattgggttacttgtgtttttttgttattgagttgtataagtttcttatagaattggagattaaaaccttatacatatggggtacatattttgratattaactttttagtttagaaatttttgacccttttctgtagttaccttttcattttgttgtttcctttgctgtgcggaaaacaaaatgtcctcactttcatttctgattctactaatttgagtgttctctcttctttcttcatcaaccagctaaaagtttgtcaattttgttttgaca

SEQ ID NO: 633592 - DNA, 538 bp, Homo sapiens
ctagatatagaattacatcatctggaaacagagataatttgacttcctcttttcctatttggatgcctttttttttctttctcttgcctgattgctctggctaggacttccagaactgtgatgaatagaagtggtgagaatgggcatctttgtcttgttccagttcttaatgggaacacttccagctttacccatttaatatgatgttggctgtgsgtttgtcatagatggctcttattattttgaggtatgttgtttcaatgcttagtttgttgagggtttttaacaggaaaggatgttgaattttattgaaagcctttcttagcatctattgagataattatgtggtttttaaattttagttatgcttgtgtaatgaatcacatttactgatttgtgtacattgaaccaactttgcatcccaggggtaaagcctacttgactgtggtggattagctttttgatgtgctgctgaattttgtttgctagtattttgttgagaacttttgcatctatgttcatcaaaggtattggcctg

SEQ ID NO: 633593 - DNA, 377 bp, Homo sapiens
ctgtcacatcttaatttctttcagttcagctctgattttagttatttcttgtcttctgctagctttggggttggtttgctsttgtttttctggttcctgtaagtctaatgttaggtatttaattttagatgttccaactttttgacgtggaaatttagttaatgctataaactttccttttaatactgctttggctgtgtcccagatattgtgctttgttgtatatttgttttcattagtttcaaaacatttcttgatttctgccttaatctcatagtctacccaaaagtcattcaggagcaggaggtttaatttccatgtaattgtatagttttgtgcaatcttcttagtattgatttattttattttattgtggt

SEQ ID NO: 633594 - DNA, 592 bp, Homo sapiens
gtatatttgttttcattagtttcaaaacatttcttgatttctgccttaatctcatagtctacccaaaagtcattcaggagcaggaggtttaatttccatgtaattgtatagttttgtgcaatcttcttagtattgatttattttattttattgtggttggtataattttttttaatttgctgaaaattgattgctgattgtgtggtggattttagagtatgtgccacgtgcagatgagaagaatatatattctgttgtcttgggtggagagttctgtacatgtctgttaggtccatttggtcaagtgtcaagttcaggtcttaaatatcttttttctgcctcaatgttctacttcttttctgcctcaatgatctagtactgttatctgcttcaatgatctaatactgtcagtggaatgttgaagtctcccattattgtgcagttatctaagtctctttgtaagtctctaraaacttgttttatgtatctgggtgctcctgtgttacatgcacatatatttaggatagttaagtctacttgttgaattgaatcctttatcattatgtaatgctcttctttgtgtttttggatt

SEQ ID NO: 633595 - DNA, 530 bp, Homo sapiens
aagcacttcatcagggcattggcagtgggatccatgctcactcatgcatgtcagcagcagcacaattggctgtctataggtttttatcctcttctatataggctgtataaaggttgagaaagacatctaaagttgcttactttacatgtctttagcttatgcttcagtctgaaatctcccaggtttgatgagccaggagttttcttctcagggatctacatagcaggaatattatcactgtgtagtttaaaaatgtgtaatttaaaaatcagccaggagtttcctctcagggatctacaatgcaggaatattatcactcccacacttcaaataaaaaaamaaatgagaaaaataacaagtttgtggtgttccttgaatccatcattctgcttcctggttgaactctgactcataaaaaaagattctcaaattcagggactgcaggctgtagagatattatccctgtttctgcctggataattctgcagaaacagtatagaatcccatgctgagaaaggaaattgtagctt

SEQ ID NO: 633596 - DNA, 599 bp, Homo sapiens
gctgatacaatagtcaagaaaagatttgaaatattgcaataattaccacaatgtgacacagaaatacaaagtgagcacatgctgttgaaaaatggagttgrtagatttgctcaaagcagggttgcaacaacttgcaattcgtaaaaaatgcaatatttatgaagtgcaataaaacaaagtgcaataaaatgaggtatgcctgtatttaaaaagattaaaggtctcaaatcagcaatctatgcttccacctttaaggtagcagagaataaagagaaattaaatttacagcaagcagaaaaaaaatagaaaagattagaaatcaatgaaagtgaaatttatttttggttttttgaaagaaaaaaatcaataaaatcgatacactctaaccacaaagagaaaaatgaatgtcacaaattaaccaatatcaggaaggagagaatgtcatcactacggcccccttagacagaaaaaggattataaatatattctagaaaaaattctatactcacaaatctagccaatgcaatagtacaaaaatgtccatgattcagaacaactattttgaagacataagcaaaaactcagttaaggaaaaatag

SEQ ID NO: 633597 - DNA, 599 bp, Homo sapiens
gctgatacaatagtcaagaaaagatttgaaatattgcaataattaccacaatgtgacacagaaatacaaagtgagcacatgctgttgaaaaatggagttggtagatttgctcaaagcagggttgcaacaacttgcaattcgtaaaaaatgcaatatttatgaagtgcaataaaacaaagtgcaataaaatgaggtatgcctgtatttaaaaagattaaaggtctcaaatcagcaatctatgcttccacctttaaggtagcagagaataaagagaaattaaatttamagcaagcagaaaaaaaatagaaaagattagaaatcaatgaaagtgaaatttatttttggttttttgaaagaaaaaaatcaataaaatcgatacactctaaccacaaagagaaaaatgaatgtcacaaattaaccaatatcaggaaggagagaatgtcatcactacggcccccttagacagaaaaaggattataaatatattctagaaaaaattctatactcacaaatctagccaatgcaatagtacaaaaatgtccatgattcagaacaactattttgaagacataagcaaaaactcagttaaggaaaaatag

SEQ ID NO: 633598 - DNA, 481 bp, Homo sapiens
gaattcctgcacagcccaggagtctcctgtttcattgccatcacacacacatacgggtctggtttagggcaaagtccagtgttggggtgaatgatccctccagcrtctccattacccccgtgcctctcaaaggcctctaaagtacttgatcttacttcatcccgctccaatttttactcatgctctctaagccctggagggtctgagatacacaaatatgtgcacctaacacatgggatttctaaccgatgataactgtattagtccgttttcatgctgccgataaagacatacccgagactgggaagaaagaggtttaattggacttacagttccacatggctggggaggcctcagaatcatggcgggaggcgaacggtacttcttatgtggcggcgcaagagagaatgaggatgaagcaaaagcagaaacccctgataaacccattagatctcgtgagacttattcactatcacgagaa

SEQ ID NO: 633599 - DNA, 496 bp, Homo sapiens
ttcaaaattaatttgtcgggcaagtgatatgtgacgtggaaacataagatgaagccctagcctagcagtccacagcctacagaaacagtcttaaagcctttttcattgtacagcactttctctccatcatttatttgttttgtctatctatctatctatctatctatctatctatctctctatctatctattattctatctatccaaccatcctttatcatataccaccatggtagaatattttgatctcataaaatttacctttcccctaaaatagagatttaaaaagataaagaatacacacaaatgacatctccaactccctcctaccacatccctggagggatcacattacagatacccatgtgggtttccaaagttgtgtatatagctaaccatgctctcaagattcacccccccatctctgaattgtctaatcacatctactttgctcttagaacaaayggaagttctaatcatttctccctagtagatg

SEQ ID NO: 633600 - DNA, 555 bp, Homo sapiens
tattatttctgatatccaggtgaggggaggattatgttactctcaatatcgcaagtgctgtacacacctttgatatttttcctactatttacggggagagaggatattactcccagtatcgaaggaagtgtacacgccccctgtgacaccgctcctaatatccaggttaaaagaggatgatattactcccaatatcgcagggggtggggtgtaccctccacctgtgatattctttctaatatcgaggggaagagagaataatgttactcccaatagcgcagggggtgtacacaccttgtgaaattgttcctaatatccagggaaggagccgatgatattactggcctgatcgcagggggtgtacacccttctgtgatattgttcctaatattcagtggrgaagatgataacattaattctaatatcacagaaggtgtacagcccccctgtgatatagttcctaacgtacagggacaagagaataatattactcccaatatcgcaggggctgtacaccccttctgtgatacggttcctgccatccaggggggttgt

SEQ ID NO: 633601 - DNA, 597 bp, Homo sapiens
taatgaaattttttttaagctctctgacacaggtgggattttaggaaaaaagtggagatagggagcccatttaagaaagctgttaaagtaaaccaggagaaaaatgaagtggccgagaccaaggtggtttcagtagaaataatgagatgctgtcagatttaggaaggattttagaagtaaaactgacagcacatgctgatagagtggatgtggaaggatacraaaacagagataaaggatgactccagatttaagctgagaacaagctggtgaataatactattagctgagatacagcagacacaagaggatccatttggggggctgaggataaaaggagatttctattttatttatcttaaatttgaaatgactgttagctaccaaagcaatgatgcttcttggatatctactgcaattatctaggttagaaacagggaagcagcagtgcggatgggggagtgggtggatttgagaaatgtttgaagaaggaatgaacaggacttggttatcgatgacatgtaagtaatggaggaatgcaagaggaattccaaggcccctgatttgagtgactgagtgccacattccctgagaggc

SEQ ID NO: 633602 - DNA, 597 bp, Homo sapiens
taatgaaattttttttaagctctctgacacaggtgggattttaggaaaaaagtggagatagggagcccatttaagaaagctgttaaagtaaaccaggagaaaaatgaagtggccgagaccaaggtggtttcagtagaaataatgagatgctgtcagatttaggaaggattttagaagtaaaactgacagcacatgctgatagagtggatgtggaaggatacgaaaacagagataaaggatgactccagrtttaagctgagaacaagctggtgaataatactattagctgagatacagcagacacaagaggatccatttggggggctgaggataaaaggagatttctattttatttatcttaaatttgaaatgactgttagctaccaaagcaatgatgcttcttggatatctactgcaattatctaggttagaaacagggaagcagcagtgcggatgggggagtgggtggatttgagaaatgtttgaagaaggaatgaacaggacttggttatcgatgacatgtaagtaatggaggaatgcaagaggaattccaaggcccctgatttgagtgactgagtgccacattccctgagaggc

SEQ ID NO: 633603 - DNA, 576 bp, Homo sapiens
aaatctataaaagcatattgaaccccttggggagtagccttatctacttatatacattaaggttatgtcagttttcmgcttctgatggtcttgtcaaaccagagcactgtttccaatagaaacttctccttgacattcacattatgttatgtcctcagtcctcatattttaagcttgtttggcttcaagcagaaaaaaaataggaattaaatccaaaaatggaaagaactggcaaataaaaccatagtttcaatccttgaatccaagaggaccatagaaattagctttttggatcaacttgaatagcctcacaacagaaacagctggtttgtgttgaagcagtttaaatattttaaagctcatagcttggagaagactgtaattcagtagtttctctctttacccactctcttcaagtgttcactgttcctccctgttacccataattgtgatttcttttcttctgttttctttctttgcctttgcctccacttaattttatcttttctctttcccatttctgtctctcaagtgtcttatccttctctttttttctcactcatttttattgccatt

SEQ ID NO: 633604 - DNA, 576 bp, Homo sapiens
aaatctataaaagcatattgaaccccttggggagtagccttatctacttatatacattaaggttatgtcagttttccgcttctgatggtcttgtcaaaccagagcactgtttccaatagaaacttctccttgacattcacattatgttatgtcctcagtcctcatattttaagcttgtttggcttcaagcagaaaaaaaataggaattaaatccaaaaatggaaagaactggcaaataaaaccatagtttcaatccttgaatccaagaggaccatagaaattagctttttggatcaacttgaatagcctcacaacagaaacagctgktttgtgttgaagcagtttaaatattttaaagctcatagcttggagaagactgtaattcagtagtttctctctttacccactctcttcaagtgttcactgttcctccctgttacccataattgtgatttcttttcttctgttttctttctttgcctttgcctccacttaattttatcttttctctttcccatttctgtctctcaagtgtcttatccttctctttttttctcactcatttttattgccatt

SEQ ID NO: 633605 - DNA, 621 bp, Homo sapiens
gtttttcccatgctgtcctcgtgatagtgaataagtctcacaagatttgatggttttataaagggcagttcccctgcacactctccctcttgcctgccaccatataagacaggcctttgctcttcctttaccttctgccatgattgtgaggcctccccagccatgtggaactgtgagttcattaaacatctttttctttataaattacccagtctcgggtgtgtctttattagcagcatgagaacagactaatacacggggctatacacggggctrtacacgttggcatatggtattcagggggttattcacacagtcctcttgcactagaaaaaaaagcagtgcccttcaacctcagctggtggaatgaccatgatgtctggaggtggctccatgaacggtgcttcattcctctgttctattgcttaatttgctagaaaattactaattatccttgaagacctaattccattcattcattcacttgttcattccacaaatatttgagagaaattattataggctgtagaccattctagacactattggggatacaatggttaaaaattgtgtatacacacacacacatatatatgtactatatatatatatatgcaatca

SEQ ID NO: 633606 - DNA, 578 bp, Homo sapiens
aagccctcagtgtttcagtcacactctccttttgacccatcccccaaaaagcgtatctgtagtgtctgcctgagactgaaatgacaagtccccaggccaacccgagatatctaccaactggracattaggaaatcatgtcaatttccagaatcttctgaaactctgcaagagctttttttttttttttttttaaagaaagtaataattaagtattgttttcttatctccagtaatcatcaaaaacttagccagggacaaccagaaatcctaaaataattcatgtgccttaaaataaccaactttccttcacttgttcagttgataacaacttgggatcttctccaccactgccaggggagctaggaagctgaaagaatgactggcaaggctgtgtcatgacagaaaggtctgtggccaatccatctgaaggtccaaccattctaaacagctatgtcacaggtacacatacaagtgcacacatgaacgtgtgtgtagtaagagagagagattccaagccagtatcatcatttcatcaaagacgtttaaatccagaagtactatatgtattatttatatt

SEQ ID NO: 633607 - DNA, 627 bp, Homo sapiens
catctctctgttcaaaggtgaattctgggagtagaattcacattctagaaccacgtaggcccagagtcttcctgtggaaggctctaattgcaatcatagcagataaactttggccaccttccagagctgggcttaggcatttaggtcaatataggatcttcagaattccctagtgaccacaggaacccctgacctactatctgatgcatccattgaatgggagttacatctgtgtaactcccatgtatggtaaaatctagagccagaataacaaatacccttctcatgcccatggcaggcatcactaatcaatcatggcattctttgccatagactttaggcatgacctccttggagttcttttcaacatggtcttcaacataagtagtaagcaactgagwggtatcgcaattagctagaacggtctatttgccattcttgtgaaattaactgtgtgtttctttaacaggaataacaatcaggaactgttctctcttttttgttacccaaactagccaagctgtgtatccctgaaaaacattctctgcaatcctttttctgcctctcccacagcatcagcttgtgatcctggtattgtctattaatgggactgcctttcgcatttcc

SEQ ID NO: 633608 - DNA, 476 bp, Homo sapiens
cagtcagtttttttttttttttttgggccatcaagctgaatgcrggttgggaatactgacttgggcgctaggggagataaatgagcaaaaaccatgacctcatctttcagtggagagggagaggacgtctaaggagagagacaggagccaggagaccagagacttcctccaaaggcagctgagtctggagggtacattgcctggacagccaacatgagttatcccctgaagcccagggcactgcccagaaaagagcggggaacccacaagaaattgtagcaataacactctgaaaatatttagcagcacaatcaaaggtaaaaggcccctgggaaacataaaaaagaagatcaatactcgtgttagcctctctgagaggtggacatgtagcaggcagggatgaaaaatgttcaccatctggaaataaaaatgccaggaatgtactttggcacgcatgaggcttcttgaaacagccc

SEQ ID NO: 633609 - DNA, 476 bp, Homo sapiens
cagtcagtttttttttttttttttgggccatcaagctgaatgcgggttkggaatactgacttgggcgctaggggagataaatgagcaaaaaccatgacctcatctttcagtggagagggagaggacgtctaaggagagagacaggagccaggagaccagagacttcctccaaaggcagctgagtctggagggtacattgcctggacagccaacatgagttatcccctgaagcccagggcactgcccagaaaagagcggggaacccacaagaaattgtagcaataacactctgaaaatatttagcagcacaatcaaaggtaaaaggcccctgggaaacataaaaaagaagatcaatactcgtgttagcctctctgagaggtggacatgtagcaggcagggatgaaaaatgttcaccatctggaaataaaaatgccaggaatgtactttggcacgcatgaggcttcttgaaacagccc

SEQ ID NO: 633610 - DNA, 503 bp, Homo sapiens
atactaataataatggtgacaatagcagcagtagcagcaacaacaacaacaataaaatgctaataaagagactgtagagccagcatccccatctgacacataagaacaggaagattaaagagaagggaagtgactttctcaaggtcacacatcaatcagcggccactctcagaggaggacctggtgttctaagagccagcattctttaatcacaatgccaaataacaataactgctagcattttgacctgcttaccctgacccaggcattgtgtacgaagcttggcaaacaatattgcaagtcatcacaaaaacttaaaggaggcaccaccatcaggtcagcccattttccaggtggcccaagtccccatggtgtaaaatgcatgccmaatggggaagggtgggcttgggagagtccctccctagaggagggagaaggagcctgcagaacaggttcaagggaattcaagggctgcctgggagcctgcacccctgttccagccg

SEQ ID NO: 633611 - DNA, 468 bp, Homo sapiens
tataaaacgtaaaccacaataaggtcgctccrtggctgaaaaccctccagtggcttcctgtctctttaagacaccctcagtctctaagatgattgttctgctccatctccacccttccctcacttattctgatccagcaccctggactttttgctgtttcctgcacatccccagtgtggtcctgcctcagggcctttgcacatgctctgtcagaatgctgtgcaccagttatttgcatggctcatgtcctcattcactcagctctctctgctcaatgctgtcttctcacagaggcttttcctgcttattcattatctgaaatcctccttaaccctgcttcactttctccatggcaccctctgataaattcaatggatatttgtttatccttgatatccttgtggtgggtcaaattgtctccctcaaagacatatgttcaaatcctaaccccctgtacctgtgaatgtg

SEQ ID NO: 633612 - DNA, 478 bp, Homo sapiens
ccacaatttacttattcttttgtccattaatggacatttgggttgtttccacctcttggctgaagagtgctgctttgaacatccacrtacaagtatttgtttaagaacctgttttttaaattcctttgagcatatacttaaaagtggaattgtagcatcacatggcaattccattaacttcttgaagaatcgctcaactgtttccacagcagctatacaaggattgcagtttctccccatctttgccaatgcttgccatcttgtttctgtttttgtttttattatggcatactagtgggtgtgaagtggcaatctctgtttctgtttgcatttctctaattattagtgatggtaagcatcttttttctttatttttatagacaaggtcttgctctgtcgcctaggctggagtgcacatgaccatagctcattgcagccccaaactcctgggctcaagtgatccttccacctcagcctc

SEQ ID NO: 633613 - DNA, 613 bp, Homo sapiens
ccattaaatgtttgttgaatgacagtatgactgaatggggcttgcagtagcagagaacggtggataactcttatctctgctccagactgtgttgtgacctacagcaaagacattgccaagaagctccatacttctttcaggaccacagacagaaagctaggttcatttctctctccaggctgcccttctgtcctagaggagagattgttctgtgaaataagccagccctaggttgaaaccttgccagtcatctgctgtggatctaagacaagtcacatgtttacccactgtaaaatggtgataagtccaccctccttataggacagtagtgagaaatcaatgaaacgatgggcatggggagcttcatgccatccctggcacagagtgggcactcaaaacatagccagctctattgccctgtggctcaggagcygagaaatggaggacactgtccctggtggggggctctggccatctgtcctcccaagctgctgatcgtttgcggcttctctgcttcccttctttgcctgattaagccaactgatggctctgtttggcttcaatttgccagccgtggctccccatccatctttcttagcacaaatggaagctt

SEQ ID NO: 633614 - DNA, 608 bp, Homo sapiens
cccccattttccaccctcagtctatttcctactcaaacttccagatcttggagtgttatcaggtaaatccttccctgacccttcgctcatcactgtcctcctcccaggtgaggtcctctatcacagcttcttcctgtataccttttctgcattgcaacgcctctcacaataactgatgtcctctccatcctcactctgcatcattccaccatgtgaatttctttcctggtccttaacacaatctgttaccagcatgtttgcatccttgtttactcatttacatactacagcctcaccttgactggaaactctgtgagagcaggaactgggtcagggtccctgcaatagctctagcaacaggtgcaatgcctaccacacagtgggcgctcggcggatgtttgtcgaatgagtacctagataggaaaggctctgaatgacaaacaacgcccaacaggtgcttaaaattccttctgtcctcgaagtctcagattctgtctgctggctcagaargcccacttctttttactagagggcaccagactgtgtcagcaggctacctccaacaatttctacatggaggctttgagtaagtgacttcacctacatga

SEQ ID NO: 633615 - DNA, 590 bp, Homo sapiens
gctcggcggatgtttgtcgaatgagtacctagataggaaaggctctgaatgacaaacaacgcccaacaggtgcttaaaattccttctgtcctcgaagtctcagattctgtctgctggctcagaaggcccacttctttttactagagggcaccagactgtgtcagcaggctacctccaacaatttctacatggaggctttgagtaagtgacttcacctacatgagcctcatctgcaaaatggggataatggctcccatcctatggcattgctgtgaggattaaatgcagcctctggcasggtgtgcaacacatattggcttggcttgaaaaatggcagtagttacactcagagcacaagaaagaaaagaaaaaaatatttaattttgccaaatgtaaaagctttgtgcatcaaataacactgtcagtaagtgaaaagacaacccatgaaatgggagaaaatatttgcaaaccacttatctgataagggtctagtgatcagaatatataatgattgcttacaactcaataacaaaaagtcaaacaacctgattaaaaaatggaaataagaacacttttacactgttggtggg

SEQ ID NO: 633616 - DNA, 591 bp, Homo sapiens
gggattacaggtgcgagccaccacacccggcctctttccttcttaacacacctattttgcttattttaagggtaagcatttagaggacaaagacaaaatgtaacctcatcaagactgaagactgccactcccttttgttgagttctttcatccatcctttcctagtcyctaatagccccattttcatcctcttacaattccctcctagctaatagttttggtcccattagtattagaggtgatacaatgaatcgtgaaagcaaaactaaccagaaatttgttactcagatttttttcttttttgaggaaagatccaagctcttaaaaacacaaattgctgatgtggtaatattttttttgcatctcaaatattattactgacatggaaacattggtttcagaaatgtcaattgaaaaatatctaaacgttagggactttttttttttttttaaagaaatgggcaaaagaaaaaagaattaaaaaaaaacaaagaaatgagctagcgtgctttcttctgaaaacactgtttaaatctgtatgttaattgaaagacactattatcgtcagaaggggaagggttaattttcaat

SEQ ID NO: 633617 - DNA, 510 bp, Homo sapiens
acttctcactcttcataatagcatgacccaattccttatactctctctytctctctccacacacacacacacacacaccacacacacacacacacacacacacacacactcactttattagttttgtttcctgtggaagtagctttggaactgcgtaatgagtagaggctggaagggttttgagatgcatcgctacctacgttgccatgacagaatgttggtagagatatgaacatataaggtcattctgcactttgggaggctgaggcaaatggaatactctgagccacggggtttgagacccgcctggacaaagtgacggaacccccattttaccaaaaatactcaacattatctgggtgtggtggtacatgcctgtggtccagctatttgggaggctgaggtaggaggatcaattgagcccaggaggtccaggctgcagtgagctgtgatcacttcattgcactctatgcccgggggacagagtgggaccccttttccaaaaaaaaa

SEQ ID NO: 633618 - DNA, 617 bp, Homo sapiens
aacctggcagtttcagcctgatatgatcaaagagagtcacaaaaataccattctccagagctctggagtccccaggggcctcatcttctctccccagcacaaactggctcccaggatgtgggtcaggttcttgatctgccactccaagtgatgactgagtctgcctctgcatttcttcccagccttcatgctgagctgcaactttccccgccggcctgactctggggatgtcacggtgatggacctgcactcaggtggggtggcccactttcactgccacctgggctatgagctccagggcgctaagatkctgacatgcatcaatgcctccaagccgcactggagcagccaggagcccatctgctcaggtatgctccagcctcagccggaccaaacctgatggtccaactaagaggggaaagaccaacctgtaggacaccgagagtgacctcagggaatggctttcagcccaggggaagaaactgctccaaatatggatgactattgttatttatgtttttattggagtaaaatacacataatatgaaatttaccattggagacattttagtatgttcacgctattgtgcaaccatcaccactacctagctccaaaa

SEQ ID NO: 633619 - DNA, 556 bp, Homo sapiens
gtacatgtacaggtttgttacatgggtatggtacatgatgctgaggtttggagtatgattgatctcatcacccaggtactgagcatattacccaatctttagtttttcagtcttgtccccctccctcactcctccctctagtagccccactgtctattgtgaccatctaaatgtacatatgcatccaatgtttagcttccacttataagtgagaacatgcagtatttggctttctgttcctgagttaactcacttaagataatggcacccagttgcatccatgttcctgctagggacgtgattttgttctttgtttatggctgcatagtatttcacagtgtatatgtaccacatttattttatccaatccatcattgatgggcacctaggtggattccatgtctttgctatggtgaatagtgctgtaattaacatgcaagtgcatgtgtcattttagtagaatgacttattttcttttggatatatgcccagtaagaggattgctaggtcgaattgtagttctgctytaagttcaacaaagagtaatattaatagt

SEQ ID NO: 633620 - DNA, 475 bp, Homo sapiens
atattttgttttaccggaaagaatccatttcatcagttatctttgtccaaagaaaataaccattgtgaggaaacagaagtgtgattcagtttctgtaggatgctcaaggccttccttgagaatcccatrctgaggatgccatctggtggtttaaagggacccagcttgccagtgacaccggcccggctttgggcttctctattggctgatagtcatttcttcaccaaatatttgagtgcctactctgtgctgggcactgtggtagcgccaccaacaatagtattagtgacatagttttagaatgatgcaggcataccttgtttcattgtgcttgctttattgcactttgcagagactgattttttacagattgaagttttgtagcaaccctgcatggaacaagtctactgatgccagtttcccaacagcatgtgcttactttatgtctctgtgtcatgttttgttagttctcaca

SEQ ID NO: 633621 - DNA, 475 bp, Homo sapiens
atattttgttttaccggaaagaatccatttcatcagttatctttgtccaaagaaaataaccattgtgaggaaacagaagtgtgattcagtttctgtaggatgctcaaggccttccttgagaatcccatactgaggatgccatctggtggtttaaagggacccagcttgccagtgacaccggcccggctttgggcttctctattggctgatagtcatttcttcaccaaatatttgagtgcctactctgtgctgggcactgtgrtagcgccaccaacaatagtattagtgacatagttttagaatgatgcaggcataccttgtttcattgtgcttgctttattgcactttgcagagactgattttttacagattgaagttttgtagcaaccctgcatggaacaagtctactgatgccagtttcccaacagcatgtgcttactttatgtctctgtgtcatgttttgttagttctcaca

SEQ ID NO: 633622 - DNA, 613 bp, Homo sapiens
ttagaatgtttaaaccaataacacttggtgttggcaaggttattagaacattggtaagctcaggggctttgtgatttgaaagaccccttaggaaagcaacacggcaattctgtccagctagagcggtaaaactgttcatgccctttgaccaaaggatttcattccagggaatttctgcttgaagatggattcaactgtagcaaaagttgtatacacaaagatgctcattaactacagctagcactgaaaaagaaaaaggaagaggagaagtgaggagggaaagggacggaagagggagaaggggaagcagaaacggasagcaggaaggaggaaaggaaggaagatgggagggaaggaaaaatgtcaaacaaaatgaacacatgtaggccagctgcagtggctcatgcctgcaatcccagcactttgggaggccacggcgggaggattgcttgaacccaggaatttgaggctgcagtgagctatgattgtgacactgcactccagcctgggtgatgaaatgagatcctgtctttaaaaataaataaataacacatgtaaaacacccaacagagtgctgagcatttggtgagtgctctacagacagtactattgc

SEQ ID NO: 633623 - DNA, 643 bp, Homo sapiens
cctctctactagcagtaagaccagagcaattgagcatctgtcctactggggggcttcagaaggagggtgagtgtcaggggtcttaatgaggagggtctagaatacagctccagcaagctaagatagtggacagctgccaagatcgtggatagagggatatcctacacagctctatttattaaggagtgggtgtctccaggcatgaatytgagggctgtttcctgtcctcagaattctatcacctggtcctagctcattgttgatgagcaagccactgtttccagtttccttggataaaggagcttccagcagagccaacctgggatacattgtgcagaccagttctaaagaatactttagaattctctctttttaaaaccactttattgaggtgtaacgggcataccaaaatgtgtaggtatttgttacatgcaatttgatggatttggagatgagcacacacccatgaaaacatcagtgcaaacctccagtgcccatttttcctatgacctaaggatgtgaaggcatcttaagacttatccgtctaaggcccaggcatctgcatttacaaacttgccttttgcttccctcgggagcctggttaatgcttgaaggaggcctagaataaatcaccaaagctttc

SEQ ID NO: 633624 - DNA, 575 bp, Homo sapiens
cttgagacagcccattttaaagatgaggaaactgaggctcagagaggtcagttgtgctcacagacatacaactaggatgtgcatcctgagcccttggacacttgaacccaagcgctcctgctctgcaatttgcctttaaatgaaatgatgtgaggtctttcaagaaatatttactgggcacctaccctgtaccaggttgccaaggatgcagcagtgagctcagctrggttgaggaccaaagacttcctcaggatattttcagaggaatcattagaatatgattggcactgggttctgttcattataccatctatgcttattgtaaagtaatgcagacccaccctgcattaaaaaaaaatacatcaaagcacaggctttaaaaataaaaataaaattctcccttcctacagtccatccccaaggcacgctctgcagggtgaatgattccttgccagccctcttaggtctcatccataaacacataatagagtgctgccttggagggagccccatgattgacttaagcaaggctttgtgatttgattctgggctcaaacacagaagcgttggctgca

SEQ ID NO: 633625 - DNA, 575 bp, Homo sapiens
cttgagacagcccattttaaagatgaggaaactgaggctcagagaggtcagttgtgctcacagacatacaactaggatgtgcatcctgagcccttggacacttgaacccaagcgctcctgctctgcaatttgcctttaaatgaaatgatgtgaggtctttcaagaaatatttactgggcacctaccctgtaccaggttgccaaggatgcagcagtgagctcagctgggttgaggaccaaagacttcctcaggatattttcagaggaatcattagaatatgattggcactgggttctgttcattataccatctatgcttattgtaaagtaatgcagacccaccctgcattaaaaaaaaatacatcaaagcacaggctktaaaaataaaaataaaattctcccttcctacagtccatccccaaggcacgctctgcagggtgaatgattccttgccagccctcttaggtctcatccataaacacataatagagtgctgccttggagggagccccatgattgacttaagcaaggctttgtgatttgattctgggctcaaacacagaagcgttggctgca

SEQ ID NO: 633626 - DNA, 575 bp, Homo sapiens
cttgagacagcccattttaaagatgaggaaactgaggctcagagaggtcagttgtgctcacagacatacaactaggatgtgcatcctgagcccttggacacttgaacccaagcgctcctgctctgcaatttgcctttaaatgaaatgatgtgaggtctttcaagaaatatttactgggcacctaccctgtaccaggttgccaaggatgcagcagtgagctcagctgggttgaggaccaaagacttcctcaggatattttcagaggaatcattagaatatgattggcactgggttctgttcattataccatctatgcttattgtaaagtaatgcagacccaccctgcattaaaaaaaaatacatcaaagcacaggctttaaaaataaaaataaaattctcccttcctacagtccatccccaaggcacgytctgcagggtgaatgattccttgccagccctcttaggtctcatccataaacacataatagagtgctgccttggagggagccccatgattgacttaagcaaggctttgtgatttgattctgggctcaaacacagaagcgttggctgca

SEQ ID NO: 633627 - DNA, 575 bp, Homo sapiens
cttgagacagcccattttaaagatgaggaaactgaggctcagagaggtcagttgtgctcacagacatacaactaggatgtgcatcctgagcccttggacacttgaacccaagcgctcctgctctgcaatttgcctttaaatgaaatgatgtgaggtctttcaagaaatatttactgggcacctaccctgtaccaggttgccaaggatgcagcagtgagctcagctgggttgaggaccaaagacttcctcaggatattttcagaggaatcattagaatatgattggcactgggttctgttcattataccatctatgcttattgtaaagtaatgcagacccaccctgcattaaaaaaaaatacatcaaagcacaggctttaaaaataaaaataaaattctcccttcctacagtccatccccaaggcacgctctgcagggtgaatgattccttgccagccctcttaggtctcatccataaacacataatagagtgctgccttggagggagccccatgattgacttaagcaaggctttgtgatttgattctgggctcaracacagaagcgttggctgca

SEQ ID NO: 633628 - DNA, 538 bp, Homo sapiens
tggaatgccagggggcaaacttcaagtatacagatgaccttcaattagtggaaggattagccttggccaagtgtcagctgaaccacttactgcctcatctctgggagtcttgtggaaagggagctacattcaaaatctctkcctctctcgctcaactattccaacagccccttcccttggctactttaggggtcttctgcagccacccagggtcttctgagtttctctcttctatggcacctgccatttttaattaaattgtccatttacacatttgcttggccccttagagcatgcagaccatgagctctagaggacaggaatgatgtctgattcacctcctcaccgcattgctggacgcattgctgggcatgaagtaagcactcaagatatattttctgaataaatgcatgggtgcccgccagagctatctatggtgtcatccaagatgcaactccagctgcacagtgacctgggaagtctcttcccacaggctgacttctgggctagatttcaagggtgggaaggaaacagttca

SEQ ID NO: 633629 - DNA, 538 bp, Homo sapiens
tggaatgccagggggcaaacttcaagtatacagatgaccttcaattagtggaaggattagccttggccaagtgtcagctgaaccacttactgcctcatctctgggagtcttgtggaaagggagctacattcaaaatctctgcctctctcgctcaactattccaacagccccttcccttggctactttaggggtcttctgcagcyacccagggtcttctgagtttctctcttctatggcacctgccatttttaattaaattgtccatttacacatttgcttggccccttagagcatgcagaccatgagctctagaggacaggaatgatgtctgattcacctcctcaccgcattgctggacgcattgctgggcatgaagtaagcactcaagatatattttctgaataaatgcatgggtgcccgccagagctatctatggtgtcatccaagatgcaactccagctgcacagtgacctgggaagtctcttcccacaggctgacttctgggctagatttcaagggtgggaaggaaacagttca

SEQ ID NO: 633630 - DNA, 502 bp, Homo sapiens
atttacacatttgcttggccccttagagcatgcagaccatgagctctagaggacaggaatgatgtctgattcacctcctcaccgcattgctggacgcattgctgggcatgaagtaagcmctcaagatatattttctgaataaatgcatgggtgcccgccagagctatctatggtgtcatccaagatgcaactccagctgcacagtgacctgggaagtctcttcccacaggctgacttctgggctagatttcaagggtgggaaggaaacagttcataactcccagggaagactgctattgaagtataaaggaaaacccttcaacctcaagagtgaagccagattcctacccgtccacccactggaggagatcaaagtcccgattcttcatgtatggtgattactgtgactaaaacatactcatcaattgattcattcatcttttcattggaaaagtgatacatttaaatgcctacaaggccaggcaagtaccacgtgaaagac

SEQ ID NO: 633631 - DNA, 538 bp, Homo sapiens
tggaatgccagggggcaaacttcaagtatacagatgaccttcaattagtggaaggattagccttggccaagtgtcagctgaaccacttactgcctcatctctgggagtcttgtggaaagggagctacattcaaaatctctgcctctctcgctcaactattccaacagccccttcccttggctactttaggggtcttctgcagccacccagggtcttctgagtttctctcttctatggcacctgccatttttaattaaattgtccatttacacatttgcttggccccttagagcatgcagaccatgagctctagaggacaggaatgatgtctgattcacctcctcaccgcattgctggacgcattgctgggcatgaagtaagcactcaagatatattttctgamtaaatgcatgggtgcccgccagagctatctatggtgtcatccaagatgcaactccagctgcacagtgacctgggaagtctcttcccacaggctgacttctgggctagatttcaagggtgggaaggaaacagttca

SEQ ID NO: 633632 - DNA, 502 bp, Homo sapiens
atttacacatttgcttggccccttagagcatgcagaccatgagctctagaggacaggaatgatgtctgattcacctcctcaccgcattgctggacgcattgctgggcatgaagtaagcactcaagatatattttctgaataaatgcatgggtgcccgccagagctatctatggtgtcatccaagatgcaactccagctgcacagtgacctgggaagtctcttcccacaggctgacttctgggctagatttcaagggtgggaaggaaacagttcataactcccagkgaagactgctattgaagtataaaggaaaacccttcaacctcaagagtgaagccagattcctacccgtccacccactggaggagatcaaagtcccgattcttcatgtatggtgattactgtgactaaaacatactcatcaattgattcattcatcttttcattggaaaagtgatacatttaaatgcctacaaggccaggcaagtaccacgtgaaagac

SEQ ID NO: 633633 - DNA, 502 bp, Homo sapiens
atttacacatttgcttggccccttagagcatgcagaccatgagctctagaggacaggaatgatgtctgattcacctcctcaccgcattgctggacgcattgctgggcatgaagtaagcactcaagatatattttctgaataaatgcatgggtgcccgccagagctatctatggtgtcatccaagatgcaactccagctgcacagtgacctgggaagtctcttcccacaggctgacttctgggctagatttcaagggtgggaaggaaacagttcataactcccagggaagactgctattgaagtataaaggaaaacccttcaacctcaagagtgaagccagattcctacccgtccacccactggaggagatcaaagtcccgattcttcatgtatggtgattactgtgactaaaacatactcatcaattgattcrttcatcttttcattggaaaagtgatacatttaaatgcctacaaggccaggcaagtaccacgtgaaagac

SEQ ID NO: 633634 - DNA, 609 bp, Homo sapiens
cactggggaaagtgaattagttagaacctcttcccaaagccatccacctgtttccaccactgctttccactgggtcaccctgcacttgttccaccttgtgacctttatccggatgtctccagtcattccatgttctctaggagctttgcaatagctttggctgggcatggaaactaggtgtgagagcctgtatgtctcccagatggaaaaatagaaatgagaagcgtggccaggttccaataagagatttgagagaagcagccctctataaaatctggaatagaattcaacacctaagtgaactagatcttgttttgacaacaggcatcatttcccacctccatgagcctttcttggtggtaacagactatgaccagtaataggtttccatttctgcacccagttgggggtgatattaaaattacttaataatctgtacaccatggtgccaaccatcagaacggatgctggctgtaaaaaacagacatggccatgtcattacttactgattcatacaccagccccagtctgagtgatacagaaatstaatcttcaagaaatttctgatgggttgtgtctgagtccaggagcagctataccttaaagctt

SEQ ID NO: 633635 - DNA, 581 bp, Homo sapiens
agatctgggtggagagctatggaggagagaccagaggagaaggtacagcctctacctttgaaatacacaaagacgcatagggagagtaagtttcttacatatccattcattcaacaggtgctccccgagtttaaaccccacatcaggcaccgcacyaggcactgaggatgaagaaaggaagctcatactcacatagcatgtgtcagacatgtgaatggttacaggacagtgtaagaagtgggcagggagtcatcaccccagctgcagaatccaaaagggcttcctggaggaggcaatgcctgaattgagagttgaagacaagctagcaattaaccagatgcaaaagagagggcaaaagcaccagcatgaaccaaggacagagaacacagcacatttgatgataattaaaatggcaccatgttgagacctcttgtgtgaattatctcattcacctactacatttttttctgtgtttaaatgaggaagttggggtacaatgatattacatacagctagcaaattgcagtatttattgcagtctgactgttgggcctgtatttctaatcactatgttgtatatc

SEQ ID NO: 633636 - DNA, 581 bp, Homo sapiens
agatctgggtggagagctatggaggagagaccagaggagaaggtacagcctctacctttgaaatacacaaagacgcatagggagagtaagtttcttacatatccattcattcaacaggtgctccccgagtttaaaccccacatcaggcaccgcaccrggcactgaggatgaagaaaggaagctcatactcacatagcatgtgtcagacatgtgaatggttacaggacagtgtaagaagtgggcagggagtcatcaccccagctgcagaatccaaaagggcttcctggaggaggcaatgcctgaattgagagttgaagacaagctagcaattaaccagatgcaaaagagagggcaaaagcaccagcatgaaccaaggacagagaacacagcacatttgatgataattaaaatggcaccatgttgagacctcttgtgtgaattatctcattcacctactacatttttttctgtgtttaaatgaggaagttggggtacaatgatattacatacagctagcaaattgcagtatttattgcagtctgactgttgggcctgtatttctaatcactatgttgtatatc

SEQ ID NO: 633637 - DNA, 617 bp, Homo sapiens
aagctggggaacaatatggtcctattagaattttagaaaaatcatcatggaaggaggatcttttggrgggagagattggagtcagggcaactagtgaagagacagctgtaatcatctaaggaagagaagatattagtttgggccagtgggcatggcccaatggaggtaaaggaaatgataaagtttaaaaacaaacaaaattttgtgattgactggatacagagggaacagaaatgggagattttcagatttctggcttgagctaggactaccacaatagctgaaaagagaagaaaaatatttttcatcccaaatgagagaaagaaaagagctttggggtaaggttggggtgagaaggtgaggatgaaatggtcagcaccaagagaggtaggataataattgttgatatctctctctatccttgacaatttttgaaagaattgaggcaaaaatagcccatatacctatagtaatgatttcaaaatagagtttagccttcaagggcaatctgaggaggagagaaaggtgaggaacccatgtaattgcagctggaaggctactctgctccaactagctttccttttcaactcagcctaccaagaaaaagcaaaagcaca

SEQ ID NO: 633638 - DNA, 500 bp, Homo sapiens
aggtaggcaaacatactttgaaatgtctaatgtttatgcatttctttaaatgcaaattagaaaaatatataaatatatggtttgcacattaaacttctaatttcatggacattattttggytggagtaagccaagtgaaaaaggcaagccaatttacacgcagtttcggaaaacaaaaacggtaacacaaaaagaagtagctggtaatagaattggactgtggaaaccgcaaaaattagcccacagactaaagtccagtttctcagcctgacctcccaggaagtccacagctgggtctcagcccatctcttgctgtctcaaacatccagtacaccaagccccttgcagctcctagacccttaaagcctccatctttcatgccttagctcatgctagtctctctacctggaaagccctctcctctcttctctgctagaaaacaccttgctaattcctcaggatccctctgtccaccctgcatttacagctatgtaataact

SEQ ID NO: 633639 - DNA, 598 bp, Homo sapiens
gctaaacttattcctaagcattttatatatttttgaggtagctattgtaaatgggattgtttttcttgatttcttcttttcagctagtttgttgttgatgtatagaagttcctctgatttttgtatgttaatttcatactctgcaactttactgaatttgttgatcagttctaagagttttttggtggagtctttagtttttcctaaatataagatcatgtcatctgcaaacaactttccactttggatgttctttctttctttgcctagttgctctggctagggtctccagcactgtgtttaataggagtggtgagagtaggcagccttgtcttgttctagttcttaaaggaaaagcttttcacttttatccattcattatgatgtaagctgtggattttccatatatggcctttattgtgttgaggtattctccttttattcctaatttgttgaaagtttttttttttatyatgaatggatgttgaatttcattaaatgctttttctgcaagtcttgaaataatcatatggttttggtctttgattcttttgcggtagtgtatcacatttattgatttgcacatattaaagcatca

SEQ ID NO: 633640 - DNA, 598 bp, Homo sapiens
gctaaacttattcctaagcattttatatatttttgaggtagctattgtaaatgggattgtttttcttgatttcttcttttcagctagtttgttgttgatgtatagaagttcctctgatttttgtatgttaatttcatactctgcaactttactgaatttgttgatcagttctaagagttttttggtggagtctttagtttttcctaaatataagatcatgtcatctgcaaacaactttccactttggatgttctttctttctttgcctagttgctctggctagggtctccagcactgtgtttaataggagtggtgagagtaggcagccttgtcttgttctagttcttaaaggaaaagcttttcacttttatccattcattatgatgtaagctgtggattttccatatatggcctttattgtgttgaggtattctccttttattcctaatttgttgaaagtttttttttttattatgaatggatgttgaatttcattaaatgctttttctgcaagtcttgaaataatcatatggttttkgtctttgattcttttgcggtagtgtatcacatttattgatttgcacatattaaagcatca

SEQ ID NO: 633641 - DNA, 598 bp, Homo sapiens
gctaaacttattcctaagcattttatatatttttgaggtagctattgtaaatgggattgtttttcttgatttcttcttttcagctagtttgttgttgatgtatagaagttcctctgatttttgtatgttaatttcatactctgcaactttactgaatttgttgatcagttctaagagttttttggtggagtctttagtttttcctaaatataagatcatgtcatctgcaaacaactttccactttggatgttctttctttctttgcctagttgctctggctagggtctccagcactgtgtttaataggagtggtgagagtaggcagccttgtcttgttctagttcttaaaggaaaagcttttcacttttatccattcattatgatgtaagctgtggattttccatatatggcctttattgtgttgaggtattctccttttattcctaatttgttgaaagtttttttttttattatgaatggatgttgaatttcattaaatgctttttctgcaagtcttgaaataatcatatggttttggtctttgattcttttgsggtagtgtatcacatttattgatttgcacatattaaagcatca

SEQ ID NO: 633642 - DNA, 586 bp, Homo sapiens
gttaaattcctctaatctggttgaggccaagaaattctaaacacttgattaaactactcatgccacagaaggccacagtgtgtttgggaatgacgaaaattagaatgaacgaaaatatctttatttagtctaaaatgtgataataatgctttaagatttgctcagctctttaagcatccttgcaagaaatagagtttatatcctttaggaatgagactttactattaagtaactgggtatgaatcaccttaaattggctaccgcgccaagggacacacagttgcttgtttattctgttgccttaaaaaaaaaaaaaaaaaaggaattcagaactaaattctcaggccaaacagccagtcaacaaaaaacaaacactaagataacagcaatgtttagcagaaaaaaaaatctaacatgaggcaaaagttgaataagcaaaaaacatktcttccaagaaagtgctgacatcaacaatactattaatacagcaaagctgaactatggttagaaaccctgttataaaaggatacccagacttgcactattttaaaaataatgttacttggttctagaaatttctgagtac

SEQ ID NO: 633643 - DNA, 621 bp, Homo sapiens
aattaaaatagtccagcaaaagccatccctgccttcatcaacagcagcagctctaggatcacaaccaagacctttctgggccttaagagaatggcttgtcttcygtcaacatcaggcctagcaagtcactgaaggagctattcaacgagtggcacattggctgccaaggtgattctacaacacccttagccagaaagaccccagaactccaagacacttcaagagtactactgttgtccccactgtcaaaactcagtcccgagaagtgggctttgaggatgatcatttaaaagaagctattttttaccttgtgaggtaggctgatttgtttctaaatcaaatcagttatacatcatctttgcctcccatagaactaccttcactcaattgttttcaagttattcctttaatttggagaccagatttttaaaaagcacacattattctgccatattgacaagaaaattgttaatgagaagagcatcacccattctgttgtccaactttctgacataaaaccctgggtggaaacctcagagtagcaacaaggaaaatggtttctctctgagacaaaggctttctgcatttccttctgcaggacagcaggcgagcttaaaacca

SEQ ID NO: 633644 - DNA, 621 bp, Homo sapiens
aattaaaatagtccagcaaaagccatccctgccttcatcaacagcagcagctctaggatcacaaccaagacctttctgggccttaagagaatggcttgtcttctgtcaacatcaggcctagcaagtcactgaaggagctattcaacgagtggcacattggctgccaaggtgattctacaacacccttagccagaaagaccccagaactccaagacacttcaagagtactactgttgtccccactgtcaaaactcagtcccgagaagtgggctttgaggatgatcatttaaaagaagctattttttaccytgtgaggtaggctgatttgtttctaaatcaaatcagttatacatcatctttgcctcccatagaactaccttcactcaattgttttcaagttattcctttaatttggagaccagatttttaaaaagcacacattattctgccatattgacaagaaaattgttaatgagaagagcatcacccattctgttgtccaactttctgacataaaaccctgggtggaaacctcagagtagcaacaaggaaaatggtttctctctgagacaaaggctttctgcatttccttctgcaggacagcaggcgagcttaaaacca

SEQ ID NO: 633645 - DNA, 631 bp, Homo sapiens
tgcttatcagggcattactttccgctcaagtggcttgctttttaacattttattatcttaacgacaaaaaaccctggaagcaataattatttattatgttaattctttagctttcttcctgaaatttcggtaagaccattaaaaactagctgtgcccttgaaacaaaccatgagtttattaatactcaaccaattaagggggaaaaagcaaagtaagagatgctccacaccagcaattattaactaagcagtttgcacactttccttgccactgattttattgtagaaaatatcctatatatttaactgactgaaatgtgtttcaattgttacaaggactcagaaaatctgaaaggaacagaagaaacctgccaccatgtctaggaatttttctaatccaggttgtaatagaagccattttccttttcacctctcacagatatggacagaacctccgagtctcccttcagcccrctgtggaaggcctccaaggcaaagggctatgttctgtctcggttcagcaacacttccccagctcacacacttgaatgtgcacacacacacctgcctttgtatttatcaatcaaaccctgggaatgttgctctttcttgacaactttctctatcaaca

SEQ ID NO: 633646 - DNA, 557 bp, Homo sapiens
gtgcgtgcacctgatgtgcctgagacctttccagccctttgagcccaatcccgaacagtctgagatgacactgcctagaactcagggacttctacagctgctccttcttctttaacttatcttctctgcattgacacaaagtttttgattgattgatacaaacttttttmaaatctcgtcaaccaggatgcagttctttcttccatgaatcccagttactttatatctcatttatgtggcatttatacttgaattacctacatacctatcctctttccttccatattataatcagatccttaagaacaggacatgccatattcctagctgagatcctgtttggactacaggcacaaaataaaaactaaatgagtaactcctgaaattcttaaagctagatcagtatgctattttgcatttagttgctgaaacctccctcacagtcaccagggctgagggtttcttccagcactagagaggcaagaagccacccaagccaccaggagcactgtctccttctaagggatatccagacagcagctctgtctcataaatct

SEQ ID NO: 633647 - DNA, 557 bp, Homo sapiens
gtgcgtgcacctgatgtgcctgagacctttccagccctttgagcccaatcccgaacagtctgagatgacactgcctagaactcagggacttctacagctgctccttcttctttaacttatcttctctgcattgacacaaagtttttgattgattgatacaaacttttttaaaatctcgtcaaccaggatgyagttctttcttccatgaatcccagttactttatatctcatttatgtggcatttatacttgaattacctacatacctatcctctttccttccatattataatcagatccttaagaacaggacatgccatattcctagctgagatcctgtttggactacaggcacaaaataaaaactaaatgagtaactcctgaaattcttaaagctagatcagtatgctattttgcatttagttgctgaaacctccctcacagtcaccagggctgagggtttcttccagcactagagaggcaagaagccacccaagccaccaggagcactgtctccttctaagggatatccagacagcagctctgtctcataaatct

SEQ ID NO: 633648 - DNA, 557 bp, Homo sapiens
gtgcgtgcacctgatgtgcctgagacctttccagccctttgagcccaatcccgaacagtctgagatgacactgcctagaactcagggacttctacagctgctccttcttctttaacttatcttctctgcattgacacaaagtttttgattgattgatacaaacttttttaaaatctcgtcaaccaggatgcagttctttcttccatgaatcccagttactttatatctcatttatgtggcatttatacttgaattacctacatacctatcctctttccttccatattataatcagatccttaagaacaggacatgccatattcctagctgagatcctgtttggactacaggcacaaaataaaaaytaaatgagtaactcctgaaattcttaaagctagatcagtatgctattttgcatttagttgctgaaacctccctcacagtcaccagggctgagggtttcttccagcactagagaggcaagaagccacccaagccaccaggagcactgtctccttctaagggatatccagacagcagctctgtctcataaatct

SEQ ID NO: 633649 - DNA, 577 bp, Homo sapiens
ctcagtacctatttataaaaatgaaaaatggaaatagaattgatgtttaacccagtttaactcaaccagtaagtaatatctacccacagataaatgaactatttcatcgaaagcccagttgatttctgaaacaattcttccaataaattttaacaatgattcgattacatactagtgataattcaactacataaaaatctaacacttaaaggtttatactcctataaaattaaatatagaattaaaatttcaactttttacatatttttgttacagagaagcctgataagtaatcacagactttcaagcacaaatgtgttataataggatatgattctatagggaaagaaaatgggagtaccagtttaaggagaaaaattaaagaggtaaagtttctctcaattaaataaaagtttgttcatatatttttaaatggacaatggagggtatcgaatccctttggtacttgggtctttacaatggatacctttaaaagatgtttgtacaagttgtattttaaaatgtcaatatttaccatagggcatacrttctctccttctcaactgtatgtttatgt

SEQ ID NO: 633650 - DNA, 559 bp, Homo sapiens
actccttagaaacatcacatagagagaaaagatgcttagcaaggaagacttggaatcccgtgcccacctttggccttctctgttacctgttacaagagccaamaaattccctgtttgatgcaggccagctttgactgaggttttcagttcaatataaaagttccagctactacaaaacatgcatttgaatctggctttctaacagccgacagaaaaaagaaagttgatgggttatattgctcactgtgtccacgagaagaatctgactgcacaggagaatcacacctttccctgaaccggaaagaaatctctccagaaggtcatcatacggattttatatgacataatacaacatcacttaatatcttcctagcagccacaacactacatttgaaatgctttttcttagagcacacttcaatacaggaggatggcatcaaagtaaagcataaatcaggaaaacactactctgtgtatgtatggggagggagacataatatggtacatgtaccccacgttcggatgacatggttgggttgggagtggagacgactttacc

SEQ ID NO: 633651 - DNA, 629 bp, Homo sapiens
agcagcggatttttaaattatcatctaacaggctgctgatatcaaataaattagagtaaatcaaaataagattaaatgtgtaaataatgtattgcttcaatcccaccawaggtaaagtcattacattaaaaaatttttatttaaaattgagaacattcaccaaaattatcatatttgaatttccctggtggttttatgctattatttccttgccagaccacaattaaatcttaaattttatctcattcacaacaaaatcctttttgctgtgaatttagaaatctcatattttaagtatagaattctgtgctatcaaaagtgatgatctgctcttgacaaaattacattatcaatatttaaaacattttttgcaatctaatagtaaaactggtcagtgtcattcccaaggtacacattaaaattttactttaaaatgttattacaagattagttgaggttataaactagaaaaaatcattttgaataagccagaagcaataaccttattttataacaattctttctacgacagcttatatttgtcttataaaacagtcaaaatctttttgaaactattacttctttcaggagctttctctctgatgtcattaactttggcctctttttta

SEQ ID NO: 633652 - DNA, 382 bp, Homo sapiens
ggctatatggataagtaatatacatgattcatatatatttattctataaaattgatatttctctttagtaaaatcactgtgttgttataattgagattttcacttaatttgtgttccattgacagcrgtgattgaaagctttgctgttctgtatggtagcacctaacagcatttcaggtgttctgttcctcagtgacactagctacatttcaaatgctcagtagcttcatgtggctagagctaatgtattgtacaacatggagagaaaacaagtccatcatcatagaaagcactattgaacaacattgatctaaaagattcatctattcaggccccatgtggtggctcacacctgtaatcccagcgactcaagaggcagagg

SEQ ID NO: 633653 - DNA, 545 bp, Homo sapiens
tctttttctcttttcttttgagatgaggtcttgatatgtttctcaatctggcctcaaactcttggactcaagtagtcctcctgcctcagcctcctgaatagctggaactacaagtgctttctctaagatgaagttatttctgtgttttcaagtccactagatagttttcatgtttttcttacagtttctttaataacccaaatgatacaagagcactatagtgatttatatatatatatataaaaggtaacataccatatataaatttatatatttatatataatatatatactataatagaaaacatactatatatgtgtgtgtatatacatatatakagagagagtatgatttttgttaccttttaaaatagttctttttgattctctattcttaaaagcctttttatatttttttccagtattgttttgggtccagaccatttgagagtgacatatagaagtcatttgttacacgcatgagagtgttagaagtgacaagaaagaggcaataaagagggttttctggatggggtcagttttta

SEQ ID NO: 633654 - DNA, 606 bp, Homo sapiens
atatttagaaactggaatttgttacaagtaaaataaaacatgataacaaggctatttccttctttagtaatctacttgttaagatgtggcaatactctttgggtaaattttcaaatacagatatattctaactagaagtgaaaactaatgtaaaaaatattctatttgctcactggaaaaaagtcaatgaaaatacagcaagaaatcatgtgctctacaatatcaggatgatatctgcttgttcaccatataaatgtaaacagcatgtggaatatgaatataaaagcatatagaggccgagagcggtggctcaagcctgtaatcccagcactttgggaggccaaggcgggtgggtcacctgaggtcaggagttcgagaccagaccagcccarccaacacggtgaaaccccatctctactaaaaatacaaaaatcagccaggcgtggtggcaggtgcctgtaatcccagctactcaggaggctgaggcaggagaatcacttaaactcaagaggcagaggttacagtgagccaagatcacgccatcgcactccagcctggtggacaagagcgagacttcatctcaaaaaaaaaaaagcatatagaata

SEQ ID NO: 633655 - DNA, 609 bp, Homo sapiens
gtctatctgggaaatagtctgtatctctagaccaggggtgcccggtcttttggctttcctgggccacactggaagaagaataattgtcttgggccacacataaaacataccaacactaacaatagctgatgaacttcttaaaaattgcaaaaaaaatcataatgttttaagaaattttacaaatttgtgttgggccacattcaaagccatcctgggccgcgggctggacaaccttgctctagacaattatctatctcccaaattggactctttaatcctcaagagcacagcacccaccaattaatcccccggcatatcgtgaaattacaaaaaaaaaaaaaacagccttgtagttctgaacgtaaatgtgttattacagcaaagttaatggaaagaaatatatcttatcacagttatcaacactgagaatcactattatagaaaagcaagcttattgattctttaagaaaggatgggtaaaaacaaaaaagaaattagcacaggttttgatgagactgcataatattttctcagtgggattcagttycaatttaaagctgacaggacattttgagcttaaagatactgagtgatttggttaaaattaca

SEQ ID NO: 633656 - DNA, 581 bp, Homo sapiens
gattactttgtaatctcatgactttaaaaccttcttaattaaagtcttacatttgttttaaataaaacaggacacagaagtgtagaacagaaaagcaaatcaggatgagggaaaatgtttctggccggtagtccccgggatctctgaatttaatttgatactcaattaaagaggaaatcagatccygggcacaggctctcactttcacatggcacataagccaacccaacctaagggtccccatgtaaattaccactggctcacgtgacactacactatatgcctgcaaccatcccccttcatagataacaaggcaaaatgtgctattaatggtgtctgtgtttatcttatctcaaggagagaaaaacaaagctttagttttgaaaaaattacttcacaagggctcacttgtataagagactgacaatgtaaatccatcatcctctcaaagatttcttcagagttcatgatagaaaacattttaaaataacaaagatgaaactttaaaagcattactcaaaacttttttctttaattcccccacttttaattctaaaataaaccagcaaaatagcccaaaa

SEQ ID NO: 633657 - DNA, 621 bp, Homo sapiens
tgcagccttcgcaacaatctcatgcagtagatactactgctgtctctatttaataaaagcagaatctgatggcgagtgcggtagctcacgcctgtaatcccagcactttggtaggccaaggtgggctgattgcttgagctcaggaattcaagatcagcctgagcaacgtagcaaaaccccatctctacccagaaatacaaaaattagctgaatgtggcagcacgcacctacagtcccagctacttgggagaaggatcacttgaacccaggaagtcaaggctgcagtaagccatgatgacrccactgcactccagcctggacaacagagtgataccctgtcccaaaaaaaaaagcagaatctgaggcacaaagaggttaagaaacttgcccaggatacacgacaagaaaaaggtagaactaggatcaaaatccagtcagtcagtctacagtactgccatcctcatagttcagtagaggctaactgatttcaaactagataactaggggagatgtccctttaaggatgtactctgaccttattatgaatacagagttcagacctctagccttcatcctttgggaagcctgtagagtcaagcacagtggaaagaacatggaaga

SEQ ID NO: 633658 - DNA, 606 bp, Homo sapiens
gtaagttttagctgctattattttataaagttttgtttatttatttatttatttacttagtagacacggggtctcactaggttgcygactggtctcaaactcctggcctcaagcaatcctcctgagcctcccaaatcactggggttataggtgtgagccactgcacccagcctattattattttattgttgctgtattactgttatgatctatttgaactggcttttgataggttcaaatattactgcctctttcaactatgcctatttaatcacactcagaagtgtataatacagcagtagaaagagtgtacatcttggaatgagagacttcttggagctgcttcagtgatatcatgtccatgtgatgatctgagcacagtacttaccttctgtgagcctcaacttcccagctataaagtgtgcattatatttccaattcccaagagttttgtgaagagtggaaaacatttgtgaaaagcagattctctcaagcactgcaatgcacctaaggataataggtctagaatccgattccccagccgcccagctctggcttgatgaaagcatgtgaatctccctcacttggcaattacaagcactttca

SEQ ID NO: 633659 - DNA, 568 bp, Homo sapiens
ccggggactgtttcatgcttgaaagcaactgttaagaatttgacaacaaccaaactgttcctatttaatccttctcccaaggtaaaaaagaattataggtaaacatatgccttcattatttgctttgctgcatttcaatacccaatcccacacaaaattgccagccaaggatttaatgcaatcacttctatatttcagagctatcgcctctgcagaatagaaaaagcttaacaagsgttatggtgctggttagccaggaaccgtattttgtatagcacgcatcttaaatgtcacgggggtttggggtgaagtaaaaggcatcacaaatcaaagggtacaaactatgaaaagaagaacgaggaaaggtgctgcagaactgagattcttacttggttctgaaagatagtagatgtgggcaaacaggtttggggatttatttttgggtttttttcctttcaggttttttgtattgctttttgttttgagccttcagtaatttattcacttgtcacatcctcaatttactactcctactaaaactaattttattactatactaaatagaagt

SEQ ID NO: 633660 - DNA, 568 bp, Homo sapiens
ccggggactgtttcatgcttgaaagcaactgttaagaatttgacaacaaccaaactgttcctatttaatccttctcccaaggtaaaaaagaattataggtaaacatatgccttcattatttgctttgctgcatttcaatacccaatcccacacaaaattgccagccaaggatttaatgcaatcacttctatatttcagagctatcgcctctgcagaatagaaaaagcttaacaagcgttatggwgctggttagccaggaaccgtattttgtatagcacgcatcttaaatgtcacgggggtttggggtgaagtaaaaggcatcacaaatcaaagggtacaaactatgaaaagaagaacgaggaaaggtgctgcagaactgagattcttacttggttctgaaagatagtagatgtgggcaaacaggtttggggatttatttttgggtttttttcctttcaggttttttgtattgctttttgttttgagccttcagtaatttattcacttgtcacatcctcaatttactactcctactaaaactaattttattactatactaaatagaagt

SEQ ID NO: 633661 - DNA, 503 bp, Homo sapiens
aaaattcaaaactctattttgaggacctatagcagctatatcaaataaactgaaaattactgtgtactaccacagacaaatatgagcatattagaactattttatcattccatccaacactaaattagaagaaatagggacaccagctgaagtacacctttgctggctgctgcgtgctctttctgtatttctgaggaagtatggcaccaggtgaacagggcagctcccagacatctttcagaaaccaaagcctctgtggccctttctgtatacagttactgctaaccatgcactgcactggaaggtaatgtcaaaataaaatttaaaatctgtttgcatcctccttctgagtacacgcattctttccatattcataaattcagcatcaccatcaatacttaacattcccggcacaracaccacttgcaaatttccccatgcagcccctccagggcccacttcagactcatttgaattggaatgagtatttccaggtgctgtca

SEQ ID NO: 633662 - DNA, 356 bp, Homo sapiens
tgaaggagacggccaattcattgctgattctgtcaccgacttgctaagcagaccgtagcaagttacttaagtgctccaggtttaagtcccctcatcagtaaaatgcaaataatggtggcacctttctcccaggccagtgtaagcatttgtgtgtgacagtgcctagcatgcctaggggctcaagraactatatactgtttctgtagttattattattctctctcccctaaatatgaaaaattcctagcactaaccagattaccaaattaaatggcacaagattaatttatgaaatgggtacaatgcaactgatgtatgagaatgtagattactgttacccgggtgtagcaggttga

SEQ ID NO: 633663 - DNA, 420 bp, Homo sapiens
gtttcgtgtcttcctttccaatgtgtatgccttttacttattttgctcaccttatctcactgactaggagcaatgttgaatacaaactgtgagagtggatgtcctagcctcattcctgatcggaaggggaaagcagcctttaccataagcatgatggcacctctgggataacagggtgcccatctagggcatggatggccttgatcgggctggaaaaggtgccttgaattcttggtttgctgaatattaatgatcaggaatggctgttgaattttgtcamacgatctttctttgtttatttggatgacatatggcttttctgttttggcttgttcataatttggtttgttaaccttgattttaaatgtaaaactaactttgtattcatgggataaagtccacttggtcatgatgtattgc

SEQ ID NO: 633664 - DNA, 617 bp, Homo sapiens
ctgcttccaccacatgccctgtacatgctttctcagttcccacccttgcttatgttggacctccagcctggaatgctgtctccagggctcacccttaggccacatactgtgtggaatgggcacagtccaaatactcctcctccagcgggctctcttcrcttattcctgcctacaactagggctcagagttgtcagtggaatctcatctttacactgtcctgcattcttctcaaactcctgacctcaggtgatctgcctgccttggcctcccaaagtggtgtgagttgcggcacccagccatgacctgcattcttctattatggtccagttggtcttatttccagtgagctcctggtagtctggaacccttctttagaggctctttggaactgatttggacaacaaataaaggttccatggagacttgctgaagtgcatggatgatttttttaaaaatttcatttattttctaattatgaaataatttacacacttcctcaaaaattcagaacatattgaaatgaaaataaagatccctcatatactcatcaaccagtgagttacactactgtttacagtttggtgtaaatatgtgcagactttgttttagtaactga

SEQ ID NO: 633665 - DNA, 617 bp, Homo sapiens
ctgcttccaccacatgccctgtacatgctttctcagttcccacccttgcttatgttggacctccagcctggaatgctgtctccagggctcacccttaggccacatactgtgtggaatgggcacagtccaaatactcctcctccagcgggctctcttcacttattcctgcctacamctagggctcagagttgtcagtggaatctcatctttacactgtcctgcattcttctcaaactcctgacctcaggtgatctgcctgccttggcctcccaaagtggtgtgagttgcggcacccagccatgacctgcattcttctattatggtccagttggtcttatttccagtgagctcctggtagtctggaacccttctttagaggctctttggaactgatttggacaacaaataaaggttccatggagacttgctgaagtgcatggatgatttttttaaaaatttcatttattttctaattatgaaataatttacacacttcctcaaaaattcagaacatattgaaatgaaaataaagatccctcatatactcatcaaccagtgagttacactactgtttacagtttggtgtaaatatgtgcagactttgttttagtaactga

SEQ ID NO: 633666 - DNA, 611 bp, Homo sapiens
gggagggacgcagttcctggctaggctgctgctatcaggccacatctcaacactggaatggggaagcgtgggtgctggggggcagttggtcatctctgctgtgggrgctcacacaattgtgttatgaagccttgttttcaagcagaggggttattacaactcacttgtatgctgatggatcgcatgttagaaagggaaaccttgatgttgttggcaggagggatatttgagcagagtccttgagactgtgagaggggacggaacccagagcacagtggccccaggagttcattgccagctgcaggagatgagggtgatcgtgcagacacaaacgaagctctgtgttgggaggacaagaggggccagtgaaatacgaagcaaggtagacagttgagcttagggaggtgtggcaagtttgaagacagagaggcgggagagccgatggaccagagtgggatggttgctgctggtgcccctcggtggggtctgtgatgagattttgcctcctctgcggggggcaggcgtggtgtggacagagttaggtttgggcatggaggagcctggccaggcagcaaagggggagagagatggggccgctgcatggtgcgcat

SEQ ID NO: 633667 - DNA, 543 bp, Homo sapiens
ggacagcaccaagatgttcatgtgggatttgccccatgatcagaacccctccaccaggccccatctccaccacaggggattgcatttcaacatgagacttgctagggccaaactgtatccaaaccatagcactcatcatccattcatccatccactgattcattgttcaaacatttattgggcacatttactatgtgtcaaatgctgggtcaaggtatgttgagggtacagggatgcccaagaacactgctgcagagaccactgctgtagacgattctccagctggtgggttaaggagctgccatctcctgcttctctgcctgtggaggaataaaygtgcaatgggtatatgcaatttttttgctgtaggatttataggaatactgcctagaaatacttttgctccaaactcctctcaggcagggctcacacctccatggggcactcagctactaatttatctaaaccattagtactcccaattgacacaactcagggccaccctttacaatcatcactaaccaaagagccacatgcttctga

SEQ ID NO: 633668 - DNA, 598 bp, Homo sapiens
gtgtgcatgcatgcatgtgtgtatgggtgtgtgcacctgcctgtgcatgtgtgcacatgtgtaggtgtgcgcacatgcatatgtgtgcacgtgtgagtgcatatgtgtgcacgtgtgtttgcctgtgtgtgagatttctcagccagagttcttttctgccatgtatccaacggcctacacctcctccctactggagcgtccataggcaccagcagcacgacaacctcaaaacccattccatgttgttttccttcaaatctgttcttcctttcccttttttcagaaaaygatatgctcacttgtccaaaccagaaacattgatgtttgtcttacatcctcttctccccttttcctcagctcacatccattaaatcaccaaggcatttggattctgacttacaaatctcctctcaaatccttctgctgttctctgttccagttgccatcaccccatctcaggctatgattttctcctaacctggattactacaaaagccccctagagggtatgcttctctctaacctggaccccctatccatttaccttgtgcaataaataatggcacttaggcataataccgccttcattagctcccca

SEQ ID NO: 633669 - DNA, 545 bp, Homo sapiens
aaatgatatgctcacttgtccaaaccagaaacattgatgtttgtcttacatcctcttctccccttttcctcagctcacatccattaaatcaccaaggcatttggattctgacttacaaatctcctytcaaatccttctgctgttctctgttccagttgccatcaccccatctcaggctatgattttctcctaacctggattactacaaaagccccctagagggtatgcttctctctaacctggaccccctatccatttaccttgtgcaataaataatggcacttaggcataataccgccttcattagctccccatcatcttcaaacaagggtcagactggattgcatgatctagaaggaactttgtggtctgtttcctgctgctttctcctgtaagcaccagtgcaccagccatgtgccattttgaattacttgcagttcccagaccactctctcttatgagtcattgtgtatgtttctctttctattcagaataacttccccctctctatccttaattctaattcagcattcacttcttggctt

SEQ ID NO: 633670 - DNA, 545 bp, Homo sapiens
aaatgatatgctcacttgtccaaaccagaaacattgatgtttgtcttacatcctcttctccccttttcctcagctcacatccattaaatcaccaaggcatttggattctgacttacaaatctcctctcaaatccttctgctgttctctgttccagttgccatcaccccatctcaggctatgattttctcytaacctggattactacaaaagccccctagagggtatgcttctctctaacctggaccccctatccatttaccttgtgcaataaataatggcacttaggcataataccgccttcattagctccccatcatcttcaaacaagggtcagactggattgcatgatctagaaggaactttgtggtctgtttcctgctgctttctcctgtaagcaccagtgcaccagccatgtgccattttgaattacttgcagttcccagaccactctctcttatgagtcattgtgtatgtttctctttctattcagaataacttccccctctctatccttaattctaattcagcattcacttcttggctt

SEQ ID NO: 633671 - DNA, 598 bp, Homo sapiens
agaggaagcctcctgccaacgccttgcaagtgagcttgcaagtggatcctccagcccgatgtcaagaattcagagagtatggcctcagccaacagcctgagaaaccctggcccagaccatccagccgggtcatcgcagattcccaaccctcagacagcatataagaaaataaatatttgctcctttaagcagctaattttgcagtaatttgttatacagcaatagataaccaacacagacctcagccagtctrgtattgtctactggggcactatctttcttccttggtctgatatccctagtctgtttctaatttttttggtttttttttttttttgggtttttggagggcctcacggcagccttaaaccccgggggggacccaagcaactcctcctgcgcttagcctcccacacagcttgaacgacagatgctgtgccacaatagcgggcaaatttaaaaaattttgctattgaaatggggtctcaacatcttgaccaggctggtctcaaactgctggtctgaagccatcctcctgccttggcctcccaaagctctgggattacaggcacaagccaccatgcccagtttgtttctg

SEQ ID NO: 633672 - DNA, 598 bp, Homo sapiens
agaggaagcctcctgccaacgccttgcaagtgagcttgcaagtggatcctccagcccgatgtcaagaattcagagagtatggcctcagccaacagcctgagaaaccctggcccagaccatccagccgggtcatcgcagattcccaaccctcagacagcatataagaaaataaatatttgctcctttaagcagctaattttgcagtaatttgttatacagcaatagataaccaacacagacctcagccagtctagtattgtctactggggcactatctttcttccttggtctgatatccctagtctgtttctaatttttttggtttttttttttttttgggtttttggagggcctcacggcagccttaaaccccgggggggacccaagcaactcctcctgcgcttagcctcccacacagcttgaacgacagatgctgtgccacaatagcgggcaaatttwaaaaattttgctattgaaatggggtctcaacatcttgaccaggctggtctcaaactgctggtctgaagccatcctcctgccttggcctcccaaagctctgggattacaggcacaagccaccatgcccagtttgtttctg

SEQ ID NO: 633673 - DNA, 598 bp, Homo sapiens
agaggaagcctcctgccaacgccttgcaagtgagcttgcaagtggatcctccagcccgatgtcaagaattcagagagtatggcctcagccaacagcctgagaaaccctggcccagaccatccagccgggtcatcgcagattcccaaccctcagacagcatataagaaaataaatatttgctcctttaagcagctaattttgcagtaatttgttatacagcaatagataaccaacacagacctcagccagtctagtattgtctactggggcactatctttcttccttggtctgatatccctagtctgtttctaatttttttggtttttttttttttttgggtttttggagggcctcacggcagccttaaaccccgggggggacccaagcaactcctcctgcgcttagcctcccacacagcttgaacgacagatgctgtgccacaatagcgggcaaatttaaaraattttgctattgaaatggggtctcaacatcttgaccaggctggtctcaaactgctggtctgaagccatcctcctgccttggcctcccaaagctctgggattacaggcacaagccaccatgcccagtttgtttctg

SEQ ID NO: 633674 - DNA, 629 bp, Homo sapiens
acacacagacgtgcataggactgccatgaaggaagaagtgtattatattcacagatccctagaaacaggtggcatggcaggccaagcagggccacacggggaagcaccaaagtgaaatgggagggcagagcagagagagagggaaattgtaggcaagagccttcactgtggtttccctgagaaagaatgggtgaggcagtgtgggcatttcagattggctagttagtataatttcagtgggctctgggtgtgggtgctgtccctcgttgtctggtatctggtcctggggtggttaaagcagatggacggtggcccagggtgtgaaagttcagatgaggaaatggtgragaataagggctctggcttggtttggtttgcatttgagagagttgtttactacttctaggaattggctaaccctgggagaagcagtccctccagggtcagccaggccccagatgtcaaagcatcagcatttagaaaataaaaaacaccacagttaatacaataatattcaaaattatgaccatggatgagatcatcaggggttggagctatgggcacgccaagcaagaggtcagcaagatgagatggatacagcaaataaaacagattaaaggggggaaagc

SEQ ID NO: 633675 - DNA, 562 bp, Homo sapiens
gttatgccaataactaattcctatagatgaaaatatatcgctgtataaaactcagctgtcaagatagaagctataatgacacagcttaggaaagtgggaattttaaatgaaaagttccagaagaaacagaaaaggtcagctaattcattctcttgcctctgttaatcaccacagcaactgcgtttcaaacatttatgtttctcatttccaattaagccaaggwgattaccacatctggtgaagggtaaggatggagtttaggacaattaaacgtttagcactgaatatatttgatagagcatttttgttacggttttttcaaatagatatgattttcaaaccgcatgcccagagcctcggtctgctagagatgcgacaaggaccattatagggaaacactggggcaaacagatcatcacccgctttctgctctccactctataagcagctcctcctttctctctctcataataccagggcttaagaaagaggtgttctgttacttaaagaagttgaaatagcattgttttaatctatctaataccaagaagacatgaaagct

SEQ ID NO: 633676 - DNA, 562 bp, Homo sapiens
gttatgccaataactaattcctatagatgaaaatatatcgctgtataaaactcagctgtcaagatagaagctataatgacacagcttaggaaagtgggaattttaaatgaaaagttccagaagaaacagaaaaggtcagctaattcattctcttgcctctgttaatcaccacagcaactgcgtttcaaacatttatgtttctcatttccaattaagccaaggagattaccacatctggtgaagggtaaggatggagtttaggacaattaaacgtttagcactgaatatatttgatagagcatttttgttacggttttttcaaatagatatgattttcaaaccgcatgcccagagcctcggtctgctagagatgcgacaaggaccattatagggaaacactggggcaaacagatcatcaccmgctttctgctctccactctataagcagctcctcctttctctctctcataataccagggcttaagaaagaggtgttctgttacttaaagaagttgaaatagcattgttttaatctatctaataccaagaagacatgaaagct

SEQ ID NO: 633677 - DNA, 301 bp, Homo sapiens
gtgctgggattacaggcatgagctaccgcgcccagcctacgttggtatctttatgaattgctcccttttattgctggtgggtgttccatggtgtggccatagcacagttcgtttggccatttactcaatgtagaacatttggattatttccaaattttgactattacaaataaagctgctatgaactttcatgcacacatttttgtgtggatgtaagttttcatttctctgggataaatgctcaggagtgtgactgctggtgcrtatggtaagtgtggtttctttttttaaaaagtttgcc

SEQ ID NO: 633678 - DNA, 450 bp, Homo sapiens
gtcgctctgaggtgatcttcgagctgagaccaaagtgacaagacgacaccagccatgcgcctaatcagcaragatcaatcaaggcagcaggaaacagggagaccctgagcactgggaatgagcttggtgtgtttgaggaatgaagagaaggtgggcacatagcaagcgagggaggcagtgtcaccgtgaggtcagagacgcaggcaaggaaggaaattggattttattttcaggcaaaggtagtcattggaggattttaagcagaacacagatgttgtctgatttacattgctggaaggtcagagtagggcaagatttcttaaacaagacatagaaagcaaactgcaaaggagaagattcataaatcatactttttattgttaaaataaaaacttctaccaaaaaataagatttaaaaagggaagagacaagcaatcataaaaccaacca

SEQ ID NO: 633679 - DNA, 416 bp, Homo sapiens
gtgggggctctaggtcccagttaagagacacgaggggtgagtaccaagtctaactacygtctcaatggagttccagaggcagataagggagaaatgggggagaggcaatacatgaaaaattaatgactgaggctttctcaggactgataaagctgaatagaaattaggatgtataattaccaaagtaatagagagacaaaaataaaatgtgggggagggagaatactctcaaacaatgcaaaaggccagaaagaaaaaaaaaggcatttttttgaattagcaattagaaaatcgagacaaacagaatgcacaaaataaaatggtagcaacgcctctaaatatatagtcataatcaatgtgaatgtattcaatttccgctagacaaaaagaagaaaaaaacaagttacatgttgttt

SEQ ID NO: 633680 - DNA, 559 bp, Homo sapiens
tctcaccaccaaataaaactcctctgaagcggtgggggaagcatcgggaaagaaacaagggacttggtgatgtgctggtggcccactgagccaacgcggatgggggtggcartaatagaatgtactatttgggaatccttgggcaccctgtgtggaggaggctggaggaagtggtcccggctctagctctctctgcacttctgcatgggggccaccgggggagctgtagagttcagattgtggcagggcagctctggttgcagggaacagggacagccctgagtcttctgtgccttaagaaaggtagatcactggaacacttctcctgccccagagagggataggccaagagagggcattgggcttgctgaaatcctgtggtggagggcctggtgggattatcagagagggttcaacctggagggatgtctgtggccatgtgacagcccaaagggaaagtgggcccagaggaaatgttatttcaggcctgaaatgatggagaaaaccataattgcctaagactacattttctgccatcaagtagtatggggcttgaaat

SEQ ID NO: 633681 - DNA, 559 bp, Homo sapiens
tctcaccaccaaataaaactcctctgaagcggtgggggaagcatcgggaaagaaacaagggacttggtgatgtgctggtggcccactgagccaacgcggatgggggtggcaataatagaatgtactatttgggaatccttgggcaccctgtgtggaggaggctggaggaagtggtcccggctctagctctctctgcacttctgcatgggggccaccgggggagctgtagagttcagattgtggcagggcagctctggttgcagggaacagggacagccctgagtcttctgtgccttaagaaaggtagatcactggaacacttctcctgccccagagagggataggccaagagagggcattgggcttgctgaaatcctgtggtggagggcctggtgggattatcagagagggttcaacctggagggatgtctgtggccatgtgacascccaaagggaaagtgggcccagaggaaatgttatttcaggcctgaaatgatggagaaaaccataattgcctaagactacattttctgccatcaagtagtatggggcttgaaat

SEQ ID NO: 633682 - DNA, 554 bp, Homo sapiens
catgtttaggtatcacatttgcattaacttgaacatgggcaatgagttttgtccaatgtgtcagagaagagggagtgtgtgcctcgcctcccctmcacatgctttttctcaaatgctcagagctacccaccggccttcagccctccctgaccctacctggcggtgggagtatgaaagaggcaaagcacctggagctctccccgaagctttggtaaattactataaaatcgtgaatgacatagggactggagggtctttcaatgtaaccctaagagttctttacactctggcagccatcttttactacttgccagaagtggaaacaaacacatttctggcaaaacaaaacaaaacaaaacaaaacaaaaaaaaacccaaaccaaaaaacaaaaagacgacaacaacaacaaaacaaacctcaaggggcaacaggcgaggagctgcctctggcagcggtggaaggtgggctgaactgcagagggcaggggtctttctggggtgacaggaatgtgctgcatcttcgggtggtggtgctttctcgggcagctataatc

SEQ ID NO: 633683 - DNA, 554 bp, Homo sapiens
catgtttaggtatcacatttgcattaacttgaacatgggcaatgagttttgtccaatgtgtcagagaagagggagtgtgtgcctcgcctcccctacacatgctttttctcaaatgctcagagctacccaccggccttcagccctccctgaccctacctggcggtgggagtatgaaagaggcaaagcacctggagctctccccgaagctttggtaaattactataaaatcgtgaatgacatagggactggagggtctttcaatgtaaccctaagagttctttacactctggcagccatcttttactacttgccagaagtggaaacaaacacatttctggcaaaacaaaacaaaacaaaacaaaacaaaaaaaamcccaaaccaaaaaacaaaaagacgacaacaacaacaaaacaaacctcaaggggcaacaggcgaggagctgcctctggcagcggtggaaggtgggctgaactgcagagggcaggggtctttctggggtgacaggaatgtgctgcatcttcgggtggtggtgctttctcgggcagctataatc

SEQ ID NO: 633684 - DNA, 534 bp, Homo sapiens
cccatgttgcctatgctggtcttgagctcctggtctcaagtgagccaccactcctgtctcagagtttagctattaattctgttgaattcaactgagaatcatcttgagtaatgttttttgaactcagatgaaaattgaacccatgtcatctaagttgacaaagtgtaagaaaagaaaaataactccacaggagcagaaactttgtcttatttatttctgtatttccagttcatttccaattcagtttcttggtatattttagcagagtgactggcacatagtagatacccaataaatatacgcacatttatgtgtggggagaaagctaacttcaacaaaaggytgtatagcagagtggtgaaaaactctctctgaagccagcctacctgggtgtgaatcctagtttgccttactagccacccttttctatggctcagttctctcattttattacctgggtgataatgataacagtccctaccccttgggattgttttgagaattaaataagttgatatgcacaaaacacttaac

SEQ ID NO: 633685 - DNA, 520 bp, Homo sapiens
aaagaaagaaaaagaaggaaggagggaaagaaagaaaagagaaagaaagaataatcaagggaacaattcagaaggaaagaaaaagaaagaaggaaggaaaaaagaaagaaaagagaatcttcaagggaacaattcagaaagaaagaaaagacgaaagacagagagaaagaaaagagaagagaagaaagaaagaaacttcaagggaaaaattccctaccattaaaatacccctgtgtataataggatttgggaaacttggaaaggcagaatagtactttgccaaggtcttggactgtgacacacgtataaatggactgagaaacagtgtcacctttgtcacttggccacctaaacactggtacatgttttcttggctattggaagtagggacccatctgtgtcttagaagaaatggcagtgaagaattcatagacaaaaggaaygcccacaaattcaaccagactagaaagaggcactttctattgaaatcctgggctattgtaaatctcctggggcaaag

SEQ ID NO: 633686 - DNA, 582 bp, Homo sapiens
gaattcagaccttttatagtgcttctctctccttccagctacttagaacaagctacttagaacaagcccagctttacttgtttctctttctcccccctaacactcagtattatacttcagaagcttggtaagaaaggggaagatgatatctcttattgacttgtttccttttaagacctatttagatagatgagttaactccattgactcaatcacttggttttactttgagagttaataatttccaccagtgtccaacattttggcttccctgggccatattggaataagaattatcttgggccacacataaaatacaataaaactaacaatagctgatgaggttaaaaaaaaaaaagggtctgtgcataactttkgggatatccgccaccacagataagcaaaatagtcctcacattcaaagggttggacactcatgatcctcctaatttaacagttatgttgcttagtatggaagcatactgactctctgaaccctaacagttgagcatgagcatgattgttgtagtatactgattataagcatgggtactgtggtaggcagcatcttgactccccaga

SEQ ID NO: 633687 - DNA, 416 bp, Homo sapiens
gaattctggttttgcctggtcagtaattgtgtgattgtcattcccaacgctgtcttcttagactatggatagggaagaggcctattaagcactgcaggtaattttctctcccaagtgcttttcatttggtggccagagtcccaggctgcccaccccattttcattcttttttgcttttcagggcctgctgtaagtcctcttggctgggtagtaagactggctctgtataaaccagataagtttgatgggagagccagctctaggtttaacttttcagagctttttcttcctgcgtagcgatagcaggcrtagggctgtactgccaaggctttgtttcagcagggcctgtggtttcacctgttctgcttcactccccttctggcagtcgcgggaggagatgacgtgagggacttagc

SEQ ID NO: 633688 - DNA, 603 bp, Homo sapiens
aagagcagggatttatttcccagaggagaagctgccctggattgaggactttaagaaatccctctgccagaagataagaagaaaggaacagggagaactcaggagagagggtggcatctgtgggctcgcatctggaaggccgtcccttcccrggcagcacaaggggatccgcgactgagggaaataagaattcttagccttgtgcttccaatgctgagatcctccggactccatgcgaagccttgccattgaggtctgctgtcattggtcaggagtagactggccgggcaggagggaccctggaaaaagtaactcctcactcccagccattgtgtgagagagctgtcatgaaggtgagagacacagccatgattaacttcagaggagagagagacttatgaggctgggcacatggagaccctctaagccctctgaggatgaagatggtcatgatcacccctcccccaacaagagtctatccaagaacatccttggatacattttgtaaagcaaggacccttccacatggaggttacacaataagtggtgtcgctgtgaaggagagcaatttagagttttaaacttggataggtttaacaaaaa

SEQ ID NO: 633689 - DNA, 553 bp, Homo sapiens
tcagtgccatcggaggctgctgcaagtgattcacgggtatctcgtgactgttgttaaggcatcatatcattgtgtaaatgtgcgtgttttgtcactgataataaaataatgatacatcttaacactgcttgatgtcttggattcaatgcaatccttcaagtggcagatctagtttcagacttgagcagccgagctatagagattttaatccacatccactacactcctggcttttattatcttcatgggaaaatacttgcagggtgtagaggtttacaaatcaagttttagaagayagcttggttgatactgagatgatggcttctttactgaatgcttagtagcatatttatagcagaatcttccccaactcccaataccttgtaactttagctaaaatctattttaagttagccacatcaaaatcgatcatactgttgacccaccagacagcaagttatactggtttcattccttgactgcctagcagggacactgaggaaatgttgacagttaccaagataactacaactgttgaggctggcagaggtcc

SEQ ID NO: 633690 - DNA, 568 bp, Homo sapiens
gttatactggtttcattccttgactgcctagcagggacactgaggaaatgttgacagttaccaagataactacaactgttgaggctggcagaggtccagtaagcagtcccctctcccctactctggttcagaactaagggggcgttcaacacgagggtgaggcacttggggattaaaacgttagtgtagtgataaatacttaatcaaaagacacagtgtagatgggtgcccatgataggagtgctcatagttccccccgaatgtttcagacttcccatctggcccagtgccacagctgaacaactaaagggacatggtcctcaccccctgggggagctgatcaaaatgcatgtgctttgtaaataggctggttttgaaaagagaaaaatgactgaatcaagcatgcttgcttccacttccataactcatgtgrcttcaccaggggagggcagaatgagggagggggagggaatgcccaggagtaccactctagtggagatgccttgcctcaatggaacttgaggcctcaggaaaggaagccctggcttaataaccatgaccatgaata

SEQ ID NO: 633691 - DNA, 568 bp, Homo sapiens
gttatactggtttcattccttgactgcctagcagggacactgaggaaatgttgacagttaccaagataactacaactgttgaggctggcagaggtccagtaagcagtcccctctcccctactctggttcagaactaagggggcgttcaacacgagggtgaggcacttggggattaaaacgttagtgtagtgataaatacttaatcaaaagacacagtgtagatgggtgcccatgataggagtgctcatagttccccccgaatgtttcagacttcccatctggcccagtgccacagctgaacaactaaagggacatggtcctcaccccctgggggagctgatcaaaatgcatgtgctttgtaaataggctggttttgaaaagagaaaaatgactgaatcaagcatgcttgcttccacttccataactcatgtgacttcaccaggggagggcagaatgagggakggggagggaatgcccaggagtaccactctagtggagatgccttgcctcaatggaacttgaggcctcaggaaaggaagccctggcttaataaccatgaccatgaata

SEQ ID NO: 633692 - DNA, 515 bp, Homo sapiens
aagcttatccaattattttacttcaataatgtatttgccagtcctaaaattcccaattagttcatttttatagtttctataraaataatttttcctataaaaaacaacaggtcctcttttctattcattttaattgtgtttatctttacctcatggagcaacttatagttgcttcagtctttatgtgataatgccaacaaccctggtcactgccgggttgccatcagttgtcttttctcctgaaaactggtcatatttccaggttcttgcatgttgagtaattctggattgtactgtgaatgtgatgctgcacagcctctgcttaattttcaggagagtacagatgttttcagcaggtaatcaccccagttaggttcagactacatgtggtgccttgtttttggtggatggaagttctacacttaattcaaatcctttgctatgtggctttgggcctgttccatgcataagcccttcagagggcagtgcaacacttcgacagtgatgaaatctta

SEQ ID NO: 633693 - DNA, 515 bp, Homo sapiens
aagcttatccaattattttacttcaataatgtatttgccagtcctaaaattcccaattagttcatttttatagtttctataaaaataatttttcctataaaaaacaacaggtcctcttttctattcattttaattgtgtttatctttacctcatggagcaacttatagttgcttcagtctttatgtgataatgccaacaaccctggtcactgccgggttgccatcagttgtcttttctcctgaaaactggtcatatttccaggttcttgcatgttgagtaattctggattgtactgtgaatgtgatgctgcacagcctctgcttaattttcaggagagtacagatgttttcagcaggtaatcaccccagttaggttcagactamatgtggtgccttgtttttggtggatggaagttctacacttaattcaaatcctttgctatgtggctttgggcctgttccatgcataagcccttcagagggcagtgcaacacttcgacagtgatgaaatctta

SEQ ID NO: 633694 - DNA, 572 bp, Homo sapiens
ctattctagtggcagactatatatctgataattcagattaaatttcatatttttaccccaagctattttctatgtgtctccattttttattaatcttcccaaaaatgatatatagcgtcactatgactttgaactaatcaatactcttattttcaatgtgaaaagttcaatgacaagacatktagtgtgttttttaaaaagacatcttttttattgtagtaagaacacttcacatgagatctacccttttaatagatttttaagtgcacaagacaatgttgttaattataggcaccatgctgtacagcagatctcgaacctactcatcttgtgtaacaaaactttataccctttgaacagtacctccaccccagcccctggaagccgccatttcactatttctatgagtttggctattttggattcctcatataagtgaaaaacacagtatttgtacttctgtgactggcttatttcacctaacataatgtcctccaggttcgtccatgttgtcacatacacaagattttctcttttttagggctgaaaaatattgcattgtgtgcgtagat

SEQ ID NO: 633695 - DNA, 519 bp, Homo sapiens
atatatgatgtgcaagtattttttcttattcygtgagctgtcttttcccctttcttttttttttaagagttggggtctcactctgtcacccaggctggagtgcagtggtgtgatcatggctcactgcagcctgcacctcccaggctcaagtgatcctcccgcctcagtctcctcatagctgggactacaggtatgttgccaccaagctcagctaatttttaaaattttttgtggagacggagtcttactgtgttacccaggccagtctgagactcctgggctcaagtaatcctcccacctcagcctcctgcctcagcctcccaagtagctgagaccacagggacttgccaccatgccccgctttcttgattgtgcagtttaatgcacaaaactttttaattttgaagcccaatttttctgttttttcttttgttgcatgtacttttgttattataggcaagacaccactgccaaatccaagattatgaagatatacccctatcttttcttctaaaaatg

SEQ ID NO: 633696 - DNA, 608 bp, Homo sapiens
atgccccgctttcttgattgtgcagtttaatgcacaaaactttttaattttgaagcccaatttttctgttttttcttttgttgcatgtacttttgttattataggcaagacaccactgccaaatccaagattatgaagatatacccctatcttttcttctaaaartgttacagttttagcccttacatttagatctttgatactttgacgttattttttgtatacaatgtgagatcaaggtccaacatccttttatatgtggatatctagttacctcagcactgtttattgaagaaactattcttttcccattgaatgatcttggcatgcttgttgaaatcaagtgataataaatgtatgggtttatttctgcaatcttaattacattccatgatccatatgtttctgatctaacctacacctttatggtatatcctaatgccagtagcacattgttttgattactgtagctttgtagtaagttttgaaattgggaaatatgtgtcctccaactttgttcttaaatattgttttgggtatttggggtcctgtgcaattgcttatgaacttcacgattggcttttctttttctacaacaaaaaaagaaa

SEQ ID NO: 633697 - DNA, 585 bp, Homo sapiens
ttttaatatatcctttatttctttgacctagagtcatagattattaaatctagacaggatgtcaaaagtcatctcatccaaaggtcccctaacaagagtcaaaggttagttaaatgcataaaattacctgtgaagyccattaaatatataaattccaggcctccacacatgataattccaatctttatgcctgcagtgggacttggaaacttatatttttaataagctccctaacagattttgattcacagccaagtttgggaaccactgctcagcatctttattttacagatgagaaaattgaagaccaagatcgcacagctggtaagtaacagaaccaggacttttacccacattttctgcttttaagcccagaaactagatccttactgatagtggcatattgataccctgggaatgggaagcagaatgaatgtttacacccttcatttgttcttcctaggtggatacactgactatggcagcaatataaacagtgtaattttatgccatcaatcaaatgagctttatgataaatgtgtaagaaagacgatatgcaatgtaaaaggtgaaaattacaatgag

SEQ ID NO: 633698 - DNA, 516 bp, Homo sapiens
tcccccctccacaagaatatcaatttaacaactatctacaaaaagaaaaaacaacaacaacatacaacaacatatacaaacaaaaaaaamcccacctttataagaagaaaaatcaggtgagcactcacagtacctggttttaacttcatacagttgaaagaggcactgaagaggtaggaaaaacagtcttgaatgaccaacatcaccccttcctccatcctctggcagcggccagcggccatgtggtgcagagagcatttttttttccactggggagaagaagagcgcagcaattgtgaagcattgaactcagttttgtcctgtaatagcagaaaggaaaattgggccaaactcagctgattcccattcacagagggagcatttaaaccagccctagctagaggggaatcattgactccagctgtgggaacttgagttcctgcaaacctcgccagtgtaggctaaagtgctctggggctccaaatatacttgaaaggcagtctaggccataaggac

SEQ ID NO: 633699 - DNA, 567 bp, Homo sapiens
gactttgtcttgcatcttggataccagctcagccccagcaggacagaacaccaatcagagtcatgaggcccccctttctaggccctagctcccaggtgacatttttagatacacactgggccagaagggaacctgctgccttaagaaaagaacccagtcctggcaagattcatcatctgctgactgaagagcctttggatcctgaataatcagcagtgatactcagttaccatgtcatgggccttgggcgagactctgagacttgttagcttcaggtgagatgcagcacattcccagttgtggtgactaagggggcaagactccttccatttaagaaaagtagaaggaaaagcaaaggggaatttgtcttgcaccttagttaccagcttggccacagggggtaatgcaccaagtgagctcttggggtctccaatgccacgagttggcacttggacagcatttctggacctgccctgggccagggaggagcycactgtcctgaagggtgagtcccaggccaggcagcattcatcacaagctgactgaagagaccttgagccttatgaa

SEQ ID NO: 633700 - DNA, 582 bp, Homo sapiens
atgagaattgcttgaatccaggaggcagaggatgcaatgagccgatattgcatcactgccctccagcctgggcaacagaatgagactctgtgtctcaatgaaaaaataaataaataaaaacatatagaaataaaataaattttacgagaaagactacatctcagccactgatgcattcggtccacagattggatctccaaccacagagaaggagtctctaggaaagagcctcagataaaaaatggaatgactttagggatggaaaaggtcctagagatcatcttgcccaatgctcccatttcacagctgatgaaactraagccccaaatggttaagtaacttactcaagatcacaccactaattattggcagagttgggagccaagttttgtttctaattctgcttctgatgagccccatgacaatagagcaagtgctgagtgtactttagctacctctgttgttaaatggagttaatactccctagttcttcaatatttcacaagcgtgttgttagagtttctgtgatttgtgagaatatattttagcttctgtaaaaagtaaattgttcattaccattct

SEQ ID NO: 633701 - DNA, 550 bp, Homo sapiens
ttgaagccctaaccctcaaagttcaataaatcacacgtgtatgtatggttcaaagcagtgtttagataaaggtggaaaaatcagaactgggatgaagttgccaccyatcaaagaaaagctttccgactttgaaaagttcctcactcctgtggccctgcccatccttcagcaggcttctgcaatgtaattggcaaagatggcagagaggcggaaattggctgtcccatcacagccttcagccctgcagagatgcagagctcctaaggctcctcaaggtaggaagctctctctgctctcctgctctgccctttgtcttaggtgggctgttgccttgcacttagtgggcggtttcacatacctcagagggctcactgggtgctgacaatctctgtggctggatctcttcaatattctctctcatgccaagcccatacactgttagtaaaactttgtaaatttgggatgatttctccttttccttattaccattacccccagggaataaaagcagccatgggattgtcttcttgaaattattcatcccactatt

SEQ ID NO: 633702 - DNA, 572 bp, Homo sapiens
tcctccctgatgattcttagacactagtcactctggatttacatgcactactttaaatgtaaacaatgatgatatgctacagcatattgtttctttgatttcaaaattaaggcacrtggcaccttaatttaattctaagtattccatgtagctcactactcctctttgcctttcaccgctctggaaaacatcctcagtcttttccggtttagtacattgtccaaagagcctactgtggaatctcatgtcattttacttttttcagttggcctatttttcataccatttctcatttcctccatatttctattattccctatgaaaacatacctagtcttgtccttctctttgcttttcaagatttagcaatctgaaaaaagttaattaccccaattatagggtgtcacagagtactaatgactcaataaactcacctcgcacacccactaaataacttttcatggtgaaatttgaatattcagcttcacataaaagtcaatgagccaaatgcatgctgtaatagtttatggaactcactgggatagggagctactgaccagtgatttataggt

SEQ ID NO: 633703 - DNA, 572 bp, Homo sapiens
tcctccctgatgattcttagacactagtcactctggatttacatgcactactttaaatgtaaacaatgatgatatgctacagcatattgtttctttgatttcaaaattaaggcacgtggcaccttaatttaattctaagtattccatgtagctcactactcctctttgcctttcaccrctctggaaaacatcctcagtcttttccggtttagtacattgtccaaagagcctactgtggaatctcatgtcattttacttttttcagttggcctatttttcataccatttctcatttcctccatatttctattattccctatgaaaacatacctagtcttgtccttctctttgcttttcaagatttagcaatctgaaaaaagttaattaccccaattatagggtgtcacagagtactaatgactcaataaactcacctcgcacacccactaaataacttttcatggtgaaatttgaatattcagcttcacataaaagtcaatgagccaaatgcatgctgtaatagtttatggaactcactgggatagggagctactgaccagtgatttataggt

SEQ ID NO: 633704 - DNA, 613 bp, Homo sapiens
gaaagccatctctagagctttctcagtaattgagtccagcaatgttcagagggagtagagcgcaaagctgaacttccttagacacataggtaagaaagagatcactgcaggaaggaagattaacgaatttctgcaaaaagcagttgaagttctgatagaagcaataaaccattttaatagagactggtatgggatgtaggcaagaagaaggacacagccacagggtaacgaaagcagagaatgcaagcaggactcggatggagacaagtgcattagatacatctggctacaggcttcaggttcttcatgaatttctgtatgtggaataactgggaggtatcttgaccagygcaggtatattacttgagtttgttgtatttaataaggtaaaatagagagtaaaccaatagtgtgagctcattcatgttcaactaattgtatgtctctttttggaagtcttgactctgtaaagttctttaaaagatgatatagatcctacctggactgggaggtccctgtctgacaatttttggtgtgattctggaacccagagagagcaaaacaagttaagtacatccctcgcaacttactgcaccaataaaaataatgaata

SEQ ID NO: 633705 - DNA, 605 bp, Homo sapiens
atgtaaatgaactaaactctttaatcaaaaggcatagagtggcttcactgattttaaaaaaaaaacaatgatctattgcctataaaaaagaaacacacttcacctataaagaaacacrtagactgaatataaacggatagaaaaagatattgcataccaatggaaaccacaaaagggcaagagtagctatacttataccagaaaaaagtagatttcaagacaaaaactataagaagagacaaagaaggtcattatataatgataaaggggctaattcagcaagaggatataacaattttaaatatatatgcacccaacactggagcatctagatatataaagcaaatattattatagctaaggaaagacataggcctcaatcaataatagctggagagacttcaacacccttactttcagcattggacagatcttccagacagaaaatcaacaaagaaacatcagactacacttaatctgtagtatagcccaatggacctaatagatatttacagaatgttttattcaacagctgcagaattcacattcttttcttcagtacatgaattattctcaaagatagaccatatgttagctcacaaaac

SEQ ID NO: 633706 - DNA, 571 bp, Homo sapiens
tgattttaaaaaaaaaacaatgatctattgcctataaaaaagaaacacacttcacctataaagaaacacatagactgaatataaacggatagaaaaagatattgcataccaatggaaaccacaaaagggcaagagtagctatacttataccagaaaaaagtagatttcaagacaaaaactataagaagagacaaagaaggtcattatataatgataaaggggctaattcagcaagaggatataacaattttaaatatatatgcacccaacactggagcatctagatatataaagcaaatattattatagctaaggaaagacataggcctcaatcaataatagctggagagacttcaacacccttactttcagcrttggacagatcttccagacagaaaatcaacaaagaaacatcagactacacttaatctgtagtatagcccaatggacctaatagatatttacagaatgttttattcaacagctgcagaattcacattcttttcttcagtacatgaattattctcaaagatagaccatatgttagctcacaaaacaaatcttaaacatt

SEQ ID NO: 633707 - DNA, 571 bp, Homo sapiens
tgattttaaaaaaaaaacaatgatctattgcctataaaaaagaaacacacttcacctataaagaaacacatagactgaatataaacggatagaaaaagatattgcataccaatggaaaccacaaaagggcaagagtagctatacttataccagaaaaaagtagatttcaagacaaaaactataagaagagacaaagaaggtcattatataatgataaaggggctaattcagcaagaggatataacaattttaaatatatatgcacccaacactggagcatctagatatataaagcaaatattattatagctaaggaaagacataggcctcaatcaataatagctggagagacttcaacacccttactttcagcattggacagatcttccagacagaaaatcaacaaagaaacatcagactacacttaatctgtagtatagcccaatggacctaatagatatttacagaatgttttattcaacagmtgcagaattcacattcttttcttcagtacatgaattattctcaaagatagaccatatgttagctcacaaaacaaatcttaaacatt

SEQ ID NO: 633708 - DNA, 591 bp, Homo sapiens
cccatggagagtgcagagaaagaaaagatcaggtgaaggacagaatcccagagaaatctaccatttatgggcaaaatagaggaaaatatttccagtgagagagtatcaggagaagcaagagagaaaatgggaagtcatagaaatcatgagagtttcaaggaaaaggaatttaacaatactaaatgaagtagagaataatgtaaaataatgacagtaaataatgacagaaaagtacctactggactgagcctttctgagattttcagtgatcgatttgtcaagagcacttttggtgggtgggaagaagattaggagaaaatggtaggtcagcaattgaaaacagtgtgtatagattacgttgtcmagtcacttgactgtaatgagccagagagagagatgatagcaatgtgagagcaccacgtggggttggaaaaatttgttttttttttttttttgtaaatagggagagacataaacacatttatcagctgaaaggactgagccaagggagagggaaagaaggtaaaagagacacaacaaggacctggaaaaggcaaggaaggataataaatacattgtgtggaggattaa

SEQ ID NO: 633709 - DNA, 584 bp, Homo sapiens
aaaccatcaaataatgtggtatcaraggtcaactgcttccaagatattgagtgcttgactgtggctaaggggcagtagacatctgagaaatcctcagctggtgattgtttattagtaacataaaacatgagctctcaagcaagtggaaaaagtacaaagataaaactttaatttgagcttctttgtgtgagtctgggcatagtcagggaaaataactgttattcaaattaatcttgcttttctttttccattagccactctgctcatctcgtccaatgatggcacaatatacaattatgaaggatgcaaactctactctagaaccactccaccctttctctcattgtgtctcttctgttctgactctgtccctcagagccaaagttccattctagaaggaactaaacaataactggaatctcagagaacattagtacctccagcttgttagctgatttaacagctaaagctaagcaaaaacaacatttatgttaatcacatatggaatcacattgtctgttttaagtgtagtattctaatttgtgttttgatatttttaaatcttggaaaaagtaaacactaac

SEQ ID NO: 633710 - DNA, 535 bp, Homo sapiens
agcttgagtagccacacacagygtccggtttgcctgtgatagactggtttatgttggttgtccgagggtcattacttaatagtttggatgatacattatgtttgcacccgaacactcacccatatgcattacaaaagaatagcagctggcaaatgttacaatgaaaaaaagatttttatataattatcggtgtaaaaatacaacaatactgttcatatttttccatggaattatttccattagttggcatgagatgttggcttttggaaatatagcagctgagttctggtttatttacttagagaaaaattgtggtatatttcagtgtgccatgttggtgtgtgttgtatacataaacacacccaaaggacacacacacttgtaatatcattacagaagtaagactcaagttgtttgtttacactgtaggctcagacatgttcatgcttgtctagagagctagtaggataaggctgcctctgcactgggacaggtagaagagtggtttccattcgcataatgagcagagaaacct

SEQ ID NO: 633711 - DNA, 607 bp, Homo sapiens
cttttattcagccataagaattgtgttcttaaagttcgataacatgaaatatctcaaataaaatgttgagaaagaagtatgtaaatactgttattattatataatactatttttctattttagtcaataagttatatttagagattaaagattggaaggaaatttatgaaaayacagatggtttttatttctgggattggtggaattatgagttatgtaattcaccatatcaacagacagaagaagaaaaaccatagaatcatctcagatgaaaagcatgcatttggcaaaattcaacattctttcataatacctctcagcagactacgaatagaagagaaattcttcaaactcatatggcatttttgaaaaccaacaactaacgtcatactttaggagtgcaagactgaagattttaccccaaagattggaaaaaaggcaggagtatctgttctcaccactgctattcaacattatactgcaagtcctagccagcacagtaatgtgaaaaagaaaatttataaaagacacacagattggaaatgtataaataaaactgccttgattttcagataatatgtccatgtagaaatcccaaataatctgt

SEQ ID NO: 633712 - DNA, 529 bp, Homo sapiens
atgagctacgaaggttcatgagcaaattctttaagatgaaaatattttatgcattgatggtggtggtggttacatgactccatacactgtcagatctcaagaactgtacatccaggagttattaataattttactactcactaattatatctcaataaaactgacttaaaaacaacaacaaacagaatctatgactttagaagaattcagattggcacagtctcatagaccctcagtagcacttgaattccttgtggtaattgcttcatgctttttcaacaactcttacctcccactgatagaagtatttgggatagtgaactattacatagaaagaagtttattcagctttagatgcctagcayctaaaatagagctttctttttttttctagtttttattttatttatttatttattttttattatactttaagttttagggtacatgtgcacattgtgcaggttagttacatatgtatacatgtgccatgctggtgcactgcacccactaattcgtcatctagcat

SEQ ID NO: 633713 - DNA, 629 bp, Homo sapiens
aaacagtgccagcagacaggttgctgcttttgtctcctttgcaatttgcaatttgggaatggagggaaaccgggcaatatccctttctgtttttggttgttcttattgttatcaatagttctcattttggtccacaactctgccactacttacagaggaatttagattgagtttgttctgaaagcaaagtatcatactaatgaatcactaaaaagaaagctggtctaattatagccaaatggtgcaaaataaccttacttatgattgcccctgattaggtgtaggctgctgggctcgctgcagggggctgtagattatcactgaaatgcaaggtgcccactgactgccaagaggggaagaacttgcagcaaaaaaaaatattgcagctgtactctattattttgttgtaaagtcatgtcccagtttcctatacccaatagcttgaacttggcattgtttcaattcctgcttattggtgaactgatctcatgttcgataaataaatattaatcaactgataattaagtattcrcccttaggccactgtaatattatagtcagactgtttgcattggaggaatgaagatttgtttaaggtactaccaataaaggacgatttgctttaaatc

SEQ ID NO: 633714 - DNA, 583 bp, Homo sapiens
cactgctttttggcaattctttytttgtttcctggctcagattcctagaggaaacctgattagtcaaagtcatcttttcaagtcagtccaccttggtaacaagtcacatctcagacccagtgactatgcattgggaccattggtagagacatttttctaataaatggtggagtagggctcaaactcataactgacatatctcatatgcatactcatttattgacagcatcctctgtgtaggcactattctagtaaataagataaatatgactcctaaacttttcggtaataatgagtggcaggcagagaattactgtagatggataggaaggagagtgactggcaggttggctagatggggtgagcagagtaaggattcccagagcaagtgacatttaaacaggcacctgaatgaaaagaaggagctaatcataggaagatcaaggtaagattattccaggcagaggacacagctagtgcacaggccccgaaacaagaaggaacctgacatgtttaagaattttttaaaggtcataatagctgaagattgtgatccagaaggagactgacatgaaattaggtc

SEQ ID NO: 633715 - DNA, 574 bp, Homo sapiens
tctcagggatctggggatttgttctagatccaaaatgactctagagaactaggctgtgagagatcttcattctggtgacctgcggttgcttcccagctactcaaagtgggaatgcttctttctctttcactcacagttgccttcctctgttgacttctagtttcttccctccctactcctttcacagtatcccccaatcacagtcctgcttcatgatctttcagaggcagacttcactgctttttggcaattctttctttgtttcctggctcagattcctagaggaaacctgattagtcaaagtcatcttttcaagtcagtccaccttggtaacaagtcacatctcagacccagtgactatgcattgggaccattggtagagacatttttctaataaatggtggagtagggctcaaactcataactgacatatctcatatgcatactcatttattgacagcatcctctgtgtaggcactattctagtaaataagataaatatgactcctaaacttttcrgtaataatgagtggcaggcagagaattactgtagatggataggaaggagagtgac

SEQ ID NO: 633716 - DNA, 583 bp, Homo sapiens
cactgctttttggcaattctttctttgtttcctggctcagattcctagaggaaacctgattagtcaaagtcatcttttcaagtcagtccaccttggtaacaagtcacatctcagacccagtgactatgcattgggaccattggtagagacatttttctaataaatggtggagtagggctcaaactcataactgacatatctcatatgcatactcatttattgacagcatcctctgtgtaggcactattctagtaaataagataaatatgactcctaaacttttcggtaataatgagtggcaggcagagaattactgtagatggataggaaggagagtgactggcaggttggctagatrgggtgagcagagtaaggattcccagagcaagtgacatttaaacaggcacctgaatgaaaagaaggagctaatcataggaagatcaaggtaagattattccaggcagaggacacagctagtgcacaggccccgaaacaagaaggaacctgacatgtttaagaattttttaaaggtcataatagctgaagattgtgatccagaaggagactgacatgaaattaggtc

SEQ ID NO: 633717 - DNA, 548 bp, Homo sapiens
ttaaacaggcacctgaatgaaaagaaggagctaatcataggaagatcaaggtaagattattccaggcagaggacacagctagtgcacaggccccgaaacaagaaggaacctgacatgtttaagaattttttaaaggtcataatagctgaagattgtgatccagaaggagactgacatgaaattaggtcagtgaggtcagcagggactgggaccagatcctatcaaggtttgtaatccaaaataaggtgcttggattttattctaagtgaaatggaagccactggaatgacattaaataatcttaccccccaaaaattaaaaattgtgtttcataattttcatattttttactttaatttgatttttatgtatgaaaatggccaagaaarcagtatgagagggtgcttaacttcattcgttactaagaagatgcacaatgagatcccactgtatacttagcaattctatttctaggtgtatatttattaagattgtgtatatatttgcaccaaaagacatatactatagtgttcccaagccccaaactg

SEQ ID NO: 633718 - DNA, 600 bp, Homo sapiens
aacaatatacatataatataaataatatattattgttatgtaaagaaagaagacacctacagctttaaagtgaagtctgtartactgtagtgaaactaaaatactccaaactcaaaacctaccaatactgtgtttaaaatgttgaaaaaattagttggtgtgaccacagaatatggagtgtatgacggtatgcatattaaaatggaaactgttgaatccgtgatatattgtaatatagaaaactgtatacctgaggacacttaaaatgatgcaaaactaaataataaaaagtccaatgtagaaaatacgagaaccaaataaatgacttaataggagtataatatgtatgccataacactgataaatactggtacataccttacatttacaagtaggacttattctcctaatatttaaaagttacaaataagcatattagagctcttctcaactgtataaagaagcagtcaataaaacacagagcataccaggaaagagtgcagcaggtcaaaaaaggcagatgtcaaaaatagtatgttttcctttggggacaaaaaagtggaaggttttatgcattttaattagccatttaaaaaaaaa

SEQ ID NO: 633719 - DNA, 543 bp, Homo sapiens
ctggcagtctctacttgatgaagtagcacgtgaaaggctgtgtccgcttgctgtcctagaggcttctcagcatttaccaattaaaatcttatgcacgtgcagcacaattttgaaacactgaactagagtgacatcagtgaatgaggaggtgagaacattcagtcattcatacagcagacatttaatgaaatgtcttcaaaatgccaggcaatggagtatttacttgggtaaaacagtgaccaaaacgagatacagccttgctttcactaagtgatggaggcagagagtaaaggatcacaggaccatatagagccaccaaatgcatgagtgcaagtctagaaatggyaggaagaagtaatatgaagaaccttcaatagtgcataccaactatcaggttggtgcaaaagtaactgcagtttttgccattacttttaatgtcattactttgagtaaaaagagaagaacttgatgactaaacagattgcaggtagagggacagcagggccatgggaaaggcaattaaacgatgaccttgggagactg

SEQ ID NO: 633720 - DNA, 591 bp, Homo sapiens
ggtataatgtctccttttgacatacataatctaagtctcattacagtaaaagctggctcagccagaaatctacaaagcacagatctccctatgagttggcgctttgatatttcactcaaacaatgattacatgtggtcaaaataatgaccttgagagtctgtaagaaaatagtcaggacagaatcgagaaaggatgaaaaagtttcacyaggagtggggttttcaggaaagaatatgagcagtgcttgaatcagaaccggaagaactagaagatccaagatcaagataaaggtgcaaggcatgcctggccaaggggatcacatgtacaaaaacacaggggtatgtaggagcacagtgggtcgaggcctgtaacactgagatggcccactgggaattaacagaagtacccattccatctcagactgtgatactgcatagtatttcaatgccttcaacattgcatacattttcaactaaatgttatttcagaaatgtgtttctttgtatttctaactttaaatacttgtgggtagaattaatgcagttactaccgcttaaatcttttaagtaaattaatcatagagttaaggg

SEQ ID NO: 633721 - DNA, 591 bp, Homo sapiens
ggtataatgtctccttttgacatacataatctaagtctcattacagtaaaagctggctcagccagaaatctacaaagcacagatctccctatgagttggcgctttgatatttcactcaaacaatgattacatgtggtcaaaataatgaccttgagagtctgtaagaaaatagtcaggacagaatcgagaaaggatgaaaaagtttcactaggagtggggttttcaggaaagaatatgagcagtgcttgaatcagaaccggaagaactagaagatccaagatcaagataaaggtgcaaggcatgcctggccaaggggatcacatgtacaaaaacacaggggtatgtaggagcacagtgggtcgaggcctgtaacactgagatggcccactgggaattaamagaagtacccattccatctcagactgtgatactgcatagtatttcaatgccttcaacattgcatacattttcaactaaatgttatttcagaaatgtgtttctttgtatttctaactttaaatacttgtgggtagaattaatgcagttactaccgcttaaatcttttaagtaaattaatcatagagttaaggg

SEQ ID NO: 633722 - DNA, 591 bp, Homo sapiens
ggtataatgtctccttttgacatacataatctaagtctcattacagtaaaagctggctcagccagaaatctacaaagcacagatctccctatgagttggcgctttgatatttcactcaaacaatgattacatgtggtcaaaataatgaccttgagagtctgtaagaaaatagtcaggacagaatcgagaaaggatgaaaaagtttcactaggagtggggttttcaggaaagaatatgagcagtgcttgaatcagaaccggaagaactagaagatccaagatcaagataaaggtgcaaggcatgcctggccaaggggatcacatgtacaaaaacacaggggtatgtaggagcacagtgggtcgaggcctgtaacactgagatggcccactgggaattaacagaagtacccattccatctcagactgtgatactgcatagtatttcaatgccttcaacattgcatacattttcaactaaatgttatttcagaaatgtgtttctttgtatttctaactttaaatacttgtgggtagaattaatgcagttactacygcttaaatcttttaagtaaattaatcatagagttaaggg

SEQ ID NO: 633723 - DNA, 464 bp, Homo sapiens
tacgaaatatttcaatgaaaactctttcttttgacagaatccagcttaataatatattaaattatcagtgcttaggcagttttgttttgttttttttttttgcagaatgtacccattaacaaattacactgaaatatcactacctctaattaaattagtctttcagagtacaggtggcgtagaagctcccttttcccaactgtatcattattagtctctgaaatttgatgtaatttagttagctccatatttctggttacttatgtcaacaaagaaagaaatctaattcctaatttttaaaacaggtttttgttaactttgaaagaaaaagaagagtttcaacatgaattttactcataacagacattttgctaaytggcattttcaaagataacactctaaaagaaaaaaaaacctaaactaaattaaacctgtttctcaatgaatttccacaatgtggcctc

SEQ ID NO: 633724 - DNA, 581 bp, Homo sapiens
ttttaaaagctagtttcagacagagagatgaagcctgaactaagaaaagcrtaactacatctatgcttgctgcaaatgtcagttttgaattgaaagaatgttgggtaagcttggggatatgatattttgtatcaccagaattcagaggtttgaatactaccaactatttgcccaaaccttaaatgtggattatttccacattgtagtctctttctttatacattcctgtccagatgtctgagctaaaaatagttctgagggcccaacctatggccagagcatccttcttcacaagttgtactttgcctctctgaaagcggacagattgtttttccaggacattcccacagggcagcattggaagaaaatccaccctctctctggtctaccaccactaaaccagaggtcagcaaacttttcctcagtagggccagatagtaaataatttaggttttgtgggccacatatattccctgtagcacatttttctttgtcgtttgtattttaagtaactttttaaaaatgtaaaagctaatcttagagaaaaataggccataggtcacactgggcccagagatcat

SEQ ID NO: 633725 - DNA, 557 bp, Homo sapiens
gagatgaagcctgaactaagaaaagcataactacatctatgcttgctgcaaatgtcagttttgaattgaaagaatgttgggtaagcttggggatatgatattttgtatcaccagaattcagaggtttgaatactaccaactatttgcccaaaccttaaatgtggattatttccacattgtagtctctttctttatacattcctgtccagatgtctgagctaaaaatagttctgagggcccaacctatggccagagcatccttcttcacaagttgtactttgcctctctgaaagcggacagattgtttttccaggacattcccacagggcagcattggaagaaaatccaccctctctctggtctaccaccactaaaccagaggtcagcaaacttttcctcagtagggccagatagtaaataatttaggttttgtgggccacatatattccctgtagcacatttttctttgtcgtttgtattttaagtaactttttaaaaatgtaaaagctartcttagagaaaaataggccataggtcacactgggcccagagatcat

SEQ ID NO: 633726 - DNA, 508 bp, Homo sapiens
atattattcttatgcctttgtatcctcatagcttagctcccgcttataagtgagaacatatgatatttggttttctattcctgagttacctcacttagaataatggcctccagctccatccaagttgctgcaaaggccattattttgttccgttttatgactgagtagtattccrtggtgtatatatatatcacagccaacaaatagttgatttctttttaactatatgctgatgataattcttgctttaatattggcaacaactgactggcagtgccagaaacagaagcaaatctcttcttgactgattgaatacaaataaaatttgcaaatagtttttattatgatccatatcttcgattttcaaatatcaacattatgtttccttagtaggaaggagctttgttattccttccatccctgtatgaggcctagtttccagctagaagcatttactctgatttttattattctttttctttgctggaaaagacgagatcctaaattt

SEQ ID NO: 633727 - DNA, 606 bp, Homo sapiens
tgtaaatattttgggagtataataccaagaccatcactgtatatacaccagccataataccattctgtaaagagtggatttaaacatcagacagatcaccttaaatgtcatctgagtcagattgataacgmaattaccaaagaacttttaaactggaatgctactaaagtaataaaacgttatttccctaattccaatgctatcttattgggtattttaaaagtagaaaaacttgtctatgaataagcaaaataaatggttctagttatataataatactaacaattttaagtttcttacatttatattaaaattaagactagaatgtactagtaaaatagaaaaaatacatagtgtaaatgaaaagtgcttattagcagttcggcatttcagatgtaccaattacaactttcatacttgctgtttttatggtgatgattaccctcttaatatatgactgtttctcagtggtgtctacagtgggcatagtaaaaattaaggactgctatttaaggggctgggcattaatttgtttctttaataaataaattatatttaaatgaaatcagggtacaattcttaggtaattggaattatttattgtaa

SEQ ID NO: 633728 - DNA, 589 bp, Homo sapiens
ttaactatgtaggtatttaaatgttctgttcaatatggtagccagtagccatatgtaactattgatcatttttaatgtggttgccttggattttgaagaccaagtaccaaaaaaagaatataaaatgtctccttttaaaatattgattatatattgaaatgataatattttggatatattgggttaaataaaatatgctattaaaatccattcacctgtttctttttacctttttaatctggctgctggaaactttcaaattacacttgcagcttacctcatacttccactgtcctaattcctatatagatgctttgcactatagtatccacattcagtgttttattcaaggtctgataaatatcagttgtattgaaaggagatttattatcatcatagtccacacatacttcccagtgcatttacctacccccctggcattcttaaattttagcaaagttgatttattttttcttattgttttgagtccacagatttggcctctttgattcctttttctgtgtygtctctgctgttgacttttcttcagtaagagaattaggatacactcttgcaaagcctgtatgcc

SEQ ID NO: 633729 - DNA, 585 bp, Homo sapiens
ttggcctctttgattcctttttctgtgttgtctctgctgttgacttttcttcagtaagagaattaggatacactcttgcaaagcctgtatgccttgtttgcttgccagcctgtggaaataaggagccttagagtgtggctttgatctccactttgaagtaggtaaatctgctactctgaatgtgggcagggatcctcgggaaattgttgttgttgttgttgttgtttttctcttttcctgtaaaacaaggtttgaatgactaattagaagatatttataagagcctacatacttcatggtagtaaaggttattggcttattaaaaagatgatcatgagaactataatgtagttttaagaaactttcttttagaaaacctgcctgttaacttattttaagygcgtttgaagttatgagtgaaattttacataaacttcacagccttttgctgaatccaccacctcggtgcctccttcaaaggaatttgagtcggcctctttactggccatttggtatcatctctgctgtgagccagacagaatctttttccactcattcagatcatggtgtggaatctgtgggcaa

SEQ ID NO: 633730 - DNA, 460 bp, Homo sapiens
accctattgacactattccacaagatagagaaacagagaattcctcctaaatcattctgtgaagccggtatcaccctaaccaggaagggacataagaacaacaacaaaaaactacaacagagcaatgatgaacatagatgcaaaaatcatcaataaaatactagctataacagaatacaatagcatagcaaaaagataatccaccatgatcaagtgggtttcatatcaggaatgcaggaatggtttaacatctgcaartcaataaatgtgatacaccatataaacagaattaaaaacaaaaaataacatgatcatctcaatagacacagaaaaagatttctttttaatgcgctatttactgtggtactctcagaggtctaaatttggcattattctcttcgtatgcatttttcagatctttttgttaattttattgttttatattaaagctttagatatg

SEQ ID NO: 633731 - DNA, 427 bp, Homo sapiens
tgtcctaatgtacattataattcactttaacaatgaatgtaactctaaattaagatactgtctctttttctactttaatgaagtttgagagaaaagagaattttgctttaacttaaaaaaaaaaaaaacaggcagggcacctgtaatcccagcactttggaaggctgaggtgggcagatcacgaggtcaggagatcaagaccatcctgactaacacgatgaaaccccgtctgtactaaaatacagaaaaaaatagctgggcgtggwgctactcgggaggctgaggcaggagaatggcatgacccgggaggtggagctttgcagtgagccgagatcatgctactgcactccagcctggacgaaagagtgagactccttccccccccgcctcagaaaataacctagattttattgtaggattaagtata

SEQ ID NO: 633732 - DNA, 524 bp, Homo sapiens
attgtaggattaagtataagtacctaatacataaggatctcttatttttctctgtacctgcctccctatcgtccccttccgtagcctgttctgtctcctgtgactgctcatacattgacttaattttcttgagagtagttgtatttggagaaggcagtgagcctataatgatataatgtttgcgagcataaaaatatattttaaaatgctttcttttgtgctttattattaatgaaaatttcaggtgtcacttaaaatgatacggaaagctttggtgcgcaatgaacagtgttagtacaatgcaagtacagaagtctgacattcagggtcaaccataactgtattagagttccatttgagtatatttcacactatggatagacaattaattcttgttgttactgatgcaaaaargtaaataatgtttattttaatgaaattggacagctcttactatgttaaatcgtctaacctagaaactcccaggacagagtttgattgtttaaaaactctcacttgtagat

SEQ ID NO: 633733 - DNA, 631 bp, Homo sapiens
aaattactgaagttttttcttttttttttatatattatactttaagttctagggtacatgtgcacaacgtgcaggtttgtcacatgtatacatgtgccatgttggtgtgctgcacccatcaactcatcatttacattaggtatttctcctaatgctatccttcccccctcatcccaccccacgacaggccccagtgtgtgatgttctccaccctgtgtctaagtgttctcattgttcagttcccacctatgaatgagaacaattattgaagtttttaaacttcaatagattcacctagatctaacagacaaataagcatatgagaaatttaaaatgtcttatgcactgagtattgctctatactttctcttyccaaagaccttgatttcttcatcattccattttttaatatcattggaggaataggttattctaatgctttccatatagttctgaaacataggaaaagaagtaaaacttccagacgtctcacaaagacaacatagcattaataaggaaacttatttttagatagcacacaatatacctgcctctacttagactaatttctaatttatgaatataaataagatcaatttaaaattcttaaggatctcttcttataggaatt

SEQ ID NO: 633734 - DNA, 631 bp, Homo sapiens
aaattactgaagttttttcttttttttttatatattatactttaagttctagggtacatgtgcacaacgtgcaggtttgtcacatgtatacatgtgccatgttggtgtgctgcacccatcaactcatcatttacattaggtatttctcctaatgctatccttcccccctcatcccaccccacgacaggccccagtgtgtgatgttctccaccctgtgtctaagtgttctcattgttcagttcccacctatgaatgagaacaattattgaagtttttaaacttcaatagattcacctagatctaacagacaaataagcatatgagaaatttaaaatgtcttatgcactgagtattgctctatactttctcttcccaaagaccttgatttcttcatcattccattttttaatatcattggaggaataggttattctaatgctttccatatagttctgaaacataggaaaagaagtaaaacttccaracgtctcacaaagacaacatagcattaataaggaaacttatttttagatagcacacaatatacctgcctctacttagactaatttctaatttatgaatataaataagatcaatttaaaattcttaaggatctcttcttataggaatt

SEQ ID NO: 633735 - DNA, 621 bp, Homo sapiens
tcatactcaaatcataagaaaagtgctcaaacttgggattgtttaatgtttttctatgaaaagcgtttactacagctccctaagcaataagcatgagaaagggtaagagggcaaggaagaggcatgctgaggcagcttgttgcaaacatcaagtgcttgaaacaatgctctggggttttttcattctaaagtggacttggtcgacccatatatgattggcgaggaaatgctgaaaggtcaaagggttgttagactactttgccaggcaatagcaacacatgactttgctgaacatcctagaagccaagagaactgaaatctaaaagacaataaaagtactcactaagcaggatgatgatgcagagcaggatggcaatgatggcaccggtgccaagccccgcacccacaatcctgtccacatctgtgcagtccccgttggagtcacactggcaaaccttcacrcgcaggatggaaatatttgatttgggaggattacccgaatctgtgattatgatgggaacttcatagataccagcttcaagaaattttatctttaaattaagctgagcaaaatcacctatatgaaaaaggaaaaacatagtttgataggtaatacttaaa

SEQ ID NO: 633736 - DNA, 597 bp, Homo sapiens
gtgctctggcaaccatccactccctcatcagaaaggataaattacattttgctgagtttggaaatctttacagataggtttcataagtccaataactactgtacaggtaaggaatgaaaataattaactcttagatcctggttttggcataagctttctttccttcatgatgcatggaggagagataaatgttataagcctctgaaagttccctgcggaamctttttgtgatgtttggcataaaggcacaggctaaataattttaaagtattttttaagtaaaaatggcagatacagagaaacaagaacagctttttcttcaaatagtaaatccattttaatatggatacagatatctatttatatctaatatagtcattgacttactgagaagaaaattcaaagaattttaaattatcttttaataagtagttttgattgcaatgaaaatttctactcaaatagtgaattagataaattttatgcacagcatagaacataagtaagctacaaaaacactacaaacagcatttcatacctaatattttgctgcatatatcgatctgggtcctgagcagtgaatgttgtcaacatggt

SEQ ID NO: 633737 - DNA, 581 bp, Homo sapiens
tgcaggtaataaaaataattaattagagatataccaggtgacttagaggtatatgtactgggtattgttgagtgagaagagcatgatgtagaatagggtacatagtattgtgtgtgtgtgtgtgtgtgtgtgtgtgtgtgtactatatatgactgtaaatgattatttgaacatagaaaaaactgtgaaggatcaagacaggctattagagtgggtttttaatgcaagaaaayactactatgatgtgtttagctgaggggagaggtaactaagctataaaggaaatggaaaaagatttcactgagaactctagaatacgtatcctaacaccacatttattcatctatatcaaattaaatacagatttaaaacattaaaattaaaaataatgttgtcattgatatatttaatatatttcctttcaaagtattaactattaagataaaagaacgtttactatttgatgtttaaactatcttgaagaagatgaattttactatttgatgtttaaaactatttagaaaaagtgttatatatatacatatgtaattattattttagggctttgtctagtaacaaaa

SEQ ID NO: 633738 - DNA, 388 bp, Homo sapiens
ctctgtttccatgcctgtaatctaaggattactctagaattgaattagagtatgtagctctcttgaccacgtggtaaccctcaccaatgtctcttttcttcttgctctgataaccgcatccatttgtacttgttcttcagacattaccctcttgagttttaactatatctctattgtgtctaaatttttttgttttttatttgtaaaaatgaatcaaactgtggaagaaaaagaaagtaaagacaccaaccagagaacagcctgatgtctttggccagggagggaatctcagcatactctggacagcaaagcaagaggagtctcagcgttcrtcgtggaaaacgtgtggtttctggcttctggaatttaaatgattgtgtatcttctt

SEQ ID NO: 633739 - DNA, 591 bp, Homo sapiens
aaatcaaaccgttgtttttgacaaccagcctgaaccaatgatgtgcactaatcattttagtgttagaatatttgctcagactgtggccacatgatagtgttaaaatgttaaaagaaagtcaaagkcatttaatattgacaaggctactcctgaaggctccctctttacctgacaacattaaaaaacaaaagatatttatttagtttaaatagggggaagtggagagacaaaaagggaaagagattgtatggtagggttaaaatatgtattaaaataatttacttattattattgtaattttaaagctttttaacatgaaaaatgtgaaatatatgtaaagttagagcagtatagcaggctgggcgtggtggctcatgcctgtaatccaagctctttgggaggccgaggtgggcagatcatgaggtcagaagttcgagatcagcctggccaatatgagtgaatcaccgtctctactaaaaatacaaatacaattagccgggcatggtggcacacgcctgtaatcccagctactcaggaggctgaggcaggagaatgcttgaacctgggaggaggaggttgcagtgagctgag

SEQ ID NO: 633740 - DNA, 567 bp, Homo sapiens
cttgcccaggctggagtgcagtggcatgatctcggctcactacaacctccgcctcctgggttcaagcgattctcctgcctcagcctcctgagtatctgggattacaggctcgtgacaccacacctggctaatttttgtatttttagtaggtacggggtttcaccatgttggtcaggctggtctcgaactcctgacctcatgatccacccgcctcggcctcccaaagtgctgggattacaggcgtgagcccccgcccctggctgaaaatgtttgtttttaaacccmttttgttcaaattacatagcttttttttttcagtagacctagattgagttacatcacctcttctaattctcactccaagtagaggttttatgagacagagatgtgtttaaagattaagcaaactgattgagcaaaaaagtttgatacaaagaaggccatgggaaaaaaattgctctggatagtttagatataatgctcacaatgacctttttcagcttgtctgaagacaattgtggttaaaattaaaaaaaaaaagattgtgttcattatgaacattactgt

SEQ ID NO: 633741 - DNA, 567 bp, Homo sapiens
cttgcccaggctggagtgcagtggcatgatctcggctcactacaacctccgcctcctgggttcaagcgattctcctgcctcagcctcctgagtatctgggattacaggctcgtgacaccacacctggctaatttttgtatttttagtaggtacggggtttcaccatgttggtcaggctggtctcgaactcctgacctcatgatccacccgcctcggcctcccaaagtgctgggattacaggcgtgagcccccgcccctggctgaaaatgtttgtttttaaaccccttttgttcaaattacatagcttttttttttcagtagacctagattgagttacatcacctcttctaattctcactccaagtagaggttttatgagacagagatgtgtttaaagattaagcaaactgattgagcaaaaaagtttgatacaaagaaggcmatgggaaaaaaattgctctggatagtttagatataatgctcacaatgacctttttcagcttgtctgaagacaattgtggttaaaattaaaaaaaaaaagattgtgttcattatgaacattactgt

SEQ ID NO: 633742 - DNA, 645 bp, Homo sapiens
caacatttccatttgtagtgaccaatgactataatctttctgcagtcatacatttggtttattcttaaattacctcagatttcctaaaaaaaaaatactatttaggaaattctgaaatccatttaaaatttgaacttcacttagaaaatcttccckggttacttccatctaattttgttgtgtttctgattcctcttcattttctccattagctttctcagcacaaaaaacagcatagactgtgagtgatggcggccatcttggttcatgtgtaaagactgaatttcagtgactaccaacggctatttcttagaatgtggcacttaccctgggttcaggctgtggtccttctactgcccatgaatgaattgctccatctgaacattcgggaacaggctcaaagccagctgcactacgaggagcacctccacaatcacaacagatcatcaaaaatgggaccactggtggtggagggatagtaatactagagttagcactgggtgcaaataaaaaacaaaacaacctgattttttatggttaaatttgaattcgtaatataattctggttggttctaaaattatgaaagtttcagaatacaagctgaatgatggtcagaccccaaagtaaatgggagcttctgtata

SEQ ID NO: 633743 - DNA, 528 bp, Homo sapiens
aaatatctgggagtagaatgtctgggtcatggtgtagatgcatgtttaacattttaagaaactgccaaactgctttccaaacttgaggtatcattttgctttcccaccagcacttggtatggcagactttttaattttagcccttctaataagcacatagtggtatctyattgtaatttaaatctgtattttcttttttttaaaacaacttcaactttaattttagatttagagggtacatgttgttacatgggtaccttgtgtgatgctaaggtttggagtgtgattgattccatcacccaggtctgagcatagtactcaatagttagttgtttttttttttttttgggagacggagtctcgctgtattgcctaggctggagtgcagtggctcaatctcggctcactgcaatctctgcctcccaggttcaagcgattctcctgcctcaacctccagagtagctggtattacagatgcccgccaccatgcccagctaatttttgtatttttggtagagacagggtttc

SEQ ID NO: 633744 - DNA, 528 bp, Homo sapiens
aaatatctgggagtagaatgtctgggtcatggtgtagatgcatgtttaacattttaagaaactgccaaactgctttccaaacttgaggtatcattttgctttcccaccagcacttggtatggcagactttttaattttagcccttctaataagcacatagtggtatcttattgtaatttaaatctgtattttctttttttwaaaacaacttcaactttaattttagatttagagggtacatgttgttacatgggtaccttgtgtgatgctaaggtttggagtgtgattgattccatcacccaggtctgagcatagtactcaatagttagttgtttttttttttttttgggagacggagtctcgctgtattgcctaggctggagtgcagtggctcaatctcggctcactgcaatctctgcctcccaggttcaagcgattctcctgcctcaacctccagagtagctggtattacagatgcccgccaccatgcccagctaatttttgtatttttggtagagacagggtttc

SEQ ID NO: 633745 - DNA, 565 bp, Homo sapiens
tttagtttctaacttatctttcttaccaagtcacttaatcatatatttcccacccacatgttgatgagcaactttaacatggtcagtgagctttaaaaagagctggagtgtttcatattgagacgaggtattggttctctgaagctgccagccactacattgccattccaacacctgacactaacaaaacatttcacagttaacaaaaccatttgaagagattacaaaagtctcgaaaggtaaattttgcaaattaaaaaaaaaaatgttcatgggataaattagtcagacagctcacaactgggacagtcaggatgtgaaccyaaaactcttcaactctgccagcattgactcccttctccctttggaccaatgaccaaccctatacattcttcctttacattgcctaattcatcccaatatctttttttattttcctgcttccctcctgttttaacatgtcactctttctaggcctgtgtcttactcttcatttctttctcagaaattagcagagacataaattttagtttccttttttttcttttttgagttggagtcttgc

SEQ ID NO: 633746 - DNA, 457 bp, Homo sapiens
gggctggagtgcaatggtgccatctcggctcaccacaacctctgcctcctgggttcaagtgattctcagcctcccgagtagctgggattacaggtgtgcaccaccacggctaattttgtatttttagtagagatggggtttcttcatgttggtcaggctggtctcgaactcccaacctcaagtgatccatctgcctcggcctcccaaagtgctgggattacaggtgtgagccactgtgccaggcccatatttcataattcttaagcatatctgctrtgcacaataaaataaaatacctgtgttcttgctctgtataatatagcaattattttgcatggtgccgttatattttaggcatatatgtctttgtaagtgctgttttatatgataaaaacatgttctcatggtgcacttctactcctttgtaagactcaactgtaagtttccatgagacatg

SEQ ID NO: 633747 - DNA, 538 bp, Homo sapiens
ctattctctctgaacactgttacctgtaagccttcatctacataacaagggccttggctcacacaacccttaatattttaactcaagcattcttttctactgacttcaagttcttagacaatagcttaactgtcaaccaactgacaactaaagaatcccccaaacccatctatgacttgtaagccctctgctttgagatgtcctgccttttgagactggactaatgtacacttttgttcaaaggaaatctttagccaaattaaatttgacagtgtttaattgagaaaagaacaattcatgaattgggcagccacccaagccagagtaggctcagagagactccagagcaaccacatggtggacgatttatggacaaaaaaaggaaaatgacaagagaaaatggaagtgaggtacagaaacagccagattgattacagcttagtgtttgccttatttgaacacattttgaacagttgkcctcctttgatgggccaaaactcgatgattggcacatcaagtagattacggtctgtttaca

SEQ ID NO: 633748 - DNA, 510 bp, Homo sapiens
tctagcaagttctgtaaaagctccaaagccatattttgaaacaattttcatgtacccagaaggcttaaagatatattaaaattctatatcaaaatatcattattttagcctagtaaactactgagactcacctgcttcaaatataaataagggtggtagactaatagcttttacattgttgcagaaaatgtcaagttattatctgttacagaaattctaagacttttcacctttccttgtatttttattctaattaggttttagaagattgtttattgtatctatttggaggaatgtgtttcatgctgtgtccttcattaaaaagattatgtacttgatcaatccttaacctcttagtgcatctcattagtttggtaatttattcatcaaaaatgcactccaagatgtggtgggattgaagaactggtgttgatccaaaaaagcaygctgtgtagtgccgtgaacctcatcacttagggtaatgtgcctgcctgagaaaaaggagcaggg

SEQ ID NO: 633749 - DNA, 583 bp, Homo sapiens
ttgaccccagggtaagaggaatgaaactgcttcacagctgtctgcatgtattcaggaatgcctggtttgtgttttaaggcttgcattacaaagatgttagtactcttgcccacagttttagcacagcatttaattaaacagcagactataagataatgagttctagtataagaaaagaaagtcataactttggaagttcttgtagaattgatctaaagtcctaagggatttaggtgaatagcctcaaagatcaatcagacatggggtcactagtagagagagatttgggtttaaaattgttagaaagacaaattgggataaatagaaaagagcaaattgaaatatatcatcccatatcttaaagttgtttactagtcaygagaagagatccgttcagttaaacagctatgtgccatttcaggaggtggcattgcagatgggctaggcctctatacatgatgaaggcaaacagagttttagtaggaggcattttttatggaaacaagaaaaacaaaagttaacgttgggcacaaactattcagatgttagactaaaagcatctttagttatataggaggaagtc

SEQ ID NO: 633750 - DNA, 583 bp, Homo sapiens
ttgaccccagggtaagaggaatgaaactgcttcacagctgtctgcatgtattcaggaatgcctggtttgtgttttaaggcttgcattacaaagatgttagtactcttgcccacagttttagcacagcatttaattaaacagcagactataagataatgagttctagtataagaaaagaaagtcataactttggaagttcttgtagaattgatctaaagtcctaagggatttaggtgaatagcctcaaagatcaatcagacatggggtcactagtagagagagatttgggtttaaaattgttagaaagacaaattgggataaatagaaaagagcaaattgaaatatatcatcccatatcttaaagttgtttactagtcatgagaagagatccgttcagttaaacagctatgtrccatttcaggaggtggcattgcagatgggctaggcctctatacatgatgaaggcaaacagagttttagtaggaggcattttttatggaaacaagaaaaacaaaagttaacgttgggcacaaactattcagatgttagactaaaagcatctttagttatataggaggaagtc

SEQ ID NO: 633751 - DNA, 583 bp, Homo sapiens
ttgaccccagggtaagaggaatgaaactgcttcacagctgtctgcatgtattcaggaatgcctggtttgtgttttaaggcttgcattacaaagatgttagtactcttgcccacagttttagcacagcatttaattaaacagcagactataagataatgagttctagtataagaaaagaaagtcataactttggaagttcttgtagaattgatctaaagtcctaagggatttaggtgaatagcctcaaagatcaatcagacatggggtcactagtagagagagatttgggtttaaaattgttagaaagacaaattgggataaatagaaaagagcaaattgaaatatatcatcccatatcttaaagttgtttactagtcatgagaagagatccgttcagttaaacagctatgtgccatttcaggaggtggcattgcagatgggctaggcctctatacatgatgaaggcaaacagagttttagtaggaggcattttttatggaaacaagaaaaacaaaagttaacgttgggcacaawctattcagatgttagactaaaagcatctttagttatataggaggaagtc

SEQ ID NO: 633752 - DNA, 567 bp, Homo sapiens
gcaatgactactaggtgagctataattacagagaaaagagaatcactccaggtgagctgatgactgcaggtggttttagctctcagaacatttgctgattcttggtgtggactaaggatcagccttaacctgggcaggactctgctgagagtaaaagtggaaccagaaaagtttttgttcttccataagactgggatggtaaatctgacacttgagaaaacttaaattcagggatattcgctgagttctggtgcactgggatagtatgaagagctcagctgaactattcctaaaaacaactcctttaaactttcaatgatcgggaaaacacacacacacacacacacactaaagagagggagtgtgtacttcattacgtggttgggcacacccacaaatttttttcaaattttgaaactgcctaggacaagaggctggatagctaagctgaaaaccactgaaggtgcaaatgatgtctcctagtattttaaagttcagatgagaaataccatggaagggccttgtcctrcaacacggtagttttatcaaaaccaccatccacctcca

SEQ ID NO: 633753 - DNA, 281 bp, Homo sapiens
catctgggagcagcttctccaggattttgaytggtttttggccctcaggaaacagtaacgggaaggtcagtaggatgggtgttaactcgtgatgttgctgctggtgtgaagtttggaagtggttttctttttctcccctctctaaatcctgtttcagatttctctcacctttgatagaacccatgcctatatgagcttacctagtggatcatccagacccttacccctgagaggtctgggccctggttatgcagccattcttaagtgggtttaaacagcct

SEQ ID NO: 633754 - DNA, 550 bp, Homo sapiens
ttttgattctgaaacacaaaacagaaagtatcagtgttttaagcaaaaagtcataaaaacattatttcagtcctttgttagtccatgcaatcaactcttgtttcaatcaatattgggctagcagtccatatgaatatattatgaatacattmgttttttataagagtcctagaagctttttttctctctattccaatctcacaatctcagaatttatcagagacctacattcaagagtacttaccatagtcttatagctgtttataaactgccttttaaaaaggataaaaacaaaacaacaaatgtctgtggatgataagaatcttaggacagccacagttaaagctgcaattaacaagaaaatctctttggcacacaattatttaacaaacaattataattattactggtaacatgtactgagacatatatactgaaacataatatgatatcagacatatgatataggaatcttatacaattttggaatatatattgaaaacacattcatatgaatgtaactcaaaggaagttaaataccattttctat

SEQ ID NO: 633755 - DNA, 604 bp, Homo sapiens
aatagagaacccagaaaaagccaaatatttayagccaactgatcactgacaaagcaaacaaaaacataaagtagggaaaggacatcctgttgaagcactttaatcaggagaggaggattatattatcaggcttctgtgtgcagaacagagtgaagaggtgcctgagtgggtgagagcagaccaggcagaggctattcaatagcagataagttaatgaatgagaggtgggggcaaagctggaggtggaggtgtaggtggtaccaatcacagggataaagacacttccagaagagccaatttaagtaaagagagttggagattgacacccctttggaagatccaagaagagctattaaataggcaactgcatctacaagattgaacctcagaaaagagagttggaatggcaatggaaagtttgagtcattctcatgtaggtggtaactgaagtgacatgtatgaataatgatgaataaaaggaagaccagagtaataaaaggagaatggctgagagagtcttgaggtcttctcacatttagaggcaagaagagagaggcaatgctgactaagagacaaagagtaaggaaaggtaagacagaaacca

SEQ ID NO: 633756 - DNA, 634 bp, Homo sapiens
caaacaaaaacataaagtagggaaaggacatcctgttgaagcactttaatcaggagaggaggattatattatcaggcttctgtgtgcagaacagagtgaagaggtgcctgagtgggtgagagcagaccaggcagaggctattcaatagcagataagttaatgaatgagaggtgggggcaaagctggaggtggaggtgtaggtggtaccaatcacagggataaagacacttccagaagagccaatttaagtaaagagagttggagattgacacccctttggaagatccaagaagagctattaaataggcaactgcatctacaagattgaacctcagaaaagagagttggaatggcaatggaaagtttgagtcattctcatgtaggtggtaactgaagtgacatgtatgaataatgatgaataaaaggaagaccagagtaataaaaggagaatggctgagagagtcttgaggtcttctcacatttagaggcaagaagagagaggcaatgctgactaagagacaaagagtaaggaaaggtaagacagaaaccaagagaatcttatgaacttgtctttccrtgtcacataaccatctgatataatttatgatcatgattgtcctaattaatacaaaac

SEQ ID NO: 633757 - DNA, 553 bp, Homo sapiens
aaataaactagtttttaatgtaaaaattagagtgatttttgtttctgtatcatattacacctactaaagtcaggcctaaaaatgtactgtgtacaatagaatamattacacaaggcaatattgcaggaatgctggaaacattgactgtttatccaagcacataatttggttttatttcgagaatagtattaaaatagtctaatctttaataggaacccaagtcaagttcctactacaattactttgtcaaaatttgagactattcttactatcatgtttctgagtaaaatagtgtccttggacataaatggaaatgtttaatttatagtaatatgatccttgcaagtcaattatttagagtattatgaacagatgatttaatcagagaactgaagaaagaatatttgtcctagctctatatcactgacaatacattgcttcacaaatctaaagagactccttgaattttgatctatgaaccagacattgtagtgctattaaaatagctatactatatttggaagattccagattgtgtgtgctgctgatggta

SEQ ID NO: 633758 - DNA, 553 bp, Homo sapiens
aaataaactagtttttaatgtaaaaattagagtgatttttgtttctgtatcatattacacctactaaagtcaggcctaaaaatgtactgtgtacaatagaataaattacacaaggcaatattgcaggaatgctggaaacattgactgtttatccaagcacataatttggttttatttcgagaatagtattaaaatagtctaatctttaataggaacccaagtcaagttcctactacaattactttgtcaaaatttgagactattcttactatcatgtttctgagtaaaatagtgtccttggacataaatggaaatgtttaatttatagtaatatgatccttgcaagtcaattatttagagtattatgaacagatgatttaatcagagaactgaagaaagaatatttgtcctagctctatatcactgacaatacattgcttcacaaatctaaagagactccttgaattttgatctatgaaccagacattgtagtgctattaaaatagctatactwtatttggaagattccagattgtgtgtgctgctgatggta

SEQ ID NO: 633759 - DNA, 450 bp, Homo sapiens
gttcaagtgattctcttgcctcagcctcccgagtagctgtgatcaccggtgcccaccactacacctagctaatttttctatttttagtacggacagggtttcaccatgttggctaggctggtctcgaactcctgacctcaggtgatccacccacctcggccacctaaagtgctgagattacaagcctgagccaccacrcccggcgaagcctataatttttataaacataaatatactttaaatgacacatttttccaaaaatcttcatattttcttggaactaacgttgactgattgggcaaagggtacaagccactcattaattaggcaattgtgttttgcagaaaacagctgtatagttgtcatctgcatagaatccaatctgcataattttggggcatcttgcccttggaaattcaggtgtttaacaaggacttgtttcctaccatg

SEQ ID NO: 633760 - DNA, 583 bp, Homo sapiens
tcagaagttgtcacactaataccaaaccagaaaagaataatttcctgagctgagaactgaacccaagttccactgtgaaagggccaagctttagctactgagctaccacatggagcagttaccattgttcttcccaggagtctagagtactcattttcaagcttgcaaaggattttaactgcttaagaaaaatttttaggctagcyattacatgtacctgaaaattgccaccctccagttagctgagatcaagacaaagtactcccatacggtcacaaagtcaagttttcaaggatataaaacaagatgagaggaaaatctctttgcattttttatttcaaggatatgcagcaaaatttgtaactgaccgatctgcaggtttggctcaaacagcaggcttacaggggtcctagctatcctatcctgtggtacccctctttataacagaatgacacagaaagacaaatttatagcacaaaggacaccagatttgctacagcctaagacgaggctcacaaatccattttcctattaatcaaaaccttgcagaggagacaaacagtgatttttaccattcactcaa

SEQ ID NO: 633761 - DNA, 633 bp, Homo sapiens
agagaggccagaagtctggttgataagacattcttacccttttgccagcatgccaggtttctaggttccctttctctacagcttctggaagaatacagtggcttttgatgactctgcttcctgcaccatagctgtggggaccaagttgtgttacaaaagaaaatcayctttttccattctattgaacaataggcaaaagtccctcaattttataaaatgctgcccaacaggctgcacagtggaactgaattaacagttcccattccagccagagcaaaacacgcgggatggaacacagacattagtcacctggctcagtgcccaaatatcaacctggcaaggctcaaacttccccatattgacccctataatcttggatccacccaaagtagggagagatgacctccaaacaggagttttaaagggcagtctctgggcaagatggaagagcagaagaatcccttaattaggcctgttgagcttcctacagggctcactgaatgtgaccaagcagacaaactaggagagccttctggacttcatcagcaattccttcagagatctcccctccataaagaaacacacacaatgaagcaaagacaaacagaaggccttttaaaccaagactgcaaa

SEQ ID NO: 633762 - DNA, 664 bp, Homo sapiens
attgatttagagactacagtagaattaccacttttgggtacatttttttttcctgtgggcaagaaaaatagtttatggacttcggaatagcactgtagctttagttactgtttgaaaattcaaraattactttaaaaatatttatttactctaaaaggaacaacaccagtacaaatattacacaaaagaaaacatctgtacctgagaaaactatgcatttttatataatcaagaaaaaaattaatattaaatgtatcactttatagacaaaatgcaaaataaaaattctactactattgtagaatttggaaaaattgaaatttttgacattttattcctttagaccacaaacacttaacaagcaccttctttggtttatacagttactctaagtgtcagaggcacttgaacgaaagcaacttcatcttgaatagggcttgggtgaaataaggccgggacttgctggactgcaccctcagtaggttaggccttcttaattacagaatgagatggaggtaggcacaagatacaagtcacaaagaccttgctgataacacaggatgtgataaagaagccagccaaaacctgtcaaaagcaaggtcatgatgaaaatgacctctggtcatcctcacagctcattgcatgctaattataatgcattagc

SEQ ID NO: 633763 - DNA, 633 bp, Homo sapiens
agagaggccagaagtctggttgataagacattcttacccttttgccagcatgccaggtttctaggttccctttctctacagcttctggaagaatacagtggcttttgatgactctgcttcctgcaccatagctgtggggaccaagttgtgttacaaaagaaaatcacctttttccattctattgaacaataggcaaaagtccctcaattttataaaatgctgcccaacaggctgcacagtggaactgaattaacagttcccattccagccagagcaaaacacrcgggatggaacacagacattagtcacctggctcagtgcccaaatatcaacctggcaaggctcaaacttccccatattgacccctataatcttggatccacccaaagtagggagagatgacctccaaacaggagttttaaagggcagtctctgggcaagatggaagagcagaagaatcccttaattaggcctgttgagcttcctacagggctcactgaatgtgaccaagcagacaaactaggagagccttctggacttcatcagcaattccttcagagatctcccctccataaagaaacacacacaatgaagcaaagacaaacagaaggccttttaaaccaagactgcaaa

SEQ ID NO: 633764 - DNA, 633 bp, Homo sapiens
agagaggccagaagtctggttgataagacattcttacccttttgccagcatgccaggtttctaggttccctttctctacagcttctggaagaatacagtggcttttgatgactctgcttcctgcaccatagctgtggggaccaagttgtgttacaaaagaaaatcacctttttccattctattgaacaataggcaaaagtccctcaattttataaaatgctgcccaacaggctgcacagtggaactgaattaacagttcccattccagccagagcaaaacacgmgggatggaacacagacattagtcacctggctcagtgcccaaatatcaacctggcaaggctcaaacttccccatattgacccctataatcttggatccacccaaagtagggagagatgacctccaaacaggagttttaaagggcagtctctgggcaagatggaagagcagaagaatcccttaattaggcctgttgagcttcctacagggctcactgaatgtgaccaagcagacaaactaggagagccttctggacttcatcagcaattccttcagagatctcccctccataaagaaacacacacaatgaagcaaagacaaacagaaggccttttaaaccaagactgcaaa

SEQ ID NO: 633765 - DNA, 633 bp, Homo sapiens
agagaggccagaagtctggttgataagacattcttacccttttgccagcatgccaggtttctaggttccctttctctacagcttctggaagaatacagtggcttttgatgactctgcttcctgcaccatagctgtggggaccaagttgtgttacaaaagaaaatcacctttttccattctattgaacaataggcaaaagtccctcaattttataaaatgctgcccaacaggctgcacagtggaactgaattaacagttcccattccagccagagcaaaacacgcgggatggaacayagacattagtcacctggctcagtgcccaaatatcaacctggcaaggctcaaacttccccatattgacccctataatcttggatccacccaaagtagggagagatgacctccaaacaggagttttaaagggcagtctctgggcaagatggaagagcagaagaatcccttaattaggcctgttgagcttcctacagggctcactgaatgtgaccaagcagacaaactaggagagccttctggacttcatcagcaattccttcagagatctcccctccataaagaaacacacacaatgaagcaaagacaaacagaaggccttttaaaccaagactgcaaa

SEQ ID NO: 633766 - DNA, 583 bp, Homo sapiens
tgtttgaaaattcaaaaattactttaaaaatatttatttactctaaaaggaacaacaccagtacaaatattacacaaaagaaaacatctgtacctgagaaaactatgcatttttatataatcaagaaaaaaattaatattaaatgtatcactttatagacaaaatgcaaaataaaaattctactactattgtagaatttggaaaaattgaaatttttgacattttattcctttagaccacaaacacttaacaagcaccttctttggtttatacagttactctaagtgtcagaggcacttgaacgaaagcaacttcatcttgaatagggcttgggtgaaataaggccgggacttgctggactgcaccctcagtaggttaggccttcttaattacagaatgagatggaggtaggcacaagatacaagtcacaaagaccttgctgataacacaggatgtgataaagaagccagccaaaacctgtcaaaagcaagrtcatgatgaaaatgacctctggtcatcctcacagctcattgcatgctaattataatgcattagcatgctaaaagtcattcccaccagcccc

SEQ ID NO: 633767 - DNA, 584 bp, Homo sapiens
caaacagaaggccttttaaaccaagactgcaaaccagattccacacaagaagagtattcctccaaacaagttccctattctctgtccaattgtggagtaatctcctcaaaccaaggccctttctacaatctatgaagagtcaagcagtcaccatgacaggtctagagaactagccagtccctataacagrgctacagttcctctagggaggccaacagatcaggagaaggaaggaggtgttggcagcccctggaatattcaccaaaccagattacaaaacatcttccaggattatttctccaccgcaattaaatctatgatctatgggttgacagtacaccaccagtagagacagtgctagaggtagacctcaatctaaaagaactaagcagctgcttgggttggcctccacatccgctgctagtgagtggctgctgaactgtggcaggtagctacaaggggctatcccagacaagcccccatatttgtaaccacctaatgggttcttcttgcctcctgcgccaatagagccaatttattaagacatgggaattgcaatagagaaagagtttaatacccgtaga

SEQ ID NO: 633768 - DNA, 463 bp, Homo sapiens
aaggggctatcccagacaagcccccatatttgtaaccacctaatgggttcttcttgcctcctgckccaatagagccaatttattaagacatgggaattgcaatagagaaagagtttaatacccgtagagctggctaaacaagagaagagagttatattattactcaaaacagactcccccaaaacttggaagtcaggttttttaaaaaataatttggcaggcagagggctagagtaggggaatgctgattggttggattggggatgaaatcataggaagtccaagctgtcctcttgtgttaagtcaattcctgggtagaggccacaggacaagacatgtcagtttactggtctaagtggtgacagctgattcatcagaatgcagggtctgaaaaatatctcaaatgctaatcttaggtcttgcaacggtaatgttatccataggaacaattggggaagttaaa

SEQ ID NO: 633769 - DNA, 463 bp, Homo sapiens
aaggggctatcccagacaagcccccatatttgtaaccacctaatgggttcttcttgcctcctgcgccaatagagccaatttattaagacatgggaattgcaatagagaaagagtttaatacccgtagagctggctaaacaagagaagagagttatattattactcaaaacagactcccccaaaacttggaagtcaggttttttaaaaaataatttggcaggcagagggctagagtaggggaatgctgattggttggattggggatgaaatcataggaagtccaagctgtcctcttgtgttaagtcaattcctgggtrgaggccacaggacaagacatgtcagtttactggtctaagtggtgacagctgattcatcagaatgcagggtctgaaaaatatctcaaatgctaatcttaggtcttgcaacggtaatgttatccataggaacaattggggaagttaaa

SEQ ID NO: 633770 - DNA, 557 bp, Homo sapiens
aatgtaagttttaatttactttatagactaaatagctgggaatgtgtgccggccactgatttataactctcagttccaaattcacaaatgtagcctgctttgcgaaaatggatctcagtcatttcaattgacacaatgttaaagtttgtcaatagagggcgccaggaacacattgcaggaggaagggaggttgctagagggtgcctctagcaggtttctacctgtgggcaacttctccagccttcacctcctacaacacatggagctaaagcatccaactcctgccctacatgayaggcagcagcacccaataaccaacaccttttcctggccattttgccctggacagttttgtaggcaagtacttccaatgagacatcgctccaggaacagctttccccagcacccctgagaatagtttgtagaccaactccaaggagtcgatttccagcgggtttcacagacacagcaacctccgctcttctttgcccagtgagcttggactgcaccttttcctgaggttcttgaattctctagcttggcgcttaagggtagtg

SEQ ID NO: 633771 - DNA, 591 bp, Homo sapiens
atataaaatcatgttatctacaaactgggacaatttgacttcctcctttcaaatttaaatgccttttatattttttcttgcctaattgctctggctatcacttgcagtattgtgttgagtaggagtaggaaaggtgggtatccttttctcattctagtttttgmaggaaaagctttaagttttcctcactcagtatgacattagctgtaggtttgttatatatcactttttttgtattgatatgtactttctatacctaacttattgagagtttatatcatgaatggatattgaattttgttaaatgattttctgtgtctattgaaatgttcatatggtttttgtctttctgtgatgtatcacatttattgatttgtatatgttaagccatccttgtattcctgagaggaatcacactttatcatggggaatcatctttttaatgtgctgttgaattcagtttgttaatatattgtttagaatttttcatctatattcatcaaggatattagcctgtaattttattttaattattgtatccttgtctggttttgaaaccaggggaatgttggtctcataaactgagtttgg

SEQ ID NO: 633772 - DNA, 418 bp, Homo sapiens
ttcctgtggaatcatacatacttagaaaagcattctatttatctcaagcatcttctttattaattttattatagataacattaattattgattcaagttgcattcatttaaggaacgcaatttgatcagtcttgtgaattgtgtacagtcataaaaacacaaccataaacaagatacagaacatttccattccccacgaaagattcctcatgctctttttaaagtgcaaarctcatctgtgtctggaaccagtcactgatttgcttaaagccactgtgaattgttgtgtaacttacataagtcgaacaaaatagcatgtactcttttgtctggctactttgattaagagaaatgatttttagattcacacaatagtatgtttattattttatattatggagaaatatttctttgtatg

SEQ ID NO: 633773 - DNA, 484 bp, Homo sapiens
ccagaatagtagatccaccaacagcttgcactgtgcacctggaaaagccacagacactcaatgatagccagtgaaagcagccaggaggaaggcagtacccttcaaagccacagaagcagagatgcacacaacatggaagccccaactcttgcatcagcgtttccttgatgtgagacatggagtcaaaggagatcattttgtaaccttaaggtttaatgactgccctattggattcgggacttgcttgagtcatgtagctcctttgttttggccaatttttcccrtttggaatgggcgtgtttacccaatactggtatccccattgtatctaggatgtaattaacttactttcgattttacaggctcataagtggaagagacttgccttgtctcagatgagactttggacttggacttttgggttaatactagaatgagttaagaatttgggggactgtaggaagggcatgattgtgttttgaaa

SEQ ID NO: 633774 - DNA, 549 bp, Homo sapiens
ttgtcaaatagattttctattgagatgattatatatattttttcttctttgatcggttgatatggtgaaataccttgattaatttttgaatattgagccaatcttgctttctcaagataaccctatttggtcataatatgttattttttaatatatttctagattagattttctaatattttgttatggattttggcatctatatttatgaggtttattggcatgtagttaatcaggaccagaacaacaattaatctaggacwaattattccccactataacgtaagaactttctgggtatcatcttcactgttcggtgaataatgaggctttctagtctaggtagtgggaagaaggattattctcaacactttctgtgagcaccaagcactagtctctctaacctttgtcaatggttcttaccctagcctttggtatttttctcatgtatgcactaattagtactctcttgtgctcttaagatagatcctctgcagatctttggagttttctttctgcaagtgtctcctcgaatattctcttcagcaa

SEQ ID NO: 633775 - DNA, 549 bp, Homo sapiens
ttgtcaaatagattttctattgagatgattatatatattttttcttctttgatcggttgatatggtgaaataccttgattaatttttgaatattgagccaatcttgctttctcaagataaccctatttggtcataatatgttattttttaatatatttctagattagattttctaatattttgttatggattttggcatctatatttatgaggtttattggcatgtagttaatcaggaccagaacaacaattaatctaggactaattattccccactataacgtaagaactttctgggtatcatcttcactgttcrgtgaataatgaggctttctagtctaggtagtgggaagaaggattattctcaacactttctgtgagcaccaagcactagtctctctaacctttgtcaatggttcttaccctagcctttggtatttttctcatgtatgcactaattagtactctcttgtgctcttaagatagatcctctgcagatctttggagttttctttctgcaagtgtctcctcgaatattctcttcagcaa

SEQ ID NO: 633776 - DNA, 549 bp, Homo sapiens
ttgtcaaatagattttctattgagatgattatatatattttttcttctttgatcggttgatatggtgaaataccttgattaatttttgaatattgagccaatcttgctttctcaagataaccctatttggtcataatatgttattttttaatatatttctagattagattttctaatattttgttatggattttggcatctatatttatgaggtttattggcatgtagttaatcaggaccagaacaacaattaatctaggactaattattccccactataacgtaagaactttctgggtatcatcttcactgttcggtgaataatgaggctttctagtctaggtagtgggaagarggattattctcaacactttctgtgagcaccaagcactagtctctctaacctttgtcaatggttcttaccctagcctttggtatttttctcatgtatgcactaattagtactctcttgtgctcttaagatagatcctctgcagatctttggagttttctttctgcaagtgtctcctcgaatattctcttcagcaa

SEQ ID NO: 633777 - DNA, 564 bp, Homo sapiens
cacaattcaatatatattaattaagaaattaggtacattgtacagaagagaggtggaaatgctttctaggaatggaggaagaatcaagataaaaatgaacaaaaaaatctaggtttatgaggattcacagtttctaattataatctagagatcaggaaaggctttgcgaaaaagcaaaatgtaagtacactttgtagaataartaggattttaatggaaagaggaatcaaaattccaggcagatttaaatgtgtctctgaatgtataaatcagtaagcacaggatgtaatcttggaacaataaatagtatggggggttgtggtgggaaataaagtggtaaagtgataagatagtggagaatcataaatgtcagtctaaggagttttggctttattttgaagttatgtatatttaccaaactatcctgaataagatgagccttcaacagttaaacgttagaattctcatttaaggaaaacaaatcaaaataacatttgttgagtgccaatcaatgtccctggcacttacatttattctaacacatttaatcctggccctaattct

SEQ ID NO: 633778 - DNA, 429 bp, Homo sapiens
tcaactgaacatcatcaaacartaacttctgtgcttcaaaggacatcatgaaaagataacctactgaatagaaaacatatttaaaaatcacaggtctagcgaggggcttgtatttacaatgtatttcagactcttacaactctataatttaaaaaacctcaattcaaaaataagcaaaatatctgaatcaacatttctctaaaaaagatacacaagtggccaataagcacacataaaatgcttgacattattcattgggaaatgtaaatcaaaaccacaaatataacattttatatacagtaggatggttagaatcaaaaaaccaaaataacaagtgttggcaaggctatagagaaattggaaccttcatataccgccggtggaagtgtaaaataatgcagcccttttgggaaacagtctgtcagttcc

SEQ ID NO: 633779 - DNA, 429 bp, Homo sapiens
tcaactgaacatcatcaaacaataacttctgtgcttcaaaggacatcatgaaaagataacctactgaatagaaaacatatttaaaaatcacaggtctagcgaggggcttgtatttacaatgtatttcagactcttacaactctataatttaaaaaacctcaattcaaaaataagcaaaatatctgaatcaacatttctctaaaaaagatayacaagtggccaataagcacacataaaatgcttgacattattcattgggaaatgtaaatcaaaaccacaaatataacattttatatacagtaggatggttagaatcaaaaaaccaaaataacaagtgttggcaaggctatagagaaattggaaccttcatataccgccggtggaagtgtaaaataatgcagcccttttgggaaacagtctgtcagttcc

SEQ ID NO: 633780 - DNA, 398 bp, Homo sapiens
cttgcatcatttagcacacaaccagccacatcaaattcaatkaaaaaattagaaatactctctcatcacaatccttacccctggcatagtactatataatcaggaggaagcctccacctctgggcctccatctgacaagggaaagagttgaaccatatacccactatcctagctttccctggtgcttcctgagagactagttcctatgtcaccctccttgggcctctgatgagatcaagctcatgttcgatccttggggcctacagagaacaaaaacagcagtttgaactacagtgggccatccactaagcctcctgctcgctggctcagtgtagagcaagaaagagagagaaataatagtaataataatcagtttctaatttctccatggggagaaa

SEQ ID NO: 633781 - DNA, 608 bp, Homo sapiens
tgcatatcatttcaatggacactgtcagtgatagttaatactaaaacccacgtaggcaggttgtggcagattcagctgtttggaacaggttccaaaattttggtgggatggattcattaaagcagaatatgtgagcttctcttttgggtgggtgtgacctcaagtggcccgatcagcagttcttccttggatgcatgtcatccctcaacagcaatcatgttaacgacttattgaaggaacaatgggctcattgtaactggagtttttagggaaacactcacaagaaaggcttgtttgagctaacatgttgaacttattcgttctgaaaggctcttcactaattagctaagtgaatttggaaaagtgcatccaagtttcctcctttggaaaataaggcttttgccagagataccttccaaggtaactgctggctataacattttgttgttcaacgagatcayggtggcttcatgaaaaatgtcgccttcagccctagcagatagttcctgaaaagaagaaaatctaatgaatctttttttttttgtttttcaggggctggggtggggttggctcttgaacaaccgattctttcattctttcaaccttaa

SEQ ID NO: 633782 - DNA, 604 bp, Homo sapiens
cgataatctgacttaattcaaatgtagaatgcatggatttcttagggaagtggatagattatgtatcttccaaataatcctctataartgtgttttctcttgtttaggcttttgataggaattagataagaggtagtttgagattctgttttacggtgggaaaccacagagatagcattctgtgataaatgttaggaagacttatgtttgctttaaaaattaggcgatggaaattcagcaactagtcagagtaaatctcagtagaggaaaaagcagaaaagtagctttataatgagagtcatggggattctattctgtgattgatcaaaacttgggctcccagaaacttcactctggctttaatttttagtctaaatacccatcagctgcacacattgttatcaatccaacctccccacggcctttcagagcaactgaacgcaggagctggagactaagaaatggctcttctacttttaatttttggactttaaatctaagccatgagcagggctgtctgtatgagatgagaagactattcatggttggcatatattcttgtttcatttctgtgttgcatcattgacaagaatcagaacagaga

SEQ ID NO: 633783 - DNA, 604 bp, Homo sapiens
cgataatctgacttaattcaaatgtagaatgcatggatttcttagggaagtggatagattatgtatcttccaaataatcctctataaatgtgttttctcttgtttaggcttttgataggaattagataagaggtagtttgagattctgttttacggtgggaaaccacagagatagcattctgtgataaatgttaggaagacttatgtttgctttaaaaattaggcgatggaaattcagcaactagtcagagtaaatctcagtagaggaaaaarcagaaaagtagctttataatgagagtcatggggattctattctgtgattgatcaaaacttgggctcccagaaacttcactctggctttaatttttagtctaaatacccatcagctgcacacattgttatcaatccaacctccccacggcctttcagagcaactgaacgcaggagctggagactaagaaatggctcttctacttttaatttttggactttaaatctaagccatgagcagggctgtctgtatgagatgagaagactattcatggttggcatatattcttgtttcatttctgtgttgcatcattgacaagaatcagaacagaga

SEQ ID NO: 633784 - DNA, 604 bp, Homo sapiens
cgataatctgacttaattcaaatgtagaatgcatggatttcttagggaagtggatagattatgtatcttccaaataatcctctataaatgtgttttctcttgtttaggcttttgataggaattagataagaggtagtttgagattctgttttacggtgggaaaccacagagatagcattctgtgataaatgttaggaagacttatgtttgctttaaaaattaggcgatggaaattcagcaactagtcagagtaaatctcagtagaggaaaaagmagaaaagtagctttataatgagagtcatggggattctattctgtgattgatcaaaacttgggctcccagaaacttcactctggctttaatttttagtctaaatacccatcagctgcacacattgttatcaatccaacctccccacggcctttcagagcaactgaacgcaggagctggagactaagaaatggctcttctacttttaatttttggactttaaatctaagccatgagcagggctgtctgtatgagatgagaagactattcatggttggcatatattcttgtttcatttctgtgttgcatcattgacaagaatcagaacagaga

SEQ ID NO: 633785 - DNA, 533 bp, Homo sapiens
gagcttctagctgataccaggagtggtttaaagtaggaaatctgaagaaaagggtttaaatcaggaaatgaggtactattttctgacatccataaggtcttccctttagtttcatcataatactattgccccagacaagtaagtcctcctactagatctgtgaaagactttccccatcgagcaatgcagaatcttcctattatggaggtttttaacagccagacacttggaccagaaacagttaggtcggtggtggagtcaggcaaagtgaaatcatcttgaggcattaatcccttgccwgccatggccattgatctcccatgttagttcttccacatacataacatgaggatattcctaggctgtcagatgtattctcaggttacgtgggcaaacagattctttgttggagagaggagttccttttggacctggaattgtggaatggaatgggtttttgccttccttataatatgtaagctatccttttttgctgactgcattttatagcattatgggataacctgtagccc

SEQ ID NO: 633786 - DNA, 600 bp, Homo sapiens
tccgggaatgagcaaagtgatcgcctccgaggtggtgcagtggcctgtggagtctaagagtttatagcttgaaaactgctcctgtaacaaaagttgtattcatatctgagatgttaaaaggtgaagatttttgcacattttctttgttatgataaaataccacttttgagtttgccgatctcaccactgtgaacaacgttagttctccacatacgatggcatttgccagctgtgccctcagatttcattggctccgtgtctgggtgagtgggaatcatttatgtgggaaattctccattacaggacagttaatgcaccaatggcatcattgtgaggttggagatttggggtgatgatctggctgcttggcacctccaggctggcagacagcacggctgtggccaggaggtagcagcactaatcaggggcagcagtgatgagtccaggtgttcctaatgagaatttgatgtgaatgaaacacattacgtggcgrtcccaattcagaatggttgcacttattatatttctatatggaagtgtttatttaacaccacatttgtcggaaattacacatatctcaaagcctgtataggatccaac

SEQ ID NO: 633787 - DNA, 590 bp, Homo sapiens
caaatcctctaaaatcgatcatattttagataaattgtttatttgaaaactttcctctatgacctataattgggattgagtctgaactgacaataaatataattacaactgttcagtaggttgaaaatagaatttattccttagttttggctactttgcatgaaaatgctaattgtatttgcatataaaggaagactaattactaagacctgaacctaaaattgtattttcctatgtttagcaagctgaattgcttattaacatcaacaaaaatggatgtttctctcaagaaaaaaaagttatgagagtggttcttggaacaacaagcatagagattgtctgcagagggtctctgacaggcttttcatatcatgagcggagacattgtctgtagagggtctcttgggggtgtttaatgccatatgcatagatgtgtctgyacaaggtcttttagggatgcttaataccatatccaagtttgcttctgaggtcatgatcagtggaaaatagtgcaaagtccagttgaaaattgtattagcttccagtggctgctgtaagaaactaccacaaacatggtggctatgacaaga

SEQ ID NO: 633788 - DNA, 602 bp, Homo sapiens
tgaactaacatgctggtgtcaacgagaaatcagagcacatatggcaattttataagagcacttagaagcaagtgcaaacctcagattcctcaactttcaatcaactctataataatacctcctttacctaattcacagggctttcaacagagaaaaatacacacagyggtttttaataaaaaaaaaaagtacgtggttatacatctgtcatcaatatgtcataattaatcataaatagggcatagatcattaaataaactaagtactttcggagggagggttctaatatttgctgcacggaatagttaattatgtgttagagttcttctaccacctttacaggtttagtggttttgtctgcactagacataggagtgaggtaaagcttggagattttaaactgccagggtcctaccgagaggcctcgggtccttgatgactcgctgcgccgtgggaatggagtgggacagtgaaatggtgtgacacagggtaactttctggaggagagggacatagtccagttctgtgaccagctgccagagaggagtggagaggagagagagggacagttcccaagcgtcacatctccctgccgcttcatc

SEQ ID NO: 633789 - DNA, 603 bp, Homo sapiens
ttactttaaggagtttaagattaaactataaattaaatttctcccagagtaagcttggcccacacccaggaatgaccaaggacagtttggaggttagaagcaagatagagtcaactatgtcaggtttctcctaytgtcataattttgcaaaggctgttttatgactattattttatcttttacccaaccacagatactagaaacaccaaagtcatttaagactccctcttcctcagttctaaaaaccaccaatcaatcaccaatctatttaggtggcttctgaaatagttcttgaatttttttacccctattgaatgcagacatcatcaaatctagtctgcattatgactggatgaacccttccttcataaacctcccatgtcactctagaatggtgttgaccttgtacttggccttcttaaaaactagatacagatcaccacacctatcaggtggaaacccgaagaccctgccatggcagacaggcgagagtattttccagtctttcttgattgtttcctgctgtcttcgacttcacgccatattcttaccagtcctccgaaccacagatggcatactttgtaagtagcactgtgttcaagc

SEQ ID NO: 633790 - DNA, 603 bp, Homo sapiens
ttactttaaggagtttaagattaaactataaattaaatttctcccagagtaagcttggcccacacccaggaatgaccaaggacagtttggaggttagaagcaagatagagtcaactatgtcaggtttctcctactgtcataattttgcaaaggctgttttatgactattattttatcttttacccaaccacagatactagaaacaccaaagtcatttragactccctcttcctcagttctaaaaaccaccaatcaatcaccaatctatttaggtggcttctgaaatagttcttgaatttttttacccctattgaatgcagacatcatcaaatctagtctgcattatgactggatgaacccttccttcataaacctcccatgtcactctagaatggtgttgaccttgtacttggccttcttaaaaactagatacagatcaccacacctatcaggtggaaacccgaagaccctgccatggcagacaggcgagagtattttccagtctttcttgattgtttcctgctgtcttcgacttcacgccatattcttaccagtcctccgaaccacagatggcatactttgtaagtagcactgtgttcaagc

SEQ ID NO: 633791 - DNA, 618 bp, Homo sapiens
tgtccatgtgttctcattgttcaactcccacttatgaatgagaacatccagtgtttggttttctgttcctgtgttagtttgctgagaaagatggtttccrgctttatccatgtccctgcaaagaacatgaactcactcctttttatggctgcatagtattccatggtgtatatgtgccacattttctttatccagtctatcattaatgggcatttgggttggttcgaagtctttgctattataactcaccaagcttcttgactttaaaacatactgaagttatctggagtgaaagaatgaatgggtgctctaccaccttgagctatgggaaggttgtgctggagattttgacacacgagtctcaggaaggccttaactcagtcattccaggattcttgttctctcctgggacctaatggctgctttgggtgctcatgaggtttcattctacaacaacggcaaaagcagttcccagatggcttctctcaccattcagaaggctttgacctggccccttgaactgccagttggtttgcgataaaggaatagagactcattttaatattggtctaagacaatctgctgtgtctaaaagttcctaaaagttaactgtaaaga

SEQ ID NO: 633792 - DNA, 601 bp, Homo sapiens
aagcacgaaactggggtataaaacacttaaatacgaatgtctccagtcctgctgtctggagagatttaatgatattttacagggaaggtcagggcatggcacacatagggaatattttaggttctgagtcttgctaggaagacacttccagtcgaggtgttatttgggtttatttggttttccttctttccccacttttgacctgagattggamaaaaaaatccagcagctttaaaaaagaagataagcatgtctgactataccatcaaaaacaaaacattttgtatataaacaatttataacaaagccaaaagacaaataaaacatttttggattgggggattgcaaagaagaggccacacacaaaaatgaagaagaaaaacaaaactcttgcaaattaaaaagaggggattaataagcaaataaaaatttgcaaaggcctattctcagaacaaatacaaatggcaagctggtatatggaatcttgttcctattcaccagcagtgggaaatacaaactaaacagctctcccttcacactttactagataagcaggcacttttaaggcttaaaacccctatggctggcagtagaaaggata

SEQ ID NO: 633793 - DNA, 443 bp, Homo sapiens
tccccttcacatttctgctgcacctgccagcacactgccacaccaagcaggaggaggaacagctttttgcaacacatctactggggctgaaggactccggcatgctgaggggagaagacgttcattagaaatcagagaagccttttcyttgagtaaaggacccgtggtcactcttagaactccatcatgtttatatagggaattccacattccatatgcttatggctaaaagattattggagaaatatattcctcatcaaaagtaggaaccttcaagggtactgaaaacatgtttcacgacagtgggctacaacagaagcctctttatagagactgttttagaccctctgaattcaaacgggagccattttatagaacagaaaaaaaggattatatggcaggactggggatagagcagtagccttagtgccccaagcaggcag

SEQ ID NO: 633794 - DNA, 583 bp, Homo sapiens
ggaaacagcgaggttctattgtcagttcttcctattagccgtggactactagtggcaaggtctggagaacaagaccctgattctgtgaaatcacccaggtttaagcgctagcatttgttaatycagcgggtgattgcacaggctttggagttgaacatgctcgggatgtaattcctcttctcctcttgattaggcgcatgaaagtggtcaagttacttaaagtctggaagtctcagttttctcatctgtaaaatggagataatatagactttatagacttcatggaatttctatgagagttgaggtaggaccattaaccataccattttattcctcaacactgaatctggaatcaattgagtaggtggctgacagattttttttttaatcaaacaaataaaaagatgaggtttgttgctacttgtattaaattagagaatatagcttgaatctttagctaaaattgggctttctactatctgcagtatgaaactcacacatctagtagtatagcctctcatctcaatctcctcctcttatatatgccctctcacttcccactcccccaaccatagacacacaa

SEQ ID NO: 633795 - DNA, 583 bp, Homo sapiens
ggaaacagcgaggttctattgtcagttcttcctattagccgtggactactagtggcaaggtctggagaacaagaccctgattctgtgaaatcacccaggtttaagcgctagcatttgttaatccagcgggtgatygcacaggctttggagttgaacatgctcgggatgtaattcctcttctcctcttgattaggcgcatgaaagtggtcaagttacttaaagtctggaagtctcagttttctcatctgtaaaatggagataatatagactttatagacttcatggaatttctatgagagttgaggtaggaccattaaccataccattttattcctcaacactgaatctggaatcaattgagtaggtggctgacagattttttttttaatcaaacaaataaaaagatgaggtttgttgctacttgtattaaattagagaatatagcttgaatctttagctaaaattgggctttctactatctgcagtatgaaactcacacatctagtagtatagcctctcatctcaatctcctcctcttatatatgccctctcacttcccactcccccaaccatagacacacaa

SEQ ID NO: 633796 - DNA, 506 bp, Homo sapiens
ggaatcattcagttgtctttcctgctcacctggcctcgcgtaacttaaaggtgacttaaaggtgaatgatctggaagtggaagaggccattgtccaggctcagatggcccaacagcaacagtggtgttgcagcaytttttctgcatgagattttaacttcgtctggaagaaacccaaatgcctaaactaatgtataaattaatgaatgcatagatgcctaaaatgtttgttttgtgggtgttttttttttacacctgaaggaatgagttttattttctataaaatgtttgactctcaatgactcatgttaaccaattggcacattttctttcttccccgaaaaccaaattgttaagaaaacaagaacttcagaacagggaggcaaattgactgcatctgtgctgtctgagttaggggactagtcgtgggctaaaagtagatggctggacgtgacacatatttggaagtaaggagtgactcaaggacagaaaggagtctgggatgag

SEQ ID NO: 633797 - DNA, 642 bp, Homo sapiens
tgaaattaaaagaaacagagggaataacaaaggatggaaaaatgaatgctaggtatgacacaataagaaatagatatttgatctttgcaccttattccccataatttctgataggagtgatgagtatgtctttggttttagtgaggtgactctttgagggccctaggtcacttcaggaggggggctgcttgccaggaagaccaaagcataattagccggttgcarctttaagccccatccctgacctctggggaggggaaaagagctggagatgaagttgatccccaacggtcaacgatttaatacatcaggcctatgtaatgaaaccttcatgaaagcccctaagtattaataggttcagagtgctcccaggttggtgaacacatcaaggggctgggaggggtgaacccggagagggcatggaggctccatgcccccacacaccacaccccatgccttgccctacgaatcccttccatttacttgttcctgagttctattctgtataatcagctgataataataagtaaagaaatttcctgaggtctgtgggcctttctaacaaattatggaacctgagaagagtcgcaggaaccctgatttgtggcaggttggtcagaagtatggtggaaacctgggact

SEQ ID NO: 633798 - DNA, 553 bp, Homo sapiens
cccataatttctgataggagtgatgagtatgtctttggttttagtgaggtgactctttgagggccctaggtcacttcaggaggggggctgcttgccaggaagaccaaagcataattagccggttgcaactttaagccccatccctgacctctggggaggggaaaagagctggagatgaagttgatccccaacggtcaacgatttaatacatcaggcctatgtartgaaaccttcatgaaagcccctaagtattaataggttcagagtgctcccaggttggtgaacacatcaaggggctgggaggggtgaacccggagagggcatggaggctccatgcccccacacaccacaccccatgccttgccctacgaatcccttccatttacttgttcctgagttctattctgtataatcagctgataataataagtaaagaaatttcctgaggtctgtgggcctttctaacaaattatggaacctgagaagagtcgcaggaaccctgatttgtggcaggttggtcagaagtatggtggaaacctgggacttgtgattg

SEQ ID NO: 633799 - DNA, 509 bp, Homo sapiens
gagctgggaggagcacttgcaatgtttgcagcacatacaaaacaatcaacaacaaaaaaacgacctgccttcttcgtgagacagcacaggtgaaaaggaggaagacagagatgggaagggaagggcggcaacaartgggaagggagtcggacttttactcaagagaaactgggatactgggaatttggcctcattcatttacctggcgttttacttattaccatcttgtggtactaggcacagaaaatagaagtgtgaatgagcaacagtagcacactgcagagtaaagaccactggccttagaacagaacatacatgtaagtctcggtttttagcattcaccagttgtgattttgggtaatgaaaacactcagagcctcaggttcatcatatgcaaaatagggataataataggtcttatgaaataatttaaaaatttaaatgagctgttataagtaaaatgccagccacatagcaggaataccccaaatggaaaaaggtagacatgg

SEQ ID NO: 633800 - DNA, 509 bp, Homo sapiens
gagctgggaggagcacttgcaatgtttgcagcacatacaaaacaatcaacaacaaaaaaacgacctgccttcttcgtgagacagcacaggtgaaaaggaggaagacagagatgggaagggaagggcggcaacaaatgggaagggagtcggacttttactcaagagaaactgggatactgggaatttggcctcattcatttacctggcgttttacttattaccatcttgtggtactaggcacagaaaatagaagtgtgaatgagcaacagtagcacactgcagagtaaagaccactggccttagaacagaayatacatgtaagtctcggtttttagcattcaccagttgtgattttgggtaatgaaaacactcagagcctcaggttcatcatatgcaaaatagggataataataggtcttatgaaataatttaaaaatttaaatgagctgttataagtaaaatgccagccacatagcaggaataccccaaatggaaaaaggtagacatgg

SEQ ID NO: 633801 - DNA, 547 bp, Homo sapiens
aagatctgcatgtctagcattcaaagaataatgtaagagatactaattcacaaaatttaagttgagagcaccgcattttggagaattagcctttatgtttgacaacaggagcacttttcagttgctttatcatcagtcttattcctctgggcwtcacacctgagaactcatctctcaacacatcagaatctcttcctcaccgtgaaagcagtacttctgtctctgatctttaagggtagcaggaacataaaggaaaacctgtcctatcagactccctcacagcacagtaatgcccaggtgtcactaggcaaatcttcagagagtaccaaagagtatgtatcaggaccgcgaacccccacaccctccgcaaatcaatcagctacagctgtcagcacagaggacttccttatacatcagcatctgagtgatacagggacaatagtgtcactcaaaaggaaagcctttgggtaacacttctgacataaaactgcaaactcacaatgcagatccccacctggaactgtatgtctgaatccaatattcatga

SEQ ID NO: 633802 - DNA, 419 bp, Homo sapiens
catttacccccaagcctgttcttaaagacgggcatgacagttatgcccattttacagatggggccctgaggctcacargggcacaccactcgcccatttccacaaagctatagctcgttagcagagggcagaattcggccgcctctcccctagctcgaaggctgtgattgacacagaggtttttttttttgttgttgctgtttgttcctttttctttttttttgagacagggtcttgctctgtcatcccggctggagtgcagtggtgcgatctcagctcactgcaaactctgcctccaagatgcaaatgattctcgtgcctcagcctcccaagtagctggaattacaggtgtgcactaccacgcccagctgttttttgtagagatggggttagtagagatttgtttaatagagatgggg

SEQ ID NO: 633803 - DNA, 419 bp, Homo sapiens
catttacccccaagcctgttcttaaagacgggcatgacagttatgcccattttacagatggggccctgaggctcacaagggcayaccactcgcccatttccacaaagctatagctcgttagcagagggcagaattcggccgcctctcccctagctcgaaggctgtgattgacacagaggtttttttttttgttgttgctgtttgttcctttttctttttttttgagacagggtcttgctctgtcatcccggctggagtgcagtggtgcgatctcagctcactgcaaactctgcctccaagatgcaaatgattctcgtgcctcagcctcccaagtagctggaattacaggtgtgcactaccacgcccagctgttttttgtagagatggggttagtagagatttgtttaatagagatgggg

SEQ ID NO: 633804 - DNA, 419 bp, Homo sapiens
catttacccccaagcctgttcttaaagacgggcatgacagttatgcccattttacagatggggccctgaggctcacaagggcacrccactcgcccatttccacaaagctatagctcgttagcagagggcagaattcggccgcctctcccctagctcgaaggctgtgattgacacagaggtttttttttttgttgttgctgtttgttcctttttctttttttttgagacagggtcttgctctgtcatcccggctggagtgcagtggtgcgatctcagctcactgcaaactctgcctccaagatgcaaatgattctcgtgcctcagcctcccaagtagctggaattacaggtgtgcactaccacgcccagctgttttttgtagagatggggttagtagagatttgtttaatagagatgggg

SEQ ID NO: 633805 - DNA, 522 bp, Homo sapiens
tagcagtatcagtgtcataatatcacccttccactgagtactgccgacagctggggggtaaagaaaagtcattgggacacactgttgtctccacatgccactgtgtctgtctgcaaatgtaggcaggctggggtcctgccccagggaagacagagtcatarcagagtaataaagaagcatgtttgagacacaggagtgtctatgtctatcctcattcctccctcacagccatcaccagagcatgtttcttgcaccaggtcaacagacagtaagagaggcatgaaaagcccattgtccacacatgttgcagcttctttttggagaatgttttccaggccttttatgttctgtctctgattctcagaactctgcaaggtcagtgtgaccaccctgctccaaatctaagaaaacagaggtttccagaggaaggagaaattgtgcccagggtcacacagcttgcaagaggcagagtggaagttgattccagctctgcctgcaggaccctctcatttcccctctgtt

SEQ ID NO: 633806 - DNA, 428 bp, Homo sapiens
gaattccagaaggaactactgagatgcaaagaagcacagcagcttttgcacacatgcgtgggattagatggaaaacaagtggattgagggtctgccaatgaaagckacccatactgaagtccactggctctggttgagacccagaagagtcatgcatcagaataaaggtggacaggaaataccctggcctttgtagggactgagcctgcaccgacgacctcaattgcagcctgtatggaggacccctgaccatcccccagaagtagactcccatctcttctgcagcaagataacatgctgctaggcctcaattcattgctaaatattttgtaacaagtatctcacatttaacaaaaaaagatcagtcatatggcagcaaaatacaatgtaatatgaccaaaacatgaaagactgtgaaaatgaatctg

SEQ ID NO: 633807 - DNA, 416 bp, Homo sapiens
gaactactgagatgcaaagaagcacagcagcttttgcacacatgcgtgggattagatggaaaacaagtggattgagggtctgccaatgaaagctacccatactgaagtccactggctctggttgagacccagaagagtcatgcatcagaataraggtggacaggaaataccctggcctttgtagggactgagcctgcaccgacgacctcaattgcagcctgtatggaggacccctgaccatcccccagaagtagactcccatctcttctgcagcaagataacatgctgctaggcctcaattcattgctaaatattttgtaacaagtatctcacatttaacaaaaaaagatcagtcatatggcagcaaaatacaatgtaatatgaccaaaacatgaaagactgtgaaaatgaatctg

SEQ ID NO: 633808 - DNA, 416 bp, Homo sapiens
gaactactgagatgcaaagaagcacagcagcttttgcacacatgcgtgggattagatggaaaacaagtggattgagggtctgccaatgaaagctacccatactgaagtccactggctctggttgagacccagaagagtcatgcatcagaataaaggtggacaggaaataccctggcctttgtagggactgagcctgcaccgacgacctcaattgcagcctgtatggaggacccctgaccatcccccagaagtagactcccatctcttctgcagcaagataacatgctrctaggcctcaattcattgctaaatattttgtaacaagtatctcacatttaacaaaaaaagatcagtcatatggcagcaaaatacaatgtaatatgaccaaaacatgaaagactgtgaaaatgaatctg

SEQ ID NO: 633809 - DNA, 416 bp, Homo sapiens
gaactactgagatgcaaagaagcacagcagcttttgcacacatgcgtgggattagatggaaaacaagtggattgagggtctgccaatgaaagctacccatactgaagtccactggctctggttgagacccagaagagtcatgcatcagaataaaggtggacaggaaataccctggcctttgtagggactgagcctgcaccgacgacctcaattgcagcctgtatggaggacccctgaccatcccccagaagtagactcccatctcttctgcagcaagataacatgctgctaggcctcaattcattgctaaatattttktaacaagtatctcacatttaacaaaaaaagatcagtcatatggcagcaaaatacaatgtaatatgaccaaaacatgaaagactgtgaaaatgaatctg

SEQ ID NO: 633810 - DNA, 565 bp, Homo sapiens
ctagctctgtcacccaggctggagtgcaatggtgccatcttggctcactgcaagctccgcctccctggatcaagtgattctcctgcctcagcctcccaagcagctgggattacatgcacctgccactacgcccagctaatttttgtatttttagtagagacagggttttaccgtgttggccaggctggtcttgaactcctggcctcaagtgatccgcccatstcgacttcccaaattgctaggattacaggcatgagccactgcgcctggccaaccttttcactgatgaatattttattgtgtggatattccacatattatgtatccattgtcttgttagtggccatttgggttgtttccagtttcttgttataaacagtgccactatgaatattcttgaacatgtttcctgttatatattgctaattataacacctattttgtttatttaaacaaatttgattttaaaatacagtgtgacccctccccttttggcaatagcatctcctaagttttcctcaaaagaggattaaacagagatccagtagcttggcagttcagttgt

SEQ ID NO: 633811 - DNA, 565 bp, Homo sapiens
ctagctctgtcacccaggctggagtgcaatggtgccatcttggctcactgcaagctccgcctccctggatcaagtgattctcctgcctcagcctcccaagcagctgggattacatgcacctgccactacgcccagctaatttttgtatttttagtagagacagggttttaccgtgttggccaggctggtcttgaactcctggcctcaagtgatccgcccatgtcgacttcccaaaytgctaggattacaggcatgagccactgcgcctggccaaccttttcactgatgaatattttattgtgtggatattccacatattatgtatccattgtcttgttagtggccatttgggttgtttccagtttcttgttataaacagtgccactatgaatattcttgaacatgtttcctgttatatattgctaattataacacctattttgtttatttaaacaaatttgattttaaaatacagtgtgacccctccccttttggcaatagcatctcctaagttttcctcaaaagaggattaaacagagatccagtagcttggcagttcagttgt

SEQ ID NO: 633812 - DNA, 565 bp, Homo sapiens
ctagctctgtcacccaggctggagtgcaatggtgccatcttggctcactgcaagctccgcctccctggatcaagtgattctcctgcctcagcctcccaagcagctgggattacatgcacctgccactacgcccagctaatttttgtatttttagtagagacagggttttaccgtgttggccaggctggtcttgaactcctggcctcaagtgatccgcccatgtcgacttcccaaattgctaggattacaggcatgagccactgcgcctggccaaccttttcactgatgaatattttattgtgtggatattccacatattatgtatccattgtcttgttagtggscatttgggttgtttccagtttcttgttataaacagtgccactatgaatattcttgaacatgtttcctgttatatattgctaattataacacctattttgtttatttaaacaaatttgattttaaaatacagtgtgacccctccccttttggcaatagcatctcctaagttttcctcaaaagaggattaaacagagatccagtagcttggcagttcagttgt

SEQ ID NO: 633813 - DNA, 585 bp, Homo sapiens
cgtttttcatttgaccactagtaattttcacccttgaaacagacaaccattgctgaagatcagagaagggttaaattctctggaacatctgaaccatgacccactcatggttttatagataaggttactatctataaaattcttcctggaatgtatctcccaatccatgatgggaactgataaaaatgggttcttaagaaaggggatttttgttttctatgcacccaccacaytgaccccataacacctttgtcataattctgttggttctcagagcctgcatgggccttcagagatcaccttgcctagctttcatttatacaagaggatgcaactaaagctccagatactgagtcacatttcccaaggtttcgtcactaatacctgtgagaggaggagaagctaagactgtttttgtggtgtttctctgtaacatcatgcggcctttacagaggttactccaggctctggaaacttgaatagggacctaggggatgctcgctcagcctgcagctgacaccatttttgaagaaataactaaaaatagcaggagtaaatgggacttaacctagcacacaagtaacc

SEQ ID NO: 633814 - DNA, 585 bp, Homo sapiens
cgtttttcatttgaccactagtaattttcacccttgaaacagacaaccattgctgaagatcagagaagggttaaattctctggaacatctgaaccatgacccactcatggttttatagataaggttactatctataaaattcttcctggaatgtatctcccaatccatgatgggaactgataaaaatgggttcttaagaaaggggatttttgttttctatgcacccaccacactgaccccataacacctttgtcataattctgttggttctcagagcctgcatgggccttcagagatcaycttgcctagctttcatttatacaagaggatgcaactaaagctccagatactgagtcacatttcccaaggtttcgtcactaatacctgtgagaggaggagaagctaagactgtttttgtggtgtttctctgtaacatcatgcggcctttacagaggttactccaggctctggaaacttgaatagggacctaggggatgctcgctcagcctgcagctgacaccatttttgaagaaataactaaaaatagcaggagtaaatgggacttaacctagcacacaagtaacc

SEQ ID NO: 633815 - DNA, 462 bp, Homo sapiens
cagagtgagaccccatctcaaaaacaacaaacaaaaacaaaaacaaaaacaaaaaaatggctgggcacggtggctcacacctgtaatcccagcactttgggaggccgaggcaggcagatcgcctgycaggagttcaaggccagactggccaacatggtgaaacctcatctctactaaaaatacaaaaattagtcgggcatggtggcagagacctgtaatctcagctactcgggaggctgaggcaggagaatggcttaagcccaggagctggaggttgcagtgagccgagattgcaccactgcactccagcctgagcgactgagtggagcggaactctgtctcaaaaaaaaaaaagaggttttttttagatcctcagctattgttagtgttagtgtatgttatgtgtggctcaagacaactttgcttcttttaatataggcagggaagtcaaaagattggata

SEQ ID NO: 633816 - DNA, 462 bp, Homo sapiens
cagagtgagaccccatctcaaaaacaacaaacaaaaacaaaaacaaaaacaaaaaaatggctgggcacggtggctcacacctgtaatcccagcactttgggaggccgaggcaggcagatcgcctgtcaggagttcaaggccagactggccaacatggtgaaacctcatctctactaaaaatacaaaaattagtcgggcatggtggcagagacctgtaatctcagctactcgggaggctgaggsaggagaatggcttaagcccaggagctggaggttgcagtgagccgagattgcaccactgcactccagcctgagcgactgagtggagcggaactctgtctcaaaaaaaaaaaagaggttttttttagatcctcagctattgttagtgttagtgtatgttatgtgtggctcaagacaactttgcttcttttaatataggcagggaagtcaaaagattggata

SEQ ID NO: 633817 - DNA, 462 bp, Homo sapiens
cagagtgagaccccatctcaaaaacaacaaacaaaaacaaaaacaaaaacaaaaaaatggctgggcacggtggctcacacctgtaatcccagcactttgggaggccgaggcaggcagatcgcctgtcaggagttcaaggccagactggccaacatggtgaaacctcatctctactaaaaatacaaaaattagtcgggcatggtggcagagacctgtaatctcagctactcgggaggctgaggcaggagaatggcttragcccaggagctggaggttgcagtgagccgagattgcaccactgcactccagcctgagcgactgagtggagcggaactctgtctcaaaaaaaaaaaagaggttttttttagatcctcagctattgttagtgttagtgtatgttatgtgtggctcaagacaactttgcttcttttaatataggcagggaagtcaaaagattggata

SEQ ID NO: 633818 - DNA, 462 bp, Homo sapiens
cagagtgagaccccatctcaaaaacaacaaacaaaaacaaaaacaaaaacaaaaaaatggctgggcacggtggctcacacctgtaatcccagcactttgggaggccgaggcaggcagatcgcctgtcaggagttcaaggccagactggccaacatggtgaaacctcatctctactaaaaatacaaaaattagtcgggcatggtggcagagacctgtaatctcagctactcgggaggctgaggcaggagaatggcttaagcccaggagctggaggttgcagtgagccgagattgcaccactgcactccagcctgrgcgactgagtggagcggaactctgtctcaaaaaaaaaaaagaggttttttttagatcctcagctattgttagtgttagtgtatgttatgtgtggctcaagacaactttgcttcttttaatataggcagggaagtcaaaagattggata

SEQ ID NO: 633819 - DNA, 547 bp, Homo sapiens
aacttggatgaatctccagggaattatgcttgtggggagaaacagtcccaaaacwttacagtataattctattgacaaaacattttgaaatggcaaaatttcaggaatggagaacagatcagtggttgtcaggacttagagatgaaagaggtggtagaggggcaagagagaggtggctgcaattataagaggacagtacaaaggggacttgtagtgttagaactgttcagtattacaactatggtggtgaatacatgaacctgcacaggtgatcaaattgtatgcaacgtaatagacacagatagagacacctacacacagggtgcaagtaacaccaggaatctctggataacattggtacattgtatcaatgtcagtatcctggttgtgatattacagtcaaccccctgtagcctgaggttctgcatctactgattcaaacaactacagatggaaaatatgtgaagaataaagcaataaaaaataatataatcaaaaaccaatacagcataacagctgccatacatagccttgacattacattagg

SEQ ID NO: 633820 - DNA, 545 bp, Homo sapiens
cttggatgaatctccagggaattatgcttgcggggagaaacagtcccaaaactttacggtataattctattgacaaaacattttgaaatggcaaaatttcaggaatggagaacagatcagtggttgtcaggacttagagatgaaagaggtggtagaggggcaagagagaggtggctgcaattataagaggacagtacaaaggggacttgtagtgttagaactgttcagtattacaactatggtggtgaatacatgaacmtgcacaggtgatcaaattgtatgcaacgtaatagacacagatagagacacctatacaaagagtacaagtaacaccaggaatctctggataacattggtacattgtatcaatgtcagtatcctggttgtgatattacagtcaaccccctgtagcctgaggttctgcatctactgattcaaacaactacagatggaaaatatgtgaagaataaagcaataaaaaataatataatcaaaaaccaatacagcataacagctgccatacatagccttgacattacattagg

SEQ ID NO: 633821 - DNA, 545 bp, Homo sapiens
cttggatgaatctccagggaattatgcttgcggggagaaacagtcccaaaactttacggtataattctattgacaaaacattttgaaatggcaaaatttcaggaatggagaacagatcagtggttgtcaggacttagagatgaaagaggtggtagaggggcaagagagaggtggctgcaattataagaggacagtacaaaggggacttgtagtgttagaactgttcagtattacaactatggtggtgaatacatgaacatgcacaggtgatcaaattgtatgcaacgtaatagacacagatagagacacctatacaaagagtrcaagtaacaccaggaatctctggataacattggtacattgtatcaatgtcagtatcctggttgtgatattacagtcaaccccctgtagcctgaggttctgcatctactgattcaaacaactacagatggaaaatatgtgaagaataaagcaataaaaaataatataatcaaaaaccaatacagcataacagctgccatacatagccttgacattacattagg

SEQ ID NO: 633822 - DNA, 549 bp, Homo sapiens
ttaaaaatcatatatcttataagggccatgtatccagaaggtataaaatagtcttacaatttaagaattaaagacaaatagtccactgtagaaacaggtaaagaggacagatgtggaggcttgtgcctgtaatcccaagactttgggaggccgaggtgggaggatttcttgaagccaggagtttgattccagcctgggctacaaagtgagctccacctgtacaaaaacaaattaaaaaaaaaaaaaagctaagcatgctggagcatgtctgtagtcccagctactggggaggctgaggtgggaggatagctcaagcccaggagtttgaggctgcagtgagctatgatkgtgtcactacactccagcctgggagacagagagagaccccgtcgttaaaaaaaaaaaaaaaaaaaggcaaagagtctgagtaaatatttctccaaagaagatatacagatgaccaattttcatatgaaaaaatgtccatcatcattaaccattagggaaatgcaaatcaaaactgcaatgagatattccttcatagccact

SEQ ID NO: 633823 - DNA, 563 bp, Homo sapiens
atacatatacagtcatgtgccacaaaatgttctcgtcaatgacagacygcatatatgatggtggtcccataaaactataatatcatatttttactataccttttctatgttcagatatataaatacttactattttgttacaattgcctgcagtattcagtacagtaatgctgtacaggtttgcagcctattgctcctaaacatgtatatatgttgcttatataatcactgtaaaaaattatattacaatatcatttacgtaaatgtaaggaccatttctacacataaagtatatattttacaggaatacatgcatattaggaagtgagtcaaagatataaaatgggtgtccaggtgagtgaaaggaaaggatatgaggcaggttgaagataaggagataggtgttggggggtggagaagagacagagacagggataagggatagcctagctgtgtagtagggtataccatctaggtctgtataagtacactctatgatgtttacacaataatgaaattggcttataacacatttcctggaatgtattcccctcattaaatga

SEQ ID NO: 633824 - DNA, 563 bp, Homo sapiens
atacatatacagtcatgtgccacaaaatgttctcgtcaatgacagactgcatatatgatggtggtcccataaaactataatatcatatttttactataccttttctatgttcagatatataaatacttactattttgttacaattgcctgcagtattcagtacagtaatgctgtacaggtttgcagcctattgctcctaaacatgtatatatgttgcttatataatcactgtaaaaaattatattacaatatcatttaygtaaatgtaaggaccatttctacacataaagtatatattttacaggaatacatgcatattaggaagtgagtcaaagatataaaatgggtgtccaggtgagtgaaaggaaaggatatgaggcaggttgaagataaggagataggtgttggggggtggagaagagacagagacagggataagggatagcctagctgtgtagtagggtataccatctaggtctgtataagtacactctatgatgtttacacaataatgaaattggcttataacacatttcctggaatgtattcccctcattaaatga

SEQ ID NO: 633825 - DNA, 588 bp, Homo sapiens
agtggccgtttgggttgcttccatctcttgcctattataaatagtgctgctatgaacacaggcatacaaatatctttttgagactggctttcaattcttttgcttatattccctgacatgaaattactggatcagatagtggttctatgtttaattttttgaggaacttccatattgttttctgtagcagcagttgtgtcattttacaatctcactgatagcacaaaagggttccaatttctccatatgcttgcaaaccattgttcttttctttttttttaatagcactyatcctattgggtgttaggtaataacttattctggttttgatttgcatttctctgatgattagtgctgttgaggattttttaaaatatatttttggccatttgtgtatcatttttagaaaaatatccattcaaacattttgtctatttttttcttttttgagacagaatctcactcttgtcacccaggctgtagtgcagtggcgtgatcttggctcaccgcaacctctgtctcccgggttcaagcgattctcctgcctcagcctcctgagtagctgggattacaggtgcctggcaccat

SEQ ID NO: 633826 - DNA, 588 bp, Homo sapiens
agtggccgtttgggttgcttccatctcttgcctattataaatagtgctgctatgaacacaggcatacaaatatctttttgagactggctttcaattcttttgcttatattccctgacatgaaattactggatcagatagtggttctatgtttaattttttgaggaacttccatattgttttctgtagcagcagttgtgtcattttacaatctcactgatagcacaaaagggttccaatttctccatatgcttgcaaaccattgttcttttctttttttttaatagcacttatcctattgggtgttaggtaataacttattctggttttgatttgcatttctctgatgattagtgctgttgaggattttttaaaatatatttttggccatttgtgtatcatttttagaaaaatatccattcaaacattttgtctatttttttcttttttgagacagaatctcactcttgtcacccaggctgtagtgcagtggcgtgatcttggctcaccgcaacctctgtctccygggttcaagcgattctcctgcctcagcctcctgagtagctgggattacaggtgcctggcaccat

SEQ ID NO: 633827 - DNA, 583 bp, Homo sapiens
aggaggggggatgttatgttgagagagcaccatgagtgtgtttgaagatcaggatgacaggggatgactctcattttgaatggatccatttgttggctgtgtggagaacaaaccgtggtgaaacaagatgggagatggggaccagtgagkaggcgaatggagtcatccaggcaggagagggggcagtggcttgtactatagaggtgatggtcagaagtggggggattcagaatatattttggatacttggcccactggatttgctgatgaactggatgtcagagagtgtagcaacaaaggaatcaagagtggcttctaaggtttttgcctgagctattgagtgaatgggattgccatttagtgagatgggaaagacctgagtgaatcagatatggggatgaaaatgaagaggtccctttgcagtacagccttatgatgcctgtgcatgattttgtgcccgtgtgtttgcttggtcccctgtctgctccctgtcccgccttcgctctgccctgtatcacaggggacagttattcccacatccccccacaccaccactgcagctgttctcaggaaacagccacag

SEQ ID NO: 633828 - DNA, 573 bp, Homo sapiens
gatttattttctttcacagaaaggaagtattagtcctgaagaatgcccaggaactgacatggtaactctattaaattacctggaaccctggctggctccttgttatttactactaagccatccttagccctggcttccttccttaaagtctcaaaatgatggttgaaaattcagccatcatgtctatattccagatgagagaaaggagaaaaggccaagggcaacagggctgttacagctgttgggcatcctttcaagggtttctcactggaaagcatatccaacaactctcactatcatctttttggccagaacttaatgtsaaggccacatctagctgcaagagaggctagaaatgtatttttttaaactcgaaaatcttacctctcagtataaaattggaattttgtatttagtgaaagaagggaaaggccaggtgcggtggctcactcctgtaatcccagcactttgggaggccgaagcgggtggatcacaaggtcaggagaccaagaccatgttggccaacatggtgaaatcccgtctctactaaaaatacaaaaattagctgagtgt

SEQ ID NO: 633829 - DNA, 612 bp, Homo sapiens
tttcaatattaaagaatacttttataccaataaaaagttaaaaaacatatctcagcattaaatgcaatggcttttcaataagtttccaaaattcatctgtggtctgaaatyataactaaatatgtagtactaaaaatgcaagttcatatggaaagtgttagttaataagggatatgagagcatttaccaagaaaactagtgccaccattttatagatacggaactgagtcaccaatctgattaagtggtttcattgaaggcaaagatgtcagtgatagagccaaaaatgaacatcaggattcctgactcttggtaccaaagtgtaataattaaggaactgaataaattaatacattgcctttagagctcatagattataaattaataaatttaatataggttaaaactcagttgagatacatgattgttggatcaggcattagagttcttagattctctcagcaaaaatgactaagattttaaaaataaactactaatcaaaaagattaagtgcttcattcatttattcattcattcaattatagaatattttgagcatacctaactgaggatcagacattatgccagtgttggatacatatgtatgaacaa

SEQ ID NO: 633830 - DNA, 490 bp, Homo sapiens
aattgcttgaacccaggaggcagagtttgcagtgagccaagatcacggcattgccctccagcctgggtgagagagcgagactccatctccaaaaaaaaaaaaaaaaaaaagtgacatcagaataatgcactgcctattgatgtaaaatgttgagtgcagtagtcggttggtttataagagtacagccatatcccagaccatagaaagagcctggacttcttttctgtgtccccatgtcatccaacatagaacacatgtgcttccttctctctcccctatctcttcttctcacgcatctctacttcaagagattctctagtgtggcaaagtttgagactgattaccctctagtagcgaaaacactgatttgtagtagaagacctggtgraaaggatctggtctgttagtgacgtgattgtaaaccagtgctgactaaggattttctgtcatgacacagagagaggtaaaaatgtttattctgtttcattgg

SEQ ID NO: 633831 - DNA, 630 bp, Homo sapiens
actgcccaggagtggagcttgtgatgatggagagaaatgaaatcactgtttaatgagaattggtgagataaggtccacagatggaccattcggagggctgtgtttgaaccacggtatcccattcattttataatacaccttactgtgggcttaaattgcattcttggaaaatttagcccagcatgactagttcttsttagaatagcatcactcacctaatgttgtgttcaataagcctgttgcataaaaggttatcatgtaatttttatcattataagtctccagtgcttccagaacttaccttcaaaagagtgaaaatgatatttcatatatccacagttgtatttcaaagtaagttctaaaaagccacatgcctcagtttaccctttggaatttgcctatcttttttttacagcgttattgttataaatcaactttctaaaagaatataccagtgatatttgcctatagctttcaagctttgattaatgttttaatggtgtttgtccctattttaatccatgtagtatattgaactaagcctggggtttagagttagatgagctagggtctgaatcccaactcttcccaattactagctgtgatgatggttaaatcacatagtgattc

SEQ ID NO: 633832 - DNA, 630 bp, Homo sapiens
actgcccaggagtggagcttgtgatgatggagagaaatgaaatcactgtttaatgagaattggtgagataaggtccacagatggaccattcggagggctgtgtttgaaccacggtatcccattcattttataatacaccttactgtgggcttaaattgcattcttggaaaatttagcccagcatgactagttcttgttagaatagcatcactcacctaatgttgtgttcaataagcctgttgcataaaaggttatcatgtaatttttatcattataagtctccagtgcttcyagaacttaccttcaaaagagtgaaaatgatatttcatatatccacagttgtatttcaaagtaagttctaaaaagccacatgcctcagtttaccctttggaatttgcctatcttttttttacagcgttattgttataaatcaactttctaaaagaatataccagtgatatttgcctatagctttcaagctttgattaatgttttaatggtgtttgtccctattttaatccatgtagtatattgaactaagcctggggtttagagttagatgagctagggtctgaatcccaactcttcccaattactagctgtgatgatggttaaatcacatagtgattc

SEQ ID NO: 633833 - DNA, 267 bp, Homo sapiens
accttgctttgtttcatttgtatctgcagagtcgctgttcttatcrgaagaaccattatgcacagctaatttcaggttcatgagttcttaagcacagtgggaaactaataaatcaattaaacatatatttcataagagattgctatatttatatgtgcatacataaatataattttaacaatgaaaagtagcttgtcatgaatagtttatttcatgagataaaaataaaaggaagacaataaacactacttcaaaatgcaatgctat

SEQ ID NO: 633834 - DNA, 267 bp, Homo sapiens
accttgctttgtttcatttgtatctgcagagtcgctgttcttatcagaagaaccattatgcacagctaatttcaggttcatgagttcttaagcacagtgggaaactaataaatcaattaaacatatatttcataagagattgctatatttatatgtgcatacataaatataattttaacaatgaaaagtagcttgtcatgaatagtttatttcatgagataaaaataaaaggaaracaataaacactacttcaaaatgcaatgctat

SEQ ID NO: 633835 - DNA, 281 bp, Homo sapiens
tttatttcatgagataaaaataaaaggaagacaataaacactacttcaaaatgcaatgctatgtaacacagaaatgaaattccacaagatcttgtggttctctgtgttacattcaaaaagagtaacagataacaagatggctggccacaatgtgagatatactgttggagaaaattgtccagtgttttgaaaggaaaggaaaarccttctaggaatttctcatcacagagaatttagactgaaggaatttgccacggtgttttctgaatagccttagaatt

SEQ ID NO: 633836 - DNA, 569 bp, Homo sapiens
ttagaatgttctgctaatctgcacctttcctcaagcgggtaagttacttgtagaaagataaaaattttcctgtataaataaattcagaataaccataattctggtgtccctctctagcacaatactgtatcatagcatatcttatgtgcaccagcctgtctctgaaggtgcaaactatgacacctgaagatttccatgtctacattattttaagggtctttccctggtaatcactgattcttctttcctttaaactatttactgagaaaatagtttattttaaaatggcatggcgtttgttctttgtctctctttctcaaataaatctctattaaagttcccttctccagagctggcactctattttgcaatatctttatcatagcacttatgttgctgttaatgtcagttgccctcttagacagggcggtctccgaaggcgggcactgtgtgtttttgtctttccttctgtcattcttatcacagtgcctggcatgaagaggaygatcaatacatttgttggctagattagtatgtgaaagaaatgagcaagatagcatatttaaatg

SEQ ID NO: 633837 - DNA, 560 bp, Homo sapiens
tgacacttgatgtggcatccttgacaatgaatggagcatcaaacacaccttttgtcctttatagtgtttccagtatccccttcagtaaatttttaatgaccctttcaattaagggcccaacaagatttcatagaatgtacccttgtctaatactagcacttaggctgaagtggtgtttttagacagcaattagtatccacaacgctgtcatgatatttgtgaacatactttagggctgatcttaatgatcccattaccatatgctctgcttttttcacaaatgtgatggttttgcttttatgatattgtggagaagctctggattttggttttgattagaaagraacaagctcatgtgcttctctcttctgggcctatgacttgccggagtcagatctgttgaaggtctttcatggatttcccatgcagccccatggtgcagtgcgagagagggctgcagccgttatatgtgaaaccacgaggaggtggagatgctacagcgatgtcctttgtgaaacattaggtaagatgaaaggtctcctggaaatctgcagaaacgg

SEQ ID NO: 633838 - DNA, 560 bp, Homo sapiens
tgacacttgatgtggcatccttgacaatgaatggagcatcaaacacaccttttgtcctttatagtgtttccagtatccccttcagtaaatttttaatgaccctttcaattaagggcccaacaagatttcatagaatgtacccttgtctaatactagcacttaggctgaagtggtgtttttagacagcaattagtatccacaacgctgtcatgatatttgtgaacatactttagggctgatcttaatgatcccattaccatatgctctgcttttttcacaaatgtgatggttttgcttttatgatattgtggagaagctctggattttggttttgattagaaaggmacaagctcatgtgcttctctcttctgggcctatgacttgccggagtcagatctgttgaaggtctttcatggatttcccatgcagccccatggtgcagtgcgagagagggctgcagccgttatatgtgaaaccacgaggaggtggagatgctacagcgatgtcctttgtgaaacattaggtaagatgaaaggtctcctggaaatctgcagaaacgg

SEQ ID NO: 633839 - DNA, 565 bp, Homo sapiens
tcttatattaatttgttctgtcttcagactatatttatgctttctttctttgagttctaaacaacaggcataaaacctcagatggcatggataccacacttctatattatgatcaaatttacttaatatttgcccaaagaaagtacttttttaaacttagtaagttggcatgtttacatatgtttctgcttgttccactaacttgctttcatagtctggggtattctaccatccttttctgcctcaggtcctttgcatatccaattacttctacctggaatgctcttttcttctctttgcctggttaattcacttttaaaatttacctcaaagtagcttttcagagartcttacatgaaactctagtttgccactgaactcattttgtttctccattaaaagctctatatctcttctttgtggtcctagtcccaaatataattaaacaatatattgtgcaaccagcttaacatctgaatccccttgtagaatatacatgtcttgggatgggcggcttctgtctttttcatagttctacttgaagcttctcactcaggttcttaca

SEQ ID NO: 633840 - DNA, 552 bp, Homo sapiens
tctatgaaacatttcatgattctccccacattcttaggcaccttctcttctcatctccattagctcccatacatactgcagtctcactgttttgtaattgtttgtttacacctctctcttctacatcagacaagagtctcttgaggtcaatgactgtgtgttatttgttcccaagtgcatagtccagtgcctgactccagtaggtagtctataagcatctgttgatagacagaatggatgaaaatgtagccaataagacttttcaattgattatatcttttatatttgttaaaataatttaataacattctctgaagatttcaagggcaggggaatctacaaatcagggttttattgttttcataagttattttcttaaaaaaawtttttttttaagagatgggggtcttactatgttgctgaggctagtcttgaactcctgagttcaagccattctcctgcctcagccttctgaatagctgggactacaggcatgcatcaccatgcccagcctaaattggaattgtatagtcatgggtccattagcatttg

SEQ ID NO: 633841 - DNA, 597 bp, Homo sapiens
catgtgacttaagttacattacaatacttcattctctgaggmctttccatataccaattgtgaaatcactctctacagctcacagttttctaaacatttgtaccaaagtattctgagagatgagaaaaatcatgatatcttcggtcttgcaggggatatgctgaattttagtttttgctaagaatacgtgaaaaatgaaatatgtctgaagcagttatcatactcctggagcaagcattagatgatgagatatccaattatgttacagttgatggcgccatcttggatttattcgttacccccacatttgtcatgttggacttgaatttttgaatgcccaagtgtcttcaataaaagaagcattttctgttggagttctgtggtagaagtctcttccggtgaactgtttatccctcaatgctaagtggacttctcatctctaaattcttagcccgggacatggcagcatataaagccttcagtaaaaaaaaagagcctgtagaggctaggaagaaaccacagcatctttaaagttccatgcatttgtgtggttaggtgatgagaggacttaccagaaacatatcttttagtagccat

SEQ ID NO: 633842 - DNA, 557 bp, Homo sapiens
taatgcaaaagagaacagagcatccgatctgagaggaataccacccatgagtttcagagctccatgagggagacagaggaccccaaaagtggggggtcagtggtgtcttttgtgtgtccttcaaggtgtcccagggtcatcaaaaatctcatttaggttcttcatgtgatagaactctgatattccccctcagtaatttttaatttgctggccgctaaatggaggggaacatatttcaaatatagaagtcattccaattcaaagaattcatcatctggtcattaacaattaggatctccaacggtgtatttattgcagtagcagctcaattcgataagcctcttcatggaaagaccaggaggtaatcttctaggtttagaataaatttttagcgtgaaagcaagaggcattctcaaagagggtgcagaagatgcagytcttaagatcccccaaaattcactttcaaaaatagattaagatagtgtaaagacctgtattagcataggcagttaagaatcacatttgcagtcaggtgcggtgtctcacatctgtaatcc

SEQ ID NO: 633843 - DNA, 475 bp, Homo sapiens
atcccctccaagtagcctgagttagttcctcgagagcaaggactttgcctgttttcgtttttgcagtatctccaggaactagactactgctgagcatatctagcacatgctcagtaaatatttgttgagtgaatgaatgtcaattgggagtaataaccctgccttactggagtggtaggttaaatacagcatacatgtgaaacaactagccgagtggacagtacacagaaagggctcattaaatatttgttccttttacyacttctcccaagtttcaccccgtctctgtattccccttgttttgaaaatctctaacttttaggcattccgtattcaggtggccccttcaaaaccttttctcataaagtacaattgtcccttggtatttgtgaggaactggttccaggacaccccatgaatactcaaatccatggagactcaactcccttttataaaatggcatagtatttgcctg

SEQ ID NO: 633844 - DNA, 558 bp, Homo sapiens
aaaactctcatgggattgttagatgaatgagaaataaattctattgtgtcaagccgctaaaattttggggcttatttgttgtgatagttagcatgaccctaatacaccaataagatggtgtctgatttttatatcaaatgaattaataattcacttggaaaaaaagcatagatgttttgttactatgaacattcatagcacaagatggtggagagccccctagaaggccattgatatcaccagaacttaatcaagaacaaaaggtccatcattttaatttccaaactgatcttacatgatcttgccatgaaaatggatgtcttccttatgatatacatctgtattttaaagtcggagagcatctgtgcattttctctggtgcttgtgttgttatagaggtagatattgtgagtcctggtgttgaatgcttatgtgaactaagtacagtatacctccttatccttggatatgctccaagacccccagtagatgcctgaaaccacagatagtaccgaatctcatacacaygacatcttttcctatacatacatacctacg

SEQ ID NO: 633845 - DNA, 508 bp, Homo sapiens
ttttctgtaaagggccagagacaaaacattttaggctctgcaggccgcaccatctctgttgcaactacttgactctgctgttgtagctcaacagtagcctttgacaataagtaatgggtgagcatggttgtgcctccgtaagacttaacttgcaaaatcaggcagccagccagatttgaccaaccccratctggatggattctgatctggagttttttggtcttttccaactccaagcccagaacaaaaaaatttttttttctatagtaatactctgctcagttcctcagaggacctagatttatgcaaaatgaggtcagagaacatctgtgtaatcctgcagtctttgcagaagaaatagaggcttccagaataggttatgcttcaccccaggggatacggggtggagtggcaggtttgggccacagtgtttggaatgactaaccattttctagttggaataggatggaaggatagcaaggtgaagtccatctataaggtcatctgt

SEQ ID NO: 633846 - DNA, 519 bp, Homo sapiens
catcagaaacactgggggctggggtggggagcgctccataaagtgcagattactgggccctacctcaagggtttgctggatcagtaggcttaggttggggccagagaatctgcatttctgtttttttttttgagatggagtctggctctgtcgcccaggctggagcgcggtggccatgatctcagctcactgcatcctccgccctatgggttcaagcggttctcttgcctcagccttccgagtagctgggactacaggcgtgcgccaccatgcctggctaatttttgtatttttggtagagacagggttttaccatgttgctaggctggtctcaaactcctgacttcaggtgagaatctgcatttctaaccaatttgtgaatgatgctgatgttgctgtctgaggaaggcacctcgagaaccacrgcactagagaaggccactcttatcatacctggccacagctgaacattctcttgttttatgaagctttcaagcagtttttctctggtaaacagac

SEQ ID NO: 633847 - DNA, 595 bp, Homo sapiens
tcactcatgattcagagaagcccacaaaaggaaatttaaagtattttgaaatgaatacaaataaaatatagcatgtcaatatttatggaataaaactaatatagtgcttagagttaaattaaatgcttatattagaaaagaggaaagctctcaaataawcagactaactactgactctatgcaataagaaaaagagcaaattaaaccaaaagcaaaaggaaggaagatataataatgaaagtaaaagaagccaatttaattaaaaatagaaaagacagtaatgaaaattaatgaaagtaaaagcttctgttttgaaaaattaaatgattagtgaaattctatctggactaacaaaagaaaagagacaagaaactaaatttagtatcaggaaagaaaaggaaatgtcaccatagtcaccaggaatattaaaatggtgataagagaatattgcaagtaaatctctgcccataaattgataaactgaagtgaaagggaccaatatcttgaagaacacaaactaccaaaacacatccaagaagaaacaaaacatctggatagcatcttatctattaaggaaattgaatttgtagttaaa

SEQ ID NO: 633848 - DNA, 595 bp, Homo sapiens
tcactcatgattcagagaagcccacaaaaggaaatttaaagtattttgaaatgaatacaaataaaatatagcatgtcaatatttatggaataaaactaatatagtgcttagagttaaattaaatgcttatattagaaaagaggaaagctctcaaataaacagactaactactgactctatgcaataagaaaaagagcaaattaaaccaaaagcaaaaggaaggaagatataataatgaaagtaaaagaagccaatttaattaaaaatagaaaagacagtaatgaaaattaatgaaagtaaaagcttctgttttgaaaaattaaatgattagtgaaattctatctggactaacaaaagaaaagagacaagaaactaaatttagtatcaggaaagaaaaggaaatgtcaccatagtcaccaggaatattaaaatrgtgataagagaatattgcaagtaaatctctgcccataaattgataaactgaagtgaaagggaccaatatcttgaagaacacaaactaccaaaacacatccaagaagaaacaaaacatctggatagcatcttatctattaaggaaattgaatttgtagttaaa

SEQ ID NO: 633849 - DNA, 494 bp, Homo sapiens
tgggaggctgaggcaggagaatcgcttgcatctgggaggtcgcagtgagctgaaattgcgccattgcactccagctgggtgacmaaagtgaaagtcagtctcaaaaaaaaaaaaaaaaaaataccgtagaggagattaaaaaatggcacacctatatagggcacttaccttgaatggagcttgcaggactggaaattgctctggtgagtcagtgagtgagtggcgagtgaatgtgaaggcgtaggacattactgtacaccactgtagactttagaaacactgtatgcttaggctacactaactttgtaaaaatatatatttctttcttcagtaataaattaaccgtagctttctgtaaattttttactttataaacttttacattatgtttaactttaatatcacttggcttaaaacataacacactgaacagtcattaaaaaaggttttctttctttacatccttatactataagttttttctattttgaaaa

SEQ ID NO: 633850 - DNA, 578 bp, Homo sapiens
tcatatatgtggtctgtgatggacccaaacattgttacatggtgcatgactgtacatgtgtaatatctatttatataacattttacaacatataaattacatacatgtatgycattatataacattttatacacaaataaaatgttaggtactggtaagtgctatggagaaaaataaagcagacaggtggaatgaagtataccaggttctctttttggagacagcttctccatggaagtggcatttaagtagaacctgaaggaaatgaggcaataagccatgtggctatctccatggcaggagacacagaaaagacttctggttgaaatgctaaccagtagtaaagagtgaaactatgtagtgagacatctgggccatacgtttcttggaaaccaagcaagaatgaagaacagcttcatgaagatgcagggcttccagatgatgaccaccccatattcaggcataaccaaagtctgggaattgtgagacaagcatctagacccaagatgctgtgtgattagctgaacgtgaactagccacgagttatcttcaagtatacaataatggctcatattttt

SEQ ID NO: 633851 - DNA, 578 bp, Homo sapiens
tcatatatgtggtctgtgatggacccaaacattgttacatggtgcatgactgtacatgtgtaatatctatttatataacattttacaacatataaattacatacatgtatgccattatataacattttatacacaaataaaatgttargtactggtaagtgctatggagaaaaataaagcagacaggtggaatgaagtataccaggttctctttttggagacagcttctccatggaagtggcatttaagtagaacctgaaggaaatgaggcaataagccatgtggctatctccatggcaggagacacagaaaagacttctggttgaaatgctaaccagtagtaaagagtgaaactatgtagtgagacatctgggccatacgtttcttggaaaccaagcaagaatgaagaacagcttcatgaagatgcagggcttccagatgatgaccaccccatattcaggcataaccaaagtctgggaattgtgagacaagcatctagacccaagatgctgtgtgattagctgaacgtgaactagccacgagttatcttcaagtatacaataatggctcatattttt

SEQ ID NO: 633852 - DNA, 578 bp, Homo sapiens
tcatatatgtggtctgtgatggacccaaacattgttacatggtgcatgactgtacatgtgtaatatctatttatataacattttacaacatataaattacatacatgtatgccattatataacattttatacacaaataaaatgttaggtactggtaagtgctatggagaaaaataaagcagacaggtggaatgaagtataccaggttctctttttggagacagcttctccatggaagtggcatttaagtagaacctgaaggaaatgaggcaataagccatgtggctatctccatggcaggagacacagaaaagacttctggttgaaatgctaaccagtagtaaagagtgaaactatgtagtgagacatctgggccatacgtttcttggaaaccaagcaagaatgaagaacagcttcatgaagatgcagggcttccagatgatgaccaccccatattcargcataaccaaagtctgggaattgtgagacaagcatctagacccaagatgctgtgtgattagctgaacgtgaactagccacgagttatcttcaagtatacaataatggctcatattttt

SEQ ID NO: 633853 - DNA, 610 bp, Homo sapiens
ttgtgtctatttaaagtttytttctgaggtaggattaagggaaatgagaccaaggaaggaactgaggcacttgggctgttttgtttcttttatagattaagacatagaaacattgggtgatggttactcaggtatttgttacatttttctttctagtaggtaattttacagaaccttttcaaattaaaacacacgcatacatagttatctaacccgctgtaatttcttataacaaaaaaattgatcttgtcagttttctctttgtgtagcatatgatggattaaggtcctttggcaaggtctcctcaacatgaaatcacaatttacataaatatataaaatagtatgactgattagcaaggtcgaaataaaaaatatatacctaggaaacataatagaaaataagaaaagatattctttaagtattttattcatcaaaaatggacacttagacaattttaccttataattgacagagaaatattccctgtctgtctcaaagggtaaaactcgggtcagtgtgagaggacggcagggagagagattttagatcgacataaagaaaacttcctattagctagtggtttaacagtaccagagtgcatctctta

SEQ ID NO: 633854 - DNA, 468 bp, Homo sapiens
tgctcagcaagacagaaataaaattcaaaatggccttgactcattgagaaaatggctccacaaagctgggataaatttcaatggggacaagtgtaaagtggcacgggcgcccccacagccctagaatagtggtttgggcatacttggcgctcagcaaatatctgcagcacyttccttgcagtgttgttgtgaagatcaaagtgtgataatgatgcggaagtgctctgtaaaccacaaagtgccttataaatggtaaaggtctgccccaataagaggaaacttattattaaaggcaaggaaatatgtcctgtgaggaaatgttaaaagaagtggagctgtttaatcaacagaagagaagaaaaagagaagatttcatgaatgtaaccattttataagggttttaacaaaagaaatgattttctcatctctatttgtgtgaagaaaaaatgaacttgaataacacaagac

SEQ ID NO: 633855 - DNA, 468 bp, Homo sapiens
tgctcagcaagacagaaataaaattcaaaatggccttgactcattgagaaaatggctccacaaagctgggataaatttcaatggggacaagtgtaaagtggcacgggcgcccccacagccctagaatagtggtttgggcatacttggcgctcagcaaatatctgcagcaccttccttgcagtgttgttgtgaagatcaaagtgtgataatgatgcggaagtgctctgtaaaccacaaagtgcyttataaatggtaaaggtctgccccaataagaggaaacttattattaaaggcaaggaaatatgtcctgtgaggaaatgttaaaagaagtggagctgtttaatcaacagaagagaagaaaaagagaagatttcatgaatgtaaccattttataagggttttaacaaaagaaatgattttctcatctctatttgtgtgaagaaaaaatgaacttgaataacacaagac

SEQ ID NO: 633856 - DNA, 642 bp, Homo sapiens
ggatctctgcaggcccttgttatatctgtactatctggaataggacttgacatctagtatatacacaataaatattaataacggttgaatgtgtgattgtcaggtataaaatattggctaaaaacttggggagtcaactttcttagagatctttaaaaaatawgggtgatttattctaggagacaaaatctttccaaacattgatttcatgagtgtatgtattttaaaaagaagtgaaaatacttatgatatattctcatcctagtcttagctttggccctcatggataggactactagcaaaagaggaaaggaggcaaaatcttacgatctcagtcccatcaataccttgtttctagccacagaaccctcatgaggaaaaaggaagagtaaggaaagtacagctagctattcatggtatctgctaaaattggaaccattttctatatcttaactgttcatttccacatctttttttctagaatctctggtccaggccacagaagacataatcagtgggttgatgttggagtattctctccccagctttgccctaaggcttgggaggtgacaggatgggccaggaaggtctctgctcccattgttggggtatttattactggtatttattcccagttgggat

SEQ ID NO: 633857 - DNA, 605 bp, Homo sapiens
caggcccttgttatatctgtactatctggaataggacttgacatctagtatatacacaataaatattaataacggttgaatgtgtgattgtcaggtataaaatattggctaaaaacttggggagtcaactttcttagagatctttaaaaaataagggtgatttattctaggagacaaaatctttccaaacattgatttcatgagtgtatgtattttaaaaagaagtgaaaatacttatgatatattctcatcctagtcttagctttggccctcatggataggactactagcaaaagaggaaaggaggcaaaatcttacgatctcagtcccatcaataccttgtttctagccacagaaccctcatgaggaaaaaggaagagtaaggaaagtacagctagctattcatggtatctgctaaaattggaaccattttctatatcttaactgttcatttccacatctktttttctagaatctctggtccaggccacagaagacataatcagtgggttgatgttggagtattctctccccagctttgccctaaggcttgggaggtgacaggatgggccaggaaggtctctgctcccattgttggggtattt

SEQ ID NO: 633858 - DNA, 466 bp, Homo sapiens
attataaacctccctgtgaaggacaagagacatgactgcacacaccaggaagagcctgtacatgcataaaaagcttgggtgtccatcagatcataaatttacatttatcttgaatggtgatggcctatttcagaaaaaagttaacttgcctcaaacttcagttctatctttcctccaactattggatagacatatcacactttgggatcttttaaaacagcatgagtaaagtttctgtctaaagtaggaaggttttttgactgtaaataccttggagccaacagtcattaccaagggtaacaaaatgtrgagcaaaaatagcaaaaaccttgagagtaatgatggtgtctatagacaccttgagccccttggttgttgtgttacgtcagtactgatcattgctaccttcatcatttattatatttagaaaatgaaaaccagctgaatgaaaatgatgcctttactc

SEQ ID NO: 633859 - DNA, 456 bp, Homo sapiens
ggattgaacctgccaatgcatttctgtctgtgcctttgctctgcttgcttggaatatctgtccttctcatcaccattgtatgtctttttattcctcaaagctaagctgaaccctcaacttctctttaaacttgcccatctctgaactccttcagaacacatttatcaaacttgtgtttttcttaagattctctttgtggctattgtwgctcagggactgagatggaaagaaaagcttgtatgtgaaaaactcccatttcaggtgcatttttcctctgttttgaaaagacagaaggccataatattggagattcagatggtgattgtgtattggttcaaaagagttcatgagtgaagagataactttgtactggctaactggatggacccaactgaatgaacccaactgtgacagtgttgtgatttattgtgctcctgccctgcagttagctaacat

SEQ ID NO: 633860 - DNA, 614 bp, Homo sapiens
aaatggcagtgaactcaaaattcatatatgtttgttraaagatgccatggaaaaggagttttgattctgcaaccacagtaggaagcaactcggttgacttgggagagtttttaaaggtctattacttcaacgtagagatctgactgacataaagcctgtgcattttatttatgtattcattcatttatttattgagacaaggcttgctctgctgcccaggctggaggtcagtggcacaatcatagctcaccgtaaccttgaattcctgggctcaagtgatcttcccatttcagtctcctgagtagctagaaatacaggcatgcaccaccatgcctggctaatttttatttttttcgttgaaatggggtctttctatatcctaggctggtcttgaactcctggtgcctagtgatcctcctgcttcagcctctcaaaacactgggattacagacatgagccactgtggctggccaatgctgtgcatttaaagcaggcccagtgcagctctgtgcaaagctattttaattgagctggctgagtacagggaatgaagtgtccagaggtgagctccagggcctcggccctctgtgaggcttgcttctttgaggcaggct

SEQ ID NO: 633861 - DNA, 614 bp, Homo sapiens
aaatggcagtgaactcaaaattcatatatgtttgttaaaagatgccatggaaaaggagttttgattctgcaaccacagtaggaagcaactcggttgacttgggagagtttttaaaggtctattacttcaacgtagagatctgactgacataaagcctgtgcattttatttatgtattcattcatttatttattgagacraggcttgctctgctgcccaggctggaggtcagtggcacaatcatagctcaccgtaaccttgaattcctgggctcaagtgatcttcccatttcagtctcctgagtagctagaaatacaggcatgcaccaccatgcctggctaatttttatttttttcgttgaaatggggtctttctatatcctaggctggtcttgaactcctggtgcctagtgatcctcctgcttcagcctctcaaaacactgggattacagacatgagccactgtggctggccaatgctgtgcatttaaagcaggcccagtgcagctctgtgcaaagctattttaattgagctggctgagtacagggaatgaagtgtccagaggtgagctccagggcctcggccctctgtgaggcttgcttctttgaggcaggct

SEQ ID NO: 633862 - DNA, 614 bp, Homo sapiens
aaatggcagtgaactcaaaattcatatatgtttgttaaaagatgccatggaaaaggagttttgattctgcaaccacagtaggaagcaactcggttgacttgggagagtttttaaaggtctattacttcaacgtagagatctgactgacataaagcctgtgcattttatttatgtattcattcatttatttattgagacaaggcttgctctgctgcccaggctggaggtcagtggcacaatcatagctcaccgtaaccttgaattcctgggctcaagtgatcttcccatttcagtctcctgagtagctagaaatacaggcatgcaccaccatgcctggctaatttttatttttttcgttgaaatggkgtctttctatatcctaggctggtcttgaactcctggtgcctagtgatcctcctgcttcagcctctcaaaacactgggattacagacatgagccactgtggctggccaatgctgtgcatttaaagcaggcccagtgcagctctgtgcaaagctattttaattgagctggctgagtacagggaatgaagtgtccagaggtgagctccagggcctcggccctctgtgaggcttgcttctttgaggcaggct

SEQ ID NO: 633863 - DNA, 560 bp, Homo sapiens
tgaggagtctgggtcaggtatttgtaacatgtccctcaatttgggttcatctgatattgtgtcatgattagcccaggcttatggatttgggggaagaatgccacagaggtgaattgccctgtcagtgcatggtatcaggggatacgtgaaattaacacaacttattaytggagacatgaaccatgaccactggttaaggtgatgtctgtcaaatttctctaccacaatgttactctggtttgtgtgtgtgtgtgtgtgtgtgtgtgtgtgagagagagagagagagagagagagagagagagagagagagagagatgggggtctcactctgtcacacaggctggagcatagtggaccaatcatggctcactgcagcctcgacctccggagctcaagtgatcctcttccctcagcctcctgagtaactggcactacaggtgtgcaccaccatgcccagctaatttttgctatattttgtagagacagaatttcgccatgttgtccaggctggtcacgaactcctggactcaaggatttgcctatcttggccccccaaagtg

SEQ ID NO: 633864 - DNA, 560 bp, Homo sapiens
tgaggagtctgggtcaggtatttgtaacatgtccctcaatttgggttcatctgatattgtgtcatgattagcccaggcttatggatttgggggaagaatgccacagaggtgaattgccctgtcagtgcatggtatcaggggatacgtgaaattaacacaacttattattggagacatgaaccatgaccactggttaaggtgatgtctgtcaaatttctctaccacaatgttactctggtttgtgtgtgtgtgtgtgtgtgtgtgtgtgtgwgagagagagagagagagagagagagagagagagagagagagagatgggggtctcactctgtcacacaggctggagcatagtggaccaatcatggctcactgcagcctcgacctccggagctcaagtgatcctcttccctcagcctcctgagtaactggcactacaggtgtgcaccaccatgcccagctaatttttgctatattttgtagagacagaatttcgccatgttgtccaggctggtcacgaactcctggactcaaggatttgcctatcttggccccccaaagtg

SEQ ID NO: 633865 - DNA, 618 bp, Homo sapiens
tttggttgacacataattatacaaatatattggttacagtgtgatatttcaatacttgtatgcactgcatartgatcaaattagggtaataagcttatccatcacctaaaatagtatcatttcttcttactggggagattcaaaattctctcttccagctatttgaaaatatagagtaaattgttgttaactatagtcaccctacagtgctatagaatgctagaactcattccttctatctagctgtaattttgtatccattacccaacttctccctatccctgccttcccctacccttcccagcctctagtaaccactattctactctctactgtgaatcaacttatttaccttccacatatgagtgaagatgtgcggtatttacctttctgtgtccctcaggcctgtcgcatcgaagcactaatcccattcatgagagtggaaccagcatgacctaatcacgtcccaacggtcccctcctttaatactaccacattggaaagtaggtttcaacatatgaattttggggaccaccagcattcagaccatagcattgagtgtgttcaatatttgaggctctttgtgcatgaaatagtctcagtattcccatcatatag

SEQ ID NO: 633866 - DNA, 618 bp, Homo sapiens
tttggttgacacataattatacaaatatattggttacagtgtgatatttcaatacttgtatgcactgcataatgatcaaattagggtaataagcttatccatcacctaaaatagtatcatttcttcttactggggagattcaaaattctctcttccagctatttgaaaatatagagtaaattgttgttaactatagtcaccctacagtgctatagaatgctagaactcattccttctatctagctgtaattttgtatccattacccaacttctccctatccctgccttcccctacccttcccagcctctagtaaccactattctactctctactgtgaatcaacttatttaccttccacatatgagtgaagatgtgcgrtatttacctttctgtgtccctcaggcctgtcgcatcgaagcactaatcccattcatgagagtggaaccagcatgacctaatcacgtcccaacggtcccctcctttaatactaccacattggaaagtaggtttcaacatatgaattttggggaccaccagcattcagaccatagcattgagtgtgttcaatatttgaggctctttgtgcatgaaatagtctcagtattcccatcatatag

SEQ ID NO: 633867 - DNA, 618 bp, Homo sapiens
tttggttgacacataattatacaaatatattggttacagtgtgatatttcaatacttgtatgcactgcataatgatcaaattagggtaataagcttatccatcacctaaaatagtatcatttcttcttactggggagattcaaaattctctcttccagctatttgaaaatatagagtaaattgttgttaactatagtcaccctacagtgctatagaatgctagaactcattccttctatctagctgtaattttgtatccattacccaacttctccctatccctgccttcccctacccttcccagcctctagtaaccactattctactctctactgtgaatcaacttatttaccttccacatatgagtgaagatgtgcggtatttacctttctgtgtccctcaggcctgtcgcatcgaagcactaatcccattcatgagagtggaaccagcatgacctaatcacgtcccaacggtcccctcctttaatactaccacattggaragtaggtttcaacatatgaattttggggaccaccagcattcagaccatagcattgagtgtgttcaatatttgaggctctttgtgcatgaaatagtctcagtattcccatcatatag

SEQ ID NO: 633868 - DNA, 596 bp, Homo sapiens
ggacagcacttagaagaatttacataacaaaacttactgaaataacccttattttccccatatatttaccttcccacagcttgctgcccctaaaagtctaaaccctttatccttctctacaaatttattgttctttgtgaagatgctatacaagcccccaaattctatccctccatttgaattactcatctctgagtttctcccrcatgtatatgcattgcacatgttaacactctctatttgttttcctcttgtttatctctcttttgtccattaaattttcaggtcgctaatcagagaacctaggagtgtagaggaagagttttgttttcctcccctataggagcaagagaagtatgagtacccgatagatacagtgtgaggtggaccattgagattatttaatccaataacccaggtaggcattagttctcccatttagctgatgtgactcagagagatggagcaacttattaaagtcaacagcttaaagtagctaggctaaattttcaatctaagtctgattcttggtcaaactcatcttactgtaccaagttattttagtttgattcagagatggcaaagaagtttctact

SEQ ID NO: 633869 - DNA, 554 bp, Homo sapiens
aaaacatattttaaaacaaaaaaatgttactagagctatagatgggcattttataatgataaaagagtcagattatcagaaagatacatgtatatatatatgtgtgtttgtgtgtgtgtctgtctgtgtgtccctaagaacagagtttaaagctatgtcaagctaaaacggacataattgaaggaagaaatggataattcaacaataatagtaccactatgaagaagatcattaatgacataaaatagttgaacatcagaaaccagctatatttaataggcmtctatagagcactttacgcaacaacagcagaatatacatttttctcaattgtgcatagaacatttttcaatatacataccacatgctaggccataaaaaactaaaaacaataaaaagaaatgaaatcatatggattatgttttctgaacacagaggaatggaattagaaactaataacagaaagaaatttgggaaattcacaaatatgtggaaattaaacaacaaactcctaaataaccaatgaaaattaggaactattttgagataaatag

SEQ ID NO: 633870 - DNA, 554 bp, Homo sapiens
aaaacatattttaaaacaaaaaaatgttactagagctatagatgggcattttataatgataaaagagtcagattatcagaaagatacatgtatatatatatgtgtgtttgtgtgtgtgtctgtctgtgtgtccctaagaacagagtttaaagctatgtcaagctaaaacggacataattgaaggaagaaatggataattcaacaataatagtaccactatgaagaagatcattaatgacataaaatagttgaacatcagaaaccagctatatttaataggcctctatagagcactttacgcaacaacagcagaatatacatttttctcaattgtgcatagaacatttttcaatatacataccacatgctaggccataaaaaactaaaaacaataaaaagaaatgaaatcatatggattatgttttctgaacacagaggaatggaattagaaactaataacagaaagaaatttgggaaattcacaaatatgtggaaattaaacaacamactcctaaataaccaatgaaaattaggaactattttgagataaatag

SEQ ID NO: 633871 - DNA, 567 bp, Homo sapiens
attttgcatatttcatgctaatatgctcatctgtttgttttgctgttgtttcccagattttcaaaaatgcttgttgataaaatgaagtcagaatgtgagatgaggtgagtgtttattagcattgagtaaaaggcttcagaaggcctaaagaaggctgtactataatagtattttttwaaaatgtgtgacatttatatttatattaaattgttggctgatgattctttagccaactgggtaaactatttttgtgtgtgtgtgtgacagagtcttgctctgatgccaggctagagtgcagtggtgcgatcttggctcactgcaacctctccctccccggttcaagcgattctcctgcctcagcctcccgaatagctgagactccaggcacctgctaccacgcccagctaattttttgtatttttagtagagacaggatttcaccatgttggccagaatggtctcgatctcttgacctcgtgatctgatctcttgacctcgtgatccgcctgccttggcctcccgaagtgctgggattagaggtgtgagccaccatgcccagctgtaaac

SEQ ID NO: 633872 - DNA, 623 bp, Homo sapiens
tgtttgggccatgggggtggatacttcgtgaatggcttggtgctgtcctcatgataatgagtaagttctcgctatacaatttcacacaagagctggttgtttaaaagagcctggcacctcccctctttctcgctcctcctctcaccatgtaatttgtctattcctccttcaccttctgccatgactggaaactccctgaggccctcagcagaaacagatgctggctccgcacttgctgtatagcttgcagaactgtgagctaattaaatctctttataaactacccagtcttaggtatttctttatagaaatacaagaacagactaatacagaaagttggtactgaggagtgggggccttcctataaagatacctgaaaatgtggaagcagctttgaaatggggtaattcacagaggttggaagagtttggagggctcagaagaagagagacaaataagggaaagtctggaacktcttagagactggttaaatagttgtgaccaaaatgctgataaagatatggacagtgaaagctagagtgatgattcctcagatggaaatgaggaacttattgggaactggagcaaaggtcatttgtgttatgccttagcaaagagcttgg

SEQ ID NO: 633873 - DNA, 588 bp, Homo sapiens
ttttctggacagattaaagtgaattacaactcaagggaaaagtaaaagaaaacaaaacactccactctctaacatatatttgagaacaaatggaaaataacactgggactttgaaaatgaggagcrtggccctgaggatttcaaaatggactgccttccttctgctggaacaacggcaccacacaactgaacaaacagccaaggggccatgttctatcctgcagcccccacatgtttgcattagtgaggtaagcagctcaaaggggaacttaaaagaagacttgtattgttcatggagcctttcaagcgtagtaagggtggaattccatctgttcagttcagtttggttcactgagctggttcactcgtaatggttcactgagttgtgacacctagtagaaattacaaccaatgtttttaaaaacctttatgttatcatttgtgaaactgtgtggcttgatcactttaaagttttcatctccttgtgtttttgatctgtttccaggatacctctttcctggtctttaaaaaaaaaaaaagtgaaaaactagcactgaaaataccactaaaaagaggaatatatttgtt

SEQ ID NO: 633874 - DNA, 588 bp, Homo sapiens
ttttctggacagattaaagtgaattacaactcaagggaaaagtaaaagaaaacaaaacactccactctctaacatatatttgagaacaaatggaaaataacactgggactttgaaaatgaggagcatggccctgaggatttcaaaatggactgccttccttctgctggaacaacggcaccacacaactgaacaaacagccaaggggccatgttctatcctgcagcccccacatgtttgcattagtgaggtaagcagctcaaaggggaacttaaaagaagacttgtattgttcatggagcctttcaagcgtagtaagggtggaattccatctgttcagttcagttyggttcactgagctggttcactcgtaatggttcactgagttgtgacacctagtagaaattacaaccaatgtttttaaaaacctttatgttatcatttgtgaaactgtgtggcttgatcactttaaagttttcatctccttgtgtttttgatctgtttccaggatacctctttcctggtctttaaaaaaaaaaaaagtgaaaaactagcactgaaaataccactaaaaagaggaatatatttgtt

SEQ ID NO: 633875 - DNA, 588 bp, Homo sapiens
ttttctggacagattaaagtgaattacaactcaagggaaaagtaaaagaaaacaaaacactccactctctaacatatatttgagaacaaatggaaaataacactgggactttgaaaatgaggagcatggccctgaggatttcaaaatggactgccttccttctgctggaacaacggcaccacacaactgaacaaacagccaaggggccatgttctatcctgcagcccccacatgtttgcattagtgaggtaagcagctcaaaggggaacttaaaagaagacttgtattgttcatggagcctttcaagcgtagtaagggtggaattccatctgttcagttcagtttggttcastgagctggttcactcgtaatggttcactgagttgtgacacctagtagaaattacaaccaatgtttttaaaaacctttatgttatcatttgtgaaactgtgtggcttgatcactttaaagttttcatctccttgtgtttttgatctgtttccaggatacctctttcctggtctttaaaaaaaaaaaaagtgaaaaactagcactgaaaataccactaaaaagaggaatatatttgtt

SEQ ID NO: 633876 - DNA, 527 bp, Homo sapiens
tgctatttccactctgacttcccctcatgtcagttggctttggaggagttgtgaatattttgagacatagctaaagggaagttgatttgggaatctggtttggattgatgtagaagggtgcatttatgtggttcacaattgcttccatgtagagttaaattgttgcaagctgacctgatgtaggaaggactactaggaatattctgaattccmactgtgctgacttgcacagcaacaagacatgaaactctagagaaactttgagaagctgaaaaaaaactttctaagctattaataattttaaaaattaaaattttttcttagttttttttttttttttttttgagacacagtctttctttgtcacccaggctgcagtgtaggacatgatcaccactaactgcaggctcgacttcccaggcctcagagatcttcccacctcaacctcccaagtagttgtgaccccaggtgcctgacaccacacctgaggtttttgttttgttttgttttggtagagatagggtctc

SEQ ID NO: 633877 - DNA, 527 bp, Homo sapiens
tgctatttccactctgacttcccctcatgtcagttggctttggaggagttgtgaatattttgagacatagctaaagggaagttgatttgggaatctggtttggattgatgtagaagggtgcatttatgtggttcacaattgcttccatgtagagttaaattgttgcaagctgacctgatgtaggaaggactactaggaatattctgaattccaactgtgctgacttgcacagcaacaagacatgaaactctagagaaactttgagaagctgaaaaaaaactttctaagctattaataattttaaaaattaaaattttttcttagttttttttttttttttttttgagacacagtctttctttgtcacccaggctgcagtgtaggacatgatcaccactaactgcaggctcgacttcccaggcctcagagatcytcccacctcaacctcccaagtagttgtgaccccaggtgcctgacaccacacctgaggtttttgttttgttttgttttggtagagatagggtctc

SEQ ID NO: 633878 - DNA, 528 bp, Homo sapiens
tcagtcagtattttccttctcctaggaatcctgggctcttagggtttctccttctgtttgtgcaacctcctcccttactggcctagaagaatagtgtggctcccaagggcccaatttactattggaagccacttaggaaattagcttgtcacccctgggaattggagacttggacttgcttattctagttgtgctgattcatagatggattcaactatgcatttatcattgattcactgatttgttcaacaaaacatttaatgtttttttttkgtttttttttttttttttttgagacggagtctccctctgtcgcccaggctggagtgcagtggcgcgaactcggctcactgcaagctctgcctcccgggttcacgccattctcctgcctcagcctcctgagtagctgggactacaggcgcccaccaccacgcccggctaattttttgtattttttagtagagacggggtttcaccatgttagccaggatggtctcaatctcctgacctcgtgatccgcccgcctcg

SEQ ID NO: 633879 - DNA, 597 bp, Homo sapiens
tggttatctgctatccacataaccattcccaaaacacttagaactttggttttgctatccttaaatgcgattaaaaggtgtacctacctcactgtgttgctgagacttaaattaggtaatacttttaaaaagattacagagtgtctttttagagtgtgcactcattattcttcctatyaatcttattattagtataataattggcatctgcctgacacatacgagggattttgttgagttaaaaggtgtcagatatgccacagatgtcctcatgttctgtggtagggactattgtatgactgtctcatcttttaaaaaatcctgttggcttctagcagaatatatttcttgaatctaactttacgtggaaattctcaatatgtgagtgctagtataacacaatttaatgactttcagaaagagcacaacctccttaggaccacctcagcctgcagatcactgataaaaacagctggagctagcatctgttccttacaaatctttcaaagtcataacaaaactggcctgatttcataaacacagtatgaatttcagtttgtgtgtgggaaacatgcctaggaaacctaataagactgg

SEQ ID NO: 633880 - DNA, 641 bp, Homo sapiens
gtgcactgtattatctctgtgcctatggagcagagagaggacccacattgtccctgccccarcccccacatagcttctgtgggacagttctgtttggccttctggcttcagtgcagggcagggagatgcaaactttatagccaaatcagagttggctccagtttggggaatgacccgtcaattatcctctgcatctcagctcactcatttgcacaatgggagtgctatgctcattatgaccctgaggtagctcactgtgcaattctgatcagaaactaggtcaacaacaaccaaaggaaaggttgatgttcccgcttccttagttctgtttttctgtcctttgcctgcctcacactctcctgtctctcctgtcttctctatcacccgccctcactcatgtgcataattaaggaagtggccatgaatgaaggtatgagatctgaccccatcttcttctatgctcccattctgacagcatggccagaggaccctgaggccatatggcaaccttattccttatttatctgttaaatattatgcccaggcaactagtcttactcttattaacatccaagttactaagtcatgttcaagtaacttattaatttattgaccatctattgagcacctaccatgtgcca

SEQ ID NO: 633881 - DNA, 641 bp, Homo sapiens
gtgcactgtattatctctgtgcctatggagcagagagaggacccacattgtccctgccccaacccccacatagcttctgtgggacagttctgtttggccttctggcttcagtgcagggcagggagatgcaaactttatagccaaatcagagttggctccagtttggggaatgacccgtcaattatcctctgcatctcagctcactcatttgcacaatgggagtgctatgctcattatgaccctgaggtagctcactgtgcaattctgatcagaaactaggtcaacaacaaccaaaggaaaggttgatgttcccgcttccttagttctgtttttctgtcctttgcctgcctcacactctcctgtctctcctgtcttctctatcacccgccctcactcatgtgcataattaaggaagtggccatgaatgaaggtatgagatctgaccccatcttcttctatgctcccattctgacagcatggccagaggaccctgaggccatatggcaaccttattccttayttatctgttaaatattatgcccaggcaactagtcttactcttattaacatccaagttactaagtcatgttcaagtaacttattaatttattgaccatctattgagcacctaccatgtgcca

SEQ ID NO: 633882 - DNA, 585 bp, Homo sapiens
atcctaatgcaatagatctgggctgaagcctcagattttgcattgccaagttctcaggtgattcaaattctgctgctccatgggccacactttgattagcgagacacagatcactgcctctccagtattctatgattttagtgggaattctgtgtcatctcagatgccttctcttgcctttcagataaagaaacaaaattagaagacattttcttgtcatatatccatcagtaaaagtgatagagcatgcagctggcttggagtccagctctgcatcccaccttcctactacagtcagattaaacacattcagaatataaactgcaaaccatgggaaaaggatgtgcagtagtgccccttatccatagtttcaccttcgtctgttacggtaacccgcagtcaactgcagtccaaaaatgttgaatgaaaaagtccagaagcaaacaattcgtatttaartcatatttaaatttaaaaataattcattttaaattgtgcaccattctgagcagcgtgatgaaatctcttacaccatcccacacaggacatgaatcatccctttgtccagcatatccatgctttcta

SEQ ID NO: 633883 - DNA, 586 bp, Homo sapiens
tgaattctagaaagaagggcggggcagatattctcgggggtagatgtgtcaaccccctgccattagagggagtaagagcagaaggaaactgagcaggcctttactgtctctcatttcaccacattgcccctggtggcccactgcttcagaactaccatgatmtctacctgtacctaagaacaaaatgatgtgaggacaccttgttgctaagatattcagccaaaaagacaggtgtgtgttgcatggaccatgtttgtgtggtgataatttgaaatacttcataatgaacagccatatgacttcctttttctctttccagatataaagttgtgccactctctttcccatattcctcttctctggctcctcagtcatcactaagaggtctctgcctctgtctgggtcctgggctctgtgatggctaattttatgttttaccttggctgggccctggtgctcagatatttggtcaaatgtcatctggtgtttctgtaagagtgtttttgggtaagacttacatttaaatcagtggcctttgagtaaagcagatttatctccattttgtacgtgggcctcatccaatcag

SEQ ID NO: 633884 - DNA, 577 bp, Homo sapiens
cagcactggcataggaaagctagaagttcatcaatgactctctcttacagcatcctattcaagtttttttaacttgatttttgtccagcactaaatagaaagatctggaagagtagtgtttgttcatgtttacaggctgtcaaagcaatcatttttccrggtgatcatactctcaaaaacctttttttctcccttcaggtaaagattatgattgactataaaatagcaatagagaaaagatcaaattccaaccactcctttttttcaataagaaaacttgagatttcctctaccaaaattgaagtctccccatagttttttttttagtagatcttagacttttgtcagcaagcctattcacagtttcagaaaccatgaaatccttagtcttcctactgctaaactttgaattcatttgtagttcaacacatctgttattttctccaggcagaaaaaaaaggaaacccactgaaaactctgatttatactcccaagtgtccttaaattcatcctaatacctctccttccccacaccctttttttaagtttgtctcacaaacagtgataagcccaaggt

SEQ ID NO: 633885 - DNA, 537 bp, Homo sapiens
tgacttagtgattctgtgcatgtatatgtgtgtatatacatatatatatacccacagagcaatagagacgygcatgcatacagttacttgatttccatatatatctagctctgacacttctcttacttttccaaatggatatttcattgattatccatgtccaaccatttaagaatgacttttatacttttctaatggtttttgtattgtatgatctccagaaaaatgggagaagtcttgtacttgctagtgttagttcaatgtaaaacacactgtaaatatcattaaaatgcagccaacaatagacaggaaagggccaaaacgtgttatgaccaaaaaaaatcaacaaatatatttttagtaacatgtaaaaacaaggtaaaactacctctatcacttcttagagaatatctcatatttctcctttctccccttcactgtctattatgatccaaagaagaagctgtgttaatactctaatttctagcaatagttcttgtatttttctctataagtctatcattcctaaattcctgt

SEQ ID NO: 633886 - DNA, 602 bp, Homo sapiens
ctaactaattggactggcatgaggaacaagtaagctgatgcatgtaaaaatacccagcaaaragccagacatacatattattattgttgttatacttaatatttgacattgtcatcacatttcaaatactgtgcaggatatttgatcacaactaaaatcaaactggtagtcagcaacatataaaaaagattatgtgttatgaccaagtaggatttatcccaggaatgcaaagctggtttagcatctgaaaaacaatcagtgtaatacatcatattagtagaatagagaacaaaatccatgtaattatctcaatagatacaggaaaggcacttgaaaatatcaaacaccctttcataataaaaacactcaactgactagcaatagtaggaagcttcctcaacctgataaaaggcatctcagaaaaacccacaggtaatatcatacttactggtgaattgtagtacacttttcctgtaagatcaagacaaagatgtctaccctcaccacttcacttcaacattgtgctagagatcctagccagagcaactaggcaagaaaaagaattaaaaaccacccaaattttaaggaaagaagtaaaacta

SEQ ID NO: 633887 - DNA, 598 bp, Homo sapiens
acctcagaatttctaagggactcagaacttgggattagcagtccaagacagggcagggtggaagtatcgcactgaaaatcaggaatgattagaagtatcttaacaatgtcagagcccagtaaagtcagctttctccactttccccttggccaggtggactgggagctatcctctgaataacctagaaggggaagcctcaggactcaagaacattgctcatcaatgaacaatcctgtctartggcatagagtattcaatcacacttaatcatactttactaaattattcttaagtataaatagaaattagagtaataacaatccagtttttgatggaagtctacaagatggagagagagaaaaaaattaacttgaaagaaacagagatcatgcggagaacagaagaaacattaaaaattaaccaaccaactagccaactaaccaaccaaccaccactaccaccaaataaccacacaaaaactccaaaagaataaaagaaagcttttaaagcaatatcctcagatttaaaaaaaggggtatagtaaggcattcattaaaaaaagctaaaatataaccagaaagttaaaaactaaattata

SEQ ID NO: 633888 - DNA, 528 bp, Homo sapiens
ttgccatctattcaatttaatactaagagatttgtgcttgactgtctttgaagaaattaaagagaaggctaaagaatgttgtatgggtctgttgtaaaagctaccacaaaagggttgcaattaaaaataaaatttgacaagtaattagtctacatttctttttttagtctacattagttatcttttttaattttgagaaagacattacagattggttaagatatttcatctctgatttagcaaatgcatccaatagtaattcctgtataaatgttacttttttctactcctcttctcaagatttattgctggaatattttgatgaattttgagtcacacaaaccaaattttatagtttaggatacacataamatagtgaatctaaggatagcattaagttttctaactataaatgtacccattaacatttatttcatattttattttttcttgtggttaaaatctctgatatataacttcttttaccacttaacacgactaggcaaaaatattgacacctctttatgg

SEQ ID NO: 633889 - DNA, 485 bp, Homo sapiens
tcttttactcaataatagccctttgcattgattcttagggttcctttaacagtaaagccctcctctctcttctcagcaaacccaaatcctgtctaatctttagaactcagccaatccatccttctctgcaaatgttcycacattgttaggagcctgaaatgagttgtactcatccttctctgaattcactcaccaaatattgtttctgcaatcattttggcaattaagtgaaagtcaatgactttttggttggcttacatatttcattaatttttgttggtttctattgaaattggaggtttcttgaggcgaggtgttagccttaattttatcttaggtttgtactgaagtagggcaaagatctcaactttgcaccctaagtcactgcactgtacctgtaggtgggtatccctgtgccacctttagaggccaggaaatcaattctgagaggccatgtctcatgtccatgtcacagcctaagttgt

SEQ ID NO: 633890 - DNA, 486 bp, Homo sapiens
tcaggaggctgatgtgggagaattgcttgagcctaggagttcaaggctgcagtgaactgtgatggcaccaccgcacaccagtcygggcaccagagtgagaccctgtctccaataagcaaaacagaaaagaaaaaaaaagaaaaaaaaatatatatatataattttgtacacacacacacacacacacacacacacacacacacacacacatattcttctgtctttagaccttacctcttctcattttaggttccctttctgagagattttatttacttatctacttgactgcttcaattattttgttttcttcctctcaggatatttaaatatgtgtgcaatttggtttgtaattcctttcctgagctgtagagctgtgtattcattcacctgtcaactgtatagccctgcctggatttctcaaggcatctcaaaattcgtgtgtcaacaactcacctcataactttcccctccctacagcatgct

SEQ ID NO: 633891 - DNA, 548 bp, Homo sapiens
aaaaattgtgtcacaacattgttttataagagaaaagaagaaaaagtatctaggtgtgtatgagctaaatggggttccttcttttgttattaagtgtaacatttctaaaagaacatttctgttcatcatttttaactttggtaaccaactactttttgastgtcaaagatgagttcaggaatgggataaatgtttgtcctatattattattattggaaccttcagttcaccaatggtaaggaacacacaggctgtatttgcaattgactttggaacttggtaacaggaagaggttggaacagtttggaaggctcagaagaagatagaaaaatgtggaaagtttggaaattcctagagacttggagggctcagaagataggaagacatgggaaagattggaaattcctagagacttgttgaatggcttggaccaaaatgctgataatgatatagacaatgaagtccagtctgagatggtctcagatggagatgttgcacttgttaggaactagtgcaaaggtcgctcttgttatgcgttagcaaagaga

SEQ ID NO: 633892 - DNA, 651 bp, Homo sapiens
gattctttaaaataggcccatcagtgcctccccatcacttacagcagataatcttggtgtgcagtatctgtcatcatctattttctatctgcctttccaaatatatctttagccatgctctgagttctgaacactgatrtatttaatgattccctaaatagatccgtgcttttccatctccggtctcatctttcaaggaccagcttacacatcatctcttttattagatttccctaaacttccagccagaagtggtatttctctcctcaaaaccaccacttttctgtgaccatatcacatcctgtgttgtgataaactagttatttccacatcccttgaggccaaaccatattttgtgctctggtttactgggggtagggggatccttccctgaaaaaaaaaatgtgtgctacttttccactttaagccacaatatcttccactgtgccgggaacaatgcctcagaaataacagaggcaaataaatgtttgttgcatgaatatatgaaagagaaaggtgacttacaatgtccatacaaggtttgaaaagtaactacgagatctcattttaactaaattctttttctgcacatcactacaattttcccaaatatatctggttgaatcttaatatgttgtgttacctgataaa

SEQ ID NO: 633893 - DNA, 651 bp, Homo sapiens
gattctttaaaataggcccatcagtgcctccccatcacttacagcagataatcttggtgtgcagtatctgtcatcatctattttctatctgcctttccaaatatatctttagccatgctctgagttctgaacactgatatatttaatgattccctaaatagatccgtgcttttccatctccggtctcatctttcaaggaccagcttacacatcatctcttttattagatttccctaaacttccagccagaagtggtatttctctcctcaaaaccaccacttttctgtgaccatatcacatcctgtgttgtgataaactagttatttccacatcccttgaggccaaaccatattttgtgctctggtttactgggggtagggggatccttccctgaaaaaaaaaatgtgtgctacttttccactttaagccacaatatcttccactgtgccgggarcaatgcctcagaaataacagaggcaaataaatgtttgttgcatgaatatatgaaagagaaaggtgacttacaatgtccatacaaggtttgaaaagtaactacgagatctcattttaactaaattctttttctgcacatcactacaattttcccaaatatatctggttgaatcttaatatgttgtgttacctgataaa

SEQ ID NO: 633894 - DNA, 536 bp, Homo sapiens
tttacgagggtatcattaggtacgggtttcaattatgtgcatatggccctatgtatatttttacagatatratacatggctaattggtgtataacatgggaaaattaatgactatagcaaagacctccactctgtcatgttttttatactatttactgtagtatatttaccaaaaaatccattagtaaaatggcattatattatgaaataattttaatatctatatgaaaaattaacaggaatatattgagtataaaaacaataatttgggaagcactctgtattataaaaataaagaatttgtaataatgcaataacaggctgtatttctgttttatgattctgataataaagcacttaagttccactttcatggtttatgctgttatcagaaccccctaatataattagatggccttgttttagataattacttatatttccttattgcatagcaaaaatcccactggaaaaatcctcaatattttaaatgtaagagctatattgctggaataggccaagagaactggaaatca

SEQ ID NO: 633895 - DNA, 536 bp, Homo sapiens
tttacgagggtatcattaggtacgggtttcaattatgtgcatatggccctatgtatatttttacagatatgatacatggctaattggtgtataacatgggaaaattaatgactatagcaaagacctccactctgtcatgttttttatactatttactgtagtatatttaccaaaaaatccattagtaaaatggcattatattatgaaataattttaatatytatatgaaaaattaacaggaatatattgagtataaaaacaataatttgggaagcactctgtattataaaaataaagaatttgtaataatgcaataacaggctgtatttctgttttatgattctgataataaagcacttaagttccactttcatggtttatgctgttatcagaaccccctaatataattagatggccttgttttagataattacttatatttccttattgcatagcaaaaatcccactggaaaaatcctcaatattttaaatgtaagagctatattgctggaataggccaagagaactggaaatca

SEQ ID NO: 633896 - DNA, 536 bp, Homo sapiens
tttacgagggtatcattaggtacgggtttcaattatgtgcatatggccctatgtatatttttacagatatgatacatggctaattggtgtataacatgggaaaattaatgactatagcaaagacctccactctgtcatgttttttatactatttactgtagtatatttaccaaaaaatccattagtaaaatggcattatattatgaaataattttaatatckatatgaaaaattaacaggaatatattgagtataaaaacaataatttgggaagcactctgtattataaaaataaagaatttgtaataatgcaataacaggctgtatttctgttttatgattctgataataaagcacttaagttccactttcatggtttatgctgttatcagaaccccctaatataattagatggccttgttttagataattacttatatttccttattgcatagcaaaaatcccactggaaaaatcctcaatattttaaatgtaagagctatattgctggaataggccaagagaactggaaatca

SEQ ID NO: 633897 - DNA, 568 bp, Homo sapiens
agaaaatcaaagaagcaaaatgtggggkgtttgaaagactaataaaattgataaaaccctagagagagacagacagaaaacaaactattaatatgacaatgtagacattacttttttcctcagacatgaaaaaaataaaaattatttgagaaaaaagtttaaacaaatgaatttgaagatttagattaaatgaaaaaatccttttgaggtatataacttagtaaacctgatataagaaaaatagaaaagctaaatagtcccattaaagctattaaatctacaataaatatattttcatgaagacatgacagcataagatggctttgtcagtaaactgtttcaaacatttacaaaataaataagatcaattttaccccaaatctttagaaaataaaaaagagaagagctattccaatttatttttactacagtagcaataattccagaaagtgttgttcaaaataaatatgtatttgtaagacagaaatttctcaaaagattcttttcaggaacagaagctccacctgcgtttgccttaactttttttgctctataattttttgctgaa

SEQ ID NO: 633898 - DNA, 528 bp, Homo sapiens
aaacatttgcctcttacctgcctctatacactggtaagtttctacacacaagatatgcataggaaaaacatctgggtattttgtctgtagcaccagctaacaccgttgaagagactagaggttgtcaccatcaatccagccacttcctggatactctgtgcctagacaggtaattgctattcaatccacctctttttgaacctttccaaccctttagaaaattccagcttttagataaatgtaggttactgaacctaaacagcaaataattgcagcccattaaactctcaataagaagatggccctagctacttgggaggctgaggcgggaagattgcttgagcccaggagtttgagtccagcctgggcaataagaaataccctgtctctaaaartaaaacataaaaaataaattatatttacaaaaagaaaagatggttcagcttttgtctatagagtgactttaaaattagggctgcttctaatcctctattcagaccctgtgcacaacatctattttattggaat

SEQ ID NO: 633899 - DNA, 582 bp, Homo sapiens
aacctttccaaccctttagaaaattccagcttttagataaatgtaggttactgaacctaaacagcaaataattgcagcccattaaactctcaataagaagatggccctagctacttgggaggctgaggcgggaagattgcttgagcccaggagtttgagtccagcctgggcaataagaaataccctgtctctaaaagtaaaacataaaaaataaattatatttacaaaaagaaaagatggttcagcttttgtctatagagtgactttaaaattagggctgcttctaatcctctattcagaccctgtgcacaacatctattttattggaattgtctccccagtcctcatgaaatgagtgttagagattgtgtcttcaaggtagtttaatttcctggaccattttttacctktcagaacattatgaatgggttttcttcttcgcagttatttttgtgcttatgtcaatcttctgtaatagttgtgcatatatgtatatttcacagtctatattttttccacgggtaaatttttaaaaaatttcccatctccaccaattttcagggctgttatatgggattacac

SEQ ID NO: 633900 - DNA, 573 bp, Homo sapiens
gtcactgtactccagcatgagtgacagagcaagactctgtctcaaaaaaaaaaaaaaaagaatatatatacatgtatatacgtatataagtatatatatgcatgcatatatatacatatatacgtatatacatgtatatatatacatatatgtgtgtgtatgtgtgkgtgtgtgtgtgtgtgtgtgtttgtattttatatatatatgcttatttagcctgttaacatgaaagttttccttggctgttaaccttcttttttttaaatttaattaaacattctgagtttaccattgagtaagctttgatagcatggtttaatattcctaacttagatagtctccaaaacaaagaagaagtggaatttcagagcatgcaaggctgatggcagccccagaatgtggtcatcacaccaagtatatgtacctgaagggagttagtcttgtagacaaggcatgcttttctggcatggctgcttcagcaggatggggaccacttagatttgaacccccaccacatatacattgattacctacaggaaaaactgatgggacattcaaacactggtagagtta

SEQ ID NO: 633901 - DNA, 573 bp, Homo sapiens
gtcactgtactccagcatgagtgacagagcaagactctgtctcaaaaaaaaaaaaaaaagaatatatatacatgtatatacgtatataagtatatatatgcatgcatatatatacatatatacgtatatacatgtatatatatacatatatgtgtgtgtatgtgtgtgtgtgtgtgtgtgtgtgtgtttgtattttatatatatatgcttatttagcctgttaacatgaaagttttccttggctgttaaccttcttttttttaaatttaattaaacattctgagtttaccattgagtaagctttgatagcatggtttaatattcctaacttagatagtctccaaaacaaagaagaagtggaatttcagagcatgcaaggctgatggcagccccagaatgtggtcatcacaccaagtatatgtacctgaagggagttagtcttgtagacaaggcatgcttttctggcatggctgcttcagcaggatggggaccacttagatttgaacccccaccayatatacattgattacctacaggaaaaactgatgggacattcaaacactggtagagtta

SEQ ID NO: 633902 - DNA, 532 bp, Homo sapiens
aacatattttggtctatacattctggaaaatggcaatacaggattctctcyggttctcagtctgcccaaatgatccaatcaaatacagtgggttagaatgtgtgaaaaagggcaacctccaaaccaggtgaatgtatgtcatgattcattttgccccaagtgagacagcttcgaaggagtggtttgggctcgccaatgtttgtagcttaagtctctgatttgcccagtctcagtgctagatattgacagcttgggttcgagaggctgagaatactgtggaagaggcaaggtcaccagataagagtgtgaccatgagaccaaggggtagagagagagatccaacagtggggaaactgagatagcagaggggaatgagggctcggagggagctgggaaggaggggcgattgcaattgaggatggaaccagagaccgttgttgaatttagggtcagaaaaatctgttgtctagatgaagaattaaatagagcaaagacaattgttgctccaactccaggtttcactcataaaaca

SEQ ID NO: 633903 - DNA, 532 bp, Homo sapiens
aacatattttggtctatacattctggaaaatggcaatacaggattctctctggttctcagtctgcccaaatgatccaatcaaatacagtgggttagaatgtgtgaaaaagggcaacctccaaaccaggtgaatgtatgtcatgattcattttgccccaagtgagacagcttcgaaggagtggtttgggctcgccaatgtttgtagcttaaktctctgatttgcccagtctcagtgctagatattgacagcttgggttcgagaggctgagaatactgtggaagaggcaaggtcaccagataagagtgtgaccatgagaccaaggggtagagagagagatccaacagtggggaaactgagatagcagaggggaatgagggctcggagggagctgggaaggaggggcgattgcaattgaggatggaaccagagaccgttgttgaatttagggtcagaaaaatctgttgtctagatgaagaattaaatagagcaaagacaattgttgctccaactccaggtttcactcataaaaca

SEQ ID NO: 633904 - DNA, 577 bp, Homo sapiens
ataatgttgcaggcatataacagagaattcattaattttacctatgaagattagggaacattatgaagaggggygcactggggctgttcttgaggaaggtcaccagacagacagtgactcctccagtcattcagcaggaaaggcagtggcatgagcagaggcagagagcctgttcttcacatttgaccatcaccctgtgcgattcaggctcactaataaacagacctagctctcttataaaacatacatctctctggtgagcaaggctttcctgaaatgtaatgctactttcatttggttctcaaactagctgctctgcagggaattcagacttagcagatctcactttctttctggacaactaacaatatgtgcaacttcccagcagtcaagaaatatgggcaatatcctcctgtagagatgtactttaatgattcatcagtgactgtactataactcattcataaaatcccaaagcattaaaagctccatcttcattattaccagatgtcttacaggcgcctaagtcaacacttccaaatgactccctgcaagtttgcaagaccaattgtacctt

SEQ ID NO: 633905 - DNA, 577 bp, Homo sapiens
ataatgttgcaggcatataacagagaattcattaattttacctatgaagattagggaacattatgaagaggggcgcactggggctgttcttgaggaaggtcaccagacagacagtgactcctccagtcattcagcaggaaaggcagtggcatgagcagaggcagagagcctgttcttcacatttgaccatcaccctgtgcgattcaggctcactaataaacagacctagctctcttataaaacatacatctctctggtgagcaaggctttcctgaaatgtaatgctactttcatttggttctcaaactagctgctctgcagggaattcagacttagcagatctcactttctttctggacaactaacaatatgtgcaacttcccagcagtcaagaaatatgggcaatmtcctcctgtagagatgtactttaatgattcatcagtgactgtactataactcattcataaaatcccaaagcattaaaagctccatcttcattattaccagatgtcttacaggcgcctaagtcaacacttccaaatgactccctgcaagtttgcaagaccaattgtacctt

SEQ ID NO: 633906 - DNA, 522 bp, Homo sapiens
aaattcctttatatttggggatgggtatccattagttatctaaactgatgcccttttgtgttcatttatattttctgtattcctgcccattctcaaacttttctgggcttcctctcaccccccagcaaatgcccaatttttcatgagagaaggcatgacctgggacatttgcctrttttatatatagaactataaagataacgatacccaccagcaaatgaggaaacctgtgagctgtaaatgcctgtgtctccaactaattcacagaattccctccaagggagggacttattttgcatttgaactccaaaacacctttcaagattgttaaacttaacaccagcctgaaaatcccagtcatgctggagatcaattaactgcttccagagctctactagcaaccctttaagatgtttgcattttagagtaatttggccattatcacatttgcatcaaatgaaaacacatcattattttgagtgataagatgttcagttagaatactcaaaccctctagaagct

SEQ ID NO: 633907 - DNA, 614 bp, Homo sapiens
aagatgttcagttagaatactcaaaccctctagaagcttgcttctttacctacttaccttatctaatggtcagatacctttttcagatgccttttttccctctgtatcagtgtcgaatctcagcttgtcttcttccgtacacttgttttatttgatttcattctttccactacatgattgcttcccacattcccacattaggatttatatgctctgaatatcccactcttacatttttcaagacaactttctcctgttgcttcaaaatttattacttgactacttgattacctaattatttgccattaactttaacattttaaaataatcttttatggcaacaattggagctcattgtagaagatttatacaattagataaggagtaaacagaaaataagaatcactgcagtatcagccaccagaaataaacactgtggtgtataattttctttatattcamggatatttttattgtcaaatactacaataataaattatgctgtacaaactgttttgtaaccgatgcccacaatataacatgaatatatttctatctttctattctttttcagcctcatttgcaatggttttatagttttttcttatatggat

SEQ ID NO: 633908 - DNA, 625 bp, Homo sapiens
ataattggaatatccctcatctcaaacatttatcttttctttatgttgggaatcttccaactctggtcattgtyttgagggcagttttgcaaagcatgtgtttgattaacctctcaaatcataacctcctgtctcccaacctatgggggtatggaaggaagaactgagtattcccaattcattttatctgcgcccatatgggtttgtcacatgctcattggaataataatgtctgagagcaatgagggggtggatagatcactggagagtgtgtgtgtgtgtgtgtgtgtgttatctgcagggatagacagatagcagttctagggaagtaaaaagcagggcagagaagtaacaaatggacatatgaatactctacccaatctctggccttttacaaacaaataggtttaaccctataccatagtatcaccaatattactaattaggatgagccatgctatttgataaacttttattatgttttattataaacaagaacatttgaatttttcactattaataacaaataacatgtgttagaacttaatgaaccacaaagcactttgcataaacattatctcaaagcagaaatttttttgggccctgcaccccatccacttggccc

SEQ ID NO: 633909 - DNA, 625 bp, Homo sapiens
ataattggaatatccctcatctcaaacatttatcttttctttatgttgggaatcttccaactctggtcattgtcttgagggcagttttgcaaagcatgtgtttgattaacctctcaaatcataacctcctgtctcccaacctatgggggtatggaaggaagaactgagtattcccaattcattttatctgcgcccatatgggtttgtcacatgctcattggaataataatgtctgagagcaatgagggggtggatagatcactggagagtgtgtgtgtgtgtgtgtgtgtgttatctgcagggrtagacagatagcagttctagggaagtaaaaagcagggcagagaagtaacaaatggacatatgaatactctacccaatctctggccttttacaaacaaataggtttaaccctataccatagtatcaccaatattactaattaggatgagccatgctatttgataaacttttattatgttttattataaacaagaacatttgaatttttcactattaataacaaataacatgtgttagaacttaatgaaccacaaagcactttgcataaacattatctcaaagcagaaatttttttgggccctgcaccccatccacttggccc

SEQ ID NO: 633910 - DNA, 584 bp, Homo sapiens
ttactctttgtcttcaacaaagaaaaagaagctgtaggtttatccctgtctctgcagctgcaattgtgacttccttggaaaaaaaaaaaaaaagccmaaaggacagctctttaccgattaggaagtagaaaatttgatagcttctgaaaataaatgcctgtattccattttctggcaggccgctgtggttcgtcttctgcctgggaactggataaaaacatcagtgaataccccaaaggtcagaatttcagaactgctgccacaactgtattgtcaccaagtagtcaccatgctctcactcactctctttttttaagaggcctggtcatgtccgggggaatgccaggtacatttttcttaatgtatgagcacaagttacatataacaacctaacaacacaatactgcctctttaatgctaatctattccttgcaatctactagatacatgtagagtcattggtgtgtatcaagagagcaaaatcagattctgaaaatatctgaaaggatgcactagagtgtacataataatgtattttaatctgccaggccttaaaattaatcatgaattcccacagagatttt

SEQ ID NO: 633911 - DNA, 583 bp, Homo sapiens
gcaatagtaaagtagacttgacagcctccacctagatttcagaggatayatggaaaagcttgggtgcccaggcagaagactgctgcaggggtggacacctcacagagaacttctactggggcagagtagaggggaaatgtggggttggaactcccacagaatcctcactggggcactgtctaatggagctgtgggaaaggggtgtcagaggcattcaaaacagagtgactccatcttgaataagggctggtgaaatgaggctgagacttctggctccattcccagaaggttaggccttctaagtctaaccttagacttagggtgagataggaggtcagcacaagctacaggtcactaagaccttgctgataaaacagcatgtggtaaagaagccagccaaaacccaccaaaaccaagatggcaatgaaagtgaactctagttgtcctcactgctcattatatgctaattataatgcactagcatgttacaagacactcccaccagcaccatgacagtttacaaatgccatggcaaaatcaggaagttatcctatatggtctaaaaaggggaggaaacttcagt

SEQ ID NO: 633912 - DNA, 530 bp, Homo sapiens
acagtatggggggaccactctcatgattcaattatccccacctggccccacctttaacaggtgggggttattacarttcaaggtgagatttggttggggatacagctaaaccatatcagacagtttctaccaaccactttttccccctgcgtataagccatactttgtttcttttatatcacatatatttttgttattgaaaactggacatttaaaataatttaatggagcagctctggaaagcagattctctccacttctcaaagtttgttgttgttgctgcttgttggtgttgctattcatttgtttggtgacttttctgaatgaattctgtaaagtctgtattctctttcatgtgtggccactgacatttctgcttggttagcttaacagtgcgctaacaattgaacagagatttccttagatgcctggaaccattaagcctctttgcaagagggctctgtgtgtgttagggcatgccttcaatgctcaaccaggtactctgctctattttggcttcacttcttact

SEQ ID NO: 633913 - DNA, 632 bp, Homo sapiens
atgtccatgtgtacccagtgattagcttccaattataagtgagaacatgcagtatttggtattctgtttctgtgtcgattcacttaggataatggcctctgattgyatccatgttgctgcaaagggcatgatttcactttttcctgtggaagcatagtattccatggcgtgtatgtaccacattttcttcatccagtctaccactgatggccgccaaagttgattccatgtctttgctattgcaaatagtgctgcagtgaacatgcaagcacagatatcttcttattagaaagatttattttctgggggtatatacccagtaatgggattgctgggttgaatggtaattctatttttagttctttgagaaatctccaaactgttttccataagggccgaactaatttacagtcccaccaacagtgtataagcattctgttttctccacaacctctcaacccctgttaatttgtgttttttttttttacttttttaataataaccattctgagtggtgtgagatgatatcatatttgggttttgatttgcattctttgatgattagttataatgaccattgtttcatatgtttattggctgtttgtatgtcttcctttgaccagtgcctgttt

SEQ ID NO: 633914 - DNA, 632 bp, Homo sapiens
atgtccatgtgtacccagtgattagcttccaattataagtgagaacatgcagtatttggtattctgtttctgtgtcgattcacttaggataatggcctctgattgtatccatgttgctgcaaagggcatgatttcactttytcctgtggaagcatagtattccatggcgtgtatgtaccacattttcttcatccagtctaccactgatggccgccaaagttgattccatgtctttgctattgcaaatagtgctgcagtgaacatgcaagcacagatatcttcttattagaaagatttattttctgggggtatatacccagtaatgggattgctgggttgaatggtaattctatttttagttctttgagaaatctccaaactgttttccataagggccgaactaatttacagtcccaccaacagtgtataagcattctgttttctccacaacctctcaacccctgttaatttgtgttttttttttttacttttttaataataaccattctgagtggtgtgagatgatatcatatttgggttttgatttgcattctttgatgattagttataatgaccattgtttcatatgtttattggctgtttgtatgtcttcctttgaccagtgcctgttt

SEQ ID NO: 633915 - DNA, 632 bp, Homo sapiens
atgtccatgtgtacccagtgattagcttccaattataagtgagaacatgcagtatttggtattctgtttctgtgtcgattcacttaggataatggcctctgattgtatccatgttgctgcaaagggcatgatttcactttttcctgtggaagcatagtattccatggcgtgtatgtaccacattttcttcatccagtctaccactgatggccgccaaagttgattccatgtctttgctattgcaaatagtgctgcagtgaacatgcaagcacagayatcttcttattagaaagatttattttctgggggtatatacccagtaatgggattgctgggttgaatggtaattctatttttagttctttgagaaatctccaaactgttttccataagggccgaactaatttacagtcccaccaacagtgtataagcattctgttttctccacaacctctcaacccctgttaatttgtgttttttttttttacttttttaataataaccattctgagtggtgtgagatgatatcatatttgggttttgatttgcattctttgatgattagttataatgaccattgtttcatatgtttattggctgtttgtatgtcttcctttgaccagtgcctgttt

SEQ ID NO: 633916 - DNA, 632 bp, Homo sapiens
atgtccatgtgtacccagtgattagcttccaattataagtgagaacatgcagtatttggtattctgtttctgtgtcgattcacttaggataatggcctctgattgtatccatgttgctgcaaagggcatgatttcactttttcctgtggaagcatagtattccatggcgtgtatgtaccacattttcttcatccagtctaccactgatggccgccaaagttgattccatgtctttgctattgcaaatagtgctgcagtgaacatgcaagcacagatatcttcttattagaaagatttattttctgggggtatatacccagtaatgggattgctgggttgaatggtaattctatttttagttctttgagaaatctccaaactgttttccataagggccgaactaatttacagtcccaccaacagtgtataagcattctgttttctccacaacctctcaacccctgttaatttgtgttttttttttttacttttttaataataaccattctgagtggtgtgagatgatatcatatttkggttttgatttgcattctttgatgattagttataatgaccattgtttcatatgtttattggctgtttgtatgtcttcctttgaccagtgcctgttt

SEQ ID NO: 633917 - DNA, 619 bp, Homo sapiens
gggttttgatttgcattctttgatgattagttataatgaccattgtttcatatgtttattggctgtttgtatgtcttcctttgacmagtgcctgtttttgtcttttgcctgcttttaaatgggttattttttttcttgttaatttgtttaagttccttgtagattctggatattagtcatttgttggatgcgtagtttgcaaatattttcacccactctgtagattatctgtttcctacgttgataggttgcttttttttttttcctgtgcagaagtgctttagtttaattaggtctctttatcaatttttgattttgttgcatttacttttgaggacttagtcataaattatttgcctaggcaaatgtccagaagagtatttcctaggttttcttctagaatttttataatttgaggtcttacatttaagtctttagtccatcttgagtaattttttttgtataaagaggtcaagtttcattcttttgcatatggttagccagttttcccagtactgtttattgaatagagtgtcctttcccatttctttatttttgcccatgttgtcaaatatcgtttggttgtagatgtgtggttttatttcaagagtctccattg

SEQ ID NO: 633918 - DNA, 553 bp, Homo sapiens
gggtgagtgaaggaactcccagccaccacattcctgatgcagacccctgagattacagctatcgaagtttccatgacacccatagaaagttggactggaaaggggagctgcctggagaacaagcagaggcacagcttgaacctgcatggagcccagaagacatctctatattgtgcacctgcagcaaaatgtaaccatagctacccatctcccaaggctctcggacttacactgaatggctgcatctccttctgtctgccaggccaggaggcagcaggatctgggagcactctcacacccaagacagatcccaccaccattactatgggactgaagtacttttgatccatgagcccccttgcctaccagcacctcccaagaccacttgcctggccactcccacagtagggtgcccacagcccagcctccactccctagcacagagaagagtgtggtgcaggttcatgtgctggcatgggaactgggtamcctgccctttgcaaggctggaccaggaaaggtgtggcttgatagcctcagcttttcccctgggg

SEQ ID NO: 633919 - DNA, 588 bp, Homo sapiens
agagaaattcaattagttattagttcctcaactctgtggtctgcttccccaggaaaaagaaytgctcagttgttgacataaagctgggaagcagcacagtgagaagaacaggaggctttggtagtactaatccaacaggaaaggctgtattttgggttaatcaagtgtctgacaaaagacctatttgtacagtagacctgctgttggatgcttacagactgacacacaggcctggttggcagtagtctccggaaaaaataaatcatgcgctgctttgcgtagggcaagtcaagtcatcttgaagcttcagtttcatgtttaacctgcctctgctggagaaaaacagatttaataagcacacaggcatgatatgggctgaatgtgttcattgtggtgtttgtggcctttatgatgggaatgttcaacctctactactacattggtgcaaaacaaagtgaagccttcacaacagagttttaagacactgctctaggctatatttggactttctgaagtgaaatcagtggtcatcaactataaccacaaattcattgaaaacattggttatgttatttatggagcctataa

SEQ ID NO: 633920 - DNA, 588 bp, Homo sapiens
agagaaattcaattagttattagttcctcaactctgtggtctgcttccccaggaaaaagaattgctcagttgttgacataaagctgggaagcagcacagtgagaagaacaggaggctttggtagtactaatccaacaggaaaggctgtattttgggttaatcaagtgtctgacaaaagacctatttgtacagtagacctgctgttggatgcttacagactgacacacaggcctggttggcagtagtcyccggaaaaaataaatcatgcgctgctttgcgtagggcaagtcaagtcatcttgaagcttcagtttcatgtttaacctgcctctgctggagaaaaacagatttaataagcacacaggcatgatatgggctgaatgtgttcattgtggtgtttgtggcctttatgatgggaatgttcaacctctactactacattggtgcaaaacaaagtgaagccttcacaacagagttttaagacactgctctaggctatatttggactttctgaagtgaaatcagtggtcatcaactataaccacaaattcattgaaaacattggttatgttatttatggagcctataa

SEQ ID NO: 633921 - DNA, 588 bp, Homo sapiens
agagaaattcaattagttattagttcctcaactctgtggtctgcttccccaggaaaaagaattgctcagttgttgacataaagctgggaagcagcacagtgagaagaacaggaggctttggtagtactaatccaacaggaaaggctgtattttgggttaatcaagtgtctgacaaaagacctatttgtacagtagacctgctgttggatgcttacagactgacacacaggcctggttggcagtagtctccggaaaaaataaatcatgcgctgctttgcgtagggcaagtmaagtcatcttgaagcttcagtttcatgtttaacctgcctctgctggagaaaaacagatttaataagcacacaggcatgatatgggctgaatgtgttcattgtggtgtttgtggcctttatgatgggaatgttcaacctctactactacattggtgcaaaacaaagtgaagccttcacaacagagttttaagacactgctctaggctatatttggactttctgaagtgaaatcagtggtcatcaactataaccacaaattcattgaaaacattggttatgttatttatggagcctataa

SEQ ID NO: 633922 - DNA, 583 bp, Homo sapiens
atttaatgaaggaaaaaacttttaacctagaatagtatatccagcaaaattatccctcaaacatgaaggagaaatactttcacagacaaagaaagtctcaggtatttcatcaacacaaaaacgaaaagtaaagacaaaatttaaaaagtgggggacaagccaggtgtcgtggctcacacctgtaatcccagcactttgggaggmcgaggtgggcagatcatgaagtcaggagtttgagaccagcctgaccaatatggtgaaaccatgtctctactaaacatacaaaagttagcctggcatggtggcagatgcctgtaatcccagctacccaggaggctgagacaggagaatcacttgaaaccagaaggcaaaggttgcagtgagccaagatcaggccactgcactccagcgtgggcaaaagagcaaaactccatcttaaaaaaagaaaagagaaaaaagtgagggaacaaaattaaggtgtagagtcttttttagttttattttgcttgtttgtttttgtttgtttatgcaaatggtgttgttattagcttaaaataatgggttataaaatagtattggcaaa

SEQ ID NO: 633923 - DNA, 583 bp, Homo sapiens
atttaatgaaggaaaaaacttttaacctagaatagtatatccagcaaaattatccctcaaacatgaaggagaaatactttcacagacaaagaaagtctcaggtatttcatcaacacaaaaacgaaaagtaaagacaaaatttaaaaagtgggggacaagccaggtgtcgtggctcacacctgtaatcccagcactttgggaggacgaggtgggcagatcatgaagtcaggagtttgagaccagcctgaccaatatggtgaaaccmtgtctctactaaacatacaaaagttagcctggcatggtggcagatgcctgtaatcccagctacccaggaggctgagacaggagaatcacttgaaaccagaaggcaaaggttgcagtgagccaagatcaggccactgcactccagcgtgggcaaaagagcaaaactccatcttaaaaaaagaaaagagaaaaaagtgagggaacaaaattaaggtgtagagtcttttttagttttattttgcttgtttgtttttgtttgtttatgcaaatggtgttgttattagcttaaaataatgggttataaaatagtattggcaaa

SEQ ID NO: 633924 - DNA, 552 bp, Homo sapiens
taacctgtattataggccaaatagatctaatagatatttgcagagcatttcatccatagccaaagaattcacattcttttcctcagcacatggatcattttcatggatagacaatatgttaggtcaagaaacaagtcttaaaagattcaaataattgaaataawatcaagcattttctctgaccatcatggaatacaactagaaatcaataacaagaggaattttggaaactatacaaatacatggaaattaaacagtatgctcctgaatgaccagtgagtcaatgaggaaactaagaagaaaattgaacaatgtcttgaaacaaatgataattgaaacacaacatacccaaacctatagaatacagcaaaagcaatactaagagggaagtttgaacttctaagtgcctgtatccaaaaagaagaaaaacaacaaatcaacaatctaatgatgcatcttaaagaactggaaaagcaagagcaaaccaaacccaaaaatggtagaagaaaagaaataataaagatcagagcagaaataaatgaaattgaaacg

SEQ ID NO: 633925 - DNA, 552 bp, Homo sapiens
taacctgtattataggccaaatagatctaatagatatttgcagagcatttcatccatagccaaagaattcacattcttttcctcagcacatggatcattttcatggatagacaatatgttaggtcaagaaacaagtcttaaaagattcaaataattgaaataaaatcaagcattttctctgaccatsatggaatacaactagaaatcaataacaagaggaattttggaaactatacaaatacatggaaattaaacagtatgctcctgaatgaccagtgagtcaatgaggaaactaagaagaaaattgaacaatgtcttgaaacaaatgataattgaaacacaacatacccaaacctatagaatacagcaaaagcaatactaagagggaagtttgaacttctaagtgcctgtatccaaaaagaagaaaaacaacaaatcaacaatctaatgatgcatcttaaagaactggaaaagcaagagcaaaccaaacccaaaaatggtagaagaaaagaaataataaagatcagagcagaaataaatgaaattgaaacg

SEQ ID NO: 633926 - DNA, 552 bp, Homo sapiens
taacctgtattataggccaaatagatctaatagatatttgcagagcatttcatccatagccaaagaattcacattcttttcctcagcacatggatcattttcatggatagacaatatgttaggtcaagaaacaagtcttaaaagattcaaataattgaaataaaatcaagcattttctctgaccatcatggaatacaactagaaatcaataacaagaggaattttggaaactatacaaatacatggaaattaaayagtatgctcctgaatgaccagtgagtcaatgaggaaactaagaagaaaattgaacaatgtcttgaaacaaatgataattgaaacacaacatacccaaacctatagaatacagcaaaagcaatactaagagggaagtttgaacttctaagtgcctgtatccaaaaagaagaaaaacaacaaatcaacaatctaatgatgcatcttaaagaactggaaaagcaagagcaaaccaaacccaaaaatggtagaagaaaagaaataataaagatcagagcagaaataaatgaaattgaaacg

SEQ ID NO: 633927 - DNA, 552 bp, Homo sapiens
taacctgtattataggccaaatagatctaatagatatttgcagagcatttcatccatagccaaagaattcacattcttttcctcagcacatggatcattttcatggatagacaatatgttaggtcaagaaacaagtcttaaaagattcaaataattgaaataaaatcaagcattttctctgaccatcatggaatacaactagaaatcaataacaagaggaattttggaaactatacaaatacatggaaattaaacagtatgctcctgaatgaccagtgagtcaatgaggaaactaagaagaaaattgaacaatgtcttgaaayaaatgataattgaaacacaacatacccaaacctatagaatacagcaaaagcaatactaagagggaagtttgaacttctaagtgcctgtatccaaaaagaagaaaaacaacaaatcaacaatctaatgatgcatcttaaagaactggaaaagcaagagcaaaccaaacccaaaaatggtagaagaaaagaaataataaagatcagagcagaaataaatgaaattgaaacg

SEQ ID NO: 633928 - DNA, 608 bp, Homo sapiens
ttttcaaattgtaataaagccaggtctaggtcaggttttagaaattcattatatcctgatgcttaatctagaaactgaccctgtaattctgaagctatatgtcaatkggttggctttttaaatctatgtatgtatcatctatctatcttctctattgattgtagatcttaaactcaaaattcagcctttttcatggttttaggtacattgagttttctattttcccttgagtcaattttagtaaatcacatttgtattttcaggaaattgcctaagttttcaaatttgatggcagaaggttgtacaaacctttcttttattttttatttatttttttgagacagggtccggttctgctgcccaggctggagcacagtagcacaatctcagctcacaacaacctccacctcccaggttcaaacgatcctctcacctcagcctctggagtagctgggaccacaggggtacaccaccacgcccgactaatttgtgtattttttgtagagatgggtttcaccatgttggccaggttggtctggaactcttgatctcaagtgatctgcccacctcagcctcccaaagtgctgggattataggggtgtgccatc

SEQ ID NO: 633929 - DNA, 549 bp, Homo sapiens
aagtgtgaataaatacacacttgtaacttcttgatttgaatgacccacctagttatataaaccacatttaaggaccaggatggcctgttaaattaagaatgtttttggcagataaaagggaaatactaggaaccttgttttttctgcctttggttaacatataattaactcagtaacaaatttctatgtgcctacagtcttgaaatttaaataattccactaatactaggttgatccaacgcaaaggttttcaagccttaaagtaattaaatgttatctttttcagtaaaataatgtatttttgcccaattaaaatagggcaatatcggtggatttttgtaccctaaagtattccacaaaggaattcaaaagttagggggagaaaataaagaattctaagtttgtttgttcttaaaaggctcaaaaggtcactatcattctaatatrtctcattagaagttaaaaattattaaataaacctacacataaaagcatacatatatgagtaggtttatgttcttctttagttagtacttttggatatatata

SEQ ID NO: 633930 - DNA, 320 bp, Homo sapiens
tattacaaataaataccagagatttgaatccaggtagtctagctttggctatactcttaaccacaaaacaaagttgcttttaagaacttaaaaaaaaaaataaaaaaaatcccaccatcctcataaaratgacaatgtgccaggtttttagtgacacttactgctttgcataatgcagcctatgagacattgctaccaatgtggaagaggggggtagaatgacaccttataagatcattgaaggagatgttacattcatctagaaaactttgcatgaaatgttctcctcctttctcttcccacctctttattgattaact

SEQ ID NO: 633931 - DNA, 538 bp, Homo sapiens
atgtcatatcctatcgaggtatttctatgacactgttgcggtttagtctggctgttccccacatctactgctcagctgttagaaaacttccatccgccattattcctggaactgccttctctctctcctgtcttgaattctctatttccaggatctcatgtctccttcttttattttctcttttgggaaagctcatcattgagatcttgaatttctaaaaaatgttttaatctagcttcataatcgatattattgttttgatagtttcctcatctgtattctccatataagaaattttatttatttttttcagaaacatttgtcatttagatactgcccatcctacgttgattctctttttttcttttttcttatcttttttcccatatttttttctttgtctttattttctctatttgtaatgattttctcaratatatctttcaaaccttcagttgaatctttaatttctggtattccatgtttaatttccaatagctctttcctgtttttcaaatattcttcaaaagattttatt

SEQ ID NO: 633932 - DNA, 606 bp, Homo sapiens
agcaaagaacattaaagaaatcattacataattaattaatgaattacacttgcactaagtgctttggagtaaaagacagtgtgtgagaggatacaaaaagggagaataatgtgttctgatgcacaggtgtgtgtgtgtgtgtgtgtgtgtgtgtgtgtgtgactaagaattaactaagcaaagttaaggagtggaggtgacatgtggaaggggaggtatcccaggcagagggaatagkatggttacagattatgtagtccaaaggctggatgaaagtgtgcttgttcaggaatggaaaggacacctgcatggctggaggacagtgagccaataggaaagaagtgcaagaggagagggcaagatgagtgggcaggggacagcatactcaggtccagcaaagccatacccaagatttaaggaggcactcgatccagtctgggttttgttttttttttttttaaagattactcttcttgctgatggaaaattcattgaagggagaacatttaactgctgtgtgggtgtaaaattatgtaatcattctgataaatgatttggcaaaatgtatccagagcctttaaaaattcatagcccttggtctgttct

SEQ ID NO: 633933 - DNA, 606 bp, Homo sapiens
agcaaagaacattaaagaaatcattacataattaattaatgaattacacttgcactaagtgctttggagtaaaagacagtgtgtgagaggatacaaaaagggagaataatgtgttctgatgcacaggtgtgtgtgtgtgtgtgtgtgtgtgtgtgtgtgtgactaagaattaactaagcaaagttaaggagtggaggtgacatgtggaaggggaggtatcccaggcagagggaatagtatggttacagattatgtagtccaaaggctggatgaaagtgtgcttgttcaggaatggaaaggacacctgcatggctggaggacagtgagccaataggaaagaagtgcaagaggagagggcaagatgagtgggcaggggacagcatactcaggtccagcaaagccataccmaagatttaaggaggcactcgatccagtctgggttttgttttttttttttttaaagattactcttcttgctgatggaaaattcattgaagggagaacatttaactgctgtgtgggtgtaaaattatgtaatcattctgataaatgatttggcaaaatgtatccagagcctttaaaaattcatagcccttggtctgttct

SEQ ID NO: 633934 - DNA, 654 bp, Homo sapiens
atgactaatgcctgcctacttcagtaaactataaactccacgggaatagaatctccaatattttatttcttaccattgaaaatccaatccagaggctatatttgtgtgtgtatatatatatatatatacacacacatatgtatatatttttgcatacacgctgctcaataaacattttattcatttgactgaaagaaaatcatttgtctataagaaaagggaggttttccccaaagtacttttagatcagcaaaggtcaaattaagccttgaaacttytgatttgtgattatgttctatgcagagatgctacaaggcaggacactaattaattctccgtgttataggccaaggaagtgtcttgtagcacttgccacctaaaaatagtcttaaaagataaaaagaagttagccaattaaagtggagtgaatttcagggtgtttaaagccttatggagagattgagatgtggaggccaatcatggaaaaaatatgaccatgatgtggcagtagcacacacaagctttgtgggtgacactttgacaggtttgaatgcaggggaagtcccttccagcaggagtgtgttctcaggcaaaggcatagaggttgctacttacaagagaagggcagggaaactcccaggagacagtcagagg

SEQ ID NO: 633935 - DNA, 612 bp, Homo sapiens
ttaatattttatttattttctcagttttaaatcctttagtccmagacggttaaggcactctaaatcacaggatgagataggaagtcagcacataatacaggtcataaagaccttgctgataaaacgggttgcagtaaagaagccggccaaaacccaccaaaaccaaaatgacgatgagagtgacctcttgttgtcctcaactctacactcccaccagcgccatgacagtttacagatgtcatggcaatgtcaggaagttaccctatgtggtctaaaatgcagaggcatgaataatccatcccttgcttagcatataatcaagaaataaccatataaatgggcaaccagcaacccgtggggctgttctgtctatggagtagccattcttctactttcttaataaacttactttcacttgaaaaaaaataaaattaaattcttcagtcctcatctgtacctggtgtttcctttcggtaatgagtttccaaaaatggccctgtcccataatgaacccacatctcctggtggtcacatttttctgtgctccactcatcttaaatctgtgctggccttgtgagcgtcttctgaccaatataatgtggtagaagtgat

SEQ ID NO: 633936 - DNA, 612 bp, Homo sapiens
ttaatattttatttattttctcagttttaaatcctttagtcccagacggttaaggcactctaaatcacaggatgagataggaagtcagcacataatacaggtcataaagaccttgctgataaaacgggttgcagtaaagaagccggccaaaacccaccaaaaccaaaatgacgatgagagtgacctcttgttgtcctcaactctacactcccaccagygccatgacagtttacagatgtcatggcaatgtcaggaagttaccctatgtggtctaaaatgcagaggcatgaataatccatcccttgcttagcatataatcaagaaataaccatataaatgggcaaccagcaacccgtggggctgttctgtctatggagtagccattcttctactttcttaataaacttactttcacttgaaaaaaaataaaattaaattcttcagtcctcatctgtacctggtgtttcctttcggtaatgagtttccaaaaatggccctgtcccataatgaacccacatctcctggtggtcacatttttctgtgctccactcatcttaaatctgtgctggccttgtgagcgtcttctgaccaatataatgtggtagaagtgat

SEQ ID NO: 633937 - DNA, 509 bp, Homo sapiens
aagcttgtctgagttcctggcctcaatttctctgtaagtggaaayagttaacattaaatgaaatgttaaaagcagataaatgttataaataagcaatcagagacaaatgctacagtcactcttctaggtgcattgtcaggaactcaacctatcaatcacaaagctaaatacagtgaagttgacatctatgtacattctcaaaggtccaggataatgagcaccttgcaactacaagcatcaattgtgcacacctgctagagtggaagaggaaaaacattgagctggtggagaggagtataaacatcatcccttccatcactttgcttatgttaaatttctgttagagcatttacaaaatcatgctctgattctgagaaccctccacatgagaatgaagaagtcctgtagataattcacaaaatgagggcgaaataaaatataaagtattgatattttgtctccacttgctgtttctaagagtaaaagaagcaatgaactacattaatggt

SEQ ID NO: 633938 - DNA, 525 bp, Homo sapiens
ggcaagaacatttacagacattagggcgttaacctatccagcagaacaaaggaatgaaattggcttttttgatctccttgcaaattgtgctaattactggctaacattagttaattcagtcttcacataaatcctataaagtaggaattattctccatattttatagatgagataaataaagcttagaacagctgtccaaagtcatagacatcaaaatttagaaatacatagattcatatttaaccgttatgtctctatgtcttaattccttttctgttgtttataacaatagctggaactgggtaatttataaagaaaatgaatttacttcttacagttacggargctgagaagtccaaggtccaggggtggcatatgctgagagccttcttgctgttggggactctctgcagagtcccaaggcagcacagtgcatcacatggcaagggggataatgtactgggtcaggtctctctttcttttcttataaatctaccattctcattcctggataacccattaat

SEQ ID NO: 633939 - DNA, 628 bp, Homo sapiens
caacacaaacttacagttttaagcttgaaacaaataggtaacagaaataaaacaataaatttaattgcttggatctagagttaaattttcatagygccacggtggaaaagtcatttcctatataatgtattgagttaattacattgtgaagttgatgggggagacaaaggtctagagaatttttgtgtaacttttatttatttatttatttttacagataaggtcttactctgtcacgtagggtgcagtgcagtggcacaatcatagcccactgtaatctcaaactcctgggctcaagcaatcttccagactcagactcctcagtagctgggactacaggcatgcaataccgcacccagctactttttaaatatttttagagatggggtttcactatgttgcccaggctgatcttgaactcctgtacttaagtgatcctcctgcctcagcctccctagtagctgggattataggcataaaccaccacacctagcctccgtgtaactttttaatgaagatgtttgtttctcaacatataatttagagtataatacatgtaattatgtgtggaattttgtagcctgtcaggaagattgtcacataaaagtttgtttgtaaaaatatgtgt

SEQ ID NO: 633940 - DNA, 542 bp, Homo sapiens
tttacacttgttgaattaatagtgcctgaaaatctgaattttgtcagaatccagtacaatatagttgccatggtgcctttacccaaaataggcttstcaaagaagtccagaaacaaaatataaaatctgttatggactgaaagtttgggccctcccaaaatgaatatgttgaaatcctaccccacattgtgatggcattagaaatggaaacttcaagatgtaattaggtcataagagtggagccctcatggatgggattagtgcctttatgaaaggtaattcagagagctctctgggggctgtttccaccacgtgaggagacaatttgaagatggtagttggaaacttagaaaaggtccctcaacccaattggccatgatggcaccctgatctcacatttccagacttcaaaactatgagaaatacattctgttgtttataaccagacattctatggtattatagcatcccaaactgactaagacaaaaaatcaatagctaccaatgttgttaaattctgtaggctgagaaagcatacatct

SEQ ID NO: 633941 - DNA, 588 bp, Homo sapiens
agaattttatccatgtttcttgttaagaaaaataaacaaatttcaaaagaaaaccaggtatagtcccatttttataaaaacaaaaggtaactatacacataaagttgtttttgcataggagcaaattttcaagtaatatattctaaatatgcacctaagcacagataaggaggatgaatatttctactttttattttgtgcatttctgtgttactgaatacattagagtaggcataatctatgcttccagccacaaagagttaatgggtataggatttgccctcccagaaacaagagaaataggtggaatgctgacacaatgttttttaaacattggaaaagaaaaagcaaatgactgattatttaacaaagggaaacaaaggaggttatgcctatcacttggccctggcttactggtagagttttgacaccacagtttaaaaattgggaacctgaactgagttcagcagacttactgaactgaggaaacaaagataggtgttyagggaggcaaaggttgctgtgcgagaacaccccaagatgaagctgcacggagagacagatcaggataattctaggtaataaact

SEQ ID NO: 633942 - DNA, 520 bp, Homo sapiens
tacactgctagattttatttgctaactttatgtaggatttttataactgtcttgataattaagattgccttgttatttttctatttatatccttacttgatttttacaacagggttatcccagcctcataaaattactagaagaatatatgctgattctataaaataatgtgaatgagttaaacgatattctcttaggatgtttgggaggtttaacctgtaaaagcaaataaatgtgtatataaacacaaacattgtcaacaaaatactagcaagccaaattcaaaatgatatgaaaagtattatcagcataatcaagtgggatttatctcagtaatacaaagctgttttaatattcaaaaacaatagataggtcatattaayagaatagaagaaaaaaattacatgcccataagaattgatgcagaaaaagcatttgataaaatccagtactctttcacagtaaatctctcaacaaactataataagaacaaaagagaatttcctcagcctaacaaaga

SEQ ID NO: 633943 - DNA, 596 bp, Homo sapiens
attatcagcataatcaagtgggatttatctcagtaatacaaagctgttttaatattcaaaaacaatagataggtcatattaacagaatagaagaaaaaaattacatgcccataagaattgatgcagaaaaagcatttgataaaatccartactctttcacagtaaatctctcaacaaactataataagaacaaaagagaatttcctcagcctaacaaagaacaactaagaaaaattgacagccaacatcatagttaatagtgaaagactaaaaggttttcacctaagggcagggacagaacaaggatggccactcccaccacttcaatccaactttgttggaagatttagccaggaaaattaggtaagaaaatgaaataaaataaataggaagggaagaagcagatgacaaaaacatgtatatagaaaaaaatccactaaaactttctaagaactgatgcacaattttagcaagttttcaagttacatgattaagatataaaaatcaactgtatttctataattaatatgactaatattaacagtgagcaatttgaaaaggaaattaaaaaataagtatgacaattccatttaaaa

SEQ ID NO: 633944 - DNA, 673 bp, Homo sapiens
atccctgtgcaaaagaatgatgttacaactcttcctcattatatactcaaaatatttattcaacatggatcattgactaaaagtctcccccatcaagaaaaaagatacagaaacgactaacaaacacatgaaaatatcttcaatgtcattagttcactttgtgaatataataaacacccttacattatacacttcatatggttgaattttatatgtgaatgtaaatatacctaaataaagtgttaaaaatgggaccagtagacacagattatgaagtatcaattcaattccttaagtgggtttaggacaatgaataattctttgaaatatatttttctaagtaattattcactttatatagggctttaacttatagagattaaatgttcataacattttatcagttttaatgtgtctttaatttgttgtatctccatgtcctcttctttgrcttttctatatgttttgcctactctcttatttttggtcaatcttctcaaattttcctattttattcattttttccccaagtgctgacttacagttctgttagtcttctcttttatattttttgtttatatttaatttattttttaaactattttctttggttttattatattattttcttatatcttaagtgggatgcttgtctcattgatttacagccttt

SEQ ID NO: 633945 - DNA, 547 bp, Homo sapiens
acttatgtattaactggaagatctggagtgtgagaggtggaactcactctatgtgtgattaatcaggaagttgcttattttagggggcatcccaaaactgtacktattagtattgttttgattttaatgttttcttaactctgtaatttaaattttcattttattattctggttttatttttattgttctggttttatttttattgttctgtttttttatctcttgttttatcaaaagtaagttttcattaagttcttctatagtgcagttgttgtagaaatgcaatttctgttccctgtattgtatttttttccagattgtatttttttcttgtttttttcagatgtgttcatttatccttctcatttttgcttctgtttatttctctggtatgcttattttttaaattcttgctcagacttgaaagttttttcagacttttgaaataagaattcaatttcatataagtgacttctgttttacttaccttttatcattattgaggcatagttgtcatctcctctgactcagagttcaaggactgtg

SEQ ID NO: 633946 - DNA, 528 bp, Homo sapiens
aattctttaataatgaatgctagtgttgcatagttgatctataaggtatcctctagtttttaaatcatataaatacaattttttctcatgcttaaaaataaaattaatatttagactattatttacactctgttttaatactataaaatacatgtagtacataattctataaaatttaataaatatgtgttaattgcygaccattttactaagcattatggagaaaaaaatatgaagacctagagtttttagaaagagagaagagaaaaatgagacaaacgttttaataactaaattatagaatggagtatgataagcatcataaggtacatatttaataaatgcatataggggttcagatagcatagagattatagtttcagacaaaaaaaatcatgcagaagtgaggtttgagttaggtcttaaaggaagagatgcagaagggaagaaacagcatgaccagaaaaggtaaagcttggattatggaagcttggaaagcattaactattttcttatatctgaattcag

SEQ ID NO: 633947 - DNA, 572 bp, Homo sapiens
tagttgtccttttttgttatgccttatactgattttggtatcagggtgatactggcttcatgaattagggaggatttccttcttctcaatctttcggaatagtttcattaaaattggcacccattcttctttgaatcgttgcccatctggccctggacttttttttgttgttggcaattttaaaattactggtttaatctcatggcctgttattgttctgttcagtrtttctatttcttcctaatttaatctaggagggttatatgtttcctggaacttatacatttcctctgtattttcttgtttatgtgctagaggtgttcatagcagtctcaaatgttcttttatatttctgtggtgttgcttgtaatgactccagtttcatttctaattcagttgattcgaatcacctcttcttttcttgattaatcaagctaatggtctaccaactatgtttattttttccaagaccagctttgtgtttcatttatcttttgtattgttaattggataagttatttttggtggacagttacaatttcagtcttcaacatatggaatttagggtacaa

SEQ ID NO: 633948 - DNA, 572 bp, Homo sapiens
tagttgtccttttttgttatgccttatactgattttggtatcagggtgatactggcttcatgaattagggaggatttccttcttctcaatctttcggaatagtttcattaaaattggcacccattcttctttgaatcgttgcccatctggccctggacttttttttgttgttggcaattttaaaattactggtttaatctcatggcctgttattgttctgttcagtatttctatttcttcctaatttaatctaggagggttatatgtttcctggaacttatacatttcctctgtattttcttgtttatgtgctagaggtgttcatagcagtctcaaatgttcttttatatttctgtggtgttgcttgtaatgactccagtttcatttctaattcagttgattcgaatcacctcttcttttcttgattaatcaagctaatggtctaccaaytatgtttattttttccaagaccagctttgtgtttcatttatcttttgtattgttaattggataagttatttttggtggacagttacaatttcagtcttcaacatatggaatttagggtacaa

SEQ ID NO: 633949 - DNA, 368 bp, Homo sapiens
aattaaagcctacatttgttcaggtataaaattacttcctaaagaaaattctatatttgagtacatccacctrtggcagaggtgccaatccaatattctttggccattcgttccaataagaacttcaatttttcagtggacattttgccatccagctgaaagtctttatttcccagcatcacttgcacagagacctaatcaatgactatgttttggccaataagatgtcattgaaagcattttgcgtctacactgcagccatgtgctgcataaggatgtttcagtcaactagggaacacatatatgctggtgggctagtaagattataatgcgcatatacagaaacctgatttatggcattgatattg

SEQ ID NO: 633950 - DNA, 368 bp, Homo sapiens
aattaaagcctacatttgttcaggtataaaattacttcctaaagaaaattctatatttgagtacatccacctatggcagaggtgccaatccaatattctttggccattcgttccaataagaacttcaatttttcagtggacattttgccatccagctgaaartctttatttcccagcatcacttgcacagagacctaatcaatgactatgttttggccaataagatgtcattgaaagcattttgcgtctacactgcagccatgtgctgcataaggatgtttcagtcaactagggaacacatatatgctggtgggctagtaagattataatgcgcatatacagaaacctgatttatggcattgatattg

SEQ ID NO: 633951 - DNA, 542 bp, Homo sapiens
aaaatctatgagttttaaatagtgtggtaaacagtggatttaactacgtatattttctgagataatcattgggtgatcttccacttgaatagtattgaaaggttatgttgcctatatttttgtctatttttttaaattttgaataatttaccgtaatatattaaggattatcttttttacttaaaagataatttacaaactgggtaatagatgtgcaatttatatcactgacaaaacattaagtgaagaatatatagtctttaagtcaattaaaaaaacagctcaccagaaaaatgggcaaaagcaacagatgctggagaggatgtggagaaacagaaatgcttttacactgttggtgggagtataaactagttcaaccattgtggaagacagtgtgatkattcctcaaggatctagaactagaaataccatttgacccaacgatcccattactgggtatatacccaaaggattataaatcatgctactataaagacacatgcacacatatgtttattgtggcactattcacagtagcaaag

SEQ ID NO: 633952 - DNA, 593 bp, Homo sapiens
gtcatgaacaatctggggacatggattgactggcagtacctacagaatgcagccaagctcttggccaggtgttgatacaccctgcagtacatcaacccatatacatattacatggagtctggacccaggaatgagctgtttgaataccagcaggctgagcaggaggctgaaattgaaaacctctcatggaaagtggagcatgcagacagctatgacagaggggacttggagaaccagatgcatgtagccgagcagtggaggagaaccctgctgaaggatttccatgacacctaagttgggatgtggatgtgcgggggtgaggaagataaggctgcaaggtctcctggctgccctactacatgctgcaggctctgcctttcatgacccctggcgacagccagggccccactcctgagagacactggcaacacctcwtagttaatttctgttttcttctcttctcactttttgtttctgccagggtagaggccatgttgaactggtctcttttcaggacttttacttccccctggatggttgttgagagggagggaaagtgttttttggatagctattaataatattagatcatt

SEQ ID NO: 633953 - DNA, 617 bp, Homo sapiens
atgagttaatgggtgcagcaaaccaacatggcacttatatacctatgtaacaaacctgcaagttgtgcacatgtaccctagaagttaaagtataataaaaaatgaaaagaaaagaaaaataaaaaaaaaaaagaaaaatgggcaaaagacgtgaacatgagttttacagaaagtaaatagcattkggccatgatattgtttggctctgcattcccactcgaatcttatctggaattgtaatccccatgttttaaagaggtacctgatgagaggtgactggatcatggagtggctttccccatgctgttctcatgatagtgagggagttctcaggagatctgatggttttaaaagtggcagttttcacttgtgctctctctctcctgccatcttgtgaagaaggtgcctgcttcccctccaccctccaccatgtggaactttgagtccattaaacctcttttgtttataaattacgcagtctcaggtagtatctttatagcagtgtgaaaacaaactaatacaggccagtaatcatgtggagagatgttctaccttatttgagattagagaaacataaatttggactgtgcataggcaccatttcatacccattctat

SEQ ID NO: 633954 - DNA, 561 bp, Homo sapiens
aatgtaccaaaagctagaggactctacttagacctgaactcacttaggttcacggaaataaatatctcctattcctcatcaggatgatctgttctttagtacagctgaaactggccacactaaatacagtgatcaatatctgtgatgtctagtaggccttcctggttgcattggccatagcgtcctgttcagacaggtggactaggattgccattaattggacttgatttggctcagtggaattccatttgtaaaacaccttagtacaataattcttacctgtaaaacagcagcaatttgctaaaccaaatagaatatatcccttcttaatttagactacagaatccaaaatggactggcaagtttgaaacaagcarcaaaacttcggacagaagtagatacacaattagagagaaagagttggtgagaacaatggatacaagaactgccttatgtgcttttgctttctgccacttatgtatcttcgcattaatgtcattcttcttatcgtaccctgtgtgattctcatttctctaaaaccaaatatcatctagagaatat

SEQ ID NO: 633955 - DNA, 566 bp, Homo sapiens
gaattcgtgccatcccacgaggcgggtggatcacgaggtcaggagttcgaaaccagcctggccagcattgtgaaacctcatctctacctaaaatacaaaaattagccaggcatggtggcacacccctgtagtcccagctactcgggaggctgaggcaggagaatcgcttgaacccgggaggcagaggctgccgtgagccgagatcacgccactgcactctagcctgggtaacagagcgagactctgtcgcaaaaacaaaaacaaaaacaaaaacaaaaacaaaaacaaarcagaaaaagagaaaagaaagaatgaaaaagaaaacattcataagagtaacttgaaagaaaatttctgatcctagaaaatcagtgataataaggtttgtctgttttcttctccttcgaaatgtatgattcagtcaccttttctcaaatgttctggttttaaatagctatccctgaataataaataaccacaaaaactcagtggtgtaaaaataaagcatttatttctcagtcatttgtctgcaaattggctgtggttttgtagaactaagctgagct

SEQ ID NO: 633956 - DNA, 626 bp, Homo sapiens
aagcttacaggtgttttatctgattgaggaatttcaaactgttcgtaactacttagtttttgatacgtttctgctctcagtataatatgtattatgcaaattctatatattatacatatataatacatatttttcagtctgattaataagaatttaaatgaagtaattcagtttaaggtactaagagtaaaaatatgatatttaattgaaatttatgactcccttccatcttccaccattaatgattctttttgtcctaattaagaacatatctaaaacagtgatatttgggggtagaaaaggcaaaatgtcctgagaattaaagctgttttttttgcctaagacttggtaaaatgtttcatccaattttttatctgtcattttgtgaaatatacaattcatactggagggtattgaaacattaaacaaaatagcaaagtgcaattaattattttaagaactcattaagataaaaacaacaaagatagtaaaagcaaagaaatctgacataatgttttgattacagtcatatgtcacataatgacaggaatacactctgagaaatgcatctttaggtgatttttgtcattgygtgagcatcatagagtgtaactacacagacctgg

SEQ ID NO: 633957 - DNA, 514 bp, Homo sapiens
gcaccatttcatacccattctatttgcaaacattggtaagtgtgatgctatgaaatgttggagaaaatgtggatttaaaaagattcttataaattgttgtaggtaaacactttaaaatattttaacattcctttgtgtgggtaaatattcacacgtcaaatartcacagattcaaactccttatatacacccaggagaaaatattgtacctatacactgggaatcacatacaaggaaggttagtagagatttagacatatctttaagagaaaaacaagaaaaatgcagtcaattaaaaaaacagatatattcacgtggaaaaatattgtttagtagtgaaataaatgaatcatacctagttacaggtaacagcagaatgatattgaatgaaacacagaatagatgaaacatagaataatattgaccctaaaattaatttctataaaattatgccaaggtcactgtgtcgtaaacattcacattgaatttcatgtacaagtaaccctccagtgag

SEQ ID NO: 633958 - DNA, 614 bp, Homo sapiens
gtttattgcagcactattcacaataacaaagacttggaaccaaccgaaatactcatcaatgatagactggataaagaaaatgtggcacatatacaacacgaaatactatgcagccataaaagaggatgagttcatgtcctttgcagggacatggatgaagctggaaactatcattctcagcaaactaacacaggaacggaaaaccaaacactgaatgttctcactcataagtgggagctgaacaatgagaacacatggacacagggagaggaacatcacacactggggcctgtcaggggatggtgggctatgagaggaatggtattaggagaaacacctaatgtagatgacaggttgatgggtgcaacaaaccaccatggcacatgtgtacctatgtaacaaacctgtatgttctgcacacgtacctcagaacttaaagtataattttaaaaaataagtttttaaatatccacttttataagctttcttcwattttaaaaatgttttatttttgttaattttttaaatctttttgttaaaaaaactaagacacaaacacacacataagcctagggccaatacagggcctatacagggtcaggatcatcaatatc

SEQ ID NO: 633959 - DNA, 563 bp, Homo sapiens
acaaataaacaaaatgactaactagattcgctgtcattgctccctctaaggaataggatttcaataatctatctaacagatatcaccaaatggtcttctgtaaaaccaaatccttaattattgctacaaatgggaaataacrtatagcctgtgtgaatccagaatgtaaataaaacacaaaatcacagttaaaataaaaacaaaactagagagacaaagttaaagttcttttactggttggggtgaaatatgggaagtaaaaaaatgcctagcaggtcatagcatatatgcgtttctttggcaagagcgtttacttggctgtctcaggtgaatctacatggacgtctcagtgagagctccaaaaatcagtgaagaatcggttttgacagggccaaatcatgacttttatgcaaatataaaataagtacaatttgaacgttttatttaacttattaaataatgagaaaagcattttaaagttaaaagcaatcaaaagaacatttaagaaactagccaaatatttgtatatatatctagatatatatatatgtctaggtgtcaca

SEQ ID NO: 633960 - DNA, 573 bp, Homo sapiens
acaccaacatctgctcagcttctggtgagggcctcaggaagcttacaatcatggcagaagatgaagtggaagcaagcatgttacatggtgagagccagagcaagagagaaagaagggggaggtcctagacacttttaaacaaccagatttcatttgacstaactgaatgtgaactcacttattaccaaagggatggtactaaaccactcatgagagatctgcccccatgatctgaccaccttccaccagttccctcctttaacattgggaatcatatttcaacatgagatttgcaagggacaaacatccaaaccataaaatcttaatggcatctagaatgataaatcctttccggtaggttttcaatgtactaatttcaacagggaaatcactatctttggtagctatagccttacaaactatatttcttaaataataagacttgaaaatcaaaattaccctttgagccactgcctgcagactggatgttgtattagcaggcatgaaaacattagccttcttgtatatctctatagggctcttgggtgactaggtgcattgtcaatgaatttg

SEQ ID NO: 633961 - DNA, 573 bp, Homo sapiens
acaccaacatctgctcagcttctggtgagggcctcaggaagcttacaatcatggcagaagatgaagtggaagcaagcatgttacatggtgagagccagagcaagagagaaagaagggggaggtcctagacacttttaaacaaccagatttcatttgacctaactgaatgtgaactcacttattaccaaagggatggtactaaaccactcatgagagatytgcccccatgatctgaccaccttccaccagttccctcctttaacattgggaatcatatttcaacatgagatttgcaagggacaaacatccaaaccataaaatcttaatggcatctagaatgataaatcctttccggtaggttttcaatgtactaatttcaacagggaaatcactatctttggtagctatagccttacaaactatatttcttaaataataagacttgaaaatcaaaattaccctttgagccactgcctgcagactggatgttgtattagcaggcatgaaaacattagccttcttgtatatctctatagggctcttgggtgactaggtgcattgtcaatgaatttg

SEQ ID NO: 633962 - DNA, 573 bp, Homo sapiens
acaccaacatctgctcagcttctggtgagggcctcaggaagcttacaatcatggcagaagatgaagtggaagcaagcatgttacatggtgagagccagagcaagagagaaagaagggggaggtcctagacacttttaaacaaccagatttcatttgacctaactgaatgtgaactcacttattaccaaagggatggtactaaaccactcatgagagatctgcccccatgatctgaccaccttccaccagttccctcctttaacattgggaatcatatttcaacatgagatttgcaagggacraacatccaaaccataaaatcttaatggcatctagaatgataaatcctttccggtaggttttcaatgtactaatttcaacagggaaatcactatctttggtagctatagccttacaaactatatttcttaaataataagacttgaaaatcaaaattaccctttgagccactgcctgcagactggatgttgtattagcaggcatgaaaacattagccttcttgtatatctctatagggctcttgggtgactaggtgcattgtcaatgaatttg

SEQ ID NO: 633963 - DNA, 573 bp, Homo sapiens
acaccaacatctgctcagcttctggtgagggcctcaggaagcttacaatcatggcagaagatgaagtggaagcaagcatgttacatggtgagagccagagcaagagagaaagaagggggaggtcctagacacttttaaacaaccagatttcatttgacctaactgaatgtgaactcacttattaccaaagggatggtactaaaccactcatgagagatctgcccccatgatctgaccaccttccaccagttccctcctttaacattgggaatcatatttcaacatgagatttgcaagggacaaacatccaaaccataaaatcttaatggcatctagaatgataaatcctttcyggtaggttttcaatgtactaatttcaacagggaaatcactatctttggtagctatagccttacaaactatatttcttaaataataagacttgaaaatcaaaattaccctttgagccactgcctgcagactggatgttgtattagcaggcatgaaaacattagccttcttgtatatctctatagggctcttgggtgactaggtgcattgtcaatgaatttg

SEQ ID NO: 633964 - DNA, 577 bp, Homo sapiens
tgtaaacacatgtgctgtcatctaggctttgttctttaacttacagagcacaggaagaataggcttagcataattcttaaatgctttaggawtttttgaatggtaaatgagtgccagcttcaacttaaagccacgagctgccttagcccctaataagagagtcagccagtctttgaagctttgaagccaggcattgacttctctctagctatggaagtcctgcatagcatcttcatccagtggaaggctgtttcatccacatggaaaatctgttgtttagtgtagccgcttagctaaatctcgataacttgctgcagcttctaaatcagcatctgctgcctcattttgcattattatgttatggagatggcttctttctttaaaactcatgaaccaaccttgctggcttcagacttttcctctgcagctttttcacctctctcagccttcacaaaattgaggacacttaggtcttttctttggattaggttttggtttaaaagatgttgtggctggtttgatctcctatccagaccactaacattttctccatatcagcaatgaggctgttttgctt

SEQ ID NO: 633965 - DNA, 577 bp, Homo sapiens
tgtaaacacatgtgctgtcatctaggctttgttctttaacttacagagcacaggaagaataggcttagcataattcttaaatgctttaggattttttgaatggtaaatgagtgccagcttcaacttaaagccacgagctgccttagcccctaataagagagtcagccagtctttgaagctttgaagccaggcattgacttctctctagctrtggaagtcctgcatagcatcttcatccagtggaaggctgtttcatccacatggaaaatctgttgtttagtgtagccgcttagctaaatctcgataacttgctgcagcttctaaatcagcatctgctgcctcattttgcattattatgttatggagatggcttctttctttaaaactcatgaaccaaccttgctggcttcagacttttcctctgcagctttttcacctctctcagccttcacaaaattgaggacacttaggtcttttctttggattaggttttggtttaaaagatgttgtggctggtttgatctcctatccagaccactaacattttctccatatcagcaatgaggctgttttgctt

SEQ ID NO: 633966 - DNA, 577 bp, Homo sapiens
tgtaaacacatgtgctgtcatctaggctttgttctttaacttacagagcacaggaagaataggcttagcataattcttaaatgctttaggattttttgaatggtaaatgagtgccagcttcaacttaaagccacgagctgccttagcccctaataagagagtcagccagtctttgaagctttgaagccaggcattgacttctctctagctatggaagtcctgcatagcatcttcatccagtggaaggctgtttcatccacatggaaaatctgttgtttagtgtagccgcttagctaaatctcgataacttgctgcagcttctaaatcagcatctgctgcctcattttgcattattatgttatggagatggcttctttctttaaaactcatgaaccaaccttgctggcttcagacttttcctctgcagctttttcacctctctcagccttcacaaaattgaggacasttaggtcttttctttggattaggttttggtttaaaagatgttgtggctggtttgatctcctatccagaccactaacattttctccatatcagcaatgaggctgttttgctt

SEQ ID NO: 633967 - DNA, 619 bp, Homo sapiens
ttgtacctcctttcattgtttaatctacttatgcgcctgtgacagctagtgaccttacactgcctcctgtttctcatgttatggtgaggagtgttaaattgatttttcccaaagtgtaaatgatataagattttcyctttcagaaaaatttgcatttttaaaagaggatattttaaaaaaaaaaatagggatttacttaaatgaattaatctaaaagaatgaactcttcagagtgtgattgatgggtaaaacgtccattttaggttagggccacctcctcatggcttttatgtcacaccctctatgtgatcacacatcgtattcgtaagacagccagcactgcagctgaggcggcatgcatcctgtctcatggctcactgatggaaaagctactgtctcgtcaattttgttttgccactgaccatcattgctgtgatctaacacatgtactgttttcaagtttcctatgagccacagaaatattcaccaagtgtcacctaaattattggaaaattacttaattccttaatctaatgaagatttgcgttaaaaaaaacaaaagcccaaagaatccaaatacacatctggcagcaatttaattcatttagaatttattgcc

SEQ ID NO: 633968 - DNA, 619 bp, Homo sapiens
ttgtacctcctttcattgtttaatctacttatgcgcctgtgacagctagtgaccttacactgcctcctgtttctcatgttatggtgaggagtgttaaattgatttttcccaaagtgtaaatgatataagattttctctttcagaaaaatttgcatttttaaaagaggatattttaaaaaaaaaaatagggatttacttaaatgaattaatctaaaagaatgaactcttcagagtgtgattgatgggtaaaacgtccattttaggttagggccacctcctcatggcttttrtgtcacaccctctatgtgatcacacatcgtattcgtaagacagccagcactgcagctgaggcggcatgcatcctgtctcatggctcactgatggaaaagctactgtctcgtcaattttgttttgccactgaccatcattgctgtgatctaacacatgtactgttttcaagtttcctatgagccacagaaatattcaccaagtgtcacctaaattattggaaaattacttaattccttaatctaatgaagatttgcgttaaaaaaaacaaaagcccaaagaatccaaatacacatctggcagcaatttaattcatttagaatttattgcc

SEQ ID NO: 633969 - DNA, 591 bp, Homo sapiens
gcaggtaacagcgaagtgagtgatacaagtcagatttccccagtaaagggaaaatgccttgctaggtgaggagattaatgtaatttcaattttgtcatggtgataatctggttgtatccatatttacaagagcaggaggaaatgaaagaaaatcgtcaatttgtattttaaagatatgtcaattgtgttttgtgccagtgagggaaaaaatgaatcttcatctgattaaaataacttttgatccctcagaataagtcttgaaaaraggcaatgctatttgaaagcatcaatacaaaccacaaactgcctctacagctgtttatgattaggtaaagtgcataacatatcacatctcagccaatggaaatgcagaggtctaaaaaggataacttaccacctcactcaactagcacctataagggaaagtgattagttccacatcagccattgtatataaaagcatcaccagtagtagatgaggccacataatcaattaatctgagtctgcaaagaaaaatcaaggttttcgtttaagatgtatgtggagcaacaactacaaaaaactttatgatagcaaatgttaggcctact

SEQ ID NO: 633970 - DNA, 566 bp, Homo sapiens
ccaactcatctcccagcctcacaaacctcttttattggtgggaggtgagtggtcagataaaatgtgtgtcttagcctgttctttacrctataagaaaattcctcaagctggttaatttatatagaagagaaatctatttattatagttctggaggctctgtagttcaagattaaggtgtcagcagaatcagtttttgttgaaggttactttctgcttccaaaatggcactctctttctgcatcctcatatggcagaaggaaacaaaaagagactgaagctgtgtcttcacatggcagaggaaatggaagggatgaaaaagatgaggcagctctctgaagccacttttataaggacattaatcccattcatgatgaatcccaattgtctgtcaaagacctcacctcttaataccatcttaacttaaactttgggtttgagttccgacacatgaattttggaggaacacatatattggaaccaaagcaatgtgtgtaaaattgatttttctttttggtccactcctttgcattggttatttggtatctcactttggaagtagctgaaa

SEQ ID NO: 633971 - DNA, 566 bp, Homo sapiens
ccaactcatctcccagcctcacaaacctcttttattggtgggaggtgagtggtcagataaaatgtgtgtcttagcctgttctttacgctataagaaaatwcctcaagctggttaatttatatagaagagaaatctatttattatagttctggaggctctgtagttcaagattaaggtgtcagcagaatcagtttttgttgaaggttactttctgcttccaaaatggcactctctttctgcatcctcatatggcagaaggaaacaaaaagagactgaagctgtgtcttcacatggcagaggaaatggaagggatgaaaaagatgaggcagctctctgaagccacttttataaggacattaatcccattcatgatgaatcccaattgtctgtcaaagacctcacctcttaataccatcttaacttaaactttgggtttgagttccgacacatgaattttggaggaacacatatattggaaccaaagcaatgtgtgtaaaattgatttttctttttggtccactcctttgcattggttatttggtatctcactttggaagtagctgaaa

SEQ ID NO: 633972 - DNA, 588 bp, Homo sapiens
cctatacaggagtcaaggcaataaagtatttgaggaaaaaaatagcagaagttggctaaagacaagacatatatgctagaaaatgcatgagatccattcatggaaatttactggatagcggttccttgtggcagggcctctttttaagaaagggggcccaatgaaaacaggtctgtctttgttagtggtaaaggtggttgygtaaagctagtttatctctacctgaagcagacacacacacactaatacctcctacttagctattgcctcagttgatccagtgtttgaaaattccaattttccaagttgctatgagtctagctgctacagagaaggttgttctacaggatttgtcaattgtgtattatttaggagaagattgttctacagtacttgtcaatcagtgttgacattacactttatatcagatcagatccaaagattgcaaatatctgtagatagaaaaaatacatgaaatttctttaagatgtcatctctttcttttttgcagataaacaatattaaaacactattaacacctccctacttctagatgttgttattcctattgtgtgatttactacctgt

SEQ ID NO: 633973 - DNA, 588 bp, Homo sapiens
cctatacaggagtcaaggcaataaagtatttgaggaaaaaaatagcagaagttggctaaagacaagacatatatgctagaaaatgcatgagatccattcatggaaatttactggatagcggttccttgtggcagggcctctttttaagaaagggggcccaatgaaaacaggtctgtctttgttagtggtaaaggtggttgtgtaaagctagtttatctctacctgaagcagacacacacacactaatacctcctacttagctattgcctcagttgatccagtgtttgaaaattccaattttccaagttgctatgagtctagctgctacagagaaggttgttctacaggatttgtcaattgtgtattatttaggagaagattgttctacagtacttgtcaatcagtgttgacattacactttatatcagatcagatccaaagattgcaaatatctgtagatagaaaaaatacatgaaatttctttaagatgtcatctctttcttttttgcagataaacaatattaaaacactattarcacctccctacttctagatgttgttattcctattgtgtgatttactacctgt

SEQ ID NO: 633974 - DNA, 597 bp, Homo sapiens
ccttcattcccgaagggagtgagtgaggaggtggaaaaagcttagcaatgcttgcctatacgtttccttcttgggcactggaaaggaaactcattcatctctgtggaaatatgatgagtatgaatgagtttccctcacaatggaaaacccagtcaattaatgtgttcactcaatggacataaacccaaatctgctacttagtagttttgtcttgtgcagattatttatattttaggccttggtattcttataagaaaaatgagattgctaattcacacttcatagagcttttctaagaattataatgagaattggtacaattaaggcacccaataaatggtagaaaatataattactaatagtaaaaaataatccctttgagtctcatttcaaataaacmcagcatacatatttcctaaaattgttgggaaattatataagatagcatgtatcatatgaaatgcctgatacttaacacaatttttattttaaaatatccttgtctttagtccaagaatagaaaaagaccaaatctgtcttccatgatcctacctcccctctttgttctcccccttttttttcttagctgccagtgtg

SEQ ID NO: 633975 - DNA, 597 bp, Homo sapiens
ccttcattcccgaagggagtgagtgaggaggtggaaaaagcttagcaatgcttgcctatacgtttccttcttgggcactggaaaggaaactcattcatctctgtggaaatatgatgagtatgaatgagtttccctcacaatggaaaacccagtcaattaatgtgttcactcaatggacataaacccaaatctgctacttagtagttttgtcttgtgcagattatttatattttaggccttggtattcttataagaaaaatgagattgctaattcacacttcatagagcttttctaagaattataatgagaattggtacaattaaggcacccaataaatggtagaaaatataattactaatagtaaaaaataatccctttgagtctcatttcaaataaacccagcatacatatttcctaaaattgttgggaaattatataagatagcatgtatcatatgaaatgcctgatacttaacacaatttttattttaaaatatccttgtctttagtccaagaatagaaaaagaycaaatctgtcttccatgatcctacctcccctctttgttctcccccttttttttcttagctgccagtgtg

SEQ ID NO: 633976 - DNA, 622 bp, Homo sapiens
aaaatatattctatctaaagatcaaaatgtaaatttgagtgcatgcatatttcccattataattcttttctccgtctttttttttttttttttgagatgggatcctgctctctcacccaggctggagtgcagtggcatgatctcggcttaccgcaacctccgccttctgggttcaaggggttctcgtccctcagcctcccaaggagctgagattacaggcacctgccaccacgcctggctaacttttgtattttttccagagatgcgttttcaccatgttggccatactggtctgaaactcctggcctcaagtgatctgtccccctcagcctcctagagtcctgggattacargtgtgagccaccatgcccagccttcccatcgtaattctttagtagtgaactctaagtttctgtttgtttttattaaaaaaaatcagtgatcataaaacatgaagaagaaattatttaagggttatttatataacacaatattacattttaaaagacatgtgcaattttaaaacaatgaagttttgaacctgtaaaaaaatacatagaaaagatttgaggagttcccaaaaggccatttttagttcctttgaaatcatataatatgggcc

SEQ ID NO: 633977 - DNA, 518 bp, Homo sapiens
gagctgagatcacgccactgcactcaagcctgggcaacagagcaagaccctatctcaaaaaaaagaaaaaaaaattgaggtgacagaaagtggcatctgcttttgaggagtattctgcatatkttttccttagggtgagtcccacacttttagtcagcttgtcatcaattgggtggaaagttagtaaaaactttctggatattgtttattgctttaacccagcttctggggaagaatggagttacaaaatattcccaatatctcaaattttttatttttaattttttcccaaggcccacttttcaaaactcatggtagaaattatgactttctctctatcagatgggagctcccagagaacagaggccattagagactcaggttcagaagtgagctccgccgcctgaatttacctgtctgttccaacaactctcattccccttacagtcaatggaaaatatttgatgactggtggtatatttgcaagggtattaaaattatctttggtccttctttag

SEQ ID NO: 633978 - DNA, 653 bp, Homo sapiens
actcacttatagcactgcaatgatttcctgttaagcttagaagaaaatcccacattatttgtaagagccccatggcctgacttgcctctgcctctctaactgtgtctctttttgattccttaccaattatgctctagtcacacttgtcttccctcgcctgtttgaatatcacaagctcacttttgttttaatggtgtttgagtttattatctttatgcctgctgtgcttggcaatcatatctttccaggactgataatgtcatcagtggagcaagggcctccctgaccaaaagtagtaaaactcccaactcttccagttactctttgttgtaatatttattattatctaaagttatcatgtttatattttttatttacatggctattactcacatttttctcatgctcaaatatatgctccttcaagcaaagatgatatctactttacktatagatacctctacattataagggctcagtaaatagttgaagaatatttaagtaatttctatgacataagtattttgaaatatattattgaaatgtggtcatgagtgaatggtggttttaaaacataacataaatttattgatactccttctttcaagaggtgagactatgtatgccccttctcttcaataacgtagtctgga

SEQ ID NO: 633979 - DNA, 534 bp, Homo sapiens
tcaacctcacagtccatttacatcttctatggaggtggtgtcactccagtcactgaatgcaaactyaggaagtcacacaatttttctgatggattttaggtaataacatcatatagttattttttgcttcaagatactagtctctattagaatggcattttgatatattaataaacacttcattactcaatgcaagttaaggcccctcctctcttaactaaggggagagaaatataattggattttcctctgattctcctttatctccatttctccttagtatgtttttggatccctccttggttggattgggtagagggtaaggaggagaggtaaggagtttatgacaattcttacttccccagtattgtcttcatgatctttgagactgactgatatttaaagctgactctttcatagggtacttgtggattttctgtgatcctcctgctgaatctttttgattgcaactccatttgtctctgtgcaactttctaatttaacgtactttcatatataaaaattggtagtata

SEQ ID NO: 633980 - DNA, 565 bp, Homo sapiens
aaattcaagcaacctgggaaattgtgtcagggtaatctgatattktccttttagtatgggtcaaatatgcatttaacggacaattcaagtaaaaccgtttgagatctcacttcctttagttttctcgaagtgtcaccttcatggttgtctgttctgatgcttgaggtttctgtgtttaaggggaaaggtgctaacagaatatagaattttctgaagtgtttttccctcattctgttgctgctgcttgtgtttcaggggagttggcagctgccttttagttccctgatagcttaggaaaacctgctctgtaagcatgttaattttcttccctctagaaaaagcttgctaatctcatgaggtattgcaaagtttaaattgaagtaaatagaaaaattgctaagttgaagaaaaaaagttccacagagctttttatgagtgggaacacatctgccacacaatagaatatgacatccttcagcttactgctttcctaggacatgtgaaggaattgtttagtatgcattggtttggagcactagcaggtaaaagtttaattactgatctt

SEQ ID NO: 633981 - DNA, 437 bp, Homo sapiens
tttgtcacccaggctgaaatgtgatggtgtgatcttggctcactgcaacctctgcctcctgggctcaagcaatcctctcaccctaggctcccaagtacctggaactacagatgtgcaccaccatacctggctaatttttgtattttggtagatggggttttgccatgcttcccatgctggtctcgaagtcctgagctcaagcaatctacccacctcggcgtcccacagtgttgagattacaggtgtgagccactgcctccagcctttaaaagctattcttttcacaatgatcatgccaatgagatcgacatgtgtrtacatgtgtgcatgttatatatgagagtcaacaatgaagaatgcatcaaccgggggcgatttggaggatggagagcagactaaatccatcctgacaaatgttttgaaaggtgtgacaaaat

SEQ ID NO: 633982 - DNA, 482 bp, Homo sapiens
ggatgaattataatatagtcagccacaataactgaattagcattccaaaattttgattgaaagagggtgaaaattctaaacatgattctattttcctcttttctcatcacttttcttgtcatttctcctttctgcattcttttttatccttagatcaatgcctttaataactgccttaagctatgctcatttctcctgcataatctatttgatattaaactatatttcttttttgatttaagtagcttattrtaactagttattccaaatcataaaacatatgaaatattttgtgttcctatgtggtattaatttttacagctatatattaacatttatcttttttagttttcctgtagttattcccttttaccataactaaaaatgaaaaacatgtcactgtttttcaatttaattatctccaaattctgatgaatattacaagtaattattggtatcattttccaaatcacatactaatg

SEQ ID NO: 633983 - DNA, 480 bp, Homo sapiens
tttgtgttcctatgtggtattaayttttacagctatatattaacatttatcttttttagttttcctgtagttattcccttttaccataactaaaaatgaaaaacatgtcactgtttttcaatttaattatctccaaattctgatgaatattacaagtaattattggtatcattttccaaatcacatactaatgcagatgtaagattctttctatttttggaacataattggaataatctacaaataagctctagtcccgatttgaaaattaaatttaactctctaaataaaatgtacttctggctgagaattttatgaatgaatatgacagagcttttcaagtggatttgaaagaagtgtttaactttatatgtacgggaacatgaactgaggtcttagagattaaataacttgcccacagttaagaaacaaagcacaattcaaagccagcatttcaaatccagactctacccgtgcctg

SEQ ID NO: 633984 - DNA, 482 bp, Homo sapiens
ggatgaattataatatagtcagccacaataactgaattagcattccaaaattttgattgaaagagggtgaaaattctaaacatgattctattttcctcttttctcatcacttttcttgtcatttctcctttctgcattcttttttatccttagatcaatgcctttaataactgccttaagctatgctcatttctcctgcataatctatttgatattaaactatatttcttttttgatttaagtagcttattgtaactagttattccaaatcataaaacatatgaaatattttgtgttcctatgtggtattaattttwacagctatatattaacatttatcttttttagttttcctgtagttattcccttttaccataactaaaaatgaaaaacatgtcactgtttttcaatttaattatctccaaattctgatgaatattacaagtaattattggtatcattttccaaatcacatactaatg

SEQ ID NO: 633985 - DNA, 653 bp, Homo sapiens
ccaaaaaatatcacatatgtcttctgagtaaatttcatatttggaacatgttctcaattaattataattatcaagtttttattaaatatttcctatatagatatgttttctcataagatgcagttcaagtaacataaattaatttttgcttgagaggttgcagtgtctgacatattaaaatcttttaccttttactatagaataagctggccaatgttgtttctagatgtctgaatattatttattcaactttttctagtctataaaaacacatacatacatttcaaatatgcctaatatagtctaagataatctggataagtgttaaaaatcatatgtaggaaagtgtttcatttttgagaaattaatctcatttaaaatgtgcttaactgcactagaactcaagtttctaaaccaatcagaacrttgaatttaaaaatgaatgacttgactatcgtagtctgccttgaacatctattatctgcattcatgaaatctacatttagcataagctatagtaatggtagctaccatagattcagtttcttttgcattgaaataaaaagcttagtgtgaactttttccccataaatacctttggcttgccttggcatttatgcagcagcaggagaccattatccagtgacacattc

SEQ ID NO: 633986 - DNA, 496 bp, Homo sapiens
tctgagcttgattttggagcttatactcttaaccactaagctaaataatggcaggattgccaagctaatacagctctcactcgtctcccaggcaaaaagcaaacattctgggacagcaggacagagcctaagcagcacacacaagagataactttcttgaaactgcatgccatagacattgactaaagcccctttttagagaaggagctctgatgtgccactttcagtgtcaaaaaccaactgggaacagaaccaaagtctgtgaaaggtacatattctggtccttatagcagccatacttgtagttgggtccagctagagaacagggttgagaagagtattgttcttctctagaattttctaaatgggtacattacgtgtcctaaaagaataagccaaatacaggagttggaatttaacctttagctgccccatcttggrtggcacagggctctgagatcctatctatcgggatggagagtgaaggttaagcatt

SEQ ID NO: 633987 - DNA, 446 bp, Homo sapiens
catttgcccattttacaacaagaattatttagatcttgtaggatggaaaaattgaaagtgctgttttccggctatttggaactactgtcgagtttgtattggggtcaagcggcattgcagaagaaaataagacacttagattttaggtgaggtgacagttgaagacgttttaagttcttaagaacacaggctaagggagaaggaggaatggaaggtggaagcttgcccatagtgaaggaggcaagcccagagaaaagagtagagacacagagaaggggtgggggtttcttgtcctccagaaaagcagagaaggggtcagggcgcagagatacgaggtcrgggtgtggaaataagggatcggggtgcagagatatgaggttggggtacttgcctctcctccagaaaagcagagaaggggtagagacacggagagaaggggttggggt

SEQ ID NO: 633988 - DNA, 622 bp, Homo sapiens
tgtttcatagccccaaagggggccaggttttaacctaagataaatattgaaccttgtccattaggcttaggatcaagatcattggtgctgctatggcagcttcagtgaaatgttgataggaaactagatgacagagtttgaggggtgattgggagataaaaaagtgaaaatgttgagtgtaggaaaacttttcacaacttcggtttagaagaggtgaaagagccagaacacactgggttgaggaagggagtaaacaaaataaggagacttaagcatgtttaaatgttaaatggagaaaagtagagacaggagaaagaagtggtattgattgtaataagatccttgtaaaggaaaaaagcagaataaagagggaaatagaagctttgacacagagaaattcactttagatgggaaaacaattttggcaaaagggatggaaacatgatgaatatgtatgcaggtaartgggtaggtggagggagagggaataggtggagtctttttctgtggttctagtttctttgttgggcaggagactgcctattggctgtgaggcggcaggaggtggcagagtaggaaacaatgaaaatggagatggttcacatagccactgtggagtatg

SEQ ID NO: 633989 - DNA, 607 bp, Homo sapiens
ttcattttgagacctaaccttgagaaatttcttttctttaggagacatttaaattccagctcatgtcaggtttgaaaatttatgcaactaatagattaaaagatgctttctgaatctaaaagttaatgattttatatccattttatgttttatttagctagctagctatctcaaagaatttagaaaaaagaaaattcaactaccacttttatgacattcaattttattagtttaaatagctttcagtaaaaaagaattcacactagtaccattttccatagctgaaatagtgcagaatgaacacaacactatatttcttttgcaatctaccttcttatgcagaaaggaagattatcattgttaactaatttmaaattatgattttggttagtaatgtactaactaatttgctttcggaacaaaataattttctaatcattgttatgatgttttatgtatgccataattgtattttttttcatgatcaggaagaaagattaattcaaaacttattttaactgcttttcattaaaccataactgagtttcattgggttaaatttggtaattttccaatctaagtgtgttttaggctggtgccaagacta

SEQ ID NO: 633990 - DNA, 460 bp, Homo sapiens
atatttaatacacctcttacaaattctcccaccttcactccaataatttcaattttttaaagttggattttattttaattgtcaaattttacatttgtattctgtttcataaatataatatctacatttttttctctttttacatgtatcttttctttggctaaattttatgttcgaatggttttactacatttatgtatttcaaaagaaaactcccatagatggtgaattgcccataggttagagtatttaaaaatgcctgattgtttacttaaatggattcatgacttggttgtacactggtcttaagccacrattttattccttaatcctttgcagactttagcctttcttctgcccatcagtgcgacttgttttttttctagagacatgaaaaatctttaaattttttttgtttacttaaataaaattttccatgtatataattttaaaagtcaaa

SEQ ID NO: 633991 - DNA, 526 bp, Homo sapiens
tttcttctgcccatcagtgcgacttgttttttttctagagacatgaaaaatctttaaattttttttgtttacttaaataaaattttccaygtatataattttaaaagtcaaatagttgtactataaaagcctacgatgaaagcattgagcttcctattgccccctttactgatttctaatctattgaggccttactctaaacccattgaacagttttttctgctaattgcctctatatttataaatagcattcctatatcatctcttggtctttctgttttagatatgacttcatagctttctatcatgaaatacactcatatattttttgggggggagggtcagggcttatcctcttctgatgttcctaatgttgtttatgtatcattcttttgggttgagtgcatttttagtagtcatcacttcattacattgtaaatattatttacagctaagagaggtattgaactacaattacaaagcctttacttgtgcaatgtttcatttgtcctggaattaatgactg

SEQ ID NO: 633992 - DNA, 564 bp, Homo sapiens
ctctctgtgtcctgcttcattcatctttatgccatttatgactcattatatctctctaaatagacaataaggtaaagttaagaatagagacaataaggtaaagttaagaatccttagaccaggttttgtgaattcaagtcccaagtctatgacttatggagagtaaaacctcagacaaattatataacttctctgtgactcagtttttagatctttaaaattggccactgagcacctaccttaaagagttgtgggtgccggacgttgtggctcatgcctgtaatcctagcactttgggaggccraggcaggttgatcatgaggtcaggagtttgtgaccagcctggccaacatggtgaaactccgtctttactaaaaatacaaaaattagctgggtgtggtggtaggcgcctgtaatctcagctacttgggaggctgaggcaggagaattgcttgaaaccggaaggtggaggttgcagtgagtggagatcctgccactgtactccacgcctgggtgaaagagtgagattccatctcaaaaaaaaaaaaaaagagttgtggggag

SEQ ID NO: 633993 - DNA, 617 bp, Homo sapiens
cataatccattgatttttatagcattcttaatttgcattattggaacacaatctttatcctttctacagttgatggacccttggatatttctagtttgagatcttgagaacaatgctgctatgaacattctttcctatttatcctggtgttcttgtgcacacattccattaccgtctacactcacgtgccacgtaatgatgtttcagtcagtgatgaaccmcatagatgacaatggtttcataagattttaatggagctaaaaactcctattgcctaatggcattgtagtcatcataacattttatcataacacattacttaagtgcttgtaaaatttctgtatggcacatataattatgtacaatacatcatgcttgataataataacaaatgactacttttctggtttatgtgtttattatatcttatcgttacattagagtgtaccccttctacttattaaaagaattaactgtaaaacagccttaggcaggtctttcaggaggtattccagacgacattgctatcgttgaagacgagagctccatgtgtgttattgcccctgaaaaccttccagtgggacaagatgtggaggtggaagacagggatactgatg

SEQ ID NO: 633994 - DNA, 513 bp, Homo sapiens
tggacccttggatatttctagtttgagatcttgagaacaatgctgctatgaacattctttcctatttatcctggtgttcttgtgcacacattccattaccgtctacactcacgtgccacgtaatgatgtttcagtcagtgatgaaccacatagatgacaatggtttcataagattttaatggagctaaaaactcctattgcctaatggcattgtagtcatcataacattttakcataacacattacttaagtgcttgtaaaatttctgtatggcacatataattatgtacaatacatcatgcttgataataataacaaatgactacttttctggtttatgtgtttattatatcttatcgttacattagagtgtaccccttctacttattaaaagaattaactgtaaaacagccttaggcaggtctttcaggaggtattccagacgacattgctatcgttgaagacgagagctccatgtgtgttattgcccctgaaaaccttccagtgggacaa

SEQ ID NO: 633995 - DNA, 633 bp, Homo sapiens
tcttaaatgaattaaggtatgaaatctgctgagaagcccttcattgaattttctcttcatccttgagtacattccatcgttggctgcttacgggcaagtcatattggaattccaaatcaccagaggcrgccctaaaatggtgaacgaacaacaaaactagcattcctgattttcatcaacatcatgcagctgcatagataaacaaatcatatggggtaaatttttctattccatctaattggactatactgttatagacaagccttactatgcaaaaatagttattgctctcttatatcttcgtttgcattatcatcatcatcatctcttattcagatgagctgattagaaaaacactaatgagttataggatttgatattatgcaaatgcattttttccctagctgatgagtttattctcatcttttgcttaagaatactaactcgtaacaagggtgaatcaaacctatgcatatgtaatgatgtagaaatagctccattctatgtatatgtgcgtgtcttcaagtcccttgtctattttttctatccaatctcatatcagtaaaatttgtaacaagctttttctaatcttaagtgaaaaaatataaaaataaaagatgtatactaccttat

SEQ ID NO: 633996 - DNA, 584 bp, Homo sapiens
ttgaaaatgcttgacattgtttaaattttttatagcgatacttgaaatagagcttggagaaattacttatgaaacatatttatgccaaagtcatcatcaaattctacagacacttttctttggcatattaaagtattattaggacatcagtataaacagactrcaatgtatcttatatcttaatgtattaagaaaagtaaaaaactctttgactccaaagacctacttattaaaagcatcagtattgaatatactgcatgcagataaaatttacatcaaagcactttacaactgagatggtagagagtctgagggaagttataaggaggtgagttatcttaaataataatcatttcaaagtaataacctgtgtaaaaatgatggctcagtgcttctgcatttagtattcagcaagtagttatcctgtcagaattggcaatgcctaatgataaatgttcaaaagaccctactggaatattgacaaaccctcaacttgtatgtattatggagataagaaggctaaatttatatttgcgttaagccatagcccagccccatacttcacaaaacagaaaagctttgtt

SEQ ID NO: 633997 - DNA, 612 bp, Homo sapiens
cagaggctggttattctagcagtgaagttgtcacatgggcagactcaggacctctggttatccaggatgttgcaggaggtggaataagctcttgttttctccttcctaggagcagggttgttctgtcatgagttgctgtcatgtcctgagctgactggcctccagccaggaggtggcacttttgagacagcagcggagttgtcacctgttctgtggaatttgcagtggcctatggcatcttccaaaggccctgtgactttttgttttttctggtatgctgctgtggtggttcctggagtgaaaggccacagtatgagtctccacatgctgttctgtctctccatgtgggagctgcatatcagacctgtctcccatctgccatcactcttcagaacctgtcttaggcactggtgtagggcaggtctcacacggtgggtggagggactgctttgcattgtcccagtggcaaagagtcatggtcctttacacgagaaggttcttacgtgtgmcaatggacataaagcaggagtacttacacaacctcccaggagctgctggtctacaagtttctgagacatgtgtgccccacagcagtggtgctgacacgacgcg

SEQ ID NO: 633998 - DNA, 612 bp, Homo sapiens
cagaggctggttattctagcagtgaagttgtcacatgggcagactcaggacctctggttatccaggatgttgcaggaggtggaataagctcttgttttctccttcctaggagcagggttgttctgtcatgagttgctgtcatgtcctgagctgactggcctccagccaggaggtggcacttttgagacagcagcggagttgtcacctgttctgtggaatttgcagtggcctatggcatcttccaaaggccctgtgactttttgttttttctggtatgctgctgtggtggttcctggagtgaaaggccacagtatgagtctccacatgctgttctgtctctccatgtgggagctgcatatcagacctgtctcccatctgccatcactcttcagaacctgtcttaggcactggtgtagggcaggtctcacacggtgggtggagggactgctttgcattgtcccagtggcaaagagtcatggtcctttacacgagaaggttcttacgtgtgacaatggacataamgcaggagtacttacacaacctcccaggagctgctggtctacaagtttctgagacatgtgtgccccacagcagtggtgctgacacgacgcg

SEQ ID NO: 633999 - DNA, 644 bp, Homo sapiens
ggagtgccattcacatagcctacaatatgaatagcatatttacctttctatatcccattaatgtgaacattctgtgaatataagaatgatgtttaccttgtccactgcagtatgccttacacctggcttactatctcgtccatagatgtttctcaatactttgaggaaatatacaaaggtttattgaatatggaaagcaaagcatagaggaacattctagaatgactccaagatttttggctttgttgcctaagtggatgacgaatccgtttactaagattcagaatgagaaacatttgaagaagcaggttttgacgtgtagtttacggtgcacatgcagtgtccattggacatatttaataggcattcgggggacatgtgtcagctctgaagaaaggtacaggatggagagagagagacattttaaagatttcagagcaaaagtgctgcttgaagctgtggtggttgataagatcaccttgggagagcatagaatgaggagagagttgaaatatgtcacctcgcagaatawcaatccattaggaacaagtgatataaaaggaatttgtggagaaacatatacccaaggagaaaatgaaagtaactagataagaaggggatattttagaagccaaaatgtggag

SEQ ID NO: 634000 - DNA, 507 bp, Homo sapiens
tttgggtctcagttcccaagacccctaaatcttcactttatttagtagtattttattttgtccactgtgtttcatgtaacttttttcaattaatctttaattttttaccaaaactgatactaccagttagtttataaaatattaatggtaactaacattaatatttgctatatttaatttcatttaaatatgattaatggaagcagcacaagtttcaaaatatctctttaaaaaaagaaattgtcttttacaaactaagagcratggattgacttctgtaatattatctttgtctttgttatatggatattcctgctcattattggttcaatttaatgatttttaatgtctggcttttaggtgttatacatttatttggcccaggtgttgtttagggtagaagcaacaacatgtattcttattcagggtagaaacaacaatagtaaatgtgcttaatatgtgtgagacactctcctgagtgctagacggacaaagttaaaaaaaaag

SEQ ID NO: 634001 - DNA, 503 bp, Homo sapiens
agtgtagaatgatggttaccagagggtgagaagagtaatggggagaggggggaagtgtagatggttaataggtacaaaaatatggtatgctttttaatacttttaaaatggcgatctyagggttagctggggtcaagaggataactcagatgacaaggttaaaaaaaatagccaagtcataaactcagtcccaaggaaaaatgaaagtgtatattgagtacttgtatactatgtgccaggattattctaataactaacttatgtaattctcactgtgatccaatggaattaggctctgttagttttctcatttttacagattggaaaaccaagattcaaagaaattgtatatatgattatactaagaatttctaaaatttgtatttaaactacaaataatttaacccaccttttaaccactataatgttaaacgatcatggtgtaggccttgagaatgagtagctgcaaacttgacctgatgctgagacccccagctactagt

SEQ ID NO: 634002 - DNA, 503 bp, Homo sapiens
agtgtagaatgatggttaccagagggtgagaagagtaatggggagaggggggaagtgtagatggttaataggtacaaaaatatggtatgctttttaatacttttaaaatggcgatcttagggttagctggggtcaagaggataactcagatgacaaggttaaaaaaaatagccaagtcataaactcagtcccaaggaaaaatgaaagygtatattgagtacttgtatactatgtgccaggattattctaataactaacttatgtaattctcactgtgatccaatggaattaggctctgttagttttctcatttttacagattggaaaaccaagattcaaagaaattgtatatatgattatactaagaatttctaaaatttgtatttaaactacaaataatttaacccaccttttaaccactataatgttaaacgatcatggtgtaggccttgagaatgagtagctgcaaacttgacctgatgctgagacccccagctactagt

SEQ ID NO: 634003 - DNA, 618 bp, Homo sapiens
ttttatacgtttttaggaagccataagacatcaatcaatacatgtaacatggacactggtttggtctgtaaatgtgggataactggaagggagaggagtggtttcctggtcataggtggattcaaagattttctgatgggcagttgattgaaagagttatctaaagacctggaatcaataaaaagtagtgtctgagttaagataagggattgtagagaggaagtattttattatgcagatgaagcctccaggtagcaggcttcaaagagamtagattataaatgtctcttatcagacttaaagaatctgtcttaaggtctgtattttgatgttaatgctggtcagctgtgcctgaattccaaagggaggagggtataatgaggcacgtctgaccccccacttcccatcatgccctgaactaggtttcaggttaactttggaatgcccttggccagggggaggatctgttagttagttgagggccttagaattttatttttagtttacaaggcagtaagtgaagcaaatgataaccaaacagtcttgctgaagaacaggagagtgtgaagtgtgtatgagaatgatgggcactagggcatccttataccagaggtgagg

SEQ ID NO: 634004 - DNA, 651 bp, Homo sapiens
gtcttttttatttctgttagttccctgtttcacttatatttggaacattagtttttctttcttttcattgttgatctactaaagttttgtctttttgttgaccttttcaaagaaccagcttttgattttattcgtttttgcctattgtttctctattctctatttcattaatttccactcaaatcttcattattttctttcttttgcttgtactacgttttgtttgtcctttgttttcctgtgtgttaaggtggaattttcagtttttgatttgagatctttattcttttttaatataagtgcctacagctagaaattttccactaagcactgctttagttgcatctcacaagattgggtatgttgtgtcatcattttcatttacttaaaagtattttctaacttaacttttgatttctttattgaccarttggttatttgtgcatgtattgcttaatttctacatatttgtgagtttgtgatttctaatttaatttttgttgaagtcagaacacattttatactatttcaataaatttgcattcatgaagattggctttatgtcctagaatattgtctaacctgcagaatgatccacatgcacttgaaaagaatacatatatattgctgttgttgggtagaatgttctat

SEQ ID NO: 634005 - DNA, 623 bp, Homo sapiens
gatcttgcccctcctgggtagatagccctcttactggtagctttgaatttttgctacatcagtgtagagtgaagtttctgtctcaactggaaggggkttgttgtgagagtgatcttggttcaaataccacagactctcactgttattactaaatcttagctgttatttttgaatagatgtttcctcatttactgtatgtccttaggatgacttccagagactttttgttcgttgtatgttttataattttcaccaattttgctgaggtatgggtctacagagctcttcatgctgtcataacagtgttgatctggcctgttaactcttgagaagtgaaattaagtaatttaaaaagacatccataattgttaactgttcaatacatttttagggaaatgtatcagtatatcttacaccattttgaatttagactacaaaagaaaaatagatttagggttgaaacgttagaatgtgaatttatttaattttataaatcacaacttagttatgcaaatgccaagcaaaatttcaggttaagtagatcagaatggagagaaaatagatttccaaagtataaaaaccattctcatgttgtactggagtatctatcattaacattctcc

SEQ ID NO: 634006 - DNA, 580 bp, Homo sapiens
atgaaaccaaatataaatattaggtatatgtatgtgtatgtataaatatatataaataggaggtgcatacacacatatatgcacacatatacacatatatgcacacatatgtatatacacatatacacatatatgtaaacatgcataatatatatttacatatatatttaaacattgttgctttcaaaccactcactgaatctttggctttctttttcactyttccctcactttttaaaaatattctttaacatgaagttaaaccaaaagcttagttgcccttttgcattcatgttagattgaatcatacagacttgttatatgagtcaaaaaaaagtcaaatattgacaattttaagtagtactaattaaaaattaacaatagaaaaaatagtaaaaatctaatgcctaatttacaaagtaatgtattaaagatgatgtatttctttgcttgcacataatttgagacagactaaagaaatcatttgggtttcaaccaagatatagcctgtgaaaaaatattttccaggatcataggaaatcgagtcctcataccttacatgtgagagggtcaaaaaaaa

SEQ ID NO: 634007 - DNA, 378 bp, Homo sapiens
tttggtgaggcagcacatatcctctgaccaatggggaaataaaaccttgataggcacataattgtgagtttctaaatatcttaatttccagtattttgattacataaaatgttatcaagtatttcacattttgtttgtgtttttcaatcctatacaaattattttatgtcatctattgagaggatgaaactttcaggaccatcacttttgcttaccaatgatttattatcacggttagacctgatcctcaaaaatcgccttttagtcactccaatttgtttttcctctaggctaataagaaaagaccctcatgtcttgtcttcctcaatattttctattatagcaaaacccacyaactgtcacaataggggtgaaata

SEQ ID NO: 634008 - DNA, 626 bp, Homo sapiens
tctagttaagatgaggcaatactgaattagggtggaccctacttcaaaataacttgtattcttttaggaagaggagaagagacacagacagaaacaggrattggaattttgctgccaaaaaccaaggaatgtctgggctactagaagcagcaaagaaggatcctcccctagaggtttttgagggagcagggcccttctaatactttgattttggacttttaacctccagaattgtgagagaataaaattctgctattttaaatcactgagtttgtggtactttgtgttggcagccctagaaagccagtaatgtccactgtagtgaacactgtttttcatcggctttccagcattcatcccccttccccttttagtaactgtatctgatcctcctaccctactcttgtttcatgtgttttacagaatttactccaccaatggctccaaaactaaatatgtggcctatacactttccatttctctggcctcagcaattgcttcagggataaatatgtaacccaatcatatggggaagatggaaggctggagctgctgcagctatgttgctactatgagaggataacctgtctgagaatagaaataacaaaaatggagcaggaccaaga

SEQ ID NO: 634009 - DNA, 548 bp, Homo sapiens
acttgctgcattttctacctcagcacttgctgcctccctttccatgtttatgttctggcaatggccactttccttaaatctcatgaactaatctctgctgtaatagcttctgacttttctcctgcagcttcctcacctctctyactcttcatagaattgaagagagttaggatcttgctctggattaggatttggtgtaagggaatgtggctggtttgatcttctataagaccatgaaaactttctccataacagtaataaggccgttttgcttttttatcattcttgtgttcactggagtagcacgttttttttttttttttttttgatacagggtctcactctgttgcctggaggcggtggcacaatcatggctcactgcagcctcaacctcctgggctaaagcaatcctctcacctcagcctcccaagtagctagaactacagatgcactgcgccatgccttgctaatcttttaaaaaacatttttgtagagatgggggtctcactatgttcgccaggctggtctggaacttctgggctcaagca

SEQ ID NO: 634010 - DNA, 525 bp, Homo sapiens
atcatcaacatgtgcaggaatatccatttatttcaactgaacttgtttcaatagaaagaggaaatggaaattgtaaagatgaaaaatgaaagctagttagaggttaaagctatcgttgctacacagatccatcattcattcccatagatccattgtcacaagtatctagcctgggtcatgaagctggagtttgaacaggcagtggcaaaactgctgactggattttgcaartaaaacaaggtctttaattctactacaacatatgacatgcacaaaaaaaaccaaaacaaaaacaagtgacagggctaaaatagagtttaaaaaacctaatagacactcagaccatgtcaaacagtcttaatatgaaatattatgaatatttacactctaaattatgacccaattgatgtgattacaatggttttaaatataaataattaaaaactaaaaagtcagtcctacaatgatttttatatattaaaggtttagtgctttagatgtgagatatgtttgcctatgtgtaca

SEQ ID NO: 634011 - DNA, 577 bp, Homo sapiens
aaccatgcacactatcctattgagtggaaaaaataagtagaatcaaagatgcatgattcaatacttcccgtagataaacagtataattttgaaaatagatttgtactgagtttattgtaggatcataagttgacaactctcaatggccatagaagtcatccagtacaagtttcttctctcaactttgaagaactgaaacctaggtagattaagtaattgcaaaaggacaaattgaactagatccagaactcasgtttcgtgtctcccaattttcaactctcactttcctaaattctgttgtatatttagtacttttacatactttgtcattaataaaacaaaaaattctttaaaaaatctgtatatacaaaccattgttttcaactaaaaaaataagcagaacaaaggtagacatgtacatgaatgtgttataatcatcattaactcaagctcattggagaaaaaggcagaataaatcataaaatctgtgttacaatcaaaaaattatattttaaatgtatttttgcagagaatgtactatatctcaataatgtgtacctccaaatagaaatccagt

SEQ ID NO: 634012 - DNA, 530 bp, Homo sapiens
acacttcaaatgatctacacctggattgggaatatttattacatatttatttctctgtatataagataatggtacctaccctcattaattatctcttcataattaactgacattctaactgggatctgagttgatctttctccagcactgttcttattgtaataattatcactgctcaaatcagtggcagttgtgtcattaaacagatggctaaaccatcacatggagcttttggagtttaaaaagtcacattttaattggggacttaagatgtaattgctgttggcatgatgtaaatgtgtctcttcttatatatgttgataaaatgtaccgtcacaccaacaaacttccatttttgtgggtctaaaactatacatgaaataactttagagtcctctgaacttcagctgtacatttaggatgccacaggatttttgcaattacaaaaawgtacaaagaaatttaagaatgtcaggttatggtcatgggttaatgtggtgatgctcttcagactccacagttaatgtgaa

SEQ ID NO: 634013 - DNA, 431 bp, Homo sapiens
atttgaaatctttctactttttaaatgtaggcatttattgctataatattccctcttagtactgtttttgctatgtaccatgagttttgatatattatattcctattttcatttgtttcaaaaaatttttaaatttccarcttaatttcttcataacccagtggttgttcaggagtatattgtttaatttccaactatttataagtttccaaagtttaacttggcgttgatttttagttttattccattatggtctgagaaatacttgatataatttttaatctttcaaatatttttagacttgctttgtggcctaacatatagtaggtcctggagaatattctatgtgttgatgagaacacagtgtattctgcagttgttaaataaaatgtaatgtttttttaaatgtctgttaggtttatttggtctaa

SEQ ID NO: 634014 - DNA, 431 bp, Homo sapiens
atttgaaatctttctactttttaaatgtaggcatttattgctataatattccctcttagtactgtttttgctatgtaccatgagttttgatatattatattcctattttcatttgtttcaaaaaatttttaaatttccagcttaatttcttcataacccagtggttgttcaggagtatattgtttaatttccaactatttataagtttccaaagtttaacttggcgttgatttttagttttattccattatggtctgagaaatacttgatataatttttaatctttcaaatatttttagacttgctttgtggcctaacatatagtaggtcctggagaatattctatgtgttgatgagaacacagtgtattctgcagttgttraataaaatgtaatgtttttttaaatgtctgttaggtttatttggtctaa

SEQ ID NO: 634015 - DNA, 598 bp, Homo sapiens
tgggctaggatgtcaggaaggccagtctttaggccccagtgatggcagcaatgggctgggatgcctgtccttgggtcccagagtggtgtaccctggtgtttgttggttcaggtaaacctattcttgagcctccaggtggcttactccaattctggtaggcagcagtgggccaggtgggtgggttctcaggtccctggacagctagaatggcatgggtgaaggtaacaggacaactatctggatcccacgtggtgagtgcttatattggcagtgggactgtgatgagccgagtgggccagtctcaatgctcacaggtgctatgtgcagatagatgccagctgtggtggtagctgggtgggtagtcccaacctcaggccccaggaggagtgttcatgtgcagtggtggtggactkggctaagcaatctttttgcctccagagtctgtgctctgggatgggagaagttgggcaacactgggccaggtgagctcatcttcaggcctcctgatggtgtgtgtgggtgtcagcatggtaggcaggggtggggtgatccccaggccaccatcagaatgctcaggttgtgggcagcagtggttatg

SEQ ID NO: 634016 - DNA, 550 bp, Homo sapiens
gttcaggtaaacctattcttgagcctccaggtggcttactccaattctggtaggcagcagtgggccaggtgggtgggttctcaggtccctggacagctagaatggcatgggtgaaggtaacaggacaactatctggatcccacgtggtgagtgcttatattggcagtgggactgtgatgagccgagtgggccagtctcaatgctcacaggtgctatgtgcagatagatgccagctgtggtggtagctgggtgggtagtcccaacctcaggccccaggaggagtgttcatgtgcagtggtggtggactgggctaagcaatctttttgcctccaragtctgtgctctgggatgggagaagttgggcaacactgggccaggtgagctcatcttcaggcctcctgatggtgtgtgtgggtgtcagcatggtaggcaggggtggggtgatccccaggccaccatcagaatgctcaggttgtgggcagcagtggttatgctgcagccctgctactggatagggtggtgctaccttccgtggcagcagcctagcctg

SEQ ID NO: 634017 - DNA, 594 bp, Homo sapiens
tcctttgttgttgttgttgttgtttgttttgttttgagcctgggaaaagacagagcagagaccacaaggggtaaaggagagttgcacttaaactattttgcaattagatttcaaaggaatttttaattttttttcttttttggatatgaaggtactaatcttttcagcaaggctatttacatctatattttggacctaatacttagttttacggtaagatatgaaagagaagttttctaaggggggcatcaaaggactagaggaggaaaattgtggtgaatttggggaaaacaataaaatctttgtggaccctgtgagcatctgacctgaattttgggactaaatttccaagtactaatgttaaaatgaggattttatatatatatatatatatatwttttttttttttcctgtttattttgcctaaggcacttggcctaaaggacatgatgctgagctactgaaagtaactgaataagaaagtaggtcaggtactttgggagattacatatacacacacacacttaaatacacacacaggtacacatatacattaacataatattttaggccaattctcttcatacagagaga

SEQ ID NO: 634018 - DNA, 495 bp, Homo sapiens
gtcatcctatttttgggaactctaaagttgagtcaagggtagtggggtactagtgtactgggactattcctcaccattgtactgatctcatcatgagtcacctgagccctaccctcggtgttattccgggcccaaaggcgcttaaatcttagcgtctttacatatgctgttttttcacaatgcgtcctggtggcaactgctccacttgtataatgctgactaaacttctgtctcagcttagagtcacccgccctcaaagcttcctttgacccttctccttatccacatgaccctctctccctgygctcccacaggcttgctgctatgtccatcccatagcatctaccatggtgtgttctaattgccatcattccctaatacctgctgcttgagagcaggaacttgatgttgctcaccaccctacaccggtactctttactgctgagcctggaactcaggttttcagcctgtgttttgtgcctgtctggctgagag

SEQ ID NO: 634019 - DNA, 417 bp, Homo sapiens
tttatcttagtgacagaaagtagaggagtggttacaggggatggaagttgggtttggtgttgattgcaaagggcatgaggatgctttttgagattatggaaatgtcctatatcttgattatggtggtggttacacagctrtgcacactgtcaaaactcaatgaaatctacacttaaatgtgttcattttaatatatgtaatctctacgtcagtaaaattgtttcaaaaatgttttgtgcatgagtctaataatttttccttgcattgtttatatatattttaggaaattctccacatacattttgtgtttctcaaataaacaatttaaaaagagaaagaataagttgggtgttggtagccactagtgcagtgtcatgatgttgcttgtaggtgctgaattctcactgagaagaactt

SEQ ID NO: 634020 - DNA, 417 bp, Homo sapiens
tttatcttagtgacagaaagtagaggagtggttacaggggatggaagttgggtttggtgttgattgcaaagggcatgaggatgctttttgagattatggaaatgtcctatatcttgattatggtggtggttacacagctatgcacactgtcaaaactcaatgaaatctacacttaaatgtgttcattttaatatatgtaatctctacstcagtaaaattgtttcaaaaatgttttgtgcatgagtctaataatttttccttgcattgtttatatatattttaggaaattctccacatacattttgtgtttctcaaataaacaatttaaaaagagaaagaataagttgggtgttggtagccactagtgcagtgtcatgatgttgcttgtaggtgctgaattctcactgagaagaactt

SEQ ID NO: 634021 - DNA, 417 bp, Homo sapiens
tttatcttagtgacagaaagtagaggagtggttacaggggatggaagttgggtttggtgttgattgcaaagggcatgaggatgctttttgagattatggaaatgtcctatatcttgattatggtggtggttacacagctatgcacactgtcaaaactcaatgaaatctacacttaaatgtgttcattttaatatatgtaatctctacgtcagtaaaattgtttcaaaaatgttttgtgcatgagtctaataatttttccttgcattgtttatatatattttaggaaattctccacatacattttgtgyttctcaaataaacaatttaaaaagagaaagaataagttgggtgttggtagccactagtgcagtgtcatgatgttgcttgtaggtgctgaattctcactgagaagaactt

SEQ ID NO: 634022 - DNA, 469 bp, Homo sapiens
ttattattcttgagtgtaatatcaagaaacaagcgtttgcaattttatacacaactatttctagttacctgttccttatttatgtgaagttgaaaacatagtgtaatttttaatattctctcttccttctccttcctcacactaatgttttattaatattattttaaattgatgaatcataattgtatacatttgtggggttcagtgtgatgttttgaaatatatatacaatgtggggtgatcaaatcaagctaattaacatcaccttgcttattattttctwtagcgagacatttgagatttactctcttagctattttgaaatgtacaaaatattattgttgaatatagtcaccttgctgtgcaatagatctcaaaacttattcctcctatttacttgaaactttgtaccctttaatcaacaactccccattcctttcctcctcagcatgccagcctctggtaacta

SEQ ID NO: 634023 - DNA, 543 bp, Homo sapiens
atctcaaaacttattcctcctatttacttgaaactttgtaccctttaatcaacaactccccattcctttcctcctcagcatgccagcctctggtaactatcattctactctcyacttctactaattcaactttttaagatttcacatataattgagatcatgtggtatttgtttttctgtgcctggcttccttcatttagcataacatccttcaaatacattcatgttgtcacaaatggtagaattttcttcttttttttaaggctgaagggtattccattgtgtgtgtatgtgtgtgtgcatgtgcctcacggtttctttgtccattcacctttcaatggacagttatgttgatttgatagttcatctactgtgaataatgctgcaataaacatgaaagtgcagatatctctttgagaaactgatttcatttcctttgaatatgtacccaaaagagggatttctggaacatatggtagttctattttaattttgtgagtaacctccatagtgttttccattatgagcatactaatttatatt

SEQ ID NO: 634024 - DNA, 543 bp, Homo sapiens
atctcaaaacttattcctcctatttacttgaaactttgtaccctttaatcaacaactccccattcctttcctcctcagcatgccagcctctggtaactatcattctactctccacttctactarttcaactttttaagatttcacatataattgagatcatgtggtatttgtttttctgtgcctggcttccttcatttagcataacatccttcaaatacattcatgttgtcacaaatggtagaattttcttcttttttttaaggctgaagggtattccattgtgtgtgtatgtgtgtgtgcatgtgcctcacggtttctttgtccattcacctttcaatggacagttatgttgatttgatagttcatctactgtgaataatgctgcaataaacatgaaagtgcagatatctctttgagaaactgatttcatttcctttgaatatgtacccaaaagagggatttctggaacatatggtagttctattttaattttgtgagtaacctccatagtgttttccattatgagcatactaatttatatt

SEQ ID NO: 634025 - DNA, 604 bp, Homo sapiens
tattcctcctatttacttgaaactttgtaccctttaatcaacaactccccattcctttcctcctcagcatgccagcctctggtaactatcattctactctccacttctactaattcaactttttaagatttcacatataattgagatcatgtggtatttgtttttctgtgcctggcttccttcatttagcataacatccttcaaatacattcatgttgtcacaaatggtagaattttmttcttttttttaaggctgaagggtattccattgtgtgtgtatgtgtgtgtgcatgtgcctcacggtttctttgtccattcacctttcaatggacagttatgttgatttgatagttcatctactgtgaataatgctgcaataaacatgaaagtgcagatatctctttgagaaactgatttcatttcctttgaatatgtacccaaaagagggatttctggaacatatggtagttctattttaattttgtgagtaacctccatagtgttttccattatgagcatactaatttatattcccactaacagtgcacaagtgttcccatttctccacatcctccccaaaacttaccttttgtctttttgataa

SEQ ID NO: 634026 - DNA, 543 bp, Homo sapiens
atctcaaaacttattcctcctatttacttgaaactttgtaccctttaatcaacaactccccattcctttcctcctcagcatgccagcctctggtaactatcattctactctccacttctactaattcaactttttaagatttcacatataattgagatcatgtggtatttgtttttctgtgcctggcttccttcatttagcataacatccttcaaatacattcatgttgtcacaaatggtagaattttcttcttttttttaaggctgaagggtattccattgtgtgtgtatgtgtgtgtgcatgtgcctcacggtttctttgtccattcacctttcaatggacagttatgttgatttsatagttcatctactgtgaataatgctgcaataaacatgaaagtgcagatatctctttgagaaactgatttcatttcctttgaatatgtacccaaaagagggatttctggaacatatggtagttctattttaattttgtgagtaacctccatagtgttttccattatgagcatactaatttatatt

SEQ ID NO: 634027 - DNA, 574 bp, Homo sapiens
aggttgtttgttttcttgctattgagttgagttccttgtaaactttggatgttaactccttgtcaggtataaatgttttataaatattttctcccattttgtagattgtctcattactctgctgtttcctagcagtaaagaagcattttcatttggtgcaatctcatttgtctatttttattgcctgtacttttaggatcatacacaaaattaattgcccagaccagtgtcaagaagattttttcctctgatttcttctggtaattttacagttttaggtcttatgattaagtctttactgaattttgagttttwaaaaaaatatatagtgtaagaaagggttcaatttatgcttctgcatgtgaatatctggttctcccaacaccatttattgaagagactgtcctttccctgttttgtgttcttggcatctatgtcaaagatcaattgactataaatgcatgaatttatttctggtctctctactctgtttcatcaatttaaatgtctgtttttatggcaataatgtgctgttttgattactattactttgattttttgggcttcatggatc

SEQ ID NO: 634028 - DNA, 587 bp, Homo sapiens
ttcctctggaattcctataatatcagtttacttggtggcatcccataagtcccataggatttctaaactttttttcattcttttttctttttgtttctctgactaggtaatatcaaataacctgtctttaagcttactgattcttctgctggattgattctgctgttaaagctttctgtgaaaatttgtaatgctgtaattctgtttttagctctagaatgtatttggttcttttttttaggggtttctatctctttgttgaactcctaattttgttcatgtattatttttctgattctatttagtatctatttttgtcctgttgtcactcattgagtttctttaagataattagtttgaattctttggcagttcgtagatccctttttctttaggctcagttactgatattttattttattgttttgttttggtagtgtcatgtttccttgattattcataatccatttggccatatgttgaaatctgaacgtttgaagaagtaagcacstattctagtttttacagactgattttgacagggaaagccctttatcagttagcctttccagagattctaggcaggc

SEQ ID NO: 634029 - DNA, 451 bp, Homo sapiens
cacctattctagtttttacagactgattttgacagggaaagccctttatcagttagcctttccagagattctaggcaggctttctagcaggatttgtgggggcaggcttgctattgaagtccttgaaaaggctctcctggacctaaatgttttttcccattctgtgacttgttttctattttctygatagtgccttttgaagtataatactaaagttttttattttgatgaagtgtattttatctattttttgttattactgttgctatgctttcagggtcataactaaggccattatctaatccagtgccatgaatatttatgcctatattttcttctagtaatgttatagttacagttcttagatttaggcctttgatccactttaacttaattttgtgtatagtgtaaagcaggagtccaactttattccttcccatgtgcatatcca

SEQ ID NO: 634030 - DNA, 633 bp, Homo sapiens
gcacctattctagtttttacagactgattttgacagggaaagccctttatcagttagcctttccagagattctaggcaggctttctagcaggatttgtgggggcaggcttgctattgaagtccttgaaaaggctctcctggacctaaatgttttttcccattctgtgacttgttttctattttctcgatagtgycttttgaagtataatactaaagttttttattttgatgaagtgtattttatctattttttgttattactgttgctatgctttcagggtcataactaaggccattatctaatccagtgccatgaatatttatgcctatattttcttctagtaatgttatagttacagttcttagatttaggcctttgatccactttaacttaattttgtgtatagtgtaaagcaggagtccaactttattccttcccatgtgcatatccagtttccctcgcatcatttgttaaaaagactattttccctattgaatggtcttaacaccgttttcaaaagtcaattgactataatataaagatttatttttagactctcaattctattccattgatctaaaagtctattcatatgctagcaccacactatttttgttactatatgtagcttt

SEQ ID NO: 634031 - DNA, 595 bp, Homo sapiens
ctgagactagtaattataaagaaaagaggcttagttgcctcatgattccacaggctgtataggaagcatggctgtggaggcctcaggaaacttaaaatcatggcggaaggtgaaaaggaaggaggtacatcttacatggtgggaacaggaagaagaacagtgaagggggaagagctatatacttttaaacaaccagatcacatgagaattttatcaggagacagcactagggggatggtgctaaaccattagaaattacccccataatccaatcacctcccacaaggccccacctctaacagttcaacatgagacttgccagaccatctgagggtaatgctgtcctcatagaatgaatttagaagtgttccttccacttcttttattgaaaaagtttgtraaagattggtgtttatctttaaatatttggtagagtatactaatgaagccattggtggctggacttttctttgaagaaaggtttctgattattaattaaatctttttacttgttatagctctattcagattgtatatttcttcttgagtcagtaatagtttctatgtttcttggaacatgtccattttacctagg

SEQ ID NO: 634032 - DNA, 603 bp, Homo sapiens
cttccacttcttttattgaaaaagtttgtgaaagattggtgtttatctttaaatatttggtagagtatactaatgaagccattggtggctggacttttctttgaagaaaggtttctgattattaattaaatctttttacttgttatagctctattcagattgtatatttcttcttgagtcagtaatagtttctatgtttcttggaacatgtccattttacctaggttatctaatttgtttgcatatagttgttgacagtattcctttatagtcctttttatttcagtaggaccagtagtaatatacccctcatcatttctaattttaggaattttacatttctctctctttttttgttagtcagaatagctaaaggtttgtcagttktgttgatttattcctaaactaacttttggttttattgattttctctactgttttctattctctattttgtttatttcaattctaatctctgttcctccttttttctgcttcttttaggtttagtttgctttgctttttctagtttcttagattgaaagtaaggctattgagttgagatctttctttttggattaaagactcaaaggaaacaataga

SEQ ID NO: 634033 - DNA, 590 bp, Homo sapiens
tagctctattcagattgtatatttcttcttgagtcagtaatagtttctatgtttcttggaacatgtccattttacctaggttatctaatttgtttgcatatagttgttgacagtattcctttatagtcctttttatttcagtaggaccagtagtaatatacccctcatcatttctaattttaggaattttacatttctctctctttttttgttagtcagaatagctaaaggtttgtcagttgtgttgatttattcctaaactaacttttggttttattgattttctctactgttttctattctctattttgtttatttcaattctaatctctgttcctccttttttctgcttcttttaggtttagtttgctttgctttttctagtttcttagatkgaaagtaaggctattgagttgagatctttctttttggattaaagactcaaaggaaacaatagataaagaactaaaggaaactaggaaaacaacttgtcaacaagtacagaatagaaataaaggacagaaattataacaaaggagccaaattgaaattctggaattgaaaagtgcaataactgaaataaatttact

SEQ ID NO: 634034 - DNA, 622 bp, Homo sapiens
ttcatttgcttttcaatgttttcaaggaaagccaccacttagctgatttttcacactgagagagttacaaattaggtaaaataaaggcaagagcagacaagtcaaaacagacaaacaattttttgggaacaagatcaactttgttccctctgaaatcaggtaatttccagcctatgaccaggaatataggctgttgtctttaagatttcaactatgccagggagcaagctcaacaaagtttaacttaaaaatgctgcaaacctttcctactgtgtttaagtcatcttattctgattcatcatttttttggttaatgtaaatctttggatattttccagagttctgataaggttgattctgacaaattttgtgtgaatttgtgtgtgtgtttgtggaggttactggaattccctcttttgttttttttcactggtgttacttccagccctcctcaaaaggtatactrttttaaaacaactaaatagcttacatgtactaattttgtacttacgatgttgtcggacagatactgttattttttttttctgttgaaaactgatgctagagaggttaaaacccacacaatctctcacaactagacagtggagaatccaaattgaaa

SEQ ID NO: 634035 - DNA, 449 bp, Homo sapiens
gaattccctcttttgttttttttcactggtgttacttccagccctcctcaaaaggtatactgttttaaaacaactaaatagcttacatgtactaattttgtacttaygatgttgtcggacagatactgttattttttttttctgttgaaaactgatgctagagaggttaaaacccacacaatctctcacaactagacagtggagaatccaaattgaaacagagactagtctaactcctaaccatggcgctatagtgaccaaatgtggaaagaagggagctggtttccatagatcaaggattataagaacttagtatgatttttaaaaccctttaatatttctgtgcttgaagtgattgacaataaaatcctgaaaccaaaaagtacaaatagcgagacagaacctagtggcctactctgtggctgggcataaatggagaaaaatctcca

SEQ ID NO: 634036 - DNA, 597 bp, Homo sapiens
ccccaaatagagatctaggatgcatgtccaaaggcactctgaaggaaactctccacttgggcacctgtgaattacgtgggtctccacagtttcaaaattgatggagtagtcaaaattttagtatcacaagtacaattggggcataatttgaactatgatttgttttatttttaattgtcaagttattttttggttctcgctacttgccagtcatttaccattctgtctcctggcccacctcccaccattcagggtcaccactctggctttatgaggtgttggcatggcggccctcttttgggcacttcattcattctgatgccctctcgtcctccgagctgctcctcagaagccaatcagcaggcacaaatctaactccattcattcaggaggattcttagcargcagctcagtcagagcataggcaacaatctgaaaaccagacataaagcactgtgcttatttggcacagcatctatgcaggcagatgcataaaagttgtacaaaacaacaataacaacaacaccactgttaattataataatacctggtggcttgaatttcaggtttaaaattttcctttatagtacaaaaaac

SEQ ID NO: 634037 - DNA, 514 bp, Homo sapiens
acttgttcaaaaagcctgtttctcatctgaaaatggggataataatgctgttatgatctttaaataagacatgtaaactgtagcatagtgcctgacacataataaatgtctaatatctggtygctattttatcatgattactaccattacattttatgactggacccagatgccacacagcctgaccctccaccatcagagtcacccttcgggttaacaattttcatccttcagtattgtgttttctaatacaaaatcctagaatgttgagattcacactaaacatgtattaagtagcttagaatactccccgggggaccctgaatccaaacatttttttttctttttcgtggaggggaagagtgccagaagtttctggtcagcatcttgctgatgtcacccccagatcatgaattagtttatcaaatttctttcttaacaatggcagctgaagaaaatgtcactaatttctggtgcccagaggaagccctaagagctggaaaaggaaagagtc

SEQ ID NO: 634038 - DNA, 607 bp, Homo sapiens
tttttaaaagtaatggcagctctttattttttattgtcttaaagtccttttttaatgtgtaaatcttagatatataacttttaaatcacatgtatwcttttttggtcaaggaagaaagagaggagggaggccttcatgcaaaataattttaagtcagactaaatagctatgatattactgtctttagtcctaatggatttattcatttgtcttctgtttgacatgtagaacccctggcagcggttggtcaaaagaatgacacgattctttaccaaattggatgcagacaaatcttatcaatgcctgaaagagacttgtgagaagttgggctatcaatggaagaaaagttgtatgaatcaggtgtgtttcattgattttcattataccttttcctgaagaagaatttaaatatttgagtaaaagctatcattagtatattttttaaatataggctgtggctcacacctgtaatcccagctttttgggaggctggggtgggcggatcacctgaggtcaggggttcgagaccagcctggccaacatggtaagaccctgtctctactaaaagcacaaaaattagccggcctggtggtgcatggctgtaatc

SEQ ID NO: 634039 - DNA, 592 bp, Homo sapiens
ttgtctttctcttccagggcaatacattgtttttactcatcatgtgtccttaccctcttctcggctgtggcagtttctcagaccttcttaatgtggtactctcccctttcccctagggatgtggcttcctgagagccaagctgcagtgtttgttatttcccttctggatgtagccacccagcagagctaccaggcaccaggctgktactggggagtgtccgcaaagagtcatatgatgtgatccatcttcaggtctctcagccatggagaaacctccctccagtggaggtagctgggcagtgaagtggactctgtgagggtcgttggttgtatttttgataagtgcactggttttgtgttggttggtctccagccagaaggtggcactttcaagaatgcattagctacagttttatagggaggatacaagtttaccctagggttgcctttggataagtattcaggtttcttaggtggtgggcagggccatagagctcccatagagctatcctttgtcttcagctaccggggtgggtagagaaagaccatcaggtgggggcagagttaagcatgtttgagctgactcttctgg

SEQ ID NO: 634040 - DNA, 582 bp, Homo sapiens
gcaaaccttatctagaggtcaacaagtatttctttactgattacctactgcagattgtccccaacttatgaagcgtgacttaggattttttggctttagaatggtgtgaaagtgatctgcattgagtagaaaccgtacttccagtacccatacaagcattctgtttttcacttacagtacggtagtcaataaattacatgagattctcaacactttattgtaaaataggctttgtgctagatgattttgcccaactgtaggctaatgttaaatgttctgagcatgtttaaggtagtctacgctaagctgtgatgttccataggctaggcgtattaaatgcattttctacttaagatattttcaacttaaaatgggtttatggggatataacccaatcataagttgaaaagcatttgtatatgcagtttgctaatcacttgaaaatgtaaaaagaataaaaatgcggtcatagtccttaaggaagttttggtcttcttacagggaaagaaatacaggcagctgtctatatcygataggctacagttctggaagtgtggttcttgaatcatcatcactagcagc

SEQ ID NO: 634041 - DNA, 643 bp, Homo sapiens
tctgtccctctgccaagtggacatgttttcctgagttttcccctgacccctctgcctcctggtgtatgaaatggagcccattacctttctgtgctctctacagtcactgctaagttgttggtactggaaactgggcagttagtcagtcaaattaatgyaggaatggtgagggctgagaagatgcaagcgacacagggctgctggggatgagcagatgtgaatgaagacgagaatgaagcgagggttaatccatttggcattgttataaaggaatacctgagacggggtaatttataaggaaaaaaggtttattttggctcatggctatactggctgcacaaacatggaagcagcatctgcttggcttctggtgaggcctcagaaagcttttattcatggcagaaggcaaagggggagcaggggtgccacatggtaagaaacaaagcaagagagaggagaggaggtgccaggctcttttaaaccacagctctcatgtcaactaatacagtgagaactcactcattcccatgaggagggcatcaagccattcatgagaaatctgctcccatgaccaaaacacctttcatcagacctcacctccaatattggggatcacatttcaacatgagatttagaggggaca

SEQ ID NO: 634042 - DNA, 447 bp, Homo sapiens
gggctccctaagaacggggaagataggatcacgagctaggaagagccaggtgtcagcacttaatcatcagattcgaggtaggcaaaattcctgtaatgggtagcaagactggatggtagccatagaatcctggcccctagaactctacagagataacgaataaaacctggttttcttaggaacaagttgtgtgctcctccaagagtagtgcttaatacatatgatcaaaagaaataaaaaatgaatgagcagaatatgggcttcaactgacgaatgacaagtcataatcccttgcctagttttcatacccgagccagttctcagacccaggaacattaagccaatggccattatatggtgtagtgcccccgacagayagaaacgtgagtttggaaaccaacaagcttggagatccatttgggagaccacttgggggatttgtgtttg

SEQ ID NO: 634043 - DNA, 491 bp, Homo sapiens
gctcctttagcttggaggagtttgttattacccaccttctgaagcataattctgtcaattcatcaaactcattctccatccagttttgtgcccttgctggcgaggagytgtaatcctttggaagagaagaggcattctggtttttggaattttcagcatttttgcgctggcttttcctcatctttgtgaattcatctacctttgatctttgatgctgatgacctttggatggggtttttgcgtgggcatcctttttgttgatgttattgctttctgtttgttagttttccttctaacagtcaggcccctcttctccaggtctgctggagtttgctggaggtccactccagaccctgtttgcctgggtatcaccagcagaggctgcagaacagcaaagattgctgcctgctccttcctctggaagctttgtcctggaggggcacacatcagatgccagccagagctctcctgtataaagtgtctgtcgaccc

SEQ ID NO: 634044 - DNA, 491 bp, Homo sapiens
gctcctttagcttggaggagtttgttattacccaccttctgaagcataattctgtcaattcatcaaactcattctccatccagttttgtgcccttgctggcgaggagttgtaatcctttggaagagaagaggcattctggtttttggaattttcagcatttttgcgctggcttttcctcatctttgtgaattcatctacctttgatctttgatgctgatgacctttggatggggtttttgcrtgggcatcctttttgttgatgttattgctttctgtttgttagttttccttctaacagtcaggcccctcttctccaggtctgctggagtttgctggaggtccactccagaccctgtttgcctgggtatcaccagcagaggctgcagaacagcaaagattgctgcctgctccttcctctggaagctttgtcctggaggggcacacatcagatgccagccagagctctcctgtataaagtgtctgtcgaccc

SEQ ID NO: 634045 - DNA, 647 bp, Homo sapiens
tattctgatcttccaactgcctatctttgttcatcttttaagatctattttaatattccatctattgtgttctttattgattatacttwatatcaaatattcctacctctttttgatgatttttgtttcaacttgtacttttaattatctctaaatatattttcattcttgttttgaattcctacttctaataatttggcttcagttagtacatactgtttagtacactaatttagtgctttttttgagcataattgtactcttcagtttataattattttttgtctgtggatttctatttctccagggttatcaaaatctccacctgataatggattttagaaaggccagatcctagtccaatagtcttggtgagttcaaagagtggggaaggaattagccttaaagagatggtttccagggactatgaaatagtcgataactcccgtttgcatacatattaccaaacaactgatttattcgagatttaccattaaacccttaaagagaagtagcactgggatgaggcagttttcctaaattataatgtacaaatcctggggctttgaaatgagcagactaataacttctgacctgataatattccctgcactcttgaccccaaaatatagtctgggccatgccaa

SEQ ID NO: 634046 - DNA, 539 bp, Homo sapiens
tattctgatcttccaactgcctatctttgttcatcttttaagatctattttaatattccatctattgtgttctttattgattatacttaatatcaaatattcctacctctttttgatgatttttgtttcaacttgtacttttaattatctctaaatatattttcattcttgttttgaattcctacttctaataatttggcttcagttagtacatactgtttagtacrctaatttagtgctttttttgagcataattgtactcttcagtttataattattttttgtctgtggatttctatttctccagggttatcaaaatctccacctgataatggattttagaaaggccagatcctagtccaatagtcttggtgagttcaaagagtggggaaggaattagccttaaagagatggtttccagggactatgaaatagtcgataactcccgtttgcatacatattaccaaacaactgatttattcgagatttaccattaaacccttaaagagaagtagcactgggatgaggcagttttccta

SEQ ID NO: 634047 - DNA, 473 bp, Homo sapiens
agtgctttttttgagcataattgtactcttcagtttataattattttttgtctgtggatttctatttctccagggttatcaaaatctccacctgataatggattttagaaaggccagatcctagtccaatagtcttggtgagttcaaagagtggggaaggaattagccttaaagagatggtttccagggactatgaaatagtcgataactcccgtttgcatacatattaccaaacaactgatttattcgagatttaccattaaacccttaaagagaagtagcactgggatgaggcagttttcctaaattataatgtacaamtcctggggctttgaaatgagcagactaataacttctgacctgataatattccctgcactcttgaccccaaaatatagtctgggccatgccaatttctgtgttgaagtaacaggtgatatagtcccacagagatgaagaagataagtgagcac

SEQ ID NO: 634048 - DNA, 473 bp, Homo sapiens
agtgctttttttgagcataattgtactcttcagtttataattattttttgtctgtggatttctatttctccagggttatcaaaatctccacctgataatggattttagaaaggccagatcctagtccaatagtcttggtgagttcaaagagtggggaaggaattagccttaaagagatggtttccagggactatgaaatagtcgataactcccgtttgcatacatattaccaaacaactgatttattcgagatttaccattaaacccttaaagagaagtagcactgggatgaggcagttttcctaaattataatgtacaaatcctggggctttgaaatgagcagactaataacttctgacctgataatattccctgyactcttgaccccaaaatatagtctgggccatgccaatttctgtgttgaagtaacaggtgatatagtcccacagagatgaagaagataagtgagcac

SEQ ID NO: 634049 - DNA, 543 bp, Homo sapiens
tgtgcacctaatagtcccagctacctgggaagctaagatgggaagatcacctgagctccggaagtcgagactgcagtgagccatgattgcactattgcattccagcctgagcaacccagtgagaccctgtctaaaaaaaaaagaaagcaaaagaaagaaaaaaaaatctccaattagtgccaaaggaacaaatgcagtgcttattggtaaactgtcatgggcaatttagggttctkgccaagaacaaattggtaaactttttgtcttacgcattaacattgtttcattacatgagttcttcaatagcattatctatagttgctgcctaatacttcattagattggtgtgctctaatttattttttaagttctctactgatgaatacttaagattgttgtgatttttaaaaatttccacttttatatatagtattgctttagtatctttctacctccgtgcactcctattcccttcagaagtgaaaccgtcaatagcatacaaaatgtgtgtatttctcattgttcaaaaggcctcctgaagac

SEQ ID NO: 634050 - DNA, 595 bp, Homo sapiens
cacgtgcatgtgttcatgtgcacacacacagttctttaaagtcctgtccttctctgagtgcctctacttcctcagttcttccttagaccatgtttcactgggacgttgtgctgtgtgggctgagggtcattcccaaatctgccccgctagcaagctttctgaaagtacagcctgaggctcacctctgatgaaaagactggaggcaggtccagaattttcctctctacaccttccaatcttcagatagtctttgggaaccccagtttaaatggctggacctcattctggaagtgtagggttaagatccagggttgagctccaacagggaaatgaaattataaygtaatgctgctgctttgggagagctgtggatgcaaatgctgctgacgctgctttgcaggtatagtgctgggaccccaaggaggatagataaggtgccctgaatctttaaaaagactcatcatgtagaaaatgaacccagaacatctttcctttttctcactcattcatttagctaacatttcctgagttatactactaagcatcagacatcgttcgtggagattttattgtgtctaggggagaagataaaaat

SEQ ID NO: 634051 - DNA, 634 bp, Homo sapiens
aataatacaaattttaaaaatatatagtataacaactatttacatagtatttacattgtaaaaggaattacaaataatctagaaatgatttaaagcatacaggrggatgtccctagggtatatgcaaatattacatcattttatatcagggacatgagcatgcacagtttctggtatccacaaggggtcctggaactaatcccccacagatactgaggactgacaatccgatgtgggtgtttaacccatctgtttatataattatttgacactaatgttgactgagtgctatttatttatttattttgccagtgtacccatcagtggaaccaggatggttaaaggcaacttatgaaggcaaaacaggactagttccagaaaattatgttgtcttcctctaatactatttagtggatggcagtatcttcatggtatccatggtaacgaataaatgctatgattttatctgacacagatacacggggatcagcccactaagtgaaaacagtcaatttctatcaagttcttcaccagcagactatgtagctccttattaatggaaaaaaagatttaaattgttggccattcttttttggttggtttcttattttaaaatatcttacttgtgaaaaat

SEQ ID NO: 634052 - DNA, 634 bp, Homo sapiens
aataatacaaattttaaaaatatatagtataacaactatttacatagtatttacattgtaaaaggaattacaaataatctagaaatgatttaaagcatacagggggatgtccctagggtatatgcaaatattacatcattttatatcagggacatgagcatgcacagtttctggtatccacaaggggtcctggaactaatcccccacagatactgaggactgacaatccgatgtgggtgtttaacccatctgtttatataattatttgacactaatgttgactgagtgctatttatttatttattttrccagtgtacccatcagtggaaccaggatggttaaaggcaacttatgaaggcaaaacaggactagttccagaaaattatgttgtcttcctctaatactatttagtggatggcagtatcttcatggtatccatggtaacgaataaatgctatgattttatctgacacagatacacggggatcagcccactaagtgaaaacagtcaatttctatcaagttcttcaccagcagactatgtagctccttattaatggaaaaaaagatttaaattgttggccattcttttttggttggtttcttattttaaaatatcttacttgtgaaaaat

SEQ ID NO: 634053 - DNA, 466 bp, Homo sapiens
ccacatacatcttaaggggtctaagatttctggaatggtaaattagcattggcttcaacttaaagtcaccagctgcattagcccctaacaagagactcaacctgtcctttgacgctttgaagccaaacattgacttctcttctctagctatgaaagtcctggatggcatcttcttctaagagaaggctgttttgtctacaytgacaatctgttgtttggtgtagccaccttcatctatgattttagctatatcttctggataacttgcagcagcctctacatcagcatttgctgcttcacctgagacgtatatgttaggatgtggctacttttcttccccatgaaccaacctctgctagcttcaaacatttcttctgcaatttccttatttctctcagccttcatggaattgaagcgagttaggaccgtgctctggataaggctttggcttaagggaatattgtgg

SEQ ID NO: 634054 - DNA, 466 bp, Homo sapiens
ccacatacatcttaaggggtctaagatttctggaatggtaaattagcattggcttcaacttaaagtcaccagctgcattagcccctaacaagagactcaacctgtcctttgacgctttgaagccaaacattgacttctcttctctagctatgaaagtcctggatggcatcttcttctaagagaaggctgttttgtctacattgacaatctgttgtttggtgtagccaccttcatctatgattttagctatatcttctggataacttgcagcagcctctacatcagcatttgctgcttcacctgagacgtatatgttaggatgtggctacttttcttccccatgaaccaacctctgctagcttcaaacatttcttctgcaatttccttatttstctcagccttcatggaattgaagcgagttaggaccgtgctctggataaggctttggcttaagggaatattgtgg

SEQ ID NO: 634055 - DNA, 570 bp, Homo sapiens
tggtgagaaatattctaaagtacttaggaaacgtgatattgacttccttggaaaacacaaacaagtactcaataaaattggaaacactgtatttcacasttatgttttagagttcaaagttacagatacaaacaggagtatgtttcaagcatttggaatcggtagattgtagtgctcatcatttgatgttaaccacaaaactttgataaaatggcaactgtcagtgagttaagccattctatgtttaattttattctgtaattgttgattggttgttgagaaaacacagatatcagagtttattatcagagagtgatccaagaaagaaggtttaaaaaaaaaaaaaaaggattttccaaagaattgtaatagaatacttttgtacaccttataatctattctttggtactgttgtaaataaattgtaccagcatttgaattttaagtgttttattgggttgttcctactgctgtcaccaacattctatatgtattaaattagtattaaaactttataatatacatggaagtaattggaaaccctctaaagactatgaatcagtgaggcaa

SEQ ID NO: 634056 - DNA, 553 bp, Homo sapiens
tgtcaaggggtgcagatattttggtagttcgtcagatggtgaaacatacagttaccacatgactcagtaattcctcaagagagagaaaaacatgtatctacacaaaaatttgtacatgaacgtttataataggggtccccaatccctgggctgcagrccagtaaaggtcatttgtggccggttaggaacccaactgcatggcaggaggtgagacctgggtgagctctgcctcctatcagatcagtgctggcattagattctcataggagagtgaggcctattgtgaactgtgcctgcgagggatctaggttgcctgctccttatgagaatctaactaatgcctgatgatctgaagtggaacaggttcatcctgaaacccttccctcctcaccaattttttcatggaaaaatagtcttccataaaactggtctctggtgccaaaaaggttggggaccgctggtttataacattattcataatagtgaaaaggtacctatcaactaatatttggataagcaaaatgtggtctatccatacaataaaatgttattt

SEQ ID NO: 634057 - DNA, 553 bp, Homo sapiens
tgtcaaggggtgcagatattttggtagttcgtcagatggtgaaacatacagttaccacatgactcagtaattcctcaagagagagaaaaacatgtatctacacaaaaatttgtacatgaacgtttataataggggtccccaatccctgggctgcaggccagtaaaggtcatttgtggccggttaggaacccaactgcatggcaggaggtgagacctgggtgagctctgcctcctatcagatcagtgctggcattagattctcataggagagtgaggcctattgtgaactgtgcctgcgagggatctaggttgcctgctccttatgagaatctaactaatgcctgatgatctgargtggaacaggttcatcctgaaacccttccctcctcaccaattttttcatggaaaaatagtcttccataaaactggtctctggtgccaaaaaggttggggaccgctggtttataacattattcataatagtgaaaaggtacctatcaactaatatttggataagcaaaatgtggtctatccatacaataaaatgttattt

SEQ ID NO: 634058 - DNA, 553 bp, Homo sapiens
tgtcaaggggtgcagatattttggtagttcgtcagatggtgaaacatacagttaccacatgactcagtaattcctcaagagagagaaaaacatgtatctacacaaaaatttgtacatgaacgtttataataggggtccccaatccctgggctgcaggccagtaaaggtcatttgtggccggttaggaacccaactgcatggcaggaggtgagacctgggtgagctctgcctcctatcagatcagtgctggcattagattctcataggagagtgaggcctattgtgaactgtgcctgcgagggatctaggttgcctgctccttatgagaatctaactaatgcctgatgatctgaagtggaacaggttcatcctgaaacccttccctcctcaccaattttttcatggaaaaatwgtcttccataaaactggtctctggtgccaaaaaggttggggaccgctggtttataacattattcataatagtgaaaaggtacctatcaactaatatttggataagcaaaatgtggtctatccatacaataaaatgttattt

SEQ ID NO: 634059 - DNA, 634 bp, Homo sapiens
cttctgcaagaagtgttaggtagagacctacgtcatgaggaagaaaaaggggacacaatggtgggaagggaaaaaaacttacaaatattccagaaaagggaatggaatatgggaatgaatgaaggttttcttggtcggggagggaagagcctggcattttagtggaagaaagtccagtatgtttggagcacagtggaccctggaggtagaggccacgtgtgcagctttataaatgactcacagtattttactccctagcctaagggcagtgataagcaatagaaacgtaagygggagagtgatatcatatttgtattttacaatgtcattctagatgcatatcatgcatggataggaggccagactacctgggcaaaccagttttggggctggcagttagtggcttagataacgagggtgaaagtactggggacaaggagatgtatgaaagctattttagaggtgaaatgacaacagtaagaagtgggttacatactggaaagttagtaggagaaggtttcgggaatgtccctctggatttcaggttgcataactgggtggttgttgaaccacctactgatataggccacatttatgttggatgacaatgatggtaagttgagtttttagtcat

SEQ ID NO: 634060 - DNA, 634 bp, Homo sapiens
cttctgcaagaagtgttaggtagagacctacgtcatgaggaagaaaaaggggacacaatggtgggaagggaaaaaaacttacaaatattccagaaaagggaatggaatatgggaatgaatgaaggttttcttggtcggggagggaagagcctggcattttagtggaagaaagtccagtatgtttggagcacagtggaccctggaggtagaggccacgtgtgcagctttataaatgactcacagtattttactccctagcctaagggcagtgataagcaatagaaacgtaagtgggagagtgatatcatatttgtattttacaatgtcattctagatgcatatcatgcatggataggaggccagactacctgggcaaaccagttttggggctggcagttagtggcttagataacgagggtgaaagtactggggacaaggagatgtatgaaagctattttagaggtgaaatgacaacagtaagaagtgggttacatactggaaagttagtaggagaaggtttygggaatgtccctctggatttcaggttgcataactgggtggttgttgaaccacctactgatataggccacatttatgttggatgacaatgatggtaagttgagtttttagtcat

SEQ ID NO: 634061 - DNA, 615 bp, Homo sapiens
ccgacttttatataaactayagtacctcaaattttaacagtatataaatagggttctgaattaaaaacccaggtgtcttccctgccaaattccctatttgttaaggtttcagctcagaaatcaagaaggactctgaaaatcccaacctttgatatgtggtggtatattggattttaagcatcaatcatgtgcagacagtgttcttagaccagttcctgtggggatcgttctctgcaaaaaggaggcagttgagggtacacgggcagatataaagcctcaaaaatgctgccatatagagattaaaagtgtgcattttatatatatatatgtatatgctgccatatagagattaaaggtgtgcatttttatataaaatgcatctttatataaaatgcacatttttaatttataagactgagtaaattcaaggcaaaattgagttgttgtcaactctggatgcaaaaacaccatgggaaacactcatgaaagatggcagatggtccaaaggggagaaaggggttatcctactgaggaggttttgacaccttcagcccctgcctcctccaacacttaagtttcccaaatagccgtgtacacaggcatcttgaatggtgg

SEQ ID NO: 634062 - DNA, 296 bp, Homo sapiens
tactctaaaaagaacttcaaaactctagaaataaaaatgtcaaaactaaaataagtattgccatcmatgggaagtggctcatttatttctttgtccccagtgtcctaggtcaaaagaacagaactcagtgaatactttcagtgaactcaacacacaaaaatgaatggccatggcatctcatcagagtgcagctaatgacctacctacatgagagtgaagcttttcttggacaccaaagagagattgcttgcttccaataaccccaaaatgcccagcataacactaagcattcagac

SEQ ID NO: 634063 - DNA, 503 bp, Homo sapiens
gaagagggctattaaaaacagaaaacagagttttaaaacataaagaaggatatcagaagcccatctgactaatagaactgctgaatgagagataataaaatcaagagaattgccmaaaaaaaaatttcaggaatatttccagaatgaatttttttttaaagtttccacattaaaatggcccaatatgtacactgtacaatgaatgagaaaataaacaaaaggcatgtcatcataaaatgtttaaaaaacatggataaaatgaaaacctaaaagcaacccataagaaaatggagcttacataaaaatcatcagaaatcagaacaataatggatcttcaacagcgtaaaagaagcaataaaccaaaatccatagccttcaaatttctgaggactaattcattcaaacctagctttctatttctagttaaattatcaatccaggttgagggtaaaataaaaatatttacaaatgtgtaaggcctcaaaaattctactgcttctgta

SEQ ID NO: 634064 - DNA, 598 bp, Homo sapiens
tatggcaatgtatgtggtcttcccattggatcctcattatttctctgtgtagtttcataacaaaaaaactatcagtctgggattgctgtcagctgatttttttctagtcactgagttgctcaagttactgtttcagcaaaatgggtagcaaccacagcaatttaaaaataaaactattttaaaagcaataaagtatttttgttgttgttgttgttcttgctgttggtttagaataagccacgtcagtctttcaattcttaactgttccmaaattcaatctgaggtcttggtgtagcattctttcttttactctgttgtatttattaactgggggcgaacacttagtaactaggaatttattttaataaacaatactgtaaatctagtaaactcaaaagacatcaaaaggactcattcactagctagcaaattggtacaaaatgataaataagagtcaaaatcaaatcatgtaatgatgaagtcaccaacatgaaaatatcattgttgacgcaaagcagagcttcgtggcacatttcctgatatttagttcagctgctgtctcctgcctccgtgtccccccaaccccgtcccactaccc

SEQ ID NO: 634065 - DNA, 587 bp, Homo sapiens
gagaattacatacaacaaagtattactcagccttaaaaaggaatgaaattctgatatatgctccaacatggacattatgctaagttaaataagcagaggcaaaaggacaaatactgcatgatkccacttacataggatatctagaacagtcaaattcagagacagaaagtagaatggaggttactagggctgggaggagaggagaatggagagttattgtttaatgtgtatagagttttagaatgggatgatgacaaagttctggtgatggacagtggtgatggctgcacaatgtaaatgtatttaatgccactgagctatatattgaaaaatggttaaaataataaatttaacgttacatattttttttaaccacaataaaaaaaacactgctgtagctaacaggcttatagagaaactgccagattttaaatgcacataccaggaaagaacagaggctgaaaatcaattatctaagtactgatctcaagaagctagaaaaacagcaaattaaaccaaaagaaagttgaaggaataaaataaaaagcagaaggaaattaaatagaaaacacacacaggagaaccaa

SEQ ID NO: 634066 - DNA, 541 bp, Homo sapiens
ggataatgtgttctctgcctgtgtattctcagagtggccaaaccttggtaccaacacaaggattgaaatgtaaagcttcatgcattttatttgaaagtctcaaagctctaacacttgcaatttttgttgggggagggtagggctacaactttattaaaagaaaagtgcaatgagatttgttgaaagctcaaaagaaagggaaaacttagacacctcccctcaagtacagaaacaagtgccaagtggacctttggggatgtcatagtcagatggtgtgctcatcttccagttgtttctggcaaagatcaacctctgctggtcagggagaaggccatccttgtcttgaatctttgccttgacattctcaatggtgtcactgggcttgacctcaagggtaatggtcttacctgtcaaggtgttcacaaagttctgcattgtcaatggcaatggcagcagtgcacaagaacaacggctcaactcccagcttygatggaactctggtaattttcaatgcacaataatatgatgccatccaagctgt

SEQ ID NO: 634067 - DNA, 482 bp, Homo sapiens
tacttagtcaaaacaatcaaaattatcaagtcttgtttccgtctcctccatcttataatatcattaaaaagttaacatttttacactttttcatattccttctcttcctctcctctcccttcccttcctgaacaattcagtcctaatgcccataagcaggtcagactaaagcaggtgrctatggcagagagtagagggaactgtggttctccacagcaggggccagagcccaagctgggtaagggggatgtccacaaatgggggtggctcagcagaagttgtcagagctggggtgggatgaagaaagcttccacacagtgtttccacctggtgcaagtatcagaacacaggaggagtaaggagagtatctgcatggggaagagggcagaaacagtgatggaagattggctacatacaggtgggttgagcaaataactaaatatagtaaggaaaatgggagacaggtttctcagtatccaaga

SEQ ID NO: 634068 - DNA, 568 bp, Homo sapiens
caagctgtgtagtcatgaataggtcagttcacctctctggacccagttttccaatggcaaaatctggaagagttatgcattctataagattcttaagagttttaagcagtaccttccatttcattggaagggcacagtaatgatgatgtgactgcttatgcttgtataaatacttcattactaataaaatagaaaatagaaaacctcagtcttcatgagatccctatgcagtagaatgacaaggagacattccaattttacaattaagaaagtagatttrgagagcttaagcaacctacttaggaacacatgatagtcaaatttgcttcagtaatatcatcagactagaagtatcagatggttccttcaccctggtatccagtggctttggaaatagtctttgcttggaaggaaggagactgatatttattgagtgcttactctgtccaaggcatcagtaatatgttattttacctggattttttcactgtgtgtggtcatattcctatggtgttacatattatcaatttatcatttcacattaccatgttacaaatgaaataccgag

SEQ ID NO: 634069 - DNA, 556 bp, Homo sapiens
tttaagcagtcttatttattagttatgcctcctctgactgayaaacacaatttgttaagccagttcaaagtcaaatttatttattattaaaacattactgaaatataatctccaggtttctagggtttatatgagatcccatggtgttgatatatcatccgctccaatatttaaatatttagttaggttctaaaaaaatcattttgtcctactttctaacatttattttgtcataaagtttatttggcttaatagctggttaaatatcccccataagaaactttttgcaactccacattttattttcagaagcggacaggaagtgataaatatgcacagagtggaaagctatgggaaagaacactttgcagctgttggtaactttgggcaaaccacgcatagcatcggacacctgagaaagttcagtcttgtgggcaaatgagtgtggatgtttactggaaaatcagcactgggtttaaacatccaatagatttaaaaaatactctcagtgaatttttttctttccattttgaaatgtgtgattcattaatgaaac

SEQ ID NO: 634070 - DNA, 511 bp, Homo sapiens
gaattcagtggggagagcagaatatatttaaccagattcctattgataaaaaacagcagctgtattttattgctaatttaaaaatattataagtcatggccatggaatattaaattattgggtcacaacaatatctagttgccccctctctcactttgcagctgtcagggtcccctctgccaatatcagatggtcattcagttttggtctgatatcttcagtggggcattgaagtcatcatcaacataatccaggcacaatgcaatgcacagctctaaaattcyactgaaggtaatttgtgttcctgtaatggtttaaagttttgcagaactgcaggctcatgactaggaatataaacaaccattattttgtagaagtaaagcagaactggttattagaatcttggactgagagaatggcaaagtcagtcatcaggaactgtacacctgagaaatgctgcggtcatttctttctttttaaaatatgagaataaagaacttagtattggaag

SEQ ID NO: 634071 - DNA, 511 bp, Homo sapiens
gaattcagtggggagagcagaatatatttaaccagattcctattgataaaaaacagcagctgtattttattgctaatttaaaaatattataagtcatggccatggaatattaaattattgggtcacaacaatatctagttgccccctctctcactttgcagctgtcagggtcccctctgccaatatcagatggtcattcagttttggtctgatatcttcagtggggcattgaagtcatcatcaacataatccaggcacaatgcaatgcacagctctaaaattccactgaaggtaatttgtgttcytgtaatggtttaaagttttgcagaactgcaggctcatgactaggaatataaacaaccattattttgtagaagtaaagcagaactggttattagaatcttggactgagagaatggcaaagtcagtcatcaggaactgtacacctgagaaatgctgcggtcatttctttctttttaaaatatgagaataaagaacttagtattggaag

SEQ ID NO: 634072 - DNA, 638 bp, Homo sapiens
gagctcctgggtgtgtggtgttcaggagttcaggaacctgcaactgcgtggggacactgatgggaaaagatccacctgactattattaagggcatgtatgtagtgttacggttaactgcagggctttggattccaacagatctgagtttgtcttgactctgccaccagtaactggagactctggacaagtagcaatccttctgggcctagttcttcagctgtaaaaggggattatgtctacgggctgaattgtgcccccctattcatatattgaagtcctaactccaagcacttcaaaatatgactgtatttggagatagagcctttagagaggtaattaagttagaatgaggtcatgacggtgggccctaatccaatatgaccggtgtccttttaataagaggaagtttggacacagacatgtacagagggargatgatgtgaagaatcagggagaagacaaaccagggagagaggcctggaatagatccttccctcatggccctagaaggaaccaaccttgcctacaccttggtctccagaactgtgagaaatacatctttttttttttttaagacaaccagtctgtgatagtttgttatgacagctcaagttaactaatctacagagtttttgag

SEQ ID NO: 634073 - DNA, 438 bp, Homo sapiens
cttactttaaattggaagctggaaatgattaaacttagtgaggacggcatgtcgaaagccaagactgactgaaagctaggcctcttgtgccagttagccaagatgtgaatgcaaaggaaaagttcttgaggaaattaaaagggctactccaatgaacacaaataattaaaagcaaaagaagcttattgttgatggggagaaggttttattggtctgtatagaagatcraaccagccacaacattcccctgagccaaagtctaatccagtgcaaggctctaatgctcttcaatttagtgaaggttgagagaggtgagaaagctgcagaagaaaagttgaaagctagcagaagttggttcatgaggtttaaggaaagaagctgtctccataacataaaagtggaaggtgaagcagcaggtgctgacggagaacctgcaga

SEQ ID NO: 634074 - DNA, 506 bp, Homo sapiens
atctaatgctgcagtggacccacagtttgtttacaagggatgtttttgcctgggataaaacatgagctcttgatttcttctgagtttgcagactggaccaagatttgggcaatttttttaggcttttttcaaaamtgctcacgaaggtgttatctgtgtctcaacatattcagcaaaatttgtaaatttcttccccagataaatttggaagttcccatccccttctgataaataactagaagatactgccactcagcacagagatagtactcattacatcatctttggttcaatgattcatttccaaatctccttgattcacttaataatattacatcatacttacacaactgcagtaataactaagtcatatcataagtgtgctatgaggtagataaattatccctttttatggatactcaagaacacacatctattaagtagaaaaattaaaatctgagtttgtcttactccacacagacttaactttcatagcactattctag

SEQ ID NO: 634075 - DNA, 556 bp, Homo sapiens
agcagctcccccaagattcataggcttggaggctgctgagaggggaaagttttctgcaacatgagagaaaaatggtcttatgggtataaaacttacaattttggaaataacgtctcctgtaaagggaaagggagtttgtttcaatstgaggaaaactcccattttcaaatgttcaaagagctgatatggcagatcttgggggttggctgactcaactgcatttccaaccacattcccctcatttgtttttgtcttagaggctataaaagaaataagcccatctcatgaactgatgggaagacagcacagcactatttcactccgcagtgttgcctcagacgctgagctccggagggttgcaatagatctgccagtgtctccttgtgaaatttctgccactcccaccagacagacccaggtgctcgagcacttttaaaggaaatatgtctactcttgaaaaagagaaaaccctgctggtgggtccaggggaagatgttacacagcaccacatatggcttcattgcctcttcatcacatttagaggtctttccctcct

SEQ ID NO: 634076 - DNA, 556 bp, Homo sapiens
agcagctcccccaagattcataggcttggaggctgctgagaggggaaagttttctgcaacatgagagaaaaatggtcttatgggtataaaacttacaattttggaaataacgtctcctgtaaagggaaagggagtttgtttcaatgtgaggaaaactcccattttcaaatgttcaaagagctgatatggcagatcttgggggttggctgactcaactgcatttccaaccacattcccctcatttgtttttgtcttagaggctataaaagaaataagcccatctcatgaactgatgggaagacagcacagcactatttcactccgcagtgttgcctcagacgctgagctccggagggttgcaatagatctgccagtgtctccttgtgaaatttctgccactcccaccagacagacccaggtgctcgagcacttttaraggaaatatgtctactcttgaaaaagagaaaaccctgctggtgggtccaggggaagatgttacacagcaccacatatggcttcattgcctcttcatcacatttagaggtctttccctcct

SEQ ID NO: 634077 - DNA, 590 bp, Homo sapiens
ttctgcttcattatctctaagcagtgtctccccttgcttcccccctccccacttctcttgctaggacctttttttttttctttccccaaatagtgcaatctctaggcccaatttccataaaagaaaggagaaggaaatagtaaataatgtacttataatttaatatttgcattctattacrattcaaacaatatagaagtacaaaataaaagattagtgtccatgtctcccctcttctccctcagtgcctctcaccagatttaaaagaccagctttaaaagatggacttggagccttcttttttttttttttttaatgtttcaccatgtttatttgacatcatgatttcacagtccttacacaaggtgaaataagcactcacttcccttttttgttgcgtgtgtgttagcaggagtcggaagaacagaatatgagggaacaagcagagggtgcagaaaatggaaagatggggaaagaaagatgctgttgaagacacagagtgagtgtttatatgaacccttctctatacaagcagtatcaacaaagagtacaaagctgacaacatggagtgtcttcttacagaaataatc

SEQ ID NO: 634078 - DNA, 507 bp, Homo sapiens
ggcagcatccagcccctccagtcacagtcctcacagagcttcaggaaaggacccctttgcagagctctctttggaggatttcttataaatcactttaggtattgctacttgttgtgggagatggggacttaaatacttaaaaacaattaccaaacattaaacacaattcacgcttctctttcatttctttaaaggactctaggctccctctcctcctcctcctcttcctctattctttaggtgcagaatgaaaagatargacataaggaaaaacaacttttggaaaatatctgtaacataattatttaaagtaaactcatccactgctcacagtaaatggatgagatcggataaagtttgctttttaattaagggcaagtgaatacttaagccctttcgattagaaggattctgcatatgatccacactgcctctgtttgctggaagacagtgtaatttgttcttcttgatgctctagcccccagtttagatataccttctagatct

SEQ ID NO: 634079 - DNA, 491 bp, Homo sapiens
tgaatatacacagaaagagaaatgcagatgtggcaaaatgctaaaaactggtggttctgagtaaagtatacagaagttctctaatattcttgctacatttctggaagtgaaattattttaaagtaatattattttttaaaagtcagtaaaccagctaaagtatctcactgaagtctctcatctaattggtgtgaagctagaattcaaacctagattcatctgactaaaaaagcttgtgagttcttaccactattaaacacaatggaaaagagtgaaaaacccaatagagaagctgtcaatggacatcaaaagacaattaataaaacaagtatggcattcaaaaggaagggggagtgtgctcaatatcaccatttattcaatcaactaatataaaatgaacacatatgaacgcrtttttcatgatgatggaagaatacaaataactatttaagccaataatttagtataacttttataaaggataatttggt

SEQ ID NO: 634080 - DNA, 576 bp, Homo sapiens
tcttttattaacattagctttagtaatttttcttcacagaactatgtatttgtgtatttgttgtcaggtttggaatttgtgttggctatcaatttaatataaagtcttagactttatagagtataaaccctcatttatttttgttcatcgtattcttgcaaaatactgttttgacttggtgacctagagtggatcaaggcactatcttcaagtggtttctgtagtagcctaacctagaaacactgcctgacatagctgagtggcaatgaaaaacagccataggtactaacttaaaaattagctatagaattgcaactggcagctaagttagaaagctatttatagagcagcttgggatactaagatactccttgactgcatgaaggtgcagtgcaaggagagaaccattgcttcgcatcaggagattggaaaccttttttttttgagacggagtttkggccttgttgcccaggctggagtgcagtggcgggatctcggctcactgcagcctctgcctcccgagttcaggagattctcctgcgtcagcctcccaagtagctgggattacaggtgccc

SEQ ID NO: 634081 - DNA, 615 bp, Homo sapiens
gtaagaaagaaatgaaaatatttgtaatgatgctttaaagctttagggtacttttaaaataccctaaatatatcaccttactaagccaagatgttgtgaaaattaagtattagtcctattttttaaatgttgaaatggaaactgagtgactaattaacatgcctgaaatcacaatggtgaatcatgaatctcgaatttgattctagattttttttgctcattctgatgtgttggttagtcttgttatagtacagttgtagcacatggaaatggatgggaccatgcatggaagccagagagtctagagcagaacttcagtgatggcaaattaaaatcttcattatcagtatttgaagcagatattgaaaatgaatagctcttaggacagactatcaaataaatgtgagccagaagrtttttaatgggagaaattaactttaatgaaatatcttgtagaaagagttaaaaacaagatacctgccaatcccagtcactctggagagtatctaatgtagcaatgaaagtaaaaactagttaacattctccagtgtttgtcaagtttaggaagagattaacttgaaaagctgtggttgggtagaaggtttatttgaagat

SEQ ID NO: 634082 - DNA, 593 bp, Homo sapiens
cattctagtgctaggagggctggctctgaagtatggcaaacaaaggatacacttgaattgcatttcatgggagagaatcaatgagccttgttctataacctacgcttgtatgtataccggtagggagagaggtacgccctttccccacatttcctaaagacatgcagtcattttgctgcccagatgttcaacagctgtttaaaggctttggccaagacttttgacttgtgagaagggaatggtggctcttctcttcttttcttctattacatgagtgttattattagtcattggaattgtgcctacacaggcaaactgaaggggaatgctgaggaaatcatgcagataatgtaggctgacatctctttcctacgaagagcaaatataaatacactttgccttgtctgaagacatgggtgcttrgtgcccttccctgctttgtcctggcttggcccataatgatgtctctgaatagagagccctttcctttccgggaaaccgctacccatccaagtgtcaccttctgatgaatgctttcctactcccacaacaactaatatataactctacaacagcacttatcacagtttatt

SEQ ID NO: 634083 - DNA, 615 bp, Homo sapiens
ttttccctgcctccctcccacagttgttggggagatcatgacagtgggtgaagaagggagatataagtgaaatttgaaaaaaataaatttagaagtatattatcattttgatatattttttcttccagtctttttttcctaggcctgtttctgtgtcataccctcccttctaattatagtctatctccaattctgtattctattgtgaggaggctcctgggaagtgacccaaatttgggtaactctttgtagggaagtgtgcatgtggagacacagggcagtaagcatgtgtatctctgggtatgtgtctgtacagaggagagaatccactattccaatctctgtcttagcccttgttaaagcagcagaatgtgtcaacctastcctcttcccccaaagtcagcagtagtggtgcaggtgaaaccatgcctcttctgtgatatgtagctgcttgtaagtgaacttactgacaagtaatatccaatataaaatacatcagtgtcacagctgctaagtctttatttattacagtattgtatagtaccattgctgtcaagttttcaggctgctaataatgcttctaaccctgctgctaacacctcattctttcttcta

SEQ ID NO: 634084 - DNA, 650 bp, Homo sapiens
ctgctctttgttgtggcagctctgtggtggagaagaaagggttctgtagaggtggctcacagggcaaaggtgtgcggggcccagaggactggcaaccctacttcttcccatccacagtcagaaggagcagttctggtgggataattacaggtatcaatcaagcagcaaagagatccaggtcatttcccaagctctggaaggtactacaatgaatgaataggagacaagaaaattttataaattggttgctctatatgatgttcatttcattaagacattcagtccttctaatggaaaatgtgaagagtggaaaytactgtttttttgaccctctcatataaaatgaaaaccagatcttgaaggtatggggccttttcattgtatcttctttaggatcaatttaattatgccttacaagctaccttcaataataattgcaattgtctgcctttatacaaagcctctttctgtcttcaagactaaaactctagtgagatacctagggagattgccaaagtgttatttagtaagagttgttttttccatattttggcattcagcaagtgtttatcatgtacctactgtgtgtccagcttgtgccaagtcctgtaggagggaatgtgtgaatgaatcatggtgtctcctctccc

SEQ ID NO: 634085 - DNA, 582 bp, Homo sapiens
tgccccttccaggtccctgctctttgttgtggcagctctgtggtggagaagaaagggttctgtagaggtggctcacagggcaaaggtgtgcggggcccagaggactggcaaccctacttcttcccatccacagtcagaaggagcagttctggtgggataattacaggtatcaatcaagcagcaaagagatccaggtcatttcccaagctctggaaggtactacaatgaatgaataggagacaagaaaattttataaattggttgctctatatgatgttcatttcattaagacattcagtccttctaatggaaaatgtgaagagtggaaactactgtttttttgaccctctcatataaaatgaaaaccagatcttgaaggtatggggccttttcattgtatcttctttaggatcaatktaattatgccttacaagctaccttcaataataattgcaattgtctgcctttatacaaagcctctttctgtcttcaagactaaaactctagtgagatacctagggagattgccaaagtgttatttagtaagagttgttttttccatattttggcattcagcaagtg

SEQ ID NO: 634086 - DNA, 636 bp, Homo sapiens
gggtcacgctgctggcaggtggcagaacccaggtggtgtcaatccacagactccacagacctgttctgacctcaagcactcacagtccaaagagggggacgacttgtacatcaacactgcagtgcaggggaggcattctaggacagagctgtgcacaggatatcactgggagaagggacaggaaaaaccagggagggctttaggaggtggcatttgagcraggccatggtaggagtggtcgtcaaagtgacatctgactcctaattaacaatctatcaattcttatctgtaaaactccacaaatggctttgcagtgtcttgcatggtataataaaatctttttcatgtggttaggtcaggaaaatagacagtccaagtgaatagtcttattttaataaagagtatgtacagggattacaggtgttcaaagagtcagcctagaacagcatccccatcccattaaactgctggactgaaatggatcttcctgttgatttaaaagatgactcaggatctgaccggacccagcttaatcatgaatcacagatacagttaagatgaccagggcaaaaccagttttgggggtcttgatttttagctcaaaaacttggagtaccctagtaatattttgctgaa

SEQ ID NO: 634087 - DNA, 432 bp, Homo sapiens
gacataattaaccaagagccaaaccttgtgtcttttccctgctctttcgcctcttcctcgtgtgttcacccccttccacatcatagaaagagaacaagtgtgacttgggcattagcatgaagaagatgtgtctgtgggtgtaaggactgaggcattgttttaaattacagagttcacacacagagattggagaaaatgagtttctaagaagcttaggcacaaaggacactgagcctctacataatatatttaacaaaataacctgtgtacaacgtggcactgagatagagtcrcatcaaccgacatacacctcttccattaaagcttttttcattcatctattctttcaacaaacatttgttgaaagccatgctgggccacacctggtgctagtgccaggggaccacattgatcttcccatcaggtgggctt

SEQ ID NO: 634088 - DNA, 558 bp, Homo sapiens
tccatggggcatcttcctctacagactccttcaggaaataagcatctttgcctcgtcccagagctcttccccagggtcatggaagatgtttgaagccttttcttcagaagtacatttgaactccagtgtccatcaaacccagatacacatattatattaactcagagcccttaactgtcccgggaaataggttgagcaggacaaaataaagtctgacatacttagtgtttccactgtgcaccaaatcttctagtagtttctaaaggaaccagctttgcttaaaagctgccatttattgggtattttattttttagtggaacaggcactatgctcagaggtttatattcttcatgcaattttgtcctcaaaataatcctttgaaataggtgtgactatccccatttctcagcttcagaaaactgaggctatagaagtgatgtgaccagggtcacttagccaagtggatggtagaactggtatttgaacccttgactgtgtggctccaacactyaacctcttcccactggttctgagaaccagggaatcaaattctgcca

SEQ ID NO: 634089 - DNA, 544 bp, Homo sapiens
tcaggggacatttcaaaatagacaggatacctgtcctgtttactgctaaccccagaagagaagtaaaagaagagctaaataatgcgaatgcaaacactacctaagtaatctaaaaatagacatgccatctacttaaaacaagtggctgccatgggctagaaggcacgaagcagaacattggaaaaacaaaaacgaacaaaatccagtctcttcccttcaagtattgacgattgggttttggaggcacacacataaatgaacagtcacagcattatgtcctatcgtccagcaatgaatggatgcaaatctccatgcacrgggagaaggctggggaaggtttgcagaggagggagcatttgaactgacaggtgaagggtgagtaggaaagggaggggcggggcacactgcagagcaggagcagcaggtgcaggcagacttgaggcatgctgcagggacaggtctgtggccaggtgtagggaggatgggaggggagggaggatgggagggtggagcagcacagcagaaagctgggatttgtgcaggg

SEQ ID NO: 634090 - DNA, 532 bp, Homo sapiens
cctccctgctccccatggggcagcrgagtagagaggaagctctgagaatgaaagccagtgacacctgcgcaaatgtgtctgtaaaatagatgccagtattggagagtttggttaaagaaaatcccatgctgacattcagacaaaggtagtgagggcctttagagatttcagtccaggatttctgaatctaagtgtgggttttagcatttttttccccctccgccatatgccagttgtcttccaagcctttgatccggctgcttggcagtacctctatctaaagttaacaattttccgatgtgtggactgaaaattttcggcaccctgtgctggctggttgagggcccattttgagaattgaaaatacttgtatgcacatccttaggccatggcttcctgacgggtaattcaagcttgctcacagactggagagggaaactcactagccagcaagggtaagcctgccaaaactgcaaagacgagtggcagagaacagcatccactctggagtgtaataatcacattagctggt

SEQ ID NO: 634091 - DNA, 529 bp, Homo sapiens
tgcattgtttcatgtatcttcagggtaatcctactgggccgatgtgaattatttccatttcacagatataaaaagtgaggctcaaaagaaagttactgagtgartgagtggcaaaagctaggattcaatcaatcgattaatcaatcagcaagtatagactgtgcccaaatttgggtagccaggcaccctggttactgacagcatttctgtcctcacatagcttagaaagagaacaggcaatgtacaaatacccatcagtgttaccaaagaggaagttcaggtggcaatggatttaatgtcacgtggtgtaaagctctgtctatcctactctgctgctgctgaggtttccttagggagatttcttcactgtcccctgggcttccacttgttactcctgatggtgagctcccaggacatggctgtatcttacttgtctttgtgtccttggtgctcatcacagcctggcaccaagtaggtgctctttaaaggcttatcagtgcaaagatgaatggccagcaggctggctggg

SEQ ID NO: 634092 - DNA, 529 bp, Homo sapiens
tgcattgtttcatgtatcttcagggtaatcctactgggccgatgtgaattatttccatttcacagatataaaaagtgaggctcaaaagaaagttactgagtgaatgagtggcaaaagctaggattcaatcaatcgattaatcaatcagcaagtatagactgtgcccaaatttgggtagccaggcaccctggttactgacagcatttctgtcctcacatagcttagaaagagaacaggcaatgtacaaatacccatcagtgttaccaaagaggaagttcaggtggcaatggatttaatgtcacgtggtgtaaagctctgtctatcctactctgctgctgctgaggtttccttagggagatttcttcactgtcccctgggcttccacttgttactcctgatggtgarctcccaggacatggctgtatcttacttgtctttgtgtccttggtgctcatcacagcctggcaccaagtaggtgctctttaaaggcttatcagtgcaaagatgaatggccagcaggctggctggg

SEQ ID NO: 634093 - DNA, 553 bp, Homo sapiens
cccaccagagtttccaatttaataggtctggggtagggtctctggtgatgataatatccttgggctggggctttgagaaccgctcgtctggaagaaagacagactttacacacaagtctgtaaaaaacaagccagagggggcagaaagatctaaactacccaagaatgcaaaagagcttgtggaccagttccaaagaggagggcttggtcctccaggaggtagtatttgaatagctcttaaagaatatacaggcttttgaaatgcaaagcagttctgggcaagatggaggtcaagtaagagtaagagccagatccagaataatcatttttgctgctcccacacagtgaccggctgatcataatgccaacttcatgtcaagtctgtctctgggacaaattacttaagaaatcagtgtaaaacactcaactcagctgctggctagagagttccatctaatgagcatcactttgtgttgaattcttctgtgatgacagacaatgcaggaaaagaaacargttctgaggaagtggggtgtggggagctgctaattag

SEQ ID NO: 634094 - DNA, 566 bp, Homo sapiens
aagctacttgatggtccgaaccctccaacttacccccggagtactgagaagctgagaggttaagtaactttcccaaattcacaaggctagtcaagtggcagagccggagtgrggagaaaacctattcatttatcttggccagaaatgctgcttctgtctctgggtgggaagcttcctgctattttcttcagttgtgtgattttgtatgtatgcttgtaggccttcccacagtgtgagtttttttaatccactagagatatagctaatattcctaccaaggaaattgtcacttgctcagtcattctttacggggcccattattggatccaattagggccatggcttgttggctgcctatggctgttctgcttactggatgcccttgccatgccagcctgatcaatgccagcagggacacgtcccctgtgtgtcctcctggtcacttcctgagcctgctgcttaagcgccatgagccactgtgggacctgcacacaggtctcggtattgttgctccagcaagtctgactggcctcaaggagccagccaagtatggagtttgagaagcc

SEQ ID NO: 634095 - DNA, 565 bp, Homo sapiens
attcacaccctatagaaaggcacaaagcttccaggaattttaaaagcaagagttttcaagagtgaaaaatgatggaaaagagaaatgaccatgtatgcaatgtgattttttatcagcccactgtgaacctaaagccatatgcaagcgtcagtggcatagcagtttcagaagagcatttgctccccaccccacacctccacccaggctttagacagccttcaggaagccctcaagagggcgagcagcagagatcatctaatggacttcaaataaacacccaattcctgacaactggcctctgagcaaawttattattggattatactcctgcattttcaggacaagctgagctgacagggtaccccatcagttttaaaaaaaaaaaaaaaggaaagaaagacaatgataaattacctgatggaagatagaagaaggcaaagatcctgcttcctccaaaatgtcagccattatatattattcatgttggttttttaaaaatccctccccgcgttgaaatgaatgtttatgatgataaagcaactaggtgattcaattcaggatgcag

SEQ ID NO: 634096 - DNA, 520 bp, Homo sapiens
attggctattaccaaggtttgtgctgaaactgccagtaaatcaggtatcaggttttggatagcacttcatttagtaacactgccagaggaaccatgtaaattggatcatgactttggtgtactaatattactacaagggtttcagaaaaagaacaattgctctcaaccaatggtcagggaagcttcttggaggaagtggaattcaaggtggtggtggaggttggatatgagtaggtagtgataaaaggaagaggcaagcaccttgcaacagccaattgtagaagtcaaagatttgcaacatatacaaagatgggagatcaaggcattttctaggaaagatgagtagcttgaagtggcttagctttyaggatatttgtggcagtagtgagagggggaaaagatgaggaaagccagcatgaataatcttgaaggagtttaggttttttctgtctttgggagccactgagaagttttaggcggaggtgtgacaaggtcaggtttggttttagaaacctactct

SEQ ID NO: 634097 - DNA, 583 bp, Homo sapiens
gaaataatgacagagggacacaggaggctggggaaaaggaaagtaggcagaagtgaactaaccaggagagtggaaagacagagagaatttagtataaaccagagtgtgccaggcagttccaggcactcatgtgttttccatgtgtaagaggggtgcccctcatgcccttacaccatgcctgctgtggggtttggtggctggattttgcataayaggctgatgggacctgacccaagccctacagaggtgttttttctctttccactgtctctgagatcctcctccacccccaaaatgaaataaaagcatggtggaatgcaattaggaaagctgggtacctgaatttccggcacaatggggcctttctctgcacaggagctggcgaaggacgtcagtggggatggagagacgactgggttggggcgggcaaaattgctcaggtcacagctgggaatctcattctcctcatgtctcatgatgatggtttccatgacaaagaagcgatcccatggcagccacagggtgtgctcctgtgtgatgaaaggtgcccgctcgaaccgcaggatgatggagatgccgccat

SEQ ID NO: 634098 - DNA, 587 bp, Homo sapiens
ggccacttttgcagtttcccatccttctttgtctgttttccttattcatatgtcttcttgtttctgtgatcacatttccaaatgcctggatcacagaatgagttgaagttccttttggccatccctggagaatgcttgctctcccttctcctctctcatgtcatcctgtctttggttttattttccccaccatgkcatatgcctgtcccaaacgtggggcacaatccctttgtctgtgtagcatctggcatggttatgtggcaggcgatattgcacttactggatcctaccttaaatgtcctgtcttttatctccctagctcactatctggatagggtagttaaaggtatggtcttccttcctctattttcctgttgtctttgtgtgtgtgtttgtgtatgagtataaaagaagaaatgtgtatataaaaatgtatatacaccacataagcatgatgtctggaagctaatgcatccccagttttgtcgcagcatccattgcccaaaggggatgggttttcggtcacaaggtggttgatatacctggagtgtcattctccccacaagatgctcagatctgtttgtgac

SEQ ID NO: 634099 - DNA, 587 bp, Homo sapiens
ggccacttttgcagtttcccatccttctttgtctgttttccttattcatatgtcttcttgtttctgtgatcacatttccaaatgcctggatcacagaatgagttgaagttccttttggccatccctggagaatgcttgctctcccttctcctctctcatgtcatcctgtctttggttttattttccccaccatgtcatakgcctgtcccaaacgtggggcacaatccctttgtctgtgtagcatctggcatggttatgtggcaggcgatattgcacttactggatcctaccttaaatgtcctgtcttttatctccctagctcactatctggatagggtagttaaaggtatggtcttccttcctctattttcctgttgtctttgtgtgtgtgtttgtgtatgagtataaaagaagaaatgtgtatataaaaatgtatatacaccacataagcatgatgtctggaagctaatgcatccccagttttgtcgcagcatccattgcccaaaggggatgggttttcggtcacaaggtggttgatatacctggagtgtcattctccccacaagatgctcagatctgtttgtgac

SEQ ID NO: 634100 - DNA, 594 bp, Homo sapiens
ctgacaataaaatcattccagcaagaaagagtagtacttcctagcctctttaaaaacaggcatttcacacattatcattagcagaggactcttcagggtgggctaaattttatcatgttaccatctatttgatggaaaattttcctactatgtgaagttttttcacatccatgagtcttaggtgagtcatgtgatttttttttgagggaatagatataatgatacccattcaattgaaaaaggaaactgaagttgagggagttgaatgggtcatcctggctcacacttctaataagtagcagaaccaggactctgcatttcctgactttatccatgtttcagcattctatcttctgtcaccataagtcaccgagaatgtccataatttccagtatattttcctccacaccacatcttccaaactggcacccttactgggaagtggcctatattctttctcaaatcacctgctctgmtcttcagttcagaaaatatcatcaccagaactttagttggattaggtcaatgaatcataacttgttttaaaaggcaaatgtttcttggcaaaatcaaggtctgacccaagccctcatc

SEQ ID NO: 634101 - DNA, 544 bp, Homo sapiens
ctgagtagtaactgcggacaaaacttccaccaatggaggcaatcctgtataaatgagacacacaaatgagtagggcttacagcattcttttcaaaggctgcagtttacaagaccagcttctgagtaaaacyctctttttattttcaaatgtagcatatggtggcctgaaacagtgcatatggctgttctacagtgagggggaatggctcccaatttaattttcttaggcatagatgacaaattttagaagattctcattaaaaggaaaaaaaagcgtgctgtagggacagaaatgtaatttttgggatagactagaaacatattaatacacagtttgggggattctctggtttttgggtggcttggaaacatttatagtttccaaatacttcatatctcacttaattatatatcatacgtaagttggttgacttataaattctctgtgttttgtatatttgctatccccattcagagaccctcattatcacagcagaaaaagaaatcaggaaagcagagggtttgcttctatgtccttcaaatt

SEQ ID NO: 634102 - DNA, 595 bp, Homo sapiens
ggctcccctctcttggctctcagcagcacatgctgggccctctacacccaagtcaacctggaaggcacagctcccgtgtctcctcctccaggaagcctccctctgaccatgaggtgggcctaccatctgggaaaggtggaagggaaggagggattaagtagaaagagcctcagactgcactgcagctccgagaaagcctcagccagcccagtggggaggccagagcacaaattagctgttagaggctgggcgtggtggctcacacctgtagtcccagctacttgggaggctgaggcagaaggatcgcttgagcctgggaggcggaggttgcagtgagctgaaattgtgccattgtgctccagcctgggccacagagtgatactctggctcaaaaacaaacaaacaaaacaaaaacaaacaaacaaacaaaaaacagaggagacatctgctgggcagaaacggccagrcctccttctcccactgagctgagtcattggctagggctgcccaaggagaaagtggccttgtcaggaacacagcagtagatcccagggtgttgctgctgggatctgttgctaacgacactcctgctcta

SEQ ID NO: 634103 - DNA, 605 bp, Homo sapiens
tttctgctgaaaatatggcctttgcctgaaggatctttatctcactctsctgctttagagatagtatcactgagagaagaattctagaaagacaataatgttttcttagcactttgaagataccattctatggtatgctggcctctgctgttgcctgtgagaagtctgctatcactgtaattgtccttccttcctatggaatctttcctctttgttttaagatttctctctgtgtttgctgttttgcagttcactattatgcatctaagtatggacttgcttttatggatcatgcttgagactagttattttcctgaatttgaagacatgtaactttttccattccatgaatttctcatctagtatccctgaataatgcctctctttatttctctattctttcccctagaacttgtattacacatattttatttcttctcaatatatcctcctcgtctttaaaccactccttatttttcatatatcttatctatttgtgcttcattctgggaaattttctcagtctttcactaattttctcaaataggatatgtacctcattcagtaaaattgtaatttctatgatacttcatttctagaagttc

SEQ ID NO: 634104 - DNA, 563 bp, Homo sapiens
aatattccaaattttttcatttagtgtaatatccatatgtgatactaaagcaaaatacttcgagactgtatatctcctgttactcatcaaacattcacctactagttttactaattattggtggctcttgcctgaaacaattattactacagtatttgccaaatagggatttttctaactccatcattccttctacatttactacatgtcatctttctttgtttatagcagtatggattcacaaattcttatttattttgatgggtttaatccattactcccatttttatttttatttatttatttatttatttattttgagacggagtctcrctctgtcacccaggctggagtgcactgacacgatctcggctcactgcaagctccgcctcccgggttcacgccattctcctgcctcagccttccaagtagctgggactacaggcacctgccactatgcctggctaatttttttgtatttttagtagagatggggtttcaccatgttagccaggatggtctcaatctcctgacctcgtgatctgcccacttcggcctcccaa

SEQ ID NO: 634105 - DNA, 539 bp, Homo sapiens
tttcacagatgaggactcagcacagagaggctaagtgacgttcccgagaccacacagctggcacagagttctatccayccatcattatcaaattctagggtaaagctgtgtggctttaacaggttactctccctctctgagcctctgtttcctcatctataaaagaagaataaaggtgctacttggcagggaaccaggtgagggactgggcaggcagcaggcttcagagggtgaagcatgggcattccctgcaaaagaaatggcatcagactatggctgagagactggttggaagaacaaagaagagggtgagctggaggctgaagttcaggctgcggacttgagggtgccctgtcttcttcaggcccaggggttgggagtaggcaagttgggcccaggaagttgggactggtctctggagcctgagggctgggagaaggcagttttgcctttacttgttgaacttgacgctaagaaaccttgtggcccttccctctgtccagagccctctctggctcccggttgccagcatgaccaag

SEQ ID NO: 634106 - DNA, 539 bp, Homo sapiens
tttcacagatgaggactcagcacagagaggctaagtgacgttcccgagaccacacagctggcacagagttctatccacccatcattatcaaattctagggtaaagctgtgtggctttaacaggttactctccctctctgagcctctgtttcctcatctataaaagaagaataaaggtgctacytggcagggaaccaggtgagggactgggcaggcagcaggcttcagagggtgaagcatgggcattccctgcaaaagaaatggcatcagactatggctgagagactggttggaagaacaaagaagagggtgagctggaggctgaagttcaggctgcggacttgagggtgccctgtcttcttcaggcccaggggttgggagtaggcaagttgggcccaggaagttgggactggtctctggagcctgagggctgggagaaggcagttttgcctttacttgttgaacttgacgctaagaaaccttgtggcccttccctctgtccagagccctctctggctcccggttgccagcatgaccaag

SEQ ID NO: 634107 - DNA, 539 bp, Homo sapiens
tttcacagatgaggactcagcacagagaggctaagtgacgttcccgagaccacacagctggcacagagttctatccacccatcattatcaaattctagggtaaagctgtgtggctttaacaggttactctccctctctgagcctctgtttcctcatctataaaagaagaataaaggtgctacttggcagggaaccaggtgagggactgggcaggcagcaggcttcagagggtgaagcatgggcattccctgcaaaagaaatggcatcagactatggctgagagactggttggaagaacaaagaagagggtgagctggaggctgaagttcaggctgyggacttgagggtgccctgtcttcttcaggcccaggggttgggagtaggcaagttgggcccaggaagttgggactggtctctggagcctgagggctgggagaaggcagttttgcctttacttgttgaacttgacgctaagaaaccttgtggcccttccctctgtccagagccctctctggctcccggttgccagcatgaccaag

SEQ ID NO: 634108 - DNA, 539 bp, Homo sapiens
tttcacagatgaggactcagcacagagaggctaagtgacgttcccgagaccacacagctggcacagagttctatccacccatcattatcaaattctagggtaaagctgtgtggctttaacaggttactctccctctctgagcctctgtttcctcatctataaaagaagaataaaggtgctacttggcagggaaccaggtgagggactgggcaggcagcaggcttcagagggtgaagcatgggcattccctgcaaaagaaatggcatcagactatggctgagagactggttggaagaacaaagaagagggtgagctggaggctgaagttcaggctgcggacttgagggtgccctstcttcttcaggcccaggggttgggagtaggcaagttgggcccaggaagttgggactggtctctggagcctgagggctgggagaaggcagttttgcctttacttgttgaacttgacgctaagaaaccttgtggcccttccctctgtccagagccctctctggctcccggttgccagcatgaccaag

SEQ ID NO: 634109 - DNA, 498 bp, Homo sapiens
ctggtggcccagtgtcatcagggaggtccatctcaagagggaggcagaggggtcagagtcagagaaacagatgtgatgagggaaggagaaagcagagagagagggagattggcgctgccacactgctggctttgaaggtagaggcaggggccacaagtcaaggaatgcgggtggcttctagaagctggaaagrgcaaggaagcagattcatccccagagtctttagaaggagttgctagcccatttaagtcttctgacctcaaaaccataaaagaataaatttatatcatttgaagccactaagtgtgtggtactagatacagcagccaccggaaatgattacagcttcttattcagatttcaggctgcctggtgtaaagtagtcttacccacaacacctgttttcatttcttgctagccctcattattactggaaatgatcacatttctttcttagtttattgcgtgtctccactcgccagcacaccaggctcctgg

SEQ ID NO: 634110 - DNA, 440 bp, Homo sapiens
tggttccataactttgtaattgtgctgcaataaactaaacatatgtatacaggtgtctttttgatattatgacttcgagaaaggttaatgtttcttaactggactctaatagatacattcttcttmactcttcttattcaaggttgattttgatatttgtgtgcatttattcttccacataaattttaaatacatttattaaatgcaacaaaagtgcaattgaaaatttattgaggtgagttgacatttcattcaagaacatgaaacaattctccattttttcgtattataatcaaaaccatttattaatcttcagattttctccataaagtttttgagtatttttggttgaattaatttctagaaacttttctatatgtgttgttgtgaatagtaacttagcttttcattatatcttatgcttcattattactgatgca

SEQ ID NO: 634111 - DNA, 540 bp, Homo sapiens
accaaaaactataaaatataatgaaagtttagaaccctggttccattctttccaccacatgggttaatgtggaataagctggctcaccaacagcagctctatggagttgtatgagtgagctctgccttggtgtacatccaatcttaattttagctgttactacaacacaaactttcattctgtcattcttacataatgtgacccattcaaaggatgtgtcagcattcatgaagtcatgactcagaagacgatgagctgtgtcagagctgaggtgaagcggcgcctaggaccattaccacagatttgtcagggcaacgagcattactggttaaaactatttgaagaaatctaacctctggaatgaagcacttatgaattccggagtttaagcaaaaattatgtgagtagcaaaagaagaggtcattgagccaaggaaatacccaggactcatmctttacagagatgcttaagccatggaattaagagacaattttacagtgagaaactgaatgtacaaatggacaactgccagatcatata

SEQ ID NO: 634112 - DNA, 574 bp, Homo sapiens
tggaagagagaaaaacgattgtgaactgagtgtcatattcacctaagatatttcccataggatattttaacaaaagacattctcagacatgctggaatcagtaaatttcactcctgaaccacctttggaaaamgtttacataaagacacacaattgccaactggctaaaagcgaacatttccagaatgcataggtcaggctatgaaaagcttaatggagctacgtttactgaacttgtttgaaaaagtcagttttctgattgaaaagtgtcttttcaggatttgacagcctggagttaagctttatccgtaatgtttttcatacctgttctcctgcttccactctaatcctcatatgagaaaaattgtttatcaagcatcattattttatcctacaaccagatgaaatatactgcctgttggagaaccactgaaaactttatgttactctgttttacataactggaatatttgtgccaagaatattacaaaatgctctttccctccataaaaacagagttgcctggagccacataaaagctattgtcattctcaaagtatttaagtgatagatt

SEQ ID NO: 634113 - DNA, 574 bp, Homo sapiens
tggaagagagaaaaacgattgtgaactgagtgtcatattcacctaagatatttcccataggatattttaacaaaagacattctcagacatgctggaatcagtaaatttcactcctgaaccacctttggaaaaagtttacataaagacacacaattgccaactggctaaaagcgaacatttccagaatgcataggtcaggctatgaaaagcttaatggagctacgtttactgaacttgtttgaaaaagtcagttttctgattgaaaagtgtcttttcaggatttgacagcctggagttaagctttatccgtaatgtttttcatacctgttctcctgcttccactctaatcctcatatgagaaaaattgtttatcaagcatcattattttaycctacaaccagatgaaatatactgcctgttggagaaccactgaaaactttatgttactctgttttacataactggaatatttgtgccaagaatattacaaaatgctctttccctccataaaaacagagttgcctggagccacataaaagctattgtcattctcaaagtatttaagtgatagatt

SEQ ID NO: 634114 - DNA, 557 bp, Homo sapiens
gttagtagtgtttttctttttgggtcatgactataaaagatttattttcttctttgtacttttttatatattctaaattttctataataaacatttaacgttttatttaagtatgtaaaatttatttaaaatgttttgtagaaactagtgtattagtttgttttcacactgctgataaagacataccagagactggraagaaaaagaggtttaatatggacttacagtttcacgtggctgggaaagcctcacaatcatggcagaaggtaaggaggagcaagtcatgtcttacgtggaaggcagcaggcaaaaaaagtgcttgtgcagggaaactaccatttttaaaaccatcagatctcatgagactcattcactatcatgagaacagcgcagggaagacccacccccataattcaatcacctcccactgggttcttcccacgacatgtgggaattgttggagttacaattcaagatgagatttggttggggacacagccagaccatatcacatggctttccaccaacaatggaataagctctaagcaccttagcta

SEQ ID NO: 634115 - DNA, 559 bp, Homo sapiens
gggtcaggagatctcccagatgtctccttaagcaattcacttcccttttctgaatttccatttcttcatccataaaaggaaaggtgaactagctgaagttttcttcctccatggacagactcttggcgtgtgaaagagatttctttgtrtatcttggaagaattcttcccttcttgtccttgctgatgacgtacttagatttgcctctggattcctggggatgataccacaaatgacttcaggtgattgtatcagggatataccctggaatgtcctggtgtctggctaaagaaggaaaaacataatagatgcttttggaaggttggtgctacaaaatctgccttatgataaggaaactgctctcagcactttctcacgagcaactctgaagtcagctactttctacactttcgtaaacgtgctcttcttcacacagagcattgacaatgatcccttgattcttgctttcctcagtgtggcccctggaagccatgtctttgctgggacccccagcttccagtctgggcctatgtcagaatcatctcatagctcctttcta

SEQ ID NO: 634116 - DNA, 563 bp, Homo sapiens
gcgatagtatgtcccagtatttataatacattgcctcatttaatcatcactaaagcataaagaggcaaacgttacttatttatttttttagagatgaggtctcactctattgctgaggctggagtacagtggcacgatcatagctcactacaactcctaggctcaagtgatccccccaactcggcctccaagtagctggaactacaggtgtgcatcagcacaggcaaaagttattatcctcattttttaaaaagatggagtttccctctgttgcccaggctggagtgcagtgacgtgatctcggctcactgcaacctctgcctcccaggttcaagcgatactcctgtctcagcctcctgagtagccgggattacaggtgcacaccaccacgcccagctaacttttgtatttttagtagagacggggttttrccatgttggccaggctggtcttgaacttctgagctcaggtaatccactcgccttggcctcccaatgctgggattacaggtgtgagccaccgcacccagccattatcctcattttcaaaggaaacaccagagg

SEQ ID NO: 634117 - DNA, 509 bp, Homo sapiens
atggggaaaacgaagagtgaccacatgagttctcttccttctcgacaagtcagagtggttattaggggatgaatgtacttagtgaggaggagagcagcaaaactgggaaattctgggtccagaagaagttgagatgtgaagaaataagtttctttctttatttakttcagcctactaagtgtcagaggctttacctacttaattctcagaacaaatctaaaaggcaggtattgttttccctgagagtcaaagaggtcaataacttgtctaagatcacacagtgagtcacagagcagattttctaacttatcaaaattgtggactttgtataaccagtcactgcccggaactctgcctttcaagatatttgcaacaggttgagacaagccacaccttcacttcctgcaatatagcagacgatatattctgaaggactgtttcaccatgaaacaactacaatcttttttttttaattaggtaagcactcaaattacttttatctaataaaa

SEQ ID NO: 634118 - DNA, 617 bp, Homo sapiens
actacaatttatccactctactgtccaatgaccatctgggttatttctggtcttttgctattacagatgaggcagtagatttccatccaacttacaaaacataaatgcaagagtttctgtatggtatattcctaaatgtggaatgactacattttggaattatcaaatgtttaactgctygggcagctatgatgttaaacaactactgctgattgtttttgacaaatgacctgggaaaatgttgattgcactgggtgtgttctgaatcaggttaaataaaaacaagccttgtgagtggtgttttccaggaaaccggcagacaggtcaaataatgacaattcttcggatagggctttgaaagagctcttaccttatttggatgccagcagctgctaggttgcttgttttcattgtaattgtgggttgttcatttacaagaccaccgttgagcagctctctgaacattgagccactttttttgctgccaagattgttgtatgcagttgattcattttcaggattctgaaaaagttgattttgactttttgtttctgccaatgttcttgtttttatggaaaaggacattttaaaggtccttactctaccatcccagctga

SEQ ID NO: 634119 - DNA, 449 bp, Homo sapiens
tgaaaagaaggcaatgacaggcaactgaagaatcggtcactggggcctatgctgttgccaaatcaccttctatgccagactctataaagcaggaccaagcactagaggaagtattatgggatagtgggaaaaagacttaaccagagtcaggaagcataggtttgagtcctatagggactyagaggaaatcagtgaactgtttaggtccttggttttcttcatcagagcaacttaagtcctttggggaagagctcttcagtagagaaggtgggtttgtggtgcatgtcagcaaagccactttctgattgagttcctgctggttacttctttgctcaggtatgatgaaaggagacagatgatggaccctggttatcccaaactgattaccaagaacttccaaggaatcgggcctaaaattgatgcagtcttctactctaaaaacagtaagt

SEQ ID NO: 634120 - DNA, 587 bp, Homo sapiens
tgggggaaatgggtatttttgtctcagtgaatagctttgaaaagaaggcaatgacaggcaactgaagaatcggtcactggggcctatgctgttgccaaatcaccttctatgccagactctataaagcaggaccaagcactagaggaagtattatgggatagtgggaaaaagacttaaccagagtcaggaagcataggtttgagtcctatagggacttagaggaaatcagtgaactgtttaggtccttggttttyttcatcagagcaacttaagtcctttggggaagagctcttcagtagagaaggtgggtttgtggtgcatgtcagcaaagccactttctgattgagttcctgctggttacttctttgctcaggtatgatgaaaggagacagatgatggaccctggttatcccaaactgattaccaagaacttccaaggaatcgggcctaaaattgatgcagtcttctactctaaaaacagtaagtagatgaggaaaccatgaagatactggaaataacatttcaaagctataaatcctctaagattagagaatagggctccaaattggaaagggacaggtttctgc

SEQ ID NO: 634121 - DNA, 449 bp, Homo sapiens
tgaaaagaaggcaatgacaggcaactgaagaatcggtcactggggcctatgctgttgccaaatcaccttctatgccagactctataaagcaggaccaagcactagaggaagtattatgggatagtgggaaaaagacttaaccagagtcaggaagcataggtttgagtcctatagggacttagaggaaatcagtgaactgtttaggtccttggttttcttcatcagagcaacttaagtcctttggggaagagctcttcagtagagaaggtgggtttgtggtgcatgtcagsaaagccactttctgattgagttcctgctggttacttctttgctcaggtatgatgaaaggagacagatgatggaccctggttatcccaaactgattaccaagaacttccaaggaatcgggcctaaaattgatgcagtcttctactctaaaaacagtaagt

SEQ ID NO: 634122 - DNA, 461 bp, Homo sapiens
atcagccacacagtatgtgcaagcgagcacatggcagccaagactcaggcagtctggagtctcaccctttcctacaccttgcactcttgacctttcctatagtcccttctgccctgataggccctcatggactggggactgcgggtgggttaagaaaagcttgagtttgtatcgtatgtcttcaaacaagaccagcctaagcaactgttcatggggtcaagattttttgtttgtattccctcccctccccagtgttgtttcctccatcaaagcccctgtgtgccctagctgggtccaatatcctgtttcatgagtcctccacttggagtatgactggctgttggtagacgttttgggggtatgataccaagggccctcaacwtttatgtcctcaaatcacatctcatcttattttttatttgttattttttgatgaaaaaatagagatgaggtcttgtgat

SEQ ID NO: 634123 - DNA, 520 bp, Homo sapiens
atttggtttttaatatatttttcttgagaaacagaatgtgtattttgaaaataactctgaacctactcctaaataaaaacaagtctctctgactrtatcaagagatgaatagaaatatggcaagtagaaataaaagcttagatttcttttggtcacttgggtaacaccacttgtgtccttggtctcaaggcaagaaaacatcctctaggctacacacaaccccaaggagtacttacagagtacagccacagactggagagaagggatgaaatgggaatttcccgttctggtaaaatccacagtcaagtctcacagtgtaattgctgtgtgaccttaacaagcaattaaatctaagcttccttaaatttaggaggaaataaacttaggaggtacccacctcataggtttattgtgaaaaaccacacaatgcatggtaagcacatcattctggcagtgtggcctgtcctgtgtccattttctccactaccctgacacatagttcccctatcttctgggttgc

SEQ ID NO: 634124 - DNA, 520 bp, Homo sapiens
atttggtttttaatatatttttcttgagaaacagaatgtgtattttgaaaataactctgaacctactcctaaataaaaacaagtctctctgactgtatcaagagatgaatagaaatatggcaagtagaaataaaagcttagatttcttttggtcacttgggtaacaccacttgtgtccttggtctcaaggcaagaaaacatcctctaggctacacacaaccccaaggagtrcttacagagtacagccacagactggagagaagggatgaaatgggaatttcccgttctggtaaaatccacagtcaagtctcacagtgtaattgctgtgtgaccttaacaagcaattaaatctaagcttccttaaatttaggaggaaataaacttaggaggtacccacctcataggtttattgtgaaaaaccacacaatgcatggtaagcacatcattctggcagtgtggcctgtcctgtgtccattttctccactaccctgacacatagttcccctatcttctgggttgc

SEQ ID NO: 634125 - DNA, 403 bp, Homo sapiens
aaaatgtcttaagagttgcatgtatgtcccgtctggggaatatcactttttctctgggaaatggaggagtattatttcattgatgtaaggaaagaaaatgttcaagacttggaaattacaggtgtctttacaactaagggctgcacattgtgtagctaatattctggagtaactgattttatgagggtatgcatctttgactttttattgggtagactagtttataaatctgtaagggtagaaatagtagagaactgacagttacacgaaaggttttttctatatcaatgcaaataaatcttacytcttagggataaaattcatttgtgccagatagaagagatactctcaaacattacattttgctgtcctataaagatattacctatttatatcattagga

SEQ ID NO: 634126 - DNA, 579 bp, Homo sapiens
atctttgactttttattgggtagactagtttataaatctgtaagggtagaaatagtagagaactgacagttacacgaaaggttttttctatatcaatgcaaataaatcttacctcttagggataaaattcatttgtgccagatagaagagatactctcaaacattacattttgctgtcctataaagatattacctatttatatcattaggaaatttctttcacattccttactgtatatatgtctgttcttcaggcccttctttgaactgattccctcattagctagtgagttaaagaatatctttaacaagttcatttcatatttgcataaaatcatatttttagcctttaaaaattatactttagcacaaattagtcaacaaggaagagaacaggactgtctaccttgtggactacaagtagaaaaaaccttaaattagyagacaatttctcaagcctgccagaactgtagtttcgtctttctgattctgcttctccccttatactgtaataggatagtgaggaatcctgtgcctttacaggagaaaggaaaggatgtaccatgtttgggctgcata

SEQ ID NO: 634127 - DNA, 637 bp, Homo sapiens
gattggaaccagaattagaaccatagcaagtcctagtcacacacaggctgatgttacggagggggagcatcagtttgaaggagcctacagaaagaaaaaatagsaaacattcaggttaagtctatgtaagaaaaagagagaaacacagagaaggcagagggatgggggagagaatgagagacagagacagagcttgtaatctttccatttctcaagaaggctgtcctgagattagatcccatgagaatcctcaagttccttactataaatcccctgtaaatgatctcccaacaaaaagattttaggcttagacataagttaaaagtgggttggcaagccacagaccctcagaggatatgcggaattggtggtgggggtcccaggagggcagcgtaaaataccatgtcaaagtgaagccagtacttgaggagggggaaaaatcagctgattacctgccatctgtattaaactgtgtcctggaacccaagccatgggcttcctgagggtgaagttttaaggtctttggataaaaagtaaatgtatttgaaggtgttgattattcctcataatctaaagtctctaatgaaaggaacatgttataatccagatttccttacagaaaatgagtaagtaagta

SEQ ID NO: 634128 - DNA, 637 bp, Homo sapiens
gattggaaccagaattagaaccatagcaagtcctagtcacacacaggctgatgttacggagggggagcatcagtttgaaggagcctacagaaagaaaaaataggaaacattcaggttaagtctatgtaagaaaaagagagaaacacagagaaggcagagggatgggggagagaatgagagacagagacagagcttgtaatctttccatttctcaagaaggctgtcctgagattagatcccatgagaatcctcaagttccttactataaatcccctgtaaatgatctcccaacaaaaagattttaggcttagacataagttaaaagtgggttggcaagccacagaccctcagaggatatgyggaattggtggtgggggtcccaggagggcagcgtaaaataccatgtcaaagtgaagccagtacttgaggagggggaaaaatcagctgattacctgccatctgtattaaactgtgtcctggaacccaagccatgggcttcctgagggtgaagttttaaggtctttggataaaaagtaaatgtatttgaaggtgttgattattcctcataatctaaagtctctaatgaaaggaacatgttataatccagatttccttacagaaaatgagtaagtaagta

SEQ ID NO: 634129 - DNA, 574 bp, Homo sapiens
atggactaatttttgttcatttaattatttaaagaatgtgtgtgtgtctggatgtgtgtgtgtgtgtgtgaaggttttactccatcaatttgacagcttatgtcatctaaaacttgtcgattttattgtatacccctttcttcaaatgaggatttaaaataagtactggcattaattcctagggccattacgtgattgggttgtcagtggggtctccagataacgttgaagctaggaccttaaaaaaaatcaaccaaaaggtctaacatttatgttcaaaaatcaattttacaagtgtaagatggtaagcagtttgtctgaaaaaaacacccaggagttttagttaaccacagacttaacaggagccaacagaatgaygcagccataaataatgccaaatccattctgggctgtactagaagtcccgcatctacatcaaaggcaagaagaatgcctcagtaccatgtatcaagacccacgaagtattgagctcagttgtggagggaacctcagtttcccctatttgaaagagaagagtaaacaagaatcctcaaacatcactgaagaaattgtt

SEQ ID NO: 634130 - DNA, 541 bp, Homo sapiens
acaatatcaaaagcaagagtaaccagacaaaaaacaggtaggttgaacttcattaaaattaaaaacatttgtgcatcaaaggaaattaccaagaaagtgaagagacaagtactatggtctgaatggttgtatccccctaaatttcacatgttgaaatcctcatcaacaatgtgatagtattaggaggtggaatttgtgggaggtgattaggtcatgatggctctgtrcttatgaatgagattagtgcccttacagaagaggacccagagacattccttgcctcttctaccatgtgaggttacaatgtgaacatggccatctataaggaagcaggccctcaccagacactgaatctgcaagcactttgatcttggattcctcagcctgtagaactgtgagaagtaagtttctattgtttataagctacccaatttatggattttgttatagtagttcaaaaagactaaaacaatcacctgtgaaatgggagaaaatatttgtaaatcatatatctgacaacgatctagtatccagaatatac

SEQ ID NO: 634131 - DNA, 301 bp, Homo sapiens
taaactcttaaatgtaatccattggatgtcrggttaaaacactgatctcttactttttccctatcagagattccatggtcacaatcttgtaacaattacattattgtttgggagattaccaaatgcagtcaacaaagctgaggccttcttttgcattatgtttgctcccctgattccttgtggaaataagggcaataatgggtaggactgggttaagactgagaactctgcagcaaacctgctcaggtttaaatccagcctccaccatctactacctgtgtgaccttggcaagccatgtaa

SEQ ID NO: 634132 - DNA, 631 bp, Homo sapiens
ttaactctgggtggagagaggggaatggatgcagtactctggggatgtccaaggaagtaggaatattctgttttcctaaccaggctggtrgttacatggatgtactttatatgctttaattgtcctttaaatagtacacatacactttatagactcctctatatcgtatcctcatatcacacttcacaataaaaattatttttcaaaagtgaccttcatatatatataaaatacaaatggatgtcaatctgctttcggtgtttttctgcctagattcaaatacatatcaaacctagatacacaggccctgacatcaggctacttgcatttaaaccccagctccaacatttaacaaaataaccttgtgcagctcagataacctcaccatgctttggtgtcctaatatgtaaattgggtatatttggggaggaatttaatgagttaatacatgtaaagtgctttgaaccacgtgtggtacatagtaattactaaaaaaatgaaaagctactattagaatagaaagatgctaagttaaaggcaatacttcctgcatctaatcgtcaataaaccatcagcacctatgagaacaatgaatccaccttccctgttttcccagatgctgtactggcat

SEQ ID NO: 634133 - DNA, 593 bp, Homo sapiens
gcagtggtgtgatcacagctcactgtaaccttgaactactgaactcaagtgatcctcctgcctcagcctctggaatagctgggactataggtgtgtgctcccacacccagctaccaaacccagctagttattttttgtagagagggaggtctcactgtgttgcccaggttgttctcaaagtcctggggtcaagctatcctctggcctcagcctcccaaagtattggaattacaactgtgagccatcacactcagcctgaaagcacttttctaagtgatttatatatgcacacgcacaaacacacactaacccatttattcttcataacaaccttatgatagatactatttattatccctattttacagatgggcatactgaaagagaaacatcaaatgtgttgtccaagtccacacaaaaaacaagtgtcagagccagggraccaatgcaaatctggcttcagagtccccaatctttttttttttttcttttttctttttttcagagtccccaatcttaaccactgtgtcacactgcttcttcaggctactaagtcagtgtaaccttaagagaaaagaaagaaaaagatttag

SEQ ID NO: 634134 - DNA, 570 bp, Homo sapiens
cccaatcttaaccactgtgtcacactgcttcttcaggctactaagtcagtgtaaccttaagagaaaagaaagaaaaagatttagaaatctacagaaatgatgtacttgataaaagaagcatttcagttcagaaaaacagaaactttaacaaatgccaaatgtattattgtgtgtatatatgtcaccacatatacaaaatccaggggacaaaataaagcaagacctctttccacaaaacacatagaaaagtaaatttcaggtaagtaaaatatgtatatgtgaaaacacaaacagataagtaatatctgacatagtgtgacgtttgaggaagctgtctttggaggtggacaggtctcaatttatatgactgcttacctaccaaagaggagtaattcagacacactcatatatatayatatatatatatatgtctgtattttaattatgaagaatcaagacttatgaaaataaggaatcacaatcttgacagtatctattatatatgcaaatactaaaaaaagtaacctgtctttccaaatgctttattttgcaccctaaaatgttatacgc

SEQ ID NO: 634135 - DNA, 570 bp, Homo sapiens
cccaatcttaaccactgtgtcacactgcttcttcaggctactaagtcagtgtaaccttaagagaaaagaaagaaaaagatttagaaatctacagaaatgatgtacttgataaaagaagcatttcagttcagaaaaacagaaactttaacaaatgccaaatgtattattgtgtgtatatatgtcaccacatatacaaaatccaggggacaaaataaagcaagacctctttccacaaaacacatagaaaagtaaatttcaggtaagtaaaatatgtatatgtgaaaacacaaacagataagtaatatctgacatagtgtgacgtttgaggaagctgtctttggaggtggacaggtctcaatttatatgactgcttacctaccaaagaggagtaattcagacacactcatatatatatatatatatatatatrtctgtattttaattatgaagaatcaagacttatgaaaataaggaatcacaatcttgacagtatctattatatatgcaaatactaaaaaaagtaacctgtctttccaaatgctttattttgcaccctaaaatgttatacgc

SEQ ID NO: 634136 - DNA, 570 bp, Homo sapiens
cccaatcttaaccactgtgtcacactgcttcttcaggctactaagtcagtgtaaccttaagagaaaagaaagaaaaagatttagaaatctacagaaatgatgtacttgataaaagaagcatttcagttcagaaaaacagaaactttaacaaatgccaaatgtattattgtgtgtatatatgtcaccacatatacaaaatccaggggacaaaataaagcaagacctctttccacaaaacacatagaaaagtaaatttcaggtaagtaaaatatgtatatgtgaaaacacaaacagataagtaatatctgacatagtgtgacgtttgaggaagctgtctttggaggtggacaggtctcaatttatatgactgcttacctaccaaagaggagtaattcagacacactcatatatatatatatatatatatatgtmtgtattttaattatgaagaatcaagacttatgaaaataaggaatcacaatcttgacagtatctattatatatgcaaatactaaaaaaagtaacctgtctttccaaatgctttattttgcaccctaaaatgttatacgc

SEQ ID NO: 634137 - DNA, 611 bp, Homo sapiens
ctgtgagtcaagtaatccatgctgtgcaactgagttcatgatgcaaatattcaccacactaacataaaatcaggcaactgcatatattaaaactttccaaattttaatgatgcaacattaagaaaaatggaatgaactatcaccagttgagaaatacaccgtccaggctaggcgtggtggctcatgcctgtaatcccagcactttagaagtccaaggcgagcggatgacttgaggtcaggagtttgagaccagcctgccaacatggtgaaaccccttctctaccaaaactacaaaaattagctgggagtggtggcacatgcttggagtcccagctactccggaggctgaggcaggagaattgcttgcacctgggaggaggaggttgcagagagccgagatcacgccactgcactccagcctgggtgacagatcatgactctgtctcagaaacacacatttcataaaagcctaatatgctcccaaactgttaaaactatgttataatagcatttttaaaargcagtaatttaaacgtagctacttaaacattagatataagtagcactgtatgtcctcataagtctttgttatggtgatttttttataataa

SEQ ID NO: 634138 - DNA, 594 bp, Homo sapiens
tacttctgttaattcccagtgggccatctcagtgttacaggcctcgacccactgtgctcctacatacccctgtgtttttgtacatgtgatccccttggccaggcatgccttgcacctttatcttgatcttggatcttctagttcttccggttctgattcaagcactgctcatattctttcctgaaaaccccactcctrgtgaaactttttcatcctttctcgattctgtcctgactattttcttacagactctcaaggtcattattttgaccacatgtaatcattgtttgagtgaaatatcaaagcgccaactcatagggagatctgtgctttgtagatttctggctgagccagcttttactgtaatgagacttagattatgtatgtcaaaaggagacattatacccactgcaataaaatatcattgacaaggattttagaagttcgtgttttttgacactttatttgctatagaagcattcatttgaattgaatagaagaaaacattactattgcaattgtttacacaaaatagtgctagaggcactacaataaagtaatatgagccaataaagattagtttattctgagctg

SEQ ID NO: 634139 - DNA, 594 bp, Homo sapiens
tacttctgttaattcccagtgggccatctcagtgttacaggcctcgacccactgtgctcctacatacccctgtgtttttgtacatgtgatccccttggccaggcatgccttgcacctttatcttgatcttggatcttctagttcttccggttctgattcaagcactgctcatattctttcctgaaaaccccactcctagtgaaactttttcatcctttctcgattctgtcctgactattttcttacagactctcaaggtcattattttgaccacatgtaatcattgtttgagtgaaatatcaaagcgccaactcatagggagatctgtgctttgtagatttctggctgagccagcttttactgtaatgagacttagattatgtatgtcaaaaggagacattatacccactgcaataaaatatcattgacaaggattttagaagttcgtgttttttgacactttatttgctatagaagcattcatttgaattgaatagaagaaaacattactattgcaattgttyacacaaaatagtgctagaggcactacaataaagtaatatgagccaataaagattagtttattctgagctg

SEQ ID NO: 634140 - DNA, 570 bp, Homo sapiens
ttaattaacataacctttcttattcttttgaaaagaaagaaaatccaggaaaaattttgtttcataaaaaacttacaatattatgttttaattaaaattgaataagcctccctatgaatattaaatttttaaaagcctagccagcaacagtacattattaaaagctgtatcagttatgtcaagaaattagtagctggtttttaaaggttcatcatcagattcttaaatgatcggtatcttgaaactcaaataawgttaatatttcagtcacccaaagcagaaaagcaagcaataaaggcagaaaatattcattaactgcaatgaagttcaccgatctcccaagtgttgaaaagcttacataaaacggatatttctatttacttgtaaacctttcttaaaaaaggttccggaaaatttattacctcaccagaattagaaaaaacaaaaactgctccccatcccccgctccattccacaaatgcttgtgactcaaacttgtaaagtctctcactgtgttgcacttgaagttcatgccttaaaggaagccagcagaaatcctttacgtggtga

SEQ ID NO: 634141 - DNA, 579 bp, Homo sapiens
catttgcgcatgctcaatatatgtaaatttcaattacaaaattacaaattcaagtttattctgtgatactattttgcattaagcagagctttatcaggtgttactagccatttcctaaagatgtaaactgtgctttgcaaaaaacatagatgtacctaaaaaaaaaaaaaagacagaaacagctttccccaaattttyttaacctcacgtaaaaccaggggtgtctaattaaataaaaaaacttcccctctcttccctcctactctgcagaattccatttacctggcaaatcatgaaaggcagaatcataaaactcaagtttagtcatacctcaacaggctgtgttcctgttgaacattaaatactttgacaacacaacagcgccttctccagtgctaaaagcagcatgattaatcttattaaaccagcatctgaaccacagccaccatgccatgggagaataattaggctgctaatgacctaaatactgtatctacaaactcctattactggagctagtaagaaataagagagaatattcacgcttaaaatggccaatcaaattaagaatattttcca

SEQ ID NO: 634142 - DNA, 609 bp, Homo sapiens
tatggtggcttgtgagcaactcctcacattcacattttcacatgagggtgggagggtaagtattttggtttaatgagttctacctctctctgagctcagtggacagcaattttgccgcatttagagagctgtgtctaacttggttcacatataatctgaagtctgtcctgggtagccmgtaagcaaatcagccatgaagacttttgtctgacaaattcaaatgaacaaacaacaacaatacaacacttggtgacaggagctggcatacatgaatctgatttatttaattctccgtatacctattagcctctgagcttttagaaataatcactcaggcagtgcgtatcacttttattttgcctgagaactcgcaagcaatactgaggaaaaatccaacagggcagagcctctaaaaatgtcactgaactctaacacagcagggaagggatttccttatttcatgttattgtttctttgctattttgtttttatgagaatatacaacagtacaaaatagtacaaaataacaaaaatagttaagagtcaccaccatttcaggagttgcttatttgtcttcatctgtggtcaagcttctgaaaaatggccaga

SEQ ID NO: 634143 - DNA, 612 bp, Homo sapiens
aatatttgattacttatcctgttcagagtatagcactgtatgctacacttttatatttasatagatgaattcacacatatgtaaaaaacatgttaatgtaatattgttcccagtgctgttggatatgaggaagtgggtgcaatctttacctttgtctttgttttcttatgttatgaatcattcaacacacattctcgttgaagcagggttataattgatggttcagatgctgagcccacaaatttctttgtgcctagtccccagttttgagaggatgtaatacatatatgaatgaaccgtggctcaacaccagactgttgttgttggttttgtatattattactgagaagctagttggaatttgttcattctttgtgcaagaaattccagcgctgtttgagagggagtgtgatacatagtcagagctcagactgtaggtgatctggggcatcttggccatagctacatgttatggttagtagaccaataactacactgcaacatcaaaacacttttatctgccacttctccacttttttagattttattgaagagagtactatactacacccctcccctaggcagtttgtgattcacatcactcatttctag

SEQ ID NO: 634144 - DNA, 568 bp, Homo sapiens
ggaatttgttcattctttgtgcaagaaattccagcgctgtttgagagggagtgtgatacatagtcagagctcagactgtaggtgatctggggcatcttggccatagctacatgttatggttagtagaccaataactacactgcaacatcaaaacacttttatctgccacttctccacttttttagattttattgaagagagtactatactacacccctcccctaggcagtttgtgattcacatcactcatttctagtaaaaccagctgaaaaataaaacaaggtctcatgttccttttattcattatctgatttractggacaagtcggctctgatcacccattgaacagcagtgtcacttaaagaaaaaggaagaaagttagaaaaactaaggaaaaatagctttagctatgaaatctataaaagacaaaaatgagcctaatctcttatttttaacatggatttcgtctcctgcctggctttccaagttctcgtgattccccttttcctctgttctttcctcttccttctcgtccattgttcagtatttcaaatatacaaacaaggc

SEQ ID NO: 634145 - DNA, 536 bp, Homo sapiens
gggcagtgtaaaatcataggctttcaaatctgaggagtaagttttttttttttagttatttactctagatacataccatcagctacagaaaaaaaatgcagatatttttgcattttaataaacttaacccattatttattacaaaagtatagtaagacaaggctgctgtattcccacttattaaaatgtaaatgtttctgtatatgattattttagcattctaacacatacttactgaaagccttttttttaaaataagccgctttaaaatatgttgtatattctgtcctaatgtacattataattcactttaacaatgaatgtaactctaaattaagatactgtctctttttctactttaatgaagtttgagagaaaagrgaattttgctttaacttaaaaaaaaaaaaaacaggcagggcacctgtaatcccagcactttggaaggctgaggtgggcagatcacgaggtcaggagatcaagaccatcctgactaacacgatgaaaaccccgtctgtactaaaatacagaaaaaa

SEQ ID NO: 634146 - DNA, 594 bp, Homo sapiens
ccaacctgggtctgcccggcaccctggcgtctgcttgcaccccacattaaaccatttctgagggaactcacttgtgtagccaggctgcccagggggcccaggggaaccaggaggacccgggagcccatctcttccacttggtcctggcagagatgtaccaggaaatcctcggtcacctttttctcctctttcaccagggaagccaggggcaccagcctgcccaggtacagggaggcctgcaaccagacagaagctcacatcagtaacctcasggccacttagcaactacagcataaactcattctcctaactctgttcaaggtaaaaatccaaccagaccatcactgaaaagggaactgctttagacatgtaaaaccaaattaagctggcaggtgtcttgccatttcatgctgacagtcaaatgtttcctacaaattaacttcaaagaacagggactcattacgtagatattaaaatctgtgaatttctctcagtgcaaatagtattcccaacatattttaaaaaggctgtagagggtgcactgcatttctacttggccaatgagggcatagaaatgtcattcaacaaagctaa

SEQ ID NO: 634147 - DNA, 606 bp, Homo sapiens
ccctggtaagcctggtggtccctaaaaaagaaagttttggtgttagttttgtttttctcaaaatatcattagcattaaaattgttatcatgtaatattatatataaaatataagttattaaaacataagcaaagaaagaaagaaaaggaaatggaatgaaaagagagaagtcataactaaaagaaagaagttctgccctaaataacctctactcacgggatttccwgcgaaaccaggcaagccaggaggcccgagcggccctctctccccctggggagacagcagagcatcattcatacgcactgtgtgtggcagacacatcagccctgacatcgcatgcatcactctgccctacccttcatttgttggttaaaatcatttcctaaaaacagtttgccacaagctgtgctactgggtaccactttatgaaagaagaaatagacttgatagtatcattaatagggacaaaggcccataatggcattttcttacgtgatgtagtaaatgattataggtaataactttcgtgcttaaatgcaattttaggataaaagtctacaaaaaagaaaggaacaattatatctttctggtacactaaatatggga

SEQ ID NO: 634148 - DNA, 606 bp, Homo sapiens
ccctggtaagcctggtggtccctaaaaaagaaagttttggtgttagttttgtttttctcaaaatatcattagcattaaaattgttatcatgtaatattatatataaaatataagttattaaaacataagcaaagaaagaaagaaaaggaaatggaatgaaaagagagaagtcataactaaaagaaagaagttctgccctaaataacctctactcacgggatttcctgcgaaaccaggcaagccaggaggcccgagcggccctctctccccctggggagacagcagagcatcattcatacgcactgtgtgtggcagacacatcagccctgacatcgcatgcatcactctgccctacccttcatttgttggttaaaatcatttcctaaaaacagtttgycacaagctgtgctactgggtaccactttatgaaagaagaaatagacttgatagtatcattaatagggacaaaggcccataatggcattttcttacgtgatgtagtaaatgattataggtaataactttcgtgcttaaatgcaattttaggataaaagtctacaaaaaagaaaggaacaattatatctttctggtacactaaatatggga

SEQ ID NO: 634149 - DNA, 572 bp, Homo sapiens
gctgttgtaagtacctgtaaagtctatgtctgatgcaaaggaaggtggaagttatttattattgttgcttttattgtgatgaccattgtcattattatagcctgctgcctcagaattcaaaggcccaaatagccagccytcttctgcctgcacattgagccctcccctgtcctgaactggggcacacccagacccctctgcctgctggtgtggttccccctgcagaaagcccccaatatcagggcatggagatggcagctggggctgcagacctgcgtgtgagctggccccatgcccaggggcggctgcaaggctcacgccatggctcagctttgggctgtgcacttagggtttggagagaggggatgtgctggcagctgccacaacatctggacatctggcatcagggctgggagacaagcgtgggcagagggttttctgtttcgggagactgttgtgtctgattctatattttacatcctggggtagagatgaagagaaaggccattgcaggtggccccaccagggtacccggaataaagcattgccgttcctacccgccgtttcctcca

SEQ ID NO: 634150 - DNA, 523 bp, Homo sapiens
cagaagaggtgacatttaagctggtttgtgaaagatgagtaggagctggccaggcagagcaggctggctgggcatccaggtgacccaggtgacccagcacaccaccgcaggcttccatggagacaggggacagtgtaggcaggccaggccgactcaytggcccagatcatagaaggccttggcattgaggataagcagcggaggtgtgttgtgtaggtgaggggcatcctggggaggtttaaaacaggaggaggtcccccaggggcaggaaacccagagaggccttggagggtgggaacgagcctgagagggccgacaggacaccactcagaaattcctgggcattgcacacagaatcctgcccgcaggcgctatggttttctgcagcttcaggccacaggtctcgtagttgctggtttctcttggttttggaatgcgaaatagaggattgtcacaggtgactgtggtggggcttctgaatccttctaggctctgatggaaatgcactggtcatttctgaatc

SEQ ID NO: 634151 - DNA, 542 bp, Homo sapiens
tgcggttctctgagaaactgtcctctccagctcttttccaggacaattaggtagaaagtcagaagagatcacacgcagcctcgtgcaaagaggctgtcagagcctctgccagtctgaacacacacttggtggaaggtcacagtaccgagctggtgatctgaggctgcccttggagtccatctgagtcattctgtttaaagtgtgtgtgtctatctgtgtgtgtgtgtgtgtgtgtgtgtgtgtgtgygcgtgtgtgtgtgtggtgggattggggttcccagtgggtggcttgctaggatgattcagatggtcaggggtggttgagggctgctcaggactcggcagctaattgcccagctttccactgtggtgagatctggtgctgagcccaaagggaaccctgtggtgcctgggcctgagttggttcagaatcgcccaaacaggccccaggcctctgccagttgatcaacctgggagagtacaggtagtaagagtttccagggcaacctccagggagaggacagggatgtctcctgtgtgcc

SEQ ID NO: 634152 - DNA, 542 bp, Homo sapiens
tgcggttctctgagaaactgtcctctccagctcttttccaggacaattaggtagaaagtcagaagagatcacacgcagcctcgtgcaaagaggctgtcagagcctctgccagtctgaacacacacttggtggaaggtcacagtaccgagctggtgatctgaggctgcccttggagtccatctgagtcattctgtttaaagtgtgtgtgtctatctgtgtgtgtgtgtgtgtgtgtgtgtgtgtgtgtgcgtgtgtgtgtgtggtgggattggggttcccagtgggtggcttgctaggatgattcagatggtcaggggtggttgagggctgctcargactcggcagctaattgcccagctttccactgtggtgagatctggtgctgagcccaaagggaaccctgtggtgcctgggcctgagttggttcagaatcgcccaaacaggccccaggcctctgccagttgatcaacctgggagagtacaggtagtaagagtttccagggcaacctccagggagaggacagggatgtctcctgtgtgcc

SEQ ID NO: 634153 - DNA, 552 bp, Homo sapiens
caggcccttcgcgggctccccagatcagtccagcctgtgtcggacccgatgactaagcacacaggaacccataactgagcctgcggaagagccagaagccgccttgccyttaacgaggggtatcctggcgagcatgcgcagaccgtccgcgcacgtcgtcgcccgctgagagcaagcgcaacgggcgttttcgtttgtgacgccagggagcgtgaggacgtggggcttccgtgaatgcgcagtgggtgcgtcggccacgaccttttggccaggttagggagggggcgacgctgagatgggggcggcggcggcggaagcggatcgcactctctttgtgggcaaccttgaaacgaaagtgaccgaggagctccttttcgagcttttccaccaggtaagcggctgggttcggccctttgcctttcgttttccgtctcgcctagggcctggccagcggccaccccgttttcttttcgtagccgtcaggggacccgacgggtggctgtttgggggtgaaaggcgggtctgggttgcgaaacgctcgctgggtgtcgc

SEQ ID NO: 634154 - DNA, 397 bp, Homo sapiens
taagtctcagaaaacatcagtgtcttatttcagcgtctggtcttgtaggttaagaaacatgactttttattacatctgtggctggtctggttactcacttatgcaagtcagactcataagagagtgaatcagcaccagagagtggactatttttacttggtatgaggagtttgcatttccagaatttggaattttggaagttgtgattcagggcatttctgtcctcatatcccagaaggtcaaagaacattagrtcctctctctctctctttttcttagagatggggtcgcaccctgttaacagcctgggctggtttcaaactcttgggctcaagcgatcctcctgcttcagcctcccaaacttctgggactacaggcatgtggcaccgtgcccagt

SEQ ID NO: 634155 - DNA, 623 bp, Homo sapiens
aagtgtcttaaggtggagtgggtaattgattgactactggtataattttagagtcaccaaagagcacatcaaccttaatatactttcccacaaccccagtcacttccatattatgtgacctttattacaagaaaggaatactataggctaaaatttcttgtagatacatgcaaaaatgctcagcaaaatattaacaaatgaagccagcaacatacataaagaatgacaaaatggagtgtattctaggaatacaataatagtttagcatttgaaatcaaaaagtrtaattcattatattaacagaataaagaagcagtgcaatatgaacatctcagtagttgaaggaaaagcaattagcaaaattcaatatccacttatgataaaaaaaatcagcaaactggaaatagaaggaaacttcctcaatctgatgaaaggcatctattaaaaaatctatagttaacattaaattagctaaactctgaacattctcccactaagattgggaatagggaaagatgtctgttctcatcatttctacttaacattatgccaaaagtcctaaccagtgcaagaaggcaagaagaaagaaaggacataaagattggaaaagaagaagtaaaaca

SEQ ID NO: 634156 - DNA, 601 bp, Homo sapiens
gcctacctagaaaagtatttatttctccttcatatttgaaagatatttttgctggatatgctattctagggtaaacaacttttttccatcagcactttaaatatgtcatatcactctctcctggactgtaaggtttccactgaaaagtctgctgccagaaatattggagctccattgtatgttgtttcttttctcttgctgtatttaaaatcctttctttatccttgaccttttggagtttgataattaaatgtcttgaggtagccttcttagattaaatctgcttggtgttctctaacctttttgtgcttggatattaatttctttctctaggtttgggaacttctcttttattattcctttgaataaattttctatccctatctctatctctatcctctctttaaggccaataactcttatatttgccctttgaggctattttttagaacctgtaggcattcctcatttttaagaaattctttttttttkgtctcctctatgtatttttaaatagccggtttcaagctcaataatttttcttctgttggatcaattctgctgttaagatactctgatatattcttcagtatgtcagttg

SEQ ID NO: 634157 - DNA, 601 bp, Homo sapiens
gcctacctagaaaagtatttatttctccttcatatttgaaagatatttttgctggatatgctattctagggtaaacaacttttttccatcagcactttaaatatgtcatatcactctctcctggactgtaaggtttccactgaaaagtctgctgccagaaatattggagctccattgtatgttgtttcttttctcttgctgtatttaaaatcctttctttatccttgaccttttggagtttgataattaaatgtcttgaggtagccttcttagattaaatctgcttggtgttctctaacctttttgtgcttggatattaatttctttctctaggtttgggaacttctcttttattattcctttgaataaattttctatccctatctctatctctatcctctctttaaggccaataactcttatatttgccctttgaggctattttttagaacctgtaggcattcctcatttttaagaaattctttttttttggtctcctctatgtatttttaaatagcckgtttcaagctcaataatttttcttctgttggatcaattctgctgttaagatactctgatatattcttcagtatgtcagttg

SEQ ID NO: 634158 - DNA, 458 bp, Homo sapiens
tagggtgggttatttggaggccccgttatttaaccttttggttcacagttacgttgaggtttattatactcttgtaatgtgttatactttccataattaaaaaataaaaaaggtacaattcttgctttctcagaccatagcaatgcaaggataaccggggaaaytgaataataaaaactggtttgggtctggaactacctgtggctgagtaggtaagtctgtctagttctggagtttagccttgggaattccatctgcctccagataaaactcacattcttctacatcaacttcaatagtaataaaaataatcatttcctcttcatccacctcatccctgtatcttctttttcaattcattcaggaatttgttggaagaaaagaatgcaacttattggcttgctcagtttcctaaaaatgttactatgcctgcctcatggattgaccttggtattgcc

SEQ ID NO: 634159 - DNA, 624 bp, Homo sapiens
acacacacccatacatgtgcacacacaaagatgcataattttccatgatccattttcagaatgattctgttttaggaccaatatgtaatgggaccaggttggaggaactgatctctgggacccttgcttgtgcccttaggaagagtaaattccttttgtttctcaacgtggagtaacaggaagtggacaatttagggaggtgctttcttttatgtcatcatcaaagtggtataaggaattgcagttttggtttacagataaaggwaatttaacaataccttttaggagcatcttgccttcttacctccatatttagtcatgaaatggggaaagagatgctgctgaattctgagttaggtgtactccttggataatctaaattaataggcccatgtagattgccttggaacctagccctgttttgtttctgtggaaaaacttccattttgaatttcacttaaacagcttacaattcatactgagcaatagaattgttaaattagagactgcatgcagttttatactttcagtcatcttggttacacatctttctccaaatcatttgtttttcatatgcattttcttatctttaccatcctatgggctctaagataccttgttaca

SEQ ID NO: 634160 - DNA, 627 bp, Homo sapiens
ttattatgtggttcatgactgtattgcattatttcacttatatgaaataactggaataggcaaatgtatggacacagaaagtagactggaggttaccatacttagcgtgtacacagtttggggtgatgaaaaagttttagggtgatagttgcacaactttgtaaatgcactaaatgttcctaaattgtacaccctaaaatggttaaaatggccaattttaggttacatatattttaacccaatgaaaaaytgtaatagaattatttcataatgaaaatgaattctaaattttaatttaaaactcgcagatcatcaaatttgggaccatcttcttaaaatataaactagaggacattaaattcacactcaagctatattgccagttcttcctgtattactttgaggctttacacaatcacagtcaaaatcataattgaatttttcttcaaacttgaaaagtagtgttttaatccaattttgagctctgaaaaattagataaatgaaagcatttgtttaatagtgttggagaaattgactaggggaagaaatggttcaactagaattcatacaaattactaaaataaattttagatggatcaaacagttaaatataaaaaagttatgaa

SEQ ID NO: 634161 - DNA, 600 bp, Homo sapiens
ttctgttgtcttgaggctttagcaaaggctgctacttatatatttgagggccaggggaattttagcaaatgaagggatcaggatgggtctggttaggggtcatgtgctgcagagaagaatcagcccatgcctaggagtgagtgattcacacactggaacacagaccgagtggaaggtccactccaggggtcaccaggagaaatacaartcactgcccccgacagttccctgcaagacgagaggaaattatgggctgtatgaaggacggggtttgagccaatttcacttgaatcttaaaggatgggattaacccaagtggtcctttagttagaactctattttaacaagcattgttctctaattcataaatcataaaacactggacttcacagatatgtaattcaacttttcaatttacagtagactaaggcacagaaaggcaaagctccttgcccccttagagtctccatatcttcacctctaaaataaaaggatttgattggtaattttgtaaatgttaactcacaagcaagattataaattctgcaagggcaaaggtcatattaaacaaatgaggtttctttctttttttttttttta

SEQ ID NO: 634162 - DNA, 550 bp, Homo sapiens
aactaactgcttaccctcccctttctagaaacctctttctcctcctcatgcaaatgaagtgtttacatacctgctcttaagaaaaataccagtcgcttaggtggaaggcttcaaagtgagttgttattactgatgctttttttttttttccttttgagacagagtcttgctctgtctcccaggctggagtacagtggtgtgatcttggctcgctgcaacctccatctcctgggttcaagcagttttcctgcctcagcctcccaagtagctgggataacaggcatgcaccaccacgcccagctaatttttttgtatttttagtagagacagggtttcaccatgttggtcaggctggtctccaacacctgacctcaaatgatccacccaccacggcctcccaaagtgctgggattacacgggtgagccactgcacctggtcgctattacagatctttctraagagcagcctaactggtgtttacaattctttaactcctcttctgtttaaacattcaaaagcttttctctgaaaggaagagagacaataacc

SEQ ID NO: 634163 - DNA, 512 bp, Homo sapiens
tagctcaacatttttttttgagtgaagctgatctatacatgagaaggtacagctgtaagaagggcctggtttgtctcatttgggtgggcaaaaggtcctgcctagctgacttgagtaccaaaaaaaaaatctagcatttctgctcaggctgtgtcagagtgcatttctttctggtcttccttgcaggraaataagtcccacgaggccagagactgcgtcatcttcactgtaggatcctcatctcaggcccaatgcctagcacataacagggatgcaagaaacatcttctgaatgaataagcaactatgaagaaggctctggattcaaggtgcctatggtgctgacttgcatagaaagcatatgcaagacaggttttgaaggccatactcagttcattaagaaagttttttcagtgttaagatttttttttctttcaattttaattttagattcaggggatatatgtgcaggctttttaaatggatatatcgtgtgatgctgaggtttggggt

SEQ ID NO: 634164 - DNA, 518 bp, Homo sapiens
tttgagagggtcacttgggctgcagaacagagaagaattgagtggaggggcaagagtggaagtgggaggccagtcaggagggagacaggggtagctgagaccaggtgatggtaaacacgggaagaaatgggttacagaggaagtcaggaagtaaaatggacagagcttgatgttaagttagatatggaacatgacagagagggaaaggacaaattgacttccagsttctggcttgtccaatttattatatgatggtgccattcaaggagctaagaataccagaaataaagcagatctggagcagatggtagctctgttttggacacactgagtttgaagtgctctgagacctgtgagtagaaatgtttacaattgaggaaatagctagttgaaggtttcttaacctgccctgtgaattttcctggggagataaggtggcaagagcacctatttaagagagaggcatccttgtaaaaggcgggaatgtttcctaggtatcactgaaacaatcatcatga

SEQ ID NO: 634165 - DNA, 518 bp, Homo sapiens
tttgagagggtcacttgggctgcagaacagagaagaattgagtggaggggcaagagtggaagtgggaggccagtcaggagggagacaggggtagctgagaccaggtgatggtaaacacgggaagaaatgggttacagaggaagtcaggaagtaaaatggacagagcttgatgttaagttagatatggaacatgacagagagggaaaggacaaattgacttccaggttctggcttgtccaatttattatatgatggtgccattcaaggagctaagaataccagaaataaagcagatctggagcagatggtagctctgttttggacacactgagtttgaagtgctctgagacctgtgagtagaaatgtttacaattgaggaaatagctagttgaaggtttcttaacctgccctgtgaattttcctggggmgataaggtggcaagagcacctatttaagagagaggcatccttgtaaaaggcgggaatgtttcctaggtatcactgaaacaatcatcatga

SEQ ID NO: 634166 - DNA, 538 bp, Homo sapiens
aaaattgtataaaatgagcaccaaatatgtccaaataattctaaatttgattacaaaccaaaagcaaatgtccaaactgatcttgaaagaaaatataaaaataatactttaaattacaatatttgaactttaaaatctcagatttcaataataaatactggtaagagagatgccaggggactttggttatcaaaaattgttaaattcctcaagttagcagggaggaaaacaattactaactttttacccgacttgataagttaagagaatttgtctccagcagaactgcattataactaatactaaaataagttcttcaggtgaaggaaaatgatgccaaacagaagaacagatcttgggaaaggaatgaaaaacactagagaagaaagatatgtgggyaaatataaaagatcttaaatatatgcataatatagccttagttagtttgggctcctgtaacagaataccatagactgggtggctcataaacaacagaaatttatttcctacaattctaaaggctggaagtctgagatta

SEQ ID NO: 634167 - DNA, 538 bp, Homo sapiens
aaaattgtataaaatgagcaccaaatatgtccaaataattctaaatttgattacaaaccaaaagcaaatgtccaaactgatcttgaaagaaaatataaaaataatactttaaattacaatatttgaactttaaaatctcagatttcaataataaatactggtaagagagatgccaggggactttggttatcaaaaattgttaaattcctcaagttagcagggaggaaaacaattactaactttttacccgacttgataagttaagagaatttgtctccagcagaactgcattataactaatactaaaataagttcttcaggtgaaggaaaatgatgccaaacagaagaacagatcttgggaaaggaatgaaaaacactagagaagaaagatatgtgggtaaatataaaagatcttaaatatatrcataatatagccttagttagtttgggctcctgtaacagaataccatagactgggtggctcataaacaacagaaatttatttcctacaattctaaaggctggaagtctgagatta

SEQ ID NO: 634168 - DNA, 521 bp, Homo sapiens
ggaaattatactaataatactcaaactctttcagaaaatagaagaggggatatcactcccaactcattttatgactccagccagcatcatgctgatatcaaaatttgtgaagcacactagaagaaaattatagctcaattatacttcawgaccaagtagtttatgccactttggtgtaacattcaaaattttccaatgtaattcacattttcagaatacaggaggaaaatcataagaccatcttaataaatgcaaacaaattttgacaaaattcaacatttgattaaaatttcaaaaaagctaggaatgcagaacttagtctgataaataatatctatgaaaaaccaatagttaatatacttaatgataaatcattgaacattttttatcctagaatatggaataaggcacagaggtctgctgtcatcatttctattcaatattgtattgaaagtttttgccaacataataagggcagaaaaataaataaaaagcataaagttggaatagaagaacaaaac

SEQ ID NO: 634169 - DNA, 633 bp, Homo sapiens
tggatattgtcagacaatcagcagaagatggaagtgcataaggatatgagaaagacagtgaattgcaggcgtggctacctctggctaataggctattgccaatttctcgtgttggaagaaattaaaatttacatgaacaaatgagattcatttgcataaatttacaygtagatgtggtagtgtaagatcttgaccattagttgtaagtatacaaagtctactttcatggatggtgattaataaattcttttcaagtaattcctttatgtttcttacctcagtttaaaaacctagtcagattttggttgtatctggtgatgtcagcattagccacactcacagccaagttctataggcttggatggctacagcagcatggcagtgaggcaagggacaagcactgacatccaaaagctgctggtgagaagctgggttagccttttacttgcagctgtcctaaacctaggtcccaaggtacttgactgcacactgctcttgtccccaaaggcctggaaaatttgggggtttactcctctttgctcagtatccatttcttcaaccctctccctgtgtcttccattactctggtgcacacatgcacgtgcacatacacaaatttactaacatgcacac

SEQ ID NO: 634170 - DNA, 633 bp, Homo sapiens
tggatattgtcagacaatcagcagaagatggaagtgcataaggatatgagaaagacagtgaattgcaggcgtggctacctctggctaataggctattgccaatttctcgtgttggaagaaattaaaatttacatgaacaaatgagattcatttgcataaatttacatgtagatgtggtagtgtaagatcttgaccattagttgtragtatacaaagtctactttcatggatggtgattaataaattcttttcaagtaattcctttatgtttcttacctcagtttaaaaacctagtcagattttggttgtatctggtgatgtcagcattagccacactcacagccaagttctataggcttggatggctacagcagcatggcagtgaggcaagggacaagcactgacatccaaaagctgctggtgagaagctgggttagccttttacttgcagctgtcctaaacctaggtcccaaggtacttgactgcacactgctcttgtccccaaaggcctggaaaatttgggggtttactcctctttgctcagtatccatttcttcaaccctctccctgtgtcttccattactctggtgcacacatgcacgtgcacatacacaaatttactaacatgcacac

SEQ ID NO: 634171 - DNA, 409 bp, Homo sapiens
caaaagctgctggtgagaagctgggttagccttttacttgcagctgtcctaaacctaggtcccaaggtacttgactgcacactgctcttgtccccaaaggcctggaaaatttgggggtttactcctctttgctcagtatccatttcttcaaccctctccctgtgtcttccattactctggtgcacacatgcacgtgcacatacacaaatttactaacaygcacacacatgggcctatctcatctctcttgctctcgctctctcgttaccactcattctccatttggatttctctttggtccctatctgtctgttgcttttgccaaccatcactcaggtaccttcaaaagccaagaagtagacaccagtttctctacctgttcccttcaagatcacacacataggtcacc

SEQ ID NO: 634172 - DNA, 580 bp, Homo sapiens
aggaatacatcagaacataagagactctcctgaattcaaatggcagagaagtactaaaaattaaccaatagacaaagacatattagacaaatattaattaaaataaagaaatgatgatagtaatataaaacaaaatagaattaaaagttaaaagaatgaaaatgggccaagggtatttacaytgataaagtttatagtacatgatgaagaaatgttatcattctttttgcaactagcatagcttggagttacacaaggcaaaaactgacagacatactcagagaaaaatgaggaagtaaaatcatctctctcagaattaagagattaagaagagaaaaaatatcaagaatttgaaaaatataattaacaagccttatgtatcatattagaagctcttttaatgccacatacctgattcattggattaactgatgttctgtattctttctataacaaatgccaatgcccttgacatgcgaaggctagaggagtaagccactttcgtatattcacccactttttctctcaccagtcaagttattccagaccttctaatgtcagatcttattaataatttatt

SEQ ID NO: 634173 - DNA, 438 bp, Homo sapiens
ggtaacttgcctgaagtcacagctgctaggtggctggctccagaatccttgctcttatctactgaattaagctgcccaagcaggcataggggaagcattagctcttccactttcttgccctcccttacactttcactattagaattcaacttcggtccacactttcaggaatatcacttgtctatttggtgtatggtgactttaagtcaaactggataatktagtccaaaaatccacttaaccaggcacatgtaaaccgcaatgtacattgcaatataatgaatggaagtgaatgaatgagggctccactgtcaaaccctcaaccttatggaattccctcttcccctttaggaaaaccagagaaacgtgtccatctgatagatggactaactgagggtgccagggtcaatttgaatattaaaaattatttagccttaa

SEQ ID NO: 634174 - DNA, 481 bp, Homo sapiens
actaacagctgactttgcaggactaggaagcttgctagaagacaagagaatgatattgtaaatgtgctaaaacaaagcaattgtcaacttagaattctacaaccagaaaaagtctttgaagaattgggacaaaatagagaaagtagcgggcaaaactaaaagcttgccactagtacgtcctctctaaaggaagttctaaatgatgaatttcagacagaaggaatgtgaaccccagtggaaggtctgaaatgcaagaaggaatgaagaattaactgagaaggccaacatgtgggtgattctaatagacataaaaaataatgccwtgtgtggttaaaaataagaaagatggaattaaagtggctgagccctagttttccacattaatcccccctgcatcagattgcttgctttccctgtctcacttccccattccctcactggtgcttagtgggatccaaaataaaatacttacactccaatt

SEQ ID NO: 634175 - DNA, 555 bp, Homo sapiens
actaaaacacccttatttgtttggaaataaagaaacaaacaacctatgggtcaaagaagaaatcataatggaaattataaaatatttctaactgagtagtaataaaaatactacatataaaaactcatgagttgcagctaaggcaggatttaaagggaactctagtcctcaaatatgcatactagtaaagaagaaaaactgaaagttaatgagctgaggaagttaagaaaggagcagcaaaatagacaaaagtagaaagaagagaatcctgcagagcacaaaagctaagaattaatgggagaatcaacaggtccaaaagttggttctctgaaaagataaatacaattaacaaatttctagctagaatgatcaaggcaaaaaagagagaaggctcatatgcccagtgtcaggaataaaaakgggaacctcatggcagatgctgcagacatttaaaagataataacaagatattacaaataactttatgcctatacattgaaacattaaatttagaggtttccaaataaatatataacacatataaaatctgaattg

SEQ ID NO: 634176 - DNA, 476 bp, Homo sapiens
gaattcttcccaggagctcagagcagacatcatggrtgaggtgatatctgagtctgtctctgaaggatgagtaggaagttttagtcagagaagagtgacgtagaaagggagatggcaagaaggaaggaaaagggctgcattgggtaatcactaggattcctcccttagattctgctatcctgagtccagatctagatggaagtctaggatgggggctggagatcaaaggcagacataggttcttctcctcctttatctgcagagtgatatgaagtcactgttttgtttttaagacaggctatcactctgttgcctaggctggagtgcagtggtgtaatcacagctcactgcagccttgacttctggggctcaaccaatcctcccacctcagcctcccaagcagctgggatcacaggcatgcaccaccacgcttggctaattttctgtattttttgtagagatggggttttgccacc

SEQ ID NO: 634177 - DNA, 643 bp, Homo sapiens
gggcacccaggacttcccaggcccctgcttgagggtcacactctcacacttcacagcaagggaagcaaactaaaacttgctaaccgccaggctcggggcaaggcgcttctggcactgtatctcctttaattctcactctaaaccaatgaggtaggtgayacgatcctcatttcataagtgagaaaactgcctcccaggcagccccgcctttttcagagaaggatttgagagattaaataacctgatgaagttcacacaattggttgacaggctgagccaggatttgaacccatatctctttgactccagagcccatttttcccatgaggccttgctgcacctgccctgctccctgtatccacacaccatccctggggagaggcctgggagccagagattgagtgtgacctcaccatgactaactgggaggaaatgggaggtagaaggagtagggaggggaagaaagaatggttgtgtaggagcagcctctgcatctgacacagacaaggggttggcagaaacaggggagcagagaaagagccactgccctgggtgaagctcctgttgcaaggccccaggccagttggtgcagccagattctgggtgaaccacagtcctgaagttgcatgagcaacgaatgctc

SEQ ID NO: 634178 - DNA, 606 bp, Homo sapiens
ccgccctctgcaagcgtgggcggggaagcagttggtaaacgtgtttgtttttggagaggtgggaatttgtcctcttttgccagccatgcttggtgctttggcctgaggctcaggtgtcaactgtttcctgtttgtagcctgggcagcagccccartactgggtggaccaagccctgtggcaagccccataatgaacagcacagaggaacaggaacagctgtctgagttctccagaagcctgtgcctagtacttgctggtctaccagacagccccaaacaccaccaaaaagcccctctgcagcatggggtttgggcctagctgattccggctccagcactggcatgagctctgcatgcattctggatgggtagcggagaccgaatgctcgtcttggctcaggtgttgggtggagaacagtgagaatgaaggagggagaagaaggtaggggtccttcacctgattgtgcaggagccaaaaagtggcttctctctggagatttcagtgagttgcctttggtggatgcagacactgatgacactaaaagcagggccaggccttccctttttcaagcaggcgtctctttggagcaaggcttttgaaaggga

SEQ ID NO: 634179 - DNA, 606 bp, Homo sapiens
ccgccctctgcaagcgtgggcggggaagcagttggtaaacgtgtttgtttttggagaggtgggaatttgtcctcttttgccagccatgcttggtgctttggcctgaggctcaggtgtcaactgtttcctgtttgtagcctgggcagcagccccagtactgggtggaccaagccctgtggcaagccccataatgaacagcacagaggaacaggaacagctgtctgrgttctccagaagcctgtgcctagtacttgctggtctaccagacagccccaaacaccaccaaaaagcccctctgcagcatggggtttgggcctagctgattccggctccagcactggcatgagctctgcatgcattctggatgggtagcggagaccgaatgctcgtcttggctcaggtgttgggtggagaacagtgagaatgaaggagggagaagaaggtaggggtccttcacctgattgtgcaggagccaaaaagtggcttctctctggagatttcagtgagttgcctttggtggatgcagacactgatgacactaaaagcagggccaggccttccctttttcaagcaggcgtctctttggagcaaggcttttgaaaggga

SEQ ID NO: 634180 - DNA, 606 bp, Homo sapiens
ccgccctctgcaagcgtgggcggggaagcagttggtaaacgtgtttgtttttggagaggtgggaatttgtcctcttttgccagccatgcttggtgctttggcctgaggctcaggtgtcaactgtttcctgtttgtagcctgggcagcagccccagtactgggtggaccaagccctgtggcaagccccataatgaacagcacagaggaacaggaacagctgtctgagttctccagaagcctgtgcctagtacttgctgrtctaccagacagccccaaacaccaccaaaaagcccctctgcagcatggggtttgggcctagctgattccggctccagcactggcatgagctctgcatgcattctggatgggtagcggagaccgaatgctcgtcttggctcaggtgttgggtggagaacagtgagaatgaaggagggagaagaaggtaggggtccttcacctgattgtgcaggagccaaaaagtggcttctctctggagatttcagtgagttgcctttggtggatgcagacactgatgacactaaaagcagggccaggccttccctttttcaagcaggcgtctctttggagcaaggcttttgaaaggga

SEQ ID NO: 634181 - DNA, 541 bp, Homo sapiens
aaatagattgaactattaataaatagctaacatttcttgagcatgatgtgccaggagctcttctgagtaatttttctgacattcctcaaaataaccttgtaaagtaggtagttctattatgcctctggtgacctactgggaagttccagaaccgtttagctgagacccatactcttggtcatcacagtgtgctgcctgtcccactcccatctccatcarctagggtcaaaagtgatggagggttggccaggctcggtggctcacgcctgtaatcccagcactttgggaggccgaggtggacggatcacttgaggccagaagttcgagaccagcctggccaacatggtaaaactctgtctccactaaaaatacaaaaatttgccgggtgtggtggtgcatgcctgtaatcccagctactcaggaggttgaggcaagaaaatcaccggaacctgggaggcagaggttgcagtgagccaagattgcaccactgtcctccagcctgggcgacagagcaaaactctgtctctgaaaaaaaaaaata

SEQ ID NO: 634182 - DNA, 547 bp, Homo sapiens
caagtgagtgtcttcaggagcactaattctggtcacctctagtggtcggtgagccctgagtttaggaaagaaaaagggaaagccaggatccattagtgatgtctgccttgggcatggcttgcacacacgcggtgtctttgcatttgctatccacaccctggcttgacccaggactctcagctagtggagaaataagactcagacctcccaactcctaaaccagtgctcttcccacagtccctcatggggcctcctgggtcctattcttcaggtggcttcaaggattgctttcaggcttctcctggatatttcctcactcctaagaaggaggtggcaggaatggagacagcaactttttgttttaatataatgtttagaggaagttgaaggctacggagattaagccacttgccaaagttgagcatgaaacagcctccaaagtgaccctagaacccagtttactgtgcrttttctggacagaactctgaccattaggccacacttcccagttccttggatgaatctcaagtaccaaaaaatgtaggca

SEQ ID NO: 634183 - DNA, 566 bp, Homo sapiens
ttttgcttatttcccaatattttatgtcaaacagaaggactgccattcggaaaagagggaaaatggcacaattatatttgaaaataaatattatttagtcctaactagctgataattataataatacaaatgagatattatctctactataaagcttcttcttaaaaaataaaatatgcggccgggcatggtggctcacgcctgtactcccagcactttgggaggccgaggcaggtggattacctgaggtcaggagttcgagaccagcctggccaacatggtgaaaccctgtctttactaaaaatacaaaaattagctgggcctggtggtgcatgcctgtagtgccggctacttgggaggctgaggcaggagaatggcttaggtscgggaagtggaggttgcagtgagccgaggttgcaccactgggggtgacagagtgaaactccatctcaaaaaaaaataaaaataataaaaagaaaacatgtttgtatttatttttaccatgcctttgaatatgctaatctgttccactcaatttcacaaatatttactgagtactcccaggt

SEQ ID NO: 634184 - DNA, 572 bp, Homo sapiens
agctgggtgtggtggtgggcgcctgttatcccagctacttgggaggctgaggcacaagaattgcttgaacctgggaggcagaggttgcagtaagccaagataatgccactgcactccagcctgggtgacaagagtgagactcggtctcaaaaagaaaaacaaaaaagaaaacccaacagaccaatatcccttatgaattgaggcaaaaatatttaacaaaatataagcaaatacaattcagcaatacataaaaagaatcatacaccatgaccaagtgtggcttcttccaggaagtaagattggttcaatattcagaatcaatcartgtaatccacagtattaaccagttaaagaataaaaatctcatgattacatagattggtacagaaaaagcattgaaaacaattctacactcatttatgataaaaacttccagaaaaatagaaatagagaaaaacttcctcaacttgaaaaagagaatctatacaaatcctacagataacattatacctaataatgaaagactgaatgcttttccaagactgaaaactaggccagaacatccactttca

SEQ ID NO: 634185 - DNA, 577 bp, Homo sapiens
tcaaatttggtcgatttgagctcatcctttcacgatatttcttcctggtgcaatagacactgacaagggtgatgatcagcatcaaggcaaacacagcaacagtagatgaaacagcaatgactatggtgtctcgggtggagcctctcttttcacacctttctcccatgtaccaccagtcttcccctgactggcacctgcatgttgagagcatgactcagagttattagttgatatctaactccagaaatcttcacagttaaagatgtggatcacctttagtctatttgatcaccaataggtcattgctatatgaaactattttacccactctggactggagagagactagcacctagagcacaggtataaacaatggaaagaaaaaatggaattcctcctaatctgatactaaaacagtatctccaagttaggaaaggccgatagcacagataacagagaaagtttagttctcagtgtcccatgcccgccaccctccagattcacatcttggccmagggctcctcagaacgtcagtatcttcatctagaaaatggaggcagctacacttaaaatgact

SEQ ID NO: 634186 - DNA, 530 bp, Homo sapiens
agaaagtttagttctcagtgtcccatgcccgccaccctccagattcacatcttggcccagggctcctcagaacgtcagtatcttcatctagaaaatggaggcagctacacttaaaatgactggactgttatgaggactttttcagacaattagaatatagagttctatttttttcataaaaaaattgtgttggctatcacaaagatagttcttgaggttatccaaagccccmaaaggagaataaaaaaaaaattctatgaatggctgtgagatgagaatcaactgatttcattcataagaactattaagtaattaatcctacattatggaaataaaatttctaaccaaagaatggagagatctctttcaaatcatccttacctgcactcagctttgccatctcgaacagtgcagacaccgtcatttttacaggtggtttttgagcagaggtcttgaacactaggggctggtgttagctggatttgtgtagagttgaggtgagatatgtctaggaagatggggaagagtgt

SEQ ID NO: 634187 - DNA, 326 bp, Homo sapiens
ttaatcctacattatggaaataaaatttctaaccaaagaatggagagatctctttcaaatcatccttacctgcactcagctttgccatctcgaacagtgcagacaccgtcatttttacaggtggtttttgagcagaggtcttgaacactaggggctggtgttagctggatttgtgtagagttgaggtgagatatgtctaggaagatggggaagagtgtggatggaaatcagctttkgtttaacaatcatttgatctttaattttcattttcttttaatgtttcttttttccttttttctttctttcttttttttttttagaggtga

SEQ ID NO: 634188 - DNA, 489 bp, Homo sapiens
atgagttgaattttctttgtmtttttgttaacctttgcgtgtcttctctaaatctcagacacggcactatactgtgtattgtttttagatctgagctctcttaaagcttaaagaaggaactggtaaaaagattgctgtgaaatggtctatgagaattagaggtcttcaatactgatgttccctctgctttgaggcaaatctagcagaatgcatgtggttgttaacacaggaagagaaagaaacctaatagaggcaaatgtttcaaaatttacagagtgaatcacattataatttacagagaattatatattcagtaagttgaatactttttaaaaaaatcattttgaatgagaaaagaaaaactaaaaaaagctaggaaaagtgagtgccttgtatttttttttttttttcatttttgagatggagtcttggtctgttgcccagactggagtgcagtggcgtgatcttggctcactgcaagctctacct

SEQ ID NO: 634189 - DNA, 483 bp, Homo sapiens
ataggaggctgactgaataaactacggtacacacacttcctggtactatgcaaaagacaatgagaataatgaatccaaggaatgcatatgaaatgactttcaagaatatatggttaaataaaaaaaaataaagtgcaaaaaaagtttatacagtatacttttttttggtttaagaagaaaggaaaaattagtatatacattttctttttattttkgttaccaaaaaaaaaaaaaaaaccaaaaacatgcacaaggaaaaacagaaaacaatgaaactggttacttactggagctagggacaagggaggaaatgatacctttctgagtataccttgccacagagttttgactgcaaggatgtatactaatgtgctacatattttaaaaattaggtcaacaagaattttttttttattataagttctgggatatgtgtgcagaacgttcaggtttattacgtaggtatacaagtgccatggtggt

SEQ ID NO: 634190 - DNA, 552 bp, Homo sapiens
tcaagatgtataaaaaacaaacaaaaaaaaaacacttgttctttaacaatcaatatcaactgccccaaaatttttaaattatcttctatatactgtttccttaccaagccagaaatcacgagaagagcatccaagaacagaaaccaagacagattccataaatccatgttgtagcttccagttgaaagtagctaactatgacattcagggttgaattgacttctttaaaggcaaacattataatttatagccttkgatctcaatgatccatattgcaggtcagcttgatgctgtaataatacctccaatcaagggatgaaagtcccgtatttttaacacaacttttcgggatttggttttttggcttttttttttttttcctgtgtcaacaattaagtgcctggctgagacttcttaatgaatacattctctaatgtatgtgtactggtccttagactagtaaacaccacttaagcaaaaaatatatatatcaaattaatttttaatcttgatcttatgaaactcctcctctcatatagccccatgctgctt

SEQ ID NO: 634191 - DNA, 618 bp, Homo sapiens
atgatctgaatgagaaatccaatcgagatgtatataatttttaaaaaaccaagcagaattttggagctgaagaattcaatgaataaaatgaaaaatacaatggatagcttcaacaatataycacatcaagcagaaaaaaatttctgaactcacagttcttttgaaataacccaatttgacaaagaaaaaagaataaagaaggcctacatgacatatagaacacccttatgcaacaaatattcacattttgggagttccagagggagaagagataggaaagtgcatagaaaacctatataataaaataatagctgaacagttcccaagtcttcagagagatacatctaaatacaagaagcttaaaagattcccaaatagattcaacccaaaaaggtcctcccagaggcatattacacttaaactatgaaaagtcaaagacaaagaggattctaataatagcaaaagaaaataatcaagtcacatgtaagagaatttccaccaaactaacagcatatttctaagaagaaaccttataggccaggagataataaagtcaaagtggtttttgttttgttttgttttgtttttaaaaaaaccctgccagccaagaatgctaca

SEQ ID NO: 634192 - DNA, 566 bp, Homo sapiens
aaagttttgggtaaacagagtcttttaaaactcctacttgaaatgcactgtaggaagtaaaggatcattccttgtcaccagatctcaggaagcatgtggccacctgttaggaaggctgagtttttaagccaggcatgtctatattctttattgttgttgttttgtttttgtttttttttcttttcagaaaggaaaggaagggatgggaataggagaagaaagggaaggaacaaaaagtagatgtagttgaacagaaagcctgaggagttgctgatacmtaaggaggggatgggtatcccacctttggagcctttggagtgctacttcagcaggtcttccaacaggaagtccactgtgattacacatgatggactggtgttgaagtgtttggaagggaggttttatggaagcctgaggggcaaggacatataatgtatcttctaattaccctttattgtgagcccttgatatggtttgactgtgtccccacccaaatctcatcttgaattgtagctctcacaattccctcatgtcatgggagggacctggtcggacgtaattgaatc

SEQ ID NO: 634193 - DNA, 508 bp, Homo sapiens
ccaatacccatatacccagtacggtacagcatttaccaagattatataaccggcccaagcacaaatatccaagtcttagtgagcactaacccagctgtgcctcaatttagccccaaacttatctcttccaaagcttcattcatgctcagattcaggagacactccccaatattcatctctaagttttaaaggaaacaaaaagaaagcccacctggcttgctacacatttatgtgtttggggactttctctccacatgtaacacatgtaaatgacaggcatctgttattcactrtgtgcaaagggagccactctagaggtaaagacttgagttatcaacccagtgctaccatttaccagcagtggaatttattttctgagcctcagcctacttggctgtcacattggtgatagtaggatcaacctcataaagtcttgggaggactaaatacacgtgaaagtgatgaaacacgtttgttcagaattgttctgaaaggggcactgtttaca

SEQ ID NO: 634194 - DNA, 631 bp, Homo sapiens
ctgcccagggcatgccagtgggggcaatagggcagaactcagaggaaagaatccatagagcctgtccaagaaatcaaytggaattgacttggaaatcaataccacaatgttatggtattcatagttatttttatgagctgcttgaacagttgtacagaatacaaacatgttttagctttaattatccccatctctgccttcactggtgtaccatgaaatccaactttcccatctgttaacagcatgctaggcagattctgtggtgtagctgtgaatttgaggcattcaaagtccagtccagcctagtcctgtggaaaactccatctcatatgatttaaaactttcctcatccaactgatgattcagagaaaatacagagaacatgttaaacacataccttgggcatgcaatcagcaaaatccagactttaaggaaacgacataaaacaaatgacccagtctcttcaaaacataaattgcaggggttgtgggaagggaagagaacggtagaagatggaagaggaatctatagattaaaagacatttaaaagatataccaactaattacagtgagcgaaccatgcttggatccagattcaaaccaaatgtaaaaaataaacatttattacact

SEQ ID NO: 634195 - DNA, 497 bp, Homo sapiens
attccttgctccaattaggtagtacaagctcagtgagaaaagcaaaatttgatttatgtttctggcaattcagctgatgaaaacaactaaagtgctagataaaaatctgctgcaaatatcattttaaaaacaaaacattgctaatccatacaaaaacttttacacaaatgttcatagcaggattatttatcataggcaaatgtgagaayaacccaaatgtctctcaacagacgataaacaaaatgtggtatattcatgcagtggaatacgattcagcagctaaaatgaatgaagtagtgacacacggattgatgaaccttgaaaacagtcttctaagtgaaagaaactggtcataaagtgctgcatattatatgatttaacttatataaaatgtctaggataggcaaatctacaaggagagaaaataaagtagtggttgcctgaggctgagggaagtgaggtgttactgctagtgactacagggtttctttggggag

SEQ ID NO: 634196 - DNA, 622 bp, Homo sapiens
tggaggcaaaaatcctcaacaaaatactaggaaactaaattcagcaacctttaagaaggattatataccatgactaactgaggtttattctaggaatgcgaggttgttcaaaattcaaaagcaatcaatgtaataaaccatatcagtagaacaaaagacaaaaacagcatgatcatctaaatacatgtagaaaaagcatttgacaaaatctagcaccctttcatgaaaaatacactaaacaaaatcagaatagaagggaaacttcctcaacctgtaagaactacgaaaaaaaaaaaggtccacagctaacattgtacttatgatgaaagaataaatgctttttccctaagattatggacaagacaagaatgatagatctkgccacatctcttcaatacttgtattctagccagggcaatcaggcaagatatgagaaaataagaagacatccagatgggaagggaagtaaaattatttttgttcacaaatgacatgatcatgtatatagaatattctaagtaatccaccatcacaaaaacaaatattaaaattaacaaatgagtttagctaggtgcaggatagaagataaatatacaaagattgatagtatttctatatacca

SEQ ID NO: 634197 - DNA, 622 bp, Homo sapiens
tggaggcaaaaatcctcaacaaaatactaggaaactaaattcagcaacctttaagaaggattatataccatgactaactgaggtttattctaggaatgcgaggttgttcaaaattcaaaagcaatcaatgtaataaaccatatcagtagaacaaaagacaaaaacagcatgatcatctaaatacatgtagaaaaagcatttgacaaaatctagcaccctttcatgaaaaatacactaaacaaaatcagaatagaagggaaacttcctcaacctgtaagaactacgaaaaaaaaaaaggtccacagctaacattgtacttatgatgaaagaataaatgctttttccctaagattatggacaagacaagaatgatagatctggccacatctcttcaatacttgtattctagccagggcaatcaggcaagatatgagaaaataagaagacatccagatkggaagggaagtaaaattatttttgttcacaaatgacatgatcatgtatatagaatattctaagtaatccaccatcacaaaaacaaatattaaaattaacaaatgagtttagctaggtgcaggatagaagataaatatacaaagattgatagtatttctatatacca

SEQ ID NO: 634198 - DNA, 622 bp, Homo sapiens
tggaggcaaaaatcctcaacaaaatactaggaaactaaattcagcaacctttaagaaggattatataccatgactaactgaggtttattctaggaatgcgaggttgttcaaaattcaaaagcaatcaatgtaataaaccatatcagtagaacaaaagacaaaaacagcatgatcatctaaatacatgtagaaaaagcatttgacaaaatctagcaccctttcatgaaaaatacactaaacaaaatcagaatagaagggaaacttcctcaacctgtaagaactacgaaaaaaaaaaaggtccacagctaacattgtacttatgatgaaagaataaatgctttttccctaagattatggacaagacaagaatgatagatctggccacatctcttcaatacttgtattctagccagggcaatcaggcaagatatgagaaaataagaagacatccagatgggaarggaagtaaaattatttttgttcacaaatgacatgatcatgtatatagaatattctaagtaatccaccatcacaaaaacaaatattaaaattaacaaatgagtttagctaggtgcaggatagaagataaatatacaaagattgatagtatttctatatacca

SEQ ID NO: 634199 - DNA, 552 bp, Homo sapiens
agatcttaaactgcttgccttactagtgtattacctcatacctcatttyttttctttttttttttttttttggactaaaatagttattgtagcagagattactctggggtgtttaaagtaagaaagagagtagtttagacacttagagaaatgtctttgtttgaaaaaaagtgcactatgaaagcgtcacgtggtctagccccatactagttctctttttggagacccaggattcagtgtgggctctgcccagagttcacagatccagttaaaagacagagactaaatttagaactacctatctaaataaaattggtttccttatacaattctatgatagatttctgtaattttatgtttgacttggcatccatttttaatctccctgtagtaccaccagactctttctctctgtaccttgagatataaatttcactatctgatttttcacaagagttggccctttaatatgcaaatttagggctatgtagctgacatctgcctggagtaataaaacaggttatcaagaaattggaagtctaaaataggagg

SEQ ID NO: 634200 - DNA, 576 bp, Homo sapiens
acacaaatgtgatagttacctatgaaatattgcattaaagtagtcagtaccgcgaccagagaaaggggtaaaaatggaatcactttaaacagaccaaggatataattcacaataagagatgrcaaagaggttaacaattcagaggctctcaggtctgattcggggaggaatgtttatgatctgggcaattaatttggaatcaagagaaagatttcagagtgcattttgcaacttctagacttgtctcacacaaataacttcctctacctttctttaccctccctttgattaccagaagctgaaagaaaggaattaacttctttctggctcgaagacctctggaaaactatgatctccttcagtatctctaacaccaggtcctgtgattcaaactacgcacaaccagtaagaaaaagaattcagcatgcatgctaatggctcacctcctttcttatgtttattacacatcaataaatcaagtgttttctaagatcctactaccaagttcctagtcagaaaaggaatcacctgccataggtaacagcctgtgttctttcctacagcattgaaaagagc

SEQ ID NO: 634201 - DNA, 488 bp, Homo sapiens
gggctcaggagatcccctcgtgagcatataccatcagggccttgggtctcaacacaaaactgggcagacccacggctgctgttctggttggcagctgtttgggcaggcactgagctgcaggagtttttacacagtccagcagctcctggaactctagtgaggcaggagtcccatccacacccatggaaagggggctgaagccagggagcaaaatggcctygctcagcatgtccactctcacagaagcctgcaagcttagatccactggattagaatccccactacccagcatagcagcttagattaggcctaaaatgaccgaagtcctcaagggaggggggactgctgttactgcagctctagtaagcggttttcccctcccagtgctagggaggctgggcagattggactgggcagcagtcttcacagtgcagcacagcccctggagcagatcatggccagactgcttcttgaggtgggaccgggat

SEQ ID NO: 634202 - DNA, 577 bp, Homo sapiens
aagcttagatccactggattagaatccccactacccagcatagcagcttagattaggcctaaaatgaccgaagtcctcaagggaggggsgactgctgttactgcagctctagtaagcggttttcccctcccagtgctagggaggctgggcagattggactgggcagcagtcttcacagtgcagcacagcccctggagcagatcatggccagactgcttcttgaggtgggaccgggatccatccctcctcactgggcaaggcatccttgcagggattccagcaactccagccaggagtttacagacaaagctctcatttccctgggacagagcacctgtggggaggggtggctgtggtctcagattcagccaacttaatctttcctgcctgctggctctgaagagtatcagagatccagacaagggggattcccccagcccactgcaccatctctgctaagggatagccagactccttcctaaagttgtttccttatcctgggcctcctgagtgggttagacctttcaacaggggttgccagacaccttatgcaggagagttccaacaggcatcaggt

SEQ ID NO: 634203 - DNA, 576 bp, Homo sapiens
agcttagatccactggattagaatccccactacccagcatagcagcttagattaggcctaaaatgaccgaagtcctcaagggaggggggactgctgttactgcagctctagtaagcggttttcccctcccagtgctagggaggctgggcagattggactgggcagcagtcttcacagtgcagcacagcccctggagcagatcatggccagactgcttcttgaggtgggaccgggatccatccctcctcactgggcaaggcatccttgcaggrattccagcaactccagccaggagtttacagacaaagctctcatttccctgggacagagcacctgtggggaggggtggctgtggtctcagattcagccaacttaatctttcctgcctgctggctctgaagagtatcagagatccagacaagggggattcccccagcccactgcaccatctctgctaagggatagccagactccttcctaaagttgtttccttatcctgggcctcctgagtgggttagacctttcaacaggggttgccagacaccttatgcaggagagttccaacaggcatcaggt

SEQ ID NO: 634204 - DNA, 577 bp, Homo sapiens
aagcttagatccactggattagaatccccactacccagcatagcagcttagattaggcctaaaatgaccgaagtcctcaagggaggggggactgctgttactgcagctctagtaagcggttttcccctcccagtgctagggaggctgggcagattggactgggcagcagtcttcacagtgcagcacagcccctggagcagatcatggccagactgcttcttgaggtgggaccgggatccatccctcctcactgggcaaggcatccttgcagggattccagcaactccagccaggagtttacagacaaagctctcatttccctgggacagagcacctgtggggaggggtggctgtggtctcagattcagccaacttaatctttcctgcctgctggctctgaagagtatcagagatccagacaagggggattcccccagcccactgcaccatctctgctaagggatagccagactccttcctaaagttgtttcctkatcctgggcctcctgagtgggttagacctttcaacaggggttgccagacaccttatgcaggagagttccaacaggcatcaggt

SEQ ID NO: 634205 - DNA, 579 bp, Homo sapiens
catcactaatcatcagagaaaaacgaaccaaaatcaccataaagcaccatgtcacaccaatcagaatggctattaataaaacacccatagtatatcattggtcatcatgtataatagtttttatagttgctggattcagttttttagaatttttgataattttatttgtgaatttattagatataattttttaatttctgggattaatgtgcagcatgtgcaggtttgtgacttaggtaaacgtgtaccatggtggtttgctacacagaccaatctatcacctagttattaagccaagcatgcattagatatttttcctaatgctctccctcccttcaaatccccctgtcaggccccagtgtgtgttgttctcctccatgtgttcatgtgttctcattgttcagctcccacttataagtgaggacatgcagtgtttggttttctgtttctrtgccagttttctgaggataattgctaccaggtaattcatgtctctgcaaaggacatgatcttatccttctttatggttgcatagtattagatggcatatatgtaccacattttctttatccagtctat

SEQ ID NO: 634206 - DNA, 579 bp, Homo sapiens
ttcgctggagacatggtaaaatagaatgtatttttagaggagtttcatattacagagttatgtcttaggtgaaggcagaactctttaagctgtgcccatagttaaaggagtctttctatttctgacagaagaccaccaccaaaaaaaaacagttaagatgttggatacctgggcaaagatgttcttcatggtgtttttaattatttggcaaaacacgatgttctgacattgaaggaagaggaaaagaaaaaatattatgatrccaaaattgaagacaaggccctgatcttggtagactctttgcgaaagaatcgcgtggctcatcaaatgtttacccaaacacttctcaatatggaccaaaagatcaccagtgtaaaacgtaaggttgcatctaacacgataaatatgttaaattttccagaatatattcaactccaaggcccatgcagtgttatctgtgatctacctacagtttcatttctaaactctcattttcagtaaacatgtcatcatcctgttagagaccaccttgtcttttatgggacgggatcaaatttccaattagccaaaaagctgtgt

SEQ ID NO: 634207 - DNA, 533 bp, Homo sapiens
gttcatgatattctttgactcttgcgactcctcaggcagtgccagtgtgggacaaccctgctatgcctacatccacaggctcaggaggaagcgtyaagctttgctccctagactaagctaaaaggatatggaaagaaaagttgacagaggtgccatgctcagaacataaggatagagtggggtgaaagatatacttgtggtgattctaaaatgcagtgactttttcttagagctgttctcaatggagaatcttacttctgcttcccttacataaaaaaaaaaattcctgtatcctagaatcccaggtttatagaaacagttcctaactgcacccaattcctggataaataacatcaacaatgacagctattgaatgttcactaacagtggccggtgttctaagcattctatgataatacataatttttaaccttaaaaaaacattttagagatcaagaagctgagacatgggattgttaaatattttgcaaaaagaaaaacaatcagaaattggagcagtcagttttagaatt

SEQ ID NO: 634208 - DNA, 523 bp, Homo sapiens
cgaggaactttgggcccctaaattaaagtgggttttacctagaagcatgaagtatataaagcagaatatatatgcattattctaaaggtatgctttgcagtaagaatattgctattattgactcatctagtcatttagtactttgtaaactagctccacttttttatccctgggctttccttgaattgctcactaaaatatakgaatataaatatcatttttctatggattaaataaattaatatatgtgaattattgcacatgacacagaaagaagtacacgttaaaggactggtgttatttaaaatgtggttatcgtagaacttaatccagttacttttcttagcaaggtttaaataaagatcacttgaatgctttcatccaccttgtatggcagtttcctgagaggacttgcattctcttggtcacctctggcccaaacgcccagcccctgctcaaatagttaaattttctataatattttgtacaatgagatatcttctttcagaagaagtttggttct

SEQ ID NO: 634209 - DNA, 497 bp, Homo sapiens
cattattggctaaattcccaaaggaaaatgtactgtactatcaataagacacatgctttcagatatttgtcaacagcactatccaccatagcaaaatcgtagaatcaacccaggtgcccatcaatagtggattggataaaaataaaattggtacatacctaccatggaatagtacactgccatataaattcaaatattatactttccagcaatatggatgcaactggagcccattaccctaagcaaattaatacagmaacagaaaactaagtaccacatgatctgacttataagtgatagctaaatagtaggcactcatggacataaagatggaaataatagacacagggagcaactagaggaaggagtgaaggaggagggcaagagctgaaaaactatatactgggtgctactctcactacctaggtgatgggttaaatcataccccaaacttcagcatcacataatatacctttttaacaaacctgcgtgtgtat

SEQ ID NO: 634210 - DNA, 600 bp, Homo sapiens
tgaaaaactatatactgggtgctactctcactacctaggtgatgggttaaatcataccccaaacttcagcatcacataatataccyttttaacaaacctgcgtgtgtatccctgaatctaaaaaaacaattgaaatgaaaacaaaaagtgaaatgtaaactatttggttaattattacgggaaaatgcaaggagactagttaaattttactcattcaggacatgtattttagattagctgaggtagaaaaactgacagatcagaagaaaggatgaacagaaggaggtgtgggggccatggtattcttcatgacaatttgaataacttgtgaagaaaaaaagttctgatattgaagagaaaggaaaagaaaaaatattatgccgaaattgaagacaaagccctcatcttgctagacaatgtgctaaagaaccctgtggctggacaaaagtctatcgagaccctacttaatacgtaccaaaagtccaccagtatgaaaggtaagattggtattttacaatggatatctccatttttttagactctattcaactccaaggcccatgcagtgtcttctgtgatctctctatccttcctttacaa

SEQ ID NO: 634211 - DNA, 600 bp, Homo sapiens
tgaaaaactatatactgggtgctactctcactacctaggtgatgggttaaatcataccccaaacttcagcatcacataatatacctttttaacaaacctgcgtgtgtatccctgaatctaaaaaaacaattgaaatgaaaacaaaaagtgaaatgtaaactatttggttaattattacgggaaaatgcaaggagactagttaaattttactcattcaggacatgtattttagattagctgaggtagaaaaactgacagatcagaagaaaggatgaacagaaggaggtgtgggggccatggtattcttcatgacaatttgaataacttgtgaagaaaaaaagttctgatattgaagagaaaggaaaagaaaaaatattatgccgaaattgaagacaaagccctcatcttgctagacaatgtgctaaagaaccmtgtggctggacaaaagtctatcgagaccctacttaatacgtaccaaaagtccaccagtatgaaaggtaagattggtattttacaatggatatctccatttttttagactctattcaactccaaggcccatgcagtgtcttctgtgatctctctatccttcctttacaa

SEQ ID NO: 634212 - DNA, 600 bp, Homo sapiens
tgaaaaactatatactgggtgctactctcactacctaggtgatgggttaaatcataccccaaacttcagcatcacataatatacctttttaacaaacctgcgtgtgtatccctgaatctaaaaaaacaattgaaatgaaaacaaaaagtgaaatgtaaactatttggttaattattacgggaaaatgcaaggagactagttaaattttactcattcaggacatgtattttagattagctgaggtagaaaaactgacagatcagaagaaaggatgaacagaaggaggtgtgggggccatggtattcttcatgacaatttgaataacttgtgaagaaaaaaagttctgatattgaagagaaaggaaaagaaaaaatattatgccgaaattgaagacaaagccctcatcttgctagacaatgtgctaaagaaccctgtggctggacaaaagtctatcgagaccctacttaatacgtaccaaaagtccaccagtatgaaaggtaagaytggtattttacaatggatatctccatttttttagactctattcaactccaaggcccatgcagtgtcttctgtgatctctctatccttcctttacaa

SEQ ID NO: 634213 - DNA, 585 bp, Homo sapiens
aacacaacctttagagaatttgaaccactgctctcctgggcccatttcacagtctatggaaaagccctgggaaatgtatgtccctgtgaaacaattttacttcaagaaatgaacacatttttcacaaaaattaaagcttttcctatttaatgtccttccttttcagatttttttttctgatacagaattttattctgtcacacaggctggagtgcagtggcactaacagggctcacagcagcctccacctccctaggctcagatgatcctctcagctctgcctcccaagtagctgggaacacaagcacatgctaccacggctggataatatttttatgtttgtaaagacaaggtctccctatgtttcctaggctgtttttgatattctgcactcaagcaattcacycacgttggcctcccaaactgctgggattacagctgtgagccacccacccatcctggatggctttcttttgaggaacattacctcatagaggcctggagcacaggctctggactcagaatgttgaacttagcatcttaaacttcatttcttgggcaagaaattgaacttccctatgcatt

SEQ ID NO: 634214 - DNA, 234 bp, Homo sapiens
ctttctcccctgctttcatcaaactgtaggagtctttcagcatagtcaccacagctgggaatgtgttggatcacagctgaattcaggacatcttagagcccaaggygcattgcatactacctgagtattgattattaaggacacaaagactctttagtcagcaggtgacaaattctgccaggactggatccttccctttatgtcactgggttctcgattggctagggtatgtct

SEQ ID NO: 634215 - DNA, 234 bp, Homo sapiens
ctttctcccctgctttcatcaaactgtaggagtctttcagcatagtcaccacagctgggaatgtgttggatcacagctgaattcaggacatcttagagcccaaggcgcattgcatactacctgagtattgattattaaggacacaaagactctttagtcagcaggtgacaaattctgccaggactggrtccttccctttatgtcactgggttctcgattggctagggtatgtct

SEQ ID NO: 634216 - DNA, 612 bp, Homo sapiens
agttttttcattcatattattacatatcttagtaatatttcccttttatgactgaacagcatttcagtgtatgtatatagcacaaattatttacttatgctcctgaattggttattgagttgtttccagtttttgacatctccatttttgaggaacagtgggcccttgcaatctagttgctcaatgtttagcttcccaggacatgagactcaaggcttatggttctacatccccagatatatggtctagtcatgatttctgtgtcctggatgccgctttggcatgcttcaactcagtggttcctggctctatctggggaagaaaccttcacgtgaaagttarcagaaaaaataaattaatcagtaaataaatttaaaagcaaatgattggaagagaagtaatttacaggcaatttctgctttctttcatgctacaaatcctcccagtggcaaggagcacaagattgtgctgcaaatggattaagtcattgccaaagtaaagataaaactttgcctgattttctcaccccagaaagtttttcatgcccattgtactcaatttcctgccacttcctcctaagataagtagtgattaaatttttaccactataca

SEQ ID NO: 634217 - DNA, 562 bp, Homo sapiens
agaggctacagaattggcacaggaggagtactagcagcagtggttcctaaatgaaatgggctatttctgcttcattactttattattctgagttaaataaacatgggacataagaggatgatctctgctttccagggactgatgtggaaatggtaaactcagtcttcagtccactccatgcacatgtatggagactactgagggaaacaagaaggacagcgataaagtaagaggagggataacccaactgtgaggagggggacatttcactgatgaaatctaaatgaggtcactttctgttgatgacatgagaagaatatgaggctgtgttcatgatgtgagamatccttgtgctccaaacagacatgatcctcctgaagaagagacggctgcttatcaattcattgggtgaaggtacaataaatggcttactggatgaattattggagacaaatgtgctgagccaggaagacacagagatagtaaaatgtgaaaatgttacagttatcgataaggcccgagatttgcttgactctgttattcggaaaggggcacgggcatg

SEQ ID NO: 634218 - DNA, 492 bp, Homo sapiens
ggtgagaggactgtctctttaataaatggtactgaaaataaactggatatccacatgcaaaagaatgaacctagacccctgactcctgccatatacaaaaatcataccaaaatgaatcaaagacttaaatcaaagacctcaaactatggaactcttacaaaaaatagagaaactctccagtcctttggactaagaaagattttttgagtaacactccagaagcatgagyaaccaaagcaaaaatggacaaatgggattacatcaagttaaaaaccttctgcacagcaaaggaaacaatcaacaaagtaaagaaaaaactcacagaatgggcaaaaaattgcaaacaatccatctggcaagggattaaaaaccagaatatataaggagctcaaacaattctgaaggagaaaattttaataatctgatttaaaaatgggcagaagatctaaatagacatttctcaaaagagtacatacaaacgccaaacaggta

SEQ ID NO: 634219 - DNA, 511 bp, Homo sapiens
ggtggcccctgaggcaacacaggtgtctgaaagtaaagttgcctaactcastgctgactttggctttgaagaaaactatgaggggggaaaggcgtctgtgtttaggcctctagttttgctaagatttgtcacagcaaaggggttaggtgaacaatcggccaagccaggaagaatgaacccaagttccaggcttgagatgaatcagtgacatctcagaggaatctatttagaacttgggaggaatgggggtcagagacatgctggaactcacaaggtcttttaatctgcttaaattgaaggagaaggttaataagaatgtgttcttcatcctagaatgatagatatttgtgcaaagtcaataatattcccttaacatgtttctgaaattttttcaaatttatttctcactgatattaataatctcccctcaagtgaactagtgaaatttccatggtccagagagactcatgacacatgttagatcattttataagttgaatgttgtgatgta

SEQ ID NO: 634220 - DNA, 583 bp, Homo sapiens
ttgaaaaactgctatacaatcagataaacaaaggcagcatgaagtgtgttgacatggagaagaactaattagaatgattatattggagaaaactataaaataataatttagtagaagaaatgtttggtttctttgtaaggatttgtgaaagcaatagaraaaaactaaagaaaagcatttgagttatttttgagaatacagtatttggttatatagtgagtatcccatgctgtgaaacatttaagaaaacattcatgaggtaatcatccttaataaattcagtagagtaatatctgaacttgataaaaacatgcatttctagcctctaaattgctttcaaatataagtttcttttattttaaggggggcacttaaggaataagagttctttaataaaataatagaagtaagaatgaagagacatttccaaatttgagagaagaatgcataaaacttggccatggcttgaatattggaggtgcatgagaggaagggggccaagatgagtttcaagttcctggattgaacaactggtgatggtggcatcaaaaaccaagttacacaaaactgtaagagaagcagg

SEQ ID NO: 634221 - DNA, 562 bp, Homo sapiens
aaagcatttgagttatttttgagaatacagtatttggttatatagtgartatcccatgctgtgaaacatttaagaaaacattcatgaggtaatcatccttaataaattcagtagagtaatatctgaacttgataaaaacatgcatttctagcctctaaattgctttcaaatataagtttcttttattttaaggggggcacttaaggaataagagttctttaataaaataatagaagtaagaatgaagagacatttccaaatttgagagaagaatgcataaaacttggccatggcttgaatattggaggtgcatgagaggaagggggccaagatgagtttcaagttcctggattgaacaactggtgatggtggcatcaaaaaccaagttacacaaaactgtaagagaagcagggtggggaagaatggcatgttcagctctgaaattgtttacataaatgtgtctctggaagatgtgagggaatatttcagtagtcttaaatgatgaagtttggtacttatttgggtaatcagaatttgagatacaaattcagattttgttagt

SEQ ID NO: 634222 - DNA, 562 bp, Homo sapiens
aaagcatttgagttatttttgagaatacagtatttggttatatagtgagtatcccatgctgtgaaacatttaagaaaacattcatgaggtaatcatccttaataaattcagtagagtaatatctgaacttgataaaaacatgcatttctagcctctaaattgctttcaaatataagtttcttttattttaaggggggcacttaaggaataagagttctttaataaaataatagaagtaagaatgaagagacatttccaaatttgagagaagaatgcataaaacttggccatggcttgaatattggaggtgcatgagaggaagggggccaagatgagtttcaagttcctggattgaacaactggtgatggtggcatcaaaaaccaagttacacaaaactgkaagagaagcagggtggggaagaatggcatgttcagctctgaaattgtttacataaatgtgtctctggaagatgtgagggaatatttcagtagtcttaaatgatgaagtttggtacttatttgggtaatcagaatttgagatacaaattcagattttgttagt

SEQ ID NO: 634223 - DNA, 565 bp, Homo sapiens
tccagcctgtaatctcagtgctttgggaggtgaaggcagtggatctcatgaagccagtatttagagatcatctgggcaacacagtgagactatgtctctacaagaattaaaatgatcagcctggcatggtggtgtgcatctgtagtcctagctgcttgagaggctgaggctgcagaatctcttgagcccatgtgttcaagacagcagtcagctatgatcacaccatggcactccaggctgggcaacagagcaagaccccattaaaaatagtgcatttaatgaaagcaattgattctctccttttgtccatttcatgaacagagcacagcatctctccaggtttttctttacggtctcaataattcttcttgaggacaagcttgagagtatttgtagattctgctgattcaggtggtccagctttgatttgtggaagagctgtgggatatcacacaatataartgatgtcttctgcctctgtgacccaggttatcacctaagaaagttgagacagagcagaaagagagagagaaatcctaggaaaaagacttctttgcctgtaggg

SEQ ID NO: 634224 - DNA, 577 bp, Homo sapiens
ccattcgtttgtaatgatatttgagaataaatatcttgctaaagtgtatgataaaaacctgatctctggggatgcaacaagttttaagagtatgtagggaaaccaaaccttctaagcatatatttcttcatagattaaacagtgacatatgttcctccttctcatttcagaaagttctgccaatgtgaagacatccagggtcctgatatattccaggtctggrggtatgtgttcctgttgacaggttgggagaattgcctaagttaatagtcatcttttaatgacctttatgcatctagatagatagatagatagataagatagagagatagagacatagatatagatgcatctatatatgcatctgtatatctatctatctatctatatatatataaagtgattttaggtaaaataaaaattagacaaaatttctctcatatcctatagtaaagttagcatgaaaatggttattttattacaatattataaatattatagtgcagattgctgcccaaagagagtttctattagcctagcagtacaacagaaagaaatgtggaaatcaggagtttag

SEQ ID NO: 634225 - DNA, 549 bp, Homo sapiens
aattcagttatctataacttccatgttaaacctatctccacattctgctgtgccaatcccaaccacatcatagtgatctcctgaagaaaaataattatctacttccttaatttcacaaaacatttgcaaagatatctgtctccacgatatctttcacttacttccttttactagaacaagtctcagttaaaggcttcatttagctgagatagctgggtttctaaatagaattttattatyaatatatactttatgaccattagaactggctaaaatgtgtcattaaagaatgtgtctgtcattacatacagagctattgctgctgcttttctcttatgacttcctttgcataattttatgccttcattacttctgtgtctactatgtaataaattaatatttttctttaatatttctcttcttcataagaacttttttcctccaatatactgtgcttatttccttatctactcctcctagatttctacttttgttctgttttatgatttttatagttaactttttgtgtgtaaatatcttactgtcaat

SEQ ID NO: 634226 - DNA, 549 bp, Homo sapiens
aattcagttatctataacttccatgttaaacctatctccacattctgctgtgccaatcccaaccacatcatagtgatctcctgaagaaaaataattatctacttccttaatttcacaaaacatttgcaaagatatctgtctccacgatatctttcacttacttccttttactagaacaagtctcagttaaaggcttcatttagctgagatagctgggtttctaaatagaattttattatcaatatatactttatgaccwttagaactggctaaaatgtgtcattaaagaatgtgtctgtcattacatacagagctattgctgctgcttttctcttatgacttcctttgcataattttatgccttcattacttctgtgtctactatgtaataaattaatatttttctttaatatttctcttcttcataagaacttttttcctccaatatactgtgcttatttccttatctactcctcctagatttctacttttgttctgttttatgatttttatagttaactttttgtgtgtaaatatcttactgtcaat

SEQ ID NO: 634227 - DNA, 549 bp, Homo sapiens
aattcagttatctataacttccatgttaaacctatctccacattctgctgtgccaatcccaaccacatcatagtgatctcctgaagaaaaataattatctacttccttaatttcacaaaacatttgcaaagatatctgtctccacgatatctttcacttacttccttttactagaacaagtctcagttaaaggcttcatttagctgagatagctgggtttctaaatagaattttattatcaatatatactttatgaccattakaactggctaaaatgtgtcattaaagaatgtgtctgtcattacatacagagctattgctgctgcttttctcttatgacttcctttgcataattttatgccttcattacttctgtgtctactatgtaataaattaatatttttctttaatatttctcttcttcataagaacttttttcctccaatatactgtgcttatttccttatctactcctcctagatttctacttttgttctgttttatgatttttatagttaactttttgtgtgtaaatatcttactgtcaat

SEQ ID NO: 634228 - DNA, 656 bp, Homo sapiens
ggtgctgtatatggtgcaggtattaacgtggcctaatccctgagttcaaaaagtcgtaaatktagtagagcgttaggaaaaggcagaatgtggtaaagggaagggattgcggtttggaaaagaaatatctaaatgtgcatccccaaagtggcgttactgactgtgatttaagttaattgtccattccgatatgtaatagactcagctatacagggaacggtaataatttcatgcacaagagatatctgaggctacaaaagtgtctgagctaagagagaatatgtaatattcagtctacacagggaaattatgttaataaattatcaatttatgttcttcacattaaattttaattaaaatataatacattgactgtccagcatcatttaccccaaacagcagttcaactataaaaatgataaaacagaaccaaaactagaactctaagaagaatcaataagaagatgatcacatcataatggagaataagaagttgttatgaagaagagaaatattaaagagaaaccaatattaatttattacatggtagacacagaagtaatgaatatgtgaaaattatacaaaggaaggcataagagaaaagcagtagcaatagctctgtgtataatcacagacacattctttaatgacacatt

SEQ ID NO: 634229 - DNA, 398 bp, Homo sapiens
atagcaaaccaggtaagtttgatttcattaacagacgttaagtacacagtgggtttcaagcagaaagaagccatgttcattcccctatccattcaggaatatatatattttttgagatggagtttcgctcttgttatccaggctggagcgcaatggtgccatctcggctcactgcaacctccrcctcccaggttcaaggaattctcctggctcagcctctcgagtagctgggattacaggcatgcgccaccatgcctggctaatttttttgtatttttagtagagacagggttttaccatgttggccaggctagtctcgaatgactgacctcaggtgatctgcccaccatgccctcccaaactgctgtgattacaggcatgagccattgcgcctggcc

SEQ ID NO: 634230 - DNA, 529 bp, Homo sapiens
aacgtctcagcttattctaacctaggccttctcattcagcctcatcttctgatactgtccccaccttgctcattacaattaaaatattctgctcttcatttaatgtctagtccagtctcccaccttctccttgcttcctattctcctatactttctgttcattctccaagtctaagaccagatggcatttttttttttcaggcaatcctctgattctctgaggggagacaatrtcagaggtacatgcccctagggcaccttgtttctctttagggtagcatagttttttacctttaattgtgatttccagcctaattctcagcatccaccattagattttatgctctgtgaggataggtggccataaactaggcctgcactacttctggcactcaagggaagtctaataattatctactgaatcactagttgagtgaatgtagaaacaaatgaataaattttaggtatggcccaactcttgaagaatatttaataaaaggtaagtaagtttgattttatttaatagaca

SEQ ID NO: 634231 - DNA, 529 bp, Homo sapiens
aacgtctcagcttattctaacctaggccttctcattcagcctcatcttctgatactgtccccaccttgctcattacaattaaaatattctgctcttcatttaatgtctagtccagtctcccaccttctccttgcttcctattctcctatactttctgttcattctccaagtctaagaccagatggcatttttttttttcaggcaatcctctgattctctgaggggagacaatgtcagaggtacatgcccctagggcaccttgtttctctttagggtagcatagttttttacctttaattgtgatttccagyctaattctcagcatccaccattagattttatgctctgtgaggataggtggccataaactaggcctgcactacttctggcactcaagggaagtctaataattatctactgaatcactagttgagtgaatgtagaaacaaatgaataaattttaggtatggcccaactcttgaagaatatttaataaaaggtaagtaagtttgattttatttaatagaca

SEQ ID NO: 634232 - DNA, 516 bp, Homo sapiens
gtgaaaaatactctgctagttgtgagggtaccattttgaggaaatgttcttacatgttcaagcttacagtcaagtggaaagatagatatgcaaatacrtcaaataaaaaacattgtaagaatttaaataacgagcagatgctcaaaaaaaagcatgagcacactgtgtttcaggtagaagatagctgtccagagaagggagggcttggcactgagacctgaaagactaggaggaatttgccccttggacaagtgagggctggtcccctaacagagagcagtgtgggaagaaacacaaagattttagggtgtctaaagtaatcaggaagctgggctagctgggctttagaaagtattgaagtgtgcagccaggactgaagtgggcgtgatgagatagggccatcatttgaagatgtttgtttgcagaaaattgacagaacattagagtgttgagtttaagagtcaggccaacctagattcactcttctcaacagacattagaccaaaagaaaatttc

SEQ ID NO: 634233 - DNA, 515 bp, Homo sapiens
tgtgaaaaatactctgctagttgtgagggtaccattttgaggaaatgttcttacatgttcaagcttacagtcaagtggaaagatagatatgcaaatacatcaaataaaaaacattgtaagaatttaaataacgagcagatgctcaaaaaaaagcatgagcacactgtgtttcaggtagaagatagctgtccagagaagggagggcttggcactgagacctgaaagactaggaggaatttgccccttggacaagtgagggctggtcccctaacagagagcagtgtgggaagaaacacaaagattttagggtgtctaaagtaatcaggaagctgggctagctgggctttagaaagtattgaagtgtgcagccaggactgaagtgggcgtgatgagatagggccaycatttgaagatgtttgtttgcagaaaattgacagaacattagagtgttgagtttaagagtcaggccaacctagattcactcttctcaacagacattagaccaaaagaaaatt

SEQ ID NO: 634234 - DNA, 387 bp, Homo sapiens
tggggagaaggttcatagtctggaggattaatttggaatcaagaggaagcagagaagatttcagagtgcatttagaaatttcyggagttttctcacacaaataacttactctgtctttccttactctctctttgattaccagaagctgaaagaaaggaattaacctttttctggcttgaaaacatctagagaacatactctccttcagtgtctctacacagtctcaggattcaaactacataccaccaataagagaaagattcagcatgcacactattggttgatttcccttttggtatttctgcctgtcacatagcaataaatcaagatttttctaagacctgagtacccagctgctagtcagaaaagggcccagactcacccagc

SEQ ID NO: 634235 - DNA, 606 bp, Homo sapiens
atagtgttgacatatactcacattagcaagtatttacacatattttgaaagttttaattttaaagacatggtccctgtaatcttttgccttgtaatcttttgatccataatcccaccatcatttttagttggagaatatgtataacaacagagaaaagtatgagatgctttttaacttttaattttggtgttatcacaaataatgaatgcacttaygagatacatgggatatattgatacagacattcaatgtataataatcacatcatgaaaaaatagaatatttataccctcaagcattatcctttgtgttataatcaaattatccccttttagttattttttaatgcgcaattaaaattattttgactatagtcacctggggtgctgtcaattactaggtcttattcattcattctaataaattttgtacctattaaccattcccacctcctcctgcaaccctccactacccttccagcttctggtaatcaactttctactctctatactcataagttcaattgtttttatttttagattccacaaatacatgaaaacatgtgatgtttgtctttctgtggctggcttgttttgcttaatgca

SEQ ID NO: 634236 - DNA, 588 bp, Homo sapiens
actgaagcctcagtaatgatggatgcccctccctccatcaagctcaagtgtcccgggtggacttcaaactgctgtgctgacagcgagaatttcaaggcagtggatcttagtttgttggccccatgggggtaggatccactgaacaagaccacttggctccctggcttcagctgcctttccaggggagtgaacggttctgtctcactggcattccaggcaccactggggtatgaaaaaaaactcctgctgctaactcggtgtctgcccaaatggccgcccagctttgtcttgaaacccagggccctaatggtgtaggcacccaagggaacctcctggtctgcaggttgcaaagacagtgggcaaagygtagtatctaggctggatagctctgtccctcatggcacagtccctcacggctttccttggctaagggagggagttccctgaccccttctacttcctgggtgaggcgatgccccaccctacttttgctcaccctccgtgggctgcacccactatgtaaccagtcccaatgagatgagccaaatacctcagttggaaatgcagaaatcacccgctttatgcatt

SEQ ID NO: 634237 - DNA, 588 bp, Homo sapiens
actgaagcctcagtaatgatggatgcccctccctccatcaagctcaagtgtcccgggtggacttcaaactgctgtgctgacagcgagaatttcaaggcagtggatcttagtttgttggccccatgggggtaggatccactgaacaagaccacttggctccctggcttcagctgcctttccaggggagtgaacggttctgtctcactggcattccaggcaccactggggtatgaaaaaaaactcctgctgctaactcggtgtctgcccaaatggccgcccagctttgtcttgaaacccagggccctaatggtgtaggcacccaagggaacctcctggtctgcaggttgcaaagacagtgggcaaagcgtagtatctaggctggatagctctgtccctcatggcacagtccctcacggctttccttggctargggagggagttccctgaccccttctacttcctgggtgaggcgatgccccaccctacttttgctcaccctccgtgggctgcacccactatgtaaccagtcccaatgagatgagccaaatacctcagttggaaatgcagaaatcacccgctttatgcatt

SEQ ID NO: 634238 - DNA, 418 bp, Homo sapiens
gggacttaatctgagctactaatttccattttggggctttttgccaggctatttgaggcagcatttagaagcagaraaaagtagattagcactgactatcattttttatgtttagactccaagctgataaagcaatgacatttttattatttcagcatggttttgtggatgtgtcacaattatttatatagtttttttttaggtaaaggaaattaaattatttgaggaactgtgccctcaccttgtggctgaatctatctggtgctgctcttccttctcctttccctcactcccttacatggtcaggtcattttaaatatgtccagtcttcagaggagatgcctcctgatctcccaactatcactgaggggtggaaggtagtgcttattcctcatttgtttgatagtgctcaacacct

SEQ ID NO: 634239 - DNA, 395 bp, Homo sapiens
agggacttaatctgagctactaatttccattttggggctttttgccaggctatttgaggcagcatttagaagcagagaaaagtagattagcactgactatcattttttatgtttagactccaagctgataaagcaatgacatttttattatttcagcatggttttgtggatgtgtcacaattatttatatagtttttttttaggtaaaggaaattaaattatttgaggaactgtgccctcaccttgtggctgaatctatctggtgctgctcttccttctyctttccctcactcccttacatggtcaggtcattttaaatatgtccagtcttcagaggagatgcctcctgatctcccaactatcactgaggggtggaaggtagtgcttattcctca

SEQ ID NO: 634240 - DNA, 351 bp, Homo sapiens
atctgagctactaatttccattttggggctttttgccaggctatttgaggcagcatttagaagcagagaaaagtagattagcactgactatcattttttatgtttagactccaagctgataaagcaatgacatttttattatttcagcatggttttgtggatgtgtcacaattatttatatagtttttttttaggtaaaggaaattaaattatttgaggaactgtgccctcaccttgtggctgaatctatctggtgctgctcttccttctcctttccctcactcccttacatggtcaggtcattttaaatatgtccagtcttcagaggagakgcctcctgatctcccaact

SEQ ID NO: 634241 - DNA, 623 bp, Homo sapiens
tcacgtgcaatgacatctactcctcagaaaggcaggacagcatatctgtggctacagagcatgcctaagattttgggcaggtagctggtcagaactgacctcaaaaccaaaaattccccataaaacacacagtccagaatggtctccttgaactctagggctgttcctaatttctcttttaacagcacattttgcatttttgcaaacctttctgttgcaacctcacataggtaactgaaatttcacttctgttgaactcaaactcyagatatgtgaagagaagaaaggtggttgtagaatggccccaagatcctcctttctggacgcctttcctcttttctctttgctgctagcttttccttattgtctgacctaaattgagccaaaagctacaaatattgaggaatacctccacaataccattctcatgcatttttgcttcagtgagccagctttcctttggatattggatatgttatcagtaatgtacatacaatataactataactagcatcagaatccttcatttgagccattcacacaatttttaaatagtatgttaatataaggtcagaatatttttcatattatcttgaattttcacagaagtccagatttcacac

SEQ ID NO: 634242 - DNA, 437 bp, Homo sapiens
gcagtttttttttttaattgtacaatgtaacatccttaaacatgacttaaaattgaactgaagagctgctgtgtcaggcatgttgtctgaattgctggacatggagctatctccctggtttagaggattccattctagttgggagcataaaacattcacgcagagaaagtggtagtatgctgacctgtttaataaaacatgcgcacacacacacacaccatacctaaattagtaatygtcaaataattagagtaatttaatatatatcctgttaaacttattatataattggatttttctgagacagggtcaccctgtctctgtctcccaagatgcaggctggagtgcagttgtggggtcatagcttacagcagcctccaactcctgggctcaagtgatcctcccacctcagtctcccaaggagctgggactacaga

SEQ ID NO: 634243 - DNA, 494 bp, Homo sapiens
ggaactatagcttcaagatggagtttggctcaacctagaggggcccaarttcaacacaagcacttttccatcaaaagttgctccaggcactgaaaaagtgaaggaggctcagcgaagtatgagcaagaaacaggggcagaaatagaatttgaagtggcaggcaaaacatccaggggctagtagagcccatttcaggaataagtgagttggaacttgaacaaggagaaaaattgttgtggaaagaggttgtgaaataaagaaagcaaacttgtctttctcactggtcattggaaggagaactagatgtactccaaagacttgtggagtataggcaaaggaaactccctgagacatgtgcgtctccctgatggcacagtcaaaaaaagttgaccagagagcccagtaatacattacttaaaggtttgctcacttacagacaaaggggcaccaggtacagctcacagcctgtaatgccagtcagacctgcgttcgca

SEQ ID NO: 634244 - DNA, 418 bp, Homo sapiens
caatatgaagccagactctccctataagataagaagaaaaatcctaaggaagcatccttcaataagaaacatgtggttttatttagggctgtttttgaagtttaccytttttcagcagacatttaaagaaagtctaccccagagaagcacagttgctttggtgaatgccagaatggatatgacagggtgtctgcctttcgggagctcacagtttagttcctggattgccgtggaagtaaatatattaatacatgtcactatcctcctactagacctgctaaaggccaggcatggtggcttacacccgtgatctcagctctttgggaggtggaggcaggaggatcccttgagcccaggagtttgagacccacctgggcaatatagggagaccctgtctctaccaaaacttccaaaagga

SEQ ID NO: 634245 - DNA, 418 bp, Homo sapiens
caatatgaagccagactctccctataagataagaagaaaaatcctaaggaagcatccttcaataagaaacatgtggttttatttagggctgtttttgaagtttaccctttttcagcagacatttaaagaaagtctaccccagagaagcacagttgctttggtgaatgcmagaatggatatgacagggtgtctgcctttcgggagctcacagtttagttcctggattgccgtggaagtaaatatattaatacatgtcactatcctcctactagacctgctaaaggccaggcatggtggcttacacccgtgatctcagctctttgggaggtggaggcaggaggatcccttgagcccaggagtttgagacccacctgggcaatatagggagaccctgtctctaccaaaacttccaaaagga

SEQ ID NO: 634246 - DNA, 418 bp, Homo sapiens
caatatgaagccagactctccctataagataagaagaaaaatcctaaggaagcatccttcaataagaaacatgtggttttatttagggctgtttttgaagtttaccctttttcagcagacatttaaagaaagtctaccccagagaagcacagttgctttggtgaatgccagaatggatatgacagggtgtctgcctttcgggagctcacagtttagttcctggattgccgtggaagtaaatatattaatacatgtcactatcctcctactagacctgctaaaggccaggcatggtggcttacaccygtgatctcagctctttgggaggtggaggcaggaggatcccttgagcccaggagtttgagacccacctgggcaatatagggagaccctgtctctaccaaaacttccaaaagga

SEQ ID NO: 634247 - DNA, 418 bp, Homo sapiens
caatatgaagccagactctccctataagataagaagaaaaatcctaaggaagcatccttcaataagaaacatgtggttttatttagggctgtttttgaagtttaccctttttcagcagacatttaaagaaagtctaccccagagaagcacagttgctttggtgaatgccagaatggatatgacagggtgtctgcctttcgggagctcacagtttagttcctggattgccgtggaagtaaatatattaatacatgtcactatcctcctactagacctgctaaaggccaggcatggtggcttacacccgtgatctcagctctttgggaggtggaggcaggaggatcccttgagcccaggagtttgagaccmacctgggcaatatagggagaccctgtctctaccaaaacttccaaaagga

SEQ ID NO: 634248 - DNA, 505 bp, Homo sapiens
tggaagtaaatatattaatacatgtcactatcctcctactagacctgctaaaggccaggcatggtggcttacacccgtgatctcagctctttgggaggtggaggcaggaggatcccttgagcccaggagtttgagacccacctgggcaatatagggagaccctgtctctaccaaaacttccaaaaggaaaattagcccggcgtttgtgcctgtggttctagctattcaggaggctgaggcgggagggtcacttgagctcaggatgtcgaggctgctgtgagcgttgatcgcaccmctgcactccatcctggatgagagagtgagaacctgtctccaaaagaaagaaaaagaaaagaaagaaaaaaaaaaaacctgctgaagctggcaggtatcaaagtgaagcctgctattaaagagatacacaacattctccctggggattggctaagggttactggtggagggaaggttagtattgagcactgcaggatgggtagttttgagg

SEQ ID NO: 634249 - DNA, 505 bp, Homo sapiens
tggaagtaaatatattaatacatgtcactatcctcctactagacctgctaaaggccaggcatggtggcttacacccgtgatctcagctctttgggaggtggaggcaggaggatcccttgagcccaggagtttgagacccacctgggcaatatagggagaccctgtctctaccaaaacttccaaaaggaaaattagcccggcgtttgtgcctgtggttctagctattcaggaggctgaggcgggagggtcacttgagctcaggatgtcgaggctgctgtgagcgttgatcgcacccctgcactccatcctggatgagagagtgagaacctgtctcmaaaagaaagaaaaagaaaagaaagaaaaaaaaaaaacctgctgaagctggcaggtatcaaagtgaagcctgctattaaagagatacacaacattctccctggggattggctaagggttactggtggagggaaggttagtattgagcactgcaggatgggtagttttgagg

SEQ ID NO: 634250 - DNA, 591 bp, Homo sapiens
aactactgagaacattcctggcatatgggttttgttctaacaacttaacacagctcaatttttaaaatctgcttttatagaaatgttcaggttctcctggattcttttgaactcttgccagtaagtgatttaagcccttgacttggccatgagaacagaagttaaacaccaaagatgaataaccatgtggtctcttacacatgagaattgtccagttaattttttaagtcgccaagactagtctggcagaaagtatgtattttatttttgtccttaaacattacattttgagttatctcctgaagagattttgcaagaaactgrtctattctgtgtggaaagatggctatttctcagcgagtacctcacttcaaatcatttgttctgaagtgtcatggtgtaatgaaaataataagaagcatgaggagatggttacgaaggaggaggtaggaggaggagtgaggaggaggagaagaagataaataagaagaggaggaagaggagatcataatgatgccttataaattgtttatttttcatcatttacaaaatggctttatgttttagaatctaatctaaaacttaaaacac

SEQ ID NO: 634251 - DNA, 587 bp, Homo sapiens
tgtaatgaaaataataagaagcatgaggagatggttacgaaggaggaggtaggaggaggagtgaggaggaggagaagaagataaataagaagaggaggaagaggagatcataatgatgccttataaattgtttatttttcatcatttacaaaatggctttatgttttagaatctaatytaaaacttaaaacaccccagtgggagaactgatatcacaagtgaggaaactcagtttcttggacagtgtttcctatgcatcatatagcttaaaagagagctggtatttgaacttccaattcaaagtctgacatttttttctaccaaaatttgattccaaatcttaattcatatctctaaatgtatgagtagactatggtgcaccatataaatgagagtatcttctctataaacctggggaggggtggtggttgtgttcctttctcatctgttgttttcaaaggcgagtcatttccagtattcccttccagaagtgacatgctcattggggatttactcaatccagttacccagttaatcaagaagactgagcccccagaggttaagtcacatcattatgaagaagaaga

SEQ ID NO: 634252 - DNA, 562 bp, Homo sapiens
ttaacctgagaagtataatggaataggcttgcctttgtaagttggttgtagggtcgtagttctggctatgctattcactagccatgtgccctcaggtacattccttaacctgactgggtctcagcctcctgtggcataaaacaaaaccattgtttccaatctcttgcagcactaagatgcaattcctgtgagttcaaagatgtgacatgactcctgtctcactacttgtcatttattaagttcataagtgtattgcatgttaaacagagaagtaatctaatttcacagttaaatataatgctgatttaaattacttttgaaattaaaatgttaatggaataaataggctgtcctcccggcttcccccacattctttgaattctctacattgtatcrtctctgtctgctcctgtttctccacctcatcttagactctagaactatttttatttagtgttggtttacttttatctgtggctgttttggcagcaggaattatatccatttgcctgacacagagttttacgtggatcatgtgtttgaaagattaatataagcagtt

SEQ ID NO: 634253 - DNA, 502 bp, Homo sapiens
ttttggcagcaggaattatatccatttgcctgacacagagttttacgtggatcatgtgtttgaaagattaatataagcagttgcttctgaaacaatttaatcttgctttccatagtaatgaaaaatgaataatcaaaagcagtaaattgtgtctggaagataataaatacttcttatagcattttagcaccgactgtgaattatagccgacccgcagatcgggaggggtgagtatgaccaactggaactccacagtgtgtgctggcctttaatatcaggctttagctgcttgattcatttcattgctctctrtcaatacctggagaatctgctgtctgtcccactgatttaaaactaaaaacaaaacaaaacaaaacaaaaaaactaaacaattagaggagtctctgtttaaaacaccacaaaacagattttctgtctttctctcaaccaacacacaagcctaagtggacctaggtaagaatttcaaacgtaaatagtaaca

SEQ ID NO: 634254 - DNA, 602 bp, Homo sapiens
cacaaatattggtctcacttgttcataagagcctccagctgtcagaaaatgaattgtcccagtccaaggtttaagtcattttgtyttctcatctacaatccaacagtgattttggtggaggcagggacagaatcatctgctttggtctggcttaccttagaactgcctggtatagatagaaaagatgctttcctgctcatcatcatgggggcctttttcctggtccagtcaaaaaagataactccatcaaaagtaacttctgctaccttccagaagagaaacaaagctatggcttggcaaatacagaaatgtttgacactttaatgcttttgtggttcaaatttatgaatgtattttggatcgagaaaagtgaaataaatatataagaatctaggcaatgtgctttgtgctatatgtaaaataactcacttattataaagcacaaaatcacttgtggaacaagcttaaaacttggttttccaagctgaaggaggaaaacagaatatttttaaagaggttggaaaagtgtttcttacagaaagcatatggagagaggagtggcagggggtatgatgacaaggccaaagatctaaatgggaaaa

SEQ ID NO: 634255 - DNA, 567 bp, Homo sapiens
agattgtatggacactctagtcttcttaaaaaaaatctcaacaagcccaaaccttttttcctgtaatacagagaaaaaacccagttgtgttttctaagagaagggaacagaatgaaataataaaggaggaaagacattgctactataattttaaaactatgaaaaaacatcagaaacatgaaagaattgaaaggaaagggcaatggattaggattgaggagatgtgggttcaagatacagcttatatcctttaaagcctatgtgaccttataaactcacttagctactcttcaacwcaaaggagttaatgtttataggaaagaggtttttaagtcacaaagcaatgtcaaaatgtaagtggcattagtatcattgatgacaaaagtttttatttttatttttaattattatttttataagacagcgtgtcactctgtcacccaggctagagtgcagtggtgtggtcaccactcactgcagacttgacctcctgggttcaagtgatcctccttcctgcctcagcttcctgagtcactgtgactacaggcgtgcaccaccacacccaga

SEQ ID NO: 634256 - DNA, 567 bp, Homo sapiens
agattgtatggacactctagtcttcttaaaaaaaatctcaacaagcccaaaccttttttcctgtaatacagagaaaaaacccagttgtgttttctaagagaagggaacagaatgaaataataaaggaggaaagacattgctactataattttaaaactatgaaaaaacatcagaaacatgaaagaattgaaaggaaagggcaatggattaggattgaggagatgtgggttcaagatacagcttatatcctttaaagcctatgtgaccttataaactcacttagctactcttcaactcaaaggagttaatgtttataggaaagaggtttttaagtcacaaagcaatgtcaaaatgtaagtggcattagtatcattgatgacaaaagtttttatttttatttttaattattatttttataagacagmgtgtcactctgtcacccaggctagagtgcagtggtgtggtcaccactcactgcagacttgacctcctgggttcaagtgatcctccttcctgcctcagcttcctgagtcactgtgactacaggcgtgcaccaccacacccaga

SEQ ID NO: 634257 - DNA, 676 bp, Homo sapiens
taacacaatgattatattgacaattcaattctgccttcctgaccatcagttcagtttctcttaaatgaagtacactcttaatcatctttttggaggcagaaacttctaagtttgcaacgataccttttcatttatatgaatgagtaaaaggggctggacataacattagtagttttcctcagctaaagcttcactcacacaacaaacgtttgctgggcacccccttaggtatcttctcttactgtcccattcatgaaatcataacttcactccatacgattgattcatttagacatttctggtcatgcagcatccaatggaagtattccactaaagccaaaatcagcaactggacaactccccaatgcttataactaagcaytgatgttcacttacagtcacacaaaaaaaatgtgcattgcttccactttcataaccctggagcctctctgatctcccaggaaaagccacatgcatcatagaatgctgctgagaatggacatattacattttgctactaatgtcagagagaactagaagatttgtttcacgtaagctcactagggtagtggaacacaaagtcagctgttcctcttgcctttcaccctatgagttgcattccagaaaaaaactcaccaatgcagttgtggtactgggagaaccttgatgccaatgc

SEQ ID NO: 634258 - DNA, 590 bp, Homo sapiens
taacattagtagttttcctcagctaaagcttcactcacacaacaaacgtttgctgggcacccccttaggtatcttctcttactgtcccattcatgaaatcataacttcactccatacgattgattcatttagacatttctggtcatgcagcatccaatggaagtattccactaaagccaaaatcagcaactggacaactccccaatgcttataactaagcattgatgttcacttacagtcacacaaaaaaaatgtgcattgcttccactttcataaccctggagcctctctgatctcccaggaaaagccacatgcatcatagaatgctgctgagaatggacatattacattttgctactaatgtcagagagaactagaagatttgtttcaygtaagctcactagggtagtggaacacaaagtcagctgttcctcttgcctttcaccctatgagttgcattccagaaaaaaactcaccaatgcagttgtggtactgggagaaccttgatgccaatgctttccttaattcatgggtaaaagctctggtatatgtttcttccataatttgaggtacacagaggtggccgactc

SEQ ID NO: 634259 - DNA, 569 bp, Homo sapiens
tcattaacgaacttaccatcaggtattcagaagctaaaaggtagcatatggaggaatttccaacacaattaaaagacactatttatgttttccattaccaccattggcttctggcagtctggacggaattaaayaactgtctacacaaatcaaagcttcacgtggtggtcatggtggaagaacaaatatgcaagtagaggagaaagtcacaggaaatatacctgatatgggcaacttcttgtaattttccagaaaaaatgtggttaatttttagttcctcagtaccactgtcttcaacttgatcctctaatacagagtattcatagtacccactgcatttaagtaaatgtgaggctcccttttctctccatgttgatttctttccccaagcactctgagtgtcttcgtttataaagctttttgttcttgcagagatcaggacttttcacacagcccatttattaggttttgataagagtcaatgcatttatgtgtcttccattcacccccaagtacggctgtattcatttgctctctgctttctgcagcatctcatgttattgcctcat

SEQ ID NO: 634260 - DNA, 581 bp, Homo sapiens
gggcaacttcttgtaattttccagaaaaaatgtggttaatttttagttcctcagtaccactgtcttcaacttgatcctctaatacagagtattcatagtacccactgcatttaagtaaatgtgaggctcccttttctctccatgttgatttctttccccaagcactctgagtgtcttmgtttataaagctttttgttcttgcagagatcaggacttttcacacagcccatttattaggttttgataagagtcaatgcatttatgtgtcttccattcacccccaagtacggctgtattcatttgctctctgctttctgcagcatctcatgttattgcctcattttgtgctttctgcatgtgtatgtgtacaaggtggtggtgtgtgtactggtctgctgataagaccaaggaaattctaaactctctttctgcctccaagataagagatagtaacctaggatgggcagaagcaaacctgacttgctgtaattttccttacaacccaaatgtacttagatggcttatataaatggttttgaaactaggttatacaaataatagatattattgtcagtctgaca

SEQ ID NO: 634261 - DNA, 576 bp, Homo sapiens
gccaagcacatttttagccatctctagtattttccccactgtccaccttcttaattctcttttatcactggcctgggagtaaygtgacatcagcctatacccctggcattacctaaatccaaagaaacactcttcccttcacctctttacttggtaactcccactccaccttctagtttctgatttccatctccagggagctttcccaggaccctggttccattagtcaccccaggctctgagctcctggagtctcctgttctcattgagatcctcatctccctgtggtcccttgtctaaggccttttgacacctacactgcaccctgagcatcttgagggctggaatgacatccatccccttccccttcctgtatgcccagcacactgaacacatttgatacatgaattacaaccagttaaggtagagtctgtgcccttcctaccactcccaagcccagaattattttaggtgcagtggcttgaggctttttataggagttcatcattaccctttgtatttcatatgtactcttttcaggccaggcaacatatttgtatatcacctctaatgtat

SEQ ID NO: 634262 - DNA, 576 bp, Homo sapiens
gccaagcacatttttagccatctctagtattttccccactgtccaccttcttaattctcttttatcactggcctgggagtaacgtgacatcagcctatacccctggcattacctaaatccaaagaaacactcttcccttcacctctttacttggtaactcccactccaccttctagtttctgatttccatctccagggagctttcccaggaccctggttccattagtcaccccaggctctgagctcctggagtctcctgttctcattgagatcctcatctccctgtggtcccttgtctaaggccttttgacacctacactgcaccctgagcatcttgagggctggaatgacatccatccccttccccttcctgtatgcccagcacactgaacacatttgatacatgaattacaaccagttaaggtagagtctgtgcccttcctaccmctcccaagcccagaattattttaggtgcagtggcttgaggctttttataggagttcatcattaccctttgtatttcatatgtactcttttcaggccaggcaacatatttgtatatcacctctaatgtat

SEQ ID NO: 634263 - DNA, 554 bp, Homo sapiens
tgaagcagggaatggacagaaataggtcatattgtgatygcaaaactaggacaatgaggagtttcttggaggattcaagctctgatggattcttactttggggcagagcatttcagaaaattcagaagccaagagatatagtatatggcagcctctaaaatattttaaaaacgcttactagtctgcatattcttttcttgtaaaaagaagttaaaagatgcgttttctttaatcacttgtcaagacagtggctttctccaggattataagacagtggattaaatgtatctttcccattgcttgtggcccttgaatgattttcagacatcattgactccacacatgtttaaaacggagtcagcagcagcaaccctttcagtagctgaaagctccgggtcccatccactgggtctgcaagtaagtagccatttggcagtgactctgaggaagtcacttaacccaagagagttctcaccaataaaacaagggggatagtttgcctctttaacttctaaaacgagtatggtattctcactttggagtgcagtttcaag

SEQ ID NO: 634264 - DNA, 559 bp, Homo sapiens
gtgctcacatttgaatggggaatctccaaaatagcttcatagaattggtgggtggcattttatctaaaccttctgagtaaaacttgtaggtgcagatgggtagagacctgcattcctaaaggaggcaagagctgtcagagtcaaattcacagtggagatcttcaggtctagttttagctttytaataggcaagctgtgtgaccttgttcaaatcacataacctgtctcaatctgtttcctcaatggttaaactagggtgttggggtagataagcttatgatccctttggctataaaactcagtgactttacatggctttggctcagtatttcattatataatgtgaataatggcataagctaaattattgtgattcaaatacttagtatattatcttatacattctctagctacagtggtttgtattttaaagaaataacccacatcaaacccttgttcttcttttcaggcagccattagcaccaaccagggagtaaaactttattcccaagtatgtcatacgagcagtctataactgatttcaggagcaaggacccag

SEQ ID NO: 634265 - DNA, 601 bp, Homo sapiens
aagtggtgctcacatttgaatggggaatctccaaaatagcttcatagaattggtgggtggcattttatctaaaccttctgagtaaaacttgtaggtgcagatgggtagagacctgcattcctaaaggaggcaagagctgtcagagtcaaattcacagtggagatcttcaggtctagttttagctttctwataggcaagctgtgtgaccttgttcaaatcacataacctgtctcaatctgtttcctcaatggttaaactagggtgttggggtagataagcttatgatccctttggctataaaactcagtgactttacatggctttggctcagtatttcattatataatgtgaataatggcataagctaaattattgtgattcaaatacttagtatattatcttatacattctctagctacagtggtttgtattttaaagaaataacccacatcaaacccttgttcttcttttcaggcagccattagcaccaaccagggagtaaaactttattcccaagtatgtcatacgagcagtctataactgatttcaggagcaaggacccagaacataaagtagcgccatgagaatggtaatttgggtg

SEQ ID NO: 634266 - DNA, 451 bp, Homo sapiens
caaggctttttaaaataatttgtgccagatagggctttttttttttcctttgccacaataaagatacaaaagccttaaaagatattttgttttcaacaactgaatttgacaaacttagtcctgctcagttttttggtggtaggtctgaatttcagtatgtgataatactactccatttatgcttgttttgaaatattttctatttgcatttaagaccaccgattccggtttttaagaaaacaattccagcaatgtatctkgctgaaagaaaaactcactatgcaaaagcaccaatttttgaatagttaaattgactgatacattttcatattatgatagcattcttggccttgaaagattcacagaaagatttgtaaaaagtaactatccccttagggcactttaatgtttatttataaacagttaactacttagaggaagaaataacacc

SEQ ID NO: 634267 - DNA, 412 bp, Homo sapiens
ttgatttattcaataaaaagacttagaaacatgtacaatcaataaacaaaatagcaatgctattacattcaaccccactttacatttcctagaattcagtagatgatttatcatcagcaaaccagattagataataacccataatatgggtatataatctgtgagttatcacctgaaagctaggttttagaaacctgagagatgtcttgataacccccctcaccctcagcytccttatccaatcatcagctagttcaggttattctatttccagaatacatacctgcagcttcctgactttctctctgaccctggtccaagcctccatcttgtctcacctgtgttgctaacacaggtgcttatgtggccttcctgcttgcaccccttcccccttccaactgctccacaggca

SEQ ID NO: 634268 - DNA, 548 bp, Homo sapiens
ttgttttctgtgggtagtcatgtggccctctgagaagggggcttttgaacagagacctgttggagatgaaactgacagaggtgagagaacagccctgtggaggtataactaggggaagagcaccaggcagagggaacagcaagtgcaaagacctgagaagggagcatgcttgggaggtttgaagaccaaagagccaagagtgtggttagagagaagcatgcaagggagaaatggrcagcaactggactgaagggtagcaaaggatagattgcatagggcattaccctcttccccctctgtgccagcctgtcaataaagctgagattttcacgtgcttcagagtctcacctgtcagcacagaccctgctttggcgaatctgagtccgttcactattttcctcaagaggcacctctataggctccatccctaatgaacaaaggttaaaaacaaatttatcattatgtaaaaacaacagctacttgacttcaaaatatactacaaagctgtagtaaccaaaacagcatggtactgacataaaaatagacac

SEQ ID NO: 634269 - DNA, 548 bp, Homo sapiens
ttgttttctgtgggtagtcatgtggccctctgagaagggggcttttgaacagagacctgttggagatgaaactgacagaggtgagagaacagccctgtggaggtataactaggggaagagcaccaggcagagggaacagcaagtgcaaagacctgagaagggagcatgcttgggaggtttgaagaccaaagagccaagagtgtggttagagagaagcatgcaagggagaaatggacagcaactggactgaagggtagcaaaggatagattgcatagggcattaccctcttccccctctgtgccagcctgtcaataaagctgagattttcacstgcttcagagtctcacctgtcagcacagaccctgctttggcgaatctgagtccgttcactattttcctcaagaggcacctctataggctccatccctaatgaacaaaggttaaaaacaaatttatcattatgtaaaaacaacagctacttgacttcaaaatatactacaaagctgtagtaaccaaaacagcatggtactgacataaaaatagacac

SEQ ID NO: 634270 - DNA, 596 bp, Homo sapiens
ttgttaactctgtcccattattagaaaatcagcaaagcccatgctctytgtgcagatgggggtggggtagggttgactgcattgcctttgcatgcggctgcctgtcacagtgctgtgatttaagtggttgtgctctggcaagtcctcccagggttgatgctctgtgtctatgcgttttgtcctcggactccaacctgagtccctctggaaaacaacaggactgccattgccctcccactctggactctgaaatgttagttcttaatagtgtcgactttaaaacagattaacatgctgaggccaactcaggaacagccctcccccaccctccttttctctccatattttatctctctctgacgatgatacttttgaacacttgggaacttttctgtcttcagaggacagcaatcacctgctccaggcaacctccacacctcatctctcaataacactgctgttgcctgtggctggcttagaggcatagctgggtcctcctctgctggccattttcagagtcttgggtttgtcagcatctgctccattagagagacaatcagaagatttttgggggtgaagggggagctgggggactg

SEQ ID NO: 634271 - DNA, 603 bp, Homo sapiens
acatgtgtctgggctggagttcagcattgctatgaatcaatgactgctgtgtgtctttccaatctgttctattttttattttattattattattattgagatgggtctcactctgtcacccaggctggagtgcagtggcgtgatcttggctcacagcaaccttcacctcctggagattctcgtgcctcagcctcccaagtagttgggattacaagtgcacaccacttcacctatctaatttttgtgtttttagtagaggcggggtttcaccagttggccaggctggtctctaactcccgggctcaaacaacccacccacctcagcctcccaaagtgctagaatyacaggtgtaagccaccacacctggccccagtctgtctatttttaaatgtgagtgcctcttgaagttattctgtcccaatttcaccattgcatattgagtgtgaaagggctatacactttgtcttttacggtaacaggtctctgcatcagagcagttgtacccgaggagaaagtcctcatctgcatgcagattcaaataatggtttcctcaccactttcccagcctctgccccctgcccagtcctaaaaccactgtcaca

SEQ ID NO: 634272 - DNA, 613 bp, Homo sapiens
cctttcttccccatctccctgcaggggcactcaagctgaccttggccttcacagtggcccggggctggtcatttgcaggggcagcatctctgcctttccctgttgtcaaggggcagctctcagggatgcaggcctcccctcagtaatgagaggctaacgagagtgaccagtgatgtttctcccatctcagccccgggtagaccttgaggttgaccccttggtgcttctgaaaccttagtctgtgttttgacacctctgtgagccagccctgtgcctggctctaggtaaatgctttccatgaagtatttctattaaacttttaatggccccttgagattgatattggtcccaatttacagttgagcaaaatgagatccagaaagtggtcccctgcaggtagagagctgaactatgtcccagacgcacagcacatattaatgttgcagttctgttttcctgggttaattttaaaattaacaaaatttattttgccgaactgtttccartgtctctatgagaaaggggtcactctggctgatgcacttccctcttatcctaggctggtcatgtctgtggggacaatatggacctcatagatgggcagcccacagga

SEQ ID NO: 634273 - DNA, 529 bp, Homo sapiens
atgacaaaagggtgttctaaactcccaacgagctgtctggaaaggccagggctgagcttttttcaagaatcctggagagccaccacatatggcttttccatcaatgcaaagarcagagtcacaagagcactaagagaagctacacagaagggcacgagttattggtggcacgggggaaagtctggaaacctatacaccaaatcattcaaggttaactgtgtctctgatagggtggtaggatgagagggtatttctttttgctcatctctatttctacttttcccacaataagcttacatttctgcatcagttcattgctctcggtgactcttggatccatcctctgaaaggtcttttcttctccataacactccttgggttatgtccttctgaagtgcccgtctgaaaagggcactttggagaatgtgcactttttggtggctgaatagccttatcttttttctttctttccatatgaagtctgaagcttagaagtttttttttatatcttgaatagtcagtccctttt

SEQ ID NO: 634274 - DNA, 608 bp, Homo sapiens
tgagccctccgtgcgtggtgctatttgtaacagctggagaaacaagtggtgaatatgcagggggggcacttcccatctacagaggagaggacttgcttgtctgtttcctgcattcactctgccgagtcctgtgagtcatgaggagggcgtggggctgcaggcgatgccctgtgttctcagatgcctcctttgttggaatgccgagagacagggaagccttgctgtcctatgacaatggccagaggcagggccacctggctgtaggacactatctcttggtgggtttggagtatgaatttgtgtggttggtagctgggatggagtgtgagcgtgactcctctcaccaccctctctggctgaggaacagcaaggccactgaggtggagggtgggttggaagggtggcgtcttctgtgatggtgggagaaattggagtagagggatgactgtgagcagttgccaggtcttgaggtcaggtgtgaggaggaatggcagagctggatggcacagccctagaaagtggaagagcagcaggaggcctggaggtgggccttttggccctwtggtgcactgagccaggagaacaggccagagaacagtcacctcctc

SEQ ID NO: 634275 - DNA, 503 bp, Homo sapiens
cattaattcactcactcattcattccactgacacttactgctgtctgttgagtgccaggagtggctgctgggcactgccacctgccaacyctcaggctggagggtaaccctcatgggtgcccttttggctgcctgttttatgcagcataacagctcaaaaatggcctttgaatcccacagacacgcttgcaatctccctgagcttcagtttctgcatctgtaaggtggggatgatcatgcctgcctgagagggtggctgcgagcctgacatgcttcgactcaggaaatgtctagcccagggcttggcccactcagaaagggggcacccggctgcctctgctcctcctctgtgtgttatgtcagggctgggagtctctgacaggggaagttgggaactcaaaggccagcaacggggaatgcctccacgtaacaccagggcaaagaagacacttgttttgttgttttgtgtttttgagactgcactagatgggaatatccataag

SEQ ID NO: 634276 - DNA, 634 bp, Homo sapiens
ctgctcatcccagccatttccttgcagaagtcccttgtgtaaagcctctgctaggagcacctcctgacttcttcatgtatcatagtgaccagttgccctccggccttggagtrtagcctttcctatttttgagctttattttttatttttctgagacggagtcttgctctgtcgcccaggctggcatgcagtggcacagtctcggttcactgcaacctccactttccaggttcaagcaattcccctgcctcagcctcccaagtagctgggattacaggcatgcgccaccatgcctggctaatttttgtatttttagtagagatggggtttcaccatgttggccagggtggtctcgaattcctgacctcgtaatctgcccgcgtcagcctcccaaagtgctgggattacaggcatgagccactgcgcctggcctgagctttattttttagaagtccatttttccctaatttgtatttggagcgatggtcctcatatctccacagatggggatggacatggcccttgaaaattaattggttgtgcccaagaggatggaaatagggtggataagccacaagaaccatgaccccagggtttggtcatggagtgatctgtgacctacaacctgcagata

SEQ ID NO: 634277 - DNA, 634 bp, Homo sapiens
ctgctcatcccagccatttccttgcagaagtcccttgtgtaaagcctctgctaggagcacctcctgacttcttcatgtatcatagtgaccagttgccctccggccttggagtatagcctttcctatttttgagctttattttttatttttctgagayggagtcttgctctgtcgcccaggctggcatgcagtggcacagtctcggttcactgcaacctccactttccaggttcaagcaattcccctgcctcagcctcccaagtagctgggattacaggcatgcgccaccatgcctggctaatttttgtatttttagtagagatggggtttcaccatgttggccagggtggtctcgaattcctgacctcgtaatctgcccgcgtcagcctcccaaagtgctgggattacaggcatgagccactgcgcctggcctgagctttattttttagaagtccatttttccctaatttgtatttggagcgatggtcctcatatctccacagatggggatggacatggcccttgaaaattaattggttgtgcccaagaggatggaaatagggtggataagccacaagaaccatgaccccagggtttggtcatggagtgatctgtgacctacaacctgcagata

SEQ ID NO: 634278 - DNA, 571 bp, Homo sapiens
tgctctcacttgtactgttcctaagccttgttttccgttcctgcccatgctgagccgaggggaagagcgttgtgagcttgtgtgagggggagggtccctgaggcaagtgtggccacagtggctgcagcagctctgattaatgggaaattccaagaggaaggtagacctggggagaaaggagtggtggctgcagagtccaactgcccttcttgccaaacacggagattctgccttttgccaaccgtggaggctctgcgtaggagattttatttcaggtgatggtgctcaccttggagggatctgttactcattcccatatcagatcatagcttcaggctgcaggaggactcaggcaggctcctgaccgcagcttctgtgaatcaccagacaccggcagtccgggagcggctagtgtctgagctgccagtgcccggaagtgrgagaggttatccagtcttcctgctgctcctccatccaacctcagcagcaccatgtgcctgggagcagggaaaggagagctgttgggcagtcctgtccagaacaatagtcaaggatacgagtggttttttgt

SEQ ID NO: 634279 - DNA, 571 bp, Homo sapiens
tgctctcacttgtactgttcctaagccttgttttccgttcctgcccatgctgagccgaggggaagagcgttgtgagcttgtgtgagggggagggtccctgaggcaagtgtggccacagtggctgcagcagctctgattaatgggaaattccaagaggaaggtagacctggggagaaaggagtggtggctgcagagtccaactgcccttcttgccaaacacggagattctgccttttgccaaccgtggaggctctgcgtaggagattttatttcaggtgatggtgctcaccttggagggatctgttactcattcccatatcagatcatagcttcaggctgcaggaggactcaggcaggctcctgaccgcagcttctgtgaatcaccagacaccggcagtccgggagcggctagtgtctgagctgccagtgcccggaagtgagagaggttatccagtcttcctgctgctcctccatccaasctcagcagcaccatgtgcctgggagcagggaaaggagagctgttgggcagtcctgtccagaacaatagtcaaggatacgagtggttttttgt

SEQ ID NO: 634280 - DNA, 589 bp, Homo sapiens
atttccaaggcaggacgacctgccatctggggcttatgtgaagctttcagaccaaataaaaagcttcaacatttctcctggaaagacctttttactattaattattgacacagagaaccacaaagcttagaatgcttagaatttgagaacttccagagtgatatgttgctttcagaagcccttgaacccagaaatrtgtcctatttgttcactatgggcctgattgaaatatcttctctcacatggactgacgtgtttggtttgtaaaatgaacactgtgcctgtgagttacagatataagtactgcatttaccaatctggtgtttgaaaactcaagaatcctctagaattttgtttatccaaaatgtattgttctgactgaaaatgtgctaaatgaatgtgtaagttggtgacattggtgcaagtactggtaagaagatgtagagtgtgcttcactctttagcctccaaggcatcctgggaccagggcccaggattctccactgtgtcaagcacaatcatcacatcatcacctttgtgctttcctgggggtatagcccttcacactcccagagtgatcctctgcctat

SEQ ID NO: 634281 - DNA, 496 bp, Homo sapiens
tgattctcagcttggtcactgttggtgtgtagcagtgctactgatttgtgtacgttgattttgtatcctgaaactttactaacttcatttatcagatctgggagctttttggatgagtctttaaggttttttaggtatacagttatatcattggcaaacagggacagtttgacatcctctttaccgatttggatgcccttyatttctttctcttgtctgattgctctggctacaactttgctgagggttttaatcataaagcgttgctggattttgttaaatgttttttctgcatctattgagataatcacatgatttttgtttttactcctgtttatgtggcatatcacatttattgacttgtgtaagttaaaccaactctgcatcactggtatgaaacccagttgatcatggtgtcttatctttatgatatgctgttgaatttagttagctaggattttgttgaggatttttgcatctatattcatcagggata

SEQ ID NO: 634282 - DNA, 554 bp, Homo sapiens
gtcactgttggtgtgtagcagtgctactgatttgtgtacgttgattttgtatcctgaaactttactaacttcatttatcagatctgggagctttttggatgagtctttaaggttttttaggtatacagttatatcattggcaaacagggacagtttgacatcctctttaccgatttggatgccctttatttctttctcttgtctgattgctctggctacaactttgctgagggttttaatcataaagcgttgctggattttgttaaatgttttttctgcatctattgagataatcacatgatttttgtttttactcctgtttatgtggcatatcacatttattgacttgtgtaagttaaaccaactctgcatcactggtatgaaacccagttgatcatggtgtcttatctttatgatatgctgttgaatttagttagctaggattttgttgaggatttttgcatctatattcatcagggatatttgtctgtagtttctttttttkttgttatgtcctttcctggtttggtattagggtgatactggctttatag

SEQ ID NO: 634283 - DNA, 591 bp, Homo sapiens
tttttgcatctatattcatcagggatatttgtctgtagtttctttttttgttgttatgtcctttcctggtttggtattagggtgatactggctttatagaatgatttagggaggattccctctgtctctgccttttgaaatagtttcagtaggattggtaccagttcttctttgaatgtctgacagaattcagctgtgaatccatctggtcctggactttttttatgttggcagcttttttattaccatttcagtctcgctacttgttattggwctgttcatagtttctatttcttcctggtttaatctaggagggttgtatatttccaggaatttatccatcttctctaggttttctagtttgtgtgcataaaggtgttcatagttgccttgaatgatcttttgtatttctgtggtttcaattgtaatattgcccatttcatttctaattgatcttatttgaatcttctctcttcttttcttggttaatcacactaatgatctattggttttgtttattttttcaaagaaccagctttttgttctatttatcttttgtgttgttttttgtttgtttcaatttcatttagt

SEQ ID NO: 634284 - DNA, 568 bp, Homo sapiens
ccactcctcaaagttctctcaccgtggaatgggtttatgccaacaaggttatacagtcagcccccatatccgtggattctgtgtccatagattcaaccaaccaaggattgaaaatatttgggaaaaaattgcatctgtactgaacatgtacagacttttttccttgtcattattctgtaaacaatacagtataacaattatttccatagcattcatattgtattaggtattctaagtaatctagagattatttaaagtatacaggaggatgtgtgatgtaaggtatacaggaggttgcatgcaaacacgacaccgttttatatcaggaacttgaacatctgtggattttggtatctgcaaggggtactggagctaatcccccacacatactgagtgacgactatatatrgaatgtgaacagaattttcccactgacttccattaggcaagcagagctgtgtttctctccaagaaaggagggtagaggagcagagcctgggagtgggaaaagaagggaaggaggccaaacggagatctcattactccaggatgtggttttaattctgtc

SEQ ID NO: 634285 - DNA, 570 bp, Homo sapiens
aagctccgcgcagactaaactacagacccaccctcagccccaatcatgacagcagtattcccctttactggggatcagattccactgggaatctgcmtcctccccacacaggcatggcccaaccctcctgggagtctgccgcccctcccaaactctccagaagggacaaccctggctcctccccccggctccagggccaagggttgaagggaattttgagagaggacctcaaagaagtggcagattgccctgggacaaactcagccaccctcatccagaagcaactcataaggcactttagccgggaatgccctgcagttgagctagtgtttcattctgagctcatgccccagaagatactgccaaccagcagaggcctctccagggtcaatagtacaagacctttatttaacctcaccctgatctctccacccctcttatcgtcatttcctggagcagagtgcgtcttgctgaggtgagaacaaccctgctcgtgcggcctggacctcttctttctaaaactgggtccagtttctttctagatctccatctggggatcttgccttctga

SEQ ID NO: 634286 - DNA, 582 bp, Homo sapiens
gtcacccaggctggaatgcagtggttcaatctcagcagctcactgcagcctctgcctctcaggttccaatggttcttgtgcctcagcctcccaagtagctgggattacaggcatgtgccaccacacccagctattttttttttctgtttttagtagagatagggttttgccatgttggccaggctggtcttgaactcctggccttaagtgattcacctgcattggcctcccaaagtgctagaatgacaggcttgagccctgcacccagctgagttattttctttcatctttactacttctagtggtctttattacatatattaattagaattcttttttatttttatttttttgagatgaggtctctgtcacccggactgggagtgcagtggtgtgatcttgcctcactgtaacctctgccttctgggctcaagtaatccttctacttcagcctcctgagcagctgggaccacagatgtacgccaccatgctgggctaattttttatttttatttttttttaatttttggtagaaaargggttttaccatggtgcctaagtttgtttttttttttttttccc

SEQ ID NO: 634287 - DNA, 434 bp, Homo sapiens
caaggcaagtcccttccacctaggagcctgtcaaagaaaaaacaagttagttccttccaagatataatggggtacaakaattgggtaaatatacccattttaaatgggagaaattggccaaaacaaatggtctgcagtctccttgtaagtctgaaatccagcagggcaggcattaaatcttaaaggttcaaaatgatcttctttgactccatgtctcacatccagatcacactgatgcaagaggtgggctcccatggccttgggcagcttcttcatgggctgaagttgagtgatggggcttttccaggtgcaaagtgtaagctgttggtggatctatcattctggggtctggaggacagtggccctcttctcacagctccactaggcagtgcccctgtggggactctgtggaatctccaatttcacattaccca

SEQ ID NO: 634288 - DNA, 569 bp, Homo sapiens
atttatttgtgctctttcagactttttgatgtaggcatttactgctatgaactttccttttagcagtacttttgctgtatcccacaggttgtgattggttgtgtcactgttatcattcagttcaaagaattttttaaattccatcttgatttcattgttgacccaaggatcagtcaggagcagattatttaatttccatgtctttgtatagtttcgagagttctttttggagttaatttccaattttgttccactgtggtctgaaagggtacttgatctaatttcaattttcttaaatgtattgagacttgttttatggccatgatatggttcatcttggagaatattacatgtgccagttaaaagaatgtataytctgcagttgttgggtagaattttcataaatatctgttaagtccatttgttttagggtatagtttaagtccattgtttctttgttgacctgtcttgatgacctgtctaatgctgtcagtggagtattgaagtctcccactattattgtgttgtcatgtatctcatttcttaggtctagtagcaattgttttata

SEQ ID NO: 634289 - DNA, 569 bp, Homo sapiens
atttatttgtgctctttcagactttttgatgtaggcatttactgctatgaactttccttttagcagtacttttgctgtatcccacaggttgtgattggttgtgtcactgttatcattcagttcaaagaattttttaaattccatcttgatttcattgttgacccaaggatcagtcaggagcagattatttaatttccatgtctttgtatagtttcgagagttctttttggagttaatttccaattttgttccactgtggtctgaaagggtacttgatctaatttcaattttcttaaatgtattgagacttgttttatggccatgatatggttcatcttggagaatattacatgtgccagttaaaagaatgtatattctgcagttgttgggtagaattttcataaatatctgttaagtccatttgttttagggtatagtttaagtccattgwttctttgttgacctgtcttgatgacctgtctaatgctgtcagtggagtattgaagtctcccactattattgtgttgtcatgtatctcatttcttaggtctagtagcaattgttttata

SEQ ID NO: 634290 - DNA, 618 bp, Homo sapiens
caaaattcttggctgatatttattttgtttaaggaggctgaagataggaccccaatcccttctgacttgcaaggtttctgctgagaaatctgctgttaatctgttaggttttccttttgggttactgatgcttttgcctcacagctctttagattctttccttcatcttgactttagctaacctgatgactatgtgcctaggtaataatccttttgctatgaatttcccaggtgttctttaagctttttatatgtggatgtctagatctctagtgagatcagagaagttttccttgattattccctcaaataagttttccaaagttttagatttctcttcttcctcagggacaccaattattcttatgtttggtcatktaaaataatccaaaatttcatggagactttgttcattttttaaaattcttttttatttgtcttttggattgggttaatttgaaagcgttgtctttgggctctgaagttctttcttctactttttcaatactattgctgaaactttcctgtgtattttgcatttctctaagtgtgtctttcatttccagaagttgtgatcatcttttctttatgatatctatttctctggagactttttca

SEQ ID NO: 634291 - DNA, 600 bp, Homo sapiens
ttttgtattcatctcctttgcctttgttgtttccaagttaatatatatctgtttattgatctttagtccctcccactagaatgcccatgttgttcccttcagagcctgggacagtgtcaagaggacagtgtggggtgggaagaaaaggtgacacagaaggaacagtctggagggcactgcaacactccagaggaggcctcatagggagggaaaagacctgatttgcatgttgagaagaccagctggtgcctgtggagcagttggaagggggaaggggtgcaagcaggaaggccacataagcacctgtgttagcaacacwggtgagacaagatggaggcttggaccagggtcagagagaaagtcaggaagctgcaggtatgtattctggaaatagaataacctgaactagctgatgattggataaggaggctgagggtgaggggggttatcaagacatctctcaggtttctaaaacctagctttcaggtgataactcacagattatatacccatattatgggttattatctaatctggtttgctgatgataaatcatctactgaattctaggaaatgtaaagtggggttgaatgtaatagc

SEQ ID NO: 634292 - DNA, 560 bp, Homo sapiens
tggaattagcacccctccctgcccactcccacccagtgctctcccaaggaccctaacagcattgggaggtcagctccagaaagggtcatggttgggccaaccctctcgttgttctttagagcaaactgaagtcccaaggtagccaggcaatgaggaaaaatcacccagctctcatgccacagrgtgactgggacgggctcctcattcctggtccacaggccagagatgagtgttgttagtggctcacccctaacagcactgtgaactgggggtcctgtgactgtcttgcaccacgtggtcaagtacacacacatacatatttgcaaagacatacaaatacagtttaataaagctgactaagccacctcgtccgcctctgcagggatgggctatttgtagtcactcttgtttctatccattgttgaaaatatacaacatcattctcatactgtggcccagctcgctatctttgagagcaaaagtgtgatgcagtcacatgttctctgggtattcactgagttcttctggcactgagggacccttctcctcaggcatccaga

SEQ ID NO: 634293 - DNA, 560 bp, Homo sapiens
tggaattagcacccctccctgcccactcccacccagtgctctcccaaggaccctaacagcattgggaggtcagctccagaaagggtcatggttgggccaaccctctcgttgttctttagagcaaactgaagtcccaaggtagccaggcaatgaggaaaaatcacccagctctcatgccacagagtgactgggacgggctcctcattcctggtccacaggccagagatgagtgttgttagtggctcacccctaacagcactgtgaactgggggtcctgtgactgtcttgcaccacgtggtcaagtacacacacatacatatttgcaaagacatacaaatacagtttaataaagctgactaagccacctcgtccgcctctgcagggatgggctatttgtagtcactcttgtttctatccattgttgaaaatatacaacatcattctcatactgtggcccagctcgctatctttgagagcaaaagtgtgatgcagycacatgttctctgggtattcactgagttcttctggcactgagggacccttctcctcaggcatccaga

SEQ ID NO: 634294 - DNA, 669 bp, Homo sapiens
aaaaagatgctggctttttcgaagacccggaagataaggtacaaatgttcttcctggtggtgtgtttctctaaaagaaaaaaaaaaagccataaaaggtaaaattaaatttgacagagtctgctgatggaaaaaattaaaaccaccagttaggtgggtataggtatcaaaagctgacatcacagaataacaagaggcattgattatttctaactttgcttgttttccttccatcagggtctctgaagtgcagtttcccagcctacagctgacctgtataagaggtgtagccgtcccaccagcagctccctcctgctgctccttccaccatatctctgggttcacctaccacagatgccaagccttgtcgccccatcctgcttttgcaagatggtgagatcctaaactaatggagatgatgttctttgggttgaccrttctggtatagaagttcagctgtggagcaatagaagcagcttcatgtaattgtgagaagggcccaagttcagaaacagaggcccacattgaggaaaggctgcagcatcctcacaagatgtcatggtggttccctaagccatctgggggtttagttgggaataaacagctgtgggttacattctgtaagtttcatacatcccctccacttatttcctaagctacaagaccaatt

SEQ ID NO: 634295 - DNA, 480 bp, Homo sapiens
ctgatgagggtgcagaagggaagaaaggtagacgttccctgattttttttttcctcttaaggtagttatcctgagtggagggtgcaggtgtgttggctgaagccttgtggctaatcagtgacaggttcaagctcctgtcttcatagtgctatgcaaggctcaaagtggaggccatcaagttctgcccctgctctcagtgggggagaaaactggccctttaaaaccaaaggagccattaggggtgagttcagctgggttgagtgggtagcccagaggccctgcacrccagttccaggtgccagaactgctgatctctaggttctggcttcagaaggtttggagtgaggttcagaatcttgcttttttaaaaaaagctgtccaggctgggcatggtggctcacgcttgtaatcccagcactttgggaggccaaggtgggtggattacttgaggttaggagttcgctaccagcctggccaaca

SEQ ID NO: 634296 - DNA, 440 bp, Homo sapiens
agatctgctaggcactaccttaaatctctctgagactgtaacaaagtgtcttacaactgaatttcaacatttttttttcatagctatggggtcttgctctgtctctcaggctggagtgcagtggtatgatcatagcccactataaccttgaactcctgggctcaagcaatcctcctrcctcaaaaaatgtggttgaatttcccacactgggaattccccacactgggaattacaggtgtgagccactgcgtctggcctacaaccacatttttaaactgatctttaccaagattatttcttactgtgaaggtcttttactaactggagaaactgggggtgagaaattgtttattttataacccagcaaattttaactactcactctgtttgcaaacagaattcattgtaatatgcagctacaggtacccaacagatacttc

SEQ ID NO: 634297 - DNA, 419 bp, Homo sapiens
cccaccgctttctccccagccaccttgtgaagaaggtgctgctttccctttaccttccaccatgatggtgaatttcctgagcctccccagccatgtggaactgtgagtcaactgaacctctttccttataaattagccagtctcaggcagttctttagagcagtgtgaaaacggaccagctcctattctctctctctctctctctcatctatgtaatctatctatctagaaatatttatttttaaggaattggctcaggcagttgtggggactggcaaatctgaaatcttcagggcaggctagcaggctggaaatgcaggtaggatttctatattcctgtcttaaagctccatatactttrtgcatctcatagagtacatctcatacgtatgtatgagttcagaaaataatagtctaaa

SEQ ID NO: 634298 - DNA, 556 bp, Homo sapiens
cactgttggtgtgtagcagtgctactgatttgtgtacgttgattttgtatcctgaaactttactaacttcatttatcagatctgggagctttttggatgagtctttaaggttttttaggtatacagttatatcattggcaaacagggacagtttgacatcctctttaccgatttggatgcccttcatttctttctcttgtctgattgctctggctacaactttgctgagggttttaatcataaagcgttgctggattttgttaaatgttttttctgcatctattgagataatcacatgatttttgtttttactcctgtttatgtggcatatcacatttattgacttgtgtaagttaaaccaactctgcatcactggtatgaaacccagttgatcatggtgtcttatctttatgatatgctgttgaatttagttagctaggattttgttgaggatttttgcatctatattcatcagggatatttgtctgtagttttctttttttttggttatgtcctttcctggtttkggtattagggtgatactggctttatagaa

SEQ ID NO: 634299 - DNA, 571 bp, Homo sapiens
cagtgggggctcccggtgtttcgcttttcctgtttagcttgggccctgtgtctggttcaatttaagaatcaggacaatgtcagaaagatatgatatgctatagaatcagaagcagaggaatgaggagtataattagtaatttatgagcaaataccttggagaaaaaccacaccaaaaaggcaaaaaggcaaagattaaagtaacacactttcaaagacacacaaaagtgcttcttaagtttatatagagagttctccaatttttaaataaactatgtccccaaagttcagttagggaaactaaggctcaggacagttccatgattagctcctagaaaccccaaattccttccttaaggcccctttaccctccaacctctccacaagagaggaacagcctcyaccccttcctgtaatggtcacacagtctcactggcaagcaggagtagacacatcacaccactggcaaagcaaggggcaatgacagcacacggtagcactagaagcccaggggacatccagaggggtgggccaagccctgccaatgcggggtggaggagcagcagggagat

SEQ ID NO: 634300 - DNA, 569 bp, Homo sapiens
agttcccatgagggaagcatttaaaaatgatttcacacgcagagtttggtccccaattttagaaaaaacttataaatcctgttaaaacatggcttcagctaagaagtcccaatgaattytaaatgtttatttaacatttaaagcagcagatttacgagaaatctattcaaaatgttgaatttatagtagttgtaccctttccacatgttttgcttatagctcaaattagcctttttaaaaaacacagttgcttaatgatgctgaattaatcattcactcagcaataattaattcttaccagtggaagcacgatgacttttctcataaaacatggagaaaaacaactcatttagtgacttagtgacaaagtagtatgttggaattttgattgcagtaactgaagatgagtagggttattgagatcatacttttttgcacattaaaaactatttcttattaaagaaatttattaataaaaataacatttattttctacttgtgaatgtatatagagtcatgcacttttattttatttaattctcacaaaaaccctaagggtaggtatttat

SEQ ID NO: 634301 - DNA, 578 bp, Homo sapiens
agctaggatccatccacctggcaggcaccttcagcctgtctttcctttttgtttttagtcttttccctattctcttgtttgtgcagacagaattaacttctacataactcactttgcaaatctccaaataaaaatcatggaaaacatcatactatatgagcaagtgattgaacawctctaagtcttactatgtctcatctgaaaagcgaggaaaaccacaggatctatcttatagaatcgagatcaaatgagccagtttgtattttagctcagtgcctcaaaataattatgcctgagtaatccaagtctaccacctgctggcagcattaggtaagtgcagaatttgtttcttcaagaggctaaaaactggtgcaaattgggtcagccaatcctaaagagaagaatggcaaacatgatcacacctctgaccctctgcctgggttactgaatggaccagatttcagatgattttcagtattgatgttggtgtcgtttaaaagttagtttctgaattatttcttgatcagattacttaaacctactttacatcgaccattcttttggggttccctattttt

SEQ ID NO: 634302 - DNA, 596 bp, Homo sapiens
ctatatgcgtcaaagaaaatgctaaaccgtcagagctacgcttgatgcaccactacctttctaaccccacattctcatgccctcacctgtttatccccacatccacatgtcctcaccacctgcttctttgtctgatcaccaataaatagtgtgggatcccagagctcggggccttcacagcctccataccagtgttggccctgtggacccaccttatgtactcttaacttgtcttttctcattcctgtgactcctccggacttcgtagcccccacggcctggtgttgggtctgatcaccccaacatttctggcgcccaacatggggctatgaagaccccggtgaaggaatgctagagcatgtggaagcagaagatgcattgtcagaggacaccgaggatgactgaaagaagctyggcgggtaagctgggcactcagaagaaccagggtaacaatgggacagaatgaaattaaacattctgcttatttaaattgcttaaggcatttattacagagagggggagtgaaagttagtactcagaatttattaacagctctttaatacagtagagcagtttgcccatggttcccagaacaa

SEQ ID NO: 634303 - DNA, 563 bp, Homo sapiens
ccgaggatgactgaaagaagctcggcgggtaagctgggcactcagaagaaccagggtaacaatgggacagaatgaaattaaacattctgcttatttaaattgcttaaggcatttattacagagagggggagtgaaagttagtactcagaatttattaacagctctttaatacagtagagcagtttgcccatggttcccagaacaagggacaatggagttggatgaatgggaaagaattggcagagattttaaaaaggtgcataaagaaggagccaaaattccattttctgtttggtcagcgtgggtgttgataaaggcagctcttgagccatttgaaacagatgatgaggcagattcatatgaggaagaggcaggtgactataaaaaaactaacttcagattctgaatgtgagggacaggacccggaggaaattaaagaaaagaaagggaagctgaaaaaggtgtattttactagccagtcggttccacctgctgaattaagtgaatggccacctcctccctctcctcctaatgggygagaaaacgaattagctgaaaaactt

SEQ ID NO: 634304 - DNA, 635 bp, Homo sapiens
aagcttgaagtgaagtgattatgagccattcatctcacccctacaagggtgaggctgtctgagatggagacaatgctgagaaaagcagagrtgagggatgcagagagactacgtgttcaacatctcggttgagctcccctttttcagttacctccttcttttcctaaatctaatttgagtttgaattctgtgccttgcaaccaagattcctgactttattaccaagaccaaaatatatggttattttaaccgtgaataatctataaggggctgggcaccgtggcttacgcctgtaatcaccacactctgggaggcccgtgcagaagaatcacttgaacccaggagttcccgtctagcctgggcaacatggtgagactgtgtctctacagaaaattttgtaaacattagccgggcatggtggtgcctgtctgtggtctcagctacttgggaggctgaggtggggggatcgcttgagcctaggaggtcgaggtttcagagagccacgagttgcacccttgcactccagcctgggtgacagagcgagaccctgtttccaaaaaaaaaaaatctgttaagagacagtagttttttgtgtgcaacttgttctaacatccagaaaatccagggataaaaaa

SEQ ID NO: 634305 - DNA, 626 bp, Homo sapiens
agccattcatctcacccctacaagggtgaggctgtctgagatggagacaatgctgagaaaagcagagatgagggatgcagagagactacgtgttcaacatctcggttgagctcccctttttcagttacctccttcttttcctaaatctaatttgagtttgaattctgtgccttgcaaccaagattcctgactttattacmaagaccaaaatatatggttattttaaccgtgaataatctataaggggctgggcaccgtggcttacgcctgtaatcaccacactctgggaggcccgtgcagaagaatcacttgaacccaggagttcccgtctagcctgggcaacatggtgagactgtgtctctacagaaaattttgtaaacattagccgggcatggtggtgcctgtctgtggtctcagctacttgggaggctgaggtggggggatcgcttgagcctaggaggtcgaggtttcagagagccacgagttgcacccttgcactccagcctgggtgacagagcgagaccctgtttccaaaaaaaaaaaatctgttaagagacagtagttttttgtgtgcaacttgttctaacatccagaaaatccagggataaaaaatgtttaaacctaag

SEQ ID NO: 634306 - DNA, 626 bp, Homo sapiens
agccattcatctcacccctacaagggtgaggctgtctgagatggagacaatgctgagaaaagcagagatgagggatgcagagagactacgtgttcaacatctcggttgagctcccctttttcagttacctccttcttttcctaaatctaatttgagtttgaattctgtgccttgcaaccaagattcctgactttattaccaagacmaaaatatatggttattttaaccgtgaataatctataaggggctgggcaccgtggcttacgcctgtaatcaccacactctgggaggcccgtgcagaagaatcacttgaacccaggagttcccgtctagcctgggcaacatggtgagactgtgtctctacagaaaattttgtaaacattagccgggcatggtggtgcctgtctgtggtctcagctacttgggaggctgaggtggggggatcgcttgagcctaggaggtcgaggtttcagagagccacgagttgcacccttgcactccagcctgggtgacagagcgagaccctgtttccaaaaaaaaaaaatctgttaagagacagtagttttttgtgtgcaacttgttctaacatccagaaaatccagggataaaaaatgtttaaacctaag

SEQ ID NO: 634307 - DNA, 626 bp, Homo sapiens
agccattcatctcacccctacaagggtgaggctgtctgagatggagacaatgctgagaaaagcagagatgagggatgcagagagactacgtgttcaacatctcggttgagctcccctttttcagttacctccttcttttcctaaatctaatttgagtttgaattctgtgccttgcaaccaagattcctgactttattaccaagaccaaaatatatggttattttaaccgtgaataatctataaggggctgggcaccgtggcttacgcctgtaatcaccacactctgggaggcccgtgcagaagaatcacttgaacccaggagttcccgtctagcctgggcaacatggtgagactgtgtctctacagaaaattttgtaaacattagccgggcatggtggtgcstgtctgtggtctcagctacttgggaggctgaggtggggggatcgcttgagcctaggaggtcgaggtttcagagagccacgagttgcacccttgcactccagcctgggtgacagagcgagaccctgtttccaaaaaaaaaaaatctgttaagagacagtagttttttgtgtgcaacttgttctaacatccagaaaatccagggataaaaaatgtttaaacctaag

SEQ ID NO: 634308 - DNA, 423 bp, Homo sapiens
gaattcagttacacaagtccactcctagatcaacctattacttattaatttacttgctctataggtagtcttgggattcactggaaaggagctggtaaaaacatgagcaagtgacagaatttgtgactgtcacgtggacagaatgtattgtgactgtcatgtrggtctctaaaaattgtgttaccaatattgatcttatgacaataatccatgttgttgatgtcaaaagatttggactcctaaaagagctgaggctaagagtaattcatgctgcaaaagtaatacatatcttcctgctactgatctggagagcctgaaagcagaaactgtataaacagaagtcagggaggctggacacagtggctcatgcctgtaatcctgttagcagtggcaaatctctatgggtctgcagcaacttgattc

SEQ ID NO: 634309 - DNA, 384 bp, Homo sapiens
gcaccacgtgattgcaatgatagtatataaaataagctaggttaaaaaaatgtaatgtaaacagtggaagaggttttaagccaaaatatgtgagaactacattggtccctaaaatcagcaggtgttatattagggctgataagatagaaaatatatgagactttgattaaaggaaaagatgattcgaatttttggagaaaatgttatctgattaaatcaatattataatatcacttttctgggatttggcattctaatatttgacttctcactatcatagaaattctggcacttacaaaatgtcaatatgagtgcaattaacacatattggcatgctgttgtttttccctagtggttttcargaagtcttagagatcaatatag

SEQ ID NO: 634310 - DNA, 610 bp, Homo sapiens
agaccctttctcagaaaaaaaaaaaataataataaataaataagatctatgtgaatatgccacttagaaatttcagaaaaaggatcaaatcaattcccttccaataggtcagagaaaacttgagaattkggtagttgagttgggaaataaagtggattatgttgagattttattaaaaattagaaatttgacaaattaagcaatatatgttggtaaatgtagaaaagtagaaataacaaaggttagaaacctttgcagctcattgcagagtggcagccacatgacagcatatcacatcaaaatgttcacctctttgcttacctcctttcctctttttcctcacctttattccttaagttctgctttgagtgggcccaagataagactctaataacctatgtttaattacctagaacatcatataggaaaaagttgtgagaataagtattttagtgaaataaggtgcattccactataaaataatcccaaagaattcttatatgaatgtaaaatattatgggttcatagaactaggtaaatcatttccaccaatataagtacaatttttcttcagctgataatatttagggaaatcttaacaaaactacag

SEQ ID NO: 634311 - DNA, 610 bp, Homo sapiens
agaccctttctcagaaaaaaaaaaaataataataaataaataagatctatgtgaatatgccacttagaaatttcagaaaaaggatcaaatcaattcccttccaataggtcagagaaaacttgagaattgggtagttgagttkggaaataaagtggattatgttgagattttattaaaaattagaaatttgacaaattaagcaatatatgttggtaaatgtagaaaagtagaaataacaaaggttagaaacctttgcagctcattgcagagtggcagccacatgacagcatatcacatcaaaatgttcacctctttgcttacctcctttcctctttttcctcacctttattccttaagttctgctttgagtgggcccaagataagactctaataacctatgtttaattacctagaacatcatataggaaaaagttgtgagaataagtattttagtgaaataaggtgcattccactataaaataatcccaaagaattcttatatgaatgtaaaatattatgggttcatagaactaggtaaatcatttccaccaatataagtacaatttttcttcagctgataatatttagggaaatcttaacaaaactacag

SEQ ID NO: 634312 - DNA, 559 bp, Homo sapiens
tattcatttgtacccaaacaggaatataggatttgccatattrgatcagtccattggtccaccaatgttgtattctcactgcctctggcaccagatgatacatgaagcactggaagagagcgaactccccccatccccagaaggcagcaagtcaattgtgcagcgcaatatatggggtgaaagtctccactggtcggggtgggactacataaatggaatctggatttgaagatgtttaaatagggcagatgctgcatccattgaacacggacttaggcagttcttacctttagaaattgtgtctagtgtctctgtgctcacttgtgtcagagcttctctgctcattttcaattagaagaactattatttatcttacagtaataaatggaaacagtggaatcaaacagccccattcctgagagatgaagacaacactctatgataactgacatgttgctgctttctttctggtgaaagaataaatgcagtcaaaaccagaactcagtgtaatatctcaggacggcatgcccctcttcccatagtaattattacagaaatc

SEQ ID NO: 634313 - DNA, 583 bp, Homo sapiens
ggaaggtacaaacagacagcaagacttatcagtccagcttgtttaaatcttatggatcytgggctgcgattgataagctgagactagatctttagaagtcactaaattcatttacctatttataaagaaaattaagaactctctcatacatgaaactttgtagtcttttctctcaataaatatctctcagattgcaaacagatcagcatttttaaggaagggaaatattatgcaaaatgttattacacaaaacaaatgaaagtgaagctactttaaataaagaagaagagtcacaataccctcactccacctgatggccatttacatttcttctctttccctctgtatcggccctcagccacttccattgtacactagtgctctaataatcacagttttaaatgaaactaagctaaagaataaacttaaatttagttattaggttaccagcacaatttaagataatttgtaataagatcagccttatcactagaattggtgattgcttatgtgttatcagtcaggaaccactatcatcactccacatgctattccatcattcaacgttatttctaacctagga

SEQ ID NO: 634314 - DNA, 602 bp, Homo sapiens
aacagaggctaggttattctacagcaacaagtatctccatattttggaacaacacaacttattgatctacctccattcagcgagaataaaatgctctttctctgttttgtccacattctggtaccctgtctaacagatcagctactgtctgygatattgccactgccattgtagaagtaaaggagagaagactgcagaatctaaaatgagcaatcaaacatctcacttccactgacaggctttcgaacagaactagacactttactccacctgacaaaatatcaagaagaacaatcccaccatgagcccaggaggagagagaacactaagaacatgaggaaaagcacagaaggtcccagcatcatgctgtgtcctcacagattctgagaaaaatcccttatacttcttcatatttctatcctgtagaagaatgtggtactccataagttgtatttgttgatgaatggatggatcatatttgccaagctaactaactaatttaaaatatctggataagatggttttctcttgcacagttgtcttctgattccagctgccttcaaaatgagttctatttggaaatatagtgccattataggaaa

SEQ ID NO: 634315 - DNA, 465 bp, Homo sapiens
gtggtcttgaactcctgggctcaaaggatcctccttcttcagcttcccaaaatgccgggattccaggcgtgaacaaccatgcccggcccaaactgaattcttatagccaagaaaaagcaaacaggtatcttggttggcatctttaattatgactgtctatgaacagtgctttattgaagatgctatttagtggtttttttattgttttgttttattctgttttgactctaggacacaacatggakaagtgtctttaagtgaatgcttccaagtaaatgcaaggacagcctttaaccattcagaagttcctaataagaaaactgcagcatcaccagaacggagcacttcagagagtgggttacttggctgatagaaatttcaccattctccacaggaactccacacctccacttgctgaattgtgtgccaaaaccttcactagctagtgtttttccagtgagacat

SEQ ID NO: 634316 - DNA, 538 bp, Homo sapiens
gtttttccagtgagacatatcagttctttttctatctctacagcccattctatcacatgaactaactgattacgaggtgagttgaaatcagacaggcacctttccctaaraactaattcatgtcaaattctgggttttaattggccaataatttcctagttaaggtgatagctattaaataaaagtgacacttttaagtttaaggtgttatctattttagaaaaagaaaacacctattctcaaatggagatgttaagacttaaaaggaatagaagtataatatgaaaatgataaacagagaggtaggcagatttatgtgcactttcctcctgcatcataccacatgactgtcatctttcccatatctgggtaacatctggcctttcatttttcttgcataatatgttttgagcacctcacagactgatcacatagtaagataaagtttaaaatgctttttatcttaatattttctgtttggcaataaatggtcagactagttgacagctgaaaatatttttgactatacaaattggat

SEQ ID NO: 634317 - DNA, 550 bp, Homo sapiens
agagagtgggttacttggctgatagaaatttcaccattctccacaggaactccacacctccacttgctgaattgtgtgccaaaaccttcactagctagtgtttttccagtgagacatatcagttctttttctatctctacagcccattctatcacatgaactaactgattacgaggtgagttgaaatcagacaggcacctttccctaagaactaattcatgtcaaattctgggttttaatyggccaataatttcctagttaaggtgatagctattaaataaaagtgacacttttaagtttaaggtgttatctattttagaaaaagaaaacacctattctcaaatggagatgttaagacttaaaaggaatagaagtataatatgaaaatgataaacagagaggtaggcagatttatgtgcactttcctcctgcatcataccacatgactgtcatctttcccatatctgggtaacatctggcctttcatttttcttgcataatatgttttgagcacctcacagactgatcacatagtaagataaagtttaaa

SEQ ID NO: 634318 - DNA, 585 bp, Homo sapiens
gtcaactagccctgtcaataaatcagagaaacccaccattcactggctgctttcactgctcctagggtctctgcgatagaagagggcataattcactcctcacaaacacttaataccacatttctacgatttacaatctgataatattcaaatactattgctgtattatgcagctcacaattgcagatgcgattccataacagcctstcactttggcatgcattatgtaagttggtataaaattgcctgtcttaaaactcttcttcaattgcaacccaatatcatcgtttcacacagagctttgggaacattaaaaattcagcttcttccctatttagcaagttctgcaaaagggagcaaaacagacaaacagatgttccctcttctgagtccccaggaggtctgaggcaaagtagaaagaccccaaaatgatacaacagcaatgacactcaagatacatttgttcagtttttttgttgttgttgtttttaagaaaaaaaaaagaaagggaaaagaaagaaatctcttactgtctcctctggaaaagtagaaatactctacattggtactggtaaatgcttttcc

SEQ ID NO: 634319 - DNA, 585 bp, Homo sapiens
gtcaactagccctgtcaataaatcagagaaacccaccattcactggctgctttcactgctcctagggtctctgcgatagaagagggcataattcactcctcacaaacacttaataccacatttctacgatttacaatctgataatattcaaatactattgctgtattatgcagctcacaattgcagatgcgattccataacagcctgkcactttggcatgcattatgtaagttggtataaaattgcctgtcttaaaactcttcttcaattgcaacccaatatcatcgtttcacacagagctttgggaacattaaaaattcagcttcttccctatttagcaagttctgcaaaagggagcaaaacagacaaacagatgttccctcttctgagtccccaggaggtctgaggcaaagtagaaagaccccaaaatgatacaacagcaatgacactcaagatacatttgttcagtttttttgttgttgttgtttttaagaaaaaaaaaagaaagggaaaagaaagaaatctcttactgtctcctctggaaaagtagaaatactctacattggtactggtaaatgcttttcc

SEQ ID NO: 634320 - DNA, 436 bp, Homo sapiens
tatgtgaggtgctgatgagaagagactggatctcatttccaggttgtatatctgcataggtggtcaaattgataatctgattatgccagtggtagaaaagcaaactggatcaaagagacaggtgaataaaggaaggggcaaacattactcacaccagttggctgggcaaaataagctacctctaggtcaagtggacactgtggaagctaggcttaagacatcttgcctgaagcttgcacagcagagctgcccactaagtaaatgcttccaagttgcaaaaagtaagtaaagcgattaaaattatgcccattaaggtaaagggacayttgcctctttacctaacttggggtaatttttatccctttgccctgtcctagttcttgagacaaagcttaagagaaagacaactgcaaaggagtgaaaggggcagtgaatt

SEQ ID NO: 634321 - DNA, 553 bp, Homo sapiens
cccagagacaatagtttctctttcagtcactcggctgatgtgcaacggcacaatcatagctcactgcaacctcaaactcctgagcacaaatcatcctcctaactcatcctcccaagtagctagggctacaggcaggcgccaacacacccagctaatttttcacagagacaaagtctcactgtgttacccaggccaatctcaactcctgggctcaagtgattctcctgcctcagcctcccaaagtgatgggattacaggcatgagtcactgcccctggctgggtatgacagctattattcttccttttatatattaggaaatggaggcagataatgtttaaatctaagtggcagatccagaaggcgaaatccagaatcatgtttcttagtccaatgtcctgttcattacagcccagtcaatttctatgtttttccctgcatcaagaaaaacatttaacctaaattatrtgaataatagtttgaatagttagcaatacctctaaaaagtagattgttaaagggagaaacgtttcttttttaaatctaaaccccca

SEQ ID NO: 634322 - DNA, 581 bp, Homo sapiens
aataatgaacattctaaacaaggagagaagcatttggaattttatgccatggatgtgcatgctaatgtgtrtatgtatgcatacaagaaaaagcaagaaaacacattttaaaatctcctttgtattgaaacagttcctcctagaattgtagtgactcacaaccatgacagccactgattttctcctcatcccaaattagacgtctgtctctcagaactctcctttatttattattgttagcccttggcaccttgagacactcactgcccatgggctctaaagggtctgagctactctgtctactttagtagatattattgagatattactttagtagatattgacatttactagatttagtaacaatataatatctagaggcagaagactcataactgttttaatgagagagtctttatttttttttcttgtttgtttttaatgaattcaaatcttatcttctgcccactagaggctccttactaaatattcaatccacactttctaatgggttcccatttagccaatggcatgttctttcctattatcaatcattcattcagaaacttttacttggaact

SEQ ID NO: 634323 - DNA, 467 bp, Homo sapiens
cctgtttgccccttatttatttggtgatccctttaggattctaagttactgcaaaaatgatacgggtttgcctgattagctaaatgatagattgtattggccttattaggtccaggatacatcataactccaagactggttgcagacttgctcaataatgaacattctaaacaaggagagaagcatttggaattttatgccatggatgtgcatgctaatgtgtatatgtatgcatacaagaaaaagcaagaaaacacattttaaaatctcctttgtattgaaacagttcctcctagaattgtagtgactcacaaccatgacagccactgattttctcytcatcccaaattagacgtctgtctctcagaactctcctttatttattattgttagcccttggcaccttgagacactcactgcccatgggctctaaagggtctgagctactctgtctactttagtagata

SEQ ID NO: 634324 - DNA, 537 bp, Homo sapiens
attgtcaccattttctcttttattcttatttatttaggtatttatttatttttttagacagtcttactctgtcccccaggctggagtgcagtggctcaatctcggctcactgcaagctctgccgcccgagttcacrccattctcctgcctcagcctcccaattagctgggactacaggctcccgccaccacacccggctaattttttgtatttttagtagagacagggtttcaccctgttagccaggatggtcttgatctcctgacctcgtgatccccccgcctcagcctctcaaagtgctgggattacaggcgtgagccactgcacccagttctttttttaaaactcatgtattatttagtagtttatttttaattttttaatacataccatttttgtagatacagtaaacaattacttttttatttaacttcattcaggtcagaaaatatatcctgtaggaaatatatatattaaatttagtgaaatctttggagtttttttgtctagcatatggcctttgttggtatatatatc

SEQ ID NO: 634325 - DNA, 649 bp, Homo sapiens
tagcagcaacattcagtcaaagtgactctttatatataacttgtacatacaatgaagaactttaaaaaggatttctcttcgtaacactgacagcagtgacttgaaaacagcaggtgtacttgttgaatgactgaatgaccattcattcatttattcaacccatgaagttgaccctatggcagagctttgtatgaatttctgttttctttagagaagtgaaactaagmcatgcatctcctaatagctatacttgtatcctgattcacttggccagctggggcttcatatttatgtgacctagaagatcagccttcttgtggcagaggctacacaatgtcactccattgttctgattcctcaataggattctccctccttggttcttccctggaccaaggacagaagaatcattcaacacagaggctattgacaaaaggggcatatttggtgcaaacaggggtaagtcatgattagttcataaaaactaaattctcaaaaaataatatgaaatctaggagattctccaccacataggaagttgttctttattggattatgtcagaatatacaagtgcatgtgcacagttttgaatttgtctagtttctttttcatattaaaaacaaacacctgattggaatttgacatcag

SEQ ID NO: 634326 - DNA, 550 bp, Homo sapiens
ttcctctctgtgggactgagtcttgaaaaacctttgtgccctcatctgcccctcaacagagactgtcatttttctactttctgtctgcatcactattgtcgagggaatgatgctctcagagccacaggcaatctgtyttcttggaggttctgttccagctctgacctcggtttgttgcagtttatgtctcttctcacaagtttcagcttgctctcatcaccagctaaattaaccataaagcaaaaccttgactcacattactgaagcctcagagaaattggtagaagcccggagtgatgcatcactatatcaaataaagcactttggatcaatgagaagattcccttgtcttgaaaccttggaatgaatgtacaggtgtgctagatgacagcaaagaaaatgccatttgaaagcattggaaggaaggagagttgtctaagaagtggtgggatagggacaacactggatggtgggaagcatctaggaaggagggtatttccgaaactaaaaaagggccaaggccaagaaaatcacctacagttctattcag

SEQ ID NO: 634327 - DNA, 511 bp, Homo sapiens
agaagaaaaggcctttgaagccaacataattactcctctgtccagagaaatataaacaacaataactccaacagccttcagctctgcttttgaatgagttctttgcttctgcctgagaggtaaagtagttcattccttggggaaaagttgaatgtggaatgctaggccatgcccttctcactttggtttcattatgttatttcgaattattaatacaaagaacattcaatgtaagttaacaaggctttactgagtaccatgtatycaggcctgcagttggtcctctagggtagatgaagaaagagtgtgggacaagttcagggtcttcaattcccttaatctcccttaacagaggtttgcatgtcccatttcaaaagccaagcacaaaatcagcaaaaatgaggctaattgtttaaatacatcttacttctctgtatttacataagcaattgaattgaatgaaatttgctaattttgatgctcttactaatacatactgcatatgtgtttc

SEQ ID NO: 634328 - DNA, 511 bp, Homo sapiens
tttgcaaatgtgtcccctgggcccaatctggtccactacctgttataaataaagttttgttggraccaagcccatccattcatttagatattgtctttggctgctttcctaatacagaggcagaatggagttgttacaacagacaccacatggtccacgaatcttaaaatgttattatcattctcttacaaaaagcgtctgccaacccctgtgttaggtaatgaaaaaaaaaaaacattcatctttgaatttataacagtagctaatctttgaacagcactttagagtttacaaagtctgaccatgttatgtcgtaataggtattattatctccacttaactgatgaagaaatggccgacttttcttcttcttttaaattatactttaagttctagggtacaagtgcacaacgtgcaggttggttacatatgtatacatgtgtcatgtgggtgtgctgcacccattaactcgtcattcacattaggtattcctcctaatgctatctgtccc

SEQ ID NO: 634329 - DNA, 511 bp, Homo sapiens
tttgcaaatgtgtcccctgggcccaatctggtccactacctgttataaataaagttttgttgggacmaagcccatccattcatttagatattgtctttggctgctttcctaatacagaggcagaatggagttgttacaacagacaccacatggtccacgaatcttaaaatgttattatcattctcttacaaaaagcgtctgccaacccctgtgttaggtaatgaaaaaaaaaaaacattcatctttgaatttataacagtagctaatctttgaacagcactttagagtttacaaagtctgaccatgttatgtcgtaataggtattattatctccacttaactgatgaagaaatggccgacttttcttcttcttttaaattatactttaagttctagggtacaagtgcacaacgtgcaggttggttacatatgtatacatgtgtcatgtgggtgtgctgcacccattaactcgtcattcacattaggtattcctcctaatgctatctgtccc

SEQ ID NO: 634330 - DNA, 622 bp, Homo sapiens
tgcctattaaataaaactaaattgattatagaattgaatgtagttaaggacataaacraagatgtggctggttgctttcaaagatacatcatccatatgtgtaaaaaaaattatagagcagtttggtaaatgaaagtgaatgcatacacacttttcaccaccatggtattcagcattacaaaagacagtaaacaaacaaaaagtcccaagaaaaacagaaacagcaatttacgttcatcttcgggagcaaagtgtcaagatgtaaatgaacaaattcggagggaaaaaaaacctactgtattatctatcctgctccaaaaataaactccctttcaaccagtgcattagtagagacactagagtatattaccatatattactgcctgaagcaattgaacatgaggctagacccctccccaccattatccaactctttttttttggtccccttcttctccaattagttgatatgctgagaccatgtaaacttttaaaattagcatgagtcaaataattagagaaaaaaactgtcagcaaaaaaaccaaaaagactctatgtaatatatcacaagtatgaataatattccattacaattacctccctaacaatagtaatataatc

SEQ ID NO: 634331 - DNA, 622 bp, Homo sapiens
tgcctattaaataaaactaaattgattatagaattgaatgtagttaaggacataaacaaagatgtggctggttgctttcaaagatayatcatccatatgtgtaaaaaaaattatagagcagtttggtaaatgaaagtgaatgcatacacacttttcaccaccatggtattcagcattacaaaagacagtaaacaaacaaaaagtcccaagaaaaacagaaacagcaatttacgttcatcttcgggagcaaagtgtcaagatgtaaatgaacaaattcggagggaaaaaaaacctactgtattatctatcctgctccaaaaataaactccctttcaaccagtgcattagtagagacactagagtatattaccatatattactgcctgaagcaattgaacatgaggctagacccctccccaccattatccaactctttttttttggtccccttcttctccaattagttgatatgctgagaccatgtaaacttttaaaattagcatgagtcaaataattagagaaaaaaactgtcagcaaaaaaaccaaaaagactctatgtaatatatcacaagtatgaataatattccattacaattacctccctaacaatagtaatataatc

SEQ ID NO: 634332 - DNA, 622 bp, Homo sapiens
tgcctattaaataaaactaaattgattatagaattgaatgtagttaaggacataaacaaagatgtggctggttgctttcaaagatacatcatccatatgtgtaaaaaaaattatagagcagtttggtaaatgaaagtgaatgcatacacacttttcaccaccatggtattcagcattacaaaagacagtaaacaaacaaaaagtcccaagaaaaacagaaacagcaatttacgttcatcttcgggagcaaagtgtcaagatgtaaatgaacaaattyggagggaaaaaaaacctactgtattatctatcctgctccaaaaataaactccctttcaaccagtgcattagtagagacactagagtatattaccatatattactgcctgaagcaattgaacatgaggctagacccctccccaccattatccaactctttttttttggtccccttcttctccaattagttgatatgctgagaccatgtaaacttttaaaattagcatgagtcaaataattagagaaaaaaactgtcagcaaaaaaaccaaaaagactctatgtaatatatcacaagtatgaataatattccattacaattacctccctaacaatagtaatataatc

SEQ ID NO: 634333 - DNA, 617 bp, Homo sapiens
taagtttgggtttgggaagccaatttctttccccctgaaatttttgacaggcagatagcattgtcataacaatgactttaagatgtcagcatgtacctatttccagcctgtatgataagtgtgtcactgctacctctactccagttcaaaatttggtctgtaccgaaaagggaacctggattgtcccctacctcctttcctaacctccaggaggaccagttggggtcctcaaagtgcacagccaggaagttgcttgaagaggcagtgaggtatagtgggcaaagcttggctctggtgtgagacttttactttctgtcccagctccatccctttctagggcaacatttttttagcytctctaagcctcattttcttaccgtgcatatggaaataatagtagcatcaacttcccagggttcttatgcagattaaatgtgttacagaacataaggtgtgccaaacggtgcctggtgcaaagtaaatgcctcaaagagtgttagctagtattatttcttgcagcttaaatctactcttttaccctgtattgataaaaatctataatctttttgttctaagtaccctgtacaatactttgcacatagcagatgttcattaaa

SEQ ID NO: 634334 - DNA, 617 bp, Homo sapiens
taagtttgggtttgggaagccaatttctttccccctgaaatttttgacaggcagatagcattgtcataacaatgactttaagatgtcagcatgtacctatttccagcctgtatgataagtgtgtcactgctacctctactccagttcaaaatttggtctgtaccgaaaagggaacctggattgtcccctacctcctttcctaacctccaggaggaccagttggggtcctcaaagtgcacagccaggaagttgcttgaagaggcagtgaggtatagtgggcaaagcttggctctggtgtgagacttttactttctgtcccagctccatccctttctagggcaacatttttttagcttctctaagcctcattttcttaccgtgcatatggaaataatagtagcatcaacttcccagggttcttatgcagattaaatgtgttacagaacataaggtgtgccaaacggtgcctggtgcaaagtaaatgcctcaaagartgttagctagtattatttcttgcagcttaaatctactcttttaccctgtattgataaaaatctataatctttttgttctaagtaccctgtacaatactttgcacatagcagatgttcattaaa

SEQ ID NO: 634335 - DNA, 489 bp, Homo sapiens
cctctactccagttcaaaatttggtctgtaccgaaaagggaacctggattgtcccctacctcctttcctaacctccaggaggaccagttggggtcctcaaagtgcacagccaggaagttgcttgaagaggcagtgaggtatagtgggcaaagcttggctctggtgtgagacttttactttctgtcccagctccatccctttctagggcaacatttttttagcttctctaagcctcattttcttaccgtgcatatggaaataatagtagcatcaacttcccagggttcttatgcagattaaatgtgttacagaacataaggtgtgccaaacggtgcctggtgcaaagtaaatgcctcaaagagtgttagctagtattattkcttgcagcttaaatctactcttttaccctgtattgataaaaatctataatctttttgttctaagtaccctgtacaatactttgcacatagcagatgttcattaaaagtt

SEQ ID NO: 634336 - DNA, 527 bp, Homo sapiens
gactacagatgcacactaccatgcctggttaattatttttatttttatttttggtagagatggggtctcactatgttgttgcccagggtggtctcaaactcctggcctcaagtgatcctcccaccttagcctcccaaagtgctgggattacaagcataagccacaacacctggccagcatcacactttaaattacctgtgaagtatctataatcatgattactttgggaactaatgttacctaggtctctgtcctccaccactacatccaccagcctcttcaccccaccgctcactgagcatggggttaccagtcctcttagttctgtctaaaccctcactaaatcagaatgcatagttcaggccagactgattggggaaactgagacacatttctaacaggactttcgcttttacagcctcayaataactactattgcaacattatactaaaaacagtgctgatgttaataataatgataataatttattaagttctgattatatgtcaggtactttacatattta

SEQ ID NO: 634337 - DNA, 416 bp, Homo sapiens
tattttgagtaatgatgctacaaacagttgtgtacaagatttttcatggacatgtatacaattctcttggcagtatacctaggattggaattgctgggtcatgtggtaactctgtttaacaatttgaaaaactatcacactgttttccaaagcaggtgtactattttatatttctaccagcaacagatgagggctccacatcttcatcaccacttgtctgtcgttttgattctaaccatcctaatggatgtgaagtggtatgtcactgtggttttgctttgatttccctatgactaatgacttagagcatcttttccttgtgctttttagccatttgtatgtcttctttggaggaatgtctatgcacattctttgcttgtttcttaawtgggttgcttttttattgttgaattgta

SEQ ID NO: 634338 - DNA, 457 bp, Homo sapiens
gtacttggaatgcggagtgttaaaaagtaatatcttacccatattacaggctgcccaggtaataaactgacactcataccagttwaaaaaaaaaaaaaacacattttagagaaccactttttcagttcttaagcactattttcatctttaatattttcgtttgtttttcagtgtctttttctcagagggaaagtttctccctgaaatagtggaacagtttaagggtttgtaatctaagtaaataacctaaatatatcttctccacatgtacatgctcaagattacaacttgtattctctgagtttaataagcactacagtttgactgtttctcattaaaaagagaatgggagtaaggtagaaattcaataactgttcaagtaaaatacagccatcctaacatctgtattatattagaggagacacaagacaaaacattgactcttgaggttaaatct

SEQ ID NO: 634339 - DNA, 584 bp, Homo sapiens
agcttcctcattaaatgtactgtgtattgtctaaaccaatggccgcaacctaatttctgtgcatgcctctgacctgcttattcagyaagtgagagaatgcagcgatgaatatggacaccacaccacagtctcacatttttacaaggtgcttttggaaacctgaatggagatttgactttttttttttagttgcttccatggcaaccctccccatgaaaacaggcgcagtctgcagaggcctgttcttttctgttgatgtttgtcactaccacatggggtcaggtttgttctttctccctccccaaaaatatttgctagctctgtggaaaaactgctgttgccctaaacagtttacctgcatctgtaccacgctgttcctgtgccaaggtgactagggaccttctgtgtggctttggcatccctcagtttccagatataaagcagaggacaggttccctctactctcaaattcccatgggcatggctggggataggagagcaggcagagtccctcttcaaggacactcaccagctcctaacccaacatctctaaccagtcatgtagtcttgtggcttatagtacg

SEQ ID NO: 634340 - DNA, 220 bp, Homo sapiens
ggaaaaactgctgttgccctaaacagtttacctgcatctgtaccmcgctgttcctgtgccaaggtgactagggaccttctgtgtggctttggcatccctcagtttccagatataaagcagaggacaggttccctctactctcaaattcccatgggcatggctggggataggagagcaggcagagtccctcttcaaggacactcaccagctcctaacccaa

SEQ ID NO: 634341 - DNA, 427 bp, Homo sapiens
aagtccagtgtgctgtaggaagctaaaagacactgagagaaaccagaaattttgctgaaaagaatgtaggctttaggatcaggcagaattttcactggcctggccaggtgtgttgggcagtggtagaaaataaaagcattgaaaagcaggcggggtagttggaacttggaaataagaagctactgaaagtttattgactgaagatagtgtaatgaaaacagatgcctactgcagtggatcttcagttttgaaatgagagctaaaaggaaaacgggatcccartgcaccactgtgtgggtctagaatcactagaaaatacttaatgccatgcgagagcttgagccctctaatgtgcagagatcaggactaggtagatgttctctggctcaggatgtctttccttgagtagaagcaatgaatgcagctt

SEQ ID NO: 634342 - DNA, 624 bp, Homo sapiens
tacgtacactatactatatatactattatatatagtgtatatatagtatatgtgttaatactataacacaatggtgagaactgggcatatatagtatgtgttaatactatatataacacatatatatgtatatataattatactttctaagattatacttcctaaaggcattttggctatccataaaaatttatacagaagaaaatacaaatttttatagaaattcacattttaattgtgtgcaaaatcgatcytgaagtttatggccaatgtttgttgttgcgtatgactaaaaagatggtgctgttgatgtgagacacactttagatttctgtgatcctatttcatttttcatagaagtaatacttgtttttgttttgttttgctttaaagacattaattttttgttctttatttagtgtcagcctaccctggcaaagccctgggaggtaatttgtcaaaaacgccaggtaatttgtcaaaaaacatctctgggaggctttcttatgttcacagctatactttgattataaacagtggtatccctgattgaagggccctctgtgattccctgagaggtcttcatttggtgctgtgcaagtcaggagaaagtgaagctaagtg

SEQ ID NO: 634343 - DNA, 573 bp, Homo sapiens
aagcttgaaaacacatcatatgttaaatgacagatttttwaaagtcatgatgttaaacttccatgctcatgagagtcaagttacgcttcatggctctctgcaattctgcattttcatctctcttgttctgaccacctggattgtaaattttctctgatgtaaaattaaatttttgttctctgtgttaatggagagaaaaatgaatatacaggaaataactctgatgttaaacttcaccactgcaccttttcccttctctcttttatttttatttggtaaaccaagttctgttatgtgctcaaaactgctaggtgctggggacattaaattcgtggacaaaatggtcccacccctaaaatcatgccctagggtgaacacagtcttcagcaccagcaatcacaacataatgtgttaaaagagaagatctaaccccttcagaagaaatgtgtagtgacctgaggcaaggtacttctgacttctaaaacaatagtaggtgactgatgatctccaatccacttctgtcaaaagagaccatgtgtagatccaaaaagcactgtagatccagtgcctagt

SEQ ID NO: 634344 - DNA, 581 bp, Homo sapiens
ttatgtctagggattccaagtccacaaacgacttgttttcttcccatgagaggtaaatgaacaatgggaacagataatgcattttggtacaaacagaatccaaataaaaacattagagaggctggctcctgaacaagtgataagatttaatgccrtctactcttactgtaagtactcttaataggataccaagtttaaaagggaggaaagcaaatcagggtattttcatctttccatcaaggtaacaggagttgtattaagacggaatcataatgacaataatagtgttgattttcatagtgctttggaattttcaaaatgctctcacatattttatttcacttgactataacaatcctgttcggtgggcaaaataagtgtaaacgacccccgtttttcaataaggacactgaagtccacagaggttaagtggtctcccaatgtcatccaactaataaatagcaggaaacacaaataatgtagtctgcaccttcagaacagctgtttcttagccttagggaatgctagcctttgaaaacagcatgtagcatggcagtgtcaaaactgaactgacttaggaa

SEQ ID NO: 634345 - DNA, 555 bp, Homo sapiens
aaaatgtaagatcatctaaaatacttttggtcaaactggagctcaaatgaccctcagtagaaataaacgtgtgcaaaaaatacctctgggtacccaatgtctcactgtggtttttctgtgtttgcctctcagggagaaagcattggttagtatgtagtgttctcatattccctggtgtgtagtataccctggtgtgtagtacacacagtggtgtgtagtcactgagttaaaacctttgggaaagtcacgagaagactagagagactgtcaatgactttgaacattgcctctatagcgtctatagcaaccagaacaaatctcccggttgcaggtagtgctgcttctgctccttgttccctccctctctttccccccaccatccagcgcacaggcagtgctgtgtgctcaagagcaactaarcatttgctcagtggcttgtactttccttaaattgtcttaaataaaggaagtaaaaattagcttgctgcacctaaagctccagctgaggttcaatttgtccagcttcacatgcaataatatcaacctggagtgtaa

SEQ ID NO: 634346 - DNA, 555 bp, Homo sapiens
aaaatgtaagatcatctaaaatacttttggtcaaactggagctcaaatgaccctcagtagaaataaacgtgtgcaaaaaatacctctgggtacccaatgtctcactgtggtttttctgtgtttgcctctcagggagaaagcattggttagtatgtagtgttctcatattccctggtgtgtagtataccctggtgtgtagtacacacagtggtgtgtagtcactgagttaaaacctttgggaaagtcacgagaagactagagagactgtcaatgactttgaacattgcctctatagcgtctatagcaaccagaacaaatctcccggttgcaggtagtgctgcttctgctccttgttccctccctctctttccccccaccatccagcgcacaggcagtgctgtgtgctcaagagcaactaaacatktgctcagtggcttgtactttccttaaattgtcttaaataaaggaagtaaaaattagcttgctgcacctaaagctccagctgaggttcaatttgtccagcttcacatgcaataatatcaacctggagtgtaa

SEQ ID NO: 634347 - DNA, 551 bp, Homo sapiens
ggctctcactatgttgaccaggctggtcttaactcctagccttaagcagtcctcccatcgcagcttcccaaagtgttaggattacaggcatgagccactgcacttggcccaaataaagtcctttgagtaatttattttaaaatatatgctctgcctctttraataaaatgaggaagaacaaaacaaagacatgcattaaaaggttaataaaagagaaataaataatcaagaccaaagaaagagagtttccataagataagtacaatgacttcataatggctgctatggtcgagtcagatttggctctgagcatctggcactgaaaacaaagaagatttggtaaattataaaatcaagttctactcaatggagcattcactggcctcctattctaaaagaaagtttgaatctggaacttcctttgggcatcattggataacacaataatcttcttacatacaattttattaaaaacaaaaatttaaaaacccacaccagactttgtcaaggaatatacataattgcaattcaatgaaagtaacctggggagg

SEQ ID NO: 634348 - DNA, 551 bp, Homo sapiens
ggctctcactatgttgaccaggctggtcttaactcctagccttaagcagtcctcccatcgcagcttcccaaagtgttaggattacaggcatgagccactgcacttggcccaaataaagtcctttgagtaatttattttaaaatatatgctctgcctctttgaataaaatgaggaagaacaaaacaaagacatgcattaaaaggttaataaaagagaaataaataatcaagaccaaagaaagagagtttccataagataagyacaatgacttcataatggctgctatggtcgagtcagatttggctctgagcatctggcactgaaaacaaagaagatttggtaaattataaaatcaagttctactcaatggagcattcactggcctcctattctaaaagaaagtttgaatctggaacttcctttgggcatcattggataacacaataatcttcttacatacaattttattaaaaacaaaaatttaaaaacccacaccagactttgtcaaggaatatacataattgcaattcaatgaaagtaacctggggagg

SEQ ID NO: 634349 - DNA, 551 bp, Homo sapiens
ggctctcactatgttgaccaggctggtcttaactcctagccttaagcagtcctcccatcgcagcttcccaaagtgttaggattacaggcatgagccactgcacttggcccaaataaagtcctttgagtaatttattttaaaatatatgctctgcctctttgaataaaatgaggaagaacaaaacaaagacatgcattaaaaggttaataaaagagaaataaataatcaagaccaaagaaagagagtttccataagataagtacaatgacttcataatggctgctatggtcgagtcagatttggctctgagcatctggcactgaaaacaaagaagatttggtaaattataaaatcaagttctactcaatggagcattcactggcctcctaytctaaaagaaagtttgaatctggaacttcctttgggcatcattggataacacaataatcttcttacatacaattttattaaaaacaaaaatttaaaaacccacaccagactttgtcaaggaatatacataattgcaattcaatgaaagtaacctggggagg

SEQ ID NO: 634350 - DNA, 592 bp, Homo sapiens
acagttatgttaatttgcgagtaaggaaactatgaacaacagaggtagagttaacatgagtagagaaagggtctaacaccaagtggcacaaatgcaattaaatcctggttcacgtgacccccccaattcacaactttacttttatcaacatcccaccattcaggaaacttttagcgcactaaattcctttattttgtgaaaaaaattatcatgtgaaatgactgctatataggacagtcaattaaatttgagtgtcaaaaactgactttctttaaacatagcaaaaccctccaaaggtaagcaatctaaaagtatttttttcttgatcagtaagtctaaactctgctattaacaccatctatcaggttctcatgatgacattgcaagcaatgccagaactagagcccaggtggctatgactcaacaactgggtatcattggcagaaagaaagaaatctgaggtttcaaaatggaatgagaaaggaaatgaaggccactttccccttamtccacaatgaatgaagtattgatactgggactcacctggtgcaagaatgaagaaacagctggattttatttgttccttttgcct

SEQ ID NO: 634351 - DNA, 604 bp, Homo sapiens
ctggactgcctttgagttgaatgctgatcttgagataacccctcgtctgcatttttaccacccagatttcaactggttaaactttgtgcctgtttcacctgctagaaaattattgagcaataatgattttagataacaattttaaaagaatctgtatatctctaattccaaaaatttaaaaactattcatacccatggggaagatgtttcccttacaattatgtattctttgtaacgtcacccttgtagaacaaaattcctttctcttttttttgagacagggtcttgctctgtcacccaggatggaatgcagtggagtgatctcagctcactgcaacctttgtctcctgggttcaagtgattctcatgcctcagcctccaaagtagctgggattacaggatcatgccaccacacatggctaatttttgtatttttagtagagagagattttcaccatgttggccaggctgatctcaaactcctggcctcaagcgacatcccgcctyggcttcccaaagtgtggggattgcaggtgtgagccaccatgcccagcccaaaatttctttgtagtgtcaccttaaatatctctatggatgaaacaga

SEQ ID NO: 634352 - DNA, 587 bp, Homo sapiens
tccaaaaattctgcaggattgttttattgttgttatcatcacctgcacatcttccctcaggggagtatttcttagaaagcaattcttatactgataaccagcaaataattaagttgtttagagcttgaaaaatttgttctctgactaattaaactttatgtatactagctgttcactgaacattattctaacattgcactatgaatattgccacgttatggaccttaggttccattagattggcattagtaccactcaggaacattttatgatgtgtgctgataaactcccaagacaaatgaacctgagacatgtgtgagcatcccataaaacaaaccctgttggactttgattttgaatgttttgtgatcacaactaaaatggtaacataacacccttttgcccagaacataaaacttgacaaacagcctacgggaatgccatccatttatcggcatgtgatgcgctggaaaaaygtaactataatatatacagtgtggcagttgaacataagtaggttttatagctgcagctgtgacacatccttcagctgaaatcctgggacaattctgagaacttcaaatgtc

SEQ ID NO: 634353 - DNA, 539 bp, Homo sapiens
acatttttaagctgccagattttattgggctaaacatgattagcagacattcctcgctgaacacacccaaaggttaaacacaagccagaaaccaacaccagatgcaggtcaggaattcctgaatcaaattcttcagtgaaggaaaaatgataaaatctcaggtcttctcattcttgacaagtactcctacattttcttgactagtgtttgttcttaggggcaatttttgcgtaagaggaatttcctataaagtgggaatttcactgctttatattttttactactccaaaggaatttcacaaaacatgtcatttccttccacarttgatgggtaagattcctacatcattcacacctgtgcctgtgtttccctgtgcatctggtacagagatgggcataaggagcacctgtcttggagacatagcatgggggaattgggtcatctcagctgttttcaactggggttttgccagttcctctttgtcttttagttccctttgttgcccctgtttttcatatggttatgctgctgttgtttc

SEQ ID NO: 634354 - DNA, 582 bp, Homo sapiens
ctgttttgaaatgtacaacagattaatgatagctatagtcaccctactgatttagcaaacaccaagtcttgacaatcatattgtctatgaataaagatacttygatatctttcttttcagtctctgctttttatctctttttttctctcttatgccactggctaggatctccagtacaatgttgaatagaagtggtgagagcaggagtccctgtcttattcctgatcttaggagtaaagcaatcagtctttcactattaattattacggtgatgcctgtaggtgtttcataattgccctttaatgaggtagaggggttttccctctattcctaatttactgagagtctttgtcatgaatgggattgaatattgaatgtaggccaggcgtgatggctcatgcctgtaattccagcactttgggaggccgaggtgggtggatcacttgaggtcaggagttcgagaccagcctgggcaacatggtgaaaccctgtctctactaaaaatacaaaatttagctgggtgtggtggtacacgcctgcagtcccagctactcagaaggctgaggcacgagaatcacttga

SEQ ID NO: 634355 - DNA, 615 bp, Homo sapiens
attattttggagctttaaagtttaatgtctgccctgctgggttttggacttgtctgggttttgaacttgctcctttcttttggctgatttctccctttttgaatgggaatgtttatccagtgcctgtaccacaactgtatcttggaaataacatgttttgattttacgggctcataggtgaaaggaayttgccttgagtctcaggtaagattttggattttggacttttaagttgatacttggaatgagttaagactttgggagactattggaaagggaatattgtattttgtgatgtgaggacatgagatgtggggtgggaggcaggaatggaattacatggtttgggtgtgtgtcctctacaaatctcatgttgaaatgtgaaccccagtgatggaggtggagcatagtgggtggtattggatcacgggggcagatccgtcatgaatgccttagtgccatccccttagtgatgagtgatttcatgctcagttagttcatgcaaaaactgctggtttaaagagcctgggaccttccccttctctcttttcctccctgtcttgccatgtgatatgcttactctctcttttccttttgtcatgattggaagcttcc

SEQ ID NO: 634356 - DNA, 615 bp, Homo sapiens
attattttggagctttaaagtttaatgtctgccctgctgggttttggacttgtctgggttttgaacttgctcctttcttttggctgatttctccctttttgaatgggaatgtttatccagtgcctgtaccacaactgtatcttggaaataacatgttttgattttacgggctcataggtgaaaggaacttgccttgagtctcaggtaagattttggattttggacttttaagttgatacttggaatgagttaagactttgggagactattggaaagggaatattktattttgtgatgtgaggacatgagatgtggggtgggaggcaggaatggaattacatggtttgggtgtgtgtcctctacaaatctcatgttgaaatgtgaaccccagtgatggaggtggagcatagtgggtggtattggatcacgggggcagatccgtcatgaatgccttagtgccatccccttagtgatgagtgatttcatgctcagttagttcatgcaaaaactgctggtttaaagagcctgggaccttccccttctctcttttcctccctgtcttgccatgtgatatgcttactctctcttttccttttgtcatgattggaagcttcc

SEQ ID NO: 634357 - DNA, 629 bp, Homo sapiens
gcggcattcagcgtatgtgaagaaatcccccaatatactaactgaggagtcagaactcagccaaaacagcattgtttttgtaacaatgggtgctttaaaaaataccacttctgaggactggggacaagatggccaactagatgcagccaggaagtgctgctcccactgagagagaccaaattattgagtaaaccaccataatttgagcagatctttggagaaagatgttgagagtggatgagacggcaacactgaaggtgaggctaaaaaggaaggaagctgggatctctgcacaargtacctggatgccagggccagttcccgaccccaaatgtaacctgggaaaggggtgagtgagggaactgaaggatgactcactctcatcacagacctttgggatcctagctataggtgaccctgcctccccccatggatgtgtgagctggcaggggtttctcccaggaagcaggcagagacaggcctttgggtggcatggagcctggaagctcttgcacactgggcaactccaggggagagtggccataaatgctcatcccccagggctccccactcccatcagggaggcatggaccccagctgacctcagagccgggaaagagtggggccag

SEQ ID NO: 634358 - DNA, 595 bp, Homo sapiens
cagttgaattccattagatgtctattttacttagccatcacagggtaaaagaccagaacacccgacggataccaaccacttctgttaacaaacctctgtctctctcggctttgcgtgtccccctcctccttcatagcctaaattctgcatcaaagtgttttcagggatattatcttcttcaytgggtttagtcacatgaaactaaggagaaacaggtaatcctcttccacattcttggaggcctaattattctcagacatgtcttagatctaatcagcaaaactatgtgcattcacatgttcacacacagacacacacagaagaaatcccttcaaaaagatgctaaggcaaacatacacttttgtacctggtattttcatttaaacctttcaaaactatttttaagtgttagagctgttaagaaaggtaacgtgaatttaaacattattttgtgttgatatatatgttattgagttgatagtcttagtttcaagtataaaaatgaggaacttaccacgattttaaagtaaacttcatggcatgaaatagatggatgcaatatttgttttcacaacaacttcagttatgcataata

SEQ ID NO: 634359 - DNA, 469 bp, Homo sapiens
tcctatacaaagacactgagcagtagagtagtcagaaccaggctgttcgtagaaactcatggctggagctcatgagaaagaaggaagacgtattcagtacacaaaggtaggtcagatgaccaaaggaatatagacagtggacagatggctcatgtgggaaaactctcaggaggacctaggcagaattaggcayaggcagaattgagaaccttcttgaaaagcatgtcattcaaaagaggccacgttgccgaaagctgagactcatttaatgatcagcattgtggcagtctgcaagagtgagatgtccagttgaatgttatctggtaaggtgattttgtgacaactcacattttcccgtctttattcgtctatcttcattctttaaagagcaattgatgtggaatctggcacccagagtggcttttcagaaaatagcatcctttgcagaatggtgcttaaatatggctgt

SEQ ID NO: 634360 - DNA, 614 bp, Homo sapiens
catgttggtttattgtttcaacttttgaacacatttggaatttaccataatgaaatttttttaatcaaaaccaaaatattatacgtaaagcattccaaaaataaactaccaataattgttaactaaatgataacagagcctagaatagtcatagrataatatgatggattttcaggatgggagtcttgaagtgataaaccatacggtgcacaaaatttatgcttctaaggaagacagtgaaatctttgtttatgttaactgtgtgcctttttgaaaaagtcacttagaaaaatcctcagaaagcaactagagaattgaatacgccaaaattcatgacaagctatgaagctggacttttaccaagttacacatgcctaaagaagatacacaatcttcactgtagtgaaactgacactggaaaatgaagctagtcactcaaatagataaaaaaaaagtgacatcttgtgttacatctgcgccatcaaacattttaaaacatagatacatttatttgtacagtttccttttaaattaatagagaaaacacaatggaacttaaatatgaacccctgacataaatgtgttctaagtcaagagaagctattgcatttctg

SEQ ID NO: 634361 - DNA, 614 bp, Homo sapiens
catgttggtttattgtttcaacttttgaacacatttggaatttaccataatgaaatttttttaatcaaaaccaaaatattatacgtaaagcattccaaaaataaactaccaataattgttaactaaatgataacagagcctagaatagtcataggataatatgatggattttcaggatgggagtcttgaagtgataaaccatacrgtgcacaaaatttatgcttctaaggaagacagtgaaatctttgtttatgttaactgtgtgcctttttgaaaaagtcacttagaaaaatcctcagaaagcaactagagaattgaatacgccaaaattcatgacaagctatgaagctggacttttaccaagttacacatgcctaaagaagatacacaatcttcactgtagtgaaactgacactggaaaatgaagctagtcactcaaatagataaaaaaaaagtgacatcttgtgttacatctgcgccatcaaacattttaaaacatagatacatttatttgtacagtttccttttaaattaatagagaaaacacaatggaacttaaatatgaacccctgacataaatgtgttctaagtcaagagaagctattgcatttctg

SEQ ID NO: 634362 - DNA, 471 bp, Homo sapiens
gtgtgcatgatcatagctatttctttaaactctatctagcaagagtcatgaatgacaagactgtcaaatgttgggcatagaagtgactactggacgcaaggtatgcaaatgggctaaactctggggccaggatgactcctgaagtttaatgacagcatcatgtgaactgcttactcccaggtcctagacatcgtgtccaagtgggggttgtaccagttttagaaaaactctaaagaaatgagctatctrctttataccactgcgtctgtctttgcatatattcttaggagattagtaaaatctctatgactattgaagtgcaggtgagcttgtggtataggttaaaagcaacaattatagtaacatggagatgggaatggaaatgatcttaactgtgtggtgttgactcattaaatcagcttttccccaggccccacacttgactaggtcctagaaggtcaaatgcatttg

SEQ ID NO: 634363 - DNA, 604 bp, Homo sapiens
tcaccttgccctaaaataatttaatgactggcagaaacttgttttggcctaagccatttaaaaaactttcaaaagtacaaacaacgtatttgctatagcatatttattccataattttggttttccttgtcagaagaatatatagtttctccatatttatctgaaagggatagatatttaaccttgttgaggggcacttaaatgtagttccatgatttatttttgtgtttatgtctttaattttaagatcagttcattacgatcattgattgattyctgccagtggctttggaaagcacatgcctattaagtcaataaaggaacaatgctaggatgacctgaatataaatatttaattagttcaagtataatcttggtgcggcttgctttcttagatctggatatgtctgtgtttacataaccatgtaaaagtggccaaaatatgcttttcgaagttataggcagctggttatgttccctagtggcactcagaattcccagctgttctggtactaagccaagtgtaaccctgaatttgattagaaacattaatattagaaaaactgactacgtgattatgtccaacactaggcattaccacaga

SEQ ID NO: 634364 - DNA, 555 bp, Homo sapiens
gccaacagggcgaaagcccatcactactaaaaataaaaaattagccgggcgtggtggcacgcacctgtaatcccaggtactcaggaggctgaggcaggagaatcgcttgaactcaggaggtggaggctgcagtgagccaagattgcgcccctgcactccagcctgagtgacagagcgagactctgtatcagaaaataaacagataaaaattaaaacagcccagttgaggggtgatgtgacttagatctggacattatagataaataaacttggtgagaagtaattgaattctggctaggtggaagtttgaataaagtgtgcttggaamtaaaaatatatgatttcctgaaacatacatatataggttcgtttatacatacatcagtggatgggctgaatttaaaaactagacaattcatcacactactcagaatggaaaaaaaaaccggagataaaattattaatctagaaggcaaagttaaggaaacatcccgttatagtacccaaagacaaaaagattaaaatttaaaaaaactttaaaagccataaaggata

SEQ ID NO: 634365 - DNA, 617 bp, Homo sapiens
aagcttcttggacagagaactctagagagaaagcaaggtctcttataaaggaatgagaacagactagcatcaaacttctaactggaaaccctaggtattatacattaaaaaaaattcaaagttctgagggaaaaaaatattttgattctagaatatcttcattcagtcaaaataatcaaatgtgaaggcaaaacaaaacactttcagacatgaaaattatcatcttgggcacatggatgaaaatatcgctctacagtgcttgttaggaacaatgaaaggtctgagagtttaccctgcttgcagctcagttagtctaccaatttcagagatgctggcagaagaaatgagactcccagtcagagacaaacaacttcattattcaccrcacagcaggcagcatgagcttcctgtttgcattggtacctttgtgcctccataggggagacgcagggctgcccggggctggtgctgtgtttacagtgggtctgcattcacagccaaggatccctgagtttaggaaacccccaatcttaagaagtctgccagtaaacccagccaacttttcctatggaggaagaagctatctttattatcctggtcaggaatcaaacttgctc

SEQ ID NO: 634366 - DNA, 617 bp, Homo sapiens
aagcttcttggacagagaactctagagagaaagcaaggtctcttataaaggaatgagaacagactagcatcaaacttctaactggaaaccctaggtattatacattaaaaaaaattcaaagttctgagggaaaaaaatattttgattctagaatatcttcattcagtcaaaataatcaaatgtgaaggcaaaacaaaacactttcagacatgaaaattatcatcttgggcacatggatgaaaatatcgctctacagtgcttgttaggaacaatgaaaggtctgagagtttaccctgcttgcagctcagttagtctaccaatttcagagatgctggcagaagaaatgagactcccagtcagagacaaacaacttcattattcaccgcacagcaggcagcatgagcttccygtttgcattggtacctttgtgcctccataggggagacgcagggctgcccggggctggtgctgtgtttacagtgggtctgcattcacagccaaggatccctgagtttaggaaacccccaatcttaagaagtctgccagtaaacccagccaacttttcctatggaggaagaagctatctttattatcctggtcaggaatcaaacttgctc

SEQ ID NO: 634367 - DNA, 617 bp, Homo sapiens
aagcttcttggacagagaactctagagagaaagcaaggtctcttataaaggaatgagaacagactagcatcaaacttctaactggaaaccctaggtattatacattaaaaaaaattcaaagttctgagggaaaaaaatattttgattctagaatatcttcattcagtcaaaataatcaaatgtgaaggcaaaacaaaacactttcagacatgaaaattatcatcttgggcacatggatgaaaatatcgctctacagtgcttgttaggaacaatgaaaggtctgagagtttaccctgcttgcagctcagttagtctaccaatttcagagatgctggcagaagaaatgagactcccagtcagagacaaacaacttcattattcaccgcacagcaggcagcatgagcttcctgtttgcattggtacctttgtgcctccataggggagacgcagggctgcccggggctggtgctgtgtttacagtgggtctgcattcacagccaaggatccctgagtttaggaaacccccaatcttaagaagtctgccagtaaacccagccaacttttcctatggaggaagaagctrtctttattatcctggtcaggaatcaaacttgctc

SEQ ID NO: 634368 - DNA, 478 bp, Homo sapiens
accatattttactactttaaaagcacaatatgctggaaaatgggattagaaaaacctagcattrtaacttctttcattttcatattctgtaaattggcagtaataactcatagcttttgtgggaggattacagagaggatgaaaataaaatatctggtgcacagaaggtactcaattcatcttagtttggtttgtttttctgttttttaaataaagataccagtacttctataggacaaatttgaggtggtacaaaagaaaggtggaattttagtcatgctggatgtgtacttcgatcagcagtgttccctgctgaaaacaacactgttttaacagggtcttgtcagctctgttgagactttcttcagtgatgtgtaatatcaatagaattgccccagctgggctcagtggctcatccctgtagtcccagctacttgggaagctaaggtgggaggatcacttgagcccaggagttcga

SEQ ID NO: 634369 - DNA, 494 bp, Homo sapiens
ttcatatatccgtctggaaagatagacatcaggtaccttgttacatggtgcttttcttgatggctatgtgtttagtaacatcaaaagcatgtttactaagcaggggaaaggagaggctggattgatgttggagtcagacatcgctctccaatctcctcagaagggtgcggtggtttaagtgtggctcagagagtcactggaatttggaaactcccgaattaaagtaataagcatgttgggattcaaatttaggccgaagagagaggttygtctgagaaaactcaacaccctatgatatctacaattctgctctttgatatcatttcattttgcagtttcataaggagtctgtgaaaattcagtctcaagtcaaataaaaagattttaaaaacaagactatatcttgaaactgtttgcaagtgttaccagaactggtggttctgaatactggagttgaatttctcgcagagtttctattgttaatttccactgtt

SEQ ID NO: 634370 - DNA, 486 bp, Homo sapiens
tccgtctggaaagatagacatcaggtaccttgttacatggtgcttttcttgatggctatgtgtttagtaacatcaaaagcatgtttactaagcaggggaaaggagaggctggattgatgttggagtcagacatcgctctccaatctcctcagaagggtgcggtggtttaagtgtggctcagagagtcactggaatttggaaactcccgaattaaagtaataagcatgttgggattcaaatttaggccgaagagagaggtttgtctgagaaaactcaacaccctatgatatctacaattctgctctttgatatcatttcattttgcagtttcataaggagtctgtgaaaattcagtctcaagtcaaataaaaagattttaaaaacaagactatatcttgaaactgtttgcaagtgttaccagaactggtggttctgaayactggagttgaatttctcgcagagtttctattgttaatttccactgtt

SEQ ID NO: 634371 - DNA, 618 bp, Homo sapiens
actgtgcctccaatgtgtgctttcccacgaycacttcatagcattgattacactctagtataatcgtgtatgtacctgccctgccactatactgtaagctctggctaggacattgtccatcatatagtaagcactcaataaatagttggcgaatcatctaatggagactgtagcccactgtggggaaaaagacccacaatcatacaaagtcaggatccttagctgtacgaaagaaaagctgctgactcttgctgatatagcagaaaaggattatattgaagatattgggtagttctcaggtgtgttggaaggtgtagagattcaggactggggccattcctctgggaataatgcacaaaaccactgcagaactagcccagcaagaaaactatcaccattgcagctctctgtcaataccactattacatcagaaactccatgttgcaaccactgagaaactaacgtcactgctagtgctgccaactaaggcagccgcctggctattagggcaattcataccagcaaggcaaggagctccataatgagccactttcctctggttgcttatacctgaatttaagtttgatatggatgagcctgactggcaaagcctaggtt

SEQ ID NO: 634372 - DNA, 541 bp, Homo sapiens
gatcttcccacctcagcctcctgagtagctgggaccacagacacatgccacaacacccaacgaatttytgtattttctgtagagacggggtcttattatgttgcccaggttggtcttgaactcctgagctcaagcaatcctctcacctagcctcccaaagtgctaggattacaagcatgggctaccatgcccgacctatatatttttttctagcagttacaatctttcatatttaagtccttacttatttttacatctctcccttaggtaggaatctaatttttatttttccataaaaactaattttttctccaaaatagaccaaattctcatgtgcctgtttctgggttctattctggtctattcgtatgttcctgtaccagtaccacattggtttacctactacggctgagtaatatgtttaaatatctggtggaaaggggctgtcccctctttttcttttttttttttttctgattgtcttaggcaggggttagggaattagggttcatgggcccaaccctattcactaactatttta

SEQ ID NO: 634373 - DNA, 375 bp, Homo sapiens
ttattttggccacactccaaccatgcttcagcctctcacaccacactgctcaccagcctcagccttgattgtcagccccagaagctgggccaggttttcagggttgggcttcagtatctcctctcttgccctgtcttgatctggttcatctcaagaacaagacacttgcaggatgcaaggagtttcacctcttcagtttcacctttcagawgctctggggtggctgtgtgcccccctgtgactctaaaatctgtatcttcagccctgccctcactacagaatagcaactcgtatgtatgagaattctactggacatccccttgagattcctacataaaaatcaagaatcagatactaaaaacgaacctattagct

SEQ ID NO: 634374 - DNA, 375 bp, Homo sapiens
ttattttggccacactccaaccatgcttcagcctctcacaccacactgctcaccagcctcagccttgattgtcagccccagaagctgggccaggttttcagggttgggcttcagtatctcctctcttgccctgtcttgatctggttcatctcaagaacaagacacttgcaggatgcaaggagtttcacctcttcagtttcacctttcagaagctctggggtggctgtgtgcccccctgtgactctmaaatctgtatcttcagccctgccctcactacagaatagcaactcgtatgtatgagaattctactggacatccccttgagattcctacataaaaatcaagaatcagatactaaaaacgaacctattagct

SEQ ID NO: 634375 - DNA, 189 bp, Homo sapiens
gtgcaatgttgtgcttatagttaacaagactgtacagttaaaaatggttaagatggtaaatttcatgttgtgwgttttttaccacaataacaattaaaataaaataatataaacgtttgtgcaagaaaagattgtattttctgtcaccgatgtgtacgtttaatgaatgacctgagctgcatgactcag

SEQ ID NO: 634376 - DNA, 561 bp, Homo sapiens
tcctcttccttctttgacagaatattaataggattaatcaggaaaatgctattgatgtagtgtgacaccaaacacttagataaaatctttcatcttatatttatggacaagttgaagaactaaaccctggatatgtggattccagctggtcaagtgactatccccaaaggaatgcagagtaaatggattaatgccagtctagaatggggtatttattgtcatgcctcaggacttcatccttggctccacattttttatttggatggaaatatagaaagcatgcctacccatttatcagatgacacaaagttgggaagaacagtaaagggaccaagggaaaacttccccttcacctacagaaggtttacagaaaatcagtggacaaaaggcagattaataggagaaaaggcrtacacaattttattttaatgtgtgtaacacaggagaatcacaggacaatgattacccaataacccagtggggcacagatgcttatgtacccttcttcttaggggaaagagagatgcggaaatgtggatgattttaaggggaatggtaaat

SEQ ID NO: 634377 - DNA, 528 bp, Homo sapiens
caattaaagtcacccgctagcctcacagccaccatcccacgccaagacagtgagcatgctggccttcctccagcatggaaagaccctgagtttgcctctgaaactcagtctggttctcctccttcttccttcttcatttctacctgtggtatctcttccctccatcacatcaagtgagatacagagttcaggggcatttaaaagctcacakttttgaaccaaataactctaacgttaaaacccttagaggaggtactttttgagtaatgtttctgacttcatactctgttgcaaattttctgtctgtaaatataatttgaaactactgttatattaaaacaaaaggactatttctgagagatatttgaaataatttaggcaatgactttttggtgaggattaaaatgagataagttatataaaaagccaagcccagtgtgtattgtatattagaaacttaataaactgttgttttctttctcactcccctatgtgagtgtgtgtgtgtgtgtgtgtgtgtgtgtgtgt

SEQ ID NO: 634378 - DNA, 528 bp, Homo sapiens
caattaaagtcacccgctagcctcacagccaccatcccacgccaagacagtgagcatgctggccttcctccagcatggaaagaccctgagtttgcctctgaaactcagtctggttctcctccttcttccttcttcatttctacctgtggtatctcttccctccatcacatcaagtgagatacagagttcaggggcatttaaaagctcacagttttgaaccaaataactctaacgttaaaacccttagaggaggtactttttgagtaatgtttctgacttcatactctgttgcaaattttctgtctgtaaatataatttgaaactactgttatattaaaacaaaaggactatttctgagagatatttgaaataatttaggcaatgactttttggtgaggattaaaatgagataagttatataaaaagccaagcccagtgtgtattrtatattagaaacttaataaactgttgttttctttctcactcccctatgtgagtgtgtgtgtgtgtgtgtgtgtgtgtgtgtgt

SEQ ID NO: 634379 - DNA, 566 bp, Homo sapiens
ccctgggcatctccaaacaagggcctgactgtcattaccccaccacaaaacactcacaggtcagtgatgtaccaggttttcgcccagaagttattactggcagcaagttctatctagcactctattataaatttctactactctttccactctaaattatatggattacctgttggaagacttgtttgaagagtttaaggtacatttgatgggcaaagtcaggwttgagaaactcagataaaagacataaaagatggcacacagaaactttactgcttgctgttatgattatttatgtgtgttatttatctttaaaaaggtgaactttaatggaatcagtgtcaaactggaggaatatttctggttctatggcacagaactgacctccactagttattagtgttttaggataaatacatggaaagtgggtttatcaaatctgttgcctatacaaactaaaagggataactaatatgtctgatgtcaaaatgaggattcaaatgatttggtcagcaaatattactgaatacctatgctatgccagtccaccagcgaggtgataggta

SEQ ID NO: 634380 - DNA, 566 bp, Homo sapiens
ccctgggcatctccaaacaagggcctgactgtcattaccccaccacaaaacactcacaggtcagtgatgtaccaggttttcgcccagaagttattactggcagcaagttctatctagcactctattataaatttctactactctttccactctaaattatatggattacctgttggaagacttgtttgaagagtttaaggtacatttgatgggcaaagtcaggtttgagaaactcagataaaagacataaaagatggcacacagaaactttactgcttgctgttrtgattatttatgtgtgttatttatctttaaaaaggtgaactttaatggaatcagtgtcaaactggaggaatatttctggttctatggcacagaactgacctccactagttattagtgttttaggataaatacatggaaagtgggtttatcaaatctgttgcctatacaaactaaaagggataactaatatgtctgatgtcaaaatgaggattcaaatgatttggtcagcaaatattactgaatacctatgctatgccagtccaccagcgaggtgataggta

SEQ ID NO: 634381 - DNA, 469 bp, Homo sapiens
atctttaattatcacacctccttgttcccacccgtactaaagttatttataaaatcaattggtttgtyttcctgacttagtataacactacaaaccaaatataatctctcttcaataaattgggatcttgcaatgtttcagtattacaattacacagtgtttgaactgggtaagtctgttctgagtctggtttttcaaatcatttaaataaatccataataggatcttgtttgcttataaattgttccttaaccctattggctttgtttgcttctgtctgcctcagcttccccttgatgattttcattctctctctcactctcttttttgagacagggtcttgctctgtcttccaggttggagtgcagtggcacgatcatagctcactgcaacctccaatgcctgggctcaagtgatcctctcacctcatccttctgaggagctggaatgacaggcatgcaccaccatg

SEQ ID NO: 634382 - DNA, 468 bp, Homo sapiens
tctttaattatcacacctccttgttcccacccgtactaaagttatttataaaatcaattggtttgttttcctgacttagtataacactacaaaccaaatataatctctcttcaataaattgggatcttgcaatgtttcagtattacaattacacagtgtttgaactgggtaagtctgttctgagtctggtttttcaaatcatttaaataaatccataataggatcttgtttgcttataaattgttccttaaccctattggctttgtttgcttctgtctgcctcagcttccccttgatgattttcattctctctctcactctcttttttgagacagggtcttgctctgtcttccaggttggagtgcagtgrcacgatcatagctcactgcaacctccaatgcctgggctcaagtgatcctctcacctcatccttctgaggagctggaatgacaggcatgcaccaccatg

SEQ ID NO: 634383 - DNA, 554 bp, Homo sapiens
tctttggacttgagctgcagaatcaactcttttcttggccttcagtctgccagtccaacctacggatttcagacctgtcagccctcgcaatcgcatgagccaattccttaaaataaatctctctctctctctctccatacgtacacacacacctccgattggttctgtttctctagagaaccctggctactacaggcttgttctgctatttctgccctaaaggaaagtcaatgcagaggaaaacatccatgcgggcattagggtagctgcctggagcgcagtggtggcagctccacagcataaygtgggtgacacagacactggccttaggaccacaggggttgtctggggagcgagaagacccagttactctttggaggtaaaaacaaagacttgaacttaaaagcatttgcagtgttttaaaattgtgaattaatctggcaacacgcttctcatttcaatccaactattagtaaaaactgccaaatcccaaacaccaactctagcattggcagcccttttctcactcttggaaatactataaggctttaaaa

SEQ ID NO: 634384 - DNA, 332 bp, Homo sapiens
ttatcttttttcaaatcttaaaaattttgaattctgaaatacacctggctccaaggcctttaggatactaaaaaagctaaatgaagaagtaacttccacttaaaagtacatgaagttttgaaacaaaaactggcagaaaagacaagaaaaaataaatatgataaagagccaattgaaaagttttaaaagtataaattaaactgaatcaataagctggataatttcyagaccagagatagtgaaataaaatatttccgtattgtaaaagagccttgaggtcctgctgactagctctgtgctatagctctgggttaaatcagaggttagaacct

SEQ ID NO: 634385 - DNA, 617 bp, Homo sapiens
tttactgtctctccttggttgtttataaattcacaaattaacaaagataataaattgtcaactgatgaaatgttctgtggaaatgctggttgccttcagcagtacagaacactgaatgtggatcactttctactcccacacccgagtaacgctcaactggcacggtataaaaagcaatgccttgtgatcttggtgattcacagaatggaactggcctactgcctgtcccaagaaacgagaggaagaacatgttccactgagtgtgccaaacaaagcccacaacgtaaattcagctaagcagctcttcaggaaagagcagagctgcaggcttctgggaggtgaatgattgacagcccctagccgtcctgacagcagcacatatctgcagarggaagaggggagggcaaagagctcatacacagaccacaaagctttttctctcctcagacagaaatgtataggaggggaaaagtaagagattgtggctgaggggactcagtaggtttaaattttaaaagggttactgttctactagtaagtttgctgagtttgggaccatgtctcctctctcctcatgactttatagtctcacagataatagaatagtaaaggttgat

SEQ ID NO: 634386 - DNA, 595 bp, Homo sapiens
ttctattaggtgtttgcagacaaagcctttcctgaacaaagagttctctgttgtaggcaatctgtttggtgggaataaacctgctttaggtttaacacagaagaaagcagaaagagtgtcatggagaagcagtggctcctgtagcctcttgcttctctttccacccccaagaactttactgaaatccatatctgcttgtcttctaggttattcttccttggttctacacaatctccagacagtgtagacaataaccaggtgaagttgctagttcttatgatgtgaggcaatgagtgctaaagtctatacttctgactcatgctggaaaatcccatacaagctttggaagggtgaagccacatactcatgaaggcttcgcatttgttctgataattaagagtctttaggagaccttttttatcttttattttttttgtccaagagaagctagctgaaaggatacaaaagatacttcaagttgattcctatgtcatttgagrgtgaatgtcaccacagtttccttaggttggggctgaattgttcctgtgtctaaaaccaccaatgattgtgatattttatggtcgctgtggattgt

SEQ ID NO: 634387 - DNA, 560 bp, Homo sapiens
agaaggactccttctgccttaatacaagcaacccatattcctggtgtgattgaaaatgggtctgcaaaaccatttccagggacagtgacaaaggctggctccttactcggcaggaagatgatctctttgctttgagcagcacctatcagaaatacaaagaactgcttaaggcatttttctatcagtcagtgttaygattttagatattcagttttgaacattcagtttacatctcaaaaagtttaagatgatatgtactgatcagatttactgatcttatctttaaaaattgtactatgcaaatacatatgtataaaataggctagaaagatactgataagacatcagcaatggctatctacactgggattatgaataattgtttaacttattaaataagtatattaatacttgtaaacagtttaggaaagtgccttgcatatagtaagtattcaatatattacattagctactaaattattttttcctttcttgtttatatgtgagttttttttaaagccagggtcccactatgttgcccaggctggagtgcagtggtt

SEQ ID NO: 634388 - DNA, 562 bp, Homo sapiens
cataaagcatagaaaaaaatggttaaaagacatgctagccaaacagtgactttattctattcaagtgtcactactggacttgtaatgtacacacatacacacacatacacactcacactcagtcaacgagcaccgagtaacttgtgaaagatggaaataggcaaacctaacaatgaattaaaatcacttacaatcaaaattacagtgaaaacgcactccctcagcaactgagatcctcttttgacctttttgtaatcaggcagacagagtggagtattagatgggctartttaagaaagccacagtgacggagcaaccaccactggctaggaaaaataaaaaggcagaagagaaggaaaggagagggtattatttcacaccaccaaagagagactgcttcagagtccgcttcacatacataaagtctaaatggtcacagaaaccaacggtggccaaggaaaggttaaagactccaaatacaatagtggtaacatctgggtgtaactaaaatatgcctattaagttgtatgatgttttatctcaattccttatgcaaagaaat

SEQ ID NO: 634389 - DNA, 272 bp, Homo sapiens
ctgaccattcactccatgtcctcaccaccatcatgctgcttgtgggacattgagaggtctgtgcacctgctggagttgtcagccatggctactgtacacagcagaactcacaataatttgggaaatgttcaccatctgctttcaggagaattgtttttggagaaaatttatttttagaggttattttgtgactgatagatattatccagttctctcagttaaaaaagaaaccmatggcctagatttcctagaatagttgtggattaaataaa

SEQ ID NO: 634390 - DNA, 599 bp, Homo sapiens
gtggcagttgcagttggtgctgatctaaatttaggacatcttgatatgtggcctacaaaaagtttagattaaatcatttccaatattttgcagaaactaaatgaaagttgaaagcatgtaacatcttttcaggatcctgcctcctctgaccaaatgttgtctgtcttctctgcctccaaagtacttaaccgtattttgcttttgcctctcacaagttactgcctcatgttaaactttttttgaactttttttatctttgtagagacagggtctcactgtgttgcccaggttggagttgaactcctggcctcaagcaatcctcctgccttggcctccccaagcactggagttataggcacacaccaccatggccagctgaggaktttttaattttaatttttgtagagataggatctcactatgttgcccaggctggcctcaaactcctaggctcaagcaattctccctgctcagcctcccaaagctctgggattacaggcgtgagccacatgtccagccacatattaagcattttttatgtttctatctttcaattttgtttcataaatgtctttgaatccttaccacggggcaagatc

SEQ ID NO: 634391 - DNA, 629 bp, Homo sapiens
tggtctgtcctcaatcttccttcactttctcccacttctgcttcatattcctttaagttctgccctgtgggaggtgggaaggggtgtgaggaaacagacattggaagaataaaggaaacaatgactcacatggctaatggcttgtaatacaggcatctgtgttcctggctctagcaagtgttcagatactatggtaagctgttcatagggttttcctgcacaacaccctaccctcaacatgtggatttctgaagtgcagtttcctgacacaggtggcacattttcttgctgatccttttgaatctccttctagcccctgcccctctgagatcaatccgagacacggagccctcttgggtaggatctcatttarttgtcttaagcttagccattctctacccattgagccatgcactgggtccagaggaaattcacatatattcttcaagcccaacactgctcttctgcttcctgctgctcctccctgccatcttggagtgctctggcaaccctatgctgccagagtcttgccagtgggaagcaggctccattctttctgtcacatatacccccaaattcaagctctcccacaatcacttactgtatgcttcactggaatgccgagctgc

SEQ ID NO: 634392 - DNA, 367 bp, Homo sapiens
aaccatattataaacaaatatgatatcatccaagctactgtttcatttgtagatcamaggcagagtagatttaacataattcttaggggccctaggattttcagagtggtaaatgaacattgacatcaactaagtcaccagctgcattagcccctaccaagaaagtcagcctgttttgaagctttgaatccagacattgacttccctgtagcgtgaaagtcctatgtggcatcttattcattagaagcctgtttcatctgcattgaaaacctgttacttagtcaccttcatcaatgatcttagctaaatggtagataacttgtgtgcagtttctttatcagcactggctgctttaccttgcacttct

SEQ ID NO: 634393 - DNA, 458 bp, Homo sapiens
aaacatacctgctgattagaaaaatggtaaaaatgaaaatacctttgtacatcatcttaagagagcttatatataaactaaatgggcaggctccatcgtctacctttctttttcttttcttcrcatgtttatgtcttttttgttattagtcagacatttttagccctctgtatgctcattcttgtagttctatttctattgaaacttcctccaaaacttttctctgaattacccttgttgaaactgacctttcttccgtgtgaactcctacacttgcatctcctatttcaggatttggcatactttttctttaatgggctaagaaagtaaatatcttcagctttggggggcatatgatcccaatagcatcaacttaactctgctaactggaaggcaaaagtgtatcatcttactcgtctttataaactccacagcactctgcatagatatgaccatgt

SEQ ID NO: 634394 - DNA, 614 bp, Homo sapiens
ttccctttaaatggacagcagtgctatgttcctagtatcttgagctggaacttctgaaccttctgaacccaatctattggttatttatttttttacagtcattctgaaaaacaaaaacctctgtctctagttaatctgccaagatttaattaattagatttagtatgtattaacattactggaaaacacacccctttctcaagatttttactaccataaatgaaaagaaaggatgacagggaraagcagaaacaggaaatggactgcagtgtaagagatcaccagtgaaaggcctacttgtgcaactgtacatgacccaaactatatgacctctatctttcccacgtatacaaccctcgaaagcactgtaaagatcacttcaaggccagacatggtggctcgtgcttgtaatcccagcactcaaaaggccgaggcaggaggattgcttgaggccaggagtttgagaaccgcttgggcaacatagtcggacctcatctctacaaaaaaataaattaaaaattagctgggtatggtggtgcatgcctgtactcctagctaccagggaggctgaggcaggaggatcactcaagcccaggaggtcaaggctgcagtga

SEQ ID NO: 634395 - DNA, 614 bp, Homo sapiens
ttccctttaaatggacagcagtgctatgttcctagtatcttgagctggaacttctgaaccttctgaacccaatctattggttatttatttttttacagtcattctgaaaaacaaaaacctctgtctctagttaatctgccaagatttaattaattagatttagtatgtattaacattactggaaaacacacccctttctcaagatttttactaccataaatgaaaagaaaggatgacagggagaagcagaaacaggaaatggactgcagtgtaagagatcaccagtgaaaggcctacttgtgcaactgtacatgacccaaactatatgacctctatctttcccacgtatacaaccctcgaaagcactgtaaagatcacttcaaggccagacatggtggctcgtgcttgtaatcccagcactcaaaaggccgaggcaggaggattgcttgaggccaggagtttgagaacmgcttgggcaacatagtcggacctcatctctacaaaaaaataaattaaaaattagctgggtatggtggtgcatgcctgtactcctagctaccagggaggctgaggcaggaggatcactcaagcccaggaggtcaaggctgcagtga

SEQ ID NO: 634396 - DNA, 614 bp, Homo sapiens
ttccctttaaatggacagcagtgctatgttcctagtatcttgagctggaacttctgaaccttctgaacccaatctattggttatttatttttttacagtcattctgaaaaacaaaaacctctgtctctagttaatctgccaagatttaattaattagatttagtatgtattaacattactggaaaacacacccctttctcaagatttttactaccataaatgaaaagaaaggatgacagggagaagcagaaacaggaaatggactgcagtgtaagagatcaccagtgaaaggcctacttgtgcaactgtacatgacccaaactatatgacctctatctttcccacgtatacaaccctcgaaagcactgtaaagatcacttcaaggccagacatggtggctcgtgcttgtaatcccagcactcaaaaggccgaggcaggaggattgcttgaggccaggagtttgagaaccgcttgggcaacatagtcggacctcatctctacaaaaaaataaattaaaaattagctgggtatggtggtgcatgcctgtactcctagctaccrgggaggctgaggcaggaggatcactcaagcccaggaggtcaaggctgcagtga

SEQ ID NO: 634397 - DNA, 596 bp, Homo sapiens
ggccattggcgcgttaattatcagtgacacarccttatccacgcttcagggcaacttaaagtctgctattctgatctctttaggacatgcttgaggctcaggaattgaaatctaaaatctctaggatccagtttcctaaggtgaagtaagcagcactttatccatctcctaagcttgtcctgagagggagtaggatgtggaggcaccctcagatattctcctttgagacctgggtaaatctgccatccctttctctacttcttctcttactagcaacaatcattgcctttttttctctctttttggtgtacttagcatatatcctccatcagcgaagcattcacaaaaagccctgtgtgatatgttcctccagtagttttggttgtgaccgtacaaattctcctgatattagagaacataggtaactgactacctactggaatgaaagaggggaatgatgcagaccccaaattcatcctaacatctcaatcaattctcctacccatatatagacataaaagtggatataacttttcaaatgactctaaatcttcacagaacaataaacataatcattattcattaaataaaaatat

SEQ ID NO: 634398 - DNA, 596 bp, Homo sapiens
ggccattggcgcgttaattatcagtgacacaaccttatccacgcttcagggcaacttaaagtctgctattctgatctctttaggacatgcttgaggctcaggaattgaaatctaaaatctctaggatccagtttcctaaggtgaagtaagcagcactttatccatctcctaagcttgtcctgagagggagtaggatgtggaggcaccctcagatattctcctttgagacctgggtaaatctgccatccctttctctacttcttctcttactagcaacaatcattgcctttttttctctctttttggtgtacttagcatatatcctccatcagcgaagcattcacaaaaagccctgtgtgatatgttcctccagtagttttggttgtgaccgtacaaattctcctgatattagagaacataggtaactgactacctactggaatgaaagaggggaatgatgcagaccccaaatkcatcctaacatctcaatcaattctcctacccatatatagacataaaagtggatataacttttcaaatgactctaaatcttcacagaacaataaacataatcattattcattaaataaaaatat

SEQ ID NO: 634399 - DNA, 596 bp, Homo sapiens
ggccattggcgcgttaattatcagtgacacaaccttatccacgcttcagggcaacttaaagtctgctattctgatctctttaggacatgcttgaggctcaggaattgaaatctaaaatctctaggatccagtttcctaaggtgaagtaagcagcactttatccatctcctaagcttgtcctgagagggagtaggatgtggaggcaccctcagatattctcctttgagacctgggtaaatctgccatccctttctctacttcttctcttactagcaacaatcattgcctttttttctctctttttggtgtacttagcatatatcctccatcagcgaagcattcacaaaaagccctgtgtgatatgttcctccagtagttttggttgtgaccgtacaaattctcctgatattagagaacataggtaactgactacctactggaatgaaagaggggaatgatgcagaccccaaattcatcctaacatctcaatcaattctcctacccatatatagacataaaagtggatataacttttcaaatgactctaaatcttcacagaacaataaacatratcattattcattaaataaaaatat

SEQ ID NO: 634400 - DNA, 539 bp, Homo sapiens
cagtgtgggggaacccactcccatgattcagttatctcccacctggtccctcccacaacacatgggacttatgggagctaaaattcaagatgagatttgggtgaggacacagccaaaccatatcactggttaatttagaaaagactttagaawctaccattcccatacccttgttactagagaagtgctcatgttgggaatcactcagaccttgaccttgtctagcaacttttatttcataatggctctaagtgccttatctcatttgagtcctgtgtacctacaagcctgttatccaatgaacatcctcaaccccaccttggaaactttccctgggcacctaataaaactaaactgtgtccaggcactctttccaagcaggacaggctgtgcacaaacccagtttcccacaagatcagcaggtgctaagagctgacatgtgaggtccaagtgcttggggctgaggcagtctatttgtcccctggtgcaaggcctgttctaacaatctcctatttaaaaagaaagtaaggtcagcatgg

SEQ ID NO: 634401 - DNA, 441 bp, Homo sapiens
aatgcacacatttgtgtacttttctgcattaatattaaacttcaatagaaatgttacctttgaaacttagaaacaaaactaattgtctttcaagtaaaacgcttcagaagaaaacagttttattttaaagttttagtctactgattctaacctcattctattcatagaaaagaaatatgagtataaaaataaagaagagaataagtgtcacaccacagcagttgagtaataattgaaatgaaaaagtattaagttaggaggagtaattattgccgtgttaaaactcaagttttcaawctttaaaaacaatcatgctcatctgacaaagggctaatatccagaatctacaatgaactcaaacacatttacaagaaaaaaacaaacaaccccatcaaaaactgggcaaaggatatgaacagacacttctcaaaagaagacatt

SEQ ID NO: 634402 - DNA, 525 bp, Homo sapiens
cacaatactcatcaagtgacatacccttcagatgtattgggtggggctgggggcttggaaaactgcctttaactcaggttgctgcaatttccatctctttccttttcatgagaattttatacttgtccatgaggatgtaggaaggaggacagggaggaaaaaaacaggcaaaaggaaggctagtttagcccagtattttccagagactgtgcaaataaatatcgtctaaaaataagaaaaaattatattatgttagcataatggtatatgtatataattcatagagaatgaaacgtacatatgtttagaagcaatgctcaatttgtatttattttctttttttacttaggagagtacatgaytaaaaatgtctggagataaccagtccatggtttttactggttagtatgtttaattagtcccttaggaagttaccaaaacagtgagtccaccttatagtcagtaattattttatgaatttttaatatgtaaatagttctgtgctaaacttgcaatagaaacaaa

SEQ ID NO: 634403 - DNA, 604 bp, Homo sapiens
acatactttttagtgctgttattggtcattttaagctcagtgtgggtgaaatgatatctgataacaaataagaagtttgtgtgtgtcctttcagctctccgaaaaggttataatgtcatgagtatactctgtgcaagaaggaaattctcagtatattcaaataaaggacaattttactgtgatacatcatgcagttaggcttctgtgcaggctagaagctcccagaggaaagcagtttccgagcaactaccactgactgggaagggcactttgaccctgaggggtatagcagaagagtgtacacattttcattatrcagcttcataaacagggtgtctttcctataggtatgtggtaatcagttgtgagctgtgtcctcccaatcttgttactaataaaaactggtatacttttaaaattaactttgttgacttatatttgcctacagtaaaatttactaattttataagtgcaattcgatgagttttgacaaatgtgtacagtcttgtaatctctaccataaccaagatttagactatttccatcaccctaaaatgttcccctttgccattttataatcaatctcctccattccctctactct

SEQ ID NO: 634404 - DNA, 527 bp, Homo sapiens
ccaaaggtccattttctatgaaagaaacaaagtgataatttaataagttaaacctaatcatttggttcactgatttcctttgcacttaaataaaattccaacttttcccatggtttataagcccatgtatgatttgattccacctacctctccaggctccttttttaatgtttcacctttattaccaggttccagayatactagctttctttcaggttattgcacaaagcaagctttttcatggcttaagacctttgcacatgctgctccctgtaattaaaatgcccctcctgctccctttacccctcaacctttcatgcatggttcctttcatcatctattcttggcttaaagtattatctcctcagatgactttttttggtgattatatctaaactagattttcctcttgtattctctttaaccacacacagttgcttctttcaaagcacttactacattttataactattaaattgcttgtatgattgcttcctgtctgtctctccaactgttgccttactagg

SEQ ID NO: 634405 - DNA, 527 bp, Homo sapiens
ccaaaggtccattttctatgaaagaaacaaagtgataatttaataagttaaacctaatcatttggttcactgatttcctttgcacttaaataaaattccaacttttcccatggtttataagcccatgtatgatttgattccacctacctctccaggctccttttttaatgtttcacctttattaccaggttccagacatactagctttctttcaggttattgcacaaagcaagctttttcatggcttaagacctttgcacatgctgctccctgtaattaaaatgcccctcctgctccctttacccctcaacctttcatgcatggttcctttcatcatctattcttggcttaaagtrttatctcctcagatgactttttttggtgattatatctaaactagattttcctcttgtattctctttaaccacacacagttgcttctttcaaagcacttactacattttataactattaaattgcttgtatgattgcttcctgtctgtctctccaactgttgccttactagg

SEQ ID NO: 634406 - DNA, 461 bp, Homo sapiens
tgggagagtgaatttcaaaaggtctgtctctggtatcctgccttcccagttatgaagatatgcctttgaaaacttcctcatcttagcagtgccttctagtgctatatcccattgaagttaactattccaggccttattatttttctgatttaamctttaggggattcagcatttagtgctcacctttttgttgttcatacactttttatgtgcaatttcattaaaaggtgaattccattgatgacttacctagcaagcttattgaggaaaatcctagactgttgatcccaactatgttgagtgatgtggaaacaatgagggtttctttaggtttgatcaacatggggcaggctgggagaaagctcagtggtcatatttctggtttctaagaatttgagtttttgagtgtgcaagttatcccagggaacatcttaaattgttttttggggagcttggacctc

SEQ ID NO: 634407 - DNA, 614 bp, Homo sapiens
tcctcccccagccccacaccgggatctctgcaaataaaacgtggcctgctcaggctgctgtttyaggtgaccagtgctccaaatgcctggagatctgcctgggcatggagtggaaagggctcccctgttccaagatctctgcacagtatgggtggggtgactttggctgctgaaccaggcaagcaggtgttctgaatgcctggggctctccctgggtataaagcagagagggtcctcttgtaccaggatctctgcaaaggaagggtggggcagtttaggctactgatccaggtgagtgggtgctccaaatgtctagaatctgcctcagcatgaagtggagacagcctcactgtaccatgatctatgcacaggaagagtgaggaagctcatgctgctgatccaggtcagggggtgacccggatacctggagatatgcctaggtgtgaagcagagaggaccccactgtgccacaatcttagggtagcaggctggggcacccagcaatggcacacacagaccagttccatgatgccaagctgatcctggctgcaagtcccatcatccaggagaaaatgcagctgtagtagctctcctatcaccccaggcctgcaaca

SEQ ID NO: 634408 - DNA, 614 bp, Homo sapiens
tcctcccccagccccacaccgggatctctgcaaataaaacgtggcctgctcaggctgctgttttaggtgaccagtgctccaaatgcctggagatctgcctgggcatggagtggaaagggctcccctgttccaagatctctgcacagtatgggtggggtgactttggytgctgaaccaggcaagcaggtgttctgaatgcctggggctctccctgggtataaagcagagagggtcctcttgtaccaggatctctgcaaaggaagggtggggcagtttaggctactgatccaggtgagtgggtgctccaaatgtctagaatctgcctcagcatgaagtggagacagcctcactgtaccatgatctatgcacaggaagagtgaggaagctcatgctgctgatccaggtcagggggtgacccggatacctggagatatgcctaggtgtgaagcagagaggaccccactgtgccacaatcttagggtagcaggctggggcacccagcaatggcacacacagaccagttccatgatgccaagctgatcctggctgcaagtcccatcatccaggagaaaatgcagctgtagtagctctcctatcaccccaggcctgcaaca

SEQ ID NO: 634409 - DNA, 614 bp, Homo sapiens
tcctcccccagccccacaccgggatctctgcaaataaaacgtggcctgctcaggctgctgttttaggtgaccagtgctccaaatgcctggagatctgcctgggcatggagtggaaagggctcccctgttccaagatctctgcacagtatgggtggggtgactttggctgctgaaccaggcaagcaggtgttctgaatgcctggggctctccctgggtataaagcagagagggtcctcttgtaccaggatctctgcaaaggaagggtggggcagtttaggctactgatccaggtgagtgggtgctccaaatgtctagaatctgcctcagcatgaagtggagacagcctcactgtaccatgatctatgcacaggaagagtgaggaagctcatgctgctgatccaggtsagggggtgacccggatacctggagatatgcctaggtgtgaagcagagaggaccccactgtgccacaatcttagggtagcaggctggggcacccagcaatggcacacacagaccagttccatgatgccaagctgatcctggctgcaagtcccatcatccaggagaaaatgcagctgtagtagctctcctatcaccccaggcctgcaaca

SEQ ID NO: 634410 - DNA, 605 bp, Homo sapiens
tgtgcccttcctacaaatttacagctactgactagggccctgctcaaaaccagaccaacaacctgacatgtgtttgacttccagcatccctactgctcaaagacactcactgctatattttaccccatcagaatatcttggattctgcttgaattaaatctcaatttgccayacatttgtatccaagcatttgcactacaggctacgtatttaggggttaacttagtcaattctcccagtcctaatactgcctgatccgaagtattctctttcacatgctctatgctgcagtcccagaaatgccttagagcaagatcacctgagacagaacaaaaacaacaggtaaaatgagataaggattccctggatactggttaaaaaataccaggaagtagaacaggatgggcagatactacacaaactggagcccctaagacaagcagaaccccgatatatggttgtttagatactgcttcattttactcaaagcttattcaatctggactctactgttccaattaaattgtttgggtcatttatatgcaagtgtggacctgttgtgagtattctccacctacagccaccaggtttatttgtgttccaac

SEQ ID NO: 634411 - DNA, 604 bp, Homo sapiens
gcaattgtacttgcaaaatgtttctaaaagtacaggtgccgagcagacattcattcagaagtggccaggtatggtcaagaggtcaagggcagtccttttctcttgtgttcagggtgacttagtcaagattttctattacttattagataactttgatttcttcttttgcaacataattcctagctcattgtagtacataaattgcacgaagaagaatcttcagacagaataagtggttgctttggaaatggggtaaatttagggtccaaaagaagattccaagtcataaycagatactttcccttagtcatggaaaagtgtaattttactgtaattccatgtttatggagtataatataaatgacaatatgattttatatttgtaatctcttttaagcatcctttgttttattaatttatatgaaagatatacttgagttcccattatgtccctgacattgttggtaaggattttatagatccagtgagggctacttagctaaatagggatgaacaaaagcttgaactcacagattcaatgatctttctgatctatcatgtgccaggtcttctaacttctgctataggcttcattcatcgggat

SEQ ID NO: 634412 - DNA, 519 bp, Homo sapiens
ccattaaacctctttttctttataaattacccagtctagggtatgtctttattagcaacatgagaactgagtaayacaaatgtacaacacaaatgtaagatgttaacaatgaggaaacttgggggagaaggataaaaagctctctttctgtgtaatttttttgtaaacctaaaactactctaaaaaataagtctattaaatagaaaacacaaggttattttgaaaagcaagtctcaacagtaccaggacagaaatacttaatatgcaaactgtcaacaaacaggtagcagcacagtaacatatattaaacccaacacatggctgatattttttatattataaacttaacagggttgcttttaaagaatatttagaatagaatgagcatattaactgaacacagagaaactagaattttacatattattacattgttcctcgtacaactgcaaatcagggggaatgaagtttcaagacagtatttttccttgggatttattctgagtgattcttgttatc

SEQ ID NO: 634413 - DNA, 578 bp, Homo sapiens
taagacaggtagcacaaaagcccattctcaagactatggctaaacttttctagccaaaagtctaacttccttttccattctattgtctgacactccatcatagtagaagataggcactgcaatatcatagagggagaaagcacttcaagggagttaaaatgarctttcatatgttagaactggagctcatggtggctttaaataatttctctgaatatcagctttatgatctttaaaatatatacaataaaatctacccttcctgttgaacaagacttctgtaatttagaaagaaaaatcagaatgagataatttatgcaaaagcactttgttagggtgtagagaagggagaacagaacacttatacactgttggaagaagtgtaaattagtacagccaccataaaacagtatggagtttcctcaaaaaactaaacatagaactaccatatgatccagaaattccattgctgggtatatgttcaaaagaaaggaaatccatatatcaaagaaatatcagcactcccatgtttattgcagccctattcatgatagccaagatatggaatcaacctaagt

SEQ ID NO: 634414 - DNA, 535 bp, Homo sapiens
tacacagctagcaagttgcagagttggattaagaaccaaattctgtctgaccccaagtaggttctagtctaccatgttcatctttaagacaggtagcacaaaagcccattctcaagactatggctaaacttttctagccaaaagtctaacttccttttccattctattgtctgacactccatcatagtagaagataggcactgcaatatcatagagggagaaagcacttcaagggagttaaaatgagctttcatatgttagaactggagctcatggtggctttaaataatttctctgaatatcagctttatgatctttaaaatatatacaataaaatctacccttcctgttgaacragacttctgtaatttagaaagaaaaatcagaatgagataatttatgcaaaagcactttgttagggtgtagagaagggagaacagaacacttatacactgttggaagaagtgtaaattagtacagccaccataaaacagtatggagtttcctcaaaaaactaaacatagaactaccatat

SEQ ID NO: 634415 - DNA, 527 bp, Homo sapiens
ttaatattatgatttatttctgacttggcttttctttatcgaatgctgactttttctaagaggttcatgtggaaatgtgctacatgaaaaaaaaaaaaggagcacagtttggcctcagggcaaaaacatgaatactgacccagggacatgaatacagggcagagagagagtggcacaggcaacaaaattaactcatttcttggccttttgtgtgtacctaagtgtgtggagtgactcaaattttascacagaaagtaaagttaaaaagcaactgctatttgccaacaacccattctttaattctcaaagatcaaaattttgcttgaaaactgacatttacattttctcctggcccagtgaacaaagttttaaggttatgtggtcgctctgataccacctaagaagcaaatatttcttgcagtctacttctagatgtgattgacctgaaagtaaatgactcagagatggagtacatgtcccttgaaatacacccaaacttattatttaggagaagagtgcttgattaa

SEQ ID NO: 634416 - DNA, 527 bp, Homo sapiens
ttaatattatgatttatttctgacttggcttttctttatcgaatgctgactttttctaagaggttcatgtggaaatgtgctacatgaaaaaaaaaaaaggagcacagtttggcctcagggcaaaaacatgaatactgacccagggacatgaatacagggcagagagagagtggcacaggcaacaaaattaactcatttcttggccttttgtgtgtacctaagtgtgtggagtgactcaaattttaccacagaaagtaaagttaraaagcaactgctatttgccaacaacccattctttaattctcaaagatcaaaattttgcttgaaaactgacatttacattttctcctggcccagtgaacaaagttttaaggttatgtggtcgctctgataccacctaagaagcaaatatttcttgcagtctacttctagatgtgattgacctgaaagtaaatgactcagagatggagtacatgtcccttgaaatacacccaaacttattatttaggagaagagtgcttgattaa

SEQ ID NO: 634417 - DNA, 550 bp, Homo sapiens
ggcttttctcatttcctcacacctctacccaaagctgcattttcttattctttttcccccttttaagaatatccatgggatttctgctctggccaagatggagtaacaggaaccagatttattctccctatggaacaacttttagaagggcaataaatataaaatatataaaatagtagtttttaagagattggacatcaaacaccaaaggagagtgatatctgagagtttaaaaatgggactgtctcagcttgctacatgagactgttcaggtagccgcacagggaagtggagcctgggtggaacctggtggactccttgcrttgaagagatgaagctgagaatctggggaaaaccaaggcagctagagtccacaagacagagtaccaaagaagacaaagcttcacagaaagaaaataatgaatacctgtagagagattcctttgagtattcatcatgtgagaatgaatgtgaggaaactagctgaggctagagaaagagcaatctgagaagattagaggaaacagtgcccagcagtcttatatggctg

SEQ ID NO: 634418 - DNA, 598 bp, Homo sapiens
tactgaaaccaaataacaatctacattttctaacacacacatatacacacacacacacacacatacagattagatgacttgttcaaggtgataacaattggttaactctgggcataagaagggcatagcttttgatctcactaccgtatctattctatacagtgtttatgtaaagaccaggtgaaaaaagcagcagctaacgagggagttgccagcccttcacatagaatgcatctcgacaaacctgtggtacattaaactggtaacagattcttttctgttcttgtcattgagagagggagtctaattcttctttcttggtgatttgcttgaccaacagaatgtggcagaataaaattctggcatttctgagattagtcgtaggaagtcttgtagcatcttgcctgaccaagtgtcagctctccacctgacagccacagctgagatcccagccatcagaaagactcaacagtcaggcatcccagcccaggcttcagggaagtaattgaagataycatattaaatgtgcatcctcctgcttcagctgtcccagccccttcaaccacccagttgaaccttttctaaattcctgacccac

SEQ ID NO: 634419 - DNA, 632 bp, Homo sapiens
ttgggctgagccttacagagtataaacaggaaatggctttatttttctctgattatttccttcaatgtgctttatccttttcattttctttccttgcagtttgatgacatcttgggcagattccataagtgttcaatccttttaaccactttttgacaatatagagtccattccaratttaaaaagccaaattctgactttttttaaaccctcaagctcatgtttaatttaaagcttttttccttccttcagattgcacctcggagaccagagtggggtccaatatggtctgtcctcaatcttccttcactttctcccacttctgcttcatattcctttaagttctgccctgtgggaggtgggaaggggtgtgaggaaacagacattggaagaataaaggaaacaatgactcacatggctaatggcttgtaatacaggcatctgtgttcctggctctagcaagtgttcagatactatggtaagctgttcatagggttttcctgcacaacaccctaccctcaacatgtggatttctgaagtgcagtttcctgacacaggtggcacattttcttgctgatccttttgaatctccttctagcccctgcccctctgagatcaatccgagacacgga

SEQ ID NO: 634420 - DNA, 596 bp, Homo sapiens
gacatttctggccttagagacggcttttcatcttcatctcattgcaagtgggtgccagaggctgaggatattaaaatgaacaaatacgctctattcctcaaaaagctacagactatatacttttataaatacaaatgtatacaattaatttattacttgggctgagccttacagagtataaacaggaaatggctttatttttctctgattatttccttcaatgtgctttatccttttcattttctttccttgcagtttgatgacatcttgggcagattccataagtgttcaatccttttaaccactttttgacaatatagagtccattccagrtttaaaaagccaaattctgactttttttaaaccctcaagctcatgtttaatttaaagcttttttccttccttcagattgcacctcggagaccagagtggggtccaatatggtctgtcctcaatcttccttcactttctcccacttctgcttcatattcctttaagttctgccctgtgggaggtgggaaggggtgtgaggaaacagacattggaagaataaaggaaacaatgactcacatggctaatggcttgtaatacaggca

SEQ ID NO: 634421 - DNA, 597 bp, Homo sapiens
tggagttttgctagcctcttacacatgaaaagactgaactgagacactgaataacttccccaatattacacagcttgcaaatggtagaacagagatttgaaccaagcgtgtctgtcygtgaagatttcgacagacagctttagtgtcctggatgagagtgctggagacaaaccacctgggttcaattctagactctgctgtgtaattgctttctgttagatgagttacttccctgagctttaatttccgcatgtttataatggagatgagagtagtatagtacctacttcctagggttcattagaggattataggaaggttaaatatttgtagtgttaggaacagtgcctgacagtaagcctgcagtaaatgtcactgttaatatcattactgttatcatgattactcttcccactctacaatctctcttcataagttataaaggaatgttaggggtcagcaaaagagaagagcttatggacaggcagcagggcctaggttcttcaagtccttctggtgtttaccttcacaaaaattcccttaagcatcatcttatgcatgatgtgatctgtaatctaattcttgccctggacagcc

SEQ ID NO: 634422 - DNA, 599 bp, Homo sapiens
catgaaaagactgaactgagacactgaataacttccccaatattacacagcttgcaaatggtagaacagagatttgaaccaagcgtgtctgtccgtgaagatttcgacagacagctttagtgtcctggatgagagtgctggagacaaaccacctgggttcaattctagactctgctgtgtaattgctttctgttagatgagttacttccctgagctttaatttccgcatgtttataatggagatgagagtagtatagtacctacttcctagggttcattagaggattataggaaggttaaatatttgtagtgttaggaacagtgcctgacagtaagcctgcagtaaatgtcactgttaatatcattactgttatcatgattactcttcccactctacaatctctcttcataagttataaaggaatgttaggggtcagcaaaagagaagagcttatgkacaggcagcagggcctaggttcttcaagtccttctggtgtttaccttcacaaaaattcccttaagcatcatcttatgcatgatgtgatctgtaatctaattcttgccctggacagcccatttctgctgggcttcttgaattc

SEQ ID NO: 634423 - DNA, 563 bp, Homo sapiens
ccagctcaggtcaggggctcagccctgggagttggaaagtgagcacaacaaaatccgctgacctgagctgcggggactgaggcctcaygggttcctcctggtcaaggggcagagcaaggggagcaagcatgttctacagtctctcaacagctgttcactgagtaccttctctgtgccggactctgttccaagcattgcttctacagtggtaaacaagagagacgaagctgctcgttggaactggcatctgggtggagagacaggccatccacaatacacaagtccccaaacaagacaaaggccagcagggctggcacactgtggccccaagaactgctgtccctgcacctggaagaacaaggccacagagtggcagagctgggcaggaccccggataacaccaagggtttcatgcttttccagataaggaagctggggcagagaaggaaccccaggatgcacaggaggttgcccatagctggagcctagactcaacccagcctcatggggtcccttgatttcatgatcacaaagcccttgctgctgccatctgctcttttaaa

SEQ ID NO: 634424 - DNA, 624 bp, Homo sapiens
gttaatctctcctgggcctagctacagaagccagaagcctgaaaaggtcttgtgtccaaaaaaaatcaatttctaatttgaaacaaaatcatttttgactaacaggggttcagaacccattactttttgctgtatagtctgctgacatttcagcactttctgttgtgcacmatgaatcctaatagtcattttataatgttgctataccaatcaatttaaccaagagaaagctgttacaattctgcaaagttttcaggaatagttttcactcatggttttattttttcttccattaggttttttttcccctttttttgtgggggtgggggaaggttgtagtgttgcaataaaaaaaaaaaagaaactttttcatctttttaagagtttttattttaaggcattcacaggaactactgactttcttttctactcatgaaaaagaccgccttgtattttccttttcttttattctaatatggagctgttagcaaaattattatctatatgaccattaaagaggctaaagttgcccctttgagccattctgcccattgcacagctagtgtatgcagattatagtacagggcaaagttattgcattggcatttgctgtggcacccaacc

SEQ ID NO: 634425 - DNA, 500 bp, Homo sapiens
cctaccacaacaaaatttaatgtccagaaacaaccaccattttacttgctcatgattctgggactcagcagagtgggttgggttcagctgggctgttcttctgttgctcttgcttagactctcattcacctgcagtccgtcagttggtggctcagctggggtggtgttgttctaagatarccttacttataggtctggggcctcagctgcatggttggggcaactggcttccctgcttcatgtggtctcatccctcagttgactaggcttggcttcttcacatggcaatctcaaagcagtgttccaaggtaatgagagctcaagctacaaggtttcttgaggcctagactcaaaatcacacaatacccaattggctccattctgttggttaaagccagtggccagctcaaattcgaggaattaggaatagattttaccacatgatgggaaaaacagcaaagtcatatttcaaaggtacacacacataagaatggtataca

SEQ ID NO: 634426 - DNA, 572 bp, Homo sapiens
taagtagattgacagactgactgaaaagaagggacagagaggggcttacaaatgcatctgttacacagggaccccagcgtaactcatggagtccacatgagccaagagatactagcaggaacttcgtgtcatggtaaaagtaatagagctggatatgataagggcatttgttaaatgatgagaatagtgtctataatttaaattggtctcacctcaattcacactatatttaaagttatgtaagaggagttggtaaaaatgccctgaagaactatgtacagaaaaaaaaaatcatttgtgatttatttgcatatctcttagtcattgtggacaaaaataacaatgttaattccctaaggaacaaaaatgtgacaactgaaagcagtcatccagatatcctgaggactctgaagaacccagatatggaaggtaagcatttkggatattcgagatattgaactgtaggcatttatgctgccctgcatagatgctagcagatttcctgatctagttagtctgctgagtattctagttttctcatttgtattatcaattacaaaaaaaaaaaagtt

SEQ ID NO: 634427 - DNA, 555 bp, Homo sapiens
gactaaaccacaagtgccactccagttattcagcagagtgtccagtaaaggttcaccacaataccaccacacgtccgcgcagggatgaacaagggctgactgattgataagctcttgaaaattcttaagctcattgcatcccttcaggtctccaaggaatgctgtttcctgcctgtcgtgagagacacaaagtgaacttagtgttgggagatggaagctggatggctctcaggggctgacccgcagggtgccggacttcgggatatagcagagagagcttggcatgacttattactccaggctgtagaatcctggaaaagagctaccatgcagcctacgcctggtcaactggaggwccaccttagtggaaacgagacaatctgggcctctggcctgccatgtgcacaagaataacaattgcttttgtttaacatgcagaaggaatatttgatcaattttaaccaggtatttgcatcttggtatgctgtcttaattgccaaagtttgttttaagtctttaacttctatgatcctctagtaaaatgaatgtatgatt

SEQ ID NO: 634428 - DNA, 539 bp, Homo sapiens
tggcctggacctcgagtgacctctgcctcccacaagcccagtgccttcaatacattcttgagtagatatgccttatcatctgggaggtgataggagaggatctgacagtctccaagggcccttcaactttagtgagtcgcaaaacatatctcagtctgggaacatttctaaggcctgcaccctggtgatccatatattccatgcattacaatggggccagggcagtctggaggacaaaactggggccatcactggtggatgcctgaactattttgtttagcagttttagatccatatcatttttttcttgctagttcatatattagaatctaaacatctcagctttcatctgttggaagtggagtacttaagtggcaggatagtattttgagatatataatatgtttttttccaaatttccttttaccccttgtcctcctcaaccgtgtatactctacycccattcagagacccaggggcaggaataatagtagaaaagggtctcacagggtctttgcctggcttttggtgattatggt

SEQ ID NO: 634429 - DNA, 557 bp, Homo sapiens
tctggaaaagagatttacaacatatttaactcttaatttgattaatgtcaccacgttttcaytgggtccacaacggtcaatcctgaccctttcagtctacttcacctcaatgctcagcttcttagacaatcgagttaatagaacccaaggaggccacaaacacttttaaaacagagttgaaggtgagaaaaaggaggaacctgctgaccaaaagagaacccatcttgatgttttaatacgaggttctaaaatattcttatatcaacccaatgatgttagtctccacggcaataaacaaactccatgtgttaaaaagaatattcagtcagaaattgaattttaattgttctgtttttttgttgtttttgttgttgttgttgtttttagtagctctttaaagaaaaggctagaaagtaaatttttggtaatttgtacagaattggatataaggaatttgggacacttaaaaggagaaaatgggattgaaggagttctttacattctgaacagccccactttgtattttttttaactgtttccttgtaaattttagatgc

SEQ ID NO: 634430 - DNA, 557 bp, Homo sapiens
tctggaaaagagatttacaacatatttaactcttaatttgattaatgtcaccacgttttcattgggtccacaackgtcaatcctgaccctttcagtctacttcacctcaatgctcagcttcttagacaatcgagttaatagaacccaaggaggccacaaacacttttaaaacagagttgaaggtgagaaaaaggaggaacctgctgaccaaaagagaacccatcttgatgttttaatacgaggttctaaaatattcttatatcaacccaatgatgttagtctccacggcaataaacaaactccatgtgttaaaaagaatattcagtcagaaattgaattttaattgttctgtttttttgttgtttttgttgttgttgttgtttttagtagctctttaaagaaaaggctagaaagtaaatttttggtaatttgtacagaattggatataaggaatttgggacacttaaaaggagaaaatgggattgaaggagttctttacattctgaacagccccactttgtattttttttaactgtttccttgtaaattttagatgc

SEQ ID NO: 634431 - DNA, 544 bp, Homo sapiens
tctggaaaagagatttacaacatatttaactcttaatttgattaatgtcaccacgttttcattgggtccacaacggtcaatcctgaccctttcagtctacttcacctcaatgctcagcttcttagacaatcgagttaatagaacccaaggaggccacaaacacttttaaaacagagttgaaggtgagaaaaaggaggaacctgctgaccaaaagagaacccatcttgatgttttaatacgaggttctaaaatattcttatatcaacccaatgatgttagtctccacggcaataaacaaactccatgtgttaaaaagaatattcagtcagaaattgaattttaattgttctgtttttttgttgtttttgttgttgttgttgtttttagtagctctttaaagaaaaggctagaaagtaaatttttggtaatttgtacagaattggatataaggaatttgggacacttaaaaggagaaaatgggattgaaggagttctttacattctgaacagccccactttgwattttttttaactgtttccttgt

SEQ ID NO: 634432 - DNA, 583 bp, Homo sapiens
tggtctcgatctcctgacctcgtgatccgcccacctcggcctcccaaagtgctgggattacaggcgtgagccaccgagcccagcccgcttaatttgtttctttaagggatatatttccgatatacagtatactgctatcttttatttctataaattttatatggaaatgaaatatgtatgtgtattttatgtggcacctgaccattggtacctaaaatatcattcaatcgttgcctgctcaaatgaaacttaccatgaaatatatattgattatatctaattatggatttattatatcaaattaaagtttaaaggatcttttatagaggcttgcatgcttctctatgtgaatggaakggagaaataatgcatgatattttcccagtgcatagtatctattcatgaccaggaaatttatattttccagccatgcattaaaataatcacaagaaaaaattctgcttattgtaatttatgtactttaacaaattatttgccagtaaatgattctgtaaaatttgggggatgcttcctttctgttaatacaatggaatattcaatgtgagatgtatttttgacagat

SEQ ID NO: 634433 - DNA, 526 bp, Homo sapiens
ccttctgtctggctgtctctgagtatagacattcagatcaggacacagctagagcatgtacggttgagggaccctcccccccsacaacccgcaccaggccccgacgaagcttggctgctctgctcttaagtagctatgtttcagaacacaactcttcccctaacatgacatgcaactcacactgcccactagtaattccagagtcacatcaacctatcaggacacaacgacaccatttcagtgatttagtgctgcgggaaattaagcaacaacctctcctgagctgaaggagttaatagctctctggctggcgctcacttaaggtttatccctgtgcctgcgtctcagtctcccaggctgtaactgctgttgcactgagagagcagtgaggaaatctcttctgcttcttccttcctagctacttagggatgagctctccaggcaattcagttgtgatatctccttgattttcgggggggcacgtgtatcactgtgtctagaagtcttggaaagccaagtttatgta

SEQ ID NO: 634434 - DNA, 526 bp, Homo sapiens
ccttctgtctggctgtctctgagtatagacattcagatcaggacacagctagagcatgtacggttgagggaccctccccccccacaacccgcaccaggccccgacgaagcttggctgctctgctcttaagtagctatgtttcagaacacaactcttcccctaacatgacatgcaactcacactgcccactagtaattccagagtcacatcaacctatcaggacacaacgacaccatttcagtgatttagtgctgcgggaaattaagcaacaacctctcctgagctgaaggagttaatagctctctggctggcgctcacttaaggtttatccctgtgcctgcgtctcagtctcccaggctgtaactgctgttgcactgagagagcagtgaggaaatctcttctgcttcttccttcctagctacttagggatgagctctccaggcaattcagttgtgatakctccttgattttcgggggggcacgtgtatcactgtgtctagaagtcttggaaagccaagtttatgta

SEQ ID NO: 634435 - DNA, 604 bp, Homo sapiens
gatacattggaacattggtgcacaatagttgttggttgatccaggctttcagcctggcctgcacagtcaaaggctatcaaatgcgtaagtatgaaaagcaagtgtgaaggcagaaaggcagaagagggaggatagttgtattgttctagttttaaaagtgggccaaagcacataaagatataaaagtggggtcagttttctccagatggaggctgtagaactgtagtacattgtgaatctattgtctataacatgagatgccttatgctaagcctctttgatcatcttcttgaaacttctgaaatgctgaggacttggagtcagggtctggagattggatgtagtgctgtagtaactccccggactttttgagtcaagattaggaaggattctagaagcccactcaaacctgctgttgctccacttaatgtcttggggcatcaagtaactctgacttcaggctcctcctgtcctcaggaagytcagagagcttcaagcctagggaaacagtagggaggagcatgaggatttctagagttagactcctgccaagacaaaggcagaagtgtcattgccaccaccctgcctcttgcaccagaaccaa

SEQ ID NO: 634436 - DNA, 605 bp, Homo sapiens
tcagacttctcaaggaatgggggtgccatggaaggccagaggttcactggtcaattgaagcccttgcagaatccaccacttctctagaagtggctcagtctggtctcagacaaaacagcaacatatgccacgttggtctggagtttagtccatcttacacctacctccccctactaacctgcttttcttctctgagccactgacacaatttgcattactacctrttttttcccctaggctccattcttcttccagtttttgcccctgctcttgtaagtttaggaaaaaagactggggagaggtaataaagtgaagtgccctgaggtgggggtgggtgtcgatgactagctctgtggcccccagctgctgtgtatgttcctctcagaaactcagaccttgcctaggtcccatcagatgcttggtgtgaataagctgatggatactgggttctattacatgaaattagcaatatctatcatttgactcgaagttcagactaatatatctgtgtttacctacagtttcgctagagtctgttctctttccctgccatgataaacacaatgtttatttccaaggtccatttatatgatggcagttgtcag

SEQ ID NO: 634437 - DNA, 605 bp, Homo sapiens
tcagacttctcaaggaatgggggtgccatggaaggccagaggttcactggtcaattgaagcccttgcagaatccaccacttctctagaagtggctcagtctggtctcagacaaaacagcaacatatgccacgttggtctggagtttagtccatcttacacctacctccccctactaacctgcttttcttctctgagccactgacacaatttgcattactacctgttttttcccctaggctccattcttcttccagtttttgcccctgctcttgtaagtttaggaaaaaagactggggagaggtaataaagtgaagtgccctgaggtgggggtgggtgtckatgactagctctgtggcccccagctgctgtgtatgttcctctcagaaactcagaccttgcctaggtcccatcagatgcttggtgtgaataagctgatggatactgggttctattacatgaaattagcaatatctatcatttgactcgaagttcagactaatatatctgtgtttacctacagtttcgctagagtctgttctctttccctgccatgataaacacaatgtttatttccaaggtccatttatatgatggcagttgtcag

SEQ ID NO: 634438 - DNA, 562 bp, Homo sapiens
cctactaacctgcttttcttctctgagccactgacacaatttgcattactacctgttttttcccctaggctccattcttcttccagtttttgcccctgctcttgtaagtttaggaaaaaagactggggagaggtaataaagtgaagtgccctgaggtgggggtgggtgtcgatgactagctctgtggcccccagctgctgtgtatgttcctctcagaaactcagaccttgcctaggtcccatcagatgcttggtgtgaataagctgatggatactgggttctattayatgaaattagcaatatctatcatttgactcgaagttcagactaatatatctgtgtttacctacagtttcgctagagtctgttctctttccctgccatgataaacacaatgtttatttccaaggtccatttatatgatggcagttgtcagcctctgttacctaacttggagtcaaatagaaagaggccctagtcggggacctgcagttagtcagaagagccttgtggcacacccagccctcattccgtggatgacaatgactttatgtaccgcact

SEQ ID NO: 634439 - DNA, 562 bp, Homo sapiens
cctactaacctgcttttcttctctgagccactgacacaatttgcattactacctgttttttcccctaggctccattcttcttccagtttttgcccctgctcttgtaagtttaggaaaaaagactggggagaggtaataaagtgaagtgccctgaggtgggggtgggtgtcgatgactagctctgtggcccccagctgctgtgtatgttcctctcagaaactcagaccttgcctaggtcccatcagatgcttggtgtgaataagctgatggatactgggttctattacatgaaattagcaatatctatcatttgactcgaagttcagactaatatatctgtgtttacctacagtttcgctagagtctgttctctttccctgccatgataaacacaatgtttatttccaaggtccatttatatgatggcagttgtcagcctctgttacctaacttggagtcaaatagaaagaggccctagtcggggacctgcagttagtcagaagagccttgtggcacrcccagccctcattccgtggatgacaatgactttatgtaccgcact

SEQ ID NO: 634440 - DNA, 355 bp, Homo sapiens
agggagtggaaggacaggaagaagagaatcagggacaagagactagatgtcccacagatggagcaggaactggccttcacatagtccctgaaggaatccccagtttctgctaattgagtagaaaatgaatctgamtgtaccctttttgcaaatttctcctcttggtataattacaataaggtcaggtgagaatgctttactgaagtctaacgttcagtgggacaggtttgaagaggctcgtgggtgtcaatgtcttggagaatacaaaacactttctctttactgatcttcactactgggcttgtgagcagccccttcactcccagggggaaggctgtgccctgttcacccaatg

SEQ ID NO: 634441 - DNA, 578 bp, Homo sapiens
agcactttggttttagttttgacttggtttgaattgcttgacaggactggtcttaggaacttgcccactccatttgagtagaagcatggcctgatcacccgyggtgtgcttgtactggcacttcagtttctgtttttgacttgacttggattgcttgatactttggttttagttttgacctggcttggatttctggatactctaattttagttttgattttggtttagtgcaaactgcaaaagtgtgtgtatgccctttttacccgttctttgttttgtggtgtgcatgtggtgtgagcgcagtgttttgtctggaagaagcatagttcaggcacaaataagaccaccctactaggaactatgttgaaaactttcaaaaaggattttaaaggagactatagagtactatgacactaggaaaacttgaaactttgtgtgagatagactggccagcagtagaggtaggtgggccattagaaagaagcctggacaggtcccttatttcaaaggtatggcacaaggaaaccagaccagttcccgtacagagacacttagttacagctagttttagaccccct

SEQ ID NO: 634442 - DNA, 493 bp, Homo sapiens
acaccattaagtgggtcagtatagaaattataggattctcggaaaaagaagggagagaaaaagaaagcttattcaaaaaataataaaggaaattttccaaatctaagggcatctagaaatcccctaatgggcacctacgatgcccagtggaccccaaataagatgataccaagatatccacactgagatacattatgataaattatcaaaggtcaagggcaaagtgagaattttgaaagcagcaaaagaaaagtgacttgttaatacagtggtgtccccataaaaatattaggagaatttttcagcagaaactttgcagaccagaagtaagtgggatgatatatccaaagtgctgagagagaraaaaaaataccagccaagaatactactcttggcaaaaccattcttcagaaatgaaggagagatgaatactttcctagacaaacaaaagctgaggaaatatatcaccactgaacctgcattacaagatatg

SEQ ID NO: 634443 - DNA, 555 bp, Homo sapiens
acccaaaacaatttacagattcaaagcaaattctatcaaaatgctaatagaattgtttacagaagctgataaaaattctaaaattcayatgaaaccacaaagggccccaacagccaaaacaatcttgagaaaacacaaggctagagacatctgctgatttcaaaatgtattaagaaacaacagtaattaaaacagtataatgctggcataaagacaggcataagacctacagaacaaaagagcccagatacaaatccacacatatatggtcaactgatcatcaacaaggttgccaacaatacagaatgagaaaaggagtcttttctacaaatggtgccgggaaaactagatatcctacataatagactgaaattgatttttatcttacacaatatacaaaattcaacttaaaatgaattgaagaattaactgtaaagaagacccaaaattgtaaatcccataaaataaaacatagaggaagagtttcgtaacattgaagttggcaataatgtattggataagacaccaaaagcaaagaaacaaaagcaaaaatag

SEQ ID NO: 634444 - DNA, 602 bp, Homo sapiens
actccaagagtaacccctgcattgtcagggttagcatctcctggaagcctcatgtaaatgaagaatttcatgctccatccaggacctaatgaataagaatctgcattttagcaagaccctcatatgattcatatacactttttttttttttttttagatggagtctcactcttgtcgcccaggctggagtgcaatggcatgatcttggctcactgcaacctctgcctcccgggttcaagtgattctcctgtctcagcctccctagtagctgggactacaggtgcatgccacagtggctggctaatttttgtatttttagtagagacagggtttcaccattttggtcaggctggtcttgaactcatgacctccggtgattcccccgcctcggcttcccaaagtgctgggattacagacatgagccaccacacccagccttattcgtatacacatttaattctgagaagcactctatagaaaataagaataagaaaatattgggctcacaggtgacattaataagtaactttatcgagtaccccaaatkttacctatgtttggaagatggggttaaaaaggacacattgaaaacaagaaactca

SEQ ID NO: 634445 - DNA, 587 bp, Homo sapiens
agaattctggtcagacacttttcaccttgtgaaacagtaaaactgattcacagagacaatcagctttatatgggtcagggctagcttatcaagacagagtcgactctctccccaattagaagtgctgtatgatagcttctgttgcatcaaactcaagttgctgctgccactgttcaggtattcaagatacttacaaagatcctctggaattgaaaagcaatttacagtggtcatctcctactgagtatttaccatgtgccaggcattgttctaaaaggttttcaatataagatctcaattttatacttgaaaaagagaaacatcttccaacattcagaaacaggcttggcactcatttaggggtggggcctggtccttacagccacagtattctcctggggaacataaacagtctcacaaaacaacataaaatcaagtcactctgtgacccttatttaaagcgagactaaaaaacacttttatttgtgcaatcacaaayataccagtcatccccatctctcgctggctaatgagtcactactgctatagattcactttagtctgcattcctagatagtatttattaa

SEQ ID NO: 634446 - DNA, 587 bp, Homo sapiens
ttggcatatctctgggtggcattggagggcaaaagcctcccaggaactagtcttattgagaaaagagtaattttttccaattcagaagttatctaaaagtcaatttatggccttgaaaatttacgttggtaaaacaaggtagaaaggcacagtaagtaggggagagagaggtgtgaagaaagttatggacatgcagacgtatttttggtaaggaaggttataaagaaaagagaataattttgtatgaaaaaggatcttgtgtggtaaatttttgtcctaaagtaaaatgactgattatttaggaggtttaggacaaggcagaaagtcsaagcatgttgtagatggtctgtgtaagtcatgataagctttgggaaggggaatttatgaaagtattttggatgtcactaagtcgattataattaaaaggaaatcatttataatagtccaagattggtcccctacgttacaacaaggtttttttttttaaaaaaactattgcttagctcttaataaaattgcaagatattttacttgtattttataatctatttcttttgaaaacttctcagaatcatatctcagaagtt

SEQ ID NO: 634447 - DNA, 605 bp, Homo sapiens
aaaaaataacaaaaacaaaaacaatatagtttcctcatacagaagagtttcactcccctatgctcacctattcagtttcactccctctaccccaggccccagcaatcacagwtcaatttctgtatagttttcccttttccagaatgtcacagaattggaatcatacagtatgtggctttttcagactggcttctttcacttagcaaaatgcatttaagatttattgatgtcttttcatggctagataggcgatttccttcattgcccaataatattccattgtatggatatgtcagtttgtttaaccattcacctatttttttttttttgagatggcgtctcactttgtcacccgggctggagtgcaatggcatgatctcagctgactgcaacctctgcctcccgggttcaagtgattctcctgcctcagcctccccagtagctgggattacaggcaaccgccatcatggctggctaatttttttatttttagtacagaaggggcttctccatgttggtcaggctggtcttgaactcctgaccttaggtgatccacctgcctcgacctcccaaagtactgggattccaggcgtgagccaccgtgc

SEQ ID NO: 634448 - DNA, 574 bp, Homo sapiens
tctgggtaaacggtaaatatggctgttttkggtagtttaaaaaatttttttgcaacattttataactttgaaattatttccaaataaaaagttttaaactccaaaaagaaaaaaaagaaaaaaaaaagaaatctattcctagcccaaggtcataagaaactttctttaattatttttttctgttagtattttatttttctctctcaagtgtaggtgaaccctagtgcagggcttctcaaccttgacactatggccatttggggctttgctgtgagcttctcaaccttgacactgtggccactggggctttatttgctagctgccctgtgcattggaggatgttgagcagcatccctaggtgtcaatagcaccccacaagttgggacaacaaaaatgtctccagatattaccaaatatcctctgggtgacaacattgcctcctctcgagaaccactgatctgtttagattttattgtatatggtgtgaggtaaggatccagtaatttttcttaataggtggaatcagtttcactaatgctatctaaataactcttcttttcaaacttatttatga

SEQ ID NO: 634449 - DNA, 321 bp, Homo sapiens
cagttgggatccatactggggatggcttgctgaccggtagggaatttgtccctttctwcggctgtcattctatcatttacttgactaagataccaggtatctccaaactctcgggctgcagctaaagccgcattcttttcattaaaggccagggtttgatctaacagtagcatgacatctctccaagtgaggtcaaaggtttgccctagaccctgtaggacatctatgtacctatcaggatcatctgaaaacttccccaggtctgccttgatctgctttaaatcagagagggagaaggggacatgtacccgggttgggcca

SEQ ID NO: 634450 - DNA, 557 bp, Homo sapiens
ttgtaaaatggcagagactaaaacaaagtattgccatgtggttacaggtcatgtgcccaaggacatgaaacaagatggagacttgtagcctagtttgttactgaccattttgttgtgctggcttgaacagcaggcttatggggtcctgggcctgcatcctaacctaaggtaccctttttcttttgacagaaccatacagaaagactcacaaagtacaccagattgactacagcttaagaccaacctcacaaatcctttttcattaattaaaactttacagagaatataaacaatgattcttattatgctttttgccagtttgcatagggagagagaagacaaaagcttgactggttaaaaaaaaaaaaaatcttttaccctttkgccagcatgtcaggcttctgggttccttcctcctagctcaaccctaagtggagcattttaaggtttggggaagtcagcttttcccaggttggaagaacattgtaaaagaactattttaaactgtgaaaggaaagataccatagaaaagtctaggggatccaaatagggttgtc

SEQ ID NO: 634451 - DNA, 618 bp, Homo sapiens
aaggctggcagccacactaatcatttttaaatggctaaagggggcccagtatttggtttgatttagttctaaaatggaggctgagagcctcaaaatgaaaggacagagttggagtccactcctctactcactcttctgatgaatgctataccttggtatcccaggcaaggtccccattatgaagcagctacattgtctgggtaatataacctggggttcattgtcgcctgccagggaaatttaggacatggacacacacaaggagtttaggaacagaggtagaagagaaagagaaacagcttcctgtatagaagaaggggccttgagtggaaaagactagctagcagtcaatgtgtcgagttctatagtccagtttgaggaggcaattctgatttacccagggctcatagattggtttgatcaggtatgacgtttacacagtgcatggggaaggctgtcgtcccaccctaatgtttttatgcaaatgggctttctagttgattagtgccatcttgtctgctcctttacagtacatgtggctggaagagaagggacgatggagcctccgccttgaacatgtctagtcctyagttcctgcctgcattcacccatgcaagc

SEQ ID NO: 634452 - DNA, 495 bp, Homo sapiens
ttacaaaacctgctgttctactatttcccagtgggtttcaagaccaaataagtacatttatgatggtattagtgacatcaatgactgaagttttggtcaatctctcaaaattgagaagatgaccaaaagtggggaatttttaaatcaagattagcctatgcctactaaagtatgacaagaagaaaaaaaagtttagcctaaagctgcctccttatatattttaagttgaacctaaaggtttatctgtacatcgtgaactgyaacaagtggaggtgtaaacagaccgtagcctacagttgtgccaatcacaaggttttggccaatgaaatgtagccaattgtttgaactgtgttcaaataaggcaaactccaacctgtaaccaatccagctgtctgtacctcactttcgttttttgtatgtcactttcctttttctgtccataaatcttcttccaccatgtggctgcactgaagtctcagagcctactctggctca

SEQ ID NO: 634453 - DNA, 536 bp, Homo sapiens
tcccagctacttaggaggctgaggcaggagaattgcttgaacccaggaggcataggttgcagtgagctgagattgcaccattgcactccagcctgggtgacagagcaagactctgtctcgtaacgagcaccaaatacggaaatcatggacggatgtggaggccggagtacatattggttatgcgatgaacaacgagtctcagcagtgaggggagctggagaagggacaggaagggcaggtcgtcttcctcaaagtcaggcggtctcccactctactgactaagtcaggggtcyttataggcacaggatggggagtatgtgcagattggtttgtggctatgcaagaaaggttaaagcaaaggcaccactcaaaggtgggcacaacagtgtagaaaaccaatcaggaaagggtaggtatatgtaaaataggtgaagggtggggatcaatcagaggaaaacatgcaagacaggaagacaagttctcaatctggtctgaggacttaacttgtagcttggctttcgagctttaaactgttt

SEQ ID NO: 634454 - DNA, 582 bp, Homo sapiens
aaaactcgtattttgaagaagcatttactccaagttctgtaattccttcaggctcagcttcagtttccttttgttaaagtaaaattacatcgaacacttactactaaaaacaaaaccaaaaaaaagcagatctattgaatcataacgtcctggggcgagcctggtcatgtggattttgaaaaaaatgcatgtgattctgaagcagtgatttaaataatgacctttcaataagtggtgggttccgttcatgggagaataggaaactgcgtgagtggtagaggcaacaagttcgaagagctgcgrgacgttcccactctctctggtgtagccttggctcaccgaggcgcgcagggagtggaagtgcctgaggataaaggtgtacacgtgcgagtctgagatgatggaattgctgctcaaacttcgtccccttctctgccctcagcaaacttattgggggtcggggagcgcgtggggtgcgagagaagagaggcaagttaggatagggagagcggctctctggccggtattttaacaaagggctgaactgactaagcatggccgggctgcctcccggtctcccga

SEQ ID NO: 634455 - DNA, 582 bp, Homo sapiens
aaaactcgtattttgaagaagcatttactccaagttctgtaattccttcaggctcagcttcagtttccttttgttaaagtaaaattacatcgaacacttactactaaaaacaaaaccaaaaaaaagcagatctattgaatcataacgtcctggggcgagcctggtcatgtggattttgaaaaaaatgcatgtgattctgaagcagtgatttaaataatgacctttcaataagtggtgggttccgttcatgggagaataggaaactgcgtgagtggtagaggcaacaagttcgaagagctgcgagacgttcccactctctctggtgtagccttggctcaccgaggcgcgcagggagtggaagtgcctgaggataaaggtgtrcacgtgcgagtctgagatgatggaattgctgctcaaacttcgtccccttctctgccctcagcaaacttattgggggtcggggagcgcgtggggtgcgagagaagagaggcaagttaggatagggagagcggctctctggccggtattttaacaaagggctgaactgactaagcatggccgggctgcctcccggtctcccga

SEQ ID NO: 634456 - DNA, 582 bp, Homo sapiens
aaaactcgtattttgaagaagcatttactccaagttctgtaattccttcaggctcagcttcagtttccttttgttaaagtaaaattacatcgaacacttactactaaaaacaaaaccaaaaaaaagcagatctattgaatcataacgtcctggggcgagcctggtcatgtggattttgaaaaaaatgcatgtgattctgaagcagtgatttaaataatgacctttcaataagtggtgggttccgttcatgggagaataggaaactgcgtgagtggtagaggcaacaagttcgaagagctgcgagacgttcccactctctctggtgtagccttggctcaccgaggcgcgcagggagtggaagtgcctgaggataaaggtgtayacgtgcgagtctgagatgatggaattgctgctcaaacttcgtccccttctctgccctcagcaaacttattgggggtcggggagcgcgtggggtgcgagagaagagaggcaagttaggatagggagagcggctctctggccggtattttaacaaagggctgaactgactaagcatggccgggctgcctcccggtctcccga

SEQ ID NO: 634457 - DNA, 613 bp, Homo sapiens
caaaaagcaaatacaataaaaacatagataaatagctgggacctaattaaactaaagagcttttgcacggcaaaaggaacagtcagcagagtaaacagacaacctacagagtgggagaaaatcttcacaatctatacatctgacaaaggattaatatccagaatctacaacgaactcaaacaaatcagtaagaaaaacaaacaaagaatcccatcaaaaagtgggctaaggacataaatagacaattctcaaaagaagatatacaaatggccaacaaacgtgtgaaaaaatgttcaacatcactaatgatcacggaaatgcaaatcaaaaccacagtgcaataccaccctactcctgcaagaacggccataatcaaaaagtcaaaaacagatgttggcatggtgatcagggaacacttctacactgctagggggaatataaacttgtacagccattatagaaaacggtctggagagtccttaaagaactaaaagtagaactactctttgatccagcaatcccactactgggtatctacccaagggaaaagaagtaattatttaaaaaagattcttacacacrcatgtttatagcagcacaatcacaattgcaa

SEQ ID NO: 634458 - DNA, 604 bp, Homo sapiens
attgtacctctgtgatggttaattttctgtgtcaacttgactggcacctgagtgcccagattaaacactatttctcgatgtatctgtgagggtgtttccagataggattagcattttaattggtggactctggaaagtagaatgccgtctccaatgtaggtgtgcatcaatcaatctattgagaccctgaatagaataaaatggtgaaggaagggggaattcaccctttttttgcttcctgccagcctgtttgagctaggacatcttatcttctccagccctcaaactgagatttacaccatcggctcccctggttcttgggctttcagtttggcctgaatcactccactgacttttactgcatgcagacagtagactgtgggacttcttagcctccataagggcatgaatcaactccttggaataaatctctttctctctctcacatatttatataaaacttatgtggaaaccaccattctactctctgtttccatgtatttgatratttttagaatctacatataaatgagatcatagtatttgtctgtgacttatttcatttagcatgatattcttcaggttcatccatgctgtctcaaag

SEQ ID NO: 634459 - DNA, 597 bp, Homo sapiens
agggacgcaagcgagggaggacatgggtgacaccggactcgcgcgggagaagagaaggcttccccacaraggctatagctggggcaaggcaggagggcatgaggaggaagttgaggctctctggccacttgcgtattgggaagtgaaatcggaaattccctatgtggggaagaggggaagtgtgggggcaacaatgaaatcttgtgggaatttagggggaagtttaaaaacccaaatacttccactttcctctcggggtcaccaccatttaccatcatttactgggatctgtgccctacctccccttaccagttcctggctgttccatggggctcactcccccgccatcctccccggccacacacagacccctttggctgtccaggctggtgagaatcttcagtgggtgatgtcagagctttggggactgattgttatgtaaccagtatcaagacaccaacctgtggtagcaggaccctgggggctcttaaagagatctgaattgaacctgcgactttgaaagcctcaggtccaacttcctcgcttctgggagatgtggaagcctggagggctaggggcctgtatcaggggataact

SEQ ID NO: 634460 - DNA, 559 bp, Homo sapiens
ccacaccccataccatccatggcctggctcaggtgccgcctctgccaagaagccgctgtcaataaccaagctggaaatctcycttttcctgcccgtagacctcacagcttctagccttgttctccccactggattgcacctgcctagaaggcagggatgtgtcccattcacccctgggttcccagcccctggcccagggcttgcacgaactaggcgttcaggtgatgattgcccaaggaatgaactgcttgctggggcagatgctgaaatcaacccattagaactttgaatgagggccgggagcagcagctctcatctgtaatcccagcactttgggccaaggcgagaggatcacttgaggcaaggggttcaagaccagcctgacagtgagaccgcatcactacaaaaatttaaaaatttgccgggcatagtggtgtgctactgtagtccagctactcagaaggctgaggtgggaggatcgcttgagcctgcctgggaggttgaggttgcagtgagtcgagattgtaccactgcgctccagcttgggcaacagagcgag

SEQ ID NO: 634461 - DNA, 559 bp, Homo sapiens
ccacaccccataccatccatggcctggctcaggtgccgcctctgccaagaagccgctgtcaataaccaagctggaaatctcccttttcctgcccgtagacctcacagcttctagccttgttctccccactggattgcacctgcctagaaggcagggatgtgtcccattcacycctgggttcccagcccctggcccagggcttgcacgaactaggcgttcaggtgatgattgcccaaggaatgaactgcttgctggggcagatgctgaaatcaacccattagaactttgaatgagggccgggagcagcagctctcatctgtaatcccagcactttgggccaaggcgagaggatcacttgaggcaaggggttcaagaccagcctgacagtgagaccgcatcactacaaaaatttaaaaatttgccgggcatagtggtgtgctactgtagtccagctactcagaaggctgaggtgggaggatcgcttgagcctgcctgggaggttgaggttgcagtgagtcgagattgtaccactgcgctccagcttgggcaacagagcgag

SEQ ID NO: 634462 - DNA, 559 bp, Homo sapiens
ccacaccccataccatccatggcctggctcaggtgccgcctctgccaagaagccgctgtcaataaccaagctggaaatctcccttttcctgcccgtagacctcacagcttctagccttgttctccccactggattgcacctgcctagaaggcagggatgtgtcccattcaccsctgggttcccagcccctggcccagggcttgcacgaactaggcgttcaggtgatgattgcccaaggaatgaactgcttgctggggcagatgctgaaatcaacccattagaactttgaatgagggccgggagcagcagctctcatctgtaatcccagcactttgggccaaggcgagaggatcacttgaggcaaggggttcaagaccagcctgacagtgagaccgcatcactacaaaaatttaaaaatttgccgggcatagtggtgtgctactgtagtccagctactcagaaggctgaggtgggaggatcgcttgagcctgcctgggaggttgaggttgcagtgagtcgagattgtaccactgcgctccagcttgggcaacagagcgag

SEQ ID NO: 634463 - DNA, 475 bp, Homo sapiens
agggatggatagaggaatttcgagtggagggtgtgatttgaagtagaatggtcaggtctgtgtcagcctttttgaggtgacgtttgagcaatattgtgaaggtggggaayccggtagacatctggagagaagatggtaacccactgggcttcctatttcactgagaaaatctaattacccaccacatatgcccaggtagtaggccttctttccagtccttgcgaataaactgcctgtgctcctagccaaggccaaacctgccactcaagaatgcattcccactctctgtccaaggccatcgctcccgcaattctcttattaaccagcaataatctatttgacccccctcttctctagctatttaatgcactctcattttcctccttccctttgctgcaaagatcccaaaagacttctgtattatcactgtctccaatttctttcctcccattggtcctgagcccaagcctacaag

SEQ ID NO: 634464 - DNA, 594 bp, Homo sapiens
gaaggtaaatataaagacaaaaatattgttatactgtaatgatggcaggcaaatgatgttatacattaattaataaattaaatgaaaaaagtagtaagaataattgtaatcaatatagaaagaagtaaaatctgatcttaattatataaagtgtgtgttttttgcatgtgtgtgtttagaggtaaagcgtatagtttctttaaacaattgcagataagttgttatcagcttaaaataggctgctgtaactataaaattgtcctatgcatayaatgatacacacacacacacacacacacacacacacacatatatgacatacagtagttacagaaaagattaaagagaaaacaattaaatcatactactacaaaaaattgccacagataagagaataagagagaaacatgggaattacaaaacaaacacaaaacaatcagcaaaattgcaatattaaggtcaatcctatcaataattaccttagatatagatcaagtaaaatcctcaatcaaaagacatgaagtggacaaagtagatatttttgaaaagagccaaacagaaattttgctgttaaaaacataaatactgaactag

SEQ ID NO: 634465 - DNA, 595 bp, Homo sapiens
taacagtggacatcatatcaaaaattgtcacaaaagataattaaggtcatcatgtaatgataaaggagccaattcatgaagatgagataataattgtaaatacatatgcaytgaagtttggaacacctaagtgtaattcaaatattaatagaacaaaagtgaaaagtagacagcaatgcaaagtccccttagtaagggactatgataccctgctttcgacaatggatacattatttagatgaaaattcctggaatagaaaacgcgagaagaaactcagagagaaacctaaaggaaattttgtgtggttgcagcagtgtgaacacaggcaagatgggttaagaaatgttgctgaaaatgagatcatgcagacaattgcaggacatgggaagaactttacgttttagtcttaagtacaatgggaaactactgaagtcgaagtggaatcatcacattaccttattaggttttggaaagtgcatctgggttacctcaggggaatatactgtagaggaaatagtggcatcagaaagcccagctgggaattaggagttcatttgcatagtccaggaaagagattcatacagtttgagcaag

SEQ ID NO: 634466 - DNA, 562 bp, Homo sapiens
cgacaatggatacattatttagatgaaaattcctggaatagaaaacgcgagaagaaactcagagagaaacctaaaggaaattttgtgtggttgcagcagtgtgaacacaggcaagatgggttaagaaatgttgctgaaaatgagatcatgcagacaattgcaggacatgggaagaactttacgttttagtcttaagtacaatgggaaactactgaagtcgaagtggaatcatcacattaccttattaggttttggaaagtgcatctgggttacctcaggggaatatactgtagaggaaatagtggcatcagaaagcccagctgggaattaggagttcatttgcatagtccaggaaagagattcatacagtttgagcaagctgagggtagtttgatttgtgacagaattcagcgatagattttaagtgtaataaagccaggcatcatgggtacccacaagggttttacccagtaagtaggtaaatgaytgtagtatttactgaggaagacatcaaggaaggggaagatatttgtgagttactgaaggaggtaatatacagttt

SEQ ID NO: 634467 - DNA, 378 bp, Homo sapiens
gcactatctggatcttgctagaaatttagcctccaaggtgtcaagaggggcaaaatacctcatttaaggcactttgctattaaactacttaaggggattgatggccccaggtgggtgggtgctgaatagctactattcacatctgtagccatatcccgaataagccttccacatgcaggagacaacactgaagaaggttaggtacggcaggagactgacaagaaagtgcattgaagycctcaaatgactgccttctataatgtctccctcatgccttctgctgacaaagcttagcaccatatgaactagcaaagtaaaggtatttgaataactcagttttaatttttaaagatctggaaattaagggtcaagttggaa

SEQ ID NO: 634468 - DNA, 378 bp, Homo sapiens
gcactatctggatcttgctagaaatttagcctccaaggtgtcaagaggggcaaaatacctcatttaaggcactttgctattaaactacttaaggggattgatggccccaggtgggtgggtgctgaatagctactattcacatctgtagccatatcccgaataagccttccacatgcaggagacaacactgaagaaggttaggtacggcaggagactgacaagaaagtgcattgaagtcctcaaatkactgccttctataatgtctccctcatgccttctgctgacaaagcttagcaccatatgaactagcaaagtaaaggtatttgaataactcagttttaatttttaaagatctggaaattaagggtcaagttggaa

SEQ ID NO: 634469 - DNA, 521 bp, Homo sapiens
gttgatctttgaagttcgtctggtgtttgttctttgaaagaattagagcaaccagcaacccttcttgcatttctaatacatggttcagaagctcttaattccatatggcagattttaaaataattactaaatacatacttatgaacatggataggattgatctccwaatattattaagtaaaaaataaatttgctaagtgatgtatatattctactgaaaattacgttatttagaaaacacacagagcagtatgagatagtgcttatgtatatattcatattttaaaagtataaaaacagactggaaaggtacacagcaattttatgatagtaattaccccccggggagaagataataaagaaatttcacccttatctgcaatgttctatttcttttataaaaaataattactttatttttttattttttataaactattactttaatgtctgactagcacatcaaccgaagtatcctcaaggccaaaagcatcatatattccctatgatgtgccagtatg

SEQ ID NO: 634470 - DNA, 606 bp, Homo sapiens
tgtcatgtagcagagaaaaaaacatggattctgtttcatcaagcaagtaaaagccaaatgataggagttacagtggaaaagagtttaaggctataacctctttgtttttctggagaaaaaaattcatcttagcaggcagtgagtttcttgttaycagaggtattcaagttgagttatgacaataacgtggatcaattacagaggggattcaagctctcagtggaggatgggattaagtaatccatgttttagttcattttgtgttgttgtaacagaatacctgagactggataatttataaagaaaagaggtatatttagctcacggttctgttgtgcagaaagttaaaaattgggcagctgcatctgacagcttttggggagtttctcatgctatctcaaaatggaaagggagacacctgtgcaaaaagaacaaaacactagaagcaacctcgatataacaaccaactcttaagggaattaactcattcctatgagaactaaccagagctgcaaaataataataataataataataataataataataataaataaaagacattaacccaacctaacgactgaatcactttttaaagtctcctcc

SEQ ID NO: 634471 - DNA, 606 bp, Homo sapiens
tgtcatgtagcagagaaaaaaacatggattctgtttcatcaagcaagtaaaagccaaatgataggagttacagtggaaaagagtttaaggctataacctctttgtttttctggagaaaaaaattcatcttagcaggcagtgagtttcttgttaccagaggtattcaagttgagttatgacaataacgtggatcaattacagaggggattcaagctctcagtggaggatgggattaagtaatccatgttttagttcattttgtgttgttgtaacagaatacctgagactggataatttataaagaaaagaggtatatttarctcacggttctgttgtgcagaaagttaaaaattgggcagctgcatctgacagcttttggggagtttctcatgctatctcaaaatggaaagggagacacctgtgcaaaaagaacaaaacactagaagcaacctcgatataacaaccaactcttaagggaattaactcattcctatgagaactaaccagagctgcaaaataataataataataataataataataataataataaataaaagacattaacccaacctaacgactgaatcactttttaaagtctcctcc

SEQ ID NO: 634472 - DNA, 621 bp, Homo sapiens
aaactgataagaaggcagtgaagtaagtgtcttcaagaaatgattttaaaaaataaatatgcaactgtaaaaggtataaataactctggggttggcattggaagtacatttatggacaatgctcactgacctaatcatagctcagctcatacttgaatcacacccaaagaaaaatggctgtgttgatgttgaaratgcaaatttccaattatggataattttgggttcctggaaaaatctattaatgtacatatttttgaagtacacatatggacaaagtatacaaattatatccagcttgaggaattttctcaatttgaatatgttatgtaaccagtacccaaaccaaaaaccagaatgtaatcaataatcaaagtgattccttatgcctgttccagtcactatttttgtttcaagggtaatcattattctgactgttaacacattagttttgcttgtttctaagctttatatgaatggaattatacaatatatgttttgtgtgtatggcttcttttgttcaacattttgtccactaaaaatatttatgaggttatatagagttctctagtatatatacatatatactatgttgtataattataccacagtttatttctc

SEQ ID NO: 634473 - DNA, 576 bp, Homo sapiens
tctatcttgctaacattttcataaaagtagcattttattttgtttttccacactttttgttttttattttgttgatttatgcctttacattttttattatttttattattttcattgtgggagttaatataattattatttttccagtattggagttgaatgtctaactattttgattcatgtcccttttttttttttaatcttaatataaaggttctggccaggtgcagtggcttacacctgtaatcccagcactttgagaggtcaaggtgggcagatcrcgcagtcaggagatcgagagcagcctggccaacatggtgaaaccccatctctactaaaaacacaaaaaatacctgggcatggtggtgcatacctgtaatcccagctactctagagactgaagcaggaggatcatttgaacccaggaggcaaaggttgccgtgagacgagatcacgccattgcattgcagcctgggtgacagggcgagactccatctcgaaaacaaaaataaaaataaataaataaatattctgctgcattttacaaattttgacaggttgtattacattaatatt

SEQ ID NO: 634474 - DNA, 529 bp, Homo sapiens
cttattatttcaaaatattctatttttccttttgattttacttttgattcttaagttgtttataaatgtgtagtttagttttcagttgcttaacatatttccattatctttctgttattcctatctaattttattgtactgtgacctgagaatatactttctataatttgaatttttaaaaattrattattattttatgcaaaaaaagaaccagattcttttagtaaatgttgcatgtgctcatgaaaagaagtctgctgttggggtaaagtgttctataaacctcaattatgtcaagttgattgacaatgttgttccaatttcctatatccttactaactgacaacttgaagttcttccactgctcactgctgctggacttactctattattttttcagtttctttttaaactcttttccttttcctttgcataatttctattgctatgtctttaaatttaccattttttctacctcatttaatcttctgagtaatcccatccattgtatattttataacagtcattg

SEQ ID NO: 634475 - DNA, 647 bp, Homo sapiens
tccattttgttctgtactaagaaaaattcttctgccttgagatgctgttaatctgtaaccctacccccaaccctgtgctcccagaaacacgtgctgtgtcaactcaaggtttaatggatttagggctatgaaggatgtgctttgttaaacaagtgcttgaaggcagcatgcttgttaaaagtcatcaccactccctaatctcaagtacccagggacacaaaacactgcggaaggccgcagggacctctgcccaggaaagccaggtattgaccaaggtttctccccatgtgatagcctgagatakggcctcctgggaagggaaagacctggctgtcccccaggccgacacccgtaaagggtctgtgctgaggaggattagtaaaagaggaaggcctctttgcaggtgagataagaggaaggcatctgtctcctgcttgtcgctgggcaatggaatgtctcggtgtaaaacccgattgtatattccatctactgagatagaagaaaaccaccttagggctagaggtgagacatgctggtgggaatactgctctttaatgcattgagatgtttatgtatgtgcacatcaaagcaaagcaatttttctttaccttgtttatgatacagagatatttgttcacatgttttcc

SEQ ID NO: 634476 - DNA, 647 bp, Homo sapiens
tccattttgttctgtactaagaaaaattcttctgccttgagatgctgttaatctgtaaccctacccccaaccctgtgctcccagaaacacgtgctgtgtcaactcaaggtttaatggatttagggctatgaaggatgtgctttgttaaacaagtgcttgaaggcagcatgcttgttaaaagtcatcaccactccctaatctcaagtacccagggacacaaaacactgcggaaggccgcagggacctctgcccaggaaagccaggtattgaccaaggtttctccccatgtgatagcctgagatagggcctcctgggaagggaaagacctgrctgtcccccaggccgacacccgtaaagggtctgtgctgaggaggattagtaaaagaggaaggcctctttgcaggtgagataagaggaaggcatctgtctcctgcttgtcgctgggcaatggaatgtctcggtgtaaaacccgattgtatattccatctactgagatagaagaaaaccaccttagggctagaggtgagacatgctggtgggaatactgctctttaatgcattgagatgtttatgtatgtgcacatcaaagcaaagcaatttttctttaccttgtttatgatacagagatatttgttcacatgttttcc

SEQ ID NO: 634477 - DNA, 585 bp, Homo sapiens
gctccacctatttatccttccctctccttctcaacctctggtaacaatagatctttttactctgtctacagttttttgttttccagaatgtcatgtaggtggaataatacattatgtagccttttaatattggcttatttcactttgcaatatgcatttaaagttcctctgtgtcttttcatggcttgatagctaatttcttattattgctaaataatagtccattgcatggatacaccaaagcttattgattcacttactgaaaagcatcttggttgctgtagactcacttttaactgtaagttacaatcaacagatcatttacattttaagaagtactcttttccagcactaatgccaagatgtgcttccttaacaaaaaaatccctctaagaacaatacctttcccattcttyaattttcacatgtattttagatacaaaaacacaattcaacagatgttttaagctaatcactattataaataacagaaatttttgatctgatattttatctgtccctaagaattgtgaggacgctatgcaactcacaaatgtaattgtcatttattcatgcaaacaataa

SEQ ID NO: 634478 - DNA, 594 bp, Homo sapiens
gtttgcactccctatttccaccccccaccacagaaactttcttgccctcttgtcacctttctctttattactttccttctaattttctcctttatcttattttctttctatctttcctcttggacatagtagtaacataaccaggagagtgatttgagattatcaatcttgcagctttaagaagtataagcttcaaagggattagcctacatgtggggaaaatgattagaaaatattacaaatttttaggcaagtgatgatgaggttctgaaatggtggttgcgggaaaggtaaagagaaggtggatgcgagaaatattgtaaagatggaattgacagcttcacaattgtaktaaggactagagcatactttcagaacattagataatcatttgcacatcataactgcgatttttcaactgctaatttggcattgcaatgtgaacttcaacaatctgccctttatatgcataaaaatatcatgaataaatcagggaaaagctaatgagaaaatatataccaaagagctaagtaagctccatgaagaaaatcaacaacagtttgtaattcagttcaatcatgtgctgggtaattg

SEQ ID NO: 634479 - DNA, 628 bp, Homo sapiens
tatatctaatgtatgaatctcattctttcattaggaaggtgttttmcccctcatttttagcaactcctgtagataaaaattgtctgattataactcactttcatgtttcaagtgttggttcctagttttaccttctagagtggctgtgttggagcctgggccttggggaaccctctgaacaccttaaaattaaaataatttttattttgtcatttcacatggaaggacatggagaagggtaatttctatttctatatccaaaacacatatgacagtctagattacctaggctgggaccttgtggcactgtatgtgtgctcccatggaaaccttgctataaatgctggctttatcttttgatgctattatgttcttataattaaggtacaccattggctaaattggcttttgttggttgatctggggactgaatcattactaacaatgaaaggtattacattatttcctgtacaaatgcattctgagctctctatatgtggttaatctggggaatatcacaaatccctaagaagggaactgactagattccagattggcctgatccctgcacaaagcagaattgttatttctcatgatttagtcattgtatgcacatttattaatgcta

SEQ ID NO: 634480 - DNA, 643 bp, Homo sapiens
tgtggcaataatcctgtctctgcatctttgcaagcaggagggaaggcaggagataagagttgccacagggagtctatatttaatctacaactggcttatccaagtgtcttattgctccccgagggtctcaccacatgcactattgtgagaaaaaaaatgacacagacggaaggaaagaaaagttcacctaagattggtcttcaactaattaattcagttcagaattggcacagaagtttttgctttactagtaatgcagactgaagaaactagatcttcctaagaccagcacagtttacctttctggcctgcctgtggctgatgtgggggaatggctgaccttgttcttggcaacaatcactaaagctgctgggaggcatctataaatgctaccwccagtagttccatcaaggaaaccccactgatccatactgcagatttttatggacattcacacagtggaacaaagtaggtatctgaaacaattacaaaatcaattatgaaaacagaaatacataaataattaaaacataaaataaataaatcttcagcctctaagggaggcatagaaaacagctactcttctttaaacacaactttaattttcattccattgcttacaagaacacagtgattgtctacc

SEQ ID NO: 634481 - DNA, 630 bp, Homo sapiens
ggaattgtcttacacaattatgaacgctgaaaaatcccgcaagaggctatctgcaagctggggactctgggatgcttggagtgtggctcagaccaagtccagaagcctcagacccaggaggtgatgatgcaactctcagtcccaggccaaaggcctgagaatccagaagctactggtgtgagtcttggactccaaaggccacatgtcctggagttctgatatccaaaatcagggcaagaaaggtttcacaacttcagaagacagagaaacaggaagaattcacctttcctctgtcttttggttctatctgggtccaaagcagattagttggtgcctgccttcatttagggtaatcttttccactccgtccatggactracatgccaatctcatttggaaacattctcacaggtgcacccagaaataatgctttaccagctctccaggtattccttaatccagtcaagttgacacctgacattaaataacacaatggttaacaatctgtatgcatgtttctcagcgacttaatatgctataaccatgaggttcagtatatactatggggacacagatgaatgagagaaagagttttgacttcttgaggtgaggttatacacatataacctt

SEQ ID NO: 634482 - DNA, 630 bp, Homo sapiens
ggaattgtcttacacaattatgaacgctgaaaaatcccgcaagaggctatctgcaagctggggactctgggatgcttggagtgtggctcagaccaagtccagaagcctcagacccaggaggtgatgatgcaactctcagtcccaggccaaaggcctgagaatccagaagctactggtgtgagtcttggactccaaaggccacatgtcctggagttctgatatccaaaatcagggcaagaaaggtttcacaacttcagaagacagagaaacaggaagaattcacctttcctctgtcttttggttctatctgggtccaaagcagattagttggtgcctgccttcatttagggtaatcttttccactccgtccatggactgacatgccaatctcatttggaaacattctcacaggtgcacccagaaataatgctttaccagctctccaggtattccttaatccagtcaagttgacacctgacattaaataacacaatggttaacartctgtatgcatgtttctcagcgacttaatatgctataaccatgaggttcagtatatactatggggacacagatgaatgagagaaagagttttgacttcttgaggtgaggttatacacatataacctt

SEQ ID NO: 634483 - DNA, 484 bp, Homo sapiens
cacggatgagtaactcagagagatggttagagcttgggcttgtatagcatcttaaaaagggacaataaatttgtagaaaagtgaaaagacaaaggaaaaacattaagcttttagaagtggaaaactgtggtaaggtaaatatataagggaaattaatggaatataagggttatcttagtagggcttgtttgtgcaggtccatcacagggccatctcatgtctggtgataagactatccccttcctggatgggtatgggaagttgagggggaaaatcacctccataagrggaatgaaatatatattctgttttcaggtagacaaaggtgagcagaaagctcaccctgtttctgctatttcttaattgccttcagctcaaaataatctgtatgctagagtggcatattttgggatgacatactttgaacacctccatgtacataaagaggttagaacagtgtctggcttattataatcattcaata

SEQ ID NO: 634484 - DNA, 569 bp, Homo sapiens
aaactaggtgacagagcaagaccctctctcaaaacaaaaaataaagaataaaaattaaaaatyatttctgaatggcaagtctgcatgtgacctctaacaatatttaatataaaatgataaaactggagaaatggtgtataacacaaaaaatctgctctttaaacaggctgaaattataccctgggagtcagaattcataacacattatcaagatataatgatatttctagatcttcaaactgggcagtgataatttatttttttcccccacttcaccttgaactgattttctttcccccactttgggtaattttgtccaattttttatccaaggacagttttgacctaattcccagagtggtatggaagagtcatgtaggctggaaattgatattgacaatctgcccaaatgattactgtaaatccaaaggagcaactaattttcaatttctcaaacctccaaatactagctggctgaggcttatcaaataaaaaagaaacaaaaagaaaaaaaaaaaaggaagaaggaaaaacatagaaaaagccttgattagttaacaaccaaatag

SEQ ID NO: 634485 - DNA, 622 bp, Homo sapiens
gcatgtttttggcataaaaagaaactcatagaccaatggaacacaatagagagcccagaaataaatctacacatttatggccaattgatttctgacaaaggcactaggaacacacaatgaagaatgaacctctctttaataaatgatgttggaacaactgaatatctatacccaaatgaataaaattagactcatatctctccctatataaaacactaatgcaaaacgcactaaaggcataaatgttatacatgaaaytatagaattactataaaaaagcataggaaacatgctccaggacagtggtctggacaaagactttttggatatgacctcaaaagaagcacagaaagcaaaagtgaaacagacaagtgagattacatcaaactaaaaagcttctgcacagcaaataaaaatatcaaaatagtgaagaagcaacctatgaaatggaagaaaatattttcgtatcgattatatgataatgaattcatattgaaaatatataagaaattcaaacacttcaatagcaaaaaaaaaaaaaaaaaaatcagaaacgggcaaataacctgaatagacttttatcaaaaaaagatgtacaaatgaccaacaggtgtataaaaga

SEQ ID NO: 634486 - DNA, 600 bp, Homo sapiens
aaaagagatggaagaaacaatatgaccaaaagtatggagacatgattgagaagaacattctggggacagagagaagaatttggctgaatcataccattcggattaggaaactaagtcattcttatttgatgaaccatactgtgaaagagccccttttcctttctagcttatgatattcagctatacctccttctgttacatgtatgaattattcattttaatcatgtcctccaccacacctgagcattattaccaccttcctgttgttcttgtgccttggaaatcataaattcaagtaaatgactctataattagaactttcaagctttctcacagcctcaagttatttattgtcttagactttatagaaacttttcttccctttatacctgtattctctagtcttcaagscttcttctagtatccacaccttagataccctgtctccactttatgagtaatcagatgaattactttcacctgctctcttgcttctccattacattgcaaaactcaatttcatgccaatcctgtagctacattttgtttccacatacacttctgaacactaatggagaagatatataaccatgtagattc

SEQ ID NO: 634487 - DNA, 528 bp, Homo sapiens
gagcattattaccaccttcctgttgttcttgtgccttggaaatcataaattcaagtaaatgactctataattagaactttcaagctttctcacagcctcaagttatttattgtcttagactttatagaaacttttcttccctttatacctgtattctctagtcttcaaggcttcttctagtatccacaccttagataccctgtctccactttatgagtaatcagatgaattactttcacctgctctcttgcttctccattacattgcaaaactcaatttcatgccaatcctgtagctacattttgtttccacatacacttctgaacactaatggagaagatatataaccatgtagattcatattttcctgaatttatgatcatccagactactttttaataccacttgagaagctctcttttccaaatcttaaaatgtgtatgcttctcrgtttctcaccataactttctgtcattgagatttacgcatttatctacaggcaagtctgtatctttttccttcctcccc

SEQ ID NO: 634488 - DNA, 595 bp, Homo sapiens
tctcttttccaaatcttaaaatgtgtatgcttctcagtttctcaccataactttctgtcattgagatttacgcatttatctacaggcaagtctgtatctttttccttcctcccctccttctttccttcctttctttttctctttctttctctatttctttctctatttcttccttatcttcaatctttctttcactctctcttttccttccttccttccttccttccctccttccctccttcctttcyttacttttctttctttcttctaacttaaggcttccctagtcttaaaagtcaactttcaacctatgctctttatcctatccattttctttccttttaaaagttattccaaaaatgactcccttctatattgccgatgtctctctattgacctgtttttggtcactagtttaagcctttctacaggacagattaaaactagaaaaacaaaatgtcacattggtcatcatcttcctccactttcagtcacttttaattcctcaagtttagcccaagtgtctggacagcataatctaggctctttctttctaactcatcccattcctacctcacagaacaacaaatccatt

SEQ ID NO: 634489 - DNA, 446 bp, Homo sapiens
cctagtcttaaaagtcaactttcaacctatgctctttatcctatccattttctttccttttaaaagttattccaaaaatgactcccttctatattgccgatgtctctctattgacctgtttttggtcactagtttaagcctttctacaggacagattaaaactagaaaaacaaaatgtcayattggtcatcatcttcctccactttcagtcacttttaattcctcaagtttagcccaagtgtctggacagcataatctaggctctttctttctaactcatcccattcctacctcacagaacaacaaatccattgccatccagtttatgtaaactccatgccactgaaggtcttgagcaaatgtcagtagtgacttcgtgtaacaaagtccagcagaaatttctcaaatattttcatattttcttctggcttttacaatagctataa

SEQ ID NO: 634490 - DNA, 479 bp, Homo sapiens
cattggttacattttgatgagacgtgtgaaagttggtggttagggaataggtgagttaggaatggtgagattgtggagaaagtttgggaaggtttcagattatgaattttaagtctcaattacgcacaattctccttcaagtcaacccttagctaacatctttttcacagaagaatctggctacagrttttaaattctttttgttttttctatcaagttataaagtttctgccaattctttttctgattatccaatgttttacgttgactggttgctgaggattttcctttgaaacttttgaaataaggtggtatttattttctggctgaaattgtgttctttccttccaataaggaaatgaagggtttgaggagaaaatgaactagttaggtgtttgtatcttcctaaggaggagacagttcagtggcaacagagtgtatactgaagtaaacgttgtatactattgtttttccatgtc

SEQ ID NO: 634491 - DNA, 552 bp, Homo sapiens
agcatggatttggtatcttaaggaagcttagatttagagaggaaagctaattcttttggggcattttctttccttgtcttccatttaccataaaatgatttatctttaaattcagctttttactagttaagtaactacmgtcagcctgcttagaagtttcagagagaattattagccaatattcaggctaggattagaacgtttatttgtctggaatagtgtttcttacataaactcctctgaaacttgcaactgagatgggcagaaggacttcacctgattaaggatacagagaatctgttttctgactttctccttaaagacatgtttaagattatcctgttcttttctttgcttttgcacacagctaccaccttggtttaagtctttcttatactttctctccaggataccagaaacaaacaaacaaacacacaaaaaccaaatgggttccaggctttacccacctcattccattctgccatatgatgtaattcaaagccattaataaaataattaaaagattaggagtaagaatacctgaggtaaagt

SEQ ID NO: 634492 - DNA, 433 bp, Homo sapiens
ttactagttaagtaactaccgtcagcctgcttagaagtttcagagagaattattagccaatattcaggctaggattagaacgtttatttgtctggaatagtgtttcttacataaactcctctgaaacttgcaacygagatgggcagaaggacttcacctgattaaggatacagagaatctgttttctgactttctccttaaagacatgtttaagattatcctgttcttttctttgcttttgcacacagctaccaccttggtttaagtctttcttatactttctctccaggataccagaaacaaacaaacaaacacacaaaaaccaaatgggttccaggctttacccacctcattccattctgccatatgatgtaattcaaagccattaataaaataattaaaagattaggagtaagaatacctgaggtaaagt

SEQ ID NO: 634493 - DNA, 506 bp, Homo sapiens
gttaaaatagtgccaacctatagagttgttgagaggattatataaaccaatgcacctaaatcacttagaaaatacctgacatgcggtaagaagggactagttatatagtaaaactaagatgtatggaggtcaagcaatgagaatataagaggggcatttataaaagagtaagaattaggtcaatatacataaatcacctgctctaatgcaggaactatgctagaaatattttaaaaattgtatattaccctatccattaaggcttgaaartttcaatcctaagagacagagtcaatggtggacatgcaggagaagttgcaggggaagatgactttaggtttgaacattttgacttgaggtctgattgattcatctacatagaattgtgaagaactgaaaatttcctattactgattgctggagtctccctgcttcttgtcactggaaaattaactgtttatttaactattaaatatacatcgcattaattaaaaaattatgttgtt

SEQ ID NO: 634494 - DNA, 587 bp, Homo sapiens
ctttatgacccaggatatgttttaatattggaattatttcacgtatacataaatgtaaagtctatagttacagattataaatttaaattgcatctatattttaaacttgaaagtaattattattattgttttctgcagtaaatatttagtacaagttactggtttccttgttcttgcatttccaatactttgcttggtatgatttttcttttgtctaaagaatagtctttagtatttcttttagtgcaattctgatgataatgttttatttttgctttttagttttttcccccttgttttaatttttcttattccggaaaaataagttttgctggattaagaactctaagttggaaattgtttcagtcttttaataatatttcattatatttttaccttctgcgttttctgtgttgagttcagttgacagtttaattgacactgtttggaatgcgtwtttcttgtttgctaatggttctaatatttttatttgtttttagtttttgacaattaaaattcaatgagcttgggtatgaatttatattttgttaggatttttagagcattttttgtgtgtggcttattga

SEQ ID NO: 634495 - DNA, 570 bp, Homo sapiens
tgtaattaatgggaattaacatctgacctaatactctcacaatattcataaatttcttaactaaatttcagtaaatgttaagctaatggaggcctgtgatttttgttgtagtgttttctttaatgggcctggtgacttgtacaaggctgagtaccacgtaagtcatcagtaaatgtttctttaatttttcattagttgaccctatacaacttattgtctatgctatttatttcagcataagatcrcatagttgcttaaattttcttattcaacccacatttcttgagctcctactgcatttcaggcactgtgccatgatctggatgtacaaaacacaaaagagaaacagtcttcaaaaagctcatagcctagggaagaaagaaaacatacaaatatcacataggcatacttaaattacttaaattaccctaaagcaaatgagtataaaaatgcctgtaatatatagtaaggtagttcttttagaaacagaacattaaaattagaaaatggaaaacattagtggcagacacatggtatttataacagatgcaaacagcaaaaattatcaaa

SEQ ID NO: 634496 - DNA, 391 bp, Homo sapiens
tcactacagcaagttttgaggaagcagttacaaagcaccagaaaaggcagaagggagtggtttaatgaaatagaataaagcattyaggaagggagataaaatgggaaatgctagaacagaatctttgctttagcctcgagctggcaaaatttcaccactgacaaaacaaaatggtaccatgaaaccatgaaatcaagagggtgacccagacaaatcttcttgtcaaatggtgtgtttttcctgttcaatacatcatctctggttctttattttttctgaaataaattctctcagagaaaacacacattctagaaaataaaatgttcaagctacaaaatgacatctcaattacttgcacattcaatcattcttacaagtaaaacaaaattga

SEQ ID NO: 634497 - DNA, 556 bp, Homo sapiens
ttctgaaagcatccacttctcattcatgaacttgcttcctactctagaagttgtctttcctgagatgcatttgtaaaaaaaccatagttattgacctgatatctcagaagttcagtttgctcttgatttctatggccttattatattaattttgacgtgtcatcttgattgtttcttaatctatattatttaaagtttcctcttccctcacccctccctccgtaatacattttgctacagttttagcgatggttttacatatgtatcaggaaataaatttaaactacctacctaagcaaaccaaaaataatgttattatcatttccctttttccttccctttgccattcagattcaaacatattctttaatacaattgcaaatagacaacagtaatagcaatggataatcttttaattgatttttgtaactctgatgaatgagaagaggaaataatattatctatcatatatttattctcatttcatcattaccttttggttctttctctcttctactctctttcttatyccccttgggactacagacttctaaaa

SEQ ID NO: 634498 - DNA, 402 bp, Homo sapiens
ctacatcttataaatttgttaagctctgtgataacattatattcaatatgatttatatttattgggcaccaattatgtgccaggtactaagcataattaataaaacaattaataatcttggttattttggtgctttcattccagtgagaaaagagagsaaataattaaaattaacaagtacaatacactgtatgtacattgaatataaatgtagaggagaaaagcaggggaaatcaatagggatattgaaaggcacttcaatttagagatcgtcagtgaaatcctcactaacaaggtactatttgcaaaatggcttgaagtagatgaagaaatgacctatgtctgtaatgagggatacaccaaactcaaaggcgcctggaacattcaaggaaaaccaaaagc

SEQ ID NO: 634499 - DNA, 402 bp, Homo sapiens
ctacatcttataaatttgttaagctctgtgataacattatattcaatatgatttatatttattgggcaccaattatgtgccaggtactaagcataattaataaaacaattaataatcttggttattttggtgctttcattccagtgagaaaagagagcaaataattaaaattaacaagtacaatacactgtatgtacattgaatataaatgtagaggagaaaagcaggggaaatcaatagggatattgaaaggcrcttcaatttagagatcgtcagtgaaatcctcactaacaaggtactatttgcaaaatggcttgaagtagatgaagaaatgacctatgtctgtaatgagggatacaccaaactcaaaggcgcctggaacattcaaggaaaaccaaaagc

SEQ ID NO: 634500 - DNA, 429 bp, Homo sapiens
gatcaaaaaaacctaggacacattttataaatagagtaatgaagtgagaatgttaatatggtgaaagatacaactggaaagcttagaaactatagagatatttatattgcagataattattaggaattaaaaattgtagttgtattaatattgatttattttcctctgaacatatagattatttatatgtatttgtatatagatctatgatataatgatatagataaatgatacaattatatatagtsataaatatgaaacattgaaagcattttaatctcaatttcatcatttatagatgaaaaaactgatgtctgaaaaattatgatgtttatacaaagttaggaagataattagcaacaaaaacaggctataaaccgagtgtgaattatcaagcctctaggatggcattgtgcacacacacaaaaa

SEQ ID NO: 634501 - DNA, 586 bp, Homo sapiens
agccatgacctgattctcaacaatcatagtttctatcagatgtcatgtgcttcctaacgtttgctaattgatagtgataagtgactagactagagcacttagtatttgccaagcctcagtatgagcattttcaatatattaacatattgaatcctcccagaaatccctaaggcaggtgtcattattaccaccatttacagatgagaaaactaagtaaggcaaagaagcctaattaatgtgcatgtagccttactgcaaatggaataaccaggattcaaacccagttttgtggcttgtaattggtttttatgattaaatccccttccatattaatgcatctgttgagcttaggatcatcatcatttctattctaaggtgccaagcagcragttggattgatacatgctaatgtgtttaaggagaaacttggtgatgtctagttcctttgtcccagacacttctctgctctttatatttcaacaatggcctcttagagaggtcatttatattagattcagaattggtaagagtacctttatgtaatttcctcatttgaatcctcctaataatcagctggtgagatgag

SEQ ID NO: 634502 - DNA, 625 bp, Homo sapiens
aatctggcctaaatatcagaaagcttacattatctgctgggccacagagctggtctgtgctatagtccagaatcagaccacattgaatatatgtatatatatatgggctttttccacactatcatatagactcttctccatagccttcaagaatgtgcagtccagaaaatatcctaataaaaaccttttacaagacaagaataataattaaatgtgaagcaaatgttatagaggaaatttaactgctttcaccttgcagagctccaaatattcatcctcaaaattaggaacagtctcaagtttgaccatgggtttttttactgtttttttmataaaggaattttggtgcaataatgaattgaagtataaattatttcaatgattgactgaatcaaattataaagtaatgttgtgataatgagtttctaggactgagaaaaaaatgtttaccaagaacatcaaaagcaaaatgtgtaggcctggctactaaaatataagcaaccttcctcagctgaaaagacaagcaaacattgaattatagaactttcttctatgacatacctctaacagaacaaagaagattttcaactaagaacataatcttgatcctaaagaaagtgagata

SEQ ID NO: 634503 - DNA, 634 bp, Homo sapiens
tttgcctttggctaggaggcaggaagccaagctctggtccaagttcagtcctaacatttgatgagaccttggacaagtcactgtcccacccagagccacagtttcctcctctgtaaaagggggtaaaaagtccttgtcagggcctctgggcgtggctgtgtgtgcctctagtcccagctactcaggaggctgaggcaagagaattgcttacccgggaggtggagattgtggtaagctgagatcgcgccattgcactccagcctgggcaacaagagcgaaactccgtctcaaggaaaaaaagaaaaaaagagagtggaatagaaaaagagaagaacagaattgagcagaataaactaaaatagataggaataacagtagtaactatgagaccgcattgcaggtagcaagggtaagtggttctgagagaygtcctttagggtactcaagttctatacagtcagtctcgtgagtctaccaaggtaaaatgtatttcttactgcagggcacagtctgcctgaccttggctgtactctggggacacaggcaggatctggctgggccccagccgtgagcagcctgagtctggtgggagacaggtgtgtatgcagggcacaggggagcccagaggctggag

SEQ ID NO: 634504 - DNA, 634 bp, Homo sapiens
tttgcctttggctaggaggcaggaagccaagctctggtccaagttcagtcctaacatttgatgagaccttggacaagtcactgtcccacccagagccacagtttcctcctctgtaaaagggggtaaaaagtccttgtcagggcctctgggcgtggctgtgtgtgcctctagtcccagctactcaggaggctgaggcaagagaattgcttacccgggaggtggagattgtggtaagctgagatcgcgccattgcactccagcctgggcaacaagagcgaaactccgtctcaaggaaaaaaagaaaaaaagagagtggaatagaaaaagagaagaacagaattgagcagaataaactaaaatagataggaataacagtagtaactatgagaccgcattgcaggtagcaagggtaagtggttctgagagatgtcctttagggtactcaagttctatacagtcagtctcgtgagtctaccaaggtaaaatgtatytcttactgcagggcacagtctgcctgaccttggctgtactctggggacacaggcaggatctggctgggccccagccgtgagcagcctgagtctggtgggagacaggtgtgtatgcagggcacaggggagcccagaggctggag

SEQ ID NO: 634505 - DNA, 635 bp, Homo sapiens
aagagaaagggcgtttgggaagtcggcccagcagagcaaatgggacacaggcccagcttctgtttccactcagtcctcgtgggcctctctttgaggacctcccgcactatctaagacatggagggggtgggcttgtggcccccacagtacgggtccccagaggctcagcggaagccagggctgcaggccctgargtccatgtgatgaggggtcttcaggctccagcaaggagaccctcagccttcctgagttttctgcaaaaagggagtgcagtgagaacccaggccacatcccaaacaagtggtggcccttttgtggctgcgattgccgtgctggtcaggacccaagtggggaagacggaaaagatgcaaaggaaatcaagtgtggaccccgaccttggcaagggctcccttctgtcctggggcctgggggtgaaattggcagctttattattcagggctacttctcttactaaggtagagatgcatgtatctgtgtctacttagaccttaaggatgccacccagggccaaggttaagattacaagccgatgatgataagcaaaatgcggtctatcatacagtgagtattatgcagccacgaaaaggaatgaagtactgacgtatgctgcaata

SEQ ID NO: 634506 - DNA, 635 bp, Homo sapiens
aagagaaagggcgtttgggaagtcggcccagcagagcaaatgggacacaggcccagcttctgtttccactcagtcctcgtgggcctctctttgaggacctcccgcactatctaagacatggagggggtgggcttgtggcccccacagtacgggtccccagaggctcagcggaagccagggctgcaggccctgaagtccatgtgatgaggggtcttcaggctccagcaaggagaccctcagccttcctgagttttctgcaaaaagggagtgcagtgagaacccaggccacatcccaaacaagtggtggcccttttgtggctgcgattgccgtgctggtcaggacccaagtggggaagacggaaaagatgcaaaggaaatcaagtgtggaccccgaccttggcaagggctcccttctgtcctggggcctgggggtgaaattggcagctttattattcagggctacttctcttactaaggtagagatgcatgtatctgtgtctacttagaccttaaggatgccacccagggccaaggttaagattacaagccgatgatgataagcaaaatgyggtctatcatacagtgagtattatgcagccacgaaaaggaatgaagtactgacgtatgctgcaata

SEQ ID NO: 634507 - DNA, 581 bp, Homo sapiens
cccaggcatttgaaagggacttgtgcaaatggggtcctttcatcagcttcacataaattcaccccaaacataacattattaaacataatcatctaaaattagaaacaacctaaaatgaccaacaattggggatggatataagttttagtatatttgcataagtgatattaatcactcatttaaartgatatgaatgtagcagtctactgacatggaaagatgctcaaaacatagtatgaagcgaaaaagcaggttataaaatggtgattacgtatcaaaatcccagttttgttaaaataacataatatttatgtgtagtaagatgtgaaatgggactttcctgtctcagaactgctgctgtaccctagagcctcaaaagcagcaccagacacaatccagcaggacttgggcagattgtgatgccctcatacaggctcagagcagccttggagcaggcactgacctgggagagaaggatggatgcaggggttttccttggggagagtcacctcagtgctgtgcctcaccccacataactcaagccaagagactggggcttccctggagcttgggggaaacag

SEQ ID NO: 634508 - DNA, 570 bp, Homo sapiens
aaagggatggatagatggacaatggacaagtaaacactgtggtccattaaatgcaaaatggcccatatcctccacccsctctatgttcaccccattgcaatgggactctgaagcttcttccatcaagaggtggactttgtttcctcagctcttgaatctgagctagtctttcattttgaccaatagaatacatcagaaattgtaatatgcctgatcccagattagatctcaagagccttgtgtacttctgtcctctctctcagaaccctgccacatcatgtaaacaatcccggactagcctgctggaggaagatagactgtggaacagaattgagttccacaaggctccagagacatgagagaacccaactgagatcagcagagcagctacctcacccatggctgaccacagatgtatgagtgtgtccagaagaactttctggtggccccataggtttgtgaacaataataaatgcttatcattttaccctattgagtttgggggtatttattatacagcaatagctagctgatataaatacataaataaatgaatggaagtaattgtac

SEQ ID NO: 634509 - DNA, 570 bp, Homo sapiens
aaagggatggatagatggacaatggacaagtaaacactgtggtccattaaatgcaaaatggcccatatcctccaccccctctatgttcaccccattgcaatgggactctgaagcttcttccatcaagaggtggactttgtttcctcagctcttgaatctgagctagtctttcattttgaccaatagaatacatcagaaattgtaawatgcctgatcccagattagatctcaagagccttgtgtacttctgtcctctctctcagaaccctgccacatcatgtaaacaatcccggactagcctgctggaggaagatagactgtggaacagaattgagttccacaaggctccagagacatgagagaacccaactgagatcagcagagcagctacctcacccatggctgaccacagatgtatgagtgtgtccagaagaactttctggtggccccataggtttgtgaacaataataaatgcttatcattttaccctattgagtttgggggtatttattatacagcaatagctagctgatataaatacataaataaatgaatggaagtaattgtac

SEQ ID NO: 634510 - DNA, 468 bp, Homo sapiens
aattctattcccaactccggtgataactggacacaaccttgggcaagtcagcgaccctcttccaaagttcatttcctccttgtctgttcatctgttcctcctttccttcattcgagaagggactcacctgtgccaggccctgtgctgggcactagggacccaaacatgaaycagaatgtaaacatatggaaaaatgtctaaccttcttcataatcagagaaatgccaattaaagctaagccaagatatcatttctagtctattagattggcaaaaactcaaaagtttgagaacgtgctctgtgggcgagactgtgggaaaagaggcccctctcgtacattgtctggtgggaaaacaaaatggtgcaagccctacctggaggggaacttttgccgcaaaattacatttgaatttaccctttaccctggcaatcccctcttggcaaaaataagagaagacagattcataa

SEQ ID NO: 634511 - DNA, 576 bp, Homo sapiens
ttccttcaaattggtatgttccaccattgaaggtgaggttcataagctgaaatatttcaccttattatctgttgataggtcacacagtgcaagattgcaccatgcttttgtgggcaaataacacactgcccacaaaataagccacaaatttcctccttccctctgtgggaaatatgcatgaggaattctgcaagatttctctttctatgtgttacaattgcaaatagagggaggctgcaactttttcctataggccatgagacatagagctttctaagcttagcttggggcaacactcacaaaaatataaaggaggtaaagtctctggatgtctgttgtgcttcatgcctgccttggtggctgaagcaggtatagcctaagctgcctaagtcccttgtggacatgaagcagtggcctccctatgtaaagactgccygctatattagtccattttcttactgctatgaagaaatgcccaagactgggtaatttttaaagaaaaataggtttaatggactcacagttccatgtggctggggaggcctcacaattgtgtcagaaggtgaaggaggagca

SEQ ID NO: 634512 - DNA, 422 bp, Homo sapiens
gaaaaacaccacaaaatcttagtggcagcaatggtaagcatttatttcttattcacttatctacagctatcttggattgctccactctaggcagagggtgtaggttttaggcgctactgaagtgagcacctaagctcaccgagctcactgagctgtaggccctgctgtggatcagcagattgactagattttgctaatctcarcttgtcttgggtaggtttcaggtctgccctattctggggccaatggggtatttatactaatagagaggcactaagtcacaagacagatgagaaaaaggaggcagtgctcttaagggtcagaacagatgcactatcccctctacccatatctgtggccaaatcaagtcacatggccaagcccatcttctatggaggtgagaagcgggagtaaatacttct

SEQ ID NO: 634513 - DNA, 494 bp, Homo sapiens
gagacactagtccagcttcagaacttagggcctttcccagaaaaactgacctggagctggccattttaccatggccataaatgcagttacatgaaatacagccccttacaagagttttytaagatatgcaactcacttgcagacaatgtccaaaccttacttatatctccatatacaatggctagcttttattcattgctttggcatttatagatcttcaattgtgatccaggtactgctctaggacttagaagtagaaagatgacaaattcacagatcaaggcctgttgggagatcaccatctagttgaagaggcaaacatgtaaaagagcaataataatgtttttaaaagctaacatttattgatcactggttacctgctggacattcttctaagtggtttggttttgattttttaaaaaacgttttaactcattgaatcatcagaacaaagtatggggtaggtggtactaccttttttttttttttttttt

SEQ ID NO: 634514 - DNA, 494 bp, Homo sapiens
gagacactagtccagcttcagaacttagggcctttcccagaaaaactgacctggagctggccattttaccatggccataaatgcagttacatgaaatacagccccttacaagagttttctaagatatgcaactcacttgcagacaatgtccaaaccttacttatatctccatatacaatggctagcttttattcattgctttggcatttatagatcttcaattgtgatccaggtactgctctaggacttagaagtagaaagatgmcaaattcacagatcaaggcctgttgggagatcaccatctagttgaagaggcaaacatgtaaaagagcaataataatgtttttaaaagctaacatttattgatcactggttacctgctggacattcttctaagtggtttggttttgattttttaaaaaacgttttaactcattgaatcatcagaacaaagtatggggtaggtggtactaccttttttttttttttttttt

SEQ ID NO: 634515 - DNA, 630 bp, Homo sapiens
tgtgaagtagagtgcttccataagcaaaacctgaaatcaatgtcatttggcctagtgatggaatggcaggaagtaaagaaacaagcggtatcctttctttgaaatgaaggctgagtgcctcattatatgttggcaaaacatttagcaaagttgttgcctgcaataacttggaaggctgaccatatacataccaagactgttaactcaagaaaactgttggcaagagtccgtataagtatgtgatggctactactatctggttttagcaaggctttataagaaaaagtgatgctgaggccagaactggctagttttcaagtrcagatgaaagacactggagataattcagttctggacttaatgaaataataaaacttttatcatgtggacatttttggttttgtgttttttataaaatctatcactttaattaatattgctgcagagtattttattgtacgactatctcaaatttgtttaaacaaatctctactgatgaccatttgggatgtttccaattgttttgccattgctaaaagctctactttggatatcttgatactacagtttgtccacttttccaattattttcttacaattaattattgtaattggaggtgcagggttaaa

SEQ ID NO: 634516 - DNA, 630 bp, Homo sapiens
tgtgaagtagagtgcttccataagcaaaacctgaaatcaatgtcatttggcctagtgatggaatggcaggaagtaaagaaacaagcggtatcctttctttgaaatgaaggctgagtgcctcattatatgttggcaaaacatttagcaaagttgttgcctgcaataacttggaaggctgaccatatacataccaagactgttaactcaagaaaactgttggcaagagtccgtataagtatgtgatggctactactatctggttttagcaaggctttataagaaaaagtgatgctgaggccagaactggctagttttcaagtacagatgaaagacactggagataattcagttctggacttaatgaaataataaaacttttatcatgtggacatttttggttttgtgttttttataaaatctatcactttaattaatattgctgcagagtattttattgtacgactatctcaaatttgtttaaacaaatctctactgatgaccatttgggatgtttccaattgttttgccattgctaaaagctctactttggatatcktgatactacagtttgtccacttttccaattattttcttacaattaattattgtaattggaggtgcagggttaaa

SEQ ID NO: 634517 - DNA, 593 bp, Homo sapiens
aatttcaaaaacaaccaagggccttgaatcaagaaaagagatcttgaaaaaccaacaggaaaaagacaggaacacaatagagaaagggttagattgactaagaaatttctagaaaatgaaccttaaaaggcgactagtaaatgaagatatgctcaaatgtagtatattttgataactgcaaatttaaatggcagtgatagacgttacacactcacattgggacaaattggaagactggacaatgccaggtgctggcaggtgtatggtgatagggcaagcttccaccacaatagggggtagtagagactaatgcagacattttggagaacattctgttaacatttggtcaaaatatgtrtatgtaaaccccatgaaccagcaatctcactgctgggatacatctcaaagaacttcacacagttctacttttctttttcttgccttattgctctggctaggatctcagtacaatgtaaaatagatggggtaagaacagattttttgctgtgttcttaacattaggaggaaaatatttgatcttctccattaaatatattatctgtagttgttcactgatgctcttgattagccat

SEQ ID NO: 634518 - DNA, 582 bp, Homo sapiens
tgtgtgtgcacgtgtgtatttaggtgtattgctttccttgaaggttttgtccatatctattgtatttaaaatattatttttattatatatgtattccatcaaaaatttaagatttaatttttgttttataatcacaatgaacatagttatttaaacttagatttgtgtttaaaatgggatttgtgatctatggattccaaagtaggccatggattgatttccatagatttctgaataacaccaagtagaatgtacattttcaggtatctggagtgcactttcttctgagaaggtccatgtcttcctcagaatctcctaggggttaagaacaaattaattaagtaatccacatgcacagtccttttataccataacttcctattcttttttattcatctttcwcattgctagaaaacttgtgcaaatgaccttttccaggaattgttcattggtaatatacttcccaaattcttgcttttgtgagtatgcctttcttttgcctttacaagaataacaacctgacggtttatgggatatttggccacagctttccttttaaaattctcctatactgctaatgtg

SEQ ID NO: 634519 - DNA, 630 bp, Homo sapiens
tcattcattttcccaaggaagttagagaaggagctatgatcacacacagcttggtccactgaatttgatagacataaatagaaactcttttattgagggtcagttcttggaggaaggagtaagaaagaggggctttgggttttgcttgttttcctaatacagttatttttccctccagctttactgtggtataatttgtttacaaaaaaactgtacatgattattgtatataatttggtgaatttggacataggtgtatacaatcatgttactattaccacaatccaggtaataaacatatccatcacctataaaagtttctttgtgtccctctgttgttattgttttgttttgttttaatgataaggatgcttaacatgagctctatcctcttaacaaatttttaagtgcataatactttcttgctaactacaggtactgtgttgcacagtaaatctctagaatttaggcaacatctataacttttcctccatgragctacaacttacgatatcttccttcccccattctctgataaccaccattctattgcctacttctatatacatttgattattttggatgcctcttataagaggaatcatgcagtattggtccttctgtgactgt

SEQ ID NO: 634520 - DNA, 630 bp, Homo sapiens
tcattcattttcccaaggaagttagagaaggagctatgatcacacacagcttggtccactgaatttgatagacataaatagaaactcttttattgagggtcagttcttggaggaaggagtaagaaagaggggctttgggttttgcttgttttcctaatacagttatttttccctccagctttactgtggtataatttgtttacaaaaaaactgtacatgattattgtatataatttggtgaatttggacataggtgtatacaatcatgttactattaccacaatccaggtaataaacatatccatcacctataaaagtttctttgtgtccctctgttgttattgttttgttttgttttaatgataaggatgcttaacatgagctctatcctcttaacaaatttttaagtgcataatactttcttgctaactacaggtactgtgttgcacagtaaatctctagaatttaggcaacatctataacttttcctccatggagctacaacttacsatatcttccttcccccattctctgataaccaccattctattgcctacttctatatacatttgattattttggatgcctcttataagaggaatcatgcagtattggtccttctgtgactgt

SEQ ID NO: 634521 - DNA, 575 bp, Homo sapiens
aggctcattctccttgatgcaaattacccaggaacttccccatcaaatctggagaaagaagaccacctctgaagcttttgctgaaacagactgaaactgactctaatagagcctttagtctgatttccagtgtgcaggaaatataggggagggaggaacaagtttagggtaccaacaaggactaatatcacgtgggtctctctgctcctctgtctggggcgtttttgtggaaccaagtgagctcactcagcccatgagcaaggcagcccagaagtgaagagtgaggggtgagagtctgtagacagagattttgcattccccagctttggtgggacagctctgaggtgcatggtatccaggtcctcagagcatcaccagcagaattaagccccagttgcctacagtgatacactgctcattaatgcatcttttcttggtctttcaccctctcctgcctcacttttcctactaccgcatttttttcttcctagcactactgtacaaataaaatgcctgccctcaagtccttatcatagggtctgctttgggggarccccaaataaagacaaggggac

SEQ ID NO: 634522 - DNA, 420 bp, Homo sapiens
aggttctagagtttaggatgtattcatgtttgtgtgtgggctgattatgtgttaggtccagctccttctcaagaacgttcagttttcagaactcctatgtgcccaggttgttgatgaagaggggcataggacaattattccaacaactcagacaataacatttttgtctgaaagaatctaatagtagaaagaggaaagattccattttgcagaagtcaaaagattttatttctaaatgtgtgtatgtgtgtgtgtgtgtgcacgcacgtgygtgtgtgtgtgtgtgtgtgtgttagaaaaagggtcaaggagtatcatccaggaataaaaagatttagagtcagacctgcatttgtttgggtttgtccctgtatagtaggcagaataatccccccccgcctccactgccaaacacatgca

SEQ ID NO: 634523 - DNA, 575 bp, Homo sapiens
tgactgaataggtagatataagaatgaataagtgaatgctttttgaagttacatataagtgagtacaactttgaagaggatcgtggctatcatgataaaatctagaatgaagcttttttttctgtcacccaggtgtggtcctactttctaaaattcagaaaagaataaatagctttgaacatatcaaagcaatataaatccaagaattatactggggtgagttggttaaatgtcttctcctgatgctgttttaaaatacaaaaactgacttagcaaaatmcctgggtaccaagtttcttggcctaactcctaagggtggtagatgactagacaacattaccttctctaagggtggtataaaaaataagaagtcttcttgaaaatactcacttaccttctaggaacacaccatgttaggagggaatgcttctttcccattccagaggtttccttccatttggagagaacacaacactcctggcctcgttccatattgtccttcactcttcccctgggaggaggaggaatcagttatccgggaatgagctggagagaagaaactgagcatatttccc

SEQ ID NO: 634524 - DNA, 598 bp, Homo sapiens
caatcctctcgtctcagcctctctagtagctaggattacagacaggcaccactgcacccagtttatgaggaaatttaaaaattccttttttaaaaatgaacttgatctcaatattcccagccaaacattcccatcattttcttggatagtctaaatcagtggttccccagtctttttggcagaaggaactggttttgtggaagacagtttttccacagaccaagrttgagggtggtgtcaggatgaaactgttcaacttcagatgatcaggcagtacattctcatgaggagcgggcaacctggatcccttgtatgtgcagttcacaacagggttcgtgctcctgtgattatctaatgctgctgccgatctgacaggaggcggagctcaggcaataatgcccgcttgcccactgctctcctcatgctgtgcagcccggttcctaataggccatggactggtactggtccatggcccggggtttggggaccactgctctacataatgcaaatttcaagcagagagtgaaaaaaaaaaaaaaaactttaacatcaaaaacttgataacaactagccatgttgtgtttgagctgtgactgag

SEQ ID NO: 634525 - DNA, 598 bp, Homo sapiens
caatcctctcgtctcagcctctctagtagctaggattacagacaggcaccactgcacccagtttatgaggaaatttaaaaattccttttttaaaaatgaacttgatctcaatattcccagccaaacattcccatcattttcttggatagtctaaatcagtggttccccagtctttttggcagaaggaactggttttgtggaagacagtttttccacagaccaaggttgagggtggtgtcaggatgaaactgttcaacttcagatgatcaggcagtacattctcatgaggagcgggcaacctggatcccttgtatgtgcagttcacaacagggttcgtgctcctgtgattatctaatgctgctgccgatctgacaggaggcggagctcaggcaataatgcccrcttgcccactgctctcctcatgctgtgcagcccggttcctaataggccatggactggtactggtccatggcccggggtttggggaccactgctctacataatgcaaatttcaagcagagagtgaaaaaaaaaaaaaaaactttaacatcaaaaacttgataacaactagccatgttgtgtttgagctgtgactgag

SEQ ID NO: 634526 - DNA, 503 bp, Homo sapiens
gaagtatcagaagaaagagttaataaactttaaatgagattaaccraaattactcaatctgaataacacaaagaaaaaaacttgaagaaaaataaacagagcatcagagacctatttatatcaagagataaaaagtggtgtaattggaatggtaggcggagagaataggagagaagagaaaggggcaggaaagtgttaaaagaaagaatggcctataacttcaaaaattttatggaaaaaactttaaattacaaatctaggaaactcagcaaaccctagccagaataaaccttcatagtgaaaatgctgaaagtcaaagataatgagaaaatctttaaagcagccagagaaagatggcatgttacatacaggagaacaatgatatgatcaatggtgactttacatcaaagtaatgaaagtcatatgaaattagaatggcatatttcaactgttggagagagaaaaaaactggcaaccaagaattttgtatccaaagaatttat

SEQ ID NO: 634527 - DNA, 530 bp, Homo sapiens
ggaggaacaattaagcagaatgtggtccctgacttaccatctgtcragtgaaggaaatataataataaggaccgtgatttagtgagcacctactatgtgccaaaaactttgcaatcatgagctctaatgatatcaacaacctagcaaagtaactgtgggtattaggtgagactcaaagaagtgtaatcatgtgtccagggcgatactggggattcaaattcttctgcatcttgctctaaggctatggtcttcgtagaatgtcatgagactactcacacacctcatcatactcctaatacctctttgcaatgtagtatagaaaatgcaacaatagaattatgtgttagggacagtgataaaagagatgcaagactaattatgcctagggacagtggagaattcactaagaagatgatgcttgagtcagaccatgaagtatgagtaagagtttgaggagcaaataaaggagagacagaacattggagacagagttagagtagaactcagggtccagtcctggctcggccaac

SEQ ID NO: 634528 - DNA, 555 bp, Homo sapiens
cagttcttgcacaaactttgttgcaaatgagccaagtagtttgtatttgtttttataatggtgcaaatccgacaggtaactacccacacaaccacttcatttaaaaatatataagaccaagccaggcacagtggctcatgcctgtaatcctagcactttgggaggccaaggcgggtggatcatttgtggtcaggagttcaagaacagcctggccaacatggcaaaacctggtctctactaaaaatacaaaaattagccaggcgtggtggtatatgtctgtaatcccagctacttgggaggctgaggcmcgagaatcacttgaacccaggagaacccaggagacagagattgcagtgagccaaaaatgcaccactgcacttcagcctggttgacagagcaagactccgtattaaatacatacatatatatccatttttatatatatatacacacatatatatatccatttttatatatatcccattttaaaaaccacgctgtgtgtggtggcacatgcctgtgatcccagcactttgggaggtcgaggcaggaata

SEQ ID NO: 634529 - DNA, 596 bp, Homo sapiens
ttgaacccatggattcatggtgatgatatggttgaggtagaacaggttgacaaargtggtttctgcatgtccaggtctcctcaatgccaaggaatgcagatgaaacatttgttaaactaatctggtggcctccagtgcacccaccagcccatgccatggttctgcataaatgcccatggggagacaggcagcagtaatccagacattggaggatggcactctcttaaagtgagattatgtagctcaccctggatgtgaacttagatgaggaaaaaaactgaatgacattcgcaacccgaagtgattccacttcatcattttgtacacatacattcatgatgtgttatatgttatatataatttactaaagcatgcttttaaaaatagatttgaggagcatggagaccccagaagtgtatgttattgtactgggcttgagtttctctttccctcccacaggggacctctgagggtctatttgagggcatgaatatggaaaattcagctccagctcctccaccccactccctgaacagcactgcagaactgtgctaagctcctgtggcttggaaagaacagatgcaagagacatagta

SEQ ID NO: 634530 - DNA, 626 bp, Homo sapiens
gattttggaattctcttggctcttgaaaataacatgaatagtaatagcaacaataatgaaattctgctacttttagtagcttataagtaagttaaatagtttgctaggaatcttatgtaataattataacttaaaggagttattatttttgagcagttatgtgccattgtaatgtgtattatctaagaacaakcatataaataataatagctaatattcacttaagctcttaaaatctgcctggcactccctccccccttgtataggaagttaggctccaagaaggaagcgacttgcttaaggctacgcagctcataactggcaaagctgggatatcaatttaggactaattccaaagggtgtgcttttagtcactataccttgctccttttgtgagaaatcagtttcaggtgagataacctcagagcatggaatgttcccagagccatagaatgaccctggagataaagggctgccttaaatcagatagtatctactttggcccactctaaatttagggcctctgaacgcccctgctcttcaatctgcaccctcaaaaacatgccccttaagggagtggctacaatctgagagtgttgtgtcccttgatccagcccaggattaga

SEQ ID NO: 634531 - DNA, 319 bp, Homo sapiens
tctcttaccttttcaaaactatcttttccaggggccctccctgatttagcacctcttcacccagctcaagagtccccagtcacactggatagggacaggaagaaacagacaccacaccttggctcctgtcccttctgctggaagtcccttgggggagggcaggrgtggtatctgggtacacagtccccagccacggtcggacaagcccgattcctggtgatggggtaatgcacacgcagctcttgggtggcctagctcagaaatacattgaagagccagttttcaaagatgcagaggccgattgggccctgtgccacag

SEQ ID NO: 634532 - DNA, 558 bp, Homo sapiens
ctgaatgtaagaaatgaggagagaccagctcaagggggtcatgggtagagggagagatgagaaaaacagacccaaaacagagctggggaactgccgacaagcttcccaaagccccagaaacgccccagggcagcaggagacaaatgctttcagscctgaaaatctccacggcctcagacttcccaggtgcctcttctgccctcagtcttccttcctgctcaggtgaaaacatcagcctcagtaaaacgcttcaagttcccaagcaaggattccctgggacagtgaactcctccaaacctaaagtgcaatcatctaccacattttcttttaaacctgttgccaccagaatgggagcttcttgaggacagggtctgtgtcttttctgcttttagccgcaaacctagcacagggcatggcatccatggcatggactaggcacttagtaaatgtgaatgaatgaatgagtggattgatggatgacaggtaaataatcaaagacagaatcccctataaccaatttctgatttatctgacactgaaaacaaggctcacccgaag

SEQ ID NO: 634533 - DNA, 359 bp, Homo sapiens
ggtcttgaaaccgctccagcttcaggttaatgatcttcatgcggaactggaggaactggggttggagcaagggacaggatgggtggctggatgagcaaggaactacaaggacagtgaggatgccccctcttcccatccacccttttcctggggaagagaggcagttacctctgtgaggcacctggatgcgcagcacaccttgtttcaagagcctccagagcacgcagcccacccagggtcctctggggccctagcgcagtgccggggcyggtggtgggaccaggggcttcatgccatggggctcctacctcctcccctgcccctgccttcagcccaggactcaccatctcctcagagca

SEQ ID NO: 634534 - DNA, 387 bp, Homo sapiens
gtgctggggctgagaaaggcctgtcccactccgacattctaagcaggacagagcctacagggaggcgagcgaggggcctggggcaagacacttaaggggcatccactgyctggtcatggaaatacctccttaaatgtcacgccctaggcacctcactggactcacctgagccctggccttcattccaagatgctctgcccgtatcctcaagaaccttatctcagaagattccttttctttatggaggataaacagcagtgttcagcatcattcattcactcatttaccaaatatttataaatcacctactgtgtgccaggcacttagtctaggccctgggggttactgctgtgaacaggacaggcagagtcactgcatcatgaagct

SEQ ID NO: 634535 - DNA, 540 bp, Homo sapiens
ggccctgtgtgggactcaaacttgctcaccctggtttctgtaatctgcagctcactcttgctgccactcagcagatctggtctccstaactcttttttcccctgcctctactttgagactcaattgcttccccaggacttcttttctccccaagccaaagaatgaaagttcaatcatcccagctcagttcttatcaagcattccagctagcctatgccagagatgttacacagctctttaataatagtggccatagctgtaataacaatgacaacagtaggtaacggtagtcataccaacagtagggcagtgcattttatattacaactggtttcttgctctagtaggcttggggatgggtgaagacggacagggctggcgcagaccctttccttctcctctccagcccacagtgatctgggcttttacaagacagcctgcttccattcagtagtgtgggaaagttccttcttggcttagcaatacccctgagaccttgttcagtgggctgtgtctctccctgggatgctgggagcacca

SEQ ID NO: 634536 - DNA, 540 bp, Homo sapiens
ggccctgtgtgggactcaaacttgctcaccctggtttctgtaatctgcagctcactcttgctgccactcagcagatctggtctccctaactcttttttcccctgcctctactttgagactcaattgcttccccaggacttyttttctccccaagccaaagaatgaaagttcaatcatcccagctcagttcttatcaagcattccagctagcctatgccagagatgttacacagctctttaataatagtggccatagctgtaataacaatgacaacagtaggtaacggtagtcataccaacagtagggcagtgcattttatattacaactggtttcttgctctagtaggcttggggatgggtgaagacggacagggctggcgcagaccctttccttctcctctccagcccacagtgatctgggcttttacaagacagcctgcttccattcagtagtgtgggaaagttccttcttggcttagcaatacccctgagaccttgttcagtgggctgtgtctctccctgggatgctgggagcacca

SEQ ID NO: 634537 - DNA, 613 bp, Homo sapiens
atcttctgaactattttctttttttattttttcttttatgttttttaacagagacagggtcactatgttgcccagtctggtctcaaactcctgggttcaagggattctcccacctcagctttccaaaatgctgggattacaggcatgagccatcgtgcttggcctgaaccattttcattaaaacccctaccctactctcacctccatttccagtcattaaattccttcatttaagaggcatctcttagtcatcgcatgtgtgccatgaacatggtagtctttggagacccctcagggagctcacagtggttgggggaaaggggkgcattaaacagacatttaagctatagttttgggttcagagggaggaagccccaggggctaaaacagctgataaggactcccagataagtgcacttttcactatctggcattttcttgttttgttatttgcttgttcactgtctctcaccccatttgatcctaagctttctgagggcagggatctttgttttttttcatcagttggatcccaattgcttagaacactacctggcacaaaataggcactctataagtgattacacaaattttggaacgactaggttaaaca

SEQ ID NO: 634538 - DNA, 613 bp, Homo sapiens
atcttctgaactattttctttttttattttttcttttatgttttttaacagagacagggtcactatgttgcccagtctggtctcaaactcctgggttcaagggattctcccacctyagctttccaaaatgctgggattacaggcatgagccatcgtgcttggcctgaaccattttcattaaaacccctaccctactctcacctccatttccagtcattaaattccttcatttaagaggcatctcttagtcatcgcatgtgtgccatgaacatggtagtctttggagacccctcagggagctcacagtggttgggggaaaggggggcattaaacagacatttaagctatagttttgggttcagagggaggaagccccaggggctaaaacagctgataaggactcccagataagtgcacttttcactatctggcattttcttgttttgttatttgcttgttcactgtctctcaccccatttgatcctaagctttctgagggcagggatctttgttttttttcatcagttggatcccaattgcttagaacactacctggcacaaaataggcactctataagtgattacacaaattttggaacgactaggttaaaca

SEQ ID NO: 634539 - DNA, 558 bp, Homo sapiens
agaatgtttattcttgtctattgctgaattatattctattatatgaaaataccagtttatccactctaccagtgactgacgtttgggtttttccaatgtttagctattactaatgaagcgactataaactttcacacacaggttttttgctggacatttgtactcatttctcttggctctatcctggagcasaattgctgggtcagagaatcataaaatacttgtacgtttagcattagtggattcagccaaaccattttccaaagtatttgtaccactttacactcccaccaacaaggtctgagaggtcttgttgctccacatcatcatcaacacagtattattagtcttttaaattttagccatttagtatttatgtagagaaattttattgtggtttgaatttgcatttgcctgataagtaatgatattaagcattgtttggtacttattggccagttgagtattcctttttgtaagatgtctattcagagtttttacagaaatatagtatctgtaaacatagacaaattattgacaaaaacagatagtagagca

SEQ ID NO: 634540 - DNA, 577 bp, Homo sapiens
agaatgtttattcttgtctattgctgaattatattctattatatgaaaataccagtttatccactctaccagtgactgacgtttgggtttttccaatgtttagctattactaatgaagcgactataaactttcacacacaggttttttgctggacatttgtactcatttctcttggctctatcctggagcacaattgctgggtcagagaatcataaaatasttgtacgtttagcattagtggattcagccaaaccattttccaaagtatttgtaccactttacactcccaccaacaaggtctgagaggtcttgttgctccacatcatcatcaacacagtattattagtcttttaaattttagccatttagtatttatgtagagaaattttattgtggtttgaatttgcatttgcctgataagtaatgatattaagcattgtttggtacttattggccagttgagtattcctttttgtaagatgtctattcagagtttttacagaaatatagtatctgtaaacatagacaaattattgacaaaaacagatagtagagcagaatcatcttgaggaattc

SEQ ID NO: 634541 - DNA, 495 bp, Homo sapiens
aaaatacttgtacgtttagcattagtggattcagccaaaccattttccaaagtatttgtaccactttacactcccaccaacaaggtctgagaggtcttgttgctccacatcatcatcaacacagtattattagtcttttaaattttagccatttagtatttatgtagagaaattttattgtggtttraatttgcatttgcctgataagtaatgatattaagcattgtttggtacttattggccagttgagtattcctttttgtaagatgtctattcagagtttttacagaaatatagtatctgtaaacatagacaaattattgacaaaaacagatagtagagcagaatcatcttgaggaattcagcaatttacacaaaaaccagcagccagttgcttctacaattgctaaccagttgctactagttaagtaaactaataagtaaactaattgaaacagatcaaacaggtgcatgactgaatgtttcctgttgaac

SEQ ID NO: 634542 - DNA, 495 bp, Homo sapiens
aaaatacttgtacgtttagcattagtggattcagccaaaccattttccaaagtatttgtaccactttacactcccaccaacaaggtctgagaggtcttgttgctccacatcatcatcaacacagtattattagtcttttaaattttagccatttagtatttatgtagagaaattttattgtggtttgaatttgcatttgcctgataagtratgatattaagcattgtttggtacttattggccagttgagtattcctttttgtaagatgtctattcagagtttttacagaaatatagtatctgtaaacatagacaaattattgacaaaaacagatagtagagcagaatcatcttgaggaattcagcaatttacacaaaaaccagcagccagttgcttctacaattgctaaccagttgctactagttaagtaaactaataagtaaactaattgaaacagatcaaacaggtgcatgactgaatgtttcctgttgaac

SEQ ID NO: 634543 - DNA, 523 bp, Homo sapiens
ggaattcaatataagagtaggccatggtgtccccaaggaacaccagggtgccaactgctccgccacctgagcaagcctgagaactctcaaaccagaaaacaagctgaatttgctcgaggaccagggagtgaacgtgactatgcagaactggggttggtgaagactagcagtggaagtccatttggctcagagaaagaggccaaattacactggctttgaaagatataatccagatgtggaagtctcttgtaggccctcgagtaagaagtgacaggatgaaagcaagcttttaggaagctctgtctagctgcagtgggcaggacaggmtggagggaggaacaacagccggcaaggaggctgttcatagctcactgggttcgttaacttaaactaggtatgaaagctcgttccttcctgatgggggaagcagatgctccctgagaatgtctggtcttggacacaggaacccatggctccccatgggtcactcactcttggagaaaacaaacaaatctcatgttcc

SEQ ID NO: 634544 - DNA, 531 bp, Homo sapiens
cccaaggaacaccagggtgccaactgctccgccacctgagcaagcctgagaactctcaaaccagaaaacaagctgaatttgctcgaggaccagggagtgaacgtgactatgcagaactggggttggtgaagactagcagtggaagtccatttggctcagagaaagaggccaaattacactggctttgaaagatataatccagatgtggaagtctcttgtaggccctcgagtaagaagtgacaggatgaaagcaagcttttaggaagctctgtctagctgcagtgggcaggacaggctggagggaggaacaacagccrgcaaggaggctgttcatagctcactgggttcgttaacttaaactaggtatgaaagctcgttccttcctgatgggggaagcagatgctccctgagaatgtctggtcttggacacaggaacccatggctccccatgggtcactcactcttggagaaaacaaacaaatctcatgttcccagaggtagatgctcaataaataaatcatgcatgaattc

SEQ ID NO: 634545 - DNA, 531 bp, Homo sapiens
cccaaggaacaccagggtgccaactgctccgccacctgagcaagcctgagaactctcaaaccagaaaacaagctgaatttgctcgaggaccagggagtgaacgtgactatgcagaactggggttggtgaagactagcagtggaagtccatttggctcagagaaagaggccaaattacactggctttgaaagatataatccagatgtggaagtctcttgtaggccctcgagtaagaagtgacaggatgaaagcaagcttttaggaagctctgtctagctgcagtgggcaggacaggctggagggaggaacaacagccggcaaggaggctgttcatagctcactgggttcgttaacttaaactaggtatgaaagctcrttccttcctgatgggggaagcagatgctccctgagaatgtctggtcttggacacaggaacccatggctccccatgggtcactcactcttggagaaaacaaacaaatctcatgttcccagaggtagatgctcaataaataaatcatgcatgaattc

SEQ ID NO: 634546 - DNA, 536 bp, Homo sapiens
acaacatgtggaaaatgccaaactgagtagcagtcacagttgacatgctgcagagagagctggccgggggtcagaagacctgggcaccagtcctgttcatttccagtgtggcctcgagtcattcacctgacctccctgaagttcattttcccaagaagttgtttagtccaactgcccatcaaggatctttagggacccttcyagctctaacagaggagatcagaaaagaaaacaagcaatgtggctcagctcatcctacaagcttcatagagaactgagactggcctggaagcatagccagaaattagaacgcctaagggaagaaggtcacaacgctgcctctgcaatttaggagtgtatatgctttcctgcaggatgttgagagtttcattcattatcgtatgccccctaccccggccccacaatacctagtgcgtgggatctgacacgtggtggctggtcaatgaatgaatgaatgaatggtcacaccatctgaggttctgcactgagtagccctgaaggcttgaagcagcata

SEQ ID NO: 634547 - DNA, 507 bp, Homo sapiens
ttgggtgctgagtggaggcagcctcatccccaacagcctgacttcctgcctcctccctgcctctgcctgtgtccagcctgtgggaagagcctgaagaccccccgtgtggtgggtgkggaggaggcctctgtggattcttggccttggcaggtcagcatccagtacgacaaacagcacgtctgtggagggagcatcctggacccccactgggtcctcacggcagcccactgcttcaggtaagaccccagctgtaaggaggtctctggggaccaaggccagtcagggaccagagagcttggggtcctgtctcctggcaccgtccttctcttcactctcccactagagacgttttccaggttgtggtggccccaatgagacaatggccatgatgccctttgttaggcttttgggtgtctgagcagagggtgctggtcaccaagcatggcctcttcctggtgggacaccagcagatacccagagtcctcaccccacccccatatcgttcaa

SEQ ID NO: 634548 - DNA, 546 bp, Homo sapiens
aagaacgctgtcacctgtgatgcccaggcatgggggtgggggcagttctcagtctgggaggggaagtggtgcccctcactcctcacacaggtgctgagaggagggaagagcacccagcatggagcccacagccctgcaggggtctgggctctgccactcaccgagggctcacctcttacttggaacatgagcagcctcatagacacatctcagagtgcagaatgtgtggaaggtctctgccaactgtgaagcatgacacacaagttggctgctgttgttaaaaacccaagagcacgcaacacgcaacaggggctctggggcccaggcaagcaactaactgataggccttggggtgccctggggtccgtcaggatccttcagtttcagcaggtcttcccacatagctctacctccattcatttrccgccttacctggaaaagcagcctggaatcccagagccctgcctcactctgagcccagatgaaaccccaaactgctattccaaaccaccatatctgagacacagggtgaggtgctcaatccta

SEQ ID NO: 634549 - DNA, 557 bp, Homo sapiens
atcaaatttaagctggggtagctatataatatttttctaaataaggatttaggacaaaaagacaaaactgactttaggataaagagggtcactacataatcacgaaagtttcaattcaccagtaagctataataagtgaaaacttgcaaacaaagagaagaaaatagaaaattaaaaaaatcatcctttgtcaccactggagttggcaatcacaccaggctcttactctgaaataatatttaaagaggaaaagttagcactattctgctttgccatagaaatctacttccaggtaacagggtggctccaggtggtgagggaaagtatagctaatcaatatagatgaatgayaggaagccatcattggcaatttctaatgaaatcattgattcaggcaaggatcatcaatggatgctattgtctgaatgcttgtgtcccccaaaatttgtatgttaaatcctaacccccaaggtgatggtagtaagaggtgggactttgggggctgattaggtcaggagagctccctgttcatgaatgggattagtgccccttacaaa

SEQ ID NO: 634550 - DNA, 624 bp, Homo sapiens
tgaaatctagggaatagatttttattattctttttacttttctgtatatttgaaaattttctcaatttttttaaaacttatataaacacaatataaaatagactcgaaagctgatagaactataaggagaaattgacaaatccaccatcttatgaagtggaagattaagcacacttctctcaattattgatatgtcgagcaggtgaatagtaaagaatggaagattaaacaataccatttacatgcctgataaatagacatatactatccatacttagcaaaaaagcattcttctcaagcacttttgtgaaaattgactacatactagtccaagaagtaatatcaacaaatttcaaaagtaacgtgagcaccaggcctagctttgctcccttcaatttccgctcagcctccccagcatcccccatcttcccgcctctaggctttagtcacttgcccgcttacttctttgaatgggcccagctctggccccttccattcccrcagttgtaaagctctggccactgccaccacctcctctcctaacactaccactggtcttcccctgccctgggccaggaccagagctgggctttgggttgggtggccttcgttgcatgcaccacg

SEQ ID NO: 634551 - DNA, 595 bp, Homo sapiens
tgtacgggtttttcagtgaacataaattttcatgaatttcttctgacaagaatgcagtaacaaaaaatgcaattactttcccatctgaaacaactaaaacgctggggggaaaatgcacgaaatggctttcagacacagggcatcaggcagcacaggtcagtgattcctgagagmggagaaccaaatgagggagccctccaattgctacagcaccaggaaaggggactcgggcagagtctggcaacctctcagaatcaaggagatggagtcaggagtcctgtggatagggctcactgggcagtatctcagagaagagacagcttcacagagacagcgctccagagatctgcaaacggtccccgtgagccttcagctgctgatccaggcacacccgaggctgagaaagaaccaccagaaaagattagaggaagcaatccccggagctcatgcagggcgaagagtagttcacattacagccaactaaaatggcaaaacttcctaattcatgagagatgaggaagagtattcaaagggcattgcctcagtagtggggtgaggtcagccctggattaaaggctgccctatgtgagctcca

SEQ ID NO: 634552 - DNA, 584 bp, Homo sapiens
aacataaattttcatgaatttcttctgacaagaatgcagtaacaaaaaatgcaattactttcccatctgaaacaactaaaacgctggggggaaaatgcacgaaatggctttcagacacagggcatcaggcagcacaggtcagtgattcctgagagcggagarccaaatgagggagccctccaattgctacagcaccaggaaaggggactcgggcagagtctggcaacctctcagaatcaaggagatggagtcaggagtcctgtggatagggctcactgggcagtatctcagagaagagacagcttcacagagacagcgctccagagatctgcaaacggtccccgtgagccttcagctgctgatccaggcacacccgaggctgagaaagaaccaccagaaaagattagaggaagcaatccccggagctcatgcagggcgaagagtagttcacattacagccaactaaaatggcaaaacttcctaattcatgagagatgaggaagagtattcaaagggcattgcctcagtagtggggtgaggtcagccctggattaaaggctgccctatgtgagctccagggattt

SEQ ID NO: 634553 - DNA, 595 bp, Homo sapiens
tgtacgggtttttcagtgaacataaattttcatgaatttcttctgacaagaatgcagtaacaaaaaatgcaattactttcccatctgaaacaactaaaacgctggggggaaaatgcacgaaatggctttcagacacagggcatcaggcagcacaggtcagtgattcctgagagcggagaaccaaatgagggagccctccaattgctacagcaccaggaaaggggactcgggcagagtctggcaacctctcagartcaaggagatggagtcaggagtcctgtggatagggctcactgggcagtatctcagagaagagacagcttcacagagacagcgctccagagatctgcaaacggtccccgtgagccttcagctgctgatccaggcacacccgaggctgagaaagaaccaccagaaaagattagaggaagcaatccccggagctcatgcagggcgaagagtagttcacattacagccaactaaaatggcaaaacttcctaattcatgagagatgaggaagagtattcaaagggcattgcctcagtagtggggtgaggtcagccctggattaaaggctgccctatgtgagctcca

SEQ ID NO: 634554 - DNA, 595 bp, Homo sapiens
tgtacgggtttttcagtgaacataaattttcatgaatttcttctgacaagaatgcagtaacaaaaaatgcaattactttcccatctgaaacaactaaaacgctggggggaaaatgcacgaaatggctttcagacacagggcatcaggcagcacaggtcagtgattcctgagagcggagaaccaaatgagggagccctccaattgctacagcaccaggaaaggggactcgggcagagtctggcaacctctcagaatcaaggagatggagtcaggagtcctgtggatagggctcactgggcagtatctcagagaagagacagcttcacagagacagcgctccagagatctgcaaacggtccccrtgagccttcagctgctgatccaggcacacccgaggctgagaaagaaccaccagaaaagattagaggaagcaatccccggagctcatgcagggcgaagagtagttcacattacagccaactaaaatggcaaaacttcctaattcatgagagatgaggaagagtattcaaagggcattgcctcagtagtggggtgaggtcagccctggattaaaggctgccctatgtgagctcca

SEQ ID NO: 634555 - DNA, 598 bp, Homo sapiens
ttttcagtgaacataaattttcatgaatttcttctgacaagaatgcagtaacaaaaaatgcaattactttcccatctgaaacaactaaaacgctggggggaaaatgcacgaaatggctttcagacacagggcatcaggcagcacaggtcagtgattcctgagagcggagaaccaaatgagggagccctccaattgctacagcaccaggaaaggggactcgggcagagtctggcaacctctcagaatcaaggagatggagtcaggagtcctgtggatagggctcactgggcagtatctcagagaagagacagcttcacagagacagcgctccagagatctgcaaacggtccccgtgagccttcagctgctgatccaggcacacccgaggctgagaaagaaccaccagaaaagattagaggaagcaatccccggagctcatgcagggcgaagagtagttcacattacagccaactaaaatggcaaaacttcctaattcatgagagatgaggaagagtattcaaagggcattgcctcagtagtggggtgagktcagccctggattaaaggctgccctatgtgagctccagggattttcctt

SEQ ID NO: 634556 - DNA, 578 bp, Homo sapiens
ctaagcctccccatctgtctccaggtccgcaggcttaccctgtccttccccaggaggtccttgcactagatccgcagggccaggcatacaaactgaccactttatttttacagcaggggtcatgtttctcagaaccctagactgaggtgagagaggaggtgagccaaagggaaggaaagtgacccctgcccagagcagggggaggagaggracagagctgcagggatatctttagatcctggtgacaggaaaagatggccaacgtcctcagtgtcctctccccaccttccctgctacctcactgctacctcaccagttcatagagtttgaagggtccataggaaaccctcatgccttagggatgaagaaagaggctcagagaggtagaatgtgtaacccgaggtcagctacacagttactgttaaagtcagcgttagaacctcccccattacttgatttccccaatccacacccccagctttcctctaaagaactccaggagggctccgcagctgggcagaaagagtgcttgggaaatgcattagcttaagggctagaggattttacatttatagagc

SEQ ID NO: 634557 - DNA, 619 bp, Homo sapiens
agtaagaaatgttgttgggaaggtagccagggttaactcatgaaggacgttgtcggccatggttaggattttgatataagccaagaatggctgacagcagatcaacatggtctgacttaggttttaaaggactgatcacacctttaaaaacatatcagacctcatgtctgcagttgtgtcaagaactgactttagaggtgtaaaagtagaaacagagaggagaggtattgcaatttcatttaatgggtctagattttgctctaatttgttttgtatttgaacacatagtttcaatcaaatttaataaaatatctgattcttctataggcccttttctggaacctagaayatatacatgactgcaggaacagtagttggctcctcatagagtaaaaatagaaatgttctttttcccagaaaaaaaatcagtaagctggtacagataaccataccacattgcctgtttttccaaaaaattacatttgggtgatatcaaatgcaaatttttgaactgcattgacagaagtcaggcatgtttagagagttagtaaactttttcagaccacagatcagcattaagtgaaatactgcttcagccactgataccttcatggcagat

SEQ ID NO: 634558 - DNA, 520 bp, Homo sapiens
tacatttccagttaattaataatcacctggagaagttagggataaaacatgtaggcatttataaattatagaaagaatgtgagtgaatataaaaaataaatcccatataaccagacaataggaataaagtattgccagaatgaccatatcatgcattgtgtgtgggaamtaaacaaatacaaatagcagtgggtatttaaaggaaatagtgatctaatggcagaggtagccagaacggggagggctagatcactgtcataatgagaatgtcagcatatatggaaacaacctcatctaggagaactcagggtagaaggaggaggattgcgtgatatatatcagaaagaatgataatgtctgagagatgagagtgaagaatgtggtaatgaaatcttgacacaagcttgaagaaagtaaaagaggaaatcctgtgtgaagatcctgagacatgaatattagcttatttaatattaatgtcatccctccagtttctcatagtactactcctactgacttatat

SEQ ID NO: 634559 - DNA, 494 bp, Homo sapiens
ctcagggtagaaggaggaggattgcgtgatatatatcagaaagaatgataatgtctgagagatgagagtgaagaatgtggtaatgaaatcttgacacaagcttgaagaaagtaaaagaggaaatcctgtgtgaagatcctgagacatgaatattagcttatttaatattaatgtcatccctccagtttctcatagtactactcctactgrcttatatatcactcacctttttaaaattgcccccaaaattgagatttagactcagttagaagcttagatctgcagaatcagaccctgtcacactatgcaattagaagtaagtagcttcaagtccctactcaaagccaaatctctgagttcacagagagagttaacaagtttctagagtactttaatgtaccatggttatagcacatagtacctgtttatagttgttatcttcattagactacagcaggtaaaggcgtggtatttttttttaagcttgctaggta

SEQ ID NO: 634560 - DNA, 579 bp, Homo sapiens
gtttaagtttatacatattttcttggagactcattcattcatccatccagcaaacactaattttgccactggtacatattaagccatatagcaggcattagaaaaatatatatatataaacttggttcagctcttgagaagtccagacactagtggaggagaaagatgtgcaaacaaattagtgtaatacagcttgctagtgcaatattagatacatgtatgtatgtatatgtacatgtctatctgtttagaaaaggagacagtgtgtgtgtgtgtgtgtgtgtgtgtgtgtgtgtgtataygtgtgtaagagacacagatagattgaaaaataaaaacagagagagagagcatcattggagaggaagtaatagctcttttcctctgactctgaaaagtacatgaatgagtcgggtttcatcccacagaatgaacagaaattcactaggcagaataaaagggcagagagacttctggcagcttagagctataaaatgctatgcatatagcaaagaaaatatttactctttcaaaatgacaggtgcctgtctgtgagttgtgaaagatgaagcataacat

SEQ ID NO: 634561 - DNA, 567 bp, Homo sapiens
tgccacaaaaatgccatagtaattcaatgcgaaagcaaagtgttttcaacaaatagtacttgaacagctaggcagctatattgtagggggtggggtggcaaaacttactatgatgactatttcatactacacagaaaaattaactagaaatcaattagaaatctaaacataaaagttaaaattatatagtttctaggtgaaaatttagaagaatatcattgtatgctgggtgtaagaaaaggtttcttaaaaataacacaaaacacataaagcataaaataaaaataccaccaattaaacttaagaaaaattaaaatcttatgctcatcaaaaggcaccattaagaaaatgtacaggtaagccaaagactgggagaaaatatttgcaaaacacctatcagttaaagaacttgtaaccagatatataaaaaaaagcactcaaagttaaatcattaaaagataaataatatttttaataaataacattttaaaataacattttaaacattttaaacagccactttacaaagtaagayattgaaatggaatatgtatacgaaaaaaatca

SEQ ID NO: 634562 - DNA, 587 bp, Homo sapiens
gatgttcaagagagagcagagcaggagcaagggtagaaagcttattcaaagaaataataagagaatactttccaaaacatgagaaagatataaatattcaggtacaggaaggccttagagcatcacattagtcaaataagactaatgaaggtatttactaatcaaactgtcaaagatcaagcataaagataaaactgtaatggcagcaagagaaaagaagcaagcagcatataaaggagctccaaatcatctttagccagaataagaaaaaagagagaagacccmaataaataaaaagtaggaacaaaaatggacacatgacaactgagacctcagaaatactaagaatcattagaaacaattaggaaccattacatgccaacaaattggaaaatatagaagaaatggataaattcctggacacatgcaacctaccaatattgaaccatcaacaaatagaaaacctcaataagccaataatgagttatgaaatcaaagccataataaaaagtctcccatcaaagaaaagctcacggcctgataacttcactgctaagttctaccaaacatttaaagaactaatacca

SEQ ID NO: 634563 - DNA, 576 bp, Homo sapiens
aatgctaataccaaatactacagccagtgttcttctgtcgccatagttgttacaagtatgacagcctcccaagtcatttattgattcaactccctttttgttttaatgttgacacactagtttgtatgaacaatgagcacactagctcagaagaggacaacaagaattagcgcggatggttcttccccttgagggggtgctctgtcagtatgaacatgccttcatgggcagaaattaggagcccactagctgttaatgaagagtgctttgctttcctttcagacagcagtttccaaagttcctcttctcctttaatggcattgccctttagtgtgtgttaacctgtggtttgaaagaaatactcgtgtatattagcaatgtaaatataagtgattaaattaaattacatttatcaataaaaatagctattatcgatagctgaatgcataaagtatgcagcatcacatacggatgaactcrccgtttgtcgtgctactacaggtacatgctctacaaacacagaaattctgatattctatgaaacattattaaattccaattgaacatgatcattcc

SEQ ID NO: 634564 - DNA, 622 bp, Homo sapiens
ttggcactaagataacaaggatcttttatattagcaaatactaagaactgcagatacagcaacaaattccagcacaactcatttataagtagtagcaaataaaactttccataaatcaatttgtgtcagcaatattttcttggggtagaacactattatagaagcagattcatctgttaaaaaaactagtaatcacctaacacagtaaggaatatacattctattttaaaatataaaaacatctgaactytgtcttgcattttatagcatgtgagtagtgatgctactgctgacacattattgattcactcacattaaacaaaataatttgttcacaggccactgtgaagctggcaatcactgagtataatctaggctaattatgtcctagacagtacaaatctgcgtgacctggagattgtcagagaagaccaatagcataaactgattcccagactccaaagagacaacctgtatacagattaaacttaactgtaccgtgcatactcaagtctaagactgttcagggtttactttaaattatagcactgaggtgctaagtcagctcgctaactaattacagcagacatgatacagcctggctagctggtgtttatgggta

SEQ ID NO: 634565 - DNA, 513 bp, Homo sapiens
atgatcgtacaataaactagctgaattaggattggaaaccaagtctgtcttactctaaagctcctgatattgattctttattctgtttttggctatggctgccacgattttggacagtgggatgtgcttttaattttccttgtttatttgctttatatcaagtgtaagtgttaacatatttgaaagagtgggcatcagccttagrtagctgttgctcaggaatttatagttatgttggtcacatgtctcttttccttggcagtactttttgatagaactgaaagggcatgtttaaagaaaacaaaaaaccaacatgtgtttaaatttacaaaaagtttgccaagttctaactacaattctataactctctcctaatgtataacatttcacattcatatttttaaatggagcttatagtctactctaatagacactaatcaaatgacaacatacaaatgtaacagcaaaatttgaaaattgatgagagagagaggtgcaggatgctataggtac

SEQ ID NO: 634566 - DNA, 513 bp, Homo sapiens
atgatcgtacaataaactagctgaattaggattggaaaccaagtctgtcttactctaaagctcctgatattgattctttattctgtttttggctatggctgccacgattttggacagtgggatgtgcttttaattttccttgtttatttgctttatatcaagtgtaagtgttaacatatttgaaagagtgggcatcagccttaggtagctgttgctcaggaatttatagttatgttggtcacatgtctcttttccttggcagtactttttgatagaactgaaagggcatrtttaaagaaaacaaaaaaccaacatgtgtttaaatttacaaaaagtttgccaagttctaactacaattctataactctctcctaatgtataacatttcacattcatatttttaaatggagcttatagtctactctaatagacactaatcaaatgacaacatacaaatgtaacagcaaaatttgaaaattgatgagagagagaggtgcaggatgctataggtac

SEQ ID NO: 634567 - DNA, 517 bp, Homo sapiens
ctcttctaggaccagcagagagaagagattccatcttccagaggttgccactgtctgcctccccacttgtccccatccacagtcatcttttttatatatataatgacacattagttgtctagttcttcatagttaatgtggtttaagtctgacatcttttcttttgccatgaaatttacaccttagtgttattctcactgaaaattgcctttgagtttgataaactcttatcccagtgatattgactgttttaaattaacagatttatcaccatttctgagctgtgtagggccttaattgaaaaartatctttgattattttttcacattttggccacatgcctataataatggaatatttacagtactttttagtggagaacttttttaagtagaatttcaataattaatgtttgatggagtttggaagttaccgtattttgaagtatcgtttaacattcttctctcaatgagttttcctttaaaatttgcagtgaatttgttttcctgtttatgc

SEQ ID NO: 634568 - DNA, 568 bp, Homo sapiens
taagtaggactcatggtattttgttttttttgtttttttttgagatggagtctcgctctgtcacccaggctggagtgcagtggcacgatctcggctcactggaagctctgcctctcaggttcacgccattctcctgcttcagcctcctgagtagctgggactacagacacccgccaccatgcccggctaattttttgtatttttagtagagacggggtttcaccttgttagccaggatggtctcaatctcctgacctcgtgatccgcccgcctcggcctcccaaagtcctgggattacaggcatgagccaccgcgccyggccagtattttcttttaaatgcagctttctttttgttggcagtcttagagtcttctgctgtctcatcattggttctttcccacttttcaaagaaactctccagtgatgattgtttttattcattttggctagggttagcttgtgggcttaccaaaactgattgagacaagtgtgcagtgcaggaaagaggtgcggatggaagtgacaaataaaataatgggcaggacacacatggactaaaataagtgt

SEQ ID NO: 634569 - DNA, 366 bp, Homo sapiens
agtgaagctaataaatattctcaacaatgtgtttaaggggttgaacagaaaatgaaagatactatgaatagtgctaaagacctttatatcttgctmtggagatagctttgattttatgattgaatgaaaatgtatctgacttgagaattcacaatatctcaatctcaataacaagaaaaggttgtaaagtcatcctgcaggaggagctagaaagaagcctgttctcctcattctgtgtcctgctgagcttctctttgctattgactccatatctcagctctcagaagaagccaaactctcagcttgtgcccttcttttaagcttgcttaagactagacagttctgtgttgagatgggaagaaaaat

SEQ ID NO: 634570 - DNA, 540 bp, Homo sapiens
aacccaacagcaggaaaccactgaaactgctaaatctggagagacaactggatggagcaagtggcactatcagaattgagaagataaaactatctaatgagagctggaatcatggcaaagtcttccttgcaggacctggaactatctaagcaatgattgatcaraggaagctatgtccacaagggagacagcagaaagataagaagaaaaatacactgggtttccccttctctcacactccaatatttggctattgtttcccattggtcaaacctacctggaaaccaaaaagcaaaggggcctaagaaatatagccttttgggatacagaaaagactaagtaagggaaaggcaatgggataaatctaaatgtaaacaagccagacccagtgatttctccgtttatttatgatagtaaaaataaaaatgtggctgtgagcattcatgtttatgactctcgatgcacttattcaagagtttctctgtaagtagatttgtagggtcataagatacgtgcatattcaattttaaaagttagtag

SEQ ID NO: 634571 - DNA, 575 bp, Homo sapiens
acgtagctttccagctcctcttggtcaccattaagctcctataatttttcctacattctttcccaacttactgtgataccccctgttgatgcytgttttttttgtttgtttgtttttgttttgtatttgaagaggtccttaatgctggtaatatatagacagtgtggacatctacaccaaagacatcatctcctatcaccaccttaacccctgaaaccatacaaaagctgttagaatcagtaacacatgcatccatcctccatgatcattggtgatttcagacaacacctttttcaggtattgatactttttaaattttcaagacctatgtcattggttggaacagaaagattactcgagtggcagagtgtaccaagaatctactaagaatctttactaagattcaggggatttttttgtccaagactgacccattatccttgaataataccttgaagaagcctcttggctctcccattctgcaggaccatgtcattgcttctaaaactggagtgcacataggggttgcagaaatgtgaaaggaggtacttggagccatggaataagtatgttgt

SEQ ID NO: 634572 - DNA, 612 bp, Homo sapiens
aaaatacatcatacattttggtagtacctatgtaactgacagaaaacatatacaaagtatacatttaacagtgctttgttgtaaagactcatagcttatactaacttttgcaaatccatactaatataaatatatataacattaatccaactgcagtttgagtgtatgtatatacatactaatagggttagtctttctttccttttcttacttttcctaagatgagrtattttatatgaaacttatttttagtaatgttctttctatcatctctaataagaaaagtatagactcttagagccagatatttctaggaagttaaacagatattttcatttgattcaacaaaaagttatttgacactccacaatctaaatactatataggtctacttacattttaatttcacagtttatacactttgattaattctaaatacaatctctttacatctggaaacttttctgagtttttccagtgcctagaaggaaaagataagagccatagctggcttaccaaatgtgccaaacacaatgacagccatcaggaggagtgctggtgagttctgaatacccatgtctgtacttgatcttgatcctggtctaaatggtg

SEQ ID NO: 634573 - DNA, 530 bp, Homo sapiens
tcatcaatgtttaaagcaataaaattattaaaagattattttggtcttttatcagttttgtccatgctattaactcttgttttgcctgatattggaccaacagtccttatggatatattagctttctgtgagagtcctggaaggttttattyctctctactttaatggaacactgtccaaagttatcactgaccttcacttaagagtactcatcagaatcctatagctgattaccaaccaccttttgaagaggatcaaaacaagacaaaaattgtctgtggatgaaaaaagtcttaggacatccacagttaaagacacaattgacaaggaaatatgatttactctgtggcacacaataattgtatatagtatttataattattactgataatgtacactaagttatatcagaattattggagttttgcataattttagaacacataccagtaacacatttagacaaatacagcctaaaggaagccaaatatcattctatatctggcaatgcttcctgtatgatgttaata

SEQ ID NO: 634574 - DNA, 627 bp, Homo sapiens
gttacctgggatcattttgatattttccaaaattgtttctaagatttattattgtgggtccacaataccccttagttttggattaatttgacccacagaaggtattgaggcaatacctttctgaaaactccatatttgagcctgaagcatgctttgactttttcaagaccaatatgaattttatatgctaacaatgtaaccacattctttgtttctattatagaattttattgaatttaatacatatattattaatttataatacataaattatttgttggatacaaattgaaagtctttggactacagaggagtttctgtaataatatatttatctgggatgtaatccttttctgttacatctttactgtcatttttttctctactttgcgtgcatatccatgataaaaatagrtagaaaatacagttttgtgagataaaacattgttagctctcttgtatacctgcaacaattacacttggaacaaaacaataacggtggctatattttaaattttaaggtcccaacagtcccgtataaaagtctaatctctacggtccttaaactcatttcctttaaatcagattaaatttgactatatgccttcattccaccaaggagaaaac

SEQ ID NO: 634575 - DNA, 594 bp, Homo sapiens
ttactccaatgtcagtgtgatcctttgaaacctgtctttaaccaccatgtgaataaaatcatctcttttattctttttacattccctgttccatattagcaagagttaagtagccagtacagcaagctccaatgttataggatgaggactttgtcttaggtttatggcttggttttattgaacccttgggtgccacttgtaaacattttccmgtgtcctctaacttggggttagggagtgaagactaccatttatggagcttctcgaataggttgcattttttttttctttttttgagacggagtctcactctgtcacccaggctggagtgcagtggcacgatctcggctcactgcaagctctgtctcccaggttcacaccattctcctgcctcagcctcgctagtagctgggactacaggggcccaccaccacgccagctaattttttttgtatttttagtagagacggggtttcaccatgttagccaggatggtcttgatctcctgacctcgtgatccacccacctcggcctcccaaagtgctgagattacaggtgtgagccaccacacccggctgcatttatttacttatg

SEQ ID NO: 634576 - DNA, 612 bp, Homo sapiens
attgggtttttcaacttatgaacatgaaatgcctctccatgtatttaggtcttctaaattcatagttttctgcatagagttattaaataccttttgttaaccttatttctaagtatttaatgttctagatatcattataaataaaattggtttttaaactttttttttgctggtagtaaatcgaaatataattgattttttcagattgatcttgtrttctgtgaccttgctatttttacataaattcctcaggattctctttgcaaacaatgatgtcatttatacacaaagggagttttacttcttaattttcaatctttatgcctatgatttcattttgttttattttactgcctaggacctccagtacaatgttgaacagaagtggtgacagtaaacatttttagcttgttcttgataataaaagaggacaatatttcaccattatcataaatggcagttgaacttagggaaataatgtttctgcttatgaaatgattacatatttgtcttctctttcgttttgttaatatggtggattacattgacaatttaatatgttaaatcaacattgcactcttgtgatacacctacttcttcatggaatatgaa

SEQ ID NO: 634577 - DNA, 641 bp, Homo sapiens
ctacagataaatgaggtcaccagagaaaacaaactttgcaccttttttctctacaaattctgctgtttttatcaagaaatgggtaggaagccataggtctgcaatacagtaagtatgatgcttagaattgaccaaagcctttaattgaccactaaagatccccatatggatgtggttgaaattctctctttttttttkgtcacaattatgtaggaaagataaaatgaattattagcagcatctgcaagaaaaaggcagccatgtaaatattttaatttcagaaatattatgtatttaaagcaactagaattttagaacataacagggtcagccctaaaatgaacaagaattccaaatttcaggaaatttattctcttagatgttcttactgcaaggtgattctgatatcatctcagaatgataaccacaattatatagcacttcctaatttgaaaacttccacataatttggccacacagcactgtaaaatagtacccttattttatgaaggaggcatctgagacttaattagataaccttcaggagcccttgtccaggtttacataggaagtagattgaggaaacagtactccatccagatctgacttcatggagtgttgactggggcgtactgttaata

SEQ ID NO: 634578 - DNA, 492 bp, Homo sapiens
tattagcagcgtaactgtgaacagggtgttcttgatgcttatgtgagaagtgttttaaggatctgatttgataaatacaaaactaactatgattcttcaccattgagccmttgcagaaaagagtgtaaaatctttacttctgagtccttattttagttggaaggtcataaaacagtgtgtgaatatgggggttaaatttggggagataggatttctcaggacttctacaagtagtccttcttcttttgcccctgtgatatcagagacactgaacttgatgacgactggatggggctgaaatcaatgattgatgttttctaagcaaaccatcagttttgcacatccattattaccatcaacacatccatgcccatccccaactcagaggttcaacgccaaatattgaaaatcctgtgacaagcaactggtaagtggtaagaaagcctcttcatactaattctgaaagctactaaaagtattttaggctgcaag

SEQ ID NO: 634579 - DNA, 599 bp, Homo sapiens
attcagggcccaagggctcttcagttaacaggtgatgcatgctggcaggtctgagtccttctcttcaaggcaactggttcctttctggtccagggtgtatctagaaatgtgtaggagctagagcctggaacagggttctcatgactctgactgacgctgcattctgctgtrgctaagagctgatatccaagatgcagacaaagtcttccccattcttctctatcctcttttcaagtggagaaaagggttctcttttggagctgtggtcagtgcagcctgaggttagtggagaggtgcagcactcccttggctgcctcagctggtgtctcagcatctcgtgttcctccccagtccaccgtctctggacctagttcagccctacgattagtctaacggttgcagtgcttgtggcctagactgcttttcaagtttacttagagaccaagagcactttggctctcagtggcaaggtttgcagggcactcaagtttaaactgctgggaccagtaatttctctctggctagggctggtttaaacgctctccctgtgggtgggcattagctaagtttggtctggtttttcttcctgctctaacagg

SEQ ID NO: 634580 - DNA, 599 bp, Homo sapiens
attcagggcccaagggctcttcagttaacaggtgatgcatgctggcaggtctgagtccttctcttcaaggcaactggttcctttctggtccagggtgtatctagaaatgtgtaggagctagagcctggaacagggttctcatgactctgactgacgctgcattctgctgtggctaagagctgatatccaagatgcagacaaagtcttccccattcttctctatcctcttttcaagtggagaaaagggttctcttttggagctgtggtcwgtgcagcctgaggttagtggagaggtgcagcactcccttggctgcctcagctggtgtctcagcatctcgtgttcctccccagtccaccgtctctggacctagttcagccctacgattagtctaacggttgcagtgcttgtggcctagactgcttttcaagtttacttagagaccaagagcactttggctctcagtggcaaggtttgcagggcactcaagtttaaactgctgggaccagtaatttctctctggctagggctggtttaaacgctctccctgtgggtgggcattagctaagtttggtctggtttttcttcctgctctaacagg

SEQ ID NO: 634581 - DNA, 599 bp, Homo sapiens
attcagggcccaagggctcttcagttaacaggtgatgcatgctggcaggtctgagtccttctcttcaaggcaactggttcctttctggtccagggtgtatctagaaatgtgtaggagctagagcctggaacagggttctcatgactctgactgacgctgcattctgctgtggctaagagctgatatccaagatgcagacaaagtcttccccattcttctctatcctcttttcaagtggagaaaagggttctcttttggagctgtggtcagtgcagcctgaggttagtggagaggtgcagcactcccttggctgcctcagctggtgtctcagcatctcgtgttcctccccagtccacygtctctggacctagttcagccctacgattagtctaacggttgcagtgcttgtggcctagactgcttttcaagtttacttagagaccaagagcactttggctctcagtggcaaggtttgcagggcactcaagtttaaactgctgggaccagtaatttctctctggctagggctggtttaaacgctctccctgtgggtgggcattagctaagtttggtctggtttttcttcctgctctaacagg

SEQ ID NO: 634582 - DNA, 580 bp, Homo sapiens
tgaagagttcagaaatagatccacagatatgcagtcaaccgattttttttttttacaaagataccaagttaattcaatgggtcaagttgcagcaaatagtgctagtaaaacagaatatctacagggaacaaaatgtatctcaacccttatttcacacaatacrcaaaaatatattagagatgtacccttaacttaaatgtaaatcctaaaattatacaatgtctataagaaaacaagagaatatcttcacaaccctgcagtagtcaaagaatttttaggggacaaaaatcattcattataaatgaaaatctgataaattgtattctatcaatgttttaaaaaattgtgtaacaaaatatactgttaagaatatgtaaatgcaagtcacagactgggagaaaatattctcaagaaatatatgacaagcatatcaagaatttagaaagaattcatgtacactcaataattttaaaaaatagcagtcaaataaaaaatatcaggcaaatatctttaatgaacacttcataaaataagatgtaaaaatcggcaattagcatgtgaaaagtagctctacaacatg

SEQ ID NO: 634583 - DNA, 599 bp, Homo sapiens
tctggcattcactgagtttattttacaggaaaaccgcatttcatggggaaaacacaaagaaatcaagtccaatagaacatatttatgaaactccagataaggtacaattkaattgggtcagagatgggtcaacatgtaatcatgtctaatttaccctattgaccaatctacaattattaaagtatcttcgaattttccctaaaaactcttagcttacataaaaaaatgactctttacatataatttgagtctgcaagagaaccaatatcaacttaaatagatgccttccagctctctttttcctttaagaatccatgtgccagactcccactactgaagataaaaatgagctatacagagaaagatcagtgaacagggaaagaggaatgttttgaaaactgtaagctgttatgcagagataatttcaatttttcaagaggataatgcaaaacccattaagaaagaactagaatatttttctcaatgaataatcatttcataataatatcatataaatatcatatgtgaaaataaaatgatgtgcagaattcattccttgttagaatatcaggaaaaggtcctgaggcccaggtaccaca

SEQ ID NO: 634584 - DNA, 595 bp, Homo sapiens
tatctgcactcccatgtttgttgtagcactgtttggaatagccaaaatttggaagcaacctaagtgtgcatcaatagatgaatggataaagaaaatatggcacatatacacaatggagtactattcatctataaaaaagaatgagatcctgtctcttgcaacaacatagatggaactggaggtcattacattaagtgaaataagccaggcacagaaagataaacatcatatgctctcacttatttgtgggatctaaaattcaaaacaattgaactcatggatatagagagtagaaaaatcattaccagaggttgggaagggtaatgaggggctgaggttgaggggaggtgaagwtggttaatgggtacaaaaaatagtgagaaagaatgaataagacctagtatttgatagcacaacagggtgactacagacaacaataatttaattgtacatttaaaaataactaaaagactataattggattatttgtgacacaaaatataaattctttaggggatggagaccctagtttacatgatgtgattattgctcattgcatgcctgtacaaaaaaaaatgtgccccataaatatata

SEQ ID NO: 634585 - DNA, 595 bp, Homo sapiens
tatctgcactcccatgtttgttgtagcactgtttggaatagccaaaatttggaagcaacctaagtgtgcatcaatagatgaatggataaagaaaatatggcacatatacacaatggagtactattcatctataaaaaagaatgagatcctgtctcttgcaacaacatagatggaactggaggtcattacattaagtgaaataagccaggcacagaaagataaacatcatatgctctcacttatttgtgggatctaaaattcaaaacaattgaactcatggatatagagagtagaaaaatcattaccagaggttgggaagggtaatgaggggctgaggttgaggggaggtgaagatggttaatgggtacaaaaaatagtgagaaagaatgaataagacctagtatttgatagcacaacagggtgactacagacaacaataatttaattgtacatttaaaaataactaaaagactrtaattggattatttgtgacacaaaatataaattctttaggggatggagaccctagtttacatgatgtgattattgctcattgcatgcctgtacaaaaaaaaatgtgccccataaatatata

SEQ ID NO: 634586 - DNA, 377 bp, Homo sapiens
tatcaccaaatagataaaatacagagtgaagttaagaatcatgctgtatgaatttcccawcaaaatgttactgtcctctgaagtgaatcaggaggtgctttagtattaataaatagaatagaatacaaatgtcagtctaaaattatacacttctattttggattaaatttcttagggtccctcagataagccataatgataaagacaacaaaaaagtgagttgatagctattagaaacatttttagctcccatgtcacatttagctaacaattaaataatatttttatgttaagaatatacaattcaaacactatacatgtattatattttagtcatatttttattattacactttgtttttacatgtctattctta

SEQ ID NO: 634587 - DNA, 377 bp, Homo sapiens
tatcaccaaatagataaaatacagagtgaagttaagaatcatgctgtatgaatttcccatcaaaatgttactgtcctctgaagtgaatcaggaggtgctttagtattaataaatagaatagaatacaaatstcagtctaaaattatacacttctattttggattaaatttcttagggtccctcagataagccataatgataaagacaacaaaaaagtgagttgatagctattagaaacatttttagctcccatgtcacatttagctaacaattaaataatatttttatgttaagaatatacaattcaaacactatacatgtattatattttagtcatatttttattattacactttgtttttacatgtctattctta

SEQ ID NO: 634588 - DNA, 583 bp, Homo sapiens
ctgtcctctgaagtgaatcaggaggtgctttagtattaataaatagaatagaatacaaatgtcagtctaaaattatacacttctattttggattaaatttcttagggtccctcagataagccataatgataaagacaacaaaaaagtgagttgatagctattagaaacatttttagctcccatgtcacatttagctaacaattaaataatatttttatgttaagaatatacaattcaaacmctatacatgtattatattttagtcatatttttattattacactttgtttttacatgtctattcttaccataattaaattgaaaaattctaaaagtttactgcttctgaggaaattagtggttactgtaaaccagtattgtgtgctggttaccaagttgtttgagtttgttaagacagaacacctacacacataacaagctgcatgaagcagtttccttacaggtaggtaacaagggacacaggagcctaggattcattgccagccagtccaaggctcaggaaacctgcccacggcagatggagtctcctctgggcacgtgacacttgcactgcaactgaagg

SEQ ID NO: 634589 - DNA, 539 bp, Homo sapiens
aagacacaagttatgcctcatggagacttttctgattcctctactgggaaagaatccctttttcctgtgtcctaccaatgatttttagctatacagtaaatctcatataccatttatgatcatacattttttccacaagtatattagaattgtagcaaagctataacaaaagsctcctaatgagttaggcatggtggactttcagccaggagaaaggttaagggtcaccaattaggaatataacccagatgagaaaattttaaaataaacaaatcaatcaattaaaaatttttataaaaataagtcagcaacatttgggagacatgcttgtgagagactagttcttaaaagtgtcactcaaataaagcttttgttcaaccttacccattaaattttagttgttgattgcaggatccatggctgagtaaccttgtataattcaccagctcagtgatattaactcactgccttccacatagaaatcatataaatatgtgagaagagaaggcttttagctattccatataagcaacaagtca

SEQ ID NO: 634590 - DNA, 521 bp, Homo sapiens
gacttttctgattcctctactgggaaagaatccctttttcctgtgtcctaccaatgatttttagctatacagtaaatctcatataccatttatgatcatacattttttccacaagtatattagaattgtagcaaagctataacaaaagcctcctaatgagttaggcatggtggactttcagccaggagaaaggttaagggtcaccaattaggaatataacccagatgagaaaattttaaaataaacaaatcaatcaattaaaaatttttataaaaataagtcagcaacatttgggagacatgcttgtgagagactagttcttaaaagtgtcactcaaataaagcttttgttcaaccttamccattaaattttagttgttgattgcaggatccatggctgagtaaccttgtataattcaccagctcagtgatattaactcactgccttccacatagaaatcatataaatatgtgagaagagaaggcttttagctattccatataagcaacaagtcaggttta

SEQ ID NO: 634591 - DNA, 637 bp, Homo sapiens
ttttataaaaataagtcagcaacatttgggagacatgcttgtgagagactagttcttaaaagtgtcactcaaataaagcttttgttcaaccttacccattaaattttagttgttgattgcaggatccatggctgagtaaccttgtataattcaccagctcagtgatattaactcactgccttccacatagaaatcatataaatatgtgagaagagaaggcttttagctattccatataagcaacaagtcaggtttatatatttgttctgaattagataataatcagccatcttcacttaaaaaagatgttttgtgcctttcccaacctgtctccccagttaccctctgctgtaaacttaattccttatgtgaccatattttcttcctctttctttgcttgtcattattctccctttggttcttaagaatcatattcacttaatatatctgaacctttacatctccacctttcacacttgcttttcagattgtgcctgcccacctctaattatgcatgtatactttggctyctgtaatcttttattctttaagacaatagaaggttttattctgtggtccttcttaaatgaattctaacatcactctcactttctctaccactcaagattggctgggc

SEQ ID NO: 634592 - DNA, 549 bp, Homo sapiens
tcccactcatgtgactggtcatggccagtgaactctgagtgggagcaatgtatcacctccatgactcaatttatcattgaatgtctcactctgagatcatgaaaagcccaggtgtggtctgcagcctctctctccctggtgtgcagaccaaacatgccttttattccagaccaacaagtaataggaggagagccctctgccaggcttgatttctgaaagggagtgtgaaacagtgccttctgccaaactgcatggggtgtgaacccacagtaaaaagtaaacctttgttatgttaagcgtctgaggtctgggctgggaggagtgttttttttccctaaaacaaggatctagcttatcaagatgaaatcagttatgtttggtaaagctgaaaattctgtataaagcatatctttttaaatgttatttcattttcctacatattgctgaggacacttcatgtagcttatcyatcctattcacccatctctttgctcttgaggaaaaataagtattaaaagaacaatggtgaagaagcaggcacaaagctct

SEQ ID NO: 634593 - DNA, 582 bp, Homo sapiens
ttgattataaatataataatgtatctggaatacagagaaccatgtaacatggtgagcatttgatagatttttgtggttggcattatttctcttctattagttaactacaatgttatcagggaaatgaaagaaagataatcttatttgtatctctttgtttcttctactcaataattttgtatgcgtgtgtctgtacatgacatgtccttccaccctactctaccaccagcctgcaccccatacgtgtctcttgttaaaaattagtattcagagcaaagtgracacactcatttatcaagaaccacagttcacactccaaaataaatagaagagtaaagtctgtagggagaaagggaagaaatgagggtttcaatccatctcccctgagcaataaaatttcatctattaaaaaaaacatatttactacaccatgttgtcaggaagatctagctatattatttttcccatgacatatgcatcaaatcttgtgaaacaaacatttttatataaagtaaacgtatcagtaaagtacactaagtatattgccattggtattagtcaagatccttgacccattcttta

SEQ ID NO: 634594 - DNA, 542 bp, Homo sapiens
tctttaaactagaattttatgtctcagagcctcatatagttgtttttaagcattctcttgcctcattcagttactcacataccttggcaaatgtctgtaaacatcccatcttcattccagatccttggaataggcctgacagaccacaaacttaaagagcacattattgacttttgtatgtactgcagattctttataaggtcaccaacctcaagggatatgaaatccagtggcagagacaaaataatgatgattaaccaataaagaacaagaatgagaatgtgtggggcatatcataagtgctacaggaattttgaagaaggaaagatttccgagaattctaatagtcaacgaaggattctcttgaagacttacactgtacgtaaataggcagaaaagggaatatgttccaggcaaagaaatacatttaggaggctgtggcctatagtgtaatgggtctrttggttttaacttcaagtctaaaatatatcctttccacttatgttgtttttgaaaagctaatgagtatttcttagccaata

SEQ ID NO: 634595 - DNA, 604 bp, Homo sapiens
gggtaactaggggaattactttaaggtgggttataaacataaaagctaaaactataaagtctctagaagaaaacacaggacaaaatctttgccatctggggttggcaaagatttcttaataggatgcagaaacagacagctctatgaaaaaagagaaaacttagacttaattgtacttatccaaaacactattaggaacgtcaactggcaagctacagaggaggagaacatatttgcaaaacatacatttgacaaaggacatatccaagatgtacagtgaactcataaaactcgaaaatataaagaacagtctaactgaaacatgaacaaaagacttgaggagacgtctcacaaaagaaggttgcccagtaarcacatgaccaggtgctcaacatcattaaatatcaggaaaatgcaaccaaattctcttatataattagtgggagtgtaaggaaaatagcacagccattttggacaaaggcttggcagtttcttgtttaacagcaaacaaataaataaaaaactaccctaaaatccagcagttccacacctaggtatttgtctaagagaaatgaaaacacatgtcctcaaaaagacttgcaca

SEQ ID NO: 634596 - DNA, 541 bp, Homo sapiens
gattttcatatgttgagccaaccttgcatctcaggaataaagcatacttgattgtagtgaattaactttttgatgtgctgctggattcaatttgctagcattttgttgaggaattttgcatctattttcttcagggatattaatctgtatttttctgtttttgttgtgttcttgctagatttttgtgtaaggatgacaccaattttgtagaataagttagagaggttttccttgtcctctatttttggaatattttcagtaagaktggtattagctcttctatgttcagtagagtttagctgtgaatccatcttgtctgaagctttttttggttgggagacttttttattactgattaaatattacagctgattattggtctaaccaggatttaaattccttcttggttcaatcttgggagttgtatgtttccaggaatttattcatttcctctagattttctcgtttctgtgcacagagatgttcatagtagcctataatgatgttttgtattttgtggtattatttctaattggactta

SEQ ID NO: 634597 - DNA, 577 bp, Homo sapiens
tcagtgtacagatggtgctggaagcaacctgaattagggaaaagtgagcagtctcaggaatgagtgctaagacatccctctctgtggaattttggtaaaggaggagaagccaacaaagaaaactgagaaggagaggccagagggtaggaggagagccaaggaattcagtgacactgaatcttagagcagagaatgtttcaagaaaccaatactgtttgttccaaatgcctctaaatagttgaacaatatgccgacaaatgtgtccctgatttagcaacctggagctattgattatctagacaagaatcatttcagtggagatggggagatgcaacccaggtaagcgtggattgaatgcaagaaatggaatgcaaaacagagaggaagcagagtgtataaaatattctttcatttttttttgtaaaggtgaacagagaaatgagaagggagctggtgtrgaatgtgggggccaagaaggttaatttgtgcttaatgaaaactcttctgatattttttaaatatgagtgatatggtttaggtgtgtccccacccaaatctcatcttgaattgtaactcc

SEQ ID NO: 634598 - DNA, 613 bp, Homo sapiens
taaaaaaaaaagtatcagtaaattatcttttaaattagtttgcagaacttaagaaaaactgattaagatttcatgtagatgaaactcattgaggaatttttttatttgagtgcactactaaatttatttaagcagttattgaagtaatatactatgccattatgttacttgatggtgaataaaaatgcacttagaactctctctcctttttttttkggagatagagtctcacctgtcacccatgctggagtacagtggcgcaatcttggctcactgtaacctccacttcctgggttcaagagattctgctgcctcagcctcctgagtagctgggactacaggtgcctgccaccatgcctggctaatttttgtacttttagtagagatggggtttcaccatgttggccaggctggtctcaaactcctgacctcaagtggtcttcccaccttggcctcctaaagtgctgggtttacaggcatgagccaatgtgcctggccagacagactctattttcttgagtaacttataattcagtatagagcacaaaatatagtacaagacagaataaaagtgttgttctaataaaaatctcaacacccataacggttgcac

SEQ ID NO: 634599 - DNA, 577 bp, Homo sapiens
tcagtgtacagatggtgctggaagcaacctgaattagggaaaagtgagcagtctcaggaatgagtgctaagacatccctctctgtggaattttggtaaaggaggagaagccaacaaagaaaactgagaaggagaggccagagggtaggaggagagccaaggaattcagtgacactgaatcttagagcagagaatgtttcaagaaaccaatactgtttgttccaaatgcctctaaatagttgaacaatatgccgacaaatgtgtccctgatttagcaacctggagctattgattatctagacaagaatcatttcagtggagatggggagatgcaacccaggtaagcgtggattgaatgcaagaaatggaatgcaaaacagagaggaagcagagtgtataaaatattctttcatttttttttgtaaaggtgaacagagaaatgagaagggagctggtgtagaatgtgggggccaagaaggttaatttgtgcttaatgaaaactcttctgatatttttwaaatatgagtgatatggtttaggtgtgtccccacccaaatctcatcttgaattgtaactcc

SEQ ID NO: 634600 - DNA, 568 bp, Homo sapiens
aaagaaattctgcaaatagccagtatgcatagaaaaataatttcaacatctttaagggataccactacatatccactagaaccgttttaaaaataataaaaacaaacaaacctgacaacatctcacttctctattttataattcatcatgattataaaattgccacatattcatttatttttaaaaactcagtcttcaatggcttcctcatcacctgtaagaaaaaattcaaactgmattatatgagaacttttgctccatgttttcaccccattttttctacatgtccctatcatgaaacctgcagtctagttctagctagccattcacccttacctgatctcgccatgtgcttcatgcctccatgcttttgagaatgcgcttcatttattctaatcaatttccagtcttgcccaactgttgaacctgttttatttttggaaatcaaagattttgccttttcacacctccatttgatcaaatatttattttttaagaaaaaaaagttcttttgcaggcacattggcccttctgttttttaaacacattggtcatgctttcattttag

SEQ ID NO: 634601 - DNA, 573 bp, Homo sapiens
caaagttgctaaatttgagaatgcctattgagtttcttacatttacaaactaagattttagtacacttcaaatttgcttgtgcagtaactaattatatagattcatataattagtagtataaaattgtataaaattatattgtatacaattatatatgttatatagacaatttattcttgttaaataattgtattactactaaatcaggagcttaytcattaatttgtgtgaaatttttcttttctttctaatgaatcactgttttgagtatgatctgaaaattgttttcttaccattaatttctagattctaggataatttctattgattttatcatttatctgaatttttcttatatatttagtaattcaattttaaaattacaatcatatacctcaaaaccagaagtgtgttctcttctactgttttcatagaaactttccaaagattcttttatattttcagttcaatggtttatttgacccttaacaactttttgagtaactctgtcacctctttcatattcgtctcttctctgaaattttattttagagagcttgaaaggctgtttt

SEQ ID NO: 634602 - DNA, 573 bp, Homo sapiens
caaagttgctaaatttgagaatgcctattgagtttcttacatttacaaactaagattttagtacacttcaaatttgcttgtgcagtaactaattatatagattcatataattagtagtataaaattgtataaaattatattgtatacaattatatatgttatatagacaatttattcttgttaaataattgtattactactaaatcaggagcttattcattaatttrtgtgaaatttttcttttctttctaatgaatcactgttttgagtatgatctgaaaattgttttcttaccattaatttctagattctaggataatttctattgattttatcatttatctgaatttttcttatatatttagtaattcaattttaaaattacaatcatatacctcaaaaccagaagtgtgttctcttctactgttttcatagaaactttccaaagattcttttatattttcagttcaatggtttatttgacccttaacaactttttgagtaactctgtcacctctttcatattcgtctcttctctgaaattttattttagagagcttgaaaggctgtttt

SEQ ID NO: 634603 - DNA, 573 bp, Homo sapiens
caaagttgctaaatttgagaatgcctattgagtttcttacatttacaaactaagattttagtacacttcaaatttgcttgtgcagtaactaattatatagattcatataattagtagtataaaattgtataaaattatattgtatacaattatatatgttatatagacaatttattcttgttaaataattgtattactactaaatcaggagcttattcattaatttgtgtgaaatttttcttttctttctaatgaatcactgytttgagtatgatctgaaaattgttttcttaccattaatttctagattctaggataatttctattgattttatcatttatctgaatttttcttatatatttagtaattcaattttaaaattacaatcatatacctcaaaaccagaagtgtgttctcttctactgttttcatagaaactttccaaagattcttttatattttcagttcaatggtttatttgacccttaacaactttttgagtaactctgtcacctctttcatattcgtctcttctctgaaattttattttagagagcttgaaaggctgtttt

SEQ ID NO: 634604 - DNA, 639 bp, Homo sapiens
gaatttttcttatatatttagtaattcaattttaaaattacaatcatatacctcaaaaccagaagtgtgttctcttctactgttttcatagaaactttccaaagattcttttatattttcagttcaatggtttatttgacccttaacaactttttgagtaactctgtcacctctttcatattcgtctcttctctgaaattttattttagagagcttgaaaggctgttttactcataatataaactttgaacagtcttaaaatgtgcaatctcattacacttgaaatttaaagaaaatccacattaatatgtgtatttaaaggattccatctacgtgataaacaacttgaaatgaaaacatgtatctataagaaaatgctgaattagtcagccacttgcagagtcaccctttgtcttgaatgacgccaaggaagagctgaatggggcacactttctgtaccttgattattgttttaaagggtgcttgcagccggarctgcctacgtaacatgtgcagccttttgtccaaaaagcattaacaattctgataaagtgatggcagacagttaagctagcacaggacccttctaagtgccgggaactgtgtaaatcatacaggtaacatgactgcaaagctggc

SEQ ID NO: 634605 - DNA, 639 bp, Homo sapiens
gaatttttcttatatatttagtaattcaattttaaaattacaatcatatacctcaaaaccagaagtgtgttctcttctactgttttcatagaaactttccaaagattcttttatattttcagttcaatggtttatttgacccttaacaactttttgagtaactctgtcacctctttcatattcgtctcttctctgaaattttattttagagagcttgaaaggctgttttactcataatataaactttgaacagtcttaaaatgtgcaatctcattacacttgaaatttaaagaaaatccacattaatatgtgtatttaaaggattccatctacgtgataaacaacttgaaatgaaaacatgtatctataagaaaatgctgaattagtcagccacttgcagagtcaccctttgtcttgaatgacgccaaggaagagctgaatggggcacactttctgtaccttgattattgttttaaagggtgcttgcagccggagctgcctacrtaacatgtgcagccttttgtccaaaaagcattaacaattctgataaagtgatggcagacagttaagctagcacaggacccttctaagtgccgggaactgtgtaaatcatacaggtaacatgactgcaaagctggc

SEQ ID NO: 634606 - DNA, 639 bp, Homo sapiens
gaatttttcttatatatttagtaattcaattttaaaattacaatcatatacctcaaaaccagaagtgtgttctcttctactgttttcatagaaactttccaaagattcttttatattttcagttcaatggtttatttgacccttaacaactttttgagtaactctgtcacctctttcatattcgtctcttctctgaaattttattttagagagcttgaaaggctgttttactcataatataaactttgaacagtcttaaaatgtgcaatctcattacacttgaaatttaaagaaaatccacattaatatgtgtatttaaaggattccatctacgtgataaacaacttgaaatgaaaacatgtatctataagaaaatgctgaattagtcagccacttgcagagtcaccctttgtcttgaatgacgccaaggaagagctgaatggggcacactttctgtaccttgattattgttttaaagggtgcttgcagccggagctgcctacgtaacatgtgcagccttttgtccaaaaagcattaacaattctgataaagtgatggcagacagttaagctagcrcaggacccttctaagtgccgggaactgtgtaaatcatacaggtaacatgactgcaaagctggc

SEQ ID NO: 634607 - DNA, 622 bp, Homo sapiens
agacgctaactgttgggtactgtgttcattctatgtgtgatggtatcatkcatatccggtacctccgtatcatgaaatatacccatgtaacaaagctgcacatatgccctctaaatctaaaataaaagttgaaatttttaacaacaattctaaacataaataagttaattaaataacacccatcttgtctgccttgtaggttgttttgtgagaagcaatagtgataatgaatgtgaaaatattttagtgtgctctattagaaagtttgaagatttcataattttaattagacgtaatagttccaaactgtgagtttttaacttaattgtagaaatacaataaaatataatgaaaccatttattttatacctaaaatgcaccaggcattgcataagacaatttgaacatactgtttctaattcttacagcaactctcagatgtggaaatgaagttcagagaatttaagtaaattcccaagttcatgcaggtaataaatagtctaaccataatttaaattcactctttctgctacaacatacagccttactagtagatagaaattatcgactaaatcttataaattgtggtcctgttttctttctacaaattttacaagcatta

SEQ ID NO: 634608 - DNA, 572 bp, Homo sapiens
tggctggccagggacgatggctcacacctgtaatcccagcattttgggaggccaaggcgggtggatcacttaaggtcaggatttcgagaccagcctgaccaacgtagtgaaatcccatctctactaaaaatacaaaaattagccgggcatggtggtgagtacctataatcccagctacttgggaggctgagacaggagaatcacttgaacccgggaggcagaggctgcagtgggccaagatctcccactgcactccagcctgggcgacagagtgagactccacctcaaaaaaawaaaaataaaaataaaaatatatatatatatatatatatatttgactggaagtgttttcagatgacagatagttgttttgatagttgaggatattgttcctcatcttggcaaggagatcaattcagggaccaactcagccatatgcccaaaagacagaaaggagtgtttccctattgaggatctgaagcagtctcctctatcagaagtaaccctgggtcgcagtaggtagagtttgctacctgaccttacctgggaagtgtctatccattcccatgtgg

SEQ ID NO: 634609 - DNA, 572 bp, Homo sapiens
tggctggccagggacgatggctcacacctgtaatcccagcattttgggaggccaaggcgggtggatcacttaaggtcaggatttcgagaccagcctgaccaacgtagtgaaatcccatctctactaaaaatacaaaaattagccgggcatggtggtgagtacctataatcccagctacttgggaggctgagacaggagaatcacttgaacccgggaggcagaggctgcagtgggccaagatctcccactgcactccagcctgggcgacagagtgagactccacctcaaaaaaataaaaawaaaaataaaaatatatatatatatatatatatatttgactggaagtgttttcagatgacagatagttgttttgatagttgaggatattgttcctcatcttggcaaggagatcaattcagggaccaactcagccatatgcccaaaagacagaaaggagtgtttccctattgaggatctgaagcagtctcctctatcagaagtaaccctgggtcgcagtaggtagagtttgctacctgaccttacctgggaagtgtctatccattcccatgtgg

SEQ ID NO: 634610 - DNA, 572 bp, Homo sapiens
tggctggccagggacgatggctcacacctgtaatcccagcattttgggaggccaaggcgggtggatcacttaaggtcaggatttcgagaccagcctgaccaacgtagtgaaatcccatctctactaaaaatacaaaaattagccgggcatggtggtgagtacctataatcccagctacttgggaggctgagacaggagaatcacttgaacccgggaggcagaggctgcagtgggccaagatctcccactgcactccagcctgggcgacagagtgagactccacctcaaaaaaataaaaataaaaawaaaaatatatatatatatatatatatatttgactggaagtgttttcagatgacagatagttgttttgatagttgaggatattgttcctcatcttggcaaggagatcaattcagggaccaactcagccatatgcccaaaagacagaaaggagtgtttccctattgaggatctgaagcagtctcctctatcagaagtaaccctgggtcgcagtaggtagagtttgctacctgaccttacctgggaagtgtctatccattcccatgtgg

SEQ ID NO: 634611 - DNA, 548 bp, Homo sapiens
aactgaagattcatagagcctgggacaaggattctcaaatattttggtatcatgatctctttacactctaaaaaattaatgataactccaaggaactagtttcatgtgggttatatatatattgatatttactacattaaaaaattaaagctgcgaaaaattttaaacataaaaatacacaarcatacattctattagctctcagagtgatgacattaccactccacgtgtagtgtttggaatgcctctttcttgttttcttccaggagcaatgacttcccaagaccactccaccttgtcccatagctgggtaagcccctttctttcttcttctttgccagtgctctgactagccaagtttcagaactgttcccaggagtgcccatgcatgtggcactttctcttcctgttttgtttttttcactactagtgccttctaccctccccagctctgcttcactgcagtctttatttcccatatcctggaaaataggtgtttgcaatcttccttgcttcctaagaatgctgtgagtataggttgtagatat

SEQ ID NO: 634612 - DNA, 511 bp, Homo sapiens
catctatgtggcagtcctagagaagagacaaaactcgctaccttaggtaaattgcttcctctaggtggctacagtaaaatctctaatgtaacattgtggtgtatgccttattatttgtctctgaactccaggaaactgtcaaatggggcatttggaaatgacagacatcgaatcaacaggtttgctgctgttttaggatttgccaattgttaacatartggcgcatctgctgtttcataaaggtcatgctgtcacataattcttgtctgcagagcttcattcaccacaaggtgagtgcttgagaaagaacagcgtagtatgacggtttcagacagatgcatttatttgcgtgcatttgatgcagagttgggaatgaaactcggaaagcatcaataccattcctttcattgttcttttgtactgcccggtttcaaaagctaaacctataaaaatagaaaatgagtgtaattaagtggtctaatttagaatgatggactttttaagtcgacta

SEQ ID NO: 634613 - DNA, 511 bp, Homo sapiens
catctatgtggcagtcctagagaagagacaaaactcgctaccttaggtaaattgcttcctctaggtggctacagtaaaatctctaatgtaacattgtggtgtatgccttattatttgtctctgaactccaggaaactgtcaaatggggcatttggaaatgacagacatcgaatcaacaggtttgctgctgttttaggatttgccaattgttaacataatggcgcatctgctgtttcataaaggtcatgctgtcacataattcttgtctgcagagcttcattcacyacaaggtgagtgcttgagaaagaacagcgtagtatgacggtttcagacagatgcatttatttgcgtgcatttgatgcagagttgggaatgaaactcggaaagcatcaataccattcctttcattgttcttttgtactgcccggtttcaaaagctaaacctataaaaatagaaaatgagtgtaattaagtggtctaatttagaatgatggactttttaagtcgacta

SEQ ID NO: 634614 - DNA, 608 bp, Homo sapiens
ttcacttttttaaatacataattttccccctttgccatgaagattgacatgctgaagagttagtgctttgtaagacatttattaggaatttctgagctaaaattttcttctggtagataatatagacttatttctaaaaatcactactaaaatgcaaagtatggagattttagtgaaacaaattatatttttacgttatgagattagttacttaaataaataattgctgcctctgaaaataatgaaagaaactgaactgtgggcttcttaaggtagcaactgaatatttatttttgtattcttatcacccagctcaatgccagagtcaaagctcaatgtttgttaagttaatagcagtaaagaaaaagatatctgaggattttagactaccttgtgcacaagaatgctcactcaaatgttataaagaaaattaaaatctgttctggtccatgcaaaatagtatattttacytaaatggctcatgttttctttcatgaaataactgtagtcactagcagagtctcattgagaatgaatacattctatttatatttttctaagcaaaaaggaaaacaatgcagaactgtagaggagctgttatagctgtc

SEQ ID NO: 634615 - DNA, 582 bp, Homo sapiens
tgttcttttgtactgcccggtttcaaaagctaaacctataaaaatagaaaatgagtgtaattaagtggtctaatttagaatgatggactttttaagtcgactattgaatttactttgatgcaaaaatttcaaacttttagaatgttagccatcattcattctgtgtgtgtttgtttgtgtgtgtgtgtctggattgaaaggaagacacaatttaaaaatcttttaaaaatgaaagctcttttaattctgtaatatacataatttagaagtgaaaataatgttgtttgatgttatttttaactgttataagtggtaaggtgatttggtcaaagtaggaaatactcattttatcagggtttttattttttatttttcttttttttttttgagatggagtcttgctctgtcgcccacgctggagtgcagtggcrtgatctcagcttactgcaacctccgcctcgtgggttcaagcgattctcctgcttcagcctcccgagtagctgggactacaggtgcatgccaccatgcctggctaattttttgtgatttttagtagagacggggtttcactgtgttagccag

SEQ ID NO: 634616 - DNA, 495 bp, Homo sapiens
agaattccttccatctcagccaagtgttcttgtgaccttcccacgcaatagtaccactcactgggcctaagtaaccacttacctgctatcttacattatagattagatttctcttttctagtttttatgtaaaatagaacaatacaatagatattcttatctggcttttttggatcaaaataatatttttgagactcatccatatcattgcatatattagaaaatgccttttaactgctgagtagtagtctgttgtatgaaatcacttcaagttacttatttatttcactgtttttggataatttaagtatttttccagttttggaccattatgaataaattttctactaacattcatgaaaaatctttgtgggatcataggttatcattgctctttggaaaatacctataattraattgttgggccaaacgctaaatgtacatttaattttataagaaacgattcaacttttttccaaagtgactgtactattt

SEQ ID NO: 634617 - DNA, 582 bp, Homo sapiens
tgttcttttgtactgcccggtttcaaaagctaaacctataaaaatagaaaatgagtgtaattaagtggtctaatttagaatgatggactttttaagtcgactattgaatttactttgatgcaaaaatttcaaacttttagaatgttagccatcattcattctgtgtgtgtttgtttgtgtgtgtgtgtctggattgaaaggaagacacaatttaaaaatcttttaaaaatgaaagctcttttaattctgtaatatacataatttagaagtgaaaataatgttgtttgatgttatttttaactgttataagtggtaaggtgatttggtcaaagtaggaaatactcattttatcagggtttttattttttatttttcttttttttttttgagatggagtcttgctctgtcgcccacgctggagtgcagtggcatgatctcagcttactgcaacctccgcctcgtgggttcaagcgattctcctgcttcagccycccgagtagctgggactacaggtgcatgccaccatgcctggctaattttttgtgatttttagtagagacggggtttcactgtgttagccag

SEQ ID NO: 634618 - DNA, 582 bp, Homo sapiens
tgttcttttgtactgcccggtttcaaaagctaaacctataaaaatagaaaatgagtgtaattaagtggtctaatttagaatgatggactttttaagtcgactattgaatttactttgatgcaaaaatttcaaacttttagaatgttagccatcattcattctgtgtgtgtttgtttgtgtgtgtgtgtctggattgaaaggaagacacaatttaaaaatcttttaaaaatgaaagctcttttaattctgtaatatacataatttagaagtgaaaataatgttgtttgatgttatttttaactgttataagtggtaaggtgatttggtcaaagtaggaaatactcattttatcagggtttttattttttatttttcttttttttttttgagatggagtcttgctctgtcgcccacgctggagtgcagtggcatgatctcagcttactgcaacctccgcctcgtgggttcaagcgattctcctgcttcagcctccygagtagctgggactacaggtgcatgccaccatgcctggctaattttttgtgatttttagtagagacggggtttcactgtgttagccag

SEQ ID NO: 634619 - DNA, 582 bp, Homo sapiens
tgttcttttgtactgcccggtttcaaaagctaaacctataaaaatagaaaatgagtgtaattaagtggtctaatttagaatgatggactttttaagtcgactattgaatttactttgatgcaaaaatttcaaacttttagaatgttagccatcattcattctgtgtgtgtttgtttgtgtgtgtgtgtctggattgaaaggaagacacaatttaaaaatcttttaaaaatgaaagctcttttaattctgtaatatacataatttagaagtgaaaataatgttgtttgatgttatttttaactgttataagtggtaaggtgatttggtcaaagtaggaaatactcattttatcagggtttttattttttatttttcttttttttttttgagatggagtcttgctctgtcgcccacgctggagtgcagtggcatgatctcagcttactgcaacctccgcctcgtgggttcaagcgattctcctgcttcagcctcccgagtagytgggactacaggtgcatgccaccatgcctggctaattttttgtgatttttagtagagacggggtttcactgtgttagccag

SEQ ID NO: 634620 - DNA, 579 bp, Homo sapiens
ctaaactgctcctaagatcagtgcttgaaatattttgctgaccctgcacttgatggatcagctggcaccacccaggtagataaactggctcatctgatctgtggcccccacccaggaactaagcacaaaaagacagctttaattccctattatttcatctctgacccaaccaatcagccctcttgacacactgtcattcccccacccacaaaattgtcctgaaaaactctgatccccgaatgctcagggagactgatttgagtagtaataaaacttgggtcttccacacagccggctctgtgtgaattatgctttctctattgcaattcccctgtcttgataaatccgctctgtctaggcagcagccaacgtgaacccattgggcggttacatttccagctttcagaactataagaaataaatttctgtggtttataagtcatcccatttatggtactctgttatagcaaccaaacagattaagacaaaagtacagagattctacagaattygcctttagattctagaagttgatgttagcattcagataataataatatcattattttaatgaaagga

SEQ ID NO: 634621 - DNA, 581 bp, Homo sapiens
ggcaagctaaccaaaagctgcaggaagcctcttttataagggctttaatgtcattaaggaggaaggagcccttatggcctgaccaactcttaaaggccttacctcttaataacatcacactggtaacacctgaatttgcactcaagccatagcacaatcttatcctttaagccagtctctcacacccacgcacagatgtgttgactgataaaagtcattgaataatgcactacagttattcactgccaacacctcagatcttcctcacttcatccagacttgccttctctgaccatatttctaaataattcwaacttttgctttctgccctcgacctaatgctgcctctaagccctcctttaggctatgaattgtattatttactgttttttgtggtatcattctcatttctttcttttcatttgtatgaatttatgggagtacatgtgaaattttgttacatgcatagattgtgtaatggataaaaaatatagtatatatccacatgaaatactattcagccaaaaaagaatgaaattatatcctctgtattgttactgtttttaacactaatcctagga

SEQ ID NO: 634622 - DNA, 529 bp, Homo sapiens
aatcaaaataatattttgtgaaaatgcawgcatattgatatagataattttagtttaattttatccttttgatgttctcccattatatgcacatatcacaaataatttactctcctgtgtacagacatttatgttttttcaataatatcgccttcacataaaaagctgccattcttatgcatatctccacatgagctatctctatctattccattcttatgcatatcgccacacaaacatgtgcaagagatgctttaaagtacacatctagcggtagaaacagagtaccatgtggtgaaagtttctgcagccttaccagctatcaccaggacactctacaagattattcacaagtttaaagtaccaccagcagcgtacaagtggtacccttattccagaccctcaaccatacagcattttcaggccttgtcatcttgttcaagttgatgggcctgaaataaaatctcattttcattttctttctttccaatggagttgaacatcttatttttattagatatttggtttt

SEQ ID NO: 634623 - DNA, 529 bp, Homo sapiens
aatcaaaataatattttgtgaaaatgcatgcatattgatatagataattttagtttaattttatccttttgatgttctcccattatatgcacatatcacaaataatttactctcctgtgtacagacatttatgttttttcaataatatcgccttcacataaaaagctgccattcttatgcatatctccacatgagctatctctatctattccattcttatgcatatcgccacacaaacatgtgcaagagatgctttaaagtacacatctagcggtagaaacagagtaccatgtggtgaaagtttctgcagcyttaccagctatcaccaggacactctacaagattattcacaagtttaaagtaccaccagcagcgtacaagtggtacccttattccagaccctcaaccatacagcattttcaggccttgtcatcttgttcaagttgatgggcctgaaataaaatctcattttcattttctttctttccaatggagttgaacatcttatttttattagatatttggtttt

SEQ ID NO: 634624 - DNA, 547 bp, Homo sapiens
taccagtttattacaagggctacaattcagaaatagccaaatggaagagatgcatagagcaaggaatggggcagggggtgcaaagcttccaggccctctccrtgctcaccaccttgccagcacctccatctgttcaccaacatggaggctctccaatcctgaacttcagggattttaatggaggctctatcacataagcatgattgattaactcaatcttcatcttctctcttcttcctggtggatgagggctgggactgaagatttcaaaattctaatcatgccttggttttgctgatgactagcccccattcagtagcccaccaagggttgcctcattagaccaaagatgctcctattaccaaggaaattctaaggatttaggggttctgtgtcaggaaccagggtcaaaaaccaaatattagaataaaaaatgctcctagtaacttcctgcttaggaaattacaagagttttagaagctctgtgtcaaaaactggggacagatgccaatatctattttttttttattgtttcatagccctcaaa

SEQ ID NO: 634625 - DNA, 547 bp, Homo sapiens
taccagtttattacaagggctacaattcagaaatagccaaatggaagagatgcatagagcaaggaatggggcagggggtgcaaagcttccaggccctctccatgctcaccaccttgccagcacctccatctgttcaccaacatggaggctctccaatcctgaacttcagggattttaatggaggctctatcacataagcatgattgattaactcaatcttcatcttctctcttcttcctggtggatgagggctgggrctgaagatttcaaaattctaatcatgccttggttttgctgatgactagcccccattcagtagcccaccaagggttgcctcattagaccaaagatgctcctattaccaaggaaattctaaggatttaggggttctgtgtcaggaaccagggtcaaaaaccaaatattagaataaaaaatgctcctagtaacttcctgcttaggaaattacaagagttttagaagctctgtgtcaaaaactggggacagatgccaatatctattttttttttattgtttcatagccctcaaa

SEQ ID NO: 634626 - DNA, 547 bp, Homo sapiens
taccagtttattacaagggctacaattcagaaatagccaaatggaagagatgcatagagcaaggaatggggcagggggtgcaaagcttccaggccctctccatgctcaccaccttgccagcacctccatctgttcaccaacatggaggctctccaatcctgaacttcagggattttaatggaggctctatcacataagcatgattgattaactcaatcttcatcttctctcttcttcctggtggatgagggctgggactgaagatttcaaaattctaatcatgccttggttttgctgatgactagcccccattcagtagcccaccaagggttgcctcattagacmaaagatgctcctattaccaaggaaattctaaggatttaggggttctgtgtcaggaaccagggtcaaaaaccaaatattagaataaaaaatgctcctagtaacttcctgcttaggaaattacaagagttttagaagctctgtgtcaaaaactggggacagatgccaatatctattttttttttattgtttcatagccctcaaa

SEQ ID NO: 634627 - DNA, 547 bp, Homo sapiens
taccagtttattacaagggctacaattcagaaatagccaaatggaagagatgcatagagcaaggaatggggcagggggtgcaaagcttccaggccctctccatgctcaccaccttgccagcacctccatctgttcaccaacatggaggctctccaatcctgaacttcagggattttaatggaggctctatcacataagcatgattgattaactcaatcttcatcttctctcttcttcctggtggatgagggctgggactgaagatttcaaaattctaatcatgccttggttttgctgatgactagcccccattcagtagcccaccaagggttgcctcattagaccaaagatgctcctattaccaaggaaattctaaggatttaggggttctgtgtcaggaaccagggtcaaaaaccaaatattagaataaaaaatgctcctagtaacttcctgcttaggaaattacaagagttttagaagctctgtgtcaaaaactggggacagatgccratatctattttttttttattgtttcatagccctcaaa

SEQ ID NO: 634628 - DNA, 635 bp, Homo sapiens
agtaacaacctttatcattgttgttaatattgatatatttcagtgtccttctaattttgggtttttcttctaccagctctacccaattcaaactattcttttccatgtccaagattcaataagctctttatgaaactctaaatacgtcattcaaaarcatttgatggcacctagagaatatattttaagctctccagcaggatatttaaggtcctccgtggtcttcttcctaaaattttcttacctccaacacactcctccatatacccagtgttccaatgttgtttgctttctctggcatatttctgagaaagaaggctgttagctgcagtgtacaaaactgccatttattgtgaaatatctgattgtgtcaaactatttaattaaaaaagacgtccttttgaatgataacccaaggaaaagaaattaatccttctccgtctgttcatctagtcatgcagattgctttatttgctttagaataatgttttgttatatgctttagaataatatgtgttttttagaatcagtgacattaaataagttcagttatatatttttgtaaatcatgttaatgcaactgtctggccaaagaaagtggacacaaaaatgaataaatacataaaaataaacag

SEQ ID NO: 634629 - DNA, 571 bp, Homo sapiens
gctggacccctgacagtcagggcaggcattccatagagtgacctctgataactgacaacatccatggggtagarccatttctttatatgtgagggtcatgaggtaccatatattccagggatcaaggatcaacatcaactttcattatcactgaaaactcaccaaccttccttggattcatttgtactttcctataacacctttcctaagtggcttctaatctaatttggataaaacaccattggtgtttttaatacttatttggttgtctggatgtgttttgtttgtgtatgtctgaagtaactaatccaaaaggaagagtctttctcttgttgctctcatttggttttcattttcttgatagtgttcctttgcataaagaatgatcaccttaccgaaaaatgtcatcttaatctcacaagtggtaggaattctgtaaaaatactcaataatagatcatacctaatggatggtacctaatgttctttcatagacagtgtatttgctgtttataaacagtaaaaaagaaagaacaatattaacaaagatgaaaaatagccctctcacaaat

SEQ ID NO: 634630 - DNA, 582 bp, Homo sapiens
aaaaaaacaacttaccacagctagcacagtaagaaacagaactagaaatattcctttgctgacaaaggtaatttgaacttgaaattaaaaccattctcacaaaagcataggtggcttcattggtgagttcttacaaaaattttaggaagaaatagtgtcaatcttacacaaactcttacagagaatagaaaaagagggaacagtttctgatttgctacaattaatgtagttcaaggtaaatcaatggagttcacctcattaagtgataaaggagagaaatcatttggtcaatcaattgttgcagaaaaaaatagtaaaattcaactcccattaattcttagttaactggtgtatggtttggctctgtgtccccagccaaatctcatgtcaaattgtaattcccagtgttgaaggagggacctggtggatggtgattggatygttggggcagatttccccttgctgttctcttgatagtgagtgagatctcatgggatctggttgtttgaaagtgtgtagcacttcctccttctccaggaagaaggtacttgcttcctcttcgcccttccaccatgactgtaa

SEQ ID NO: 634631 - DNA, 543 bp, Homo sapiens
cttttaagaatgcaattattaggcaacgtcttcaaaagccatgaaaatgttcatatgctttgatgcacaaattgcttctagaagttcatcttaggaaatatcctgctttacttgtagtttggtaaagtttggtttattgcatccaggccacttggacaaatgaattttgtggtatatgtcacaaactrtgctgtagaactgcattttatactgtcttagagacctctctttgttcacagaagtttagagaataagtatttgtggaatggagaagaaagaagttcaattagggtaaaatcacatcttatcaatgttctatagcaatgtcagttaccatttaatgagtatcgataatgatagtgaaataaacgatatgtacttaaagggcaaaacaagataaattttaaagctcgtatttcaatatcttcatgacattgagaaagtttaaggaccagattttgaagctctagatatcagaaactggtatctgggtgtattggggcaattcacaggatgtgtggaggagtgggtatgtacctgccc

SEQ ID NO: 634632 - DNA, 503 bp, Homo sapiens
tttgttctatttcaagatcgtttgattattctaggtctcttgtatatctatataaatttcagaatcagcctttcaattttaaaacaaaacccagctggatttatttctaaattagtttttctgttttatttaacgaaatttasattttaattacaactgtgcactaaatcttagaatgaacaaagaataaagtgggcttagattttggtgcaatttttttgcagggcaggggacaaagttatacaatggtataaggtgtataaattctcaggacaacccataaagaccattttggaaaacatattcgaggggttcatgaaagaggcattttagaagtctttgatacttaagtcattctttttgcaacacatttatttacctttaattcttttaaagtttttttgaatttttgactaatctcattctgctagattctcacttgacaaatgcttttcgtgtaaaattgtctctttcctgccttggtcaattttgccaaaggtttg

SEQ ID NO: 634633 - DNA, 590 bp, Homo sapiens
tttcttctttctttggatttattattttcaccattcttcaaatgactgcttagctcattaatttcaattttttttctttttaaaatagatgtatgacacctgtatctttaccactatggaaaatgggcttattgttgtyccgttttcctttttcaacttttattttagattcagggggtacatgcgcaggtttgttacctgggtatactgcacgatgctcaggtttgaggtatgaatgatcccatcacccaggtactgagcatagtacccaatagttaatttttcagcccttttcccacttccagtagtccccagtttctattgctgtcatctttatatccatgagtacccaatatttagctccaacttataagtgagaaaatgtggtatttggttttctattcccatgttaattcatttaggataatcgccttcagctgtatccatgttgctacaaaggtcatgatttgattctacggctgcacagtattccatgatatacatgtaccaatccaccatttcttcatccaatccaccggtgatcaacggtggattgatccatgtctctgatactgtgaatagtgctgtga

SEQ ID NO: 634634 - DNA, 588 bp, Homo sapiens
ggcttcaattttgttactcattattggtttgttgaakttttctatttcttcatggttcaatcttgatggggtgaatgtgtccaggaatgtatccatttcttctatgctttccaatttgttggcatatagttattcacaatagtctccaatgattctttgtatttctgtggcctagttgttatgtttccttttttgtttctaattttatctatttgggtcttctttcattttctcttagtctagctaaaggtttgtcaattttgtttatcttttcaaaaaaaccaacttttcattttgttgatttctgtatttttttaagtctcaattttatttatttttgctctgatctttattatttcttttcttctactaattttgggtttggtttgttcttgcttttctaattccttgaggtgtattttaggttatttatttgaagtccctttctacatttttgatatagccatttattgctataaacttccctcttactactgcttctgccacatcccatagattttggtatgtagtatttccattttcatttgtttcaagaaatttttaaatttccttttaaatttcttcatt

SEQ ID NO: 634635 - DNA, 588 bp, Homo sapiens
ggcttcaattttgttactcattattggtttgttgaatttttctatttcttcatggttcaatcttgatggggtgaatgtgtccaggaatgtatmcatttcttctatgctttccaatttgttggcatatagttattcacaatagtctccaatgattctttgtatttctgtggcctagttgttatgtttccttttttgtttctaattttatctatttgggtcttctttcattttctcttagtctagctaaaggtttgtcaattttgtttatcttttcaaaaaaaccaacttttcattttgttgatttctgtatttttttaagtctcaattttatttatttttgctctgatctttattatttcttttcttctactaattttgggtttggtttgttcttgcttttctaattccttgaggtgtattttaggttatttatttgaagtccctttctacatttttgatatagccatttattgctataaacttccctcttactactgcttctgccacatcccatagattttggtatgtagtatttccattttcatttgtttcaagaaatttttaaatttccttttaaatttcttcatt

SEQ ID NO: 634636 - DNA, 588 bp, Homo sapiens
ggcttcaattttgttactcattattggtttgttgaatttttctatttcttcatggttcaatcttgatggggtgaatgtgtccaggaatgtatccatttcttctatgctttccaatttgttggcatatagttattcacaatagtctccaatgattctttgtatttctgtggcctagttgttatgtttccttttttgtttctaattttatctatttgggtcttctttcattttctcttagtctagctaaaggtttgtcaattttgtttatcttttcaaaaaaaccaacttttcattttgttgatttctgtatttttttaagtctcaattttatttatttttgctctgatctttattatttcttttcttctactaattttgggtttggtttgttcttgcttttctaattccttgaggtgtattttaggttatttatttgaagtccctttctacatttttgatatagccatttattgctataaacttccctsttactactgcttctgccacatcccatagattttggtatgtagtatttccattttcatttgtttcaagaaatttttaaatttccttttaaatttcttcatt

SEQ ID NO: 634637 - DNA, 383 bp, Homo sapiens
ggtatctcgttgttttgatttgcattttcctaatgattagtgactttgagcatcttttcatgtgcttgttggtcattagtataacttctttggagaaatgtctattcaagtcctttatctattgtttaattgggttgttgtaattgtcgttttgttgttgttgttcagttgtaggaattctttatatgttctgaataccaatcccttatcaaatagataatttgtacatattttccctgattccattggttgcctttccactctgttgtttgtgtcctttcatgcacagaaatttttatttttgatgtagtctaatttgtctatttttttctttygttgcctgtgcttttgatgttatagctaagaaaccattgccaaatcca

SEQ ID NO: 634638 - DNA, 526 bp, Homo sapiens
tccaccagactcatggtactttaccgctctgtgcctcagtttcctcatctgaaaagtagagctcatattagccctggggccttgtaggtggtgaacatcaaatgaactcatacaagggaaggggtcgtgttaccggtagagggtcctaactgcaagttgtccaggttggcgttttgaacaaagaattggacaaaacgtgctgcaaagcaaggaaaaaaggaagcaactaaagcagggatttattgaaaacgaaagtastctccacagtgtgggagcggcctgagcaggctcaagggctgcgttatacaatcttctcggtccaaatacccgctagaggtttcccattggccactcatgtgctcccttcatgtaaataaagtggtggcccataatcggtctgattggttgcggaaagcagccaaccagaggctgaagtgaagttacaaaggtcacactcctgcgcaaacatctgattggttgcaaaaagctaacgttaagaggctaaagtgaaagttacaaagttgga

SEQ ID NO: 634639 - DNA, 610 bp, Homo sapiens
cccttcagcatggcagtctactttgtgtatcaaataaaaagaaatggaatgacagctgaggcccacagtgtccatctgtggacccacaactcaagtgagcaacattctgttgtcatctcctccatgactgggagcagaaaaatgttgctgaaaccagcccaaaatgttaaagtagaaaagaaagcaagagcaacagaaatgggaccagaacaccaaagaaacctaaaaatggctamtgtgaggaaaaagattaaggaaaaggaagcctagaatgttgaaaatgccatgaaggggagggtccaggtctgtgattcagtgtggtacctccagcatcataccacacatggcataaagcaggtgcttactaaatagtgaatgaatgaacttttcttctcttacctttttcagagacaggccacagacaaacttagatggttccaagtcaactgtacaaatgaaatgcatttaaaatggctcaaataactggcccttcaaaccactggcccatatccaaatgtgaagagatcagcaattctcaagtgacagaaacaagtagccagttgccatttttcaataagtaaataaacctgggtaggaatgtggacttaca

SEQ ID NO: 634640 - DNA, 610 bp, Homo sapiens
cccttcagcatggcagtctactttgtgtatcaaataaaaagaaatggaatgacagctgaggcccacagtgtccatctgtggacccacaactcaagtgagcaacattctgttgtcatctcctccatgactgggagcagaaaaatgttgctgaaaccagcccaaaatgttaaagtagaaaagaaagcaagagcaacagaaatgggaccagaacaccaaagaaacctaaaaatggctactgtgaggaaaaagattaaggaaaaggaagcctagaatgttgaaaatgccatgaaggggagggtccaggtctgtgattcagtgtggtacctccagcatcataccacacatggcataaagcaggtgcttactaaatagtgaatgaatgaacttttcttctcttacctttttcagagacaggccacagacaaacttagatggttccaagtcaactgtacaaatgaaatgcattwaaaatggctcaaataactggcccttcaaaccactggcccatatccaaatgtgaagagatcagcaattctcaagtgacagaaacaagtagccagttgccatttttcaataagtaaataaacctgggtaggaatgtggacttaca

SEQ ID NO: 634641 - DNA, 645 bp, Homo sapiens
ctagaaaggtcttagattgaacatggttgctaatacattatgaaatctcggcacttctttccttgaaatctcttagtccagagcactcactgctactattctggttttgattctcatcactttgtaatggtattactgcttcagattttaagcccgtttccatctctgcccttccattatcacattattcaccttaaaatacaacctaaaacaaatccatctcactcaagaacctaagtgttccataaacacttgtagaataaatgaataaataaacatataatagctctttaatctctaaccaccaagcccagactcctctgcctcggcttttatttaagtccctccatgatctgctccacttagcttatgcaaacatttccccaccatctgtgcaaccagtactcactctttctcctttgcctttgctcatgctcttttctcagtctgtgcaaaaatatcgacccttttaatgacattctgagttctgtgcatggccgtcttcctctcattcygcttctttcctcactctcttagccctcctgggggaactcctctatcatcctggctccaaggaccacctatgtaagttgacaatacatcaacctttctctctagcaggatctctcctaaattccacatcag

SEQ ID NO: 634642 - DNA, 539 bp, Homo sapiens
aaagatgcctgcactcatatgttcatcacagcactactcacaatagcaaagatatggaatcaacataagggcccatcgatgatggactgtataaagaaaatgtggtacatatataccacagaatactacacagccataaamgagaacaaatcatgtcttttgcagcaacaaggatacagcaagaggctattatcctaagtgaattaatgcaggtacagaaaaccaaatgctgtatgttctcacttacaagtgggagctaaacattggatactcatggacatcaagatggcagcaatcgacactggggactactagttgtggggggagggaaggaggcaagggttgaaaaactattgggtactaggctcacttacatgggtgacaggatcatttgtatcacaaacgtcagcatcatgcaatgtactcatataacaaacctgcacatgtatcccctgaatctaaaataaaaattgaaatgattaaaaaaagaatagatttggaaacaagggtgtatctttaaataatgctaaatgaaaaac

SEQ ID NO: 634643 - DNA, 434 bp, Homo sapiens
gaattcaaggaaatgtgaaatttgggctaagtctgagtaaaaatacaagaagtcccagggtatgagcagaaacctagaacagaggcagagtagtagagaggatcctttctttctgtgaacaataagttgggagaacacctgagcgaggtcaggagataagctggtaatgggatcatccacagtttggaaatgggtgctggatacacctgctgtgtatcagattctcctccagcagcaactgctgacttctccttttcaatcctcctaaaacaaagtcacgccctgacactgggtgacagtcaggaggggacaaagcsaatagagagaagacagatgctccaaaaatggtcaacattcgcaacatgctaaggcaaaaaatttaaataaaataaaacaacactcctctcgaagaagttggcaagggttaaataaga

SEQ ID NO: 634644 - DNA, 574 bp, Homo sapiens
atcagtgtatatttcctgagaataggggttttctcttatgtaaacacagtatattcaggaatattagcagtgataacgatacttttatttatagtcctgattccaatttggtcagatgtcccaaaagtgtactttattgcatttacttttcacttctctttatttcatgttaatctggaacaattacttatttcattttaatctggaacaatcattcagcctttctttgtcatttctggcatggaarttttgttaagaatacacaccaggtattttatagaatatttctgtttgggtttgtctgatatttcctcatgatgggattttcataatagttttggctagaatggtacataagcgaggtcatgaacttctcaggaagtcacattcagaggtagaggatgtcagtatgcctctttggtgatactaaatttgataacctggtcaaggtactgtccaaggtatattctccactacatagttacttttttcctcttgcagtgaataagcattctggaaaaagacactaagaccatgcatataacctccttaatcacctccttaatcaaactcc

SEQ ID NO: 634645 - DNA, 486 bp, Homo sapiens
ggttgagaggaagctcaccagacagctgtstgctgctgctccatgcttctgcctcagcagcatcacacattacagcagctcatgagccctagacattacctgcatattgttctaaccaggaatatgagttatgtgaaagccaggaatccattatatcattttgttctatttgccaaaaaaaaaaatttaatactaatttttaaaagttagctctcccaggcttctaagactcggttctagaatgtaaatgtgtggttcgtacaacaactgatgggcaaggtaacttcaatgtttaacttactgttaaaaacaaccatttatagcaaagtgagttttcactttgagatcaaacagcaagtaagcattcattcagtttgattttggacatctgggaataaactctgaatgtaaacaaaaagaatgcagtttattttcatttttaagctgattttaaaatctatatatcttccagtttaatggaacctc

SEQ ID NO: 634646 - DNA, 486 bp, Homo sapiens
ggttgagaggaagctcaccagacagctgtgtgctgctgctccatgcttctgcctcagcagcatcacacattacagcagctcatgagccctagacattacctgcatattgttctaaccaggaatatgagttatgtgaaagccaggaatccattatatcattttgttctatttgcmaaaaaaaaaaatttaatactaatttttaaaagttagctctcccaggcttctaagactcggttctagaatgtaaatgtgtggttcgtacaacaactgatgggcaaggtaacttcaatgtttaacttactgttaaaaacaaccatttatagcaaagtgagttttcactttgagatcaaacagcaagtaagcattcattcagtttgattttggacatctgggaataaactctgaatgtaaacaaaaagaatgcagtttattttcatttttaagctgattttaaaatctatatatcttccagtttaatggaacctc

SEQ ID NO: 634647 - DNA, 486 bp, Homo sapiens
ggttgagaggaagctcaccagacagctgtgtgctgctgctccatgcttctgcctcagcagcatcacacattacagcagctcatgagccctagacattacctgcatattgttctaaccaggaatatgagttatgtgaaagccaggaatccattatatcattttgttctatttgccaaaaaaaaaaatttaatactaatttttaaaagttagctctcccaggcttctaagactcggttctagaatgtaaatgtgtggttcgtacaacaactgatgggcaaggtaacttcaatgtttaacttactgttaaaaacaaccatttatagcaaagtgagttttcactttgagatcaaacagcaagtaagcattcattcagtttgattttggacatctgggaataaactctsaatgtaaacaaaaagaatgcagtttattttcatttttaagctgattttaaaatctatatatcttccagtttaatggaacctc

SEQ ID NO: 634648 - DNA, 486 bp, Homo sapiens
ggttgagaggaagctcaccagacagctgtgtgctgctgctccatgcttctgcctcagcagcatcacacattacagcagctcatgagccctagacattacctgcatattgttctaaccaggaatatgagttatgtgaaagccaggaatccattatatcattttgttctatttgccaaaaaaaaaaatttaatactaatttttaaaagttagctctcccaggcttctaagactcggttctagaatgtaaatgtgtggttcgtacaacaactgatgggcaaggtaacttcaatgtttaacttactgttaaaaacaaccatttatagcaaagtgagttttcactttgagatcaaacagcaagtaagcattcattcagtttgattttggacatctgggaataaactctgaatgtaaacaaaaagaatgcagtttattttcatttttaagctgattttaaaatctatmtatcttccagtttaatggaacctc

SEQ ID NO: 634649 - DNA, 453 bp, Homo sapiens
ttctgtttatcgtgtgttttagggcaattcaagctgctggaacaagaccgagatataaaggagccagtgcaatatttcaacagtgtggaggaggtggctaaggcatttcctgaacgcgtgtacgtcatggaggatatcacattcaacgtgaaggtagtagctcttgaagcaccaaatatttatactcactaaagataatttaactttcaagtctggatgtacacagtaagtgttcatctgtgtctcctaggagggttttatcttctratagttagtggcagtagccaaaaccacatatattgtagctgacctgactccctgactgcttctgtatttattagcattatcttttgttagaatttaaaactgatatctgagttcaaaactgtagctgttgaggcatataagtgatattttttaaaatttggacttcattttctaatatgtaacagt

SEQ ID NO: 634650 - DNA, 479 bp, Homo sapiens
tgcagtgagccaagatcacgccactgcactccagtctgggcaacagaccaagactccatctcaaaaatgaaaaaaaaaaaaaaaaatacarggcactcacttttcctagctttttttagtttttcttttctcattcaaaatgatttttttaaaaagtattcaacttactgaatatataattctctgtaaattataatgtgattcactctgtaaattttgaaacatttgcctctattaggtttctttctcttcctgtgttaacaaccacatgcattctgctagatttgcctcaaagcagagggaacatcagtattgaagacctctaattctcatagaccatttcacagcaatctttttaccagttccttctttaagctttaagagagctcagatctaaaaacaatacacagtatagtgccgtgtctgagatttagagaagacacgcaaaggttaacaaaaatacaaagaaaattcaactc

SEQ ID NO: 634651 - DNA, 632 bp, Homo sapiens
agatagctaacccagcaccgtatctaagttatagacacttgaggcagttatataaaaggatatagaaatcagatcctttaaaacaaatcccctcacagagtagatgttctaattgtagttactggaaaaatatgttaaaaatgtaatcacttaaaaaattaaaaagggaaatgttgtacttctctctttctccttctcctgtctgtgtatactttcctaggctcctaggagatctgttcagatacatacacacatgtgggtggaactgtagcagaaagaggacctcaagctgtctttctggaaactgctatggccatcagctcctgggcagaagggcttactgaattttgaaacctggaaattagctttaactcttagggagatcaaaagcagttaaaagcagagatgagaaaaggccttaggtgagaggaccaatccttttattggcaggtcaagtaagttccctaggacagtaggctgctgagtctgaggaatggctttgtagtctcagtcaaattgcaaatctgatttttacctccattctcacacttactggtctaatttcctttccattcgttttggtggtagagcattgatttgaytgggctctgcttggtcatttaccaccttaa

SEQ ID NO: 634652 - DNA, 566 bp, Homo sapiens
acattaggcattctcaacctacttcatgctttacgagagctgagaaatcagacgcaccggcctttattattatatatgctacatctgttgagtatttttaaaataccaataagaggacttgtttatttcataaaccacttcttccctctctttcaaagaaaatacattattaccatacttttacattagtctgagaatttttgctaaatatgattaagtattccaaaatataatggcgtcattattcttgacttttttagagaatatacatcttaagactgtattagttctcagagcaaggcatcatctactcccctgcaccygagagtctggccccagattccagatgtgcggacagcccatgaccgaggtgcacacagtgccctcttgaataggaaggtcagccagtgaggcggcagcataacttgcaggatggacttatatcttaccatctcttcctgctaccaaaataaaaaaataaattgaaagacaagacccaccagtctagttttgtagacctgtgaaatgtgtctttatttcttggcattagaagaaagatattttta

SEQ ID NO: 634653 - DNA, 621 bp, Homo sapiens
agaagtccagggatgggaggtggggtgtggaaggatggagggtccttcattttctaaacactttgtataagtcactactcatcgtgcctagcaagtataagattaacattttgaataacaaactggaaaacaaataatccttcaaagaacctagcgaactgttcaaaggaaattttaatttcagtctaccagaaaagttaaatctgttgttggacgtagggggctttcagaaacatgcctcttatatcaatttccactatctttcaagttacctaaaggcaccaggctgcttgagcaagaagaataaaaggcctagagtgcaaattatgtgaagtagagtttttagattgtgggattgtaataataygggattctcatggttacatcatgttaaatcacactgttcagtctttaaaacttggtgttttaaaatttgtctcattgtgatagccagaaacaaggaataaacgtgatttcagtttaaactatatacaaatatcttctgtaattttgctgctctaatttttaggctataaattttgtaatagagcttatcagatcgcaaatttcctttgtttacaatctcatgtagtagggctcagataatttcttagctataaa

SEQ ID NO: 634654 - DNA, 585 bp, Homo sapiens
ctcacagaacaaccatcagtatctcatagaacaactattccccagaatagtttgggaactgatgcattaagagttgtaaaagtatcactgacagaaacagccacatgtgataagcatgagacaatgaatttccccatgctasagactatattcctctttaacaaatgaatataagtttctaagatctgaaaatgggacaattttgagaatattgtgagaaccaagtattcagaataaatagtgacaaaatattaaagatgatgtaataaactttaacctacaagcttgaacaacctcaagttcaaagccactgaaggaaacaattctttgcaaccactgtcaaaaaagtcctaatatatataataattttttaaatattgtgattataatgctgtaatcaagactctatctagtcatatgaggactcaataaaaaatgttatacaggcatatcacaaagacattgcaaattcagttccaaactacgacaataaagtgaatgttgcaaaaaagtaagtcacataaacgttttggtttcccagtacatataaaagctatcactatactgtagtctattaactgtaca

SEQ ID NO: 634655 - DNA, 585 bp, Homo sapiens
ctcacagaacaaccatcagtatctcatagaacaactattccccagaatagtttgggaactgatgcattaagagttgtaaaagtatcactgacagaaacagccacatgtgataagcatgagacaatgaatttccccatgctagagactatattcctctttaacaaatgaatataagtttctaagatctgaaaatgggacaattttgagaatattgtgagaaccaagtattcagaataaatagtgamaaaatattaaagatgatgtaataaactttaacctacaagcttgaacaacctcaagttcaaagccactgaaggaaacaattctttgcaaccactgtcaaaaaagtcctaatatatataataattttttaaatattgtgattataatgctgtaatcaagactctatctagtcatatgaggactcaataaaaaatgttatacaggcatatcacaaagacattgcaaattcagttccaaactacgacaataaagtgaatgttgcaaaaaagtaagtcacataaacgttttggtttcccagtacatataaaagctatcactatactgtagtctattaactgtaca

SEQ ID NO: 634656 - DNA, 552 bp, Homo sapiens
attcaatattagttaaaacaataattattttccaatgatattattctacagtttaaaattctgacaccttttctaagaatcaatccattttcaaattccaaaaacaggaattgctcagaagagatgtagcctgtggcaaaatcagtaaaaacaactgaaataaagacatctaaaggcaaaaataaagcctttgacagatcacactttcaccagcttctccacaattagagaagggtttggtgttcacagtgtatctacttcatgacaaacaaacttgtggaggacctttggccacatcttgggacattctgctgggcctcgatgagaagygatgttttcaaaattggaacaagttgtagcaaatatgagaatgtgtatgttttaaaagacaacgttttataattgtattttctttaatgttccctctgtgtgtagcagagggggaaggggggaaaaaacttccaatgtacccaaccatgaatactaatgttttatttagtgaaactcaagctcatgttcttgtatagataaaataaggttatgttataatgt

SEQ ID NO: 634657 - DNA, 455 bp, Homo sapiens
tatagaggtaacagtgtcctgtgctcatacagggccaggaacagtgcttgttctcactagtcagattggaaaatcatacgccttagtsgtggggaagacttcactataaactgagcacaaatctggttctgcctaagatatcataagattccaaagtatcaaaccgtttccaaaaattcaactgcatcaaattcactcatgtgccagctcagaagctctcttttctgttcttcaaatttgtatttccagggagcttagtgcatgttcactacttctaatgttgtttctcttgctagactataagctcaatgaaggcaggactcatgacaatctcatgcaacacagtatttccaatgtctagaaccttgcatagcccaccataaaatttcaattgatatttgtaaaataagtatattcttttgaatcaattcaactttattaatagatactgttca

SEQ ID NO: 634658 - DNA, 496 bp, Homo sapiens
cagagctgttccaaaaaggctttattaaaaaatactcatttagaaataattgataacattaaaaataatttattaaattatttaaaataacagttaacattattttaaaatgggtattaaaaaagattaaaaagtaatagttgataacattgaaggtattaacaaataattttaaaataattgataatattagtgaaatgcagtgtaacaagtgccgcaaagcattttacaggtattatcacatttattcttaaaaaaaaactataaaggaagcaccattattatatctatgtaatamataaggaatctgaggcttagagagcttaaagttaagaacactcagctaagatttggggtataaagatttatcagaaacaaaagcccatcctcttacctgctagaagatgcaatggctgctgcacagattttgctaactcctggggattccaagaaaaatcagagggtctcagaccttgaaaaaaatataggttagtgg

SEQ ID NO: 634659 - DNA, 500 bp, Homo sapiens
tatgctgcctgaacctcataatcaaccacatctaatcagtcaacaagaaccttacaagtctcctaaaatccatcaactccttcaaatttgagcctttgtaaatctctgacttttgcaaaatctaacttctggcacatgtgttaccaagataaatgcataaatatttagcattgctggggtgaaaaacacataaatagaccaactatttgtccactgccatctcttctcaaatgtgccctcaatgattctcagcaactacttttttctgcaggatgaatctctgaaaatacaccaagccacttttcacggcctttttactctcctgaaatccctgatcctctagtctcttagcagacactwacatacactaccatccaggggaaaactcccactttctactgcatttttcaaatttacttattttttactctttctttcctgcttccctatgatctcagaaatcaatacttttttcttcgtttttctaaataagctttgtc

SEQ ID NO: 634660 - DNA, 615 bp, Homo sapiens
catttctcagtctatattcactcaatcactcattcggaaaacctttactgagcacctactatgtgctaggcaaaatgaggaggagaaacaaaggactgtcctgaggccattattccaatgaggaaaacaaatacatgaataagttaatcagagactatagtgagtgccaggaaggaaataaacagaaaaataagacaagaaacaactaaagaaggtgttttagatgggaggggaggcaagaaaagcttttgtgaggaggactttgagccctggtggatgagaaggagctggtcttgccaaaagcatccctgtcaggaaagcatccctgcagagmtagtaggaagcacagaagctgagacacagaaaaggcttgggtttgaggaacagaaaggagggtatggctaactcccagcaaggtggagagtctgggactcctcctcctctgttctatgcttcagtccctcatcacggctcttttttaaaaaaacataattatacgtatgtcctgctccagtgcaaaatcctggcatgctctacatagcttactgacatttgaagcctttttaaaaaatgctgttctaagctacctttgtggcctcaatttactcacattat

SEQ ID NO: 634661 - DNA, 615 bp, Homo sapiens
catttctcagtctatattcactcaatcactcattcggaaaacctttactgagcacctactatgtgctaggcaaaatgaggaggagaaacaaaggactgtcctgaggccattattccaatgaggaaaacaaatacatgaataagttaatcagagactatagtgagtgccaggaaggaaataaacagaaaaataagacaagaaacaactaaagaaggtgttttagatgggaggggaggcaagaaaagcttttgtgaggaggactttgagccctggtggatgagaaggagctggtcttgccaaaagcatccctgtcaggaaagcatccctgcagagatagtaggaagcacagaagctgagacacagaaaaggcttgggtttgaggaacagaaaggagggtatggctaactcccagcaaggtggagagtctgggactcctcctcctctgttctatgcttcagtccctcatcacggctcttttttaaaaaaacataattatacgtatgtcctgctccagtgcaaaatcctggcatgctctacatagcttactgacatttgaagcctttttaaaaaatgctgttytaagctacctttgtggcctcaatttactcacattat

SEQ ID NO: 634662 - DNA, 613 bp, Homo sapiens
ccacagagaacagtgaagtaaactagaattaacaatgggagttagtgtgtgacctgaagtgtgaagggacgcagggcttatcagaccacgggcagagaggggactgtatggagaggacatcctgataggagctggccaatgaatgaagcctgtgctgtcattgcagggaggatatgatgctcaatctcacttttctttctccattcaatccattgctgtgactacccaacagctgaacctaatcagaatccagacagccttctcttccctcttctgaacatctaggtatgaggcttaaagcattgtaagcgtgtagagaaggggagaggggtacagccatgatcatgacagtccaggagggaatcacagagccaagtggggtgaggtagcacagagaggtggcctggagaggagttttagagtccaaccatggtgaggagggcacctgcactgaggagtagcctgatgtgcagtgttagaagtctaacaggaagaggaaaatgcaaggtgggtggcctgtcatcaagagtcacagcctgtgtgtgatgaggagaccatccacatggcaraggtatggtggccaagatggaagactggctacctacaaggcaat

SEQ ID NO: 634663 - DNA, 503 bp, Homo sapiens
aaaataaataaataaataaataataatggagacatgtcagagggcacagcagccagctttagtgggctcttgtggaccaaatgtgggacaatttaagcataatagcctagtgaaaagaaggaaataatgaaggcatacatatagatgcacacacacgtgtgtctgtgtgtgtttgtacatgaattaatacattgaaaatctgaagaggaacaggatatttacacagtttaaaagaacttcctcacaaaatactatttaattacaaaagggaaaggagcaagtttacactggaaaagcttgacaaatacactttaatacaatgatcaagttaacagcatcagtactgagtcaaatcaaagttgtgtgccacctaacaggatgcaagaagaacgcaacaycatttactgtatttctcccaaaggtacataatctgaatctgagtaggagatattatgaaaactcaaattggtttataacattcaaaagtgtcaaggtcatgaaca

SEQ ID NO: 634664 - DNA, 485 bp, Homo sapiens
ttcagattttgtaaaatatgtgaagatgtaattgaaattttaggtatttcacataattgtaggaccttccactggctcaaataaatctatgtaatcaaatycacatttccatgccatctccactcattatggccatgaaacagtggtgttcatcttcatttggacatttgcaataagctagactaaaacagcagcagttttgcttgtttgttgcaccaagtcacccgtccctttctgctagaaaagagggttgagcccaccttgagcagaaagagagcatactagctctaaatttcttgctataaaatgctgacaggcccacaaagcttctctttcttaagttactctagaaaaaatctctagttgccttctagacctttaacaatcccatttcatagctgtcatttattcctattcatcctgggtagaaaatatgtctggaattcattccttccatttccaactccaataccaaggtcaaacat

SEQ ID NO: 634665 - DNA, 595 bp, Homo sapiens
tctcaaggcccaattcaagaattttaaatttgactctgatatttcccttctgcatataaaagtacaatatactttgtacttttcccctcaagcttacctgtttctaactcatattttkgttatttacaaatacagtttatgtatccaactacagtgcatttaatcactcattcaataagcattcactgtcttgctattactccaaagcacccagaatatatcatattcagggtaaatattaagtaaatgttattgaaagagaaaaaactcctattgaaatgaaaatgtacccaaaatcaaaataatctctttctaaatatgaacaataatcaccaccaaagagatacatataaattgtagcaaactgttgcttatcatatttaaatatgtatgaaagaagatgggtaagtcaatagaaaacagaagcaaataaaaagctaagaaaacttattcaaagtaatatggaaatattgaatgaattttgtccacttcaattcatggatgtacctatcatctcaagacacaaattcataaatatacatgcattaagtccatcaattgaaaatgatgcacagtttcagaattcactgaaata

SEQ ID NO: 634666 - DNA, 547 bp, Homo sapiens
atttaaatataaataaatcctatttaaagtctttttattagaagtatgtcccaagatttagcaaaatgtctgtcatatagtagcaactgacaaaactttactaaaaaaaaatcagataaaatcttgaattttataaacaaatacactctgcaaataagaattatctcaagttgccaagaaagtaagtggcagaacaggtaataaagttcacgtcaataaatttgcagtttctgccaaacattttacaaaatattrtaacgatccaggttattatcatgatcctattcacagctaaaacaactcagagaaatgaagccatcaggatctaggtgcagcaacaagccagtggcagttgagaattctaatgttcaaaccaggatatgtttatttttgtctttctaattctcatgctcttttctccctgaatgctgttgggggttcctgatgaaaagttatcaggaaagaagtatgttgaagaaaacctggtgctgatttgaaagacccgtggcctgtgtctccaacatttctcagcaattttacatttttt

SEQ ID NO: 634667 - DNA, 557 bp, Homo sapiens
gttgaagaaaacctggtgctgatttgaaagacccgtggcctgtgtctccaacatttctcagcaattttacattttttcagacaggcactactaaatattttaagaagcatagacaaaaagcaaggaagagcaattttactgcagcagaccccactgacaatgtactctccagttcagtgaaccctttataaagactgcatttttttcttccaagacagcatattccaataaagtgaaacctagttgcacagacaaaacacygcacattagatagtatcatgacccggcagataattattttacatgtatcattttaagtctcatttttaccctctgcttcatccaatattatcattcacaaatttagtaataggcttaagaccattcagttgtaactagaatgtttccttatttagcattctttttggttttgataaatggagggaaattttaatttccttgtttaatcattaaaaaatgttctgaaaattttagataatttatttgagaaaacacaaatttctaaaatgtgaaatggcatagtctattaaacactc

SEQ ID NO: 634668 - DNA, 588 bp, Homo sapiens
tttcatttctttatctgaactgtctgcttcaccatttttagattcagatcctaaaaaaggaaatagttattatgtcattatcttctctagctgtccttgaaaagaaaaatctaaaattgtttgaggaactgtagatataatctccttttctagagttaatacactacctttggccacaatctgattcccctactggatataaaaagagaagcccaataaatcaatcaaacagaacaaaaagcaagaacagatggcctaatagtggagtcaaaactacgttcattgatctgatagcttttaaaagaaatagagtcaggtcttttgtaaaatacacgaataagcttgaacaatactatgccattctgagacaacacaagacagacacggaaagatgaaaaagaaaggaatcttgaagagagggagagattatacctttataaatagctttatgttgaagtatgaacagaaaatacaaacgttaatcyacaataaatagaatagtacatagccgataaagtgacacaaggtaaattagaagacaaggtcagggctgcactggggtgagaagaatgctgccagaacacaaaa

SEQ ID NO: 634669 - DNA, 504 bp, Homo sapiens
caatctcttagccttggggaatttttcctcctggaaccatttggcaatttctagagaatacttttgattgttagggactggaggcaggggatgctagttatgtctagtaggtagaggccaggtatgctggtaaatatcctataaggacaggtarccatccccaagtccatcccccaccacagaggattatccagtacaaaatcagaagatgggagagggtgttatatagtacttatggactggaagactcaatattatatacatgtcagagtgtacaaagaaactctccagagtgaaagatatgtccattattttgattttgataatggttccattgagtgtgtttatatgtcaaagtttatcaacatgtacacattcaatatgcatgctattttacatcaatagagctgttaatttttttattcccagaaacaatttatgaaaactgagacgatagaaaagttctacaactattaaagaaattgagtcggtaattaaaagttt

SEQ ID NO: 634670 - DNA, 601 bp, Homo sapiens
aatggactatcttgtagaacaactttaaattctgtcatttcaaatccagaaagaagcaatatcagaatcaaaataaacaagcagatggtgactgtaaatgcagtctactatgaaggaatgtaccttcaagccggtcatatgtataatgttccactgtccaaaccacacagagtacaatttcaatatcgatggtgttatgagaaggagtataattggatttcaactttaatgcttccaggtattattcaatatgaaagaaatttacaagcttaaccctagaaataaatgcacttttcaaaggaaacacacacaacatagctaaygcagtctaggaaaagtaaagatcatatcacactcacatcaattcaattctggctctaagtgcaaggaaagaaatcaaaagatgctgactgtgcatgcttttctccagtgacatattgcaatactttcttccaaaaagagaaaaaaaaaacctttaaataaacatttgatttttcagacagaaagcctgttagatagttctaaaaatatggattggtttcattcctatcctaatggaaaaaataaaataaaacttcaaatcagaggcttttgtgttaac

SEQ ID NO: 634671 - DNA, 570 bp, Homo sapiens
atacatacacaagaaacatatattcacaaacacasatcatatgtatatggaaatatatatatatgtatttaatacacttacaaaaattctacatggtcatagccattcagctatccaaaagaaaagaaagctgtagatttgctgaggttgctacagtttaaaatgctgcatgttcagtcaatttttgcaatgctgtcttaagaaattcagcaattacatggaatctgggcaaaattctgcaagaatagcttttcttctaaatatatttccaatctgaatttgattattaatcaaatattagcatatttgctacatattgagccatattctcctggttacttatttgctataggttagaaaacagaagttttaagaaatgaattaataactctttcaggacattaagaagctttcaggacatgattcttaaaacaaagcttagactctaagcaagcagtggcagttcccatgaatatatgctccacaaaaaacacaaaaacaaaaaaatcacttaaaattttgtaatgttttagtaatcgtaaaaaatgttcaaataatacaaaaccaaaa

SEQ ID NO: 634672 - DNA, 630 bp, Homo sapiens
tatatttccattcatatacaggaagatttcatggtgtgcacattttccaagtcactgaacctcagaagtatgagtttcatttatgatcccatttatgtttcttaaatgccacagccacaagtgtccatttttgtatcttttgttctattctggttagtattttattacctgcatcttatttgctgtctgaatgagtagcccaggctttgctacctacagctgttttttatttcatcaattaaaaagggatctcaacaccaatttcaattttgttctctggcatctaaaacatttcaaatgcagtaagtggcaagctttccaaaggatacttgacctatgcagggtgaaatactgttactaccttcaatataaatgctgcaatgtcaataatatgaaataggaaggtaacataattcagcataaccatgttargtttctttcctatgttttcttgtctgaggtacaggagaagataggtagagatgtctaagtctagaagtttggatgtgcatattaagaagcttcagtggttggtggaacttaaaaaaactctattttagaaaacataatttttcttttccttgtgataaatatatcgctagaatgatacctctaatcctggatctggta

SEQ ID NO: 634673 - DNA, 613 bp, Homo sapiens
cagcccccgacaaggaaaaacttagaattgtaagtgatgggtctaggaaatactatggttgaagtagcaaaaagatttgcagatgaatatagtgagaaaagtcattgaattaaagatcatatgactttttttacttaatatgatttttttgcttaagacagtctaaatgttctagctaagaaacagtttattacattgatcacataaactatgcttcctaggcttctctcctttaaataatcactggaataatttttaacaccttgccaaagcttatttatcaagaaatattagaaataataatcagtttatagtctaaacataaatttatggtatttactgataatacagatagccttttcaatgttctgaagtctctatgaaatgtgaccaactgaggaggtgacagagagacggcagataaaatatatgatcccaaatgaacagatctcatgtatgcccagccaaaagtaaagtgtgcattagcatatatgttttattactttcacattcttacaatggcatttacayctagaaaattggaaacttacaggttagttcgtttaaaggagaactaaatgcagtccatagatattaaggaacttagggaaaa

SEQ ID NO: 634674 - DNA, 583 bp, Homo sapiens
tcagaatacaaacttgatctatctctcttgtctcacatcctgccagcctcccaattctcagcctctataatccagccaatctggagactcttcagtgtcttctgaacacatctacttgctgtgtttgttgtacttggtctgattgtccctcctccaaatatcctttcccagcactctgcctggcaaactcatcttggcagtccaaattctgaacagcttcccccaaagcttctctgactgtcccagcttctgaggtagacttgctcctcccctagccatgctttcttggaatttagtgtacaaattcatgacagtccctgcaattctggtgctgtcatctgcctcagcagccacaggcttggaaactcagggacttacatgsgaagatgggcacagagcagtcgatctattaatgttcattgaattttttaaaaatcaaattttaaagtatcaaattcaaaaattttgtttaaagtatttttgaagttaactttcaactatgatttttaataagaattcatgaaagtggaggtcagcaaagctattttttatgaaaaagtatgtataaaatgaattgttgtaa

SEQ ID NO: 634675 - DNA, 525 bp, Homo sapiens
gacaattcagaagtatccccaaatggcaaataaacacaacagtttatgtttgggttataatttgttttatgtatagtatttacatttgaaattgtgtatatcagatattttggatatatacagccagaaaatacatgctacaaattgttaaaaagacttgaacagggaaaaccatctaaccccaattaaaccattcctgaactctatttttaaaatcctttttgcattcagcctaagcagaactgccttttctaaaaacatytgtttcaagataggtataggtatttgggtttaagcaaatttccttattacattaaaagaaaatccaaaggatataagttgccaagaaaagtcagtaaatagattaataaattgctagtaatactagcaataaaataatggaaacagcaattttttcctaagaccctttcaaaggacatggagtctaaaaattacaagcactgattctctttataacgtttagaacaatatcttctataatgaaacatacctaatgtaactgga

SEQ ID NO: 634676 - DNA, 499 bp, Homo sapiens
tattattctaaaatttctatgaaaatacaaagggcttctaatcaaagaaaaagaacaaagatagtgagctacctctacaagatatcaagctacgaataatcaagataacatggttttggtgtaaggayagacaaacagaccaatgcaaaggaacagtgtctataaatagatgctcacatataaggtcaattgttatgacaaatgtaacattacactgtgggggtggggggaagaatgaccttttaaataagatatgtttggtcaactggatatgcatctaaaacaaattaatctctatctcatgtcatactcaggtggtttgtagatataaatctaaatgtagcataagtacatctctttacatgatgcgaatagacaatatattaagacaaataagcaaattggagtacattaaaattaagaacttctcttcatcaaatgacaacacttagagaatcaaaagacaaaccacaacataagaagataccaacaatatatt

SEQ ID NO: 634677 - DNA, 534 bp, Homo sapiens
acaatataattgtcttaaggaagacaaaaataagttcacatataaaattcagaggtgaaaaaagccccccccccccgctcccccttaaaattctggaaggttcactcacttcttaaaagtgtctaacaagaaaatatcttatttggccctcttttcactgtgaggaatgataacactgagcttcatttgcaaaagacaaaccaaggaacaaagctgttataaaactacttgtgattacaggaaaaatcagcacaatcagaaataaaacattagcattctcagtcctcccataagaatgaaaccactagatgcccccagtaaccctctcactttgcaggagaaatatrttgatacttaaagaagtatttaagaaaattattcagggaaatatgtactgttaaaaaacaacaaaagcaaagaactatatacttcttttagattttatcctttttgaatcaaaacaccttgatgataaatctcagcggtaaaaatttagaagaaaactgtattgataatggtgggaaattcaattaa

SEQ ID NO: 634678 - DNA, 408 bp, Homo sapiens
tatcagatcactttttaaagaaatcaaacagcattaaactaacatttaaaatatcaaagtacatatgtataaacattattagaatgagttcatatacttgaatgatgtttataaaatataaagtacatatatatttcctggagtagattttggaacaaattttgtgttttgattgcaaactaatatttagaagctaaaatttagagctacaattattgccttttaaaattatacatccatatacattttacttcctaatatgccgaaatatcaatatctggtcaaaccaattttagttaaaagccctaaccccactacactcacatgcttcttaggaattatgggtatttaattcacattctgagacaatacagcctttaggataygaagctttcaaactttgaattc

SEQ ID NO: 634679 - DNA, 534 bp, Homo sapiens
ggactcagcagaaaggcagccttgaggcatgctgcaaacaagagaaaaccatttggaatttaaatgttatcyttagtttattccaagatgactgagatgtgatcatgtacaaacatatcatgtcattgactcctatgcagaggcagtcaacccatggccataggtggctcttcaggacttttagcctatttctccacccctgcaagctcaaaaaaattatttccaattaggtcaaaaactgtatcttacaaaataaaatagtaaattttatatattaaaagaacagacattgtaattatatctggtatgagttagtttcatactaaaatgtaagtttctatattcaacctgtagctactcattctctcccatcatattagcaatggtcaatactccaccatttccagaatctgttctgtgggatatctgtcccaagtgttgctcaaaaacattctcaaatgtgtttgagaaatgtatgttgcattctccttttgcacactcaccaaatacattaatatatattattgaagtctc

SEQ ID NO: 634680 - DNA, 600 bp, Homo sapiens
ggtgctttacctcatcatcaccacccaaaaattcatcaccatactttaaacatcaaaaaaaaaaatcagacaaacccaaatttaggaacattctataaaaatctcagccagcgctacccaaaactatcaaagttctcaaggaaarggaaaatcttagacagcctagaggaccctgaggagacatcatgacaaaatgtaaatgtagtgtaaagtagtagctgggcatggatcttggaacagaaaaaggtcatttggggaaaaccaatgaaatccaaatccaagtgtaactttagttaataagacaagaaaaatggacaagatacacaaaaaggtggacttcttggtgcatcaaatacacaaatgtaagaaaaacaaatagctactgaattgcaggaagttgaaggaaaaaacatctatgaaagggaaacttacctatgagaaagcccccatcttagagaaagcagttctctgaggaaaggactactaagtccttttgaaactccagacttgcagctatttcagaggaatttcctgtcaatcactgggcatagatatctgctcagccttacctgggaatcagtcaatgcagtaaaagtattt

SEQ ID NO: 634681 - DNA, 600 bp, Homo sapiens
ggtgctttacctcatcatcaccacccaaaaattcatcaccatactttaaacatcaaaaaaaaaaatcagacaaacccaaatttaggaacattctataaaaatctcagccagcgctacccaaaactatcaaagttctcaaggaaagggaaaatcttagacagcctagaggaccctgaggagacatcatgacaaaatgtaaatgtagtgtaaagtagtagctkggcatggatcttggaacagaaaaaggtcatttggggaaaaccaatgaaatccaaatccaagtgtaactttagttaataagacaagaaaaatggacaagatacacaaaaaggtggacttcttggtgcatcaaatacacaaatgtaagaaaaacaaatagctactgaattgcaggaagttgaaggaaaaaacatctatgaaagggaaacttacctatgagaaagcccccatcttagagaaagcagttctctgaggaaaggactactaagtccttttgaaactccagacttgcagctatttcagaggaatttcctgtcaatcactgggcatagatatctgctcagccttacctgggaatcagtcaatgcagtaaaagtattt

SEQ ID NO: 634682 - DNA, 609 bp, Homo sapiens
tggcatgactctgtgtcatctgttctcttcgggcctcagaggaaactgaacagaaagctactcctgcctatgtcctgttgtgtatctagagggacaatttagcctccagctttacactgcctccagagctcaattacatagaaaaacccaaccgtcctcaggacactttgctgcyatctgctgggcaattgtgaaaagtacacaaaaagtggttggagcctcagatttgcctagcgttccccctaaacactcacatgggacggtactttgtgtgtgcatgttattgtataaatgcatgtgccctcaactatcagaaagcatatggaccatttagcattatctaagctataaagagttgagatgcaaaatttccttccatattacttttttctgttgtctagcaagagtggtacccgaaaatcactggagtggtcttgaggattttaggtgtctctgtgtgcaagtgctggagggaggaaataaagagggtgccagtatatggaagtgtagagaagctgtatcatttaagaaagtgagacaggaagagatgtaagaggaagaaaaggaagctcagaagtcctgatgaaattacattacactgtgtcgggc

SEQ ID NO: 634683 - DNA, 609 bp, Homo sapiens
tggcatgactctgtgtcatctgttctcttcgggcctcagaggaaactgaacagaaagctactcctgcctatgtcctgttgtgtatctagagggacaatttagcctccagctttacactgcctccagagctcaattacatagaaaaacccaaccgtcctcaggacactttgctgctatctgctgggmaattgtgaaaagtacacaaaaagtggttggagcctcagatttgcctagcgttccccctaaacactcacatgggacggtactttgtgtgtgcatgttattgtataaatgcatgtgccctcaactatcagaaagcatatggaccatttagcattatctaagctataaagagttgagatgcaaaatttccttccatattacttttttctgttgtctagcaagagtggtacccgaaaatcactggagtggtcttgaggattttaggtgtctctgtgtgcaagtgctggagggaggaaataaagagggtgccagtatatggaagtgtagagaagctgtatcatttaagaaagtgagacaggaagagatgtaagaggaagaaaaggaagctcagaagtcctgatgaaattacattacactgtgtcgggc

SEQ ID NO: 634684 - DNA, 608 bp, Homo sapiens
actatttgcatggagtatttcatcccttcactttcagcctgtgttttttcttaaagctaaagtgagactcttatagcatatagatctgtttttttttttaaattcagccactctgtgattgaagaatttaattcctttatatttaaggttattattaataggtaagtagttagtagtgccattttgttatttgggtgggggggggttgtttttgtagatatttgtttatttcttcatctcttgtctccctttgtggttaggtamttttatgaagtactaagcttttaattttttttatctttcatgtatctgctgcagttctacagttcttatagttctagaggctgggaagtctaagggcatgtatgacataaacctctggtgagggtgatcccatggaaaaagatggaagtgagtgcacaaagcaaagagagagagatggggccaaatttattctttatcaggagtccactcctgccatagcttaccctctcccatgataatgacatttatccattcacgaggatgaaggtctctgggtgtaattacctctgaaaggtcacacctcttaaaactgttacaatggcaattaagttttcacatgagtt

SEQ ID NO: 634685 - DNA, 602 bp, Homo sapiens
cattggcaaaattttttctgtcaacattattttatatttgaaatttgtttgagacaatgttgcaaacatattgtgtcactttttgcactttawcttttcatttttgtgatttcattttcaattgaataaattatccatactttttacatattctatatgtgatatatatccagatgctcctaatctgtgggacttcttggaggcttgtatcaagcatatctacttccttctttatggaatccaatgtaagacttattcagagactaattgctttctaagcatgtctttttgttgggatttctcctttactactaactttgatagttctcagaactataattctccagggaagtgataggtatcagctgatgcatttaatttctaggattatgatcaataatttatgctgtacacctcaaggagactcttatctttgataagtataatctgaaatctgtggccatagtgtcctgtttctttgatactgtttctacattttcccccaaatttatccttatgcaatctttgtttttaacactcatttcacctgacttatagagattttagttgtttcccactttcataacaaaatggagttctaa

SEQ ID NO: 634686 - DNA, 574 bp, Homo sapiens
tttttggtttggttttttgctcataaaacagttctcatattttggtttggggataaactaccttgttaggtgatgcctgtgtgagggacagaggaacaactgaccccgcttttccaatataattttaaaaattaattaacaactgctctgggctctgacctactctgctgcttgttgttttgwcactgaacttgagctcttttttatttgcttttatttgtatagtagttagttttgtcctatgcttatttagaggtagggtgattctatttatgtttctctgtcaaatttcaattttattgttctttatatcaccataaatcctcaatcacttgtctgctaagaataacactaataatatctcacttcacactatatggaagaggaggtaagattgacatctgttcttagtctagaatttcaacctctcttataaagtcatgaaactctgtacctttgtcttctgtaatgccacattttcctagtttgcctgttatcttctttaatctctttttgccatcctctggaaacccttatttctgataatactgtttctattctctagcaaaaaggg

SEQ ID NO: 634687 - DNA, 593 bp, Homo sapiens
cacaataggaaggaaacttagcgttccttggaaacctgaagggatgtagtgaayttaagaattttcaagagcttatcaatcagtcagcccttattcatcccagagcagatgtgtggtggtattgtggtggacctttactgggcactctgctgaataactggagtggcacttgtacttcagtccaattggctatccctttcaccctggcatttcatcagccagagggaggaaaaataagacattgtaaagcgagagaagccccttatgggtcttttgactctcacgtctatttagatgcaattggattcccatggggaataccagatcactttaaagcttgaaatcaaatagctgcaagattaaagtcaacattttagtagataactgtaaataaatatgtagattagatgaactacatctattacaaccaacagcaatgaacttttcatgagttaaaagaaaaactcatgttggcctcagccctggggctacctgacctgacaaaaccctttacactctatgtgtcagaaagagaaaaaatggcagttggagttttagcccagactgtcgggccctggccaaggacagtggcc

SEQ ID NO: 634688 - DNA, 625 bp, Homo sapiens
aatggacaccggggaacattcagaggctgtaagcaatactcctgataaaaataggatgatggcttggcacgmggagatgggagaaatacagagttaaaaaatggttgcgtagaattagaatatgattgatggagcatagaaggtatgtaacggaaggtatcaatgacaaactaccagacatttaacacagacaactgagctaattgttgggccttctaccaagaaaggacatttgcagtcgcatagccctcttagcattcctgttacctttagctcttgcctctcttgattagggactgcttgtagtgttctgaagtaatctccacataatattccttgtgccaccttcctttatctgaaagataaattttgaggaagactgaatatcttctaatttggtcttctaatgtttgaaataaaaattacctcttctctttgctggaacaatttgataaatgatcaaattatgggctttattatagtgacttcaaaattaaccccagagggggacaattctctcaagttcagcaaaatttgagggtatggattcagtttaagaccaaaaataaggcctgctattttattttattcgtttgctccaaatctaaattttgtattctgttca

SEQ ID NO: 634689 - DNA, 602 bp, Homo sapiens
gggtttgtatcctcatttaggaagaactgctgaatgctggatatgaaagctaatgtctttgagagtcagtggacaagtctgtaacaggggctttgctgctggaaggaaagcgaccaagggtctggtaagtgtcttttggttaagcctgagagttctagcaagagacatttcctgagctgcaaggataagacacatcaaacctggctggttctctaaagaggctccctagaaatgttctcatgtaatcctaataaatttttcccctgtgacacttaggcaagaatgatagacttagctctgtgctatgacattccatgtgcaatacaatccctgcattggagcctgatgtaatcaaggcttcctctataccagatgcttcctcccccccaacwtttttttttccagagtgggagcactgtccaagttgatatccaaattcaaatcaactgagttaaatgtcattttgtggactctcagagacagaaagaacacgagactgtatatttccaaaaatctttttctctccttttcagatccaaggcagcctggggatgaatacagtcagtgccaccacagcaggaacaggcacagttctgatggct

SEQ ID NO: 634690 - DNA, 649 bp, Homo sapiens
atttaaatgtatttatagaaaaaaattagatataaaatgagaatttagcaaggaggatgtatatggaggaaatattaaaatcacttgtataactgtatgacaataaaaaagtaggactacatgacttaaaataattatattrtcaatagcaatagatatattaagtgtcttagtcccttttgtgtttttatcaaggaattcctaaggcttggcaacttataaagaaataaggtgtatttggctcatgcttccaaggactggaaagttcaagattaggcatctgcatctggtgagagtctcaggctgcttgcactcattgtggaaagtgaagaagagctagcatgcacagagatcacaagggaacagtggaagcaagggggaagaggcgccagactctttttagagaaagtggagaaatacattatgtttgttgactggaagattagttattacaaagctatctatgctgtgatgagattgcaagccttgctgaaacctagatttcagcttctcaaaagacctagtcaagccacgcccagacttccgaaccacaggaaatgtgacataataaacatattgttttagacaactaagcttgtggtaagtttctacaataaaattgcatgtggaattttagttttaaaaaatc

SEQ ID NO: 634691 - DNA, 565 bp, Homo sapiens
ttttggttgattctttcagatattctacacagacaatcacgtcatctgtgaataaaagcagttttatttttttccttaccaattgtatacctttatttccttttcttgtcttaccatttcagctatgacttccagtaaatggtaaaaggagtagtgacaggcttatccctgccttgttcctgatcttagtgagaaagctttgaatttctccattaagtatgaakttagctgtagttttattaataaatattctttatcaacctaaacaagttatcctctattaatagtttttcaaaagtttttataataaacaggcattggattttgctcaatatttttcctgcatctgttgatataatcatgtgatttttcttccttttagcctgttgatgtcattagttacattcattgatttttgaatgtctagtcagccttgcatatctgggataaatcccatatggttatggtatataattcttttgatacactattagatttagtttgcacatgttttgttgggaatttttgcatctttgttcaccagagatgttggtctgcagttttc

SEQ ID NO: 634692 - DNA, 469 bp, Homo sapiens
tgaaatgaatgcaggaccagctatgtaatttatagactctcttattaaaattacatatatatcttagcttgagctatacgaaactgctgtctttctaggttaagtatagttgatcattggcaatttcatatggttctgcctaatgattccgggtggtagactctaactacttttttctagagctcaactttttctggcctctttaataattatatgctttccagcatttctatctttttcttccaggagaaccaaagttcctttgtggtagggaactgttctctttcttatgtctaccrgggtgccaaccctgtgatggggcatacactatgggctcatagacctgtggactgaatgtaaaggtgcccaggcaagaagagactcattgcttcaaattccagaaagctcttatggaagtcctctgctattagaacaggcataaaaatgttcacacagttaataggaattc

SEQ ID NO: 634693 - DNA, 568 bp, Homo sapiens
ttatgtatctaggaatttacccatttattgtagattatctaatttgttggcatataattggtcataatagtctcctgatttttttgtgatgtaagttgtgatgtctcctttttgtttatgattaacctttttttttctgttagtctggataaagatttgtgaatcttatttaacttttcaaaagatcaaatttcaggggttttttttcattgttgtcatagtttctatttaatttaactgccctgatctttatttattccttcattctattaactttgggcttagtttattctttttatagttccttgaagtgtaacattaagttgtttaagatctttcttctttttcactgtaaacgttttgaagcatctaacaagtttwggtattttgagtttccatttttgctggtctcaacatattttttaatttccactttaatttcctctttaatccatctgttgttcagaagcatgctgtttaattttcatgtatttgtgagttttctaaaagttctcctgttattaatttctactttcatgtcattgtgatctggaatgataaatggtat

SEQ ID NO: 634694 - DNA, 551 bp, Homo sapiens
gtatgcatagtttgcaaatattttctcccattccgtagktgtgtgtttaccctgttgatagtttcttttgctgtgcagaagatttaattaggtctcatttgccaattttcacttttgttgcaattgctttaagtgtctttgtcatgaaatctttgccaggaattattggcatattttcttgaagacagcatctcttttctaacattccatgggttcaatctgatgatcttgaagtgatgactcttgtttacctttctcttcatcgtaggtctcaagtttctcatcatttaatgatttatacaagctctcatttgtctttttaatatcacaaagaatagaatccatagaataaccaaattcaataagggcatgcacattaaatcctcgttgataaaaaagcccaaaggtatgcaaagcaaccaatttgccagatgcattaaacactggggagcctgaggacccatcagagaaacaagtatcataactaagcgtgtgtgtgttccaaacctctgataggaaacttctttgggtaaacatacagtatacattac

SEQ ID NO: 634695 - DNA, 604 bp, Homo sapiens
cagttgtgccaaacaaaaggtcacattttaaaaaaaaatctgagcagtaagatgtccatagagtattttgaaattatgacaatatctggaaacataaaaggtcacatgcatatgctgggatgtgtacatgccaagaaaagacctgaaaaatgtcctaacctcccacctctggctgacctgaagaaaatccaattcaaccattcaagttaaatggccgaatcatggtaagaacagtgagctttgtggtattgtaacttgtcctattcccatccctcacaacccatctcctgcttttatgataaaagcaggaagtgatagctaaggcagagttgcaaactctcccagagctttaaaaccttaccccaacacaaacacatgcaaacacrcacacacacaatctctcagcaaagtctaggaaacttactggttcaaaagaattaaggaaatctttgtccaatcactagctgaccactaagttaacaaagcagaataacaaagacaatgataaaaccaacccctagagggctatgatttacaatgttgccacactatattattttaaatgttcaatttttaacaagtaaaaatataaaatatgcaagga

SEQ ID NO: 634696 - DNA, 596 bp, Homo sapiens
gacaaatgggacctaattaaactaaagactttctgcacagcaaaaaaaagaaactattaaactaaacagacaacctgcagaatgggagaaaatatttgcaaactatacgtcctacaaaggacaaatactcagaatctataagtaacttaaacaattcaacaagcaaaaaacaaataaccaaattaaaaagtgggcaaatgacatgaacagtcacttcttaaaaagaagacatacaagcagccaacaaacatgaaaaatgcttaatatcactaattgtcaggaaaatgtaaaccaaaaccaaatgagataacatctcataccagtcagaatggctattactaaaaagtcaaaaaatagatattggtgagaatgcrgacaaaaggaacacttatacactgctggtggaaaagtaaattagctcagtccctatggaaagcatctggaaatttctaaagaactaaaaataaaactaccacttgacccagcaatcccattactgcatatacacccaaaggaaaataaatcattttaccaaaaagacatgcatttacatgttcatcacagcactattcacaatagcaaagacctgggataaa

SEQ ID NO: 634697 - DNA, 466 bp, Homo sapiens
tggtactaaaataaaacaaagacattataataaaaggaaactatagactaatatccattatgaatatagatgcataaatcctcaaaaactattaacaaatggaatctagcaacatacaaaaagtattatatatcatgaccagttaggatttatcctaagagtacagagctggttcaatatatgaaaactaatcaatgtattccaccttactaatagaataaaagccagaaaccacatgatcacctcaaaagacatagaagaagcatttaagaaaattgaacacccttttatgattaaaaaagttgaaaaactaggaatagaatggaattttctcaacctaaatatgggcrtttattaaaaatttatagttaacataatacttgataaagagacactgaatcattttcttcttaagataagaaacaagatatcttgtcacttacattcaacattgtattgtaggttc

SEQ ID NO: 634698 - DNA, 624 bp, Homo sapiens
gaatcattttcttcttaagataagaaacaagatatcttgtcacttacattcaacattgtattgtaggttctatccaggaaaatcaggcaataaaaaataaacaaaagaatttagtttaatcaaggaaaaattaaaactaacactctttacaaatgacattatctgatctygtataaaatgctaaaaaaatccataaaaatctagtcgaactaataaataagtttaacaaaatggcagaatacatggccaatatacagaaaccaactgtatttttgtatacaaaaacacagttacagtaacatcaaaaggaataaatatacatatacttcacattcaggaataaatttttaaaaagaagtgcgagacttgtctaccacaaactctaaaacattattgaaagaaatttaagaagatacaaacaaatgaaaagacatcccatgttcattgataaaagacaatatttgaagacaatattatgatggtaatactccccaaccaatttaacacaacccctgttaaattacagctggcatttttcagaaattgacaagcttatcctaacattcatatgaacatggaaaagacccaaaatagtcaaaccaatattaaaaaagaaaaacaaag

SEQ ID NO: 634699 - DNA, 632 bp, Homo sapiens
taacactctttacaaatgacattatctgatcttgtataaaatgctaaaaaaatccataaaaatctagtcraactaataaataagtttaacaaaatggcagaatacatggccaatatacagaaaccaactgtatttttgtatacaaaaacacagttacagtaacatcaaaaggaataaatatacatatacttcacattcaggaataaatttttaaaaagaagtgcgagacttgtctaccacaaactctaaaacattattgaaagaaatttaagaagatacaaacaaatgaaaagacatcccatgttcattgataaaagacaatatttgaagacaatattatgatggtaatactccccaaccaatttaacacaacccctgttaaattacagctggcatttttcagaaattgacaagcttatcctaacattcatatgaacatggaaaagacccaaaatagtcaaaccaatattaaaaaagaaaaacaaagtaggaggtgttaggtttcgaagggaaggtaagggttaaagaaagacacacacacacacacacacacacacacacacacacacatataaaaagggcacctcagcagcaaatgcaggctttacatccagcataaaacctacagaagt

SEQ ID NO: 634700 - DNA, 632 bp, Homo sapiens
taacactctttacaaatgacattatctgatcttgtataaaatgctaaaaaaatccataaaaatctagtcgaactaataaataagtttaacaaaatggcagaatacatggccaatatacagaaaccaactgtatttttgtatacaaaaacacagttacagtaacatcaaaaggaataaatatacatatacttcacattcaggaataaatttttaaaaagaartgcgagacttgtctaccacaaactctaaaacattattgaaagaaatttaagaagatacaaacaaatgaaaagacatcccatgttcattgataaaagacaatatttgaagacaatattatgatggtaatactccccaaccaatttaacacaacccctgttaaattacagctggcatttttcagaaattgacaagcttatcctaacattcatatgaacatggaaaagacccaaaatagtcaaaccaatattaaaaaagaaaaacaaagtaggaggtgttaggtttcgaagggaaggtaagggttaaagaaagacacacacacacacacacacacacacacacacacacacatataaaaagggcacctcagcagcaaatgcaggctttacatccagcataaaacctacagaagt

SEQ ID NO: 634701 - DNA, 632 bp, Homo sapiens
taacactctttacaaatgacattatctgatcttgtataaaatgctaaaaaaatccataaaaatctagtcgaactaataaataagtttaacaaaatggcagaatacatggccaatatacagaaaccaactgtatttttgtatacaaaaacacagttacagtaacatcaaaaggaataaatatacatatacttcacattcaggaataaatttttaaaaagaagtgcgagacttgtctaccacaaactctaaaacattattgaaagaaatttaagaagatacaaacaaatgaaaagacatcccatgttcattgataaaagacaatatttgaagacaatattatgatggtaatactccccaaccaatttaacacaacccctgttaaattacagctggcatttttcagaaattgacaagcttatcctaacattcatatgaacatggaaaagacccaaaatagtcaaaccaatattaaaaaagaaaaacaaagtaggaggtgttaggtttygaagggaaggtaagggttaaagaaagacacacacacacacacacacacacacacacacacacacatataaaaagggcacctcagcagcaaatgcaggctttacatccagcataaaacctacagaagt

SEQ ID NO: 634702 - DNA, 520 bp, Homo sapiens
tgactttgtgtactgcgaaagaagtcaaacaaagatcacactactgccagcatgcaaaatcaaagtcgaagtatcttaatcaacaacacgtacacaacctcagaaaaaaaaaaaaawttcccctaccaaagcaatttcaaaaaattggaacaagcaactgctacactagatgcaaagacatcaatggaaaaacacaggaagcatgaaaaagcagggaaatgggatatcatcaaaggaccataattgtccagcaacagattcccacaaaatgaatcccttgaaatgccagataaataatttaaaatattgatttttaaagaagcttaatgagatgcaaaggatatctgaaaatcaggccaggcatagtgtctcgtgcctgtaatcccactgtaatcccagcactttgggaggccatggcaggtagatcacatgaggccaggagttcaagaccagcctgggcaccatactgaaaccctgtctttctactaaaaatacaaaaaaaaatgtaagctaatacaag

SEQ ID NO: 634703 - DNA, 530 bp, Homo sapiens
aaaaaggaagaaagtcaatagactatgtattaatgaatgagttctgttatagggaactggtgcttaatcctgttggagactctctaagagacagttgaaacacacttcaaaattatttctcttaggggacagagaagctagggtagttatccagcatatgcacgttacactggataggaaaaattcttgtgggattaacttcccagcacctatggcctgccccatacctatgcatcctcggaaaagaaaggagttgtccatagatgtggagactggctgaagatgcagcatcaatacagcatttgctgcagagtttgctcagagtttgaggctgcartgagctatgatcacgttactgtactctagcttgagcaagacctgtctcagacctccagagtggatcaaggggatatagatgctgcatcaacagcatttgctgaagtaggtttggacaataataatctcccttgtatgtctccggtcccttttagaaagttggcaccacttcgatgaactcaagtaaaaggtga

SEQ ID NO: 634704 - DNA, 602 bp, Homo sapiens
gatcattagctttttttagcaataaaatattcttaaattaagtacatttttagacataaagctattgcacacttgcacacttaatagacgacaataaactgtaaacagtagcataactttttttttttaaggcggagtctctctctgtcccccaggctggagtgcagtggcacaatctcggctcactgcaagctccgcctcctgggttcatgccattctcctgcctcagcctcccaagtagctgggattacaggcacctgccaccacgcccggctaatttttttgtatttttagtagagatggggtttcgccatgttagccaggatggtcttgatctcctgaccttgtgatccacctgcctcggcctcccaaagtgctgggattacargcgtgagccactgcgcccagccagcataacttttatatgcattgggaaactaaaaaattcatctgttacgttattaaagtattcattttattgcagtggcctgaatctgaacctgcaatatctccaaagtatgcctgcatatttctttttctgtgttgctgtattgagtttgctaacattttgttgaagatttttgtgtccatgttcataagag

SEQ ID NO: 634705 - DNA, 602 bp, Homo sapiens
gatcattagctttttttagcaataaaatattcttaaattaagtacatttttagacataaagctattgcacacttgcacacttaatagacgacaataaactgtaaacagtagcataactttttttttttaaggcggagtctctctctgtcccccaggctggagtgcagtggcacaatctcggctcactgcaagctccgcctcctgggttcatgccattctcctgcctcagcctcccaagtagctgggattacaggcacctgccaccacgcccggctaatttttttgtatttttagtagagatggggtttcgccatgttagccaggatggtcttgatctcctgaccttgtgatccacctgcctcggcctcccaaagtgctgggattacaagygtgagccactgcgcccagccagcataacttttatatgcattgggaaactaaaaaattcatctgttacgttattaaagtattcattttattgcagtggcctgaatctgaacctgcaatatctccaaagtatgcctgcatatttctttttctgtgttgctgtattgagtttgctaacattttgttgaagatttttgtgtccatgttcataagag

SEQ ID NO: 634706 - DNA, 539 bp, Homo sapiens
aatgtaatcatgcagtacgtaccgttttgtgccttgttgctttcactcaaaattatgtttgtatgaaatccatcaatgttgttatgtttagtagtagttttgttcattttcattgctatgttattttccattctatcagtgtgctataatttgtctatccatatttttaccaatgcacatttgggttatttccagytttggctactgtgaaaaaggaggctataaacttgtatttcctttcgtaaaacataggtaagcatttctgataggcctatatctagaagtagaattactcagtcatagggtaaacatgtgttcaactctggaagatatggtcaaacaaatttccagtggttgtagaaatttaaacttccactagtagttgttttacattcttgccaataagttaaccattctggcaagtttgctgtagtatttcattgtggttttaatttttattttcctaatttttaatgagcttaagcatatcacttttatttttttctatttttatcatttctgccaaacttacaaaacag

SEQ ID NO: 634707 - DNA, 539 bp, Homo sapiens
aatgtaatcatgcagtacgtaccgttttgtgccttgttgctttcactcaaaattatgtttgtatgaaatccatcaatgttgttatgtttagtagtagttttgttcattttcattgctatgttattttccattctatcagtgtgctataatttgtctatccatatttttaccaatgcacatttgggttatttccagctttggctactgtgaaaaaggaggctataaacttgtatttcctttcgtaaaacataggtaagcatttctgataggcctatatctagaagtagaattactcagtcatagggtaaacatgtgttcaactctggaagatayggtcaaacaaatttccagtggttgtagaaatttaaacttccactagtagttgttttacattcttgccaataagttaaccattctggcaagtttgctgtagtatttcattgtggttttaatttttattttcctaatttttaatgagcttaagcatatcacttttatttttttctatttttatcatttctgccaaacttacaaaacag

SEQ ID NO: 634708 - DNA, 539 bp, Homo sapiens
aatgtaatcatgcagtacgtaccgttttgtgccttgttgctttcactcaaaattatgtttgtatgaaatccatcaatgttgttatgtttagtagtagttttgttcattttcattgctatgttattttccattctatcagtgtgctataatttgtctatccatatttttaccaatgcacatttgggttatttccagctttggctactgtgaaaaaggaggctataaacttgtatttcctttcgtaaaacataggtaagcatttctgataggcctatatctagaagtagaattactcagtcatagggtaaacatgtgttcaactctggaagatatggtcaaacaaatttccagtggttgtagaaatttaaacttccactagtagttgttttacattcttgccaataagttaaccattctggcaagtttgctgtartatttcattgtggttttaatttttattttcctaatttttaatgagcttaagcatatcacttttatttttttctatttttatcatttctgccaaacttacaaaacag

SEQ ID NO: 634709 - DNA, 623 bp, Homo sapiens
actctgggtactcatcccccacaccaggacttattgttatttacttgattagaaaaaaactgtctaggttgtttcagtgaagtctatttctccgtcctcactgttaagctttgatgttgccccttatagggtacaggcttgtgatgcccacagtcaccctgggatgacatttatcttggaaaggctctttgtctctttccctaaccatacccagytgttaagctctgctagtgcttgctggttgttctgaggcaaaaactgcttcacagactaacccaaacaaatttgagctcctttgaggggatagctcccaaaatcagtgtttgagatttgttctgactccaaaagggctcttcctagcttccccttttcccatttctctctgggaaactcgtgggcctacagtttagcctgtatctaaaatgtatctgtgaacacctaccaagtgccttttaccacaacttccactgtttttgagagtacttgtaagcctaaacttctccacatgctacaaatgaagtcacctcctttgggaacagagtggagatttctattccatagcctatttctctcccaacatctctgagctaaggatctggtgcaggggtgaggaagtgggtagg

SEQ ID NO: 634710 - DNA, 618 bp, Homo sapiens
aaagcttcgagagacacagggtattgagaagctggtgttgatcaacaaatcagggtgagcttaccacctaaaattacagtcaaaagaatttgagtgagtggagagttgttttcctcttttggttactaagaaaggaaatttccccttatttacgtgtaatgtgtgaagagctattgctctattatctgtcttaatgttgatccataarttgataatagattcatgtcaaacttttcttgtgtcgctatttgggatagaatacaggatttggtaaaaatttgatttaacccattttggcatttatattcttttttgtttgtttgaggcagagtctcgctctgtcacccaggctggagtgcagtggcgcagtctctgcaacctccacctcccgggttcaagtgattctcctggctcagcctcctgagtagctgggactacaggtgcgtgccaccatgcccagctaattttttgtacttttagtggagatggggtttcaccgtgttagccaagatggtctccatctcctgacctcaggtgatccacctgcctcagcctcccaaagtgctgggattacaggcaggagccactgtgccctgcccctggcatttatattcttat

SEQ ID NO: 634711 - DNA, 567 bp, Homo sapiens
catttttccttcccagagaagctgggaatattaaattttaaaatatgattttgctaaggtstaaatgttagtgtccccaccagccaagttcatatgttaaaatcctaattccataaggtgatgttattaggaggtggggcctttgggaagtgattaggtcatgagggtggagtcttcatgaatggtattagtgccctcattaaagcaaaaaacaaaaaaccaaaaacaaacccagagttcccttgccccttccaccgtgtaaggacacagtgagaaggtgctaccaatgaacaaggatgtgggtcctcaccagacactgaagcttccaggcagcaagaatgaccatgccaaatgcaggccctcctgccctggacttcccagcttccagaaccgtgagaaataaatttctgtggctgggcgtggtgcctcacacctgtaatcccagcactttgggatgctgaggcaggagaatcacctgtggtcaggagttcgagaccagcctggccaacattgtgaaaccccatctctactaacaatataaaaattagccaggtgtggtggtgggtg

SEQ ID NO: 634712 - DNA, 463 bp, Homo sapiens
gatcctgtggttaggatgagcagacagtatggccgctttgccccctctctggacaattcagccttatcagcctccaactcacttccccagaggatttggaaatatgcttcctactgctctgtgcccctgggcagagatgctaagtatcctgtccaccccttccttcggaacataacacagaggatttttggctttttaaacctgcatcttatctgaaggtagggattgctctgcctgccatcccaaagcctacagtcctgacactgtgaaatgagtgcagaggaaggaggtggaatgcagttggctttgagtcctagccagccgtttgaaggctacagcctgcttctaacttgtttctgatggaattcccaggaatgascctggctcaacctgattctcatcatgtcttctctgtactttggagaaatcaggtcccaaactctcctttctgggcctctctaat

SEQ ID NO: 634713 - DNA, 604 bp, Homo sapiens
tcataaggttattgtctggtttaaatgagagaaagcctgtaaagcacttgtaagagtaatggacacatggtggcagagctgaatttccarcacagttcttcctgatatcagtgcttttctttgctatttagtcttttttttttaatgaataggaaattcaaacaacgtagaagtaaataaagcatcaaagccttccctttccctctgcatctccacttccattttcatttttcacagaaaaatatttgctgttaagagttttattcaaaacccctcctatatatttataggcataaaaagatacttttacatgcacagttcccttcttccctttctctcttctttctttcctcattccctccctttcttccttcgtccctgcctccatcccttcctccttcctttccttccttctttaaataaagaatgatgattctgtgtgcattgttctgcaactcaacagtatgatttgaacatctgcccatatcagtccctgtgcagagcactctattatatggccacactaaatttatttgatctttcccctattgatggatgtttttgctgtttccgatttctgctccatcaaataatgtttcattga

SEQ ID NO: 634714 - DNA, 549 bp, Homo sapiens
ccaaccactaacatgagttgaactacmtgtctatgcctctaattgctgacagtgtgctgagaagagaggtaagagacccacagaaaagttttagagataataatagcagacatgtaaaattctagggactttaaaatcacggccaggcacagtggctcatgcctctaatctcagcactttgggaggccaaggcagacagatcacttgaggtcaggagttctagactaccctggccaacatggtgaaaccctgtctctactaaaaaaaatacaaaaaattagccaggcatggtggtgcattgtgacaatgtcctgggacataaattgctcccagctacttgggagtctgaggcaagagaattgcttgaacctgggaggcagatgttgcagtgagctgagatcgttccactgcactccagtctgggcaacagagtgagactccatctcaaaaaaacccaaaaacaaaactcgcagggaaaagcttttgtgagagatgggcttaggatgaggatttggaatgaatgtaatacattatgtaatgccctagaag

SEQ ID NO: 634715 - DNA, 461 bp, Homo sapiens
aatattggacaagtaatataaaattgccaacaacaacaacaacaacaaaaacaacaacaaaaattcaggcctagatttcttctctggcaaattgtagcaaacatttaaagaagaattaatagaaatatttacaaacttatctaaaaaaaaaagaaggatgaatacttttcagtttattctatgaggtcagtattatcctgataccaaaaccagacaaggacataaaaataaaactgcagaccaatatctttatgaatatagaccctggctgggtatggtggctcacacctataatcccagcccttttagaagttgaggtgagagaatgsctttgagcctaggagttcaaggccagcctgcacaacatagtgagacccccatctctacaaaaaaaaattaaaaattagctgggtgtggtggtgaacaccagtagtcccagctacttgggaggctgaagtgga

SEQ ID NO: 634716 - DNA, 594 bp, Homo sapiens
ttgcccagggtctcataactgttcagtaacggagatgagagcccacatccactgacttctactcggaggcttcgtgcactccactctgcttgtgttccctccttcatttaccttctgccaatcttaggactagctgtgaaggcaacgaaggagcaactcccactcttgggtacatacatgaccagtaaacattaaaaaaaaaaaaaaaaaatcacgctctcctacgacctttcagctgcaggagtactatcttttcaagtccaatccaaaagcctgtctcagcccacatgaactaaackgcaatttcaagtgaaaataaatacacaccaatgctgtaactcagtttcaatttgtatctaattaaagtttgctatgttatgatcaggatggaaatttcgcttttaatattttgtgaagtagtagggaaggtaactggattatgacattaataaacgaagactagttactgataaacacactgtttcaggggtttattattacaacagcctaacttctagtcaacagaaagggtgctgctgtactatgtttatttagatggcaaagtacagtagtatgaacattacctgagagaat

SEQ ID NO: 634717 - DNA, 498 bp, Homo sapiens
gaattcaaactttacaaaaatggagacagagtagtactgacataatgacatattgaaatcaatgggatagaatagaggatccattaaaaaatccctcaaatttacattcaattaattttctaaaaggcaacaaaaacaattcaatggggtaagaataggtttttcaacaaatgatgctgaacaaatggattaacttttgctaaagaatgaagttgggtctcaatctcaaaagttccacaaaacttaattcaaatggatcttatatctaaayatatgaactaaaagcataaaactgtaaaatattatattatagtaaatgtttgccacctggagttagacaaatcctttttaagaatgataataaaagcacaaaagcaaaaaaaaaaaaaagaaacattggataatatcatcaaaattaatgttttacctgcaaatgacattatgaagaaagtggaaattaaaacctagggtaaaatattttcaagtgatatatctcat

SEQ ID NO: 634718 - DNA, 498 bp, Homo sapiens
gaattcaaactttacaaaaatggagacagagtagtactgacataatgacatattgaaatcaatgggatagaatagaggatccattaaaaaatccctcaaatttacattcaattaattttctaaaaggcaacaaaaacaattcaatggggtaagaataggtttttcaacaaatgatgctgaacaaatggattaacttttgctaaagaatgaagttgggtctcaatctcaaaagttccacaaaacttaattcaaatggatcttatatctaaacatatgaactaaaagcataaaactgtaaaatattatattatagtaaatgtttgccacctggagttagacaaatcctttttaagaatgataataaaagcacaaaagcaaaaaaaaawaaaagaaacattggataatatcatcaaaattaatgttttacctgcaaatgacattatgaagaaagtggaaattaaaacctagggtaaaatattttcaagtgatatatctcat

SEQ ID NO: 634719 - DNA, 551 bp, Homo sapiens
aaataattataataatgctaaaaacataatgaaaatataaataatgttgagtattgtatttgattggtagttaaatgttttttatcaaatgacaattagataatgcattttggtcaaattaattttaggggatttaaattatatgtaactaataattaagacaatatattcatttaagttttaaggccatttggtaggtaatttatacatggttgtgtgtgatatctatatatgtcacatttgctcttctcccytaagtattatttcaatttaaaaacagccacaagaatcagtttttaaattttcattcattgagaagatgcttacattttgtactcaaaataactgctgacatgtttttaaacaggatgtttcaataagcagtaaacaagccagctggctctgacaaccttctgtaaagctttggtatgatactgctgaaaagataagtgttttggatatagagaaacagagtgttcagatttagggccctgggaaaagttatttaacttcactgaatttcactttccacatttataaaataagaagaa

SEQ ID NO: 634720 - DNA, 541 bp, Homo sapiens
tttgtaatttttagaagacacttgaaataaaattactagttattgtttttaattcagattactataatttgtattgaaggtgtattaatatgtttattggagatcattgttcaattttgctactattttcttctgattttcttatttgggkgtaattatagatgacagatgtaatttcggctggtctgtgtattatgttttttttttttttcagacatggcttttaaattaatggtttctatttattttgccattttaaatttctatatagtaaaaaatgtaacattgcttgtcttatttttattatttccctttaagttctgggatacatgtacaggacattgcaggtttgtttcataagtatacatgttccgtggtggtttgctgcacccatcaacttgtcatccaggttttaagccccgcatgcagggatagcattaggacaaataaaaaacattgcttatctttacagtacctgtcatctgtgccagtcctagatatcatatctcatatccagtattttaaaaatgcggactcatat

SEQ ID NO: 634721 - DNA, 541 bp, Homo sapiens
tttgtaatttttagaagacacttgaaataaaattactagttattgtttttaattcagattactataatttgtattgaaggtgtattaatatgtttattggagatcattgttcaattttgctactattttcttctgattttcttatttgggggtaattatagatgacagatgtaatttcggctggtctgtgtattatgttttttttttttttcagacatggcttttaaattaatggtttctatttattttgccattttaaatttctatatagtaaaaaatgtaacattgcttgtcttatttttattatttycctttaagttctgggatacatgtacaggacattgcaggtttgtttcataagtatacatgttccgtggtggtttgctgcacccatcaacttgtcatccaggttttaagccccgcatgcagggatagcattaggacaaataaaaaacattgcttatctttacagtacctgtcatctgtgccagtcctagatatcatatctcatatccagtattttaaaaatgcggactcatat

SEQ ID NO: 634722 - DNA, 522 bp, Homo sapiens
atagtcatatgtggaaccttaccatgactcagtcaaagcctgcaagtacattactgcttaagctgatccaggtcaaaaagartaacagtcagagattgaatagtgtccctcccgaaaatatatattgcagccctaaccctcattacccaagtatgtgcctgtatttagagacagagtctctaaggaggaaattaacccaaatgaggccatgaatgtgtcatgatccaaatgcctggtgtccttataagaagggaaattaggatacatgaaagataccagggctttacacacacagagaaaaggtcacttcatatcatatgaagacatagtgagagggtggccctctgccaaccaaggagagaggcctcaggagaaaccaaacctgaagacaacttgatcttgaacttctggcttccagaagaatgagaaaataactttctgttgcttaagccatcccatctgtggtattttttatggtagcctcggtgaatggaaacccttacagacaaaattaagattgca

SEQ ID NO: 634723 - DNA, 522 bp, Homo sapiens
atagtcatatgtggaaccttaccatgactcagtcaaagcctgcaagtacattactgcttaagctgatccaggtcaaaaagagtaacagtcagagattgaatagtgtccctcccgaaaatatatattgcagccctaaccctcattacccaagtatgtgcctgtatttagagacagagtctctaaggaggaaattaacccaaatgaggccatgaatgtgtcatgatccaaatgcctggtgtccttataagaagggaaattaggatacatsaaagataccagggctttacacacacagagaaaaggtcacttcatatcatatgaagacatagtgagagggtggccctctgccaaccaaggagagaggcctcaggagaaaccaaacctgaagacaacttgatcttgaacttctggcttccagaagaatgagaaaataactttctgttgcttaagccatcccatctgtggtattttttatggtagcctcggtgaatggaaacccttacagacaaaattaagattgca

SEQ ID NO: 634724 - DNA, 522 bp, Homo sapiens
atagtcatatgtggaaccttaccatgactcagtcaaagcctgcaagtacattactgcttaagctgatccaggtcaaaaagagtaacagtcagagattgaatagtgtccctcccgaaaatatatattgcagccctaaccctcattacccaagtatgtgcctgtatttagagacagagtctctaaggaggaaattaacccaaatgaggccatgaatgtgtcatgatccaaatgcctggtgtccttataagaagggaaattaggatacatgaaagataccagggctttacacacacagagaaaaggtcacttcatatcatrtgaagacatagtgagagggtggccctctgccaaccaaggagagaggcctcaggagaaaccaaacctgaagacaacttgatcttgaacttctggcttccagaagaatgagaaaataactttctgttgcttaagccatcccatctgtggtattttttatggtagcctcggtgaatggaaacccttacagacaaaattaagattgca

SEQ ID NO: 634725 - DNA, 490 bp, Homo sapiens
ccaggcttgcagtactagcaggattaaaggattaggcaaatatccttcaggtaataattctaaattatagtatatatagaaaatacaacactacgatatgcgtgtatatgagtccagttttattattatttatatataaactatgtaaagtatgtgtatatgtgtagatatgtgcaattatttcaagttattaatgtgcaacatactagaaagtatttttaagtgaatgataatagacaacatatccatatttattggctgcaactaaagctctatttaggggaaaaattgtatagctttaaatgttcatattgaaaaaagtgaaggttgaaaattcacagtgtaagtgscccctttaagaagctctctccccaaaaatgggaatccaaacccaaagtaatttgagaacagtaaataataatgataacaatgaaagttaatgaaatcctaatacaaacaacagagtaaatcaatgcaaacaaatgtgttt

SEQ ID NO: 634726 - DNA, 621 bp, Homo sapiens
ggtttacattttcttgtgaatctataatcatttcaaaatgcaggtttttaaaaagtcattagactggaatgaaataaaatgaaataatgtaagaaaaatagaaaagaggattaaaacaattatgcttaataatactgagactatgtcacagagaagtttctaaggaatattttcggtcaagagatttgtatcgttgagtttcaaagttacagttaattttcatgttatttaaactttcctaaaaataataaaaagttaacaatatacaatactttgaaatctgtaaatattttacatatcaagtcaaaggaactaaataatacacataaaaattatatacacgaacttttcatttgatgctaagaaaccctcagataaaagtaaacctaggtgggacacagtggctcacgtgtgtaatcccagcactttgggaggcctaggcgagaggatcacctgaggtcagaagttcgagaccagcctggccaacatggtgaaacaccatctctactgaaactacaaaaattagctgggcacrgtggtgggcacctgtaatcccagctactcaggaggctgaggcaggagaatcgcttgaacctgggaggaagaggttgtagtgagccg

SEQ ID NO: 634727 - DNA, 481 bp, Homo sapiens
agagtgaacctaacctaagggacctatcttctcttctagagtgaacctgacctaagcaggtctgcagagggatgttcctgtaaaatcaaactttccttcatccaatctcacagcacatatgcagcaatgtatcagttttataaatcaattatatttattaggtaagactgcagtcatgcagtttcaggagaatcagattttactggatggagagtagcgaggagaatatatrgccctcttgaaaatggtgaaaaaacattactttggtgacatcttctggagttcagcatacccttaggcaaattttgggactcaggaattatatctctatttgaagcatactgtaccattctcaatttatgaacactgctcagtaatttctgtattgtttctcatttaaaataacacattccataattgtgattgttagtgggtttttttgtatatcacataaagtgattttgattaccaagcagttgtt

SEQ ID NO: 634728 - DNA, 481 bp, Homo sapiens
agagtgaacctaacctaagggacctatcttctcttctagagtgaacctgacctaagcaggtctgcagagggatgttcctgtaaaatcaaactttccttcatccaatctcacagcacatatgcagcaatgtatcagttttataaatcaattatatttattaggtaagactgcagtcatgcagtttcaggagaatcagattttactggatggagagtagcgaggagaatatatggccctcttgaaaatggtgaaaaaacattactttggtgacatcttctggagytcagcatacccttaggcaaattttgggactcaggaattatatctctatttgaagcatactgtaccattctcaatttatgaacactgctcagtaatttctgtattgtttctcatttaaaataacacattccataattgtgattgttagtgggtttttttgtatatcacataaagtgattttgattaccaagcagttgtt

SEQ ID NO: 634729 - DNA, 619 bp, Homo sapiens
tgtgaaaaatccttttagaaaacttagagtatcctcagttctatccaggtctaaaatattatgctataatgaccttttgaacatttttcttctaatattttgctaaacaaagaaagacaacaagcatactacaacctagactttcttgttggttctacttctattagtgtattattttgtactctgcctgtttgaacagatgttcaacaccttttttgagttttatagatttattttgtcaaaacaggtgtaatttaaaatcatttactcattagagtaatataaaaagtgatggtctcatacatatgtttgtataataatttcttggcaatgggagacaatctgcatctttagcctaatacaaggtatacctacctagaataactaaataagcaactcagataagatttttaagaaaatctttccagatattcatttattacaactccaactttttgtttaacatttttctattgagaagcatttttttattgtttattaagtgcacttcaaggaattgatgasttatataaattaatactcagtatttgtatcttgatttagagttcatgattcaatctatagtttataatcctattcaacaatttattcattgact

SEQ ID NO: 634730 - DNA, 619 bp, Homo sapiens
tgtgaaaaatccttttagaaaacttagagtatcctcagttctatccaggtctaaaatattatgctataatgaccttttgaacatttttcttctaatattttgctaaacaaagaaagacaacaagcatactacaacctagactttcttgttggttctacttctattagtgtattattttgtactctgcctgtttgaacagatgttcaacaccttttttgagttttatagatttattttgtcaaaacaggtgtaatttaaaatcatttactcattagagtaatataaaaagtgatggtctcatacatatgtttgtataataatttcttggcaatgggagacaatctgcatctttagcctaatacaaggtatacctacctagaataactaaataagcaactcagataagatttttaagaaaatctttccagatattcatttattacaactccaactttttgtttaacatttttctattgagaagcatttttttattgtttattaagtgcacttcaaggaattgatgagttatataaattaatactcagtatttgtatmttgatttagagttcatgattcaatctatagtttataatcctattcaacaatttattcattgact

SEQ ID NO: 634731 - DNA, 599 bp, Homo sapiens
tacagtttgaagactgaagtggaatatatgcagatacaccactaaactactgattagggaatcatacatcccaggcttcttttgatgattaatgaattaacagctttttagaaagcagagaataaacaaataatgcttcctacttccaacaataataacaacacaagaaaaaatttaaaaagtaaaaataaaaatctttaaaggttgatgaataaggtagactgaaaatttcatgaaccttcaaataaatcatgatggtttaacaaaaccaccaattaccatacatgtagagtgggaaattccatagtcataaaattatgcaaagactattttttcctaaaacattgttcagaataatgatcaaacattatgttagttaamcatgtttatcacgtaaattatatttgacaaattgaatgaatatacatatttgaatatatatacatatatatatatacacacatatatatatatatctgtaaaggcaacatgaaggattacatatttttcttcgaaccaacagtgtatttcattttcccaagaatttctaacagtatttatttctttgttcttatgctttcattaagaagatatagttt

SEQ ID NO: 634732 - DNA, 599 bp, Homo sapiens
tacagtttgaagactgaagtggaatatatgcagatacaccactaaactactgattagggaatcatacatcccaggcttcttttgatgattaatgaattaacagctttttagaaagcagagaataaacaaataatgcttcctacttccaacaataataacaacacaagaaaaaatttaaaaagtaaaaataaaaatctttaaaggttgatgaataaggtagactgaaaatttcatgaaccttcaaataaatcatgatggtttaacaaaaccaccaattaccatacatgtagagtgggaaattccatagtcataaaattatgcaaagactattttttcctaaaacattgttcagaataatgatcaaacattatgttagttaaccatgtttatcacrtaaattatatttgacaaattgaatgaatatacatatttgaatatatatacatatatatatatacacacatatatatatatatctgtaaaggcaacatgaaggattacatatttttcttcgaaccaacagtgtatttcattttcccaagaatttctaacagtatttatttctttgttcttatgctttcattaagaagatatagttt

SEQ ID NO: 634733 - DNA, 599 bp, Homo sapiens
tacagtttgaagactgaagtggaatatatgcagatacaccactaaactactgattagggaatcatacatcccaggcttcttttgatgattaatgaattaacagctttttagaaagcagagaataaacaaataatgcttcctacttccaacaataataacaacacaagaaaaaatttaaaaagtaaaaataaaaatctttaaaggttgatgaataaggtagactgaaaatttcatgaaccttcaaataaatcatgatggtttaacaaaaccaccaattaccatacatgtagagtgggaaattccatagtcataaaattatgcaaagactattttttcctaaaacattgttcagaataatgatcaaacattatgttagttaaccatgtttatcacgtaaattatatttgacaaattgaatgaatatayatatttgaatatatatacatatatatatatacacacatatatatatatatctgtaaaggcaacatgaaggattacatatttttcttcgaaccaacagtgtatttcattttcccaagaatttctaacagtatttatttctttgttcttatgctttcattaagaagatatagttt

SEQ ID NO: 634734 - DNA, 560 bp, Homo sapiens
tttccatatacttattggccttagttcataaattcttgttataaattgtttataataacagcaaaataaataggaattgtatttttgaaagtaaccaataatgtttctggagtgttaaatactgaaagtcattttattttcaatctcacatctgtgactctatcttaaagaaataaattgatatctaaaatgttcttatacaaaaaaatttatcaatgtattatttattgtgtctaaacttaaaacctaattgctgagataagccatgtactttttgacatataagttctcttaagtgtttaaagatgttggataggattatggcaaagatatttggagacttgcatagtagaaaaacttagtagtcgaaaaaacctcagggtatcaagaaagtagagttctacatcacattgtattaaaaaataaactagtgttaacagatgaacacaaaaatatatatattttctaatttgtcactgaaagagaccacaacataaagaataattctggttatttcttccactaatgtacaccrtaagtttccaattctgatcttttat

SEQ ID NO: 634735 - DNA, 579 bp, Homo sapiens
tttaaaatgaacaattttcctttgattttcagctgcttttctgcctgactgcctcttttcctatacaacttaatctgaaatgcctcaacaatattgatatggttaggctttgtgtctccacccaaatatcatcttgagttgtaattcccataatccccacatgtcaagggagagamcaggtggaggtaattgaatcatgggagtggtctcccccatgctgttctcatgacagtgagtgagttctcaggagatctgatggttttataaggggctcttccacctttgctcagcacttctccttcctgctgccctgtgaggaaggtggcttgcttccctttcaccttccgccatgattgttaagtttcctgaggcctccccagccatgctgaactttgagccaattaaacctctttcctttataaattacccagccttgggcagttccttatgcattatggaaatggactaatacaaatgccttatatcaagttaaaatttctggacctctctcttctccatgttcttggcctttcaagcagcattgtttgccattgtatcttatgatatctctgaaagctt

SEQ ID NO: 634736 - DNA, 616 bp, Homo sapiens
caaatcattcacagtagagaatattatagaagtatgatttaaaatgaaaattctccaggtttcataagagcaattttcagctgtatattccaaatataacctgttgccatctcctgcagcatggcttattctggtgctagatgcaggtgtgcatgaaaccagtgtgaaattttgttaacaaaggcaagttagttatgagcaaatggatctcttggkcaaggggcttattcattacagctttccactattcttaaatcttttatgactgacactaattttcttgggcattcaaaacacttcctaaatgatctcacctcagtgcacaggggctacatgagatagtttcagaaccaggaacagttttctcatgataggtaagccaatgatactttagaggaaaatatgaatgtcaggaaccatattaggacagttataaatctttggggtaagacagattagatttgaaatctgttgcttacttcaatgtaccagcagtgtgatcttggtcaatttattaacctgtcaaaatttcaaatccacataggaaaaatgggggaaaattatatgacaagagagggtgtggctatttaataatttgttgattgtaaagtattta

SEQ ID NO: 634737 - DNA, 582 bp, Homo sapiens
ttattatggaaaaatttaaaattacatacatacaagcttatctttgtagtattatatgtaacatttcaaaattgaaaacatcccacatttgatcgtacagtatttgaatgttagaataaacacaggtgtgtattgtgataagaaaatggtttacttataacaaagcacacgctttcacataactacatttaccaggaatataattttctttcatttttaaaataagtcaaggccacatttctttatacagtcttttaacaataggagaataattggcttgggaaaattgtgaaatttacaaggaaatgtgacataaatgtacagactagcaactatctccattgttcagtaacatagtcaaatttactttgatcatgtaaataaattagattccaaaatttttaaaaatcctcttctaacagatgttcttagtaggtatttcccttttggataattctaggaaaaaaattttggcattgaaactgactagatcagctctcactatagtgtggttcgatggaaataggtggcaacacttcctcaagttaactgwccttgatttttgaatagttgaaccttcat

SEQ ID NO: 634738 - DNA, 430 bp, Homo sapiens
acatatattttcagtaaatgtgtgttttacatttactgaaaaggttccctgatgttcagctctgccaccttctcatgaaggggttccctatatttgtataatcttatctctgattctctagttggctccactagctattcattgctccagggcaaatattcttgtctgaactactgtagttttgtcctaggcgtttgctccttattagtgcaactcctgtaggtatttttcttcaataaaattgccttgcagaggttgcagtgttcagacatagcgccattgcactccagcctkggcgacagacatgtatctgtatctaatcatatatctttatctcatatatatatatatataatatatatatttaagagggcaaaaatatgcagcagtatttccaaatatttagtgcttgtagtttttctcttaattt

SEQ ID NO: 634739 - DNA, 430 bp, Homo sapiens
acatatattttcagtaaatgtgtgttttacatttactgaaaaggttccctgatgttcagctctgccaccttctcatgaaggggttccctatatttgtataatcttatctctgattctctagttggctccactagctattcattgctccagggcaaatattcttgtctgaactactgtagttttgtcctaggcgtttgctccttattagtgcaactcctgtaggtatttttcttcaataaaattgccttgcagaggttgcagtgttcagacatagcgccattgcactccagcctgggcgacagacatgtatctgtatctaatcatatatctwtatctcatatatatatatatataatatatatatttaagagggcaaaaatatgcagcagtatttccaaatatttagtgcttgtagtttttctcttaattt

SEQ ID NO: 634740 - DNA, 585 bp, Homo sapiens
caaaaaatcataaaaagtgaaaaattttcctatgcagactaatttagatattatgtaagcaatagagaaattagcaacctgtggcgagggcattttataattaaagcttacatttattatggaatactaaagtacaggtgccacagtatgctatagtgtttgaatgccaagattccagctgtagatttcaaaatgacatttactttagaatgttatattttattcattttgaattcaatagtaaggagattaactgttcttttcttacaatgtagatataaatttaatggaaaagctatttttacatccagttttagtacaagtatactttgattaatctgaaacaaatttattgagatgttrggttgtataattgtcaacttcaatgttatacagatcaaataatattatagtgatccacactctgcatatgtaatttctgcaacaataaaacaggattaagatgaatgaggtgatcaaatgatcaaatacatgacataagagttgtataggtatatctgctcactccttcacattgggaacttattttattagtacaaggataattatttttctaccagtact

SEQ ID NO: 634741 - DNA, 599 bp, Homo sapiens
aatgtttgtaatatgtaagaatgatatgaaatgtatcttctagtatttaaatattaaaacaaaagactctggctattgagttttacatttaaaactttccattgacccaaggctctctcttcatgatgggtacctctaatccttatatgtaacttaatagttttgcatttccaacatctacatccagccaaatttgatttattttatgaagaaaaataattttgtaagattcacaatggagtttaatgtcatataatcaacagaaaagccagagttcatgttaggactttttctacatgattgtgttttgaatcttctgcmtgtatttttgaatgactccttagagattttttaggtctttggctcgtgttaagaggagttgttaaaaaacacctaattaagaaagtacacagggattctgtggtcccggtatactccctttaagcagatgtattccttgttaaaagtttacttaatgaaggtcatagagaaattcaactgaggtgaaatttatctttatgttacgtatttgaaattcagataaatctgctctttagaaattgctaaaatatatatttttggtagctgatgaataaaaa

SEQ ID NO: 634742 - DNA, 646 bp, Homo sapiens
catatgattaatggcatattattcacactgagaaaaaaaaacagttaaactgaagacaaatataaatcttctgaaaaaacataatgagaaacaagttaaaaaattaaaaatgaacaaactatcattgagttgtgagacaatttcaaacattctcatttatgtataactgcagtttctagaaccaatgaaatttagaaactcatacatccaaaatgtttaacaaaacttaagcacaggtgttaaaaaatattataccaaggagcatcatgattaaattactcaaaaccattaataatgagaaaatctgaaaggtagacaacgatatgttatatatagaataacaaagataaagttgttagcagatgtctcatctcaaacaatgcatgccaaatgacactgcagaaacatttttaaagtattgaaaatgaaaagaaattaatccaactgagaatttctcaaccaatcacaatgatttttgtaaagagatcagctgaattgaaagagaagaaactgagctgtcaggtattggaacagctaatccaaagaacatgtaaaaaaattaagaggtaagmctttagacacttagtgcaatagtataagcaagaggctaaaacaaaagaaattgttgcatctccttttttcattt

SEQ ID NO: 634743 - DNA, 578 bp, Homo sapiens
gacttcaccttgtatccgtgtgagttaattctcctaataaactccctttcatatatgcatatatcatattagcattgcacctctaaagaaccctaatacaatattttatttaatgtgttaattacatcccatatgctaggacttatrttcagtaattttaagtgacctgtcctgtaaacaaatgtattcataactactgatcttaaagacatcaagtgtattctatacactgtactttattgaatggaagaaaaaaatgcataaatatctaacactgtgacatctatatctaatggttcactttgtttacattgaataaagatctataaattacattttaacgtttggaccattcttcaaatgacaaaatatatgttttctattatctcttcttagtatataatttttccccttgttctaaagattcttgaggtcaagtaaaaaaaataagtcagaatgatggatttgatggctgtgtgggggaagacataagttgaagctgggaaatgtggatgggataaatttagaaacttaatcctgtttgtgatctcttaaaaaatcaagggaaacttggcagc

SEQ ID NO: 634744 - DNA, 456 bp, Homo sapiens
atatctcctgttaatatgaaagtaggaatgaattttgcttttgagtttcttgttcacatgtcagaaaaccatggagatattttcttttcagcttcacaaatatttacagagtgccaattattgtcttaaaagaagggactagtagaaatagaataataccagatcattgccagagtcaacagttctttcatcatcagatcacctttttagtgaccttcccacctaagtgcagatccaaagtgacagtaacatttcgggagctcagtgacaatagctgatctcggtgaggaygatgcaccatgcactggagaagctatcctgcttatgcctattttcctcagatagcctggggctgctctaagttgcctactacatataaagacttcctgaagcatagtcatttttcacagtatatatttgaggataatctggtttttaggactattgcatcatatg

SEQ ID NO: 634745 - DNA, 644 bp, Homo sapiens
tgaacttgaaaactctttttaaaaaatcctggttttgcaggacagctacataatgaatgtatatattaagactgtagctgaattgcacatgaaatcagattgccaacttcttgactttcaatgttagacatttatccttaagttgtgagcgatatatgtagcatgctgtgaaatgtctgttatagctctttaattcatcagtattaatacagaattatcatttgcgtttcttggtactttttattcaawgtaatcagaagctgtgatgttttgcctttgtagtcctgtgctttgttactgtaattttttttttttttttacgaagcacgtgactggactaatgtaaggcagatgacgtgatctttaagactgctatatatatcagtctcttactctataaggttttaaattagaataagcttttatcaaatagataattgatgcaatttaggattcacgcaagtttcagtgtcaaatggcggtcttatagtttcaattctgaaaatagcaaacttaataaacagccactttaaacttgttctggcaaaccagaccctgctgtagatatagtctaaggtagttaaccatataagccttttcaactcttaatgccctccacatgaatcagcagttaagaaggttct

SEQ ID NO: 634746 - DNA, 483 bp, Homo sapiens
ttacagtgtctgagaggatgaagaaagtatagtgaatttggtaaccaccttggactcagcagtgcctgggrcctcaccacaggagctaagcactgggaggcactgcaattttagtggccggaaaatttgcgaaaattcgcgaaaattctgagttgtaaatgtgaccaatctcaagaagcccccacagagcagagcagtgggatataaaagctgaccatgggcacaggggcggggctccagcagcacccagaatccttggcaggatgctggatcctgggctcagtggtacaggcctatccatcaaagctgcatctgtgggcagaggcttaggttcagggcctggaggtgtgcagtctgtgaccaccaaaaggcacctcctggccagatggagcctggaggattggcttctgaacccccagttacaaaggataaggaccacaaccacatctaccagttgaaaggttcagaccaaggttgacaaag

SEQ ID NO: 634747 - DNA, 609 bp, Homo sapiens
tttctaatctggtgttctgttactaaagcctactgccatttggcctcacatttagagggccttgaagaagagctaccttcttaaagcccaggagaaaacccaggagaaaaaaagggaaattattttgcctaagggtaaattttattaacctcaaattatatttattacatatcatcgtgaagcagatggctctttcctgcttaaaaaaaaaaaaaaaaaaggtgggcaggcatggtggctcatgcctgtaatcccagcactttgggaggccgaggcaggtggatcacctgatgtcaagaattcgagaccagcctggccaacatggtgaamccctgtctctactaaaattacaaaaattagctgggcgtggtggcacatgcctgtaatcccagctacttgggaggctgaggtaggagaatcccttgagcctgggagacagaggttgcagtgagctgagatcgcaccactgcactccagcctggctgacagagcagactctgtctctcatactcaaacacactcactcacacagaagtgttaagcctatataacttgagggaggatttatatttggatacacaaatgagagttatttattttacggaaaaa

SEQ ID NO: 634748 - DNA, 400 bp, Homo sapiens
cttaaaggatggagtaagggcaggaagtgaaggataagatggggtctgtgtagaaagggaatttgggcaaagggaatcagcatgagctaagaaacagacatcacaaacagtctggtttatgagaggaactccaggcagctggataatgctagaacataaaatatgagggtggagcatggtgagaaactagattggagctggagacaggagctaggctatggagagcctgtaaactgcattctgcagtgtgaactttgtcctgtaggggctgggcaggcaacactttacagattttcagcacaagagtgactaagtttctgtgatctttgacttaggagattcttttcaaagggaaactgcagtgtggactcaaaagctgcygaactgggctttgggaatt

SEQ ID NO: 634749 - DNA, 601 bp, Homo sapiens
attctgacctctcagcacagcagkaactcaggccccttgtactcttcagaaccgctgtacatcttacctctcaagctgccatttgtaactatttccaccctcccttcccatcttctttaatctccacagtccccttcctcattatctcacccagggtctccatgttacctggttgcctgtacttctttctgtcaaactatgctcctttacgactcactccttccctagctgcataaatggctctgcctccctaagccttccttggtggctcctccccacctgatccctcccttccatgattcctttttattctgagcaattgagtgcattcatctatttgtattagtttacctgttccaacttcttcacgcacaaatccctgaatctgccatgcctttctcactcatgatgtttgttccctctgcttgaaatgtcctcctccttgcctcccttctaaactctgccttatctttccacacacagcagaaatgtcatcctgaccctaaggcttgcttccatcacctcaaagacagattaaatctaataggactttgttcacctttattaaattatggttttttgcttaggtcatagcaacagc

SEQ ID NO: 634750 - DNA, 563 bp, Homo sapiens
gcttgcaaatgatgcccatgctgcaggatcccagcccatactttggtgacaaggagctggagcacttgtgctttgtcattctctcttckagtacttccatagagaagatagcgggcctatcacctctaagcctgaaagtaacaatagcaatagcaataaaagtaatgatattactattaaaataataaaatcatatcaataacagcaagactttgatgtgtgtttcttcctgccaaacactgtgctcaagttacactttttaaaaatattcaacaagaagatgtaaaataattgctcattcttaccttgagttctttactactcaaagtgtcttacttatattagctttttagacttcacaacaacccttattgtcctgggtgctgctgttatcattccattttggggaagaaggagctgaaatacatagagatgaagttgcttgccaaggccaccaagtttacaagcacagagctgggtttagacacaggatgtatgctagtaatgaccctgctactctgtctctccaggcacttgggccttggagttgtgagttacttgcc

SEQ ID NO: 634751 - DNA, 517 bp, Homo sapiens
tgatgtgtgtttcttcctgccaaacactgtgctcaagttacactttttaaaaatattcaacaagaagatgtaaaataattgctcattcttaccttgagttctttactactcaaagtgtcttacttatattagctttttagacttcacaacaacccttattgtcctgggtgctgctgttatcattccattttggggaagaaggagctgaaatacatagagatgaagttgcttgccaaggccaccmagtttacaagcacagagctgggtttagacacaggatgtatgctagtaatgaccctgctactctgtctctccaggcacttgggccttggagttgtgagttacttgcccacagtcatgctaatcaatagtggagctagggttcaaaactccattggctttactttacagactgagctattgggagaggaaatgaatgaggtatagaaagtgctagacacagttcttggcacatcatggatactcataatttatttctttattcctttttcccact

SEQ ID NO: 634752 - DNA, 517 bp, Homo sapiens
tgatgtgtgtttcttcctgccaaacactgtgctcaagttacactttttaaaaatattcaacaagaagatgtaaaataattgctcattcttaccttgagttctttactactcaaagtgtcttacttatattagctttttagacttcacaacaacccttattgtcctgggtgctgctgttatcattccattttggggaagaaggagctgaaatacatagagatgaagttgcttgccaaggccaccaagtttacaagcacagagctgggtttagacacaggatgtatgctagtaatgaccctgctactctgtctctccaggcacttgggccttggagttgtgagttacttgcccacagtcatgctaatcaatagtggagctagggttcaaaactccattggctttactttacagactgagctattgggagaggaaatgaatgaggtrtagaaagtgctagacacagttcttggcacatcatggatactcataatttatttctttattcctttttcccact

SEQ ID NO: 634753 - DNA, 582 bp, Homo sapiens
tatcaaatggcatttaaatgaccctgctccctaaaggagccaagtaatgtcagtggcatggacagaggaagggagagggttgacagtaagtcacacccacttcctagagtgaggcagccartggggtgatcaaagccagcccccatatctctgcaggctcatcctatgcctggcagaactggcaggaaaggaatataggtaccctaaggcagccgttgctaccaagaaaggtgatctgtgtccatttgtcaagcatgattgggagaaagtgatcaaaagggctgcagtgaaaccaggaatggactgaagcagctctgagagtccatgtagctttggcactgaacttgaggctgactctcccaacagaagacacatttccccaggggttctaagacgagcagcatggaggagagcctggatattgctatggtttcttagaagaagctgtagcatggtgagagtgcctaactccttgtctgtgtctccatccaagctgactataatctccgtcttatgttctatccttagcatctagtacagtgcctagcatggagagagtgcttgattaacaatatttgttga

SEQ ID NO: 634754 - DNA, 563 bp, Homo sapiens
ggacagggtctatagaagaactctaacttctgctcagttttgccataaactattctaaaaaaataaaactcattaattaaaaaagtaatgggtagggctgtgggagtggtggtgaggacagtggtataactgagcatcacagaaataaaggatatgagagtaggtccttgccctcggacttatcctagaggtagggagaatgcataaatgcacagaattcttgctcaaatctatcaagcacctcctacttgcctgtcacatttacatcrcacaatatcttcacaaaaatcctgcactgtaattttggctcagagaaaatcaacgatttttttctgaaagtcacatgaccacaaagtggcaaggccagattcaattgctgttcagctggctctacatccggttttcctctgtaactaactgctggaaaggtaaaagtggtgagtaagggaaaggtttgctttactaaacacatcacgcttcagaatcaactttgtatacatgatacacagcatgccaatggatgggctgagtttgtgacaagagggaaaacacaaaaccacatc

SEQ ID NO: 634755 - DNA, 563 bp, Homo sapiens
ggacagggtctatagaagaactctaacttctgctcagttttgccataaactattctaaaaaaataaaactcattaattaaaaaagtaatgggtagggctgtgggagtggtggtgaggacagtggtataactgagcatcacagaaataaaggatatgagagtaggtccttgccctcggacttatcctagaggtagggagaatgcataaatgcacagaattcttgctcaaatctatcaagcacctcctacttgcctgtcacatttacatcacacaatatcttcacaaaaatcctgcactgtaattttggctcagagaaaatcaacgatttttttctgaaagtcacatgaccacaaagtggcaaggccagattcaattgctgttcagctggctctacatccggttttcctctgtaactaactgctggaaaggtaaaagtggtgagtaagggaaaggtttgctttactaaacacatcacgcttcagaatcaactttgtatrcatgatacacagcatgccaatggatgggctgagtttgtgacaagagggaaaacacaaaaccacatc

SEQ ID NO: 634756 - DNA, 229 bp, Homo sapiens
acttattgtgtgatcttcagcaagttactcacctcggctttctcatctatacaattatgagtacctatctcaaagggttgctatgagcattaaatgagttaatgaacataaagcattcatcacttaccatgcttggcacatggtaagtgctcagcaaatgttaattgttgctagatctrttgtgggcaatgatatttacacttcttggacaaaattggtttgatggtgc

SEQ ID NO: 634757 - DNA, 532 bp, Homo sapiens
gacaagcctgtatctctcatgcctgcatctcagtatcccatcaaggcttccaggagctgcagtgcccccatcttcaacctttggagagactttggatctgatgctttgatgtgtgcgtatccgacatccccagacagcatgacactgaaccaccctgactatgttccactgattcctcccaacatcattatgatgctgagaagattctccagagatgctgctggagagtgcaaagccccttgaacctggctgaggttgtagcaatggaccattcttatacctctggggtcttggccccaactgatgttgtcagaatatgctgggccctgactcatctcctggggctgaagcaagacagtgcygcacctctgaatttggagctatgtgcctctgatacattatcttaatcctttgaacccatggctactgaatatattgccaaatgtggctgtccctctgaccataacctaaccctactagccaaagaaggctccacccaagcacaatttgagcctgggattgtctcagtctc

SEQ ID NO: 634758 - DNA, 608 bp, Homo sapiens
agcatcttaaatctccacccatgggtgtgttttttactattgtaatgagcaaaagatcagtttgaggacaggtaaaatcaaaatgtgcatgctctctggaagggaaagtccctactaaagatagctttgcttgagtgagctcrgttacaatatgactgctaaggcttattgtattggctctatggtcaccacggtcactgcatcccaagtatatgtcaggtccttgacaacctatcctgccaaagaatcaatcacaaaatttgacaatatatcagtgtgaatagaaaatatcaatatcttctttaaacaaaatgaaaaaaattcaaacattctgaattatcatgcaataaaatttgaaatatttttgaaagtcagaaaatgtacaggtccttttcctggtaggttaaatttttttattgaatggatctcagatttgagggaagcacaaatcataaaagccaaatttccacaaaacaataaatatctattaagaatatgaactgtagagcaagatagtctgattttgaattccagcttctcttaccagctagtgtgaccttgaaaattacttaatgactcagtttcctcaatgtaaaatggagatagca

SEQ ID NO: 634759 - DNA, 630 bp, Homo sapiens
cagaaaaatgtataaagatgtaattttgtgataatcaacaaccaaaagaggagaccatggagctattacaggagcagagtttttctatgttaataaatttaaactggcataaattcaaatttgaatgttataactttagaatgttaaatgtaatcctcatggcaaccacaaaaagatagctatagaatgtgaacaaaagaaaataagaaagaaatttaaacatttcacaataaaaaatcaactaaacacatttaaaaagcattaatgcaggaatatagggaaaaaagctataagatataaagaaaacatatagaaaaatgagagaagtccctccttatcagtaattacttttaatgtgaatgaaataaacagtacaatcaaagacagggattggcagaataacaaagtaacataattcaattacagtgatgtgccaccataacaacattttggtcaatgacaaactgcatatatcacagtgggcccataagattataaaaccacattcttactgtacctcttccatgtttagagacacaaatgcttaccattgtgttacaactgcctatagtattcagyagattaacattctgaaccagtttgtagcctagaagcaataggctacaccag

SEQ ID NO: 634760 - DNA, 489 bp, Homo sapiens
gagagtgatcagattcacttataaaarataattttaaatattcatgtttagaaacagtaacagattcccttaatattacatttggtgagtgcttaccatgtgccaggcactgtactgagctcttgacatatcttatttaatcatacagaaaagggcctaggatgggttattcttagtaagtataaaatttgatgacaactacacttctttcaatagatagtaaaatataattatatccactaaagagctaactttcttcactgtaaaagaaaaactactgagtttaaactcatataaaatcataaatataaaaattacaatagtttttaataatatattcaatggaagttatattcttcaatcaaaagaaatgctgatatctatgataaaacatagttaagaacttcagagcaatgttactaacatatactatagagctttaggaatttttcttttgtatattcacaactgatcttacatatcatgtat

SEQ ID NO: 634761 - DNA, 489 bp, Homo sapiens
gagagtgatcagattcacttataaaagataattttaaatattcatgtttagaaacagtaacagattcccttaatattacatttrgtgagtgcttaccatgtgccaggcactgtactgagctcttgacatatcttatttaatcatacagaaaagggcctaggatgggttattcttagtaagtataaaatttgatgacaactacacttctttcaatagatagtaaaatataattatatccactaaagagctaactttcttcactgtaaaagaaaaactactgagtttaaactcatataaaatcataaatataaaaattacaatagtttttaataatatattcaatggaagttatattcttcaatcaaaagaaatgctgatatctatgataaaacatagttaagaacttcagagcaatgttactaacatatactatagagctttaggaatttttcttttgtatattcacaactgatcttacatatcatgtat

SEQ ID NO: 634762 - DNA, 435 bp, Homo sapiens
tattctgatatggatgggggatatcatatattcatatattctgatatggatgggggcaaataatcacatatatatgattgtatatgagatatatatatatatatatagagagagagagagagagtgtgtgtgtgtgtgtgtgtgtgtgtgtgtrtatatttttttttctgttattgggcataacagatgacccactgatacttctgccagtgggagctgtttctaggatttattcatcccttaattggtctgttaggtactgtgttcatttgctagggctaccgtagtaaaataccacaaactgggtggcttaaaaattaatagcaaatatattttcctacagttctggaagctagaagttaaggtaccagaaggtttagtttttttcaaaaggcttctctccttggctcacagatggtcactttcttgcgtgtc

SEQ ID NO: 634763 - DNA, 395 bp, Homo sapiens
ccctcttggtgtgcattctctgggttttgacaaatgygtaatagcatgtatccaccattatagttttcatactgaatagttttattgccctaaaaatctcctgtgcttctcctatttttcctttcctgctgaacccttcacaacctgtgatctttcactgtcatgtcttttccaaaatatccgtattgttggaatcgtatagtatgtggccttttcagactggcttcttttacttagtaatatgcatttaaggttcctctgtgtctttctctggcttgatagcttctttttgaatcactatctaatattcagtgtcatggatatgccacagtttatatattcaagtattgaaggaccttgtggttgctttcatgtttttagcaattatgaatgaa

SEQ ID NO: 634764 - DNA, 571 bp, Homo sapiens
aggataagttccaggcctggcagcattcgccacaagctgacaagagcctttgggccttaagtgaacatcaatggtaacctggcagtactccctgtggccctgtggtggtggtggccatgggatggggctcctctgcctatggaaaggggagagaagagtaggaaagactgtgtctcatggtttgagtgccagctcagctgcaatatagtagaacaacaggtagatttctgaagcttttgactgcagtccctggctcctggacaacatctctggacccacctagggcctgggggaactcactgccttgaaaggaacaacacagcttggctggctttaccacctgctgattatacagtcctaggtccttgaacaaacacaggcagtagccaggtagcagttwcagtgggctttgggcaagacccagtgctgtgctggctttgggtttgacccagtgccgtcccagtggtggtggccacaggggtgcttgtttcaccccagctccaggtagcttatcacagagacagagagagactttgtttatttgggagaaagtaagagaagaaaacaaaag

SEQ ID NO: 634765 - DNA, 583 bp, Homo sapiens
acattaatgaacaataagaaattatatgaagatacaaaactcactggtaatagtaagtacacagacatggaatattataacactaactgtggtgtgtaaactgctcttaagtagaagactaaatgataaaccaataaaaaataataactagaacttttcaagatgtagacagtataagatataaatagaaacaacaaaaagttaaaaacagaggatgaagttaaagcatacagtctgttagttttctttttgcttgtttatctatgcaaacagtgttgttaccagcttaaaaatgagtataaggtagtatttgcaagcctcatgataaactcaaatccaaaaatatacaatgcatacacaaaaagtagaaagtaagaaattgtatcataccaccagagaaaatcacctttactaaaaggaagacaggaaggaaggaaagaaggaaaagaagaccacaaaactaccagtaaacagataacaaaatggttggaggaagtctgaacttaccgataataacatcraatgtaaatggactaaactcttcaataaaagacatagagtggctgaatggatgaaaaaacaa

SEQ ID NO: 634766 - DNA, 418 bp, Homo sapiens
gttggtcctgcatccacaagcttctaaccatatattggagaagaagaagcttctggaaataaagagagggtgtgtcttgttccagctgcagagatatggaagatatgcaaaggggcggggggctccatgaatgctgctggaagtcaagtacagccaccctccctctgccttgtactgccgcctcatcagcctccttgtcctcccgtaaacatgccaagtccacttccacctcagccttcgtgctsactgacactcctccccctggggtgcataggccccaggtatctatgtggttcgctcccgcacttcaagtctttgctcaaacaccacccccttagagaagactttccttgaccatcctatctcatgtagcatgtcactactcttaccccattacttgctttatgttatttatttt

SEQ ID NO: 634767 - DNA, 577 bp, Homo sapiens
atgacttataattttaaaaaaacttaagttgaattatgatagcccatgccacatgattcaataggggcgaataatgtgagataagcagttaaagtaagttgggaggagaatcacaaccttaacttttgcaatgttttcttgtgagaaaacaaaaaagccagacagtttacatacttttttttttaaataggacttttcaaagatatgaggtaacaatgcatgaacttatgagaattaaaccttgttacatcatcacagtgtgctgggttcaattttcctttttgagggttttttttttcttagcaaatttaactatttataagggytggtatttcatgatcaagacttcttagatatatttttactccttcttagaggtctcccaaagaaaacagagtattactagattctttagtaatgaaacagaactcattccatcttgcggctaccacacggattcaatgaaactttttataaatatgaggtaacatcttgtcttatttttcctctatcttgaaacaaagttacttcataatcctaggtattatttcatcagtactcatcatcattcaattat

SEQ ID NO: 634768 - DNA, 590 bp, Homo sapiens
atgaagggaatgattaaaggacttcaggaatgtattttatgagaattgcaaatttaaaaaaccaaagacatctatttggtttgcctatctgattataaggatgtctttaaaagttaatgtagaattttagtcaggattccacaaaatgagcacttttatattcagcagatgagagtgtgaattgtataaaacttcgcaacctggaacgtaatttggatattattgtctaatattgagaataataatttagatttccagaatttcactgccaggtcattatcctgtaataaaaacataatctagataccatgtaaaaggatggccctcatagtaatattcaaaattggaaaaggaaggcygggcacagtggctcacacctgtaatcccagcactttgggatgctgaggtgggtggatcacctgagctcaggagtttgagaccagcctaggcaacatggcaaaaccccaactctaccaaaaatacaaaaaattagctgggcatggtggtgtgtgccagtggtctcagctacttgggggactgaggtgggagaatcacttgagcctgggaggcagaggctgcagggagccaag

SEQ ID NO: 634769 - DNA, 616 bp, Homo sapiens
gctagtcccagagaaacctgtttattcgaatatggatgatacttaccgcttcatggggaatgatgcaaatgattcttgctttacaatgtcatgtaattttataaaagaagaacatcagtggtatagggaaaattgtttggaaaaataaggatatactgtcactatatgggttgattttgctctctgaactatgttgtttataaagttgtttagaaataagctgtgttggaagagtttgttcagaaagtcaggaatggacagtgacttgtttgacattggtttcacattaaggttagaagagattaatagtgtggtctcccagccaacagcatcagcatcacctggtgataattgctagaagtgcacattgtgcagtcgtccagtcacaccccagacccgctgaatcagaaaccctgggcgtgggacccagcaactggtcattcatctaactttccaggtgattctgatgtctgctaggacttgagaaccactgcagcagttcactctttcaatgtcccttccagctctgaaattctrttactctaaagaaatgataataacatggtttctgtatcttctttactaggttatagtaggaagactaatgtatgtaaaa

SEQ ID NO: 634770 - DNA, 563 bp, Homo sapiens
tgacccccctcaggatatcctgttcctgtcagttcagtctctcttatcccaccaccaccgcctccgaaaaatgttgcccgaatgttggcgctagcattagctgagtccgcacagcaagcctcaactcagtcattgaagagaccagggacctctcaggctgggtatacaaattatggagacatagcggtggctacaactgaagataatctgtccagttcttactctgcagttgctctagataaggcctatttccaaaccgatcgaccagcagagcagttccacctccagaataatgcaccaggaaactgtgaccatcctctaccagagacaacagctactggggatcctacccattccaacacaactgaatctggggagcaacatcaccaagtagacttaacagggaatcagccacatcaagcatatttatctggggacccagaraaggccagaattacttcagttcccttagactcagagaagtctgatgatcatgtaagtttccctgaagaccagtctgggaagaacagtatgccaactgtctccttcttggatcaggacca

SEQ ID NO: 634771 - DNA, 613 bp, Homo sapiens
tggcctgggtgctcccttaggggctctagatttgaaggttccaaatgtaaactggaagacagtttacaattctgggctcacaatttagaaagaaataaaaacttttaagggcaggcacagacacatttcaaagtttccaagataagactgaaagaaatcagtatcacttaacttacagaaagaaaaaagatcacagccaatcaatctgtcacttttataagctaacagaataagagaagaaagggttaagatgaaggaccaagaattttggttaaataaaaagaacatcaagtgatattattaaaaagtagaaactgacagagatataaaatttgtaaataagtagactctgaaacagattacatcagtgtataatggtggtcttatctgaagattaagcagtttctcaaatttgttatagagtgaaatagacacagaaaaaggtggcagtcaagaaactgaaatccttgtagtccccactgctaacactctgtatagcttaggacascaacttcagtaatttggacctcagtttcctcacttgcaaaattagagggtctaattgtatgtctttttctctcttagttataaaaaagtatgattctaggctaat

SEQ ID NO: 634772 - DNA, 615 bp, Homo sapiens
cttatcataaatgcactcaatattttcacttaaaaattaactcaccaaatggaagcattttatgaaatatgacatgaaacttagtaattaagagcttccctacattctcaaagaagccaaggtgacatgcaataaaacatatataaacaatacgtgaatttggccatcttacttatttatatacaagctaaaatttgatttccaatcctatactctgacacctaaaaagaaacgcacttaattctggtaagttttccttaaggtgaccacaactaaaaacttcagtatatcacacacgatgaaagcattggacttttttggatcatttagcttcaggtacatgattaatactttttgagaaaaaatataaatgcccatatcttactctctcccaaagatagctgaaaactttgtatagaagaaagctttcctcctaaatgctttctttacaatgactaattcaccagtaggcaaaaagctcaaagaatgtagaataagtgaataaaagaactatactaagtgcttacatgatgrgggaaataatcaatgctacaaatgacatattttaagtctcattaagaacaagtcatggtcattaccttcaaaacagttcca

SEQ ID NO: 634773 - DNA, 598 bp, Homo sapiens
ctgccactcactagattaggtttgtaacttagcctctttgtgttttagtttcttcgtctaaacatggtaataataatgcctatctcataagggatgttatgagaattaaatgggctagtataaataaaatgcatagagtaaaatgcattgatttgttaactaaatggtctagtaacaacatgatctattaactacggcagcctgtttcgtacattattctttctgcagccgtggcaatttctaaagctttaacccayttatggcagaggttgcaaaatttttttgtgaaaaatcagaacttggcgatgaccttgagcagtaagatataaataactcccacaagcttagcgttccaataatggaacactaagcataaatgggttaatgcataagtaaatgctattattatcccagtatttggctaccagaactgctagagggctctagctcctccatcaaatggatattacacaaaatgccaccttttggatatatctgctgaagtttcctgactctcaaatatcattctttctaaaacattctaattcatttcaatatataaaatctgcaacttgcctgagagaaaagtccagattct

SEQ ID NO: 634774 - DNA, 411 bp, Homo sapiens
gaattcatataccatcaaattcacccttttrtaagatgtacaattcactggtttttagtaacctcacagagctgtacaaccatcatcactaaatctcagaacattttcatggccccaaagaaaaccctgtactcattagctgtcactgtgtctcccttccccctggcccagcacccactatctgctctatctccatggctttgcctattgactcgttctttcctaagccttcctgtatccccagcagccagtgctgcgagagtgtgtttgttgtagcccgattttacagatgagaaaactgaggctcaggaccccttgggaagctgactttcccttttacaagccttgtgtttagtgtctgcccacaactgggctgcatggggaggacagaaactcagcaggagaagaaat

SEQ ID NO: 634775 - DNA, 579 bp, Homo sapiens
aggttatgtagcttgcccaggctcctgcctgcaggagatgggtctgatacacccgttgttttagggcgattccacagggttagggacctggagatgctgctgcctctcggatacgcgtttctgcattggkgagggggccgggcccagccgatctcctgtccccgcccactccggatgcggccgagtcacgtggccggcttcttctgcagttccggggagtttgggggaccagatttaccttggattgcccctccctctcctggctcgggcaccccgaagcacgacgcagagtaggaagagtttaaagacctcgaggcctctgggcacttgagtttggcatgttaatttttatcagcgacttctggggcctagcaccattcccggaagaagggagttgtcgggcagggtccttaatgggggttgcaattcttgtcttggttgggaaagagcctagctgggaacaggggtcgtttgtgtagtaactgtattaagcagttctggtgggtttgttgtaactgttcggtgtccttggggtcccatctagcattgtggggtcttggctctttctgaagaggagtc

SEQ ID NO: 634776 - DNA, 485 bp, Homo sapiens
ttgtgcattcaattcaaggcttctttacatgcctttacgtgccaatgagaagaaatagatattaaaccagacttgaacccagctctcgagttgatagccaggtacatggttattctaacatccgmaaaactgagacaagttctgtggtagtatatgccttaaaaaaaaaaagaaacgagcgggggactccgggatgattttgttgttctagaacagtgaccacagcctcacactctgcaggaaaagactgggtcgcaaacaagtcagaggcaaacccagaaagggaactgggggccctaatcctataaacggaattaagggtgtaaacggagagcgatgcctgggagtggggtaccttgcagagcataccgggggttgtagtcggggacattccacagcaccgcccccgcccggactcccggcgctccaggtggagacagcagcttgaccccgcctcccgcgagcgaccctacatgaatatgagg

SEQ ID NO: 634777 - DNA, 613 bp, Homo sapiens
tgatcttggctcactgcaacctccacctcctgggttcaagcgagtctcctgcctcagtttcctgagtagctgggactataggcacgtgccaccacacccagctaatttttgtatttttaatagagacggggtttcaccatgttggccaggatggtctcaatctcttgacctcatgatccacccaccttggcctcccaaagtgctgggattataggtgtgagccactgcrcccagctgtgagaggatttcttgaggccaatagtttcagaccagcctgggcaacatagtgagaccccatctctacccccccaaaaaaaattagtcaggtgtggtgatgcacacctgtagctccagctactggagaggctgatgcaggaggatcacttgagcccaggagttcaagactacagtgagccatgattgtgccactacactccagcctgggtggcagagtaagaccccatctctaatacaatacagtaatataaaaatgttgtagaatgcaaagtattgttcctgggtgtgtctgtgagggtgttgccaaaggagattaacatttgagtcagtggactgggagaagcagacccacccttagtctggcgtggcaccatct

SEQ ID NO: 634778 - DNA, 580 bp, Homo sapiens
ggctgctgctggacccctgcttcactggcactaagtggggggtgttggtatgtgaggccagaaccccttgtgccagggcagttgccccacacccatgccacccgacacccaccacccacccacagtagggaggcagccacagttcagctgcaggtgatgggttggggcggggctttggcctcatttcccatcccctcctccctgttttccccmctcctctgccctcctcctcacagctctgctgaagctgctcctggcactgctgtctcctccccagggggctccttgggcccgatgcccacattcagcaagctcaggccttctgactcggccaacttctgggccagctccaggccctctggggtcaatgagtacctgggaggcagaggggacaacacagctctaccttcttcactcattcctggcaggctttcctgcctgcccccagctgggctggcctcaccacccccttggcgccctgcacaaatgaccccagtggctcctgctcctcctggtcttcttggctcttagagcagttccttgggcctgctcagcgccattctcaggtctgcaagaagtg

SEQ ID NO: 634779 - DNA, 560 bp, Homo sapiens
taaatctgtaccaagtgtgttcgcttgtaagagctgtggayccacaaccccaagcaaagggtgggatgcacagtggtctcatgatttctcactgtgtcatgattgccccaagctctttgctaaaggtacccaaaaaacccagttttgccagctttcggaggttgtacttggtgttctggaggtgaactaaactctagtgaaatgaaataaaaagtctcacacattatgtcaaggataccatttagacacatttcctaagttcctgtttagaacttagcaactagaaatgtcttgttagtttatacgggaagtgttaaggggacttttcattataactaaccacaaagaaatcctctaagctagtatttcccaaagtgtgatatatatattatatatttgattatttcagacattattttagttgctacccaaacattttctttcagtagttatattagaaaaaaatattaatataactaatacattaaacctgttatattactgacttaggataatcatataaagttcactgttttaagtaagataagcagatcagtttg

SEQ ID NO: 634780 - DNA, 560 bp, Homo sapiens
taaatctgtaccaagtgtgttcgcttgtaagagctgtggacccacaacyccaagcaaagggtgggatgcacagtggtctcatgatttctcactgtgtcatgattgccccaagctctttgctaaaggtacccaaaaaacccagttttgccagctttcggaggttgtacttggtgttctggaggtgaactaaactctagtgaaatgaaataaaaagtctcacacattatgtcaaggataccatttagacacatttcctaagttcctgtttagaacttagcaactagaaatgtcttgttagtttatacgggaagtgttaaggggacttttcattataactaaccacaaagaaatcctctaagctagtatttcccaaagtgtgatatatatattatatatttgattatttcagacattattttagttgctacccaaacattttctttcagtagttatattagaaaaaaatattaatataactaatacattaaacctgttatattactgacttaggataatcatataaagttcactgttttaagtaagataagcagatcagtttg

SEQ ID NO: 634781 - DNA, 560 bp, Homo sapiens
taaatctgtaccaagtgtgttcgcttgtaagagctgtggacccacaaccccaagcaaagggtgggatgcacagtggtctcatgatttctcactgtgtcatgattgccccaagctctttgctaaaggtacccaaaaaasccagttttgccagctttcggaggttgtacttggtgttctggaggtgaactaaactctagtgaaatgaaataaaaagtctcacacattatgtcaaggataccatttagacacatttcctaagttcctgtttagaacttagcaactagaaatgtcttgttagtttatacgggaagtgttaaggggacttttcattataactaaccacaaagaaatcctctaagctagtatttcccaaagtgtgatatatatattatatatttgattatttcagacattattttagttgctacccaaacattttctttcagtagttatattagaaaaaaatattaatataactaatacattaaacctgttatattactgacttaggataatcatataaagttcactgttttaagtaagataagcagatcagtttg

SEQ ID NO: 634782 - DNA, 560 bp, Homo sapiens
taaatctgtaccaagtgtgttcgcttgtaagagctgtggacccacaaccccaagcaaagggtgggatgcacagtggtctcatgatttctcactgtgtcatgattgccccaagctctttgctaaaggtacccaaaaaacccagttttgccagctttcggaggttgtacttggtgttctggaggtgaactaractctagtgaaatgaaataaaaagtctcacacattatgtcaaggataccatttagacacatttcctaagttcctgtttagaacttagcaactagaaatgtcttgttagtttatacgggaagtgttaaggggacttttcattataactaaccacaaagaaatcctctaagctagtatttcccaaagtgtgatatatatattatatatttgattatttcagacattattttagttgctacccaaacattttctttcagtagttatattagaaaaaaatattaatataactaatacattaaacctgttatattactgacttaggataatcatataaagttcactgttttaagtaagataagcagatcagtttg

SEQ ID NO: 634783 - DNA, 560 bp, Homo sapiens
atataaactagtagccacctgagatgcaatctaagagcagcttccagctctctgttgttcaatattaaattaaattattcttcagaaaaggtcagcctaatattctctactgaaaggaagacacataattcaaagttatggataatagtccaaaatcatttcctttggccctgtagataatgtcttgagctagctaatattgggaaactagatgatattcattttttgtttgaatctaggcagctgagcagcttaagcacatgctgaacttttatctactgtcttatttaaaatgtctatgatggagatttctctctaaagacataatttccttcttccggcaatgtgttgactgagtagttttgaaaaatgctctgcatcaattcaggtatcttgagaaggcattaaaaattgctattcttagtgtccctttctatgactgagttgctgttttctycctctacttatacctgtcataatcagctaaatcagaggaaaacaaattacagaataatgaatagccagaaccagaactgtttttggaagtcatacattctagt

SEQ ID NO: 634784 - DNA, 633 bp, Homo sapiens
cgctgggaatcgaacagcccgggagagcagcttccagtataacgcggyggctgggtcggggagcagtgagccttctcctccgccccagggcacggatacaagatgggttagcccgaattgaacgcttctagaataaaagagcccttattgtactacatgcaaaacagaagcgctgcccagtttactatatgcaaaacagaaaggccctcaatgaacgcactttaaaaaataaaaaaggagcccctcccattttcatgctggagctctttccaaaaagcacacaccgagtggcaggtctcctgccacctcctcgctctactgtgcactcgtctggctttcgtgcccttctgcagggagttgggttgtgtttctccagcccgggcactgaggccacggcgtgctccgctaacgacgcggtgttacaacgaagctgaagctgggtggctaacggggcctggagggaagaggcgggcaaaagcgcccccgccccttcttcctccggtctctgcctgccgctgcatgcaaagcagaccctaatgtatgcacgcagagggaggggggctcgcgagcacgtttctgattaagagagggggaggaggagagcgttgggcattatgatacactgggtggaag

SEQ ID NO: 634785 - DNA, 540 bp, Homo sapiens
caagacagctgatccccatcaaaattaagctgctgggcttagaaagtgttttgggggaaggggttgtattttattttgcaggtggtttttcttcttttgacaaaatcattaggcctttgaaggacatttttgatctaagcaaagcaaagataaaaggtagtgatagaaggtgacgttttcacttgctccctaacacttgtgagtcaggcaaggaagaaggacagacgtgactcgtctgggacggtctgcaccggagcatgtggggggcctsgtctgtgcgcaggtcagcccttctgtgggtagtggttttctcaagatgccactacctggctcgggtctccgtgaccttgtcctgcagctcgttgcctagacaaccagcaggcgggagcccagacgccggtccacacaggcagttatcagggccagaggagtggcagagactccagcgagcactggggcatccatggcacccgaggcttccaggcgcctcctgcccattccacacaaagcagaaatctggcagctggaagcagcatggtc

SEQ ID NO: 634786 - DNA, 642 bp, Homo sapiens
cctctttccttacagcacaactttttttaccaataaaaaatttaacttttttgatgttaaaaccattaccttctccttaaagcataaattaacttttgctgttcttgcctaagtctagaatgtatgtttgtatgttgatacacaaattcaacataamttaacaacataacttacaatttccatacctgagataagattttatgttctgccactctcatcctttatggccttttgtccaagttagcatgatatatttcttctattcttagtcctcctcttccttactactgatttaaaatctctcaaccttcagagtacttcttaaactaggtaaaattcacaccaatactaaaatcatcccatgtgtacacatacataaataatcctgaatacatttaaacatgtgaattaacaaaaatatatttgcagtttctgaaggtaatgcctggtgagtgagcacagaccatcaaacgatgtctgaggacagaggaagcagctccacctctttcctatcatcacagtgaaaggacaatgattcctctacagtcattccatcttccactgcttccgtgattagtagcggggaagtatgtcactataaaacacacacacacacacacacacacacacacacacacacac

SEQ ID NO: 634787 - DNA, 642 bp, Homo sapiens
cctctttccttacagcacaactttttttaccaataaaaaatttaacttttttgatgttaaaaccattaccttctccttaaagcataaattaacttttgctgttcttgcctaagtctagaatgtatgtttgtatgttgatacacaaattcaacataaattaacaacataacttacaatttccatacctgagataagattttatgttctgccactctcatcctttatggccttttgtccaagttagcatgatatatttcttctattcttagtcctcctcttccttactactgatttaaaatctctcaaccttcagagtacttcttaaactaggtaaaattcacaccaatactaaaatcaycccatgtgtacacatacataaataatcctgaatacatttaaacatgtgaattaacaaaaatatatttgcagtttctgaaggtaatgcctggtgagtgagcacagaccatcaaacgatgtctgaggacagaggaagcagctccacctctttcctatcatcacagtgaaaggacaatgattcctctacagtcattccatcttccactgcttccgtgattagtagcggggaagtatgtcactataaaacacacacacacacacacacacacacacacacacacacac

SEQ ID NO: 634788 - DNA, 348 bp, Homo sapiens
tgatgtcagctccaggctgcaggcagcaaatgctaagcacttactatgtgccggccaccacgatgcactgcaggagacaaagagagccaggaaccgcccttgtccctgctgtccctrcttcacatctctagcaagagctagcggggtcgtgaggcctgtgaaacttggcgtggcacccagcagcgtgctcagcgtggagtgggtgaaggcaccagtgacggatgtgctgcaggagcacacaggaggggtgcctaacctaaatactgacaacaactaacactgagatggcgcttcctgtgggccaggcagtgctccagggcactctaactcattcaagtaggccattta

SEQ ID NO: 634789 - DNA, 610 bp, Homo sapiens
tgacattcccgaggtaggacagtgaaggtgtatttttggctttgttagttgaaagaaaactgcttttggtgatctttactaacagayactaagacaaagcactcagcagatcaataactgcatgccagttactaggggataggttctcaagtaatgaaatgacatctggaacagcagctgcaattagtcactactcagttaagtttatgataatccactgtcattttccaagatcaatctgttttctgcacaggccaaacaggagggttgaatgcgaatatgtcaggaatcatcacccctgcatccttaagtgcactcatctctgcaattcctcctggaatgcggtattgcttttggcttactattattccaggaagaggcagctctagtggcttctacttggcctttcctaccacgatcgccctcactccacaagtcggggaaccagtgtggggattctgccagttgctgagtatgtctataccagttatgcatcctggaactggcaaagtaaccataggatgaatatggggacccactgtgaggagaacctgggttaaacttccattgaccacctaacctcaacaagtccctactctgaatggcgggc

SEQ ID NO: 634790 - DNA, 509 bp, Homo sapiens
gaattcagtagactgcccaacgagttctcttctagggacaccatgaccacctacccaattaggacccccaagtcaggctgttcagattgttgctttgactccgctgtcccccatgatggcaacacacctacttactctttggtgatcacatagcccctgccatcctagatccarccatccctgctgcagctaaggacccccagtcagtggcaacagctcccactgcaatctctgacctgaagagaaaagcaaccccagagctcttcacggattcctgaggaaaaccggcaatgtcttgcaaggtaactacctcaagggaggtcattacaggttcttcaggcaaagcagagttaacctcctcagaggtggaagaactgcttctactggcaaaaaagagtgagtcaaatttaggagtttaacatccccagcttcatcaggatgttcccatatggccctattccaaatgtgcagatcccattccttcccaatcaatgccctcattttaatag

SEQ ID NO: 634791 - DNA, 510 bp, Homo sapiens
agaattcagtagactgcccaacgagttctcttctagggacaccatgaccacctacccaattaggacccccaagtcaggctgttcagattgttgctttgactccgctgtcccccatgatggcaacacacctacttactctttggtgatcacatagcccctgccatcctagatccaaccatccctgctgcagctaaggacccccagtcagtggcaacagctcccactgcaatctctgacctgaagagaaaagcaaccccagagctcttcacggattcctgaggaaaaccggcaatgtcttgcaaggtaactacctcaagggaggtcattacagrttcttcaggcaaagcagagttaacctcctcagaggtggaagaactgcttctactggcaaaaaagagtgagtcaaatttaggagtttaacatccccagcttcatcaggatgttcccatatggccctattccaaatgtgcagatcccattccttcccaatcaatgccctcattttaatag

SEQ ID NO: 634792 - DNA, 440 bp, Homo sapiens
ggagaattctgcaaaatacctgattgttattcctcaaacttgtcaagatcatcaaaaacagagtcaaagacactgtcacagccaagaggagcctaaggagacacagtgactaaaggtgatgagacatcctgggtgggatcctgggacggaaaagggacattaggtgaaaacgcagaaaatagaaataaactatagactttagttaactttttaaaaagataatcagcaagaggaaagaatgtcattcagtggaaccatttaacctcagcactatctttctgcagtagttggggatacattttaagtctgattgcaaataacacagaagtaaaatgagtcacagcctaccttctccctccttcccctcatctcttactcttctttttctctttgtagaaatgattcagctgstttacttttgattaaagagcttatgttct

SEQ ID NO: 634793 - DNA, 461 bp, Homo sapiens
gagcggcaacaaagctcagtttaaaataaaatctattagcatgcacaatttagaactcccctgaaataaagtatttcaaaaacctgagaacttcatcactctgtcattctaaatatagaatgacattttgctctacgatgcctagaaaggcagtaatgcgagctatcagggtaaccaagacaaacactggtcagtaatgaggcatgatgtcaaatgcccwtctttccagctacaaactatttttctccctttcttttaatagtaagtaggcaacaagcaaataacacagaactttttccagttaaaacaaacaaacgaacaacactaaaatataactagcctcttgtcaggtgaattgacaatctgtatttagtataatcaacttcaacttttaaatacaatcatcctacagtgaaaatattcgaattcctttttctttcattcatgaatttgattttttt

SEQ ID NO: 634794 - DNA, 577 bp, Homo sapiens
gtttgctgaaacgttcatgacttagttatcacctggggggacagggggtggaggccctggctttcacagtatctcagattttcatttaatcgctttttttttttccagtaaacctacttctgtttcctaccctcaagtcagtaatagtctcagctattcttkgtattcagagtttttcaccaacttaaatgtatttagaaatgtgaatggaactgaaaagtcaattttttagggacttaattaaaattaaaatgcattttcttatatagatttatataatacatattacattatacataatatataaatataagaaatatttataagataaatgtataaaatatttataaagataaaataccgtaaaaagtatataaaatctgggatgagaacaaagggctgaccttacctttgatttagtgtaaataaaccaaaggatttttaaggaaaaaaataaaccagtccttcaaaataaggatttagtatgtaatttaaggaaagaagcgatggccagcggccgtctgctgagcggtgagagcctggttgaggatgagctaacagcctgctttggctgtct

SEQ ID NO: 634795 - DNA, 612 bp, Homo sapiens
tgaggcatggattttctttttttttttttttttttactgaaaccactagtaattgcaaagttttaaatgtttatagcacatcatttgcttttgacattgctttgcagatcatctgagctgcttcctggctctccagtacattgtactaactgggaggatggggagacatttgctgtccccatggggaatgaaaaaggaaaccatgtgggatggggaggggcaagaaagaagaaaaacaagcttctctaggctccaaaaaatttgaaggaaataargatattaagcacttgttagatgaagtgatagctacaaaacacgtaatctgtacaacaatcttatgagcactattcaacattaagctaacagaagaagtctcagttgtggtcaaaaaatagttttgttttttggcttctgttttttgcttttttttttcttttcctaggctgccaaccttagagaaatgatggtcaaactggggctgccaaggtcatgtattacagaagaggcagcaaaaaaggccttggcagggccagaaaggccagagaaggtcctgttccaaggatttcttggggcccttttcatcgaggccgcatccacatgatccctgaagat

SEQ ID NO: 634796 - DNA, 660 bp, Homo sapiens
tgtgcaccaaggatggacttcacatccttagttttgcttgcttgggggtaaggtctaagctatatgtttgtgtccattgtttggtagtaaggtctaagctatacattagtttatctcagttgggatcatgtgagtgaatggctcctttaccaagcgcatgttaatctgtcaccatagcagattctagaaagagcctgaagcacagagagtgtgtgtgtgtgccttgcaactcaaggtgtggtctttagaccagcagcatcacctagaagattttagaaaggcggattctcacacccctcaacggctagacgtactgaatcataacctgcattgtaacaaaattcccaggtgattcataaagtcaggaaagcrctgtcacagatgaacctgatagttaaaatgcttgttttcctctaattttcagaatgagaaaaacaaatgatcttcaaactctatatgctccccaagaaaacagcagtcaggaatttttccacccctgctgtcaatatcattgccttcacagccctgtgatatgattattttgtgtttattacctcggcggtcctaaacctttttggcaccagggaccagttttgtggaagacaatttttccatagactgggggtagggtggaggatgagggatggtttcgggatgaaa

SEQ ID NO: 634797 - DNA, 463 bp, Homo sapiens
ggtttcaactctcccctttactagctgtgtgatctcatgcaagaaacaagcttcctgagcctcagtttcttcacctaaagagtggagttagtaatcctcttcttttcatggcgttatgcttaaaaaagggggrtgggaggtttacaacttgcaacattcattcattattcatttttgtatcccttattcatttttgtatcctccttattcatttttgtatccctacctctcctgacaaatagtgatgctcaataatgcctgtttgctccaatggattacagcataaactctcaaggggaatgaaaattggatattgcaatggcttgtggcctccaaaggttaaactttatggacaaaatcttattccatagcatttaggggatcctaaaggatttcttagcatccttaggggatacaaagactccttgtgagtggggaggaggagtgaggaagatgattttta

SEQ ID NO: 634798 - DNA, 594 bp, Homo sapiens
ccatgtgacaagcagctggacattatctgtaatagaaagcaaaatgattttttaattcaatgtctcagaactaatttatcatgatttaaaggagaagcagaactttttgaacacatacgatctgttccacattagagtcatttatttattcatcaaacttatcctatacatctggcacatgctaggcactacagggcacagtccttgttcttgggcaggctacctcacccttgtgcccatttcacacattgctccccctgcagccatgctgcacttggtgccagctttccccctgcaaggatgacctctacagtgacttagctagcattttctgaaccctaggtatgtgtgccaggcactacactaagtgccttatatggactttctcacttaatcttcaagacaaccctatgaggtggaaattagtatcatccctattttacagtatgtgaggcttaaatgttgggaaacttgcctaagatcatatagcttgcaagtggtgtagtcaggactcaaaataggctggctaatgscaaagcggcgatcaacacctctctactgaaagtgtggtcctcaaactagcagcaatgccat

SEQ ID NO: 634799 - DNA, 540 bp, Homo sapiens
cattgactaaactgttaaggcaagtgttcacattaggattgctcttaaggacatgttttcacattttctagagctctggaaacgrttactagttagtattgcactatttgggcttgtttggattcagaagttttacagttgaccgtatcactaaaattcatatatttagaaatatactgcttttcgcaaagtacatacacaagaagaatatgaaaataaactatcttttatttttagtgattagttgacgtatggttggtaactacattttttcttaaccttttctaagggaaacaaaaacaaaaacaaaaaagactaaggctttaagtgaacaaatttttatttaaaatttgaagtatgttaaactggggtaaatcagaggtctgcagtagttttgctgtaaatattttaggttttgtgggcatacagtctttggttcaacaattccatgctgccacagccatagacaagatgtaaacaaacaagtatggctgcagtccaataaaactttattttggacacagaaatttgaatttcatg

SEQ ID NO: 634800 - DNA, 540 bp, Homo sapiens
cattgactaaactgttaaggcaagtgttcacattaggattgctcttaaggacatgttttcacattttctagagctctggaaacgattactagttagtattgcactatttgggcttgtttggattcagaagttttacagttgaccgtatcactaaaattcatatatttagaaatatactgcttttcgcaaagtacatacacaagaagaatatgaaaataaactatcttttatttttagtgattagttgacstatggttggtaactacattttttcttaaccttttctaagggaaacaaaaacaaaaacaaaaaagactaaggctttaagtgaacaaatttttatttaaaatttgaagtatgttaaactggggtaaatcagaggtctgcagtagttttgctgtaaatattttaggttttgtgggcatacagtctttggttcaacaattccatgctgccacagccatagacaagatgtaaacaaacaagtatggctgcagtccaataaaactttattttggacacagaaatttgaatttcatg

SEQ ID NO: 634801 - DNA, 585 bp, Homo sapiens
ttttttgggttgacttgttggtcaggtgattgataggtttgggttttcaaccaaagaaatgctaattcactgtgcctttttcatttttaaaaaatatttttgcttacccaaagattctttacttaacaaccgtggcttttaatctgactcaaaaagttcaagctaaattttaaatagttgtgatttgatcatcaaaagtagctaaaaataaattttggatactgattktagcctctccttttgaaaatcaaagttttcttcatagctaattttttctaagattaatgcccatccattttcagtcataaaatagataaatttgtaaatcaacatctggcaccaccctgaagatttctcattcttttcaaactttctgggcatgttgtatgaaattttatgaagttgaaataatcactctctgcagataattctttacttcatgtagtcccagagctctactaatatgttagatctttccaaactggaattacaccagtctacacatcaaccctaataattttctatactatgcatcattaaaaccacagtcacctctcttgttcagttcagtaacctttactctcc

SEQ ID NO: 634802 - DNA, 365 bp, Homo sapiens
tcactttcccgaatttgtgtccttttcttttttgaaatgactaagctgaagactcgattttctgaaggatatttaatctttgcttgcaaccaatttcaatgtatttactctacagatgaataccttggccttagtggttgaaaaatgtaaatctgttttctaaaactttatttaacctaaatggaagtctttatttttaaagttagtgaaatcgaattgtggatttcattgcctggatttcacttgtgtttttcatagcacatcacttactacccttcctttacctgcttggttttctaaatgccttttctaccaaaaacwcactcctacctcctctacttatttctgtccacctctcttaacaa

SEQ ID NO: 634803 - DNA, 576 bp, Homo sapiens
ctagctgttctccatcaaaagctttgtttttgccattattcagacctaatcctgattaactctgtgtgggggtcttctaccctatattaactacttaacacactgggaaactgacttatttgtaatagtttgctgctaaagaaacacttatgtcattgctggttctgtcagataagtmaaataaataaactgcagctcaagggagaatttctgcttccttcctaattcaatgaagttttaaaagccttaataatttgtatgcaccttcctcattgcaggagaaggagtctgaaatgtgatacagtgtgggcttttactaccctcccccaaagcttgtcaaattcctgggcttgctagtttataccaaggtctgtagtagaccaaccaaatgatttgaaaccagcccagaacttctacctctaacattgtcacttgattagactcctgatgtcatatgactaggttaaaattgttctgcttatatttttctcaagtacaagaaagtgtacatttgtgttgtcaatagatttcttgttaagtggattaataatccatctagtttaaaattgctccaca

SEQ ID NO: 634804 - DNA, 586 bp, Homo sapiens
tagttattatttttaaccattgcagaatgcagacattrttttataaagacagacatctgctttaaagcatcagttttccagagataattctgcctttgctattaaaattattttcttactccaaatctaaacttgtgtaatgaataaaatctcaatccactgggattgatactaaacattatgtaagccgtatatcctacaattttctgtcttaagggaatgtttataacatatcacacatgctgtatgggtatctgttaaatactcttgaacaactctctcttttatatcgtttatatttaggtttcatttcacgtatttgtgtcttccattttgttttcgagatcttctagatccttgatactcagtgttgaaccagtacactggaccaatattatcgacatttcttggaagcttgttagaaatgcatcttctcaggtcccaccctcccaacctcccctaccctaccaccacagaaccagaaactgcattttcacaagatccctaggtgatatgcttacactttaaaatttgaaaagcactgctctagataattgtcagatggtagatgatattttgaagggga

SEQ ID NO: 634805 - DNA, 586 bp, Homo sapiens
tagttattatttttaaccattgcagaatgcagacattattttataaagacagacatctgctttaaagcatcagttttccagagataattctgcctttgctattaaaattattttcttactccaaatctaaacttgtgtaatgaataaaatctcaatccactgggattgatactaaacattatgtaagccgtatatcctacaattttctgtcttaagggaatgtttataacatatcacacatgctgtatgggtatctgttaaatactsttgaacaactctctcttttatatcgtttatatttaggtttcatttcacgtatttgtgtcttccattttgttttcgagatcttctagatccttgatactcagtgttgaaccagtacactggaccaatattatcgacatttcttggaagcttgttagaaatgcatcttctcaggtcccaccctcccaacctcccctaccctaccaccacagaaccagaaactgcattttcacaagatccctaggtgatatgcttacactttaaaatttgaaaagcactgctctagataattgtcagatggtagatgatattttgaagggga

SEQ ID NO: 634806 - DNA, 575 bp, Homo sapiens
gttaatttctttaaggaagagccgtaagtataagaactgatgcagaagaatataagtatgtttatgaatgagaggaactagtttctgatcttgattctgaactgatacataccacaataaccaataagccaaactacaaccaactagtttgttaacaagattagtgctattggtatgyttcatagaattatttttaatggcacccaaaacttagtcttgaatggagcacttcacagaatgaagttttctgaaatatggaagaattagtaacgcttctatttgcattagtttttagggactcagatcatccttattctagtatgaacagtttctgtaaatttataggaggcactaaaaaattccattaaggtcattgggagtcactactaaaattctgtttctctgaaagtaaatataaaaggcaggttataaataagtagtaatattatagatgagacttgtattagttaccttatgctgcataacaaattatcccaaaagttagtagcttaaaataacaaacatttatcatctcagaatttctgtaggttgagaatccaggtttggcttagcta

SEQ ID NO: 634807 - DNA, 590 bp, Homo sapiens
gaattcatcaatctaaaattacatgtgtgaataaagaaagacataaaagtttgttgattagaagaatcagaaaagtaagtcttaccaactatgactttaaaactatatttttatttatttatttatttttgtgagatggaatctcgctctgtcacccaggctggaatgcagtggcatgacctcagctcactgcaacctccacctcgggctcaagcaattctcctgcctcagcccccctagtagctggtattacaggtgtgtgccaccaggcccaactaatttttgaatttttagtagagatgggatttccccatgttggccagactggtctcaaactcctgaccacaagtgatccgcccgcctcagcctcccaaagtgctgggattacaggcgtgagccaccatgcctggcctaaaactatatttttaattgtacattacagtaattgaacrgtaactctagagaaagcaccctctcaacagtgcaacatcttttaaagccacctataatgaaagaataggtacaatggggacagtgtggcaaaaataaaatcacttcccaaagattttcagtcagaaagctgaaaaatc

SEQ ID NO: 634808 - DNA, 535 bp, Homo sapiens
gctgctcggggcacactcaccatcaaacacgggaggggaagggcagggtggggtaaatttcactcttagaaacaccagaatttcttccttttcaggatcaatgtcacccatatcttgtcaattgtgactgcaaacttcagaaggactcagagtggaaagtcttggcaaccatgttgsggttcagacagtgggagccatgcttctgcgaatgagcctggggactggggactgtggtcccagccctggatttgatgaggggagtatccctgtcctgcgagggtgcagtgtcacttttccactcccatttggggtcaactcttaacagcatccctgagaagtgaggtggtgtaaagtcagggaagtgtggtctttgtcttattaaaaataatgcgatgagatggacgatggcagaagcttcagggtagaccatggagctcatcatggtatttgatatggcttggctttgtccccacccaaatctcatcttgaattgtagctcccatgattcccatgtgttgtgggagggacccagtgg

SEQ ID NO: 634809 - DNA, 584 bp, Homo sapiens
aggctgaggcaggagaatcgcttgaacccaggtggtggaggttgcagtgagccgagatcgtgccactgcactccaccttagtgacagagcgagactctgtctcaaaacaaacaaacaaacaaattatcaacccaaaagaaggcagaaaatgagagaattggcgggggtgggcaaaatatacaagggacaaatgaaaagcaaaatggaaagaggacagagttaaacttcctatcaataatcacayattaaatgcagacgatataaacacccttattttaagggcagattcttcaagttgaataaatgctcacctccaaggagcactcgctttaattataaagacacaaaagagttaaaagtaagaaggtggaaaggcatataccacattaacactaatccaaagaaaactgggatgacgatattagtatcaaaatagattttagaacaaagaatgttaacagtattaaagaaggttatttcattatggtaaaagggtcagttctatggaaggacattaaaaacactaaacatgtatgtacctaataacagagcctcaaaatacatgaagcaaaaaatagacctgc

SEQ ID NO: 634810 - DNA, 620 bp, Homo sapiens
agttgatggcagtcacattcccggtggtcagacaggcaaagttcctaagtgcgttgtctaatacagctttggggttagtgatgtccaggatgtcagggctctgaggctggaatttggagtaggtggccacttgaaggttgacactctccacctagaccaggctgccttcttccaagagcaagttctgcatcatccagtgtgggaggtagcagatgccctcatcagccacaaactccagcacgccacagtgcgtcatgcggtccaaattcttactggtcagtttgaacagcatgggataggtaatgttaagttggctgagttggtccagggctgagggcagcataattatcttccctcctttctccacatctgacttgtcattaggccctgctagcrtggacacagagaagcagcggtagtgtgtggagaagcggttttggaagaccctgggaattaggtggttgaacatgttgaaagagaacatgatggacaccacctcacagacaccgcttctctcagggaatgcgacaaaggcaccctgccgaccgctgtcctcgctgccgccgccaccccagtgtgttgtttttaaccttgacttctaaaagatcagaatgcagatc

SEQ ID NO: 634811 - DNA, 392 bp, Homo sapiens
gaattcaacatctggacagaagacatactcataaaggccaccagcgaggacagctcctatgatgggcccaacccaatatatctaaggaaaagatggaagaggatagagtgtaagtagagaaaagctattccattgagcagctcatgaatgtagaatctagctgggttaaattaagagtgtatttgtgtcatgcatcaaaaagaggggaattggagaggaaataagaaaacacaccaaagcctcatcagagatccataaattattaaactgcatttgaacagaaaacaaraagaactgtttcatctcctatcctcttttcattaattatgttctttccatcttatgataatcgttaatgtaaagatagatcctctttggtggtactacaaatt

SEQ ID NO: 634812 - DNA, 616 bp, Homo sapiens
gttaatggcatggaaaagtagtaaaaggttggattagaaggtttaatacttttgatctctcagcccattgcagtttacttactccttaggagacacagatgggacacggcaggtgtgtgtaaggagcgaagcaattcatgaatactcagccatgaaatagaaaatcaaaatgaaataagtatgactgcaactatcttggtctattaacattcaactattaatacctactgttctttgaaagccattactgaatatttactgataagaaaaaaatgatagcttaggaagaggaagatgttcaggaaaagcatttaagcagggtttgaaagacttgtgattttcttaactcrgggtaaaagtcgaccaattaaagtaggtttcccatccaaatgtttcccatccaaaatgatccctttttttttccccaagggatctaatttaggatcccttggaaaaaaattccaaaatgcattacaactattcataagggtgacacatggacctatttttctaaggactttgatttaatatttgaatgcaatggtatctgactttgttagtatagaatatttaaacttaaaaagaaaataccttaatttacttatgcataagccta

SEQ ID NO: 634813 - DNA, 561 bp, Homo sapiens
caactcttctttccaaatgaatgcttcctatctgccaggtacaattctaaatgctgtatgtattgattcatttaaactacacaacagccctttgaggtacgtactattattattattattatttttgagacagggtctcactctgtcagccaggctagagtgcagtggcacagtctcggctcactgcaacctctgactctggggctaaagcgattctccctcctcagcctcccaagtagctgggactacagtcacatgccaccacacctggctaattttgtattttttgtagagatggggtttcaccatgttgcccaggcrggtcttgagcttctgggcccaggtgatcctcctgtctcagcctcccaaagtgctgggattataggcgtgagccaatgcgcctggctgaggaaggtatcatcataattgccacctcataaataaggaaactgaagcatggggaagttaactgactcatctaaagtcgtggagccagcacatagacatccatcactgcaatcaaagaaatctggcctctacccatggtgatatatgttacct

SEQ ID NO: 634814 - DNA, 561 bp, Homo sapiens
caactcttctttccaaatgaatgcttcctatctgccaggtacaattctaaatgctgtatgtattgattcatttaaactacacaacagccctttgaggtacgtactattattattattattatttttgagacagggtctcactctgtcagccaggctagagtgcagtggcacagtctcggctcactgcaacctctgactctggggctaaagcgattctccctcctcagcctcccaagtagctgggactacagtcacatgccaccacacctggctaattttgtattttttgtagagatggggtttcaccatgttgcccaggcgggwcttgagcttctgggcccaggtgatcctcctgtctcagcctcccaaagtgctgggattataggcgtgagccaatgcgcctggctgaggaaggtatcatcataattgccacctcataaataaggaaactgaagcatggggaagttaactgactcatctaaagtcgtggagccagcacatagacatccatcactgcaatcaaagaaatctggcctctacccatggtgatatatgttacct

SEQ ID NO: 634815 - DNA, 561 bp, Homo sapiens
caactcttctttccaaatgaatgcttcctatctgccaggtacaattctaaatgctgtatgtattgattcatttaaactacacaacagccctttgaggtacgtactattattattattattatttttgagacagggtctcactctgtcagccaggctagagtgcagtggcacagtctcggctcactgcaacctctgactctggggctaaagcgattctccctcctcagcctcccaagtagctgggactacagtcacatgccaccacacctggctaattttgtattttttgtagagatggggtttcaccatgttgcccaggcgggtcttgagcttctgggcccaggtgatcctcctgtctcrgcctcccaaagtgctgggattataggcgtgagccaatgcgcctggctgaggaaggtatcatcataattgccacctcataaataaggaaactgaagcatggggaagttaactgactcatctaaagtcgtggagccagcacatagacatccatcactgcaatcaaagaaatctggcctctacccatggtgatatatgttacct

SEQ ID NO: 634816 - DNA, 421 bp, Homo sapiens
ttaggcagaaggaaattgatactgaatgaaaacctgtgtttatacaaaggtataaaaagcaacaggattattagccatgtgagtaaatgctgtggtttggatatgatttgcttttccccaccaaaattcatattgacatttgatccccgatggggcagtgttgggagatggggcagagtgggaggtgtctgggtcatgggggccgatccttcatgaatggcttggtgctattctcatgacaataagtcagttctagctccagtaaggttgaattagttcttgagggaatggattagttctagggagagtagttatataaccaagacatcccttaggttttggctctctttgcacrtgtctgcttcctctttgacctctctgccatgctttgcagcacaaaagcccttgtcagaagccagtg

SEQ ID NO: 634817 - DNA, 530 bp, Homo sapiens
atttccctttgaaggtttcttttcattgtgatgtaggagttgaaatcactggctaaacataagaagaaagtgcaggggataccaggagtttgagcagccaggggagtggctctagggtacctatcagagccaagcaaagggaagacggagcagcatcagagcccccaggttggggggagtattcctgaatcatggataaatcttcagagagcattaccctgcggaagcagctgggcaggaacactgagcataataatatcaaccagcatttacgatatgtatttaatttcttatttatttaatatttcaaccatacagaaatagaaagaatgatatctcaaacacctgcctgtccactcccaacatttcaagaattttartgttttgccataggtaacaaactgaatgtttaaactaatttatttctaggtgttttaaagtgtcctaaaatactttcttagttgcttagtccactctttatcttctaattttataaatgttcagttattcagttctacttctgctgttga

SEQ ID NO: 634818 - DNA, 507 bp, Homo sapiens
acaagtgattccagcatgctagacacaactctacaatggaattygggagcccaaactattatggaagcatataaaagttggactcaaaccagaatgaggtgagaaggacaccttggtcaatttttgtattattataaagaagtaactgagtctgggcaattcaaaaagaaaagaggtctatttggctcacagctctgcaggctgtataaggagcatggcaccagcatctgcttctggtgagggcttcaggaagattccactcatggcggagggggaagcagagctggcatgtgggagaccacatggtgagaggaggaagcaagagagggaggaagagatgccaggtttttttcaacaaccagttctcatgggaactaagtgagaattcagttactcctgcaagaatggcaccaagccattcattagggatccaccccaatgacacaaacacctcccaccaggccccatctccaacactggggatcaaatttcaacatgagatttaga

SEQ ID NO: 634819 - DNA, 622 bp, Homo sapiens
tccggttgttatgggttttttaagtgactagaaccaagcaagtttgcgaagagcagatttcatgaaggagataaatactgaggagtgtttgaagaagaatcagaaaatcctgtggcagtgagagaagggaaagggattgaggataaaagaatcacctaagttggctccaaggtggggcctgacaaggtgtggtcgcagcatactccctgcagcaaaaatacaggccaaagtgaggcaagagataagaacacccaggaaaggtaaaccagtaatgccaagacttgacacttctaagtccctgtgaatttcagatgtgctttcctgattgtatgaatgtgaaaaaaaaaaaaaaaaaagcacagaggttaaagagaaggatgtatgatcacttaggaaggaaaaaaagaaagcatctgaattattagaaaggtcatcgaaggccattcctaaataacttgactgttgagatcagtcatttctttttgtggtcacagattatggccacttctgcttctttaaaaagtgttctgtttctagcattattcygaaagcattttttttaaccacctagttttttggcctactctgccagtcataccccatgtgtacagaattttaaaca

SEQ ID NO: 634820 - DNA, 480 bp, Homo sapiens
cctaccacaacaaaatttaatgtccagaaacaaccaccattttacttgctcatgattctgggactcagcagagtgggttgggttcagctgggctgttcttctgttgctcttgcttagactctcattcacctgcagtccgtcagttggtggctcagctggggtggtgttgttctragatagccttacttataggtctggggcctcagctgcatggttggggcaactggcttccctgcttcatgtggtctcatccctcagttgactaggcttggcttcttcacatggcaatctcaaagcagtgttccaaggtaatgagagctcaagctacaaggtttcttgaggcctagactcaaaatcacacaatacccaattggctccattctgttggttaaagccagtggccagctcaaattcgaggaattaggaatagattttaccacatgatgggaaaaacagcaaagtcatatttcaaaggtacac

SEQ ID NO: 634821 - DNA, 574 bp, Homo sapiens
aagtcatttggactacttgttcataaaagacttcccatgggattagagaacaccataaaggaatgttttcttttagtcacattttaaatttctctatagtaaagcaaaccacagatagaagagtcacctgttttaaggtttcattattgcaaaatctcttgccatttgcctttctttactttctagagctgaaaaggaattgaggcataactaaatcctcctttgtgatttttcatagaagaaaactgaggtccagtgggggaagcgaattgtacaaaattacacacaagttagatgggaccaggtctctcaactcccagtctggagttcarttttttttttttgagacggagtcttgctctgttacctaggctggagtgcagtggcacaatctcagttcactgcaagctctgcctcccgggttcaagcaattctcgtgcctcagccacacaagaagctcggattacaggcatgtgccaccatgcccagctaatttttgtatttttagtacagatgggtttttgccatcttggctaggctggtcttgaactcccggcctccagcaatctaccca

SEQ ID NO: 634822 - DNA, 448 bp, Homo sapiens
gaatgctctttcccatattaattcrgaacccagtaaataatttctgattaagaattataaaggtatgccaagaaggatacattataattatgcctctctaccctgatcctggcctttcttcacatccacccaataaaatacattgctgaggtgtgcacttagttttgacaacaattaaattcaacaaacctttaacaagaacgttttttcaggtggctatctaataatgaagtaatcaaaagttattcaaagttttattatacaaattaagcctctgtagaaattattttaatataaaataaataataagtatcattaaaatgcttggataatgattgatactgaactgttggctcagaatcagtgacatattgaaaatcaaagtgctaaaatgagctaggaggtacatctaactcttcctaatttcagtgtaagcaagtataccagt

SEQ ID NO: 634823 - DNA, 448 bp, Homo sapiens
gaatgctctttcccatattaattcagaacccagtaaataatttctgattaagaattataaaggtatgccaagaaggatacattataattatgcctctctaccctgatcctggcctttcttcacatccacccaataaaatacattgctgaggtgtgcacttagttttgacaacaattaaattcaacaaacctttaacaagaacgytttttcaggtggctatctaataatgaagtaatcaaaagttattcaaagttttattatacaaattaagcctctgtagaaattattttaatataaaataaataataagtatcattaaaatgcttggataatgattgatactgaactgttggctcagaatcagtgacatattgaaaatcaaagtgctaaaatgagctaggaggtacatctaactcttcctaatttcagtgtaagcaagtataccagt

SEQ ID NO: 634824 - DNA, 598 bp, Homo sapiens
ttgctaaggaatcaacaagatgtttttgagtaattgatgatgtgtaattccatggatrattatatcttgcttaactttacttgattgttgagaactgttagtgtgaagtactctaagctagttacatcaccaaccacaaggcaatcagactgaagatgaagagcaggcaaaagaagcttcaactattttaaattctaattaattactctttggagtaattatccattccatagaaatttttaacaaaatatgtgtttactatgctttctcatagccaaccagcttgttaataagaaacaactgccttttattacatttactaatttcctcatctccttatatgtattctgttaagaaaaaaaaaaaaggtaggctggcaccgtggctcactcctgtaatcccagccctttgggaggctgaggcgggtggatcacttgaggtcaggagtgcaagatcagcctggccaacatggcaaaaccccgtctctactaaaaatacaaaaattagccaggcatgggggcgggcacctgtaatcccagctactcaggaggctgagacaggagaatcacttgaacccaggaagcagaggttgcagtga

SEQ ID NO: 634825 - DNA, 598 bp, Homo sapiens
ttgctaaggaatcaacaagatgtttttgagtaattgatgatgtgtaattccatggataattatatcttgcttaactttacttgattgttgagaactgttagtgtgaagtactctaagctagttacatcaccaaccacaaggcaatcagactgaagatgaagagcaggcaaaagaagcttcaactattttaaattctaattaattactctttggagtaattatccattccatagaaatttttaacaaaatatgtgtttactatgctttctcatagccaaccagcttgttaataagaaacaactgccttttattacatttactaatttcctcatctccttatatgtattctgttaagaaaaaaaaaaaaggtaggctggcaccgtggctcactcctgtaatcccagccctttgggaggctgaggcgggtggatcacttgaggtcaggagtgcaagatcagcctggccaacatggcaaaaccccrtctctactaaaaatacaaaaattagccaggcatgggggcgggcacctgtaatcccagctactcaggaggctgagacaggagaatcacttgaacccaggaagcagaggttgcagtga

SEQ ID NO: 634826 - DNA, 509 bp, Homo sapiens
agtatcttttctgaccacaatgatataaaactagaaataaataacagaagaatattggaaactgtacaaatttatggaaaataaacaacatgctcttgaatgacaaatggatcaaggaagaaatttcaaagcaaatattaaaatttcttgagataaataaaaatgaaatcacaacataccaaaacctatgggatatggcaaaaatagttytgaaggaaggttatagcgataaatgtccacatcaaaaaaggagaaagacttaaaataaacaaactaatgatacaccacaatgggcttaaaaaaaaaaaaaaaaaaacaagaacaaatgaaaagaaaatcttccaaacccagcaagagaaaaaaaaataaaaataaatatcagagtagaaataaattttagactaaaaataatgcaaaaacatcaataaaacaaaaagttggcctttaaaaaagatagaattgagaaactaactagaataactaaaaaaagagaagattcaaattaataa

SEQ ID NO: 634827 - DNA, 545 bp, Homo sapiens
ggaaactgtacaaatttatggaaaataaacaacatgctcttgaatgacaaatggatcaaggaagaaatttcaaagcaaatattaaaatttcttgagataaataaaaatgaaatcacaacataccaaaacctatgggatatggcaaaaatagttctgaaggaaggttatagcgataaatgtccacatcaaaaaaggagaaagacttaaaataaacaaactaatgatacaccacaatggrcttaaaaaaaaaaaaaaaaaaacaagaacaaatgaaaagaaaatcttccaaacccagcaagagaaaaaaaaataaaaataaatatcagagtagaaataaattttagactaaaaataatgcaaaaacatcaataaaacaaaaagttggcctttaaaaaagatagaattgagaaactaactagaataactaaaaaaagagaagattcaaattaataaaatcagagatgaaaaaagagacattaaaattgataccacagaaatacaaaggatcatcagaaactattaggaaacttagaagaaacagataa

SEQ ID NO: 634828 - DNA, 545 bp, Homo sapiens
ggaaactgtacaaatttatggaaaataaacaacatgctcttgaatgacaaatggatcaaggaagaaatttcaaagcaaatattaaaatttcttgagataaataaaaatgaaatcacaacataccaaaacctatgggatatggcaaaaatagttctgaaggaaggttatagcgataaatgtccacatcaaaaaaggagaaagacttaaaataaacaaactaatgatacaccacaatgggctwaaaaaaaaaaaaaaaaaaacaagaacaaatgaaaagaaaatcttccaaacccagcaagagaaaaaaaaataaaaataaatatcagagtagaaataaattttagactaaaaataatgcaaaaacatcaataaaacaaaaagttggcctttaaaaaagatagaattgagaaactaactagaataactaaaaaaagagaagattcaaattaataaaatcagagatgaaaaaagagacattaaaattgataccacagaaatacaaaggatcatcagaaactattaggaaacttagaagaaacagataa

SEQ ID NO: 634829 - DNA, 596 bp, Homo sapiens
agtgtgtgtgtgtgtgtgtgtgtgtttgatagtggtttccccaaactaacttgttttgactggaaaagaaagaagaacactaacaagggcaggactctgatgtaagtaagcgtaaagataagcaatatgaacagacaaaagcaaaatgaaattcataatgagaaaatacaagttaatagtatatcaagtgaaaccattttaaatgtgcatggaatgaatttcttccaaattgatggaaacaaaaatctaaatacttgacaaaacttacaactctaattttacatgacttgaggttgcatatctatacctttcatgacgtgggcctaggtatcatcttcttctaaattttatctccatttcaaaacactttaattcctcctactcatygtcttcaaataaacatattgtcattgtatgttattcaggaaaactacttattattttaaaacttgattgttaaatgggttagatcatgcaggttctgtacaaaaagattgtacaatatgtataagatttttattcaagttcctgagttttcttaaattcaaataaattaagaaataagaaagagccatttccttcatcacctaattgca

SEQ ID NO: 634830 - DNA, 564 bp, Homo sapiens
cataatccagatgaaaatttaccaggcttagactaaggtaaaaaacatttggaccttagtaaaactgacgattttgtctgatgaactcgatgtggcaggataaggtaaagcaatgactaagaagaaagccagctttaagcaaaaattgagcaaatgagaaaacaatgccatagttttgccttttcttggttttattttaatagtgaaaaaattaagagagagttcattttatgacatgaatcatgaatcaagaattccagaattctgttttggctatggtaaatttgagatgtctgaaacacagcccagcttcactggaattctggagagcagtctgaaataaagatataaatttgtgagcctttagcatatagattctgtttcccatcatgatgctgaataacccatttaagtaacarattttaacaaaagattaatggatgtagatggaatccaaagattaatatgaatggaaatgtttgcattttatattttaccaagcttaattaactagcattttctttaattattaccgaaagcaaaataataataatgatcaccaac

SEQ ID NO: 634831 - DNA, 605 bp, Homo sapiens
gaatcaatatccagaatagctactataaattacccaaaatgactagtttcctacaaaaaaattatgaggcatacaaagaaacagaaatttggaactcaagaacaggaaaaagtaggcaacaacaattttctgtgagaaggaaatatttaatatttaacaaagatgtcaaagtgtcattataaaaatcttcaaagaactaaaggaagcaatcttaagaagtaaaggaaggtatgatgtcagtgtcycatcaaatagagactatcaacaaggaggtaaaaattatgaaatataaaccaaatgataattctggaggtaaaaggcacaataactgaatgaactgttcattacaggggttcaacaatagatttgaacaagaagaaagaatcaacaaactatgagatagattgacagaagttaggcaatccaagaacagaaagaaaatggaataaaaaaaaagttgaacagagtctcagagacatgcaaagcacttttaaatgcagcaacatatgcatacaggaagtactagtaggaaaagagaaagtgaaataagcagagaaatacttgaagaatatataatgacaagaaaacttaccaatttgctgaaa

SEQ ID NO: 634832 - DNA, 576 bp, Homo sapiens
taataactctttaatatataaatttaggcaaattacttagtaattatgcctcagtttccctgtaaaacgcagcctttatatttacttaatgtaattgctatgagaaataaattgagggatatgtatggagcacttcacatagtgtttggcacataatcaatacttcataaacctctgttaatttggagaaggcaatgtaatatgctgtgtacagatgaccctaatgaaattatttaaataactttatcaactaatttgggaggctattagaggataacaagattgtaatactttaaattaaactgttttcttttttacattttgactgtgaaaataatgtgtttactagaaaagtttattttgattgttttatgatatacaaaaacttatattttattaattgctctcaagttgttcacttcatagcaggaccatgggwtagtctttagcaaatatgcaagctctttgggaaaactaaatgcgtacaataaacaataaagaattcacgctttgaaaacaaaaattcagatacgcatatcctagatagaatgcttaaatgctaagtggatgtgaagt

SEQ ID NO: 634833 - DNA, 302 bp, Homo sapiens
atctcccagcagacaagccactatactgtgccactttaatttttgctttagtgccctttaatggcttctctgtcttaccagccaggctttagctcaccataaagcacctgmtaggaaattctgtggccagcctggtgattgtggtatgctttcagaaataaagtaaaaatgtttgtggaattgaggtcaaaaacctccttcatttttcttggcagttaattgactatgtttttcagagtaggaatttgagttatagcatgcttttcttcacagggtcagagttagaaatcaacggtttctga

SEQ ID NO: 634834 - DNA, 302 bp, Homo sapiens
atctcccagcagacaagccactatactgtgccactttaatttttgctttagtgccctttaatggcttctctgtcttaccagccaggctttagctcaccataaagcacctgctaggraattctgtggccagcctggtgattgtggtatgctttcagaaataaagtaaaaatgtttgtggaattgaggtcaaaaacctccttcatttttcttggcagttaattgactatgtttttcagagtaggaatttgagttatagcatgcttttcttcacagggtcagagttagaaatcaacggtttctga

SEQ ID NO: 634835 - DNA, 414 bp, Homo sapiens
tatatacataaacacatacatatacacaaatatatctgtgtatatgtgtagatatatgtaatgttatatagacacatacacacatggatgcacacgtgcatgcatgttagagaattattaagtatcattaataaaatgtagccattctagatcctgattttaaaggttattcattttgtgagagagaaataaacgatttcaaagcaaatgtaggacttttaaaaacatggcttcagagaaaaatccatacgtarggagcaataatcattgtaggtaggcaaaatacagtcacttttgattataaagctcattagttttatcagtgtaaatgtgaatatgaaagtagttagatattatgtgatgaaaggttttatattgactattttcaaaacttcacattctaatgtggattta

SEQ ID NO: 634836 - DNA, 636 bp, Homo sapiens
agttctatcagactacctctttttggggagattgtggtttgtatatatacataaacacatacatatacacaaatatatctgtgtatatgtgtagatatatgtaatgttatatagacacatacacacatggatgcacacgtgcatgcatgttagagaattattaagtatcattaataaaatgtagccattctagatcctgattttaaaggttattcattttgtgagagagaaataaacgatttcaaagcaaatgtaggacttttaaaaacatggcttcagagaaaaatccatacgtagggagcaataatcattgtaggtaggcaaaatacwgtcacttttgattataaagctcattagttttatcagtgtaaatgtgaatatgaaagtagttagatattatgtgatgaaaggttttatattgactattttcaaaacttcacattctaatgtggatttataattccattctactcacaatttctttacatctctattttttataatttgtttttatttgtgttttctgcagaataactatctttccatgtattatgcctcaaaattaaggcttcactcaagaaaaattgctatgctgtattcatttgaacatcaatgtcttatcgtatttctgcaaat

SEQ ID NO: 634837 - DNA, 636 bp, Homo sapiens
agttctatcagactacctctttttggggagattgtggtttgtatatatacataaacacatacatatacacaaatatatctgtgtatatgtgtagatatatgtaatgttatatagacacatacacacatggatgcacacgtgcatgcatgttagagaattattaagtatcattaataaaatgtagccattctagatcctgattttaaaggttattcattttgtgagagagaaataaacgatttcaaagcaaatgtaggacttttaaaaacatggcttcagagaaaaatccatacgtagggagcaataatcattgtaggtaggcaaaatacagtcacttttgattataaagctcattagttttatcagtgtaaatrtgaatatgaaagtagttagatattatgtgatgaaaggttttatattgactattttcaaaacttcacattctaatgtggatttataattccattctactcacaatttctttacatctctattttttataatttgtttttatttgtgttttctgcagaataactatctttccatgtattatgcctcaaaattaaggcttcactcaagaaaaattgctatgctgtattcatttgaacatcaatgtcttatcgtatttctgcaaat

SEQ ID NO: 634838 - DNA, 520 bp, Homo sapiens
gcttattcactaggaagacctcttaattttttttttttggaggtggagtcttattctatggcccaggctggagtgcagtggtgcgatctcggctcactgcaacctccacctcccgggttcaagcgattctcctgcctcagcctcctgagtcgctgggattacaggtgcgcaccaccaagccctgttaatttttgtatttttagtagagatggggtttcatcatgttggccaggctggtcttgaactcctgacctcaagtgatctgcccgccttgtcctcccaaagtgctgggaytacagctgtgagccatcacgcccagcctgacctcttaacttatgatggattatgcagttttattttgtgctctcaaagcagatcttccatagttctataatagacttgttattttacatagaattatgtatttatttgtcagtttcatcaacttgtttatatcttgagaacaggggccattttttatgtctgtaaaattttaataacctagaacaaatgacagaat

SEQ ID NO: 634839 - DNA, 706 bp, Homo sapiens
gaggtactgagagtagtcaaaatcaaaaagacagaaaatagaatgatggttgccagggactggcaggggcaatgggggagaacagggatttatgtttaatgggtatagagtttaaattttacaagatgaaaacagttatggaaatggatggtggtcatggttgcacaatattatgaatatatttaataccacwgaactatacaattagaaatggctaaaatgataaattttgttatatgcattttaccacaataaaaaagaaagaaaaaattattaacagtagactttcataagaatattaaataaggtaagctataactacaccgagattatttattagaaatattctgggtttgctttctacatattttttgtaaaattcccaccattacaatctatcaattggaaaaatatcttatttaatctgatttacagttacacagctaaaaaaatatgttatgagacttttttggtttgcctcaaaatttgaaggattggtcagtgctgcaggcaacaaagcagactaagaggactaaagatttttccaaggaaaatagtaatgtatcttaaactctgtacagaaactctgcatccagaattattactatgtggtataaaatgtagttattgttcaaaggaaacatagtttattgggttagataaaagcaaaatatttaataataaaacaccaagcattcaactaaga

SEQ ID NO: 634840 - DNA, 625 bp, Homo sapiens
ttaagtatacttttatataaggaaattaaaaagtgattgtgtgtgcccagagaaaagtgcaggttcttaaaagacctacaaacaccctaaatttataattcagactgattattggcacagacattctagaaaatatttttaaaaaacaacaacaataataaataagtaaaagcaattacaaagaacaacataccctaggtaagggggagaatccgatttccacagtataaaacttagtaggttcaaatattcattttttgagaaaaaattacaaggcatttgaagagaatagaaagtatggcccattaaaatgaaaaaaaaatcaataaaaactgcctctgaaaatgatagatctaccaaacaaagacttgaaaataactttcttaaagatgtttgaagaactaaagaaaaatgtggggaacacatttataataataaacmagaaacaacaataaattagaaatattaataaaaagaaatcttaaaaataaaccaaaaagaaattctaaaacttataattgcaatatttgaaataaaaacattcattaaaggaattcaaaggcaattttgagtaagccaaaaaaaaaattagtgaacttgaagataagataatgtaaagtattgg

SEQ ID NO: 634841 - DNA, 575 bp, Homo sapiens
gctccatagctagggctaccttgtaggcagagagtagcagtttggggcagttttgcagtcaaatttatatccacttttaattgcatgcagattaaggtgcagtttatgcagaaatttctctggaaggggtagtaatcattgggtcaccaccatggaaaggggcagtaactcctgtgtgttgccatggcaacagtaaattgacatggcacaccaacaggctgtctaattgaaagctgctttcaccctggctctgttttagctagttgtcaatctggtccagtgtccaagcctcagccctggggtcaagtattgcctcctatcgatcacgtatgtagctaattgctactatacagtgctgtttttagtcatcatgtgacatgaagcctggcaagcttcacttctgcaccccagttcatggacacagtaaagagaagtccaagacaattttaagatttattttaaaraagaattttgaacacagtgctcaagtttacaacttatggtcatactttgagccacaaaagagacaggaaaatctatctctagcttgggcagctatgtatcttgttaaaagt

SEQ ID NO: 634842 - DNA, 613 bp, Homo sapiens
cagcaaaatttcccctctcttcaagcacacagatcggacaataggaaagatcatctgaacatgctcagtgccttctccacctgttgcaaattctccagtgaaaagttttgttaatgtaactgaaatrcctttatatggaataacgagaggtctgagaaaagtctatcttcactagaaatgtcaagtatcagcaaaggtgtagggagccaagggctctcaaaaaccaccaatgggagttacacatataaccaatttggaaatatctgatgaagcttactgtagtgaagtattccagatactatactcaaaattatagtatctgtgcctgtctctgtctctcttcctctctcattctttttctctcaaatatatacatataggtgtaagtatgtgtccatatattaatgtgtatttatgtacatatatctgtatgtgtatatgtgtgtataaatatgtatgtatgtacaggctaccctgctttgataaaataacctcacaacaaggttgactcaaaaaagacagacattcatttctccttcacacagtaatctgaagttagctgggaaatgtaagatggatacagagatatactgcataaacgattgcaggataa

SEQ ID NO: 634843 - DNA, 613 bp, Homo sapiens
cagcaaaatttcccctctcttcaagcacacagatcggacaataggaaagatcatctgaacatgctcagtgccttctccacctgttgcaaattctccagtgaaaagttttgttaatgtaactgaaatgcctttatatggaataaygagaggtctgagaaaagtctatcttcactagaaatgtcaagtatcagcaaaggtgtagggagccaagggctctcaaaaaccaccaatgggagttacacatataaccaatttggaaatatctgatgaagcttactgtagtgaagtattccagatactatactcaaaattatagtatctgtgcctgtctctgtctctcttcctctctcattctttttctctcaaatatatacatataggtgtaagtatgtgtccatatattaatgtgtatttatgtacatatatctgtatgtgtatatgtgtgtataaatatgtatgtatgtacaggctaccctgctttgataaaataacctcacaacaaggttgactcaaaaaagacagacattcatttctccttcacacagtaatctgaagttagctgggaaatgtaagatggatacagagatatactgcataaacgattgcaggataa

SEQ ID NO: 634844 - DNA, 475 bp, Homo sapiens
tttctgaaacttcggaaagttggacaactctttcagatttagtcattgatatatttttcaaggcaatactagtttactttcagagcagtggagccattttcttctccggaaaaaaaatttcaggggtacttgaagggttaagtgttgtcagccacatgatctatgttcctgggacaataatgattggaaacctaattctaaatctcagcaaaccttttcagaaagtaacatatcaacaaggggagcagaaaaaaaaaaaaaaacagccataacgaggagaagacctacaaagttttatctacacatatagagaaataaatatctcatgatagttattaaaaagtaatcctgaaakgatggtcgtctttagtatggggttgggggtatgaccaaggtatgatgacatggcagggaatacatattctggaccccaagttactctgattttacagtttcttatctatgctgccaaatg

SEQ ID NO: 634845 - DNA, 551 bp, Homo sapiens
aacatcacatacccgggcctgtaaggggttgaggggcaaggggagggagagcattaggacaaatacctaatgcacacagggcttaaaacctagatgatgagttgataggtgcagcaaaccaccatggcatatgtatacctatgtaacaaacctgcacattctgcacatgtatcccagaacttacagtaaaaaaaaaaaaagcctcagtcctgcatttttatatgtactaaatggtgatgttgatctccacaacttcaagaaatcagtataattaaaatatatatatatatatattttcttagctaagtgtacaacagtttcagaggcttccacttggccttctccagtatgacagagcttactccaraagccatagaccatgtagggttcctcttactaccaagtatgttaatccaagttgtacactcaatgagacaataatcattgagtatctctgcagactcacgaggactcactacaaattggattttagccagaaattatatgtattacccactcattataagaaaatcatatttaacacctgggta

SEQ ID NO: 634846 - DNA, 662 bp, Homo sapiens
tcaattacctcccactgggtccctcccacaacatgtgggaattctgggagatacaattcaagttgagattttgggtgaggccaagccaaaccatatcacaccacagtttgaaaatgtataatattaaatattgtttttaaccacttgaactgctaaaaggtctactgccttaaacacatcaatctgagaacagactcagactatagataaaattatttatacacaacatatttatgtgattaatgcaatttggaaataatattagcagttgcaacaggtttcacatcttactgtgaggtatattttctggattccattgatattaatgatatctgtgatatttagcatattaacctctttcaccctaacagcagactatttgataaaaactaaacagtaacctggattctcataattttgtagataaaaaaacagtctatgatctaatctcttggcttaatgacaatataacgaaactaaattattgaaatgctggctcaaagctagactaactgattcatgcatgkttctgatttggaaggcagtttgataaagagaaattattctaggtcattattaaagacaaaaaattttaatgcactaagtgtgagatttactgctgcttacttaagtaaaaatcaaagcaccttttactgacttgt

SEQ ID NO: 634847 - DNA, 602 bp, Homo sapiens
gctttctgcctttcatcacaaattaaaaactaggaaattcttagaatcctgataaaaggtttaaatgttaatataataatattcctctgtgctatttatacagaagtaagatgttaagtagaataaaagatatttataagtattaataccaattttcaccaaaaatagtcatatctatgaacttctaatgacaaattggaattttaactgacaatgtttttgtcccagtacaggttatyattcttaaaagtattaccctatctaatacatttttggttatttttattctatttacaaaggatgtagtatctcatttgtcttgaaaatagctcagtgagaatttttatcactagtgaccaggtatttttcatcagaattatatataaattacaaggatttataatcagaaaaattggtgccaataagattttggagataattgagtaggaagagtcaagaatcattagaccgatggttctatgttagataattgtatgaatgtatatattgaacatttattgacaaaaagaatatggaataatgagacacagattgttattggaaatggggacactaataatgtaaatatttggagttcatgg

SEQ ID NO: 634848 - DNA, 626 bp, Homo sapiens
tatttttcatcagaattatatataaattacaaggatttataatcagaaaaattggtgccaataagattttggagataattgagtaggaagagtcaagaatcattagaccgatggttctatgttagataattgtatgaatgtatatattgaacatttattgacaaaaagaatatggaataatgagacacagattgttattggaaatggggacactaataatgtaaatatttggagttcatggccttctaggcaacaagtgtcaggtatttgggcagctaaaaagttaatcagactatttgatttataattctagcgataatattaagattggtttcctagtattcacctgagtagaacattttatatatatatagatatataaatataatcaccttgtgactmagacaaaactaaatgttaatattgctttcctctagcaccataatgaatgaagataaaagggtaatatccctagcttattgggtagtaaaatttatagtgtacttccctggaatttaacttctgcaacacagaatttcttggtgggtgaaagcaggaaatgagacaggctagtgattatgttgcagaaattaaatccaagtaagtatagccaaaacacagggact

SEQ ID NO: 634849 - DNA, 556 bp, Homo sapiens
agaccatcagaattgagagctccaaagatttccccaaggtaactgacattatttgaaacagtgggaaaagttcaagcctaagggtgcactcagtaaaaaagattttggaagtaaacaattaaaaagaggctggcagatccatgagagcaataagctaagcaatatacaagcaaatttattgagagaaccaaggaaagatgtaggtaagaagagtcttcctaaggtcagagcaaatcaagaagactggcctcaaatattgccttaataaaggggaccaaatgtaattaaatcagactttggagaacttcatgcccaagggaattcatgaaaatgtcacccaaaagaccaccagtatggctataytgtagaaaggagagctttattggctatactagtgtgcaagctgagaagaggaagtctccagcatgcgccaaagatgctctttctttgaagaaagtaaggacagattgggtttaatacctcacagggctagtatcatatatattcggcaggtttgggaagaaaaggacacaaaaatggtgtatgtacagcttct

SEQ ID NO: 634850 - DNA, 322 bp, Homo sapiens
gaccaccagtatggctatactgtagaaaggagagctttattggctatactagtgtgcaagctgagaagaggaagtctccagcatgcgccaaagatgctctttctttgaagaaagtaaggacagattgggtttaatacctcacagggctagtatcatatatattcggcaggtttgggaagaaaaggacacaaaaatggtgtatgtacagcttctaaaacctggctgaaactggtttaaggtgtgcaaatakcttatccaaacaaacaaacaaacaaaaaaaacggctgtaaaataggtcctctgtccagtcagatttgcagtt

SEQ ID NO: 634851 - DNA, 600 bp, Homo sapiens
tataacaattataaacatatgcaaataaatagataattccacaatgataatcagagatgcaaataactaattttccataatggatacaattgtgcagaccatcaacaaggaaaggaaagacttgaaaatactatgcaccaagtagttctaacagatatctatagacaacccacccaatagcagctgaatatgaattattctgaagtacaaatggagcattgaaaggatagacaataaaaaagcctcaataagtttaaatcataaaatcaaagtatgtaccctcaaaccacagtataattaaattgggaatccagaatacaaagacatttaggaatcacaaatgtgtagaaataaaacaataaaatcctaaataatcaagggatttggtatggtttggctgtgtccccagccaaatctcatcctgaattgtagttccagtaatccccacaggttgtgggagttaccaggtggagataattgaatcacaggggccgttttccccatcctgttctcatgatagtgggttagttctcagaagatctgatggtttttatgagagggttccccttcactkggtattcattcgctcccctgccacca

SEQ ID NO: 634852 - DNA, 570 bp, Homo sapiens
ctttgctcccatcacgggttcagaggcctaggaggaaaaaatgattttgtgggctgggtctggggtccccctgctgtgtgcagcttacagatttggtaccctgcatcccagctgctgtagccatggctaaaagggaccatacaacttgggctgtggcttcagagggtgcaagccccaaaccctgcaccttccacatggtgttgagcctgtgggtgcacaggagacaagaactgaggtttgtgaacttctgcctagatttcagaggatgtatggaaacatgtggttgcccaggcagaagtttgttgcagggcagagccctcatggagaacctctgctaaggtaatatgaaagagaaatgtagggtcagagcccccactcagagtccccactggagtactgcctagtggagctgtgagaagagggccactatactccagacyccataatggtagatccactgacaccttgcactatgcacctggaaaagccacaggcactgaatgtcagcccatgaaaacagctgggagggggggctctaccctgcaaaaccacaggggcagagctgcccaa

SEQ ID NO: 634853 - DNA, 572 bp, Homo sapiens
ttgaacctgggagacagaggttgcaatgaacagagataatgccattgatggcagcagcagcctgtctggagtggctgctacaaagacgccagctgcagcataggaggtgtggccagggatgaaagctccatggagccagaggcagctgggaacaggcaggagtttcatccccttctgagctgttagggcaggagcctcatgctcctgggcacaattgaagctgcctagccttgactgtggacctgggcatccctgtgatattggggtccaggaaaccccttggccctgcaggcttcaaaatgtgtgctcccactgyctagtctctacatgctcctggcacctgctcagattttggaggaaagttgtggccgagcccaagtgctgtcacaacccggacaggtgtgtgtgcactggggccagtgctgactctccagcccccttgtggcatcagccccatgcttccttagctccctctggactttgggcactgatgagcatgggagggagattgagggagggctgagggcagcttggcacaagcctgcaggcttccattggcaaaaagaacctga

SEQ ID NO: 634854 - DNA, 597 bp, Homo sapiens
tatgagaaaaaacaagcaacccgattaaaaagtggtcaaatgacatgaactcacatgcagccaacaatcatatgaataaaggctcaacattaaagatcattagaaaatgcaaaccaaaagtacaatgtaattccatctcgcaccagtcagaatgggtattattaaaaaaatgacggctgggcgcgttggcttaatcctgtaatcccagcgctttgggaggccgaaatgggcagatcacgaggtcaggagatcgagaccatcctggctaacatggtgaaacccatctctactaaaaatacaaaaaattagccaggcatgttggcaggcgcctgtagtcctakatactcaggaggctgaggcaggagaagggcatgaacccaggaaggggagcttgcagtgagccgagatcgcaccattgcacaccagcctgggggacagagcaagacttcatctcaaaaaaaaataataataataataaaaaagtcaaaagggaaaaaagatgcttatacactgttcgtgatagtgtaaattagttaaaccattgtgtaagacagtgtggcgattcctcaaagacctagaggcagaaataccatttta

SEQ ID NO: 634855 - DNA, 526 bp, Homo sapiens
tctatatggagactggaaaagaagaaatgaaattctaattatttaaagataacattactatatatgttaaaattcaaagagaatatatagaaaatcaattcaaattaataaatacatttagcacagctgatgagacaaatattttagaaattatttatacttctacacatcgcaactaacatttatacaactttctamaaaattgtatcatttatgatagatagcattaagaatattacatgcctaggaataaatgaaatacctaggagaaatatgttaaagatttgtatgaaagtataaaatggccacatattattagatacctttcccacaaagaggtcttgtctattcctcttcatgctttgagcaacacaatgtggcaaaagtaacattttatcagtttgggggctcagaccttaagagactagcagcttctacttctcctctcaaggaacacttgctattggaatttagcatccaaattgggagaaaaagcaggcatctccatggagagatgcagatacaa

SEQ ID NO: 634856 - DNA, 624 bp, Homo sapiens
aagtaacattttatcagtttgggggctcagaccttaagagactagcagcttctacttctcctctcaaggaacacttgctattggaatttagcatccaaattgggagaaaaagcaggcatctccatggasagatgcagatacaacatcaactgattccccggcctgacagtcatcaaccaacttttcagccatgtgaaccagccattttggaagtggccccagctgaagccacactgaagaaaaacaagctgtcttcacaaagtcttactctaattgaattcatgagctagataaagtattgtcttaagccactaaagttgggtagattggtataacacaatagataactgggaaaatgttaatggcttgaaacagtcagtatggtaacaaagtcaattctcttccattaattcttccagttcggtgcaatatcagttaaaattcaagatacaaaaacagtacatatgagatgagtatactcatttaatgtttaaaatgagtcaaagaaatctatggtgttagaaacatgatatcggttactgtagacatggggtgaaatggagaaaatgtggagaacagagagatgtaggtcctttgtggatggcaatattgtattcattgatt

SEQ ID NO: 634857 - DNA, 519 bp, Homo sapiens
taacaaacctgtgcatcctgcacatgttcctcagaacttcaacacaaagttgaaggaaaaaattaagaatgcagaaaactrcttccccagtttcattcctatttagatgtagtaaattataaccccaataaatctctttcatattgaaccagactgtttgatttccatgtctttcttcagcctgatttgttcctcatatacaaactgtacaattgtatataggaatttggtgaagtatagagaagaaatactggaggactattcagcttattaccgtctgaagtagctctgttttggcactaatcatattcattcaaatcaaccaaaacaaaaatcttgcaaaaaaacaactacccttttcaaagtttggtatagtgatgctaatatttctcgtgtagatttcattggaaggaagaataaaatccttactcttttatcctatccaaattatcaaaatatctcttctaccctcatgctgtactccatgagtgtctggttaaataaaatctcttaactctt

SEQ ID NO: 634858 - DNA, 565 bp, Homo sapiens
aactgatatttgagccaaagtttaaaaaatgagtaagtaagtttttgtcttatgcataggaagaatagagctgtctgagtgaaaggtgaaatttgggaaaatacattgaataattaaaacttcatgcaattcaatatagctgtactttaggggcaaggaatgggtacaggaaaaaatgaggctgaagatgtaggctgcagtgaaacttaagcaaattttatacatcttctgaaacacttttgaaaacgttattgtaagtaaacatgttggagatagagagcaagaagaaaaagatctaccgtcatggctcatttcttcaaagtgaaagaaaatccagctcaagcaagcttaaccaactatcacracgtaaatatatatattcacagaatggaagaatctacagtgaagttttatttcatgcatagttggatctagatgctgacacaataaattctagcctcaactttgcgttgctataattttcagatagacgccacaactagttacagaaatagtttttaacaatcccacacaaaggccaggtgcagtggctcacgcctgtaat

SEQ ID NO: 634859 - DNA, 617 bp, Homo sapiens
gtaagtaaacatgttggagatagagagcaagaagaaaaagatctaccgtcatggctcatttcttcaaagtgaaagaaaatccagctcaagcaagcttaaccaactatcacgacgtaaatatatatattcacagaatggaagaatctacagtgaagttttatttcatgcatagttggatctagatgctgacacaataaattctagcctcaactttgcgttgctataattttcagatagaygccacaactagttacagaaatagtttttaacaatcccacacaaaggccaggtgcagtggctcacgcctgtaatcccaggattttgggagtccatggcaggcagatcacttgaggttaggagttcagagaccagcttggcaaacatggtgaaacctgtctccactaaaaatacaaaaattagctggacgtggtggtgtgtgcctgtaatcccagctactcgggaggctgaggcaagagaatggcactccagcctgcacaacagagtgagactccatctgaaaagtaaaataaaaaaggaaaaagaaggaaggaaggaaggaaaatagaaagaaagaaggaagaaaaagaaatcccacacacaggttatactgcatagaa

SEQ ID NO: 634860 - DNA, 617 bp, Homo sapiens
gtaagtaaacatgttggagatagagagcaagaagaaaaagatctaccgtcatggctcatttcttcaaagtgaaagaaaatccagctcaagcaagcttaaccaactatcacgacgtaaatatatatattcacagaatggaagaatctacagtgaagttttatttcatgcatagttggatctagatgctgacacaataaattctagcctcaactttgcgttgctataattttcagatagacgccacaactagttacagaaatagtttttaacaatcccacacaaaggccaggtgcagtggctcacgcctgtaatcccaggattttgggagtccatggcaggcagatcacttgaggttaggagttcagagaccagcttggcaaacatggtgaaacctgtctccactaaaaatacaaaaattagctggacgtggtggtgtgtgcctgtaatcccagctactygggaggctgaggcaagagaatggcactccagcctgcacaacagagtgagactccatctgaaaagtaaaataaaaaaggaaaaagaaggaaggaaggaaggaaaatagaaagaaagaaggaagaaaaagaaatcccacacacaggttatactgcatagaa

SEQ ID NO: 634861 - DNA, 491 bp, Homo sapiens
ggtaagtctgggtggactccatgactacttaatcattagaatatgataaaagcaatccactgccatatttttttttttttgagacagagttttactcttgttgcccaggctggagtgcaatggcacgatcttggctcactgcagcctccgcctcccaggttcaagtgattctcctgcctcagcttcccgagtagctggtattacaggcaactgccaccacacctggctaaggttttgtattttcagtagggacaggatttcgccatgttggccaggctggtcttgaactcctgacctcaggcaatctgcctgccttggcttcccaaagtgctgggattagaggcatgagccaccrtgcccagcccactgccaatttttgaccccaggcctcaaaaaatgggagctaccactggctctgaatagtgtcacatgttttacgttcctgttactgtgttttagaacccagtcacaatgctacgaggaaatctagg

SEQ ID NO: 634862 - DNA, 491 bp, Homo sapiens
ggtaagtctgggtggactccatgactacttaatcattagaatatgataaaagcaatccactgccatatttttttttttttgagacagagttttactcttgttgcccaggctggagtgcaatggcacgatcttggctcactgcagcctccgcctcccaggttcaagtgattctcctgcctcagcttcccgagtagctggtattacaggcaactgccaccacacctggctaaggttttgtattttcagtagggacaggatttcgccatgttggccaggctggtcttgaactcctgacctcaggcaatctgcctgccttggcttcccaaagtgctgggattagaggcatgagccaccgtgcccagcccactgccaatttttgaccccaggcctcaaaaaaygggagctaccactggctctgaatagtgtcacatgttttacgttcctgttactgtgttttagaacccagtcacaatgctacgaggaaatctagg

SEQ ID NO: 634863 - DNA, 540 bp, Homo sapiens
ccttggctgttttcttcaccactgactttctatcatattaaatgctctataaatattttgatacatttattaggtagagaatttggaaaataagaccatgataactcagcctctatatgtatgtatgtgtatatgtgtttgcatgtgcatatgtttgtgtgtatatatatacatatttaacaattttaatcatatcatataaaactgttacagtatattggttaaagaggaaaggctctgtgctcaaaatatctgggctggaatgaccccagctctgccattcttaactgccagttcctccatgttcagttacttcatctgtaaaacaggaatattaatagtacatgcttcaaactttgtgagaattaaatgagwtaaaaaatttaaacacttttttaattttttaaaaattaaaaattaaatgagataaaaaattaaaaatgagaattaaatgagataattaaaaaattaaaattaaaaaatctctttcatgaaatcaaagtaagtcctcaatgtaagatagtttattataatttttta

SEQ ID NO: 634864 - DNA, 609 bp, Homo sapiens
ttgttcatcaagaaaatacagttaggaaaataagaaaaagtaaatctaaagacttaaacaaaaagcatctacagtcaacaactgcttgataggtttttgtttygttttgttttcagaaaccaagtttctaagcccctgtttaatacaggtgggccaggagaatttattatttgtgttaatattatgtctctatcttcccctggatgtaagctaatatggaagaaaaagttttcagtttgttcactgcaacactaagtgcctagcacagtgtttgaaagagtagttagttgaaaaacattagtgaaaataaatttctgtatcaagatttaaatggcaattgattttttgaaaaggtaatacaaatgcagtcaaccatattatttatctttggagaatcagaataaaatggcaaaaatatgtgagtatttttattggcccaaactagtagatgttgcaagcaaacactgcaaagaatattcactaaacaaagttccgacagcaattattgaaaaaaaaatcaaagatgacctttcaaggaggtttacatatttagtatataaatgttgattatttctgttattaaagcaaatttataaagagtagcacaaa

SEQ ID NO: 634865 - DNA, 506 bp, Homo sapiens
tgcttaaatcatattgtttagtgatgaaagttagaatttgaagtggttgttttgtgatttgatcctttcaaattattttaaatttttattgatctcttcattttgctatgaacatttatagcactttgctgtttcaatatttttaggaagcgtctattctctgtctggatacttttactaaattttctatattaggctcattgcttggaccatcatctgtcttcctaggtatttctcaagattctagctaaaayggaaaggctgcatatacaatccaggacccttgctgagactggatcacatttgtcctgagggaacaaaatgcacggcagggggctataattcagaagctgaatatttaacccagttgttcccttgcagttgcattatatttaaaaaaaaaaaaaaaaggttgagacacaccgaaaatcttatgacctgtactccccatttctcttaatttcactttgttttgagagaaaaacaagtaaaattctcaaaaccaa

SEQ ID NO: 634866 - DNA, 416 bp, Homo sapiens
ttacttttcttttactacattcaaaatttgttattccaaattataactctgtcacctgtaggaaagacataatacctcctacaaaggagaaaagtagacttatttctagtaattatgctaagtgatagataatcccttaaaaagtttttggacttcagcagtcacttgcatgtgtattgctagcagaatatacaatctaagtaaacttaaacttctgaaaactagtagtttcgtatacaatagaaatctgaatttaycaaactatccaccaaatttggctgactattcaaattatatgtaagtaggttgactagctctgatctacataggcctaagtaaaagtactaagtcatgctaaatcattttcactatcttcattgagatctggcaggtattctgactccgtctttttattt

SEQ ID NO: 634867 - DNA, 416 bp, Homo sapiens
ttacttttcttttactacattcaaaatttgttattccaaattataactctgtcacctgtaggaaagacataatacctcctacaaaggagaaaagtagacttatttctagtaattatgctaagtgatagataatcccttaaaaagtttttggacttcagcagtcacttgcatgtgtattgctagcagaatatacaatctaagtaaacttaaacttctgaaaactagtagtttcgtatacaatagaaatctgaatttatcaaactatccaccaaatttggctgastattcaaattatatgtaagtaggttgactagctctgatctacataggcctaagtaaaagtactaagtcatgctaaatcattttcactatcttcattgagatctggcaggtattctgactccgtctttttattt

SEQ ID NO: 634868 - DNA, 573 bp, Homo sapiens
actttggctgttctatggaaatagtgacaaatcccaaatgccgcatactgcttgagaggtgaaataatcatctgaggagtgaccatattcagaaaacaagaataaaaaagaaaaaatagctcttctgaaaktattttttctattatttttagcttttagaaataatattgattttttaaattgtaaacagcctctctcattccatacaaaatcagtgttaactaagtattaaaagaacttgtgttgaaaatctaagtatacaagtcatgacttattttctgcatgagtccaggttttttaatagagacctataaaaatctaacttttccatgtttcaacatgtggttacatataattaatacaatataatataatgaaaatgcaagaaattacctctcatttttatgtaatggaattcattttagatttcccccctgtaaacaccttgcaacaagactcaaactgggaattaaaatcaacagagactgctttgaagtcatcttgtcattacaagaacaaatataaacagcctaccaattagagatttaccatacacttgccagtgatactaaa

SEQ ID NO: 634869 - DNA, 573 bp, Homo sapiens
actttggctgttctatggaaatagtgacaaatcccaaatgccgcatactgcttgagaggtgaaataatcatctgaggagtgaccatattcagaaaacaagaataaaaaagaaaaaatagctcttctgaaattattttttctattatttttagcttttagaaataatattgattttttaaattgtaaacagyctctctcattccatacaaaatcagtgttaactaagtattaaaagaacttgtgttgaaaatctaagtatacaagtcatgacttattttctgcatgagtccaggttttttaatagagacctataaaaatctaacttttccatgtttcaacatgtggttacatataattaatacaatataatataatgaaaatgcaagaaattacctctcatttttatgtaatggaattcattttagatttcccccctgtaaacaccttgcaacaagactcaaactgggaattaaaatcaacagagactgctttgaagtcatcttgtcattacaagaacaaatataaacagcctaccaattagagatttaccatacacttgccagtgatactaaa

SEQ ID NO: 634870 - DNA, 572 bp, Homo sapiens
aagtaggtagggttaagatttgaaatgcatttaataattttgagaaaacaggtatttagtagaattctctttaggtaagcttagaagataatcagacaacagataatgcatacatgaataaatataaatgccagtatcagaaaatacagttattgtctttccaatctcatgtaccgcatctataaagtrtaaagaattcttactcttagataattcttaagtcttactttacatttattttcaataaaatggtacaaaaagatattagggattggagaaaaattttctgacattctgaaataattataaatctcacacaatagattttataataacacttgtcttttcattttattttttactgacagcaattttgttttcctaatattttctatctcagatgtatcaacatgataatgaagaactgataaggctgaggaacatcagcaagatggcagaacagaagattccatggcatgactcccccaaaaaaatataaaaagaaattattcaaataaaaagatacaaccatgaattcaccagaactcagaggagaagtggaaaaactccct

SEQ ID NO: 634871 - DNA, 563 bp, Homo sapiens
tcgcttaagaaacactatttttttaaaactatgtatttcctagaaagttatctaatatctatggtaccaaccaattctctgtttaaaacatgaactggaagcaaaaaaataataatatgcttctctgtatgtgtgtgcatatgtgtgtgtatgaatattaagagagttataaaaatacatttgaataagtatttctatatctatgagctctctaagcacctatgaactataaggttttacttacacataaaatatctttacttacacattraatatctgagtttctaaacaactatcagctaattactcacttttttcacaaacgcttggcctgtatcttccatattttagaatatatcatgtatttgttaacctgcgtaaaacaaattttatctacactggagtgctttagtaagtagatagactatttcaatgggaaaaatattataataataggactatgaaagctttctgaaaaatagaatatgacctggaaagggattccagctgaaggaggaaggtgtgaggtaaacacagaaagataggaatctatattcagatat

SEQ ID NO: 634872 - DNA, 563 bp, Homo sapiens
tcgcttaagaaacactatttttttaaaactatgtatttcctagaaagttatctaatatctatggtaccaaccaattctctgtttaaaacatgaactggaagcaaaaaaataataatatgcttctctgtatgtgtgtgcatatgtgtgtgtatgaatattaagagagttataaaaatacatttgaataagtatttctatatctatgagctctctaagcacctatgaactataaggttttacttacacataaaatatctttacttacacattgaatatctgagtttctaaacaactatcagctaattactcacttttttcacaaacgcttggcctgtatcttccatattttagaatatatcatgtatttgttaacctgcrtaaaacaaattttatctacactggagtgctttagtaagtagatagactatttcaatgggaaaaatattataataataggactatgaaagctttctgaaaaatagaatatgacctggaaagggattccagctgaaggaggaaggtgtgaggtaaacacagaaagataggaatctatattcagatat

SEQ ID NO: 634873 - DNA, 563 bp, Homo sapiens
tcgcttaagaaacactatttttttaaaactatgtatttcctagaaagttatctaatatctatggtaccaaccaattctctgtttaaaacatgaactggaagcaaaaaaataataatatgcttctctgtatgtgtgtgcatatgtgtgtgtatgaatattaagagagttataaaaatacatttgaataagtatttctatatctatgagctctctaagcacctatgaactataaggttttacttacacataaaatatctttacttacacattgaatatctgagtttctaaacaactatcagctaattactcacttttttcacaaacgcttggcctgtatcttccatattttagaatatatcatgtatttgttaacctgcgtaaaacaaattttatctacactggagtgctttagtaagtagatagactatttcaatgggaaaaatattataataataggactatgaaagctttctgaaaaatagaawatgacctggaaagggattccagctgaaggaggaaggtgtgaggtaaacacagaaagataggaatctatattcagatat

SEQ ID NO: 634874 - DNA, 609 bp, Homo sapiens
ccaaagtgcctggcacatacacattaaatgaagatgacatataatactcattttctttttgtcttatttgttggtatctattttgcaccagtgactaaaacagattacatactcacagtaaggatatgctgtgtgaattgaagaagcagcagctaggacaaatcaaaaaatttctttcatctttacmtccccagcaccccatgattcccatattgtcataatccttttctgtttggagaaggtaaggttcttgacgtcaagcagcatatctagctttgtaaaaactgtaaattctgagcatagagcctggcatattattggagcgcaattaatatttgtcaaatgagtgaaatgtagcagtttaggtgtgtgagtttattaaaaaaaagcctaattaaggctagtaacaaactaacaagagaaactgggcaggcttaataatgatgtttgacctgatgttataccagacttggaagaaataaatttgccaaagaaaaggcaatatttaaaatatgaaaaagtacaaggattatgatgttactcacataaatacagtaataatggaaaaatgattatacggtatgatattaattaagtgtaaagacaagt

SEQ ID NO: 634875 - DNA, 457 bp, Homo sapiens
taaacatgctagtatccccacaarggaccactgcaaagaagaaagggaagcacagactcagaaacttgaagaactgcatggggtttatttgaacaattcaatctgccacacatgtagctaaaagttacctgcatttgagatgaaaaaattctagtcctgctttccaccccccacagaaaacaccctaaattcatccctgaaatgttgttagatggtttcagaactaaacaggaccacaagaaatcatgctgcatcctttctacaggaaaagaaggtaagtatttgttgatctgtgagggtaccttctgtggccaatgagaaacatggatgccacttggcatagtacctggcacatgcaggcccctcagtacaggttctttttatcataagtatctgatttgaaacaggtataggctgtgtaattacaaatattgcaaataaatttttttaagaattc

SEQ ID NO: 634876 - DNA, 397 bp, Homo sapiens
ttgcagaattctaaatcactaccaggaaagggctcagagaaagccgtcactttgtgagacctcagaagcaacctggagccaggtctgtggttgaagaatgtttccaaactggggtgatggctatggctatttttttttkttgttgttattgttgtcagatgcctcagggcgccaacaaatgagagtgggttgttgtccttagagggtgtttttttttttctcttcaatttcttactttggggaaaactctggaaatgctgtgtgttttgggagatttccaggggttattgtaggaagggtagaagactcccccatccacactggggtgaccctctgggaagggtagaagactcccccatccgcactgggatgaccctctgggtgccaccgacttccc

SEQ ID NO: 634877 - DNA, 397 bp, Homo sapiens
ttgcagaattctaaatcactaccaggaaagggctcagagaaagccgtcactttgtgagacctcagaagcaacctggagccaggtctgtggttgaagaatgtttccaaactggggtgatggctatggctatttttttttgttgttgttattgttgtcagatgcctcagggcgccaacaaatgagagtgggttgttgtccttagagggtgtttttttttttctcttcaatttcttactttggggaaaactctggaaatgctgtgtgttttkggagatttccaggggttattgtaggaagggtagaagactcccccatccacactggggtgaccctctgggaagggtagaagactcccccatccgcactgggatgaccctctgggtgccaccgacttccc

SEQ ID NO: 634878 - DNA, 633 bp, Homo sapiens
cactgatgaattattccaaacatctaagaattaaataatacaaattctacactcaatttctccagaagaatagaagagaatgcttcctatttcatgttatgacatcaacattaccttaatacaaaaaccacacaagatattatcagagaaaattacaaccaattttcttaataaatataaacattaaacatgttaacaaagttagagaaaatcaaatccatcaatacataaaagggataacaccttataaccaagtaaaattcatcccgggaatgcaagatttaacattaaaaaccaattgatgtaatcatcatgttaataaatgcaaaaagaacaaccacaagttcatctcaatagattcagaaasagaatttgacataagtcaacattcatttatgataaaagctctcagcaaactagaaatagaaggaaacttcctcaactggataaagagcagctacaaaaagcctacagcaaatactatccttaatggtgaaagactaagtactttcaccctaagatcgggaacaaggtggatttatttttctcacggactgggagaaaatgcttgtgaaatatatgtcaaaaacaaaactcaataattaaaagacaggccaacttaaaaacagaaca

SEQ ID NO: 634879 - DNA, 571 bp, Homo sapiens
gagaaataaaaacctttattgaacaaaaatgttcaataaagcattttattgaatgrcagcattattcataatagccccagagcagaatcaacccagatgtccatcaaatgatgaatggacaaatcaaatgtgatatatccatacaaagaaatattattcagccataaaaaggaatagagtgctgatacatcctacaacatggatgaacatgagggaagtcaaacacaaaagagcatagattgtatgattccatttatatgaaagtccaaagtaggcaaatctgcagacagaaagtaaattagcagatgtcagggcaggaaggaggagtgactgctagtgggtacaagatttctttttggggtgatgaaaatgttctggaattagatagtgctgatgattggacagtcttgtgaataaactaaaactgctggattgtacactttaatgtggtgactttcacaatatggaaattatatctcaatttaaaaagtgagatgaatggctgtggctaatcaagatgctgatgaggatcctgcatcctgccaccctgagagtcacagcccaggaagag

SEQ ID NO: 634880 - DNA, 546 bp, Homo sapiens
cattgggcctatacttattaataaagagatctcaacatcagattctactttctaaagagtggctttctcagtcagcttggacactgaaagaactcagtagaggggtgaggaaaaataaagctcatgagaatactctactagatctacacaatattttctttagagtaagagatgatgctctggaggtttgcattgctaattataatacacagtttgagaccttgaaattgatctagtatataagcaaacgaaagcctcctgctatctggggtgattcatcaaaaccagaaagtgtgccatgtcaccccatccccccgaaaaggaaactgctggaaagcatgttatctttatagagtcatttggttcagcaaatactttcccgtcagtcagcgtcagccacagrcaaaagtgtgaaataaaaaacgtcggatcttcactatgagcaacatccctcactcaagcctctttttggttgttttggtttgggttgggttggttttttgtagaaacaggtctcactatgttgcccaggctggtctcgaattc

SEQ ID NO: 634881 - DNA, 607 bp, Homo sapiens
tgtactcaagacctgtgcatttcattgcatgtacatcttacatcaaaagaaaaaaaaaactgtaaacgtgttaaactttagttatatatgcatattatgaagtatttagggttaagtgtatttatgtctgcaatttattttgaaatgcatcaaaaatatagactcatagatggatagatgaatagataaattagacagataaatagatgattgatagataatagctagatagataaaaatagctatagtaaaatattaatagcagacactccattgtatataagtgttcactatataattcattcatctttgttgtctgtatgaaarattttataataaaatgtggagggctagatgagatggctcacacctgtaatcctaacactttgggaggccaaggcaggaggattgcttgagcctaggagtttaagaccagcctaggcaacatggcaaaaacctgtctctacaataacaaataaaaataattagctgggcttgatggtgcccatctgtagtcccagctactaaggaggatcacctgagcctggggtggtcgaggttgcaatgagccatgatcacaccacttcactccagcctgggcaacaga

SEQ ID NO: 634882 - DNA, 604 bp, Homo sapiens
tgaaaaatcagcagaaaaatgaagagcttggtttgttgtacagagtaatcagagagcactcacacagcaatggtagtttctggaaatttggtctggaaaacaataattaaaaatctttcctgcttttacarcatctggtactaaccatcacattctgggaatcttgacttgcatgcagagattttcttaaattatttctccctcatttagtattcacatggcttttattttcttataataatttccttttttgattatatatttaatactaacataaattttgcatgaatttggggaagatctgtaatggcataaagataaaatttaaaaatcacttataattcattattcagaaataccaatttttaacattctcgggtatacccttttattctttcatatgtttttgttttttttttttgaaattagaggatctattttacattttgttgtgcaatctgcttttttttacttaaaggtttttgtggaaatttctccatgcaattaaacattcttctaaatacagttttttaaaaggtgccgcagttgtaatgttgtaaatgcactatatttacttaaccatttccttgtggtaaaattttaa

SEQ ID NO: 634883 - DNA, 583 bp, Homo sapiens
gtaaattataaaatcagtcctgtccctaagtttccagaggttaaatttacctacagttccccataatttcgtccccatccaactttgatattttttaagtttgctacttcttatccccagattattaatgtaacagtcaggtgagcaccctagagcagtcttttttcctgtatttcctatgtttccttatttttattgtccaaatcagtgctgcctgtgctataaatggagctgcagttatatattgttcttataatgcttcttctcagatcaaaaacttcaaacagaattcattggctaaaaactaaatgcactgaagtctctatctaaattcatgttaactgctggattatacaaattcattttctaataattgcccaatttcaactacaacatataaccmaaccagacaaattctgaacaattcttcatggtagaaagaattcaaataaagatttaaggaaatcctcattttcaaaaattactgtctccaaaaaaaaaaaattaagtaaatgtttttgcattcctgaaatgccctgtgtctacagtgatcaggtacagaaaagctacttcaagttcaaat

SEQ ID NO: 634884 - DNA, 583 bp, Homo sapiens
gtaaattataaaatcagtcctgtccctaagtttccagaggttaaatttacctacagttccccataatttcgtccccatccaactttgatattttttaagtttgctacttcttatccccagattattaatgtaacagtcaggtgagcaccctagagcagtcttttttcctgtatttcctatgtttccttatttttattgtccaaatcagtgctgcctgtgctataaatggagctgcagttatatattgttcttataatgcttcttctcagatcaaaaacttcaaacagaattcattggctaaaaactaaatgcactgaagtctctatctaaattcatgttaactgctggattatacaaattcattttctaataattgcccaatttcaactacaacatataacccaacmagacaaattctgaacaattcttcatggtagaaagaattcaaataaagatttaaggaaatcctcattttcaaaaattactgtctccaaaaaaaaaaaattaagtaaatgtttttgcattcctgaaatgccctgtgtctacagtgatcaggtacagaaaagctacttcaagttcaaat

SEQ ID NO: 634885 - DNA, 583 bp, Homo sapiens
gtaaattataaaatcagtcctgtccctaagtttccagaggttaaatttacctacagttccccataatttcgtccccatccaactttgatattttttaagtttgctacttcttatccccagattattaatgtaacagtcaggtgagcaccctagagcagtcttttttcctgtatttcctatgtttccttatttttattgtccaaatcagtgctgcctgtgctataaatggagctgcagttatatattgttcttataatgcttcttctcagatcaaaaacttcaaacagaattcattggctaaaaactaaatgcactgaagtctctatctaaattcatgttaactgctggattatacaaattcattttctaataattgcccaatttcaactacaacatataacccaaccagacaaattctgaacaattcttcatggtagaaagaattcaaataaagatttaaggaaatcctcattttcaaaaattactgtctcmaaaaaaaaaaaattaagtaaatgtttttgcattcctgaaatgccctgtgtctacagtgatcaggtacagaaaagctacttcaagttcaaat

SEQ ID NO: 634886 - DNA, 561 bp, Homo sapiens
aaaggaaccaagtaaactctgagcaggggcagagaaaagagattttttttccctagctcmattttcaaatgtttttgaatcattttttttttcaatcaaattcagagcatgccccatttatttgcaaacctggctggtataatttttgtcatagtaacccacgttttcataattttcatttgagattgcaaaatgctcttgcacagcattttaaaatagcaggcaaaccagccttggagccctttccctgggaagggtagcggtgggggtgggagctcttctcctaaaggacagaaaggcagagccacaggagctctgacacaggagaagatcccaaaaagtaggacaccctggagggtatttggcatataacaaggttgagctagctcccaatcgaagcaaaatcaaagcagcctggcctcacattggagatgggagtctgcctggagctgacaaagcccaggctaggcagggcgtaatgacaggaaaggaaatgaagacattcctcagctctcctcccaccttctttttctcagacccaaagatgctgtatcaaatttc

SEQ ID NO: 634887 - DNA, 561 bp, Homo sapiens
aaaggaaccaagtaaactctgagcaggggcagagaaaagagattttttttccctagctcaattttcaaatgtttttgaatcattttttttttcaatcaaattcagagcatgccccatttatttgcaaacctggctggtataatttttgtcatagtaacccacgttttcataattttcatttgagattgcaaaatgctcttgcacagcattttaaaatagcaggcaaaccagccttggagccctttccctgggaagggtagcggtgggggtgggagctcttctcctaaaggacagaaaggcagagccacaggagctctgacacaggagaagatcccaaaaagtaggacaccctggagggtatttggcatataacaaggttgagctagctcccaatcgaagcaaaatcaaagcagcctggcctcacattggagatgggagtctgcctggagctgacaaagcccaggctaggcagggcktaatgacaggaaaggaaatgaagacattcctcagctctcctcccaccttctttttctcagacccaaagatgctgtatcaaatttc

SEQ ID NO: 634888 - DNA, 558 bp, Homo sapiens
ttagatatatattcacacatatcctaaaaactgtaaccatagtagtttgaaaaatatcatatgttattatgaccaccattaccaaatgttttacttaaaggataagatataaatgctacaggcccaaaataccatgaagatttgccattgtaagcaaaatatctccttataaccaacagttctctttcaaaacatttttcaaaatataaaaacgtaatatctgcttgacagatattgtaaaccaataaaagacaaataaacaaatactcttatactgaatctcaatattagcttttggtttcaggtgcaatrtagttattctgatgggcaaaatcattcaaacttattttaacgtgtgcgtaactatagcattctcctctacatgtggatgagaatacagttgcgtttagctaggctaagaatacggctgtatttagctgggctaatgtttccactgtcaaatctactaatcaaaaagccaagttctactgacatttctcggcattcctattagggactaaatatatatttgtttacttatttaatgtgatacttctt

SEQ ID NO: 634889 - DNA, 492 bp, Homo sapiens
catgaacaatatgtacttgcctgatgtgttccctctatatcaacctctacattaacccaccaatggtggcttcagccacaggatataggaagatctgaacatgcagggccatttctccacaaaagaaacaggacaaaaatggaagataattcctacttgctggatgccctgacattgacatcccctcattccktgaatttacagtcaacagtaaacttgcacaatcgaagttaatcctaacataacctcctcattgaaactcataacgctgtcaggttcttttatcccacccttcgcgtaatgcacacctccaatcttgccccacgtgaataatttcactgtaccattactgataccagcattcaaatgatttaacaaaaaacatagcaaattttttcttaacccaaatctagctgatcaaaattctgattaaacttttgcacaaaaaaaaatttgaagaaaaatttaaaggacaatgaaaactaatagata

SEQ ID NO: 634890 - DNA, 579 bp, Homo sapiens
tcaattgttttgagttttagatcccataaatcaatgaaaacatgcaatgtttgtctttctgtgcctggcttatttcacttaatataatgaccttacgttctatccatgttgttgcaaatgaaaagatctcattcttttatacagctgaatagtatgccattgtgtgtaagtactagactttttttttccattcatctgttgatgaacacttcagttgcttccaaatsttggctgttgtgaacagtgctgcagcaaacatgagggtgcaaatatctcttcaatatactgattttctttcttttgggtacatacctagcagtgggattgctgggtcatatggtagctctacttttagttttttgaggaacctccaaactgttgtttggagtggttgtactaatttacattcccaccaacagtgcacgagggttcccttttctccacatcctcgccagcatttgttattgcctgtcttttggatataagccattttaactggggtgagatgatatctcattgtcattttgatttgcttttctctgatgatcaatgatgtttagcacctttccatatgcctgt

SEQ ID NO: 634891 - DNA, 579 bp, Homo sapiens
tcaattgttttgagttttagatcccataaatcaatgaaaacatgcaatgtttgtctttctgtgcctggcttatttcacttaatataatgaccttacgttctatccatgttgttgcaaatgaaaagatctcattcttttatacagctgaatagtatgccattgtgtgtaagtactagactttttttttccattcatctgttgatgaacacttcagttgcttccaaatgttggctgttgtgaacagtgctgcagcaaacatgagggtgcaaatatctcttcaatatactgattttctttcttttgggtacatacctagcagtgggattgctgggtcatatggtagctctayttttagttttttgaggaacctccaaactgttgtttggagtggttgtactaatttacattcccaccaacagtgcacgagggttcccttttctccacatcctcgccagcatttgttattgcctgtcttttggatataagccattttaactggggtgagatgatatctcattgtcattttgatttgcttttctctgatgatcaatgatgtttagcacctttccatatgcctgt

SEQ ID NO: 634892 - DNA, 611 bp, Homo sapiens
aaactcctgtaaaatagtatcatcagctgacatttctgtacatctacttattatgataagcattgtttaaaaataagaagcatcaggcagtgaaaaattataaagtgcgtgttttcagagaaagttggtttgatttctatggtctcttaacgatgatataatgctatgatatcatattatatgcaaggcagtttacagttgggtatattttacaaaattctatgccatatcattaaattaatactattaatcatattatttaattgatctgaatacgctattttctgattgcactggttactagcatatacataatttcttattactccaacattgtgataccaacaaaaccatatttacttaaagaggaatacttataagcctaaacataygaggaaaatagcaccagaaacaagtaactcttacattaaaattttggagctatactggacttatctttattctataaaaagaaaataaactgttttcagctgaaaattcccctaccacactgatttacatatgtataacattcccttacagtgccatatagccccctccaaaatttaatacttaaactttttgtgtttatttttccccagttgtataca

SEQ ID NO: 634893 - DNA, 528 bp, Homo sapiens
gatttaattacctaaattcacaacttgcactttgcaactcccttctacagtttgyaaatgaaaaacagattgcagtcaataggaggatgaagtagtaatcactacagttatcaataagagaagttccaatcttgatagcattactatttatactgtatctttaaaggactttatttggtatttccataaaatatgcagaaaagatatctcatgggcatttatattattgacggctagtacaggtaaaatcaccatgatggcataacaattcattattctagaacactgtgtctaatggaactttctgcgatgatagaaatgttctataattctaccttgtccagtacagtagccactagccacatgtggctattgagtacttgaaatgtggccagtgtgactgacggtttcaagttttatttaatttaaatagccacatgtggatagcagttaccatattgggcagtgcagttctagaataacaaaactatcactagattgtccccgtcatatcatactctattttaa

SEQ ID NO: 634894 - DNA, 589 bp, Homo sapiens
ttatggactgagactttggggagggctttgggtaattactgcctggaatactgaaaagtaggtcagatgtcatcaggcgaatgcagataaaccattgagttgagggaaatgaatcattcccttatacctacatatgaaagactttgtagttactattaactccagaccatcaaagctatgaggtcattgggagtttttctctcttaaaagtggtctaaatttgttatttgtcatttgtgccattwcactcagtttatttaataacaggaatgaattggtatagtttcagatattaaattcttttgatctagacttaattttgtacccatctctcttttcctgcaggtatgacacacagatgtctaagcaactgccttccagcagtgattgattttgctggttccccacacaaaaagtttggaagagacccttatgtcttctgtagagtttcttggttgtaagcagcaagcactggtgctggctaacttaagcaaataaagaatatatcactcagacatcaaagaaacagctggaaatctggcttggcaaaggccggattagggcactcctggggatgtgggtagtagga

SEQ ID NO: 634895 - DNA, 589 bp, Homo sapiens
ttatggactgagactttggggagggctttgggtaattactgcctggaatactgaaaagtaggtcagatgtcatcaggcgaatgcagataaaccattgagttgagggaaatgaatcattcccttatacctacatatgaaagactttgtagttactattaactccagaccatcaaagctatgaggtcattgggagtttttctctcttaaaagtggtctaaatttgttatttgtcatttgtgccattacactcagtttatttaataacaggaatgaattggtatagtttcagatattaaattcttttgrtctagacttaattttgtacccatctctcttttcctgcaggtatgacacacagatgtctaagcaactgccttccagcagtgattgattttgctggttccccacacaaaaagtttggaagagacccttatgtcttctgtagagtttcttggttgtaagcagcaagcactggtgctggctaacttaagcaaataaagaatatatcactcagacatcaaagaaacagctggaaatctggcttggcaaaggccggattagggcactcctggggatgtgggtagtagga

SEQ ID NO: 634896 - DNA, 601 bp, Homo sapiens
ggctctttctgggctcaaggaatagaaaaacactcaggttacatcagataaagagtaagaatttattgcaacaatacagagacataaaagcagagacatcacgctgctgcagaaggttgttgaagatwtaactgcagcccaccattctggacctctcagcagggggcgccatcctttgctccctaccctagtgtttccgcactctggggtctcaatcattctctctctgctcttgcttctgccgctcctggtcatcttttctgtattctcctttaggctgtcccatggcttctgcttactctctgctctcacttccctctgtgagcctttctgcatctaccttgactaaggactgtcctttgcatgcgtcacggttaaacctacccaagagagaaatctagatggttcaatgctactcagtatagagatttcctgttgggcaaagcacatataccaggcctttggtaagcctaatagaaaggtgccatttaggaggccctgctcttgctccttcagctgagccaagaattgtaggttgcataatgaagtcctcaaaaaggggcaataggcagggcagactttccaaggcttcctagaaggg

SEQ ID NO: 634897 - DNA, 562 bp, Homo sapiens
ctactctcagtcattaaaatgggctgtaaaaattgtaatgttcatttattctacatgttttttgagtgcctactctgtgccaaaactttatgtaaattaactcttattagttagcaattctagcactgtaaaaaggttagctttttcaagatcccatagttaagtgrtggagctgaatttgataatccaatttcatttgttttctttatttcattcctctatggctgtggctacagcttcaacaatcttgtatctaagctatgtaaaaaaagaaaaaagtactcatagtattttaactttaatgttcatagtagatggtcagtaaatatttattgagtggatggatggatgaagggaaggaaggatgagtgaatgaatgaatgtgactgctgtaaggtaacataactgacttaggtgtgtagatgagcttttatagcttttagtatttacattaaaagtttacagctttttatggccagagctgggaggatgtctttactacatttacccagttccacatgatacattggtagggccctaagaaatccaccagatggcatac

SEQ ID NO: 634898 - DNA, 562 bp, Homo sapiens
ctactctcagtcattaaaatgggctgtaaaaattgtaatgttcatttattctacatgttttttgagtgcctactctgtgccaaaactttatgtaaattaactcttattagttagcaattctagcactgtaaaaaggttagctttttcaagatcccatagttaagtggtggagctgaatttgataatccaatttcatttgttttctttatttcaytcctctatggctgtggctacagcttcaacaatcttgtatctaagctatgtaaaaaaagaaaaaagtactcatagtattttaactttaatgttcatagtagatggtcagtaaatatttattgagtggatggatggatgaagggaaggaaggatgagtgaatgaatgaatgtgactgctgtaaggtaacataactgacttaggtgtgtagatgagcttttatagcttttagtatttacattaaaagtttacagctttttatggccagagctgggaggatgtctttactacatttacccagttccacatgatacattggtagggccctaagaaatccaccagatggcatac

SEQ ID NO: 634899 - DNA, 358 bp, Homo sapiens
ggtagaaaaataaaaagtaaaaaggtacttttcactaaaaatctatacaccttggccaggcgcagtggctcacacctgtaatcctagcactttgggaggctgacgtgggcggattgcttgtgctcasgagtttgagaccagcctgggcaacatggtgaaagtccgtctctacaaaaaatagaaaaacattagccaggtgtggaggcacgtgcctatagctccagtatttgggggactgaggcaggaggatcacttgaacctgggaggtcaaggctgcagtgagccgagattacgcccctgcaatccagcctgggggacaaaatgaggccttgttttgattaaaaaaaaaaaaaaaaaa

SEQ ID NO: 634900 - DNA, 534 bp, Homo sapiens
ctgctacacttgttactttaaattacttctctctttctcttttcaaaggtctccttgcatgtccaagtttggggccttattcagggttctctgtattggctacatgctaatgcaggccagagaaacggggagggtttttttctgttccctttggcagaaagagccatttccatttagaatttgagctcaaaagaagacttaaaatgtagctttgaggaaataggaattaatagaaaatcatgggtgtaatctgtagaagatggcctgggttgctatgatatgtggtaagaatagaggtactatgtgtaactaattgaatatattgtgctttgtttagaaggttaagttttaacatggcgtttttcaaacttgkgttttaaagttttagtggggctgctgggagggagggagtactgctaagtacttgggacttctgtcctatttccacttcagccagaacaatcagtcctattttcatttcagccagaacaaatttgttttacataagctttcattgaagaaaaggttccatgg

SEQ ID NO: 634901 - DNA, 627 bp, Homo sapiens
tcttgtaaattgactccctgaaggagtttcccatatgctttacattctttcttgttgagataagtatactaaatgataagtgtaccaaataaggggtttgaaattcttaaaaaastttaaaaaagcaagcagtgatcagacatcgatactgaaagattgtatccacttacagaaactaagtcacatttatatttctttaatccatctagtttggaaatgtttattcccctctttggttacagctcttctgcttattttaaagtaagccatgttaattttggagtcaactggaatttttaacgttgctataacctgtattaactactcagacacaaatgttgataaaccccaggtttttataaattatttaaaaaaagaaatggttagattgtttataatgtcttggattgcaaatgtctgtatcttcttgaatttgagaagatgatttttgaaataacaattttttttttcccctgaattttgtttagtcagaatatcggtgaaagtattctttacctgtgggtggagaaaataagagatgttcttatacaaaaatctcagatgacagaaccaggtaggattgaaaaatactatcaatactcttttaacttataataactacatttt

SEQ ID NO: 634902 - DNA, 627 bp, Homo sapiens
tcttgtaaattgactccctgaaggagtttcccatatgctttacattctttcttgttgagataagtatactaaatgataagtgtaccaaataaggggtttgaaattcttaaaaaactttaaaaaagcaagcartgatcagacatcgatactgaaagattgtatccacttacagaaactaagtcacatttatatttctttaatccatctagtttggaaatgtttattcccctctttggttacagctcttctgcttattttaaagtaagccatgttaattttggagtcaactggaatttttaacgttgctataacctgtattaactactcagacacaaatgttgataaaccccaggtttttataaattatttaaaaaaagaaatggttagattgtttataatgtcttggattgcaaatgtctgtatcttcttgaatttgagaagatgatttttgaaataacaattttttttttcccctgaattttgtttagtcagaatatcggtgaaagtattctttacctgtgggtggagaaaataagagatgttcttatacaaaaatctcagatgacagaaccaggtaggattgaaaaatactatcaatactcttttaacttataataactacatttt

SEQ ID NO: 634903 - DNA, 627 bp, Homo sapiens
tcttgtaaattgactccctgaaggagtttcccatatgctttacattctttcttgttgagataagtatactaaatgataagtgtaccaaataaggggtttgaaattcttaaaaaactttaaaaaagcaagcagtgatcagacatcgatactgaaagattgtatccacttacagaaactaagtcacatttatatttctttaatccatctagtttggaaatgtttattcccctctttggttacagctcttctgcttattttaaagtaagccatgttaattttggagtcaactggaatttttaacgttgctataacctgtattaamtactcagacacaaatgttgataaaccccaggtttttataaattatttaaaaaaagaaatggttagattgtttataatgtcttggattgcaaatgtctgtatcttcttgaatttgagaagatgatttttgaaataacaattttttttttcccctgaattttgtttagtcagaatatcggtgaaagtattctttacctgtgggtggagaaaataagagatgttcttatacaaaaatctcagatgacagaaccaggtaggattgaaaaatactatcaatactcttttaacttataataactacatttt

SEQ ID NO: 634904 - DNA, 627 bp, Homo sapiens
tcttgtaaattgactccctgaaggagtttcccatatgctttacattctttcttgttgagataagtatactaaatgataagtgtaccaaataaggggtttgaaattcttaaaaaactttaaaaaagcaagcagtgatcagacatcgatactgaaagattgtatccacttacagaaactaagtcacatttatatttctttaatccatctagtttggaaatgtttattcccctctttggttacagctcttctgcttattttaaagtaagccatgttaattttggagtcaactggaatttttaacgttgctataacctgtattaactactcagacacaaatgttgataaaccccaggtttttataaattatttwaaaaaagaaatggttagattgtttataatgtcttggattgcaaatgtctgtatcttcttgaatttgagaagatgatttttgaaataacaattttttttttcccctgaattttgtttagtcagaatatcggtgaaagtattctttacctgtgggtggagaaaataagagatgttcttatacaaaaatctcagatgacagaaccaggtaggattgaaaaatactatcaatactcttttaacttataataactacatttt

SEQ ID NO: 634905 - DNA, 545 bp, Homo sapiens
tgggtccctgaccttaaacagaggcacagtttgtgagaaatgagggaagctgagaaagtgagagaccagggtgctgaataggcagttgaccccctgaggatggtggcaggatttgcaacggggtgaaagaatatgctgcccaaagttatttggtgaggggcaggccactgggaggctggcagrtggcagcagagaaggcatgcacaagagctttggcttaatgacagaagcctcaaaggaggagctgtgatgtgagtggagaagtcatcaactaaaggcagtagtgggttttttgttgttgttttgagacagtgtctcgctttgttgtccaggctggaatgcagcggtgcagtcacagatcactgaagccttgacctcttgggctctggtgatcctccgccttagcctctggagtagctgagactgcaggtgtgcaccaccaggcctggctaattttttaattctctgtagagatggggtttctctatgttgcccagtctggtcttgaactcctgggctcaagcagtccgccatccttggcctcc

SEQ ID NO: 634906 - DNA, 545 bp, Homo sapiens
tgggtccctgaccttaaacagaggcacagtttgtgagaaatgagggaagctgagaaagtgagagaccagggtgctgaataggcagttgaccccctgaggatggtggcaggatttgcaacggggtgaaagaatatgctgcccaaagttatttggtgaggggcaggccactgggaggctggcaggtggcagcagagaaggcatgcacaagagctttggcttaatgacagaagcctcaaaggaggagctgtgatgtgagtggagaagtcatcaactaaaggcagtagtgggttttttgttgttgttttgagacagtgtctcgctttgttgtccaggctggaatgcagcggtgcagtcacagatcaytgaagccttgacctcttgggctctggtgatcctccgccttagcctctggagtagctgagactgcaggtgtgcaccaccaggcctggctaattttttaattctctgtagagatggggtttctctatgttgcccagtctggtcttgaactcctgggctcaagcagtccgccatccttggcctcc

SEQ ID NO: 634907 - DNA, 496 bp, Homo sapiens
ctgcttcccaaatagaatgtgttaacttccaagatttgtccctatactttcattagttcaaaagtgctaacattaacttgtactatcaacaacctacttaccgtgaacacagcccaagaaagggcagaatgacctcctccatgcagaaggagcaggactggaccctctgaaccactcttgtagactcgaaaagtgtatgaatagttaaagataaaacatctatgtttttgctcactaaagtttttcattatttaatcatagtaataccgctagaaacttacatgcaaaactgcagactgccaaatgtaagagatgtaagcagacttttytgagacactaaccctctgtttgaagcatgaagcctgtgtgaccattttgttcaatgaaaaaaaaaaaaaattcccttggccctcatgaggacataacccctggattctagaaatgaaactagttcaactcacttgactcatgaaaccttcccctgggcccctaagac

SEQ ID NO: 634908 - DNA, 471 bp, Homo sapiens
actcctttgtgtatatgtaccacattttccttatccattcatctactgatagacactggttgcttccaaatcttggctattgtaaatagtgctgtaataaacatgggagtgtaatatctcttcgatgtactgatttcctttccttggctatatacatagtagcgggattgctgcattatayggtagttctatttttagtttttttttttttttaaggaatcaacaaactgttctccatagtggctttactaatttacattctcaccaacagtgtatgaaggttccctttcctccacatcctcaccagcatttgttattgcctgtcttttgcataaaagccattttaactggggtgagatgatacctcattatagttttcatttccatttctctggtgatcagtgatgttgagcaccttttcatatgcgtgtctgccatatgaatatatccctttgagaaatatctattcag

SEQ ID NO: 634909 - DNA, 607 bp, Homo sapiens
aggtgtgaaatggctggatcataagtaggtgaatcttaaactttttaagaaaccatcaaacttttttccaaagtgtctgtataattttgcattcccactagcagtgtatgagagcttcagttcctccacatcctcaccaccacttggtataatcttattttattgtagccatcataagagagtgcagtgctatctcattgtggttttaatttgcatttccctaatgatgttgagcatctttccatatgtttcttagccattcatttatcctttttggagaggtgcctactcaaataactttctgtccattaaaaaaaattgaattatcttattactgagttataaaagttctatagatattttggatacaagytctttaccaaatatatgatttgcaaatattttctcctagttggtggcttgtcttttccttttctaatgatgttttttgaaaagcaaagaattttaatttgataaggtccaatttatcagttgttttcttcttttatggatcatactttggtgtcatatctaagaaatctttgcctaacctgtggtcacaaaaattttctcttatgttttcttctagaagttttatagttttaca

SEQ ID NO: 634910 - DNA, 573 bp, Homo sapiens
catatgtgtctctccttacactggtaccacactgccttgattcctgtagctctatattaagttttgagatcagatagtgtatgtcctccaatttgttcttctttttcaaaattgttttggctgctctaggttttttgcatttccatatacattttaggatcagcatgctaatttctacaaaaataaacctcctggaatttttataaagctggggttcaatttatagatcaattttggggaggtcattttaatcctcaaaaatcactactgggtatctacccaaaggaaaataaagtattatattacagaaaaaacacctgcacccagatatttattgcagcactattcacaacagcaaagtyatggaaccaacctaaatgtccatcgatggttgatttgataaagaaaataaggtatatatacataacagaatactatccagccataaaaagaatgaaataatttcctctgcagcaacatggatggagctggaggccattatcctaagtgaactaactcaaaagcagaagataagatattgcatgtcctcacttataagtgggggctaaacaa

SEQ ID NO: 634911 - DNA, 492 bp, Homo sapiens
tcaacatacatagtaagtggtaragaagggacttgaacccaggtcatgtggatcctgattccatattcttaatcaataccagaggcagatttacctagaaggttttgaagcttaagcttcaaggctcctagcttgcacaaaccctttctaactgagtagccttcccatagaaggtattctgaccatagaagattagggactgtggtaggcagaatcatgccctccctccaaagatgtgcatgtcttgattcccaaaagccatgactgtgttaccttacatggcacaagagactttacagatgtgattaagttaaggatcttgacattggaggattatgctggtttatcttggtagtcccgatgcaatcatgagggtccttaaaagtcatagaaggaaatgtgacaatggaagcaaagtcagaaagatttaaagatacttagtactatattgctgactttaaagatgaaagaagaggccaccagtcaaggatt

SEQ ID NO: 634912 - DNA, 492 bp, Homo sapiens
tcaacatacatagtaagtggtagagaagggacttgaacccaggtcatgtggatcctgattccatattcttaatcaataccagaggcagatttacctagaaggttttgaagcttaagcttcaaggctcctagcttgcacaaaccctttctaactgagtagccttcccatagaaggtattctgaccatagaagattagggactgtggtaggcagaatcatgccctccctccaaagatgtgcatgtcttgattcccaaaasccatgactgtgttaccttacatggcacaagagactttacagatgtgattaagttaaggatcttgacattggaggattatgctggtttatcttggtagtcccgatgcaatcatgagggtccttaaaagtcatagaaggaaatgtgacaatggaagcaaagtcagaaagatttaaagatacttagtactatattgctgactttaaagatgaaagaagaggccaccagtcaaggatt

SEQ ID NO: 634913 - DNA, 544 bp, Homo sapiens
gacttgttttgtgacctaacatggtccatccttgagaatgatccatgtcttgaggagaagaatgtgtattctgcagctgttggatgaagtgttctgtaggtaattattaagtccatttgatatatagtgcagattacgtaaatttttctatctcgattatctgtccaacactgaaagtggggtattgaagtctccagctcttattgtattggrtggggcccatctctccctcttcagctctaataatatttgctttacctatttgggtgctccagtgttgggtgcatatatatgtataactgttatatcctcttgctgaattgacccccttatcattatataatgacttttgcctctttttatagtttttgtcttgaaatctattttgtctgatatacatatagctactcccactttttagtttgcatcagcatggaatatctttgtccctcactttattttcagtctatatgtgtctttacagataaagagtgtttctagtaggcaacaggtcagtgggtcttgtttttgtattcattcagcc

SEQ ID NO: 634914 - DNA, 544 bp, Homo sapiens
gacttgttttgtgacctaacatggtccatccttgagaatgatccatgtcttgaggagaagaatgtgtattctgcagctgttggatgaagtgttctgtaggtaattattaagtccatttgatatatagtgcagattacgtaaatttttctatctcgattatctgtccaacactgaaagtggggtattgaagtctccagctcttattgtattgggtggggcccatctctcyctcttcagctctaataatatttgctttacctatttgggtgctccagtgttgggtgcatatatatgtataactgttatatcctcttgctgaattgacccccttatcattatataatgacttttgcctctttttatagtttttgtcttgaaatctattttgtctgatatacatatagctactcccactttttagtttgcatcagcatggaatatctttgtccctcactttattttcagtctatatgtgtctttacagataaagagtgtttctagtaggcaacaggtcagtgggtcttgtttttgtattcattcagcc

SEQ ID NO: 634915 - DNA, 577 bp, Homo sapiens
acaacaattggctccttgtgttcaggtaacaaattagattattctattctagcccttgtcagtaaggggcaacctggactttcctgcattcttttacctgtggttttacaatatggtggaaaggaatgacatagccaacayattaaaaagaaaatcggattctgcatgcaatgaagctcatgagcacggcatgggctgtaagaacagtgggaaagggagagaaatcttccgtctgtataccttctactattttgtactggggctgatcttttttttttaatagagacagggtctcactatgttacccaggctggactcgaactgctgggctcaagcgatcttcttgcttgagcctgccaagtagcggggactacaggtgcacaccaccgcacccagattgggactgatcttatgtccaatctgagcagaaaatcaccaactggacttcaactcaatcctctgtacttcttaaagattattttctccctataaaatcagtcttaggtttcccacaaaccttaacatttgtcttgagaaatgtttgtcttgaaattgtctcgagaaatcccaacctgaa

SEQ ID NO: 634916 - DNA, 601 bp, Homo sapiens
acaacaattggctccttgtgttcaggtaacaaattagattattctattctagcccttgtcagtaaggggcaacctggactttcctgcattcttttacctgtggttttacaatatggtggaaaggaatgacatagccaacacattaaaaagaaaatcggattctgcatgcaatgaagctcatgagcacggcatgggctgtaagaacagtgggaaagggagagaaatcttccgtctgtataccttctactattttgtactggggctgatcttttttttttaatagagacagggtctcactatgttacccaggctggactcgaactgctgggctcaagcgatcttcttgcttgagcctgccaagtagcggggactacaggtgcacaccaccgcacccagmttgggactgatcttatgtccaatctgagcagaaaatcaccaactggacttcaactcaatcctctgtacttcttaaagattattttctccctataaaatcagtcttaggtttcccacaaaccttaacatttgtcttgagaaatgtttgtcttgaaattgtctcgagaaatcccaacctgaagatgaaagacttgggcataatcta

SEQ ID NO: 634917 - DNA, 414 bp, Homo sapiens
gaattcagaaatcacacaaatgttttactgcttggataatttcagcaagaatccaatttgttcgcccttttgattcttggtcatcatctactgkggatgatttttaccattaaaaaatttttttggtgccagttatcaacttactacctcaactccaattcatccttcattgcctactctacaaaaatagatgtgaggcctgtaaatattttacccttgccagtaggcatgatattaagctatgttaatggagggtgctagagaaacacagaacttcccccagtatccaactcctgccaattcctgcacaattcctccagcacaagtggcttctccagtactctagccctccccaacccagtgtttttgtagccaagtgcctctggtgagatcctccccacgaatagctttccc

SEQ ID NO: 634918 - DNA, 608 bp, Homo sapiens
ttgttatactatttttgaagttgataattttaaaacgagcgggaaaactcttggagagcaggaatagtaccttaatctgccctgttatagataataaatttcagtaatataaattccattggtgttttagaaatggaattaaccagagtatactaggaaaggaaacagcatcttttgcctatataaacactgttgaaggacactggagaagggaaattaactggaaagatkatcacttcaggccctaccatttctgcccttttctgcatttgttgccaagctagaaaggttggaagtgtgctggacgatcccacctcttattcccctttacagtcatcaccacttcctaaactccttccttgaacccagtccattctccatcgctgtcgtggttcagagtctccttgtcttgtgcttgcagttttgaagtggcctcctccccaccctctcacacatttatatatgtgaacaagtcatagtttcaacagtaccactctcacttaaagccttctctaacctgctctggccaaattaatcatcccctctctgtcctccccactaagccttgttcttaaatctggtattgcatctgtaatgtaattatttgt

SEQ ID NO: 634919 - DNA, 540 bp, Homo sapiens
ggctaggagaatatgaatacaaataacgctaactgagacagtgaggggagcatcttggggcagctccgagacttcacatgaagacaaacatgtaaagctgtcacatgcaagcacgtgcccctgggagtaagttctgggataagatgtcacaaactcttatgcaaagaagaggaagacttgagaatactctatgatgcacactgctctggatttgactcttccagtaacatttttttcctcaaaaaattgaacttgaaatgtactgttacttctggggatttttgaatgccaatactactttttgttgtcctgtatttcctttccctggaatcttagggccctttgagctcagtgtcttcccagcgatgggaggctagggaagaactgccgtgattgtcagcacactgggttgtcagccataggacaggcctcctgcacacctagggaaggctggctartcatgtccccaccctccatggccacctccgtgcaccagaaatcagggtaagctgggtgtctctggccatgcaagttcttagc

SEQ ID NO: 634920 - DNA, 525 bp, Homo sapiens
cagcacactgggttgtcagccataggacaggcctcctgcacacctagggaaggctggctagtcatgtccccaccctccatggccacctccgtgcaccagaaatcagggtaagctgggtgtctctggccatgcaagttcttagctgtgtcctctgatgctctgccactcacatgtctcagtccctttccacgtggtctcctctgttcctttgcttcctgctgccaccccctttctctcttcatacagtcggcatctttttttttttctccctacaactttggctccttctctattttatcctctcacactttggtctcatacagggccaccaagggcctccccmcctccaggcccttttgcttttgcttctctcaaatgcacaatctctctcccagtgcacagccctgagacatgactatgattaactcagccttctgtgccaggagcctcctatgccactggatagcctgccttttgatggggtgcctttggggcaggcacccaccctgcattcactcagctgtt

SEQ ID NO: 634921 - DNA, 560 bp, Homo sapiens
tcagcattgatattaaaagagagatcataagactgacggaacaactttgtgacaataagataccaaataataaacaggatctaaagccatgtcagccaagggttaagtcatgcacccctccctacacttaaagaataaaacaattggccaggcgcagtggctcaggcctgtaatcgcagcactttgggaggccgaggcgggtggatcacaaggtcagaagatcgagaccatcctggctaacatggtgaaaccccgtctctactaaaaatacaaaaamattagccgggcgtggtggcaggcacccgtagtcccagctaggaggctgaggcaggagaatggcgtgaacctgggaggcagaggttacagtgaaccgagattgcgccactgcattccagcctgggtgacagaacaccaccagacgctaactgaccccttattctatcagccataaccatgctttgattggacaagacatttatttctgtaactttctcctggtaaaagaccaccaaccatggactggttctggtcagtttcacagaggctgcatacttgagtgc

SEQ ID NO: 634922 - DNA, 583 bp, Homo sapiens
gggttctctcaaatcgtgttactgcaactactgtatttccaagcctacctttgggccctgaagcaatctatctgtagctgttcttgcactagctcctctttcccccacccctgatcccttggcctccagactgaatgtttggctcaacaagacaaaatgtttggctcckaagtctcagctggagacagattacattcaactgagcaacagaatttgttctatggggcagcaataaaaatactagtttgtaataaccttttatgttctttaaagactccttagagtgtttgttaaagaaagataattttaacaacagtaaataagataaaatatctctcttgacaagaaagacctcttgctgcaacttcttaaccaagatacaaaatacttccttaaaaagtccatgctggccgggcacagtggctcacacctgtaatcccagcactttgggaggctgaggcaggtggatcacttgaggtcagcagcttgagaccaacatggtgaaactccatctctactaaaaatacaaaaattagccagacatggtggcacacatctgtagtcccagctactcgggaagctg

SEQ ID NO: 634923 - DNA, 658 bp, Homo sapiens
taattacactctctgtcatccggagggcctggataggacgaggtaggtaatggagggcccaagaatacatgagtccctaattgtatttggctgactgtgcttcctgccatatggttagagaaacaaaagccataacaaaccagatccagcctatttcaggtatgtctttctcttccttaaaaatacagacagaattttcattacttcctttaatgccaatattaaatgtatacagttgtaaagtcacatgctttaatttttaactcactatttwaaaaaaatcttaagatccttcttacctgaatttgtttctttcttcccgctctattctctgcaacctttcttctctctcctgccgccgcctctctctctctgctgccagtgactcttggtgctgcctgaaggatgatgtgagaagaccactcggtgatgacctggagatacaatgagttaatgtttcagttgcttggcctgtgattaaaagtactgaagtaagcaccagtcagaccttggttagaattgagggtctgccggtacctaggcaatgcttggggaaaatcactgaatgcctcgggtcttcttgtttcagatttttgtctgtaaattggggaaaagtatcatactgtgagtgtgctcgcaggaaaaaaggtggtaacag

SEQ ID NO: 634924 - DNA, 630 bp, Homo sapiens
tggcatcttgataggccaagaacaatgtataatttctattgctttccaaacatccgcaaaatgtttttagttatctcaccaaaatgataggctactaagayaacatgataaaaacagcattaggtttggtgtccacagctttggtcagagatttcattttatgaattacttaacatctttgaacctcggtttccttatccttaaaacgagggtaaggatacctgctttacaagattgttgaaagattaaataggataatttatgcccatttcctgtaacagagaattatacaaatggaatttattgcatgcccttctcttccatatccccaacacctcctcctcaccaattctgaagtactgtgtcggatataggagtctctacaatggatacttcctaagcaacttactatctgaaagttattaaagtcaacatgttggccaattaccttgccatgggagtattccaagcttaagtatgacatgaccacatctgcagtagcatcacagtagttttgtctgaacctataacccttccatggaggcctgttataaacagtaaataattgtatgtgtcctctttcaaacccaaggtctatttttacttactgaaggtaaagggaagtgaaga

SEQ ID NO: 634925 - DNA, 630 bp, Homo sapiens
tggcatcttgataggccaagaacaatgtataatttctattgctttccaaacatccgcaaaatgtttttagttatctcaccaaaatgataggctactaagataacatgataaaaacagcattaggtttggtgtccacagctttggtcagagatttcattttatgaattacttaacatctttgaacctcggtttccttatccttaaaacgagggtaaggatacctgctttacaagattgttgaaagattaaataggataatttatgcccatttcctgtaacagagaattatacaaatggaatttattgcatgcccttctcttccatatccccaacaccwcctcctcaccaattctgaagtactgtgtcggatataggagtctctacaatggatacttcctaagcaacttactatctgaaagttattaaagtcaacatgttggccaattaccttgccatgggagtattccaagcttaagtatgacatgaccacatctgcagtagcatcacagtagttttgtctgaacctataacccttccatggaggcctgttataaacagtaaataattgtatgtgtcctctttcaaacccaaggtctatttttacttactgaaggtaaagggaagtgaaga

SEQ ID NO: 634926 - DNA, 592 bp, Homo sapiens
tggtctcgtactcccaacctcaggtgatccacctgtcttggcctcccaaagtgctgggattacaagcatgagccaccaagcctggctccaatttatgatattatagttagtctagctgcacagtcttggagcagagagcatgccctctttaactctagtgtcctttattgcaatgctgtccaatagaaaaacaatgtaggcctcagatgtaggagatgtacacaatttcaaaatttctaataggcatgttaaaaacaaaaaagtccaactaattaaatagcattttatttaatrcattcaaagtattatcagttcaaactgtaatcaaattaaaaatcattaatgactttttaaatattcttattttggagaaagtcttcaagtctggtatgtagtttttatttacagcacatctcaattttgactagccatatctaaagtattcaatagtcacatgtggctagtggctaccatattggacagcagctctggagctgcacactgaagcatacatgtgagctggggaccttacatttttattgaacaaaaaaggcagtgcagtggaaagatcagcaacatgtgatggtattgt

SEQ ID NO: 634927 - DNA, 586 bp, Homo sapiens
ttaatttgattactgacaaggttaactagatacttattgattacatgtgtcacaaaaatattctcctaatttgtagttgtattttaattttttagttcttcttaacaggaaggttttaattttaatgttctaaacttttattttatgatttgcaaatttttgacctgataagttcacaaaaaatccttccctacttgtcaaaattttctaatgacaaatttatagttttataatatgaatttttacatttacctcccacaccaaaaattgatttatataaagattcataaagtacaataccaatttcaattagttttcttcatgaatagccaakagtcccccaagcatttattgaatgccttgtccttttcacaccaatcaatgtcacttttataattttttttttttgagatggagtctcgctctgtcacccaggctggagtgcagtggcgcatctcggttcacggcaacctctgcctcccgggttcacgccattctctgcctcagcctcctgagtagctgggattacagacgcccgccaccacacctggctaattttttgtatttttagtacagacagggtttc

SEQ ID NO: 634928 - DNA, 586 bp, Homo sapiens
ttaatttgattactgacaaggttaactagatacttattgattacatgtgtcacaaaaatattctcctaatttgtagttgtattttaattttttagttcttcttaacaggaaggttttaattttaatgttctaaacttttattttatgatttgcaaatttttgacctgataagttcacaaaaaatccttccctacttgtcaaaattttctaatgacaaatttatagttttataatatgaatttttacatttacctcccacaccaaaaattgatttatataaagattcataaagtacaataccaatttcaattagttttcttcatgaatagccaagagtcccccaagcatttattgaatgccttgtccttttcacaccaatcaatgtcacttttataattttttttttttgagatggagtctcgctctgtcrcccaggctggagtgcagtggcgcatctcggttcacggcaacctctgcctcccgggttcacgccattctctgcctcagcctcctgagtagctgggattacagacgcccgccaccacacctggctaattttttgtatttttagtacagacagggtttc

SEQ ID NO: 634929 - DNA, 542 bp, Homo sapiens
ggggcctccttgagtgtgcaggttgggaggtgggagaggatcagaaaaaaataactattgggtagtttgcttagtacctgggtgaygaaataacctgtacaacaaacccctgttacaaaagtttacctgtataacaaacctacacatgtacccctgaaccaaaaataaaagtttaaaaaaatgtagatactagtctgtttcatcatttactactataaaatatatacaaatatattgcaaaaagttgaaatttataaaaaaacttatgcacaaaaacactgactctacccggcactaccacttgcagttgagagaaatgtaaacaaatgtaaagatgtagtattacatcataactgcataagattatagtacatactgtactattgcaataatttcataaccacctcttgttgctgttgaagtcctattgtatcctcttaaaatggcatgtgatgctaatcagatctgcatgagcagttcatctctccagtaaattgcgtattacagtaaaaagttacctctcttggtttttgtgtattttt

SEQ ID NO: 634930 - DNA, 542 bp, Homo sapiens
ggggcctccttgagtgtgcaggttgggaggtgggagaggatcagaaaaaaataactattgggtagtttgcttagtacctgggtgacgaaataacctgtacaacaaacccctgttacaaaagtttacctrtataacaaacctacacatgtacccctgaaccaaaaataaaagtttaaaaaaatgtagatactagtctgtttcatcatttactactataaaatatatacaaatatattgcaaaaagttgaaatttataaaaaaacttatgcacaaaaacactgactctacccggcactaccacttgcagttgagagaaatgtaaacaaatgtaaagatgtagtattacatcataactgcataagattatagtacatactgtactattgcaataatttcataaccacctcttgttgctgttgaagtcctattgtatcctcttaaaatggcatgtgatgctaatcagatctgcatgagcagttcatctctccagtaaattgcgtattacagtaaaaagttacctctcttggtttttgtgtattttt

SEQ ID NO: 634931 - DNA, 559 bp, Homo sapiens
tcagtgccatcggaggctgctgcaagtgattcacgggtatctcgtgactgttgttaaggcatcatatcattgtgtaaatgtgcgtgttttgtcactgataataaaataatgatacatcttaacactgcttgatgtcttggattcaatgcaatccttcaagtggcagatctagtttcagacttgagcagccgagctatagagattttaatccacatccactacactcctggcttttattatcttcatgggaaaatacttgcagggtgtagaggtttacawatcaagttttagaagatagcttggttgatactgagatgatggcttctttactgaatgcttagtagcatatttatagcagaatcttccccaactcccaataccttgtaactttagctaaaatctattttaagttagccacatcaaaatcgatcatactgttgacccaccagacagcaagttatactggtttcattccttgactgcctagcagggacactgaggaaatgttgacagttaccaagataactacaactgttgaggctggcagaggtccagtaag

SEQ ID NO: 634932 - DNA, 595 bp, Homo sapiens
tcaaataactcaaaacataatttttataatcaaaacatagccacggaagcagataagaacaaactgctcctaacaaaatctatgtcatgacatgtcaaaacatatttattacctctattattctactgtaagattttattaaatcttttaaaagctttctaatattctctcatgttttatcttttgttatttaaatggtctctatgtcagaaatgagaattcttaaccataacagcatgatattggtataaaaacagacacaaagaccaatggaacagaatagagaacccagaaataaagccatgcattaacagtcaactcatttttgacaaaggtgccatggatatacattggggaaagggcaatctcttcaataaatgctgctgggaaaactggctacctatatgcagaaaacagaactagatcactatcactcaccacatacgaaaataaaatcmaaatcgattaaagacttaagtgtaagatctgaaactacaaaactactacaagaaaactttggggaactgctttaagacttttgggtaaatatttttgtagtaagacctcaaggcataggcaatcaaggcaaaaattg

SEQ ID NO: 634933 - DNA, 473 bp, Homo sapiens
actaacaaagaaattctggacttaaactcaatgcttgtccaattggatctaataaacatctacagaataatccacccatcaaccacagaacgtaaattcttctcatctgtacacagaacatatactccaagattcaccacatccttggccataaaccaagactcagtacattttaaaaagtcaaaatcatgccagtcatactgtcaggtcacagtggaatacaaagagaaaccaacatcaagaagatctgtacaaaccacacaattacatggaaattaaaaagtttgctctggataactttgagtaaacaataaaatcaaggcagaaawtaaaaaaaaattaaaataaatgaaaacagacacaacataccaaaatctctggaatgtagcaaaaacaatattaagaggagagtttacagctctaaatgcctacctcaaaaagttagaaagatctcaaattaatgacctaacatc

SEQ ID NO: 634934 - DNA, 602 bp, Homo sapiens
aggtttctaataactttggagactgtgtgacattaggatagagaaaaaaaactttcaggagtcagggagagctgaaatgtccctgactaccaagcaggacaggagttaactgtatggaatgaagtaacagaagactgaattaatttatgtgacattttgcttaaaatgttgttgatcctttgctttgtttttcagagtcaaggaaactttttttaaaagctatttacaacttttaacacttgagtaaagtatattcctgtgaacaaaatttggaccatacttgtttctctctacctgatttctccataatttagaaactatttgtaagtattattgacttatggcaatatagttatttccataagtacaataaatctgttttcatttgtaacaggacacagttggagacaatggttattttaccaaggctttgacttgaatgttatgcttttctttgagaaataaaacttgacttacagagccaataaaagccccttgggraaactggcttcataccttgtctacctgtccctgtgcaaggttcctgaactgtggtaagtaaagaatgtcactttctgacagacccaggagccccaagttat

SEQ ID NO: 634935 - DNA, 515 bp, Homo sapiens
ctcttagtaaacttttgtcttctttatataaatctcaagtatttgccattaagattattcctagatgatttatctttttgttgtaattttaaaaattgcttcattaagttttctaatgccttcctgctgatatgggagaaaggtattaatatttaaatatttatcttatatccagccactttgttacacaggcatatcttggagatatagccggtttggttccagaccacggcaatgaaggaaatattgcaacaaagtgaatcacatgcatctttttgtttcccagtccacgtagaagttatatttacactatactagaatgtattaagtgtgcaacagcattatttaaaaagtgaacacaccttaactaaaaaacactttattgctagaaaatggtaacaatcatctgagtctyccctgagtcaaaatctttttgctgttggagggtgttgtctaaatgttgatggctgctgattggccagggtggtggttgctgaaggttggggtggctatga

SEQ ID NO: 634936 - DNA, 559 bp, Homo sapiens
gaaaaatgaacaaaaaatattaagacagttcacaaartacagcccacagaagtatgaagaaggctcaactcactaataagcattactgattaaaataataatgggaatttcagcaatttgagtactggaataataatgaataacaaataatgaccattggagaatctgaagatagttgggtatagtcaattaaaatatgcgttactttggcccaacaattctacttctagaaactcatccttacagaactctagaatacctgtaggtggatgtttattgcagtattacattatttataatactgagaaactgaatacagcccaaatgtctgttaaaaagagattagcaaattgtggtatacccttgcaatgaaaagagtgagttagctgtctatactacagatgtcaagaagtctctaaaatatttgattttatgaaaaagcaaggaacaatatcattctgggtaaaaaattgtacccatttgatcttgctagtgtatagagagctatctaaaagaaaataactaagtgcttactgtcaggatgagagacttccaattt

SEQ ID NO: 634937 - DNA, 592 bp, Homo sapiens
tactatactttttatcagcattttagtgtgcattctttctacttacgtaacttcatatatatatataaatatattaatatatataaataaacagactattctgccacataacatttcagtaaacaatggagtgcatayacagtagtggtctcctaagattataatggagctgaaaaattaatgtgtatatataattaaattataaataaagacatttatatacaattttatatatgtgtacacacacacacatatatatgaagagttgactgtaaaacaaaatcaggcagttttctagaagaaggcattatcataggggacggcagctccatgcatgttattgtcctaaagagcttccagtggaacaagatgtgaaggtggaggacaatgatatccatgatcttgactctgtgtaaggctgggctaatatatgtattcatgacttagtttttaaaatttatgaagttaaaaaagaagaaacataattagaagagcacttatagaataaggatacaaagaaagaaaacatttttgtaaagttgtatgatgtgtttgttttttagctaagtgttattatagaaagtttttaaaa

SEQ ID NO: 634938 - DNA, 560 bp, Homo sapiens
caaaatatttatattttctatgagttgtctttttgcttaaccacgtggggtagaaatcatttcaggatagtacttataaatatattctattattttacttttttattgagttcagtataatgaatgaactgtatgtgtgcaaccatttctttatagattttttttacattcaaacaaaatagcagaaataaatacttttcaacatacattgtcattatggttatatgttaataattctttggcttagactcgtagaagtagagttgytgaagcaaaggacttatacattttaataacctgtcaaattcttcaaaaagctattttaatttataatccctataatcactatcagtgttatgaaaaagcctatgttttgacaactcagaatttatacttttatttgcttatctaaggtatacaattttaatttaactttaaatttccctatttcattttagtttctctgattactaaggatatgaataatctttctttacattcatttgttttaaatattttccatgaatatcctattcttacccaaagcctatttaatttta

SEQ ID NO: 634939 - DNA, 560 bp, Homo sapiens
caaaatatttatattttctatgagttgtctttttgcttaaccacgtggggtagaaatcatttcaggatagtacttataaatatattctattattttacttttttattgagttcagtataatgaatgaactgtatgtgtgcaaccatttctttatagattttttttacattcaaacaaaatagcagaaataaatacttttcaacatacattgtcattatggttatatgttaataattctttggcttagactcgtagaagtagagttgttgaagcaaaggacttatacattttaataacctgtcaaattcttcaaaaagctattttaatttataatccctataatcactatcagtgttatgaaaaagcctatgttttgacaactcagaatttatacttttatttgcttatctaaggtatacaattttaatttaactttaaatttccctatttcattttagtttctctgattactaaggatatgaataatctttctttacattcatttgttttaaatrttttccatgaatatcctattcttacccaaagcctatttaatttta

SEQ ID NO: 634940 - DNA, 592 bp, Homo sapiens
tactatactttttatcagcattttagtgtgcattctttctacttacgtaacttcatatatatatataaatatattaatatatataaataaacagactattctgccacataacatttcagtaaacaatggagtgcatacacagtagtggtctcctaagattataatggagctgaaaaattaatgtgtatatataattaaattataaataaagacatttatatacaattttatatatgtgtacacacacacacatatatatgaagagttgactgtaaaacaaaatcaggcagttttctagaagaaggcattatcataggggacggcagctccatgcatgttattgtcctaaagagcttccagtggaacaagatgtgaaggtggaggacaatgatatccatgatcttgactctgtgtaaggctgggctaatatatgtattyatgacttagtttttaaaatttatgaagttaaaaaagaagaaacataattagaagagcacttatagaataaggatacaaagaaagaaaacatttttgtaaagttgtatgatgtgtttgttttttagctaagtgttattatagaaagtttttaaaa

SEQ ID NO: 634941 - DNA, 597 bp, Homo sapiens
tgataattgtgcattctatttaaacttcatgaagttgttttgtttggataaataacatatttaaaatagaaaatgaagttatctcacgctcacacatatccaatgactgaaagttttttaaaagaaaagctacaagttgaaattttccactatgmaaaaaaaagagaaattataacaaaattttatactaacaacattaaacacatttgaacttagaatagtaatgacaaaaataatatgtaaaagagaaggaaatgccaatttggacttaatgtttttaaactgatgaaagcaggcaaacaaaattgagtcatttaaaaatgcatgcctttctgtcaagatttgaagcaatgaaagaaaataagaaataaaaaaatactgagcaattgctttctaaatcataaaaatagtaaaggagaaaacatgcaaagaggcaaaatatgattttaaaaaagtaaccacaagcatagagaactggtatctcattatgagaggtgtttctgtcctgaaattaagcccttttactagtattgtagaatatataaaaaaggatgaagagagacaagtaaaaccacagaaattctacatagggcacaa

SEQ ID NO: 634942 - DNA, 479 bp, Homo sapiens
tatagtgatgttattgccacactgacattgccgctctcctttcttagatttacgagattgacagtcccagtacagctactctcgctcaggttagatagacatttagactcttgttaaaaagaaaacaacaaaaatgactacacaaacaaactttcctcaaggcacacatatgactcttttctttcttttcttctttgaaaacaacrtattaaaatataatgtgctaattccatatgttacattgccttcttgttcttctctcactggaggaggagctagaacaagcaccttaaatttctgagaagggtgaaatctcagactctctgtttcaaagttggggaatgcttagtttagagaatacttcgtttggagggtgcattagatctcaggtaaaattagaacaactctgctgcaggcacttttttcgattttcaacttcccaccccagttatctaaactgctttttaaaacattatttc

SEQ ID NO: 634943 - DNA, 479 bp, Homo sapiens
tatagtgatgttattgccacactgacattgccgctctcctttcttagatttacgagattgacagtcccagtacagctactctcgctcaggttagatagacatttagactcttgttaaaaagaaaacaacaaaaatgactacacaaacaaactttcctcaaggcacacatatgactcttttctttcttttcttctttgaaaacaacatattaaaatataatgtgctaattccatatgttacattgccttcttgttcttctctcactggaggaggagctagaacaagcaccttaaatttctgagaagggtgaaatctcagactctctgtttcaaagttgggraatgcttagtttagagaatacttcgtttggagggtgcattagatctcaggtaaaattagaacaactctgctgcaggcacttttttcgattttcaacttcccaccccagttatctaaactgctttttaaaacattatttc

SEQ ID NO: 634944 - DNA, 479 bp, Homo sapiens
tatagtgatgttattgccacactgacattgccgctctcctttcttagatttacgagattgacagtcccagtacagctactctcgctcaggttagatagacatttagactcttgttaaaaagaaaacaacaaaaatgactacacaaacaaactttcctcaaggcacacatatgactcttttctttcttttcttctttgaaaacaacatattaaaatataatgtgctaattccatatgttacattgccttcttgttcttctctcactggaggaggagctagaacaagcaccttaaatttctgagaagggtgaaatctcagactctctgtttcaaagttggggaatgcttagtttagagaatacttcgtttggagggtgcattagatctcaggtaaaattagaacaactctgctgcaggcacttttttcrattttcaacttcccaccccagttatctaaactgctttttaaaacattatttc

SEQ ID NO: 634945 - DNA, 552 bp, Homo sapiens
ctttaacatagaaaatactgcattatatatgttttagtttaatttaagctatattcttgagggagtcagatacactaatcaggacrtcatggctaagtggggtgaggtagcatttaatcagaaagtccaaagagtggttattagaagtagttgtttttatttcccatcaatattactgctagtatcattgattacagaaatggtctctcattgggtaaaaaggaaagtgtctcaaaaatattttaggaaattgaccaaaatgttttggagatacccaccacccttagaaaaagggaggcataagaatctttcatattattttccttccaggataatgcctgatgttgaatttttcaactgacctgtgctaacaggcttccagttgttaacagaattctgcatccagggtattctttatttgcctcttctaaatctttcatttagtctgattggttacttaaaatggcatatatatgagatagaattgaatctatagagtggattatatgaccatttttgcatgtactacctaataaatatttgtgtagcaga

SEQ ID NO: 634946 - DNA, 617 bp, Homo sapiens
ggcatacctgcaaaggcagactggaccccaggcaagaatggggtctttacgggagaggggtgttatcaattttgtttcagagtcaaaccatgaactcagttccttcccaaagttagtttggcctacacccaggaaagaacaaggacagtttaagggttagaagcaagatagagttggttaggtctgattttttcactgtcataatttcctcggttataattttgcaaaggtagtttcaatatccatggcataaatgaggtctagggtgggaaagagacataggtgagagcagataattcctattctctaagcttctctgctcatgggcgcaggctgctttggtacccgtggtggtccctgccaaggtcactggaacttggggatrcaaggacggaagagggaaagagaacactcttccctgtcttcctcatgtgcctcaagtatctgctgtaaagagaagggaaccaggcatgtctgctgccctctttctagatgggtagccattcatcttcagtctgtacccctttagaatgcatcctaaatccctgggacttctttgaaaaaaacgctttctttttttctttcttctcctgggttctctcttcacagataggtaa

SEQ ID NO: 634947 - DNA, 531 bp, Homo sapiens
tacagctcaagtgattgcttcacagggtgcaagccccaagcattggcagcttccatgtggtgttgggcstgcaggtgcacagaagagaagagttgagcttgagagcctctgcctagatttcagaggatgtatggaaatgcctagatgtccaggtagaagtctactgcaggggcagagccctcatggagaacctctactagggcaatgtggaaagaaaatgtggggttggaacctccatacagagttctcactgtccagtggagctgtgagaagagaaccactgccctccagaccccggaataagattgactgacagcttgcactatgttcctgtaaaagccacagactctcaacactagcctgtgaaagtagctgcagaggctgtaccctgcaaagccacaggggcagagatgcccatggccttgggagcccacctctagcatgagcacacgttcagtgcgaaacatggattcaacagaggttattttggagtcttaatgtttaatgactaccctgttggctttcagactt

SEQ ID NO: 634948 - DNA, 531 bp, Homo sapiens
tacagctcaagtgattgcttcacagggtgcaagccccaagcattggcagcttccatgtggtgttgggcctgcaggtgcacagaagagaagagttgagcttgagagcctctgcctagatttcagaggatgtatggaaatgcctagatgtccaggtaraagtctactgcaggggcagagccctcatggagaacctctactagggcaatgtggaaagaaaatgtggggttggaacctccatacagagttctcactgtccagtggagctgtgagaagagaaccactgccctccagaccccggaataagattgactgacagcttgcactatgttcctgtaaaagccacagactctcaacactagcctgtgaaagtagctgcagaggctgtaccctgcaaagccacaggggcagagatgcccatggccttgggagcccacctctagcatgagcacacgttcagtgcgaaacatggattcaacagaggttattttggagtcttaatgtttaatgactaccctgttggctttcagactt

SEQ ID NO: 634949 - DNA, 531 bp, Homo sapiens
tacagctcaagtgattgcttcacagggtgcaagccccaagcattggcagcttccatgtggtgttgggcctgcaggtgcacagaagagaagagttgagcttgagagcctctgcctagatttcagaggatgtatggaaatgcctagatgtccaggtagaagtctactgcaggggcagagccctcatggagaacctctactagggcaatgtggaaagaaaatgtggggttggaacctccatacagagttctcactgtccagtggagctgtgagaagagaaccactgccctccagaccccggaataagattgactgacagcttgcactatgttcctgtaaaagccacagactctcaacactagcctgtgaaagtagctgcagaggctgtaccctgcaaagccacaggggcagagatgcccatggccttgggagcccacctctagcatgagcacacgttcagtgygaaacatggattcaacagaggttattttggagtcttaatgtttaatgactaccctgttggctttcagactt

SEQ ID NO: 634950 - DNA, 648 bp, Homo sapiens
aacaactcttaaaaattaacaataaaatgtcagttacccagtttaaaaaatcagcaaatgtacagactgacaattcataaaaggagatatgtgaataattgcaaaacgtgtaaaaaggtgttcacattgagagttcctttacattctaatggatggatttgtaaaaaataaataaaaacggataaacccraatgttggcaacaatgaggaacaacttgaacattcctacattattggtgagaacataaaataacctatttggaatcagtaatgtgttctaattttcatatctgaataaacctaaataaatattgactgtaaaagcaatataagatatattttgttccttaaatatgtatataaattagtagatcagtaggtataaatggaaatacatgccaccaaaacatgcaagatggcagattaattgtagttaaaatattagaagtctttggaaattttcaggagatctaaaagtacttaatacattttcataaattaaaaatgcacattgtattctctattgtaaatcaaagaaaaaagtcgtgtatatctaaaaaactaaaaaatagtgaaattaaataataaggtaataatagagaaaaaaaaagtaagaaaggagagaacattaaaaaacaaataaaaagt

SEQ ID NO: 634951 - DNA, 530 bp, Homo sapiens
ggtatggtaacattaattctgattgtttcaaacagacaatgattgtgaaaagatgatgggagagggaagagcatcagtgattaacagatgtacagaggtttttaacagcctttagactcagtggatgcatgggtagggggagagaggaggttgattatgtgggaagtgtggagttctcctttgaccctttccattaaagacagtttgaagaaataatatgaaatctatgctaccwttaggaagcattcttaaataaaactgctatgagaaattacctcacaaattaaaatagctattataaaaaagacgagatatatgtaggcaaaggtgtgaagaaaaaggaagcctagcacactgttggtgaagatgcaggttggtacagccattatggaaaatagtatggaggttcctaaagatattaaatatagtactaccacactgcctggcagttctccttctgggtatatatatgcccaaaggagatgaaatcatcaccttgtaaagaaacctgcacattcaagttcattgga

SEQ ID NO: 634952 - DNA, 530 bp, Homo sapiens
ggtatggtaacattaattctgattgtttcaaacagacaatgattgtgaaaagatgatgggagagggaagagcatcagtgattaacagatgtacagaggtttttaacagcctttagactcagtggatgcatgggtagggggagagaggaggttgattatgtgggaagtgtggagttctcctttgaccctttccattaaagacagtttgaagaaataatatgaaatctatgctacctttaggaagcattcttaaataaaactgctatgagaaattacctcacaaattaaaatagctattataaaaargacgagatatatgtaggcaaaggtgtgaagaaaaaggaagcctagcacactgttggtgaagatgcaggttggtacagccattatggaaaatagtatggaggttcctaaagatattaaatatagtactaccacactgcctggcagttctccttctgggtatatatatgcccaaaggagatgaaatcatcaccttgtaaagaaacctgcacattcaagttcattgga

SEQ ID NO: 634953 - DNA, 539 bp, Homo sapiens
aacctaatcaactttctatgattaatgtaaatccaactttatttctgaattcacacaccccatctcagactggacaaatctctccctaccccaaactcataatcattatgatcttatctaggagtcttaatcaataagtcacaatatgctgattcataattattactttgaagtctatcacatacaatttacyactagtcctgtgtctagatagtatttgactagatagatatgtgttgaatagataagttaaataaatgaataagataatgaataaatatagaataataaactcaaagctgataaatttaatttttaacaaaaacaacatatgacaaagcttgttactctaatgaagatattttatcactttgtctattaatatagattttggcatcagaaaaataaggttagattttgagcaaatgtctgtcagaataagtatatatgtgaacatgcacactgaagtgtgccatacatgatgtcactttgtcatagcaagaaaaaaagttcaatagcgttcaatgtcagtgaaaaat

SEQ ID NO: 634954 - DNA, 527 bp, Homo sapiens
gcatactcaactattttattagaatagactgatagtttctggcaactggtgtgattcaatacctcaggctaatactcaacacaagtttactctgaaaagtctatcataacagagacacagagagtgtaatgttttcttttaatcttccaaaattttcaattacaaaattatcaaattatttaatgagctctgatcagtaactcaaagcttagtagtatgatatcacctcattcttacggaaagtgtaagtgtacttatcaatgttgcttcagaggcatgaatggagtatctctgatttgcaaagcacaatttctgrtacaccgggaatacaaacataaatcaatcagagtgcttatcttcaagggtatttacaatattataggaaaaaagagacaagatgaaacataattacatagaagagcgcagtacagagggctgatggaaactaaaatggacacatggaatataaatattattataacatgttgtgcatttatttttcattccaagatagttaggaacaaaag

SEQ ID NO: 634955 - DNA, 500 bp, Homo sapiens
agtttgaattcatatgtttatgtatacgtgtatgtgaatattctgtgtgggcaggaaaataatgccttctgaagtggtaatgtaatttggtcacataccwagttataaatatttatcataaaccttgataaatataaggtaggttcaaaataaactctgaaattttcaaaaagcacacagcttgtagtacaaaatatgaaaaattttgtggaaggacaataaaggaaaattatgttaaaaaccattgagtgagtttttgtaaaccagagtaaggaaaacatttctgccaaaggcaactgacctcaatgaatctgaaatgtacttttaaaatacgtttactctagacaaaagagaacaagatgaatgtcagaaaacaagctatgtgacacataatgaataaggaataaagatgtcagactattctgaagtattgaaataaaaattttatctgaacaattctcataagaaagcaaacttagattgatactttgtgaataaat

SEQ ID NO: 634956 - DNA, 678 bp, Homo sapiens
tagcaagtagaaattcatctggcctcttagcattcttctttaaaattactcatttgcatttcatccacacacttccaggcccatcaacatggccttgccctcatcagaacagagttgtaccaccactgttatttcacccttggaaaaagaaaaatcttatggcttcataaacccaatcatcataatcatctgttcaaatacatgagctaacaagtcctgttggtgtaagtccatagtccacaatgatggaagccaatatatcattgcttgacaatctttmttcttttctaacttattgtaaaaaactttgagaccggtgaagagatgtaaagaatagtataatgggcacctgtataatcaacatacaacttaaaaattaacatgaaataaaaatatttggacccttcagtgcaatcttttatcaaaccttattacagcatctacctgatggaataaatgttcagttgaatggaggtttattatttccatgattttgtaaatcccatttatatctatcatttataaattccatttatatctatcctaagagctatgcatgctttaaaatgctgtccaaatattataataaatacatattctgaaattatgtcactgattttattaaaaatataatccttacttatacatgtagactgagttcctggggggggtttacag

SEQ ID NO: 634957 - DNA, 621 bp, Homo sapiens
tcaggatagttaggtcttcttgctcaatatcaatactactataagttttatttataatagtcaaaaatgggaaaatgggaaacaccaaatgaccatcaatgggaaaatgaataaacatttggtgctatacctatacaactgagtactatacaacaataaaaggaaagacctaataacacatgccacaacattaatgaatctcaaaataattagactgaaagaaactaaacgacaaaaatgcatactgtataattccatgtatacgaaattctagaagattcagattaatctatagtgacagaatgcacatcagtkgttggctgaacaagacagggaaaagtgaaagacgagggataataattaggctaccaaacatatgtatagtcatgaacatattcaatatcttaactatgatgatagtatcatgggcatacacatatgtcaccaattctcaatgacaagggcacgcttacagtcaaaaatcattaaatgtagtccttcaaaaatgatgtttccttctcctgctctttcgagttgttcttcattatatagtaatttatatttttagtcctaacatcaatgttgtattattttcaactacacctgctctctcatctgtta

SEQ ID NO: 634958 - DNA, 583 bp, Homo sapiens
gacctgccccaaggaagagtgaattttgctagtaggcttcctttggacttgagctggagctccagcttgctgaccttacttacagattttggacttgtcagtttctataatcaaccatgtgtgctaattccttaaaataaatctctatctctatatatgtctctctccctctgtgtatgtgtatgtgtatttagagagagagaaagtgcacatagaatatatagtgttacttaaaataaacataaaagtccagctaataagaaacacctatgtgtttcccacatgtgcgcacacacacacacacacacacacacacacacacasagagtctcctgttggttctgtttctctagaaaacctgactaatatgcaacctttacacagcctgtcaatttttgaagcccctcctcaaatattaataaaggctttccagatccctagagctgatgttctctctctatttcaaatccacatagagttgcatggcaacacattctctcatattataccaatatttttattttatgtaggctttttagaacattaatagcatagaacaggtaaagtgacttccttatgcaat

SEQ ID NO: 634959 - DNA, 266 bp, Homo sapiens
cctttacacagcctgtcaatttttgaagcccctcctcaaatattaataaaggctttccagatccctaragctgatgttctctctctatttcaaatccacatagagttgcatggcaacacattctctcatattataccaatatttttattttatgtaggctttttagaacattaatagcatagaacaggtaaagtgacttccttatgcaatctgaaccacctagcacaattcacctgctacacattaagggtttcatacatgttttg

SEQ ID NO: 634960 - DNA, 658 bp, Homo sapiens
caccatctcctcagcagctcatctataaaatcccctgcattttgccatggactggcaacccatttttctcggacccctctctgcagcagagagctattctctttttttcacacattaaacttctgctgtcagcctgatagtttgtgtgtccacatccttgttttccttggcaatggtacaaaaaaccttgggtgttacgccagacaatgaggtygtttcaaaaataatcctaaaatgtatcgtaaattctcaagaactcactattgcttaaatattcttgatagaagaacaaatttgggagaaaacacattttctaatttcaaaactgactacaaaactaaagtaaaatactaacacaagagtagacaaatagatcaatggaacacaactgagagtccataaataaaccctcaaattttgctcgaatgatttttggcaaaggtttcaagacaattcaatgtcggaatgaattgttcttttaacaaatggtgccaagtctagatatacacatgtaaaacaatgactccaatccctactccgcaccatatataaaattaacttaaattagatcaaaagtcaaaaaataagaccaaaaactacaaaaatcttagaaaaaaacatacacatatattttcttgaacatgaattaggcaatgat

SEQ ID NO: 634961 - DNA, 596 bp, Homo sapiens
tgaatgtaattagtaccattgtaaaagggatcccagggagcttcttctcctctactgcatgtgaagttatagttagaagatagctatttatgaaccagacactaaatctatggatggcttgatcttggacttccagcttgcagaactttgagaaataaatttctatagtttataatccacctagtttatggtaatttgtaatagcaatgtaaatggactaagtctagtatttcttgtcattcttttaattrtgtctatatctatgattacgtggcctttctcatcaggatcagacattctgacctggaggaaaatgttgaataaagtaggtttcaagtaaacatttcttttcttatgtggatgacatggcaactcaggaaagcaggacttttaaaattatcagaatgataaaaaaaacttggtattaagcatccagggcattcataatacctttttaaactttcacattccagaattcactctgtccagagtgattatatttatgtttttaaagtatattcataatctccttcataaaattaaatcatgatggcacttaggccaaaagagtttgtacaagttctctatattgataa

SEQ ID NO: 634962 - DNA, 539 bp, Homo sapiens
gaattcactctgtccagagtgattatatttatgtttttaaagtatattcataatctccttcataaaattaaatcatgatggcacttaggccaaaagagtttgtacaagttctctatattgataaaatttctcctaaggattcattcctgaatacacaatgaaattgtgtatcttgatcaaggctgtctcacaattatatttcagttcttctaggcattctttctagcatgagtttatcatgtctacaagtgttgtcttctggtagaaaactgccacattcattgcatccatgttttctcttctgtatgagttctccaatatttattgwtgcatgacttctgactaaaggattttccacattctctacaacaacaggtctttatactgcatgggtttttcaatgtacattgaggtatgacttttttgtcaaatgactttccacattcattgcacacaaagacacaaaggttctttctcctgtatgtgttctctgatgttctgtgagatatgattatgagtgatggctttcctacaaaaaa

SEQ ID NO: 634963 - DNA, 605 bp, Homo sapiens
ataaaggattcttcgaattaaataataataaataaaatgaaaaaataagcatgctatctgaatagtcatttctcaaaagaagacatgaaaatggtcaataagcacaggaaaatgttcaacattattatttaccaaggaaatgtaaatctaaacyaccatatcctatcacttcacgaccagttgaatgactatattccaaagacaaaataaagagtgttgtgaggatgtagagaaatttgagcccttatacaccacttgtgggaatgtaaaatggtgcatctacttgggcaatgcagttcctctaaatgttaaacatataataccctgtggcccagcaattccacttctaggcacatactcaaaagaaataaaacattacttccacacgaagcttgtacacaaatattcatagccataatagccaaaagtgtaaatgaccatcaaacgtccatcaaataatgaatggataaatagaaagtggcttatttctacaataaaatattatttagcaataaaaaaatggagtatccatacgtactccaacatggatgaaccttgacaacattattataagtgaaatatgccactcacaaaagagcacatgt

SEQ ID NO: 634964 - DNA, 628 bp, Homo sapiens
tagttaagtgactggagtagggtgggtgagatcacgcatgtaaaagaacgtcttaaacgtgctatataaatattgctagaaagcttagccctcatgttaagcaggtaatctcaatttgtcataagttgcagttatgttagagcatagttggtcttactgtctctgtttggttgattaactacggtaaargttgaaaggattgtggagtaagtaaaagaaagtataaggaggggatggtattgaagcattttgaaaatttactgaggctgcaagagtacctagctctgtcttttgagctcttttgagtaacttccaggcatattatgcatgacatatttttcccacatagatgtgagtttgacctgggttagaatttttaaaccatggtctcatttttttttctcagatatctgtagatacatttcacttataaacatttttttgttaaaattaaatatcttatatgttcttcaagggtatgctcacttctaaatttttaaagagtaacacatattgagaggcagttaccttgaaatgggtgtgtctcagagatctgaacttgggaatgagaggaaaaacctcaggtgtcctggaagatagaattggttttgacaaggaaatgtcaggt

SEQ ID NO: 634965 - DNA, 628 bp, Homo sapiens
tagttaagtgactggagtagggtgggtgagatcacgcatgtaaaagaacgtcttaaacgtgctatataaatattgctagaaagcttagccctcatgttaagcaggtaatctcaatttgtcataagttgcagttatgttagagcatagttggtcttactgtctctgtttggttgattaactacggtaaaggttgaaagrattgtggagtaagtaaaagaaagtataaggaggggatggtattgaagcattttgaaaatttactgaggctgcaagagtacctagctctgtcttttgagctcttttgagtaacttccaggcatattatgcatgacatatttttcccacatagatgtgagtttgacctgggttagaatttttaaaccatggtctcatttttttttctcagatatctgtagatacatttcacttataaacatttttttgttaaaattaaatatcttatatgttcttcaagggtatgctcacttctaaatttttaaagagtaacacatattgagaggcagttaccttgaaatgggtgtgtctcagagatctgaacttgggaatgagaggaaaaacctcaggtgtcctggaagatagaattggttttgacaaggaaatgtcaggt

SEQ ID NO: 634966 - DNA, 547 bp, Homo sapiens
tctgtcttttgagctcttttgagtaacttccaggcatattatgcatgacatatttttcccacatagatgtgagtttgacctgggttagaatttttaaaccatggtctcatttttttttctcagatatctgtagatacatttcacttataaacatttttttgttaaaattaaatatcttatatgttcttcaagggtatgctcacttctaaatttttaaagagtaacacatattgagaggcagttaccttgaaatgggtgtgtctcagagatctgaacttgggaatgagaggaaaaacctcaggtgtcctggaagatagaattggttttgacaaggaaatgtcaggttgtctaagaagcacatgctgaagtgtgggtgttaaatgtctaccttcttgaagayagttcaggaactagaaagttagtattaataagtcagactagaagactgtgtagttatgcatgcatttccatgaaaaatacatcccagctattaagggcctgtaatgtaattagtttccagacactggaaaactctcaggtcaagtcg

SEQ ID NO: 634967 - DNA, 605 bp, Homo sapiens
ataaaggattcttcgaattaaataataataaataaaatgaaaaaataagcatgctatctgaatagtcatttctcaaaagaagacatgaaaatggtcaataagcacaggaaaatgttcaacattattatttaccaaggaaatgtaaatctaaactaccatatcctatcacttcacgaccagttgaatgactatattccaaagacaaaataaagagtgttgtgaggatgtagagaaatttgagcccttatacaccacttgtgggaatgtaaaatggtgcatctacttgggcaatgcagttcctctaaatgttaaacatataataccctgtggcccagcaattccacttctaggcacatactcaaaagaaataaaacattacttccacacgaagcttgtacacaaatattcatagccataatagccaaaagtgtaaatgaccatcaaaygtccatcaaataatgaatggataaatagaaagtggcttatttctacaataaaatattatttagcaataaaaaaatggagtatccatacgtactccaacatggatgaaccttgacaacattattataagtgaaatatgccactcacaaaagagcacatgt

SEQ ID NO: 634968 - DNA, 587 bp, Homo sapiens
tccccatgctaatactaaaccccagaattcaatcccaggttgaattattctaccataaatgggctgtgttatgttcwacaagtttgcctctgtggaaactgctcctgtaaaattgaaggcagagtcggaacagaatattcactacctgtggaaaattcagttcaggagacaggaaagcgaaaggttcctgtaagcatgcacactttttccttgcaaattgaccaaatgactgtcaccctggaaagaatggagtaagggtttagagaaaggcaaggagttttgttgccagagaatctcctttcctatttcagaacaaacacattcaagaatagaaaaaaaaagtacccaactaaaatgggctgttttgttgtttttagaacttcaagagactaacaaaatcactgtgttctttcatgcagatgtgtttaacaaagagagagatagcattaactctgtaccagacattaatttaggtggtatacaaacgctgattaactttatcattacaacaaccatgggttgaatgcactaaatataaggcaactgaggcacaaagtggttaaatactttgcccatcatcacacaga

SEQ ID NO: 634969 - DNA, 587 bp, Homo sapiens
tccccatgctaatactaaaccccagaattcaatcccaggttgaattattctaccataaatgggctgtgttatgttctacaagtttgcctctgtggaaactgctcctgtaaaattgaaggcagagtcrgaacagaatattcactacctgtggaaaattcagttcaggagacaggaaagcgaaaggttcctgtaagcatgcacactttttccttgcaaattgaccaaatgactgtcaccctggaaagaatggagtaagggtttagagaaaggcaaggagttttgttgccagagaatctcctttcctatttcagaacaaacacattcaagaatagaaaaaaaaagtacccaactaaaatgggctgttttgttgtttttagaacttcaagagactaacaaaatcactgtgttctttcatgcagatgtgtttaacaaagagagagatagcattaactctgtaccagacattaatttaggtggtatacaaacgctgattaactttatcattacaacaaccatgggttgaatgcactaaatataaggcaactgaggcacaaagtggttaaatactttgcccatcatcacacaga

SEQ ID NO: 634970 - DNA, 587 bp, Homo sapiens
tccccatgctaatactaaaccccagaattcaatcccaggttgaattattctaccataaatgggctgtgttatgttctacaagtttgcctctgtggaaactgctcctgtaaaattgaaggcagagtcggaacagaatattcactacctgtggaaaattcagttcaggagacaggaaagcgaaaggttcctgtaagcatgcacactttttccttgcaaattgaccaaatgactgtcaccctggaaagaatggagtaagggtttagagaaaggcaaggagttttgttgccagagaatctcctttcctatttcagaacaaacacattcaagaatagaaaaaaaaagtacccaactaaaatgggctgttttgttgtttttagaacttcaagagactaacaaaatcactrtgttctttcatgcagatgtgtttaacaaagagagagatagcattaactctgtaccagacattaatttaggtggtatacaaacgctgattaactttatcattacaacaaccatgggttgaatgcactaaatataaggcaactgaggcacaaagtggttaaatactttgcccatcatcacacaga

SEQ ID NO: 634971 - DNA, 587 bp, Homo sapiens
tccccatgctaatactaaaccccagaattcaatcccaggttgaattattctaccataaatgggctgtgttatgttctacaagtttgcctctgtggaaactgctcctgtaaaattgaaggcagagtcggaacagaatattcactacctgtggaaaattcagttcaggagacaggaaagcgaaaggttcctgtaagcatgcacactttttccttgcaaattgaccaaatgactgtcaccctggaaagaatggagtaagggtttagagaaaggcaaggagttttgttgccagagaatctcctttcctatttcagaacaaacacattcaagaatagaaaaaaaaagtacccaactaaaatgggctgttttgttgtttttagaacttcaagagactaacaaaatcactgtrttctttcatgcagatgtgtttaacaaagagagagatagcattaactctgtaccagacattaatttaggtggtatacaaacgctgattaactttatcattacaacaaccatgggttgaatgcactaaatataaggcaactgaggcacaaagtggttaaatactttgcccatcatcacacaga

SEQ ID NO: 634972 - DNA, 560 bp, Homo sapiens
gtataaccactttaaaacctggagccttttttcaggcttccttatagatcgtcccatgggagataaccaactagtcatgtttgagtttcaagctttatttagaatggacggattcatccactaaattgtgcaagggattaagagataccctttgttgtttcttttgacatgtttcagtcaagtatatagaaagcaacttgtaagagagaactctcacccactgtgatacattgaggagccagaacactgtgaagctgcttaaattttatctatttttctttagcccacactgctttctaagaagaaatcccttacttttctgtttgcctgtgaaggaaaccactgtgctgagttgaaatttcatttgaaaattcttggaacaatttgtttttattgttcagttacaggtttcaagagaactcaagatgtcatgtttgaaatataaaatgagctaaaagcaggagtacttctacttcagcatrttccctaatctcatgtcttcatggacatgcttatctggaatggatcacgtttgggttaggaatttagaactttcaaga

SEQ ID NO: 634973 - DNA, 546 bp, Homo sapiens
aatccacatctacttattgcatgatctcgcattaaaatgtaacctcaacagctgggcactgtggtgaatgcctataatcccagctactcaaaaggttgaggtggaaggatgacttgagcccaggagtgtgagaccagcctgggcatcaaagtaggacaccatcaaaaaaaaaaagtaacctcagtttcttaattttycaaatgagaataatagtacataatttcagaggaggataatatatgggtttggtgtcctttacagtgctttatctgctcagatttacacaaatatttattaataaatgagttcaggactaaaataaaagactaaaatctcctaggcttacataatatattctggagtcatttgtaaatgaagaataaaaggaaaatatgaaattttgtttgagataccctaatacagagaaagaagcatcagtttacatttgattttcatttaaaaacagtaagtgttcttattgttaaataatcagatcacatccattcctgcttttaatagtgttaaactgtactttggtgattcctc

SEQ ID NO: 634974 - DNA, 546 bp, Homo sapiens
aatccacatctacttattgcatgatctcgcattaaaatgtaacctcaacagctgggcactgtggtgaatgcctataatcccagctactcaaaaggttgaggtggaaggatgacttgagcccaggagtgtgagaccagcctgggcatcaaagtaggacaccatcaaaaaaaaaaagtaacctcagtttcttaattttccaaatgagaataatagtacataatttcagaggaggataatatatgggtttkgtgtcctttacagtgctttatctgctcagatttacacaaatatttattaataaatgagttcaggactaaaataaaagactaaaatctcctaggcttacataatatattctggagtcatttgtaaatgaagaataaaaggaaaatatgaaattttgtttgagataccctaatacagagaaagaagcatcagtttacatttgattttcatttaaaaacagtaagtgttcttattgttaaataatcagatcacatccattcctgcttttaatagtgttaaactgtactttggtgattcctc

SEQ ID NO: 634975 - DNA, 507 bp, Homo sapiens
aatattatttttcacccacatgagcaagccattttttttcctatgcctggggaggcaaacagtaaaggaaagagatcctgacctcagaattctcaatctaataatacatgatctgaacagagtgatgaggtggggttgggacaagtgtagagaaaataagctaatatttatcgaagaatttcagagtgctgcctgagctttgcatagttttaaatattttttccagatgttacayccccccaaaacattttatattttatatattagaattgggagttaatgtttaaaaagttgtgattcctcagtgagtggcaaaactagggtgtaaaaacaaatctagccttctctaagacacactattttactacaaattagtatcaaattaatattttaatgtcaatcattatttcctctctctttatttacataagttccacagcaaaattaaaattcacagaatgtgcttttctgcatattgcaatgttgttccagttatagtaaatgata

SEQ ID NO: 634976 - DNA, 483 bp, Homo sapiens
tgataaaacaggttgcagtaaagaatctgaccaaaaccaagatgtcgaagaaagtgacttctagtcatcctcactgctcattatatgttaattctaattcattagcatgctaaaaaaaactctcccaccaagtcatgacagtttataaatgccacagcaatatcaggaagttgccctatatggtctaaaaagggaaggagccctcagttcagggaattgcgcactcctttactggaaaaactcatgaataatctacaccttgtttagcagataatcaaaaaataaccattaaaattgcaaaccagaagccctttggackgctctacctacagagcagccagtctttattcctttactttcttaataaacttgctttcactttactctatggtttttgccttgaattctttctcacgtgagatccaagaagtattctttgttccagtaacactctcagtgttacataaatttaacaattttaaa

SEQ ID NO: 634977 - DNA, 642 bp, Homo sapiens
catacacaaaatatcaaaagaacctcctgccgagagagagaatattaaacagaaaagagaaggaaaaatgcaaggaaaaaaataaagaatataaccacaaccccattcatactcagtaatttgtgagtttagttacaccagctatgtgttcttgtwattttacactcaaattaaatcaaattaattttttcttctttttttattatactttaagttatggaatacgtgtccagaacgtacaggtttattacataggtatatatttaccatggtggtttgctgcacccatcaacgtgtgatcgacattaggtatttctcctaatgctatcccttcccttgtgccctactccccaacaggaactgtagtgtgttattcccctccctgtgtccatacattctcattgttcaactcccatttattagtgagaacatgcggtgtttccttttctcttcctgtgttagcctgctgcgaatgatggtttccagcttcatccatgttcctgcaaaggacatgaactcattctttttttatggctgcatagtattccatggggtatatgtgccacattttctttatccagtctaacattgacgggcatttgggttggttccaagtctttgctcttgtgaatagtactacaa

SEQ ID NO: 634978 - DNA, 642 bp, Homo sapiens
catacacaaaatatcaaaagaacctcctgccgagagagagaatattaaacagaaaagagaaggaaaaatgcaaggaaaaaaataaagaatataaccacaaccccattcatactcagtaatttgtgagtttagttacaccagctatgtgttcttgttattttacactcaaattaaatcaaattaattttttcttctttttttattatactttaagttatggaatacrtgtccagaacgtacaggtttattacataggtatatatttaccatggtggtttgctgcacccatcaacgtgtgatcgacattaggtatttctcctaatgctatcccttcccttgtgccctactccccaacaggaactgtagtgtgttattcccctccctgtgtccatacattctcattgttcaactcccatttattagtgagaacatgcggtgtttccttttctcttcctgtgttagcctgctgcgaatgatggtttccagcttcatccatgttcctgcaaaggacatgaactcattctttttttatggctgcatagtattccatggggtatatgtgccacattttctttatccagtctaacattgacgggcatttgggttggttccaagtctttgctcttgtgaatagtactacaa

SEQ ID NO: 634979 - DNA, 532 bp, Homo sapiens
aacattttattgaaatacctttttatctcatttgtaaattgaattattayagtacttatgctgacttctttcaaaaaatgcagaatgtttttgaatgtattctccagcatgccccaaattaggaattgttttgatctcaaactttctgatcataatttatattggaattattatttcatagttaaatcatttatccataaaacattattaaacattaaaaatattgctaaggaacaaaattgacttctcttataagtgtatacacatgcaaagttgcaaaatctctctctttttcaaccacattacttacaatattgatacaatttggtgttctcttaaataatgtcttaaaaatccatatgccctcagccagttaaacacttactatggtctcaaatgtacttgagagtttatgggtaaagactatttgcagaattaccatctctgcaaaattaatcagtgtgaattctcttactttcattttaactgcaggtattattcatgtaagtctctcactcctccaactgttaca

SEQ ID NO: 634980 - DNA, 532 bp, Homo sapiens
aacattttattgaaatacctttttatctcatttgtaaattgaattattacagtacttatgctgacttctttcaaaaaatgcagaatgtttttgaatgtattctccagcatgccccaaattaggaattgttttgatctcaaactttctgatcataatttatattggaattattatttcatagttaaatcatttatccataaaacattattaaacattaaaaatattgctaaggaacaaaattgacttctcttataagtgtatacacatgcaaagttgcaaaatctctctctttttcaaccacattacttacaatattgatacaatttggtgttctcttaaataatgtcttaaaaatccatatgccctcagccagttaaacacttactatggtctcaaatgtacttgagagtttatgggtaaagactrtttgcagaattaccatctctgcaaaattaatcagtgtgaattctcttactttcattttaactgcaggtattattcatgtaagtctctcactcctccaactgttaca

SEQ ID NO: 634981 - DNA, 543 bp, Homo sapiens
tctgatcataatttatattggaattattatttcatagttaaatcatttatccataaaacattattaaacattaaaaatattgctaaggaacaaaattgacttctcttataagtgtatacacatgcaaagttgcaaaatctctctctttttcaaccacattacttacaatattgatacaatttggtgttctcttaaataatgtcttaaaaatccatatgccctcagccagttaaacacttactatggtctcaaatgtacttgagagtttatgggtaaagactatttgcagaattaccatctctgcaaaattaatcagtgtgaattctcttactytcattttaactgcaggtattattcatgtaagtctctcactcctccaactgttacatgtatcatatttttttaatgtgctttataaaattttattatgcacaaaaaaccaccacatctgtgtttgaaccatgttggtctgaatcatcaggccagagaaaatcgtcttttgtaaactggatagcatcataaacatttcattaaatttagaag

SEQ ID NO: 634982 - DNA, 543 bp, Homo sapiens
tctgatcataatttatattggaattattatttcatagttaaatcatttatccataaaacattattaaacattaaaaatattgctaaggaacaaaattgacttctcttataagtgtatacacatgcaaagttgcaaaatctctctctttttcaaccacattacttacaatattgatacaatttggtgttctcttaaataatgtcttaaaaatccatatgccctcagccagttaaacacttactatggtctcaaatgtacttgagagtttatgggtaaagactatttgcagaattaccatctctgcaaaattaatcagtgtgaattctcttactttcattttaactgcaggtattattcatgtaagtctctcactcctccaactgttacatgtatcatatttttttaatgtgctttataaaattttattatgcacaaaaaaccaccacatctgtgtttgaaccatgttggtctgaatcatcaggscagagaaaatcgtcttttgtaaactggatagcatcataaacatttcattaaatttagaag

SEQ ID NO: 634983 - DNA, 596 bp, Homo sapiens
gtgtaatacctaacaaaggagaagggagaaaacaaatttgatcaggtgaagtggtaggaccatyaaatagatctaacaaggtctttactagatcagagtagggttttacagtaaagattgcccaaaaaaggagtgccacactaggttttaatggcccggtgcttgcacctcagtcctgtttagtcaccggcgagggccatccctagaagagtataacctcagctcacaaccagaggtaaactacaaggaagtaagagtaagaagctgttatctagccacatatcttccatttgtttagaaagtcactttttaaagaaggatttgagcaataattttctgtgttggctgcaagtaaattgtgaaagttcatatggctggggaggggaatagttccacaagcttaacaaaatgtgtaataattataatatccatatgcgtaagttactagtaccacaaaattgccttatcattcacaaatcacaaagtaagtctggcttgacacttctgttcagaatccagtatttatttaatctatgactgcttttaaccaattagatgctgtcaaactgacagaattataatggctgcctgttttt

SEQ ID NO: 634984 - DNA, 573 bp, Homo sapiens
catcaagtcctaaaactccatcctgccccctgctttctcagatgactcttgaaacttctgtgttagttttgtcctctggaaaggagatgctgaatgagttaggagtaggaaatattattggagtgtaatacctaacaaaggagaagggagaaaacaaatttgatcaggtgaagtggtaggaccattaaatagatctaacaaggtctttactagatcagagtagggttttacagtaaagattgcccaaaaaaggagtgccacactaggttttaatggcccggtgcttgcacctcagtcctgtttagtcaccggcgagggccatccctagaagagtataacctmagctcacaaccagaggtaaactacaaggaagtaagagtaagaagctgttatctagccacatatcttccatttgtttagaaagtcactttttaaagaaggatttgagcaataattttctgtgttggctgcaagtaaattgtgaaagttcatatggctggggaggggaatagttccacaagcttaacaaaatgtgtaataattataatatccatatgcgtaagttactagtac

SEQ ID NO: 634985 - DNA, 573 bp, Homo sapiens
catcaagtcctaaaactccatcctgccccctgctttctcagatgactcttgaaacttctgtgttagttttgtcctctggaaaggagatgctgaatgagttaggagtaggaaatattattggagtgtaatacctaacaaaggagaagggagaaaacaaatttgatcaggtgaagtggtaggaccattaaatagatctaacaaggtctttactagatcagagtagggttttacagtaaagattgcccaaaaaaggagtgccacactaggttttaatggcccggtgcttgcacctcagtcctgtttagtcaccggcgagggccatccctagaagagtataacctcagctcacaaccagaggtaaactacaaggaagtaagagtaagaagctgttatctagccacatatcttccatttgtttagaaagtcactttttaaagaaggatttgagcaataattttctgtgttggctgcaagtaaattgtgaaagttcatatggytggggaggggaatagttccacaagcttaacaaaatgtgtaataattataatatccatatgcgtaagttactagtac

SEQ ID NO: 634986 - DNA, 532 bp, Homo sapiens
ggtgctaaataaatattctcatataactaaacaaatgaaaataaaattagtgaatattctacataaaacacaaaatgtggagaaaaaacacactgttcctatccacaaaagtttgtcatcaataatattgatwacttctgttctaatggaccttaaaaaattcttctgggacacatcagtgagttttcatgtcactatccacttaaaacattggttttgatcaggagatggcaaattgccgtctgcgggccaaatccagcccactatttgattttgtagataaaatttaactgtaacagagccaaactcattttttaaaaatgtattgcatatggtccctgtcatgccacaatggcaggccatatgacagcagccatagggcctaaaacataaactatctggctttcttgagaaaaagctttctgacttcagtttttgtatcagttattatttatatatttacttgagaaaattgttataacttgatgatttaagataatgtttttatgtaacagaactgatatgttcagtt

SEQ ID NO: 634987 - DNA, 609 bp, Homo sapiens
ttctaatggaccttaaaaaattcttctgggacacatcagtgagttttcatgtcactatccacttaaaacattggttttgatcaggagatggcaaattgccgtctgcgggccaaatccagcccactatttgattttgtagataaaatttaactgtaacagagccaaactcattttttaaaaatgtattgcatatggtccctgtcatgccacaatggcaggccatatgacagcagccatagggcctaaaacataaactatctggctttcttgagaaaaagctttctgacttcrgtttttgtatcagttattatttatatatttacttgagaaaattgttataacttgatgatttaagataatgtttttatgtaacagaactgatatgttcagtttgctgtcaacttattattcagtgtagatgtaagtaagacaatataaggaatccttttctgtaataaagtgtataatagagcttgatttgggagactcctagaaagacacgctgcaaacaaacacactgactaatctgagaatatcaattaccatttgaaaaccacctaagcctaattaaaacataaataggaacaagtgaagaaagagtaattacat

SEQ ID NO: 634988 - DNA, 591 bp, Homo sapiens
taagggaattaaaactgaatatttaaatccttatatttaacraattcactatgaaacttctgttttgttcacactttcataatatttccatgctgtactgtctcatattccctccagcagtgggagaggaccttgccaattgttggtatggttgctcattttacttttaaccattctcatcggtgtgtaatagtatctcacaaatcaaatgtcagaaaaattttaatttttctcttccaaatatcgtatgatattgagtaccaatttcatatgcttatttgccatttatattcctaatttggtatggtgtctgctaaaatatttaccccttacccttatgttttcaagtttgtttgtttgtttgttttaagacagggtctcactctgtcacccagggtggagagtagtggcgccatctcagcttactgcaacctagacttctgggctcaaagtatcctcccacctcaccctcctgattagatgggacaataggtgtgctctaccacgcttggccattttttttcttttaatttttttgtagggatgggatttcaccatgttgcccaggctggtcatgaactcctgagctca

SEQ ID NO: 634989 - DNA, 394 bp, Homo sapiens
ccagcagtgggagaggaccttgccaattgttggtatggttgctcattttacttttaaccattctcatyggtgtgtaatagtatctcacaaatcaaatgtcagaaaaattttaatttttctcttccaaatatcgtatgatattgagtaccaatttcatatgcttatttgccatttatattcctaatttggtatggtgtctgctaaaatatttaccccttacccttatgttttcaagtttgtttgtttgtttgttttaagacagggtctcactctgtcacccagggtggagagtagtggcgccatctcagcttactgcaacctagacttctgggctcaaagtatcctcccacctcaccctcctgattagatgggacaataggtgtgctctaccacg

SEQ ID NO: 634990 - DNA, 584 bp, Homo sapiens
acttctgttttgttcacactttcataatatttccatgctgtactgtctcatattccctccagcagtgggagaggaccttgccaattgttggtatggttgctcattttacttttaaccattctcatcggtgtgtaatagtatctcacaaatcaaatgtcagaaaaattttaatttttctcttccaaatatcgtatgatattgagtaccaatttcatatgcttatttgccatttatattcctaatttggtatggtgtctgctaaaatatttaccccttacccttatgttttcaagtttgtttgtttgtttgttttaagacagggtctcactctgtcacccagggtggagagtagtggcgccatctcagcttactgcaacctagacttytgggctcaaagtatcctcccacctcaccctcctgattagatgggacaataggtgtgctctaccacgcttggccattttttttcttttaatttttttgtagggatgggatttcaccatgttgcccaggctggtcatgaactcctgagctcaagcagtccgctcacctcggcctaccaaagtgctgggtttacaggtgtg

SEQ ID NO: 634991 - DNA, 628 bp, Homo sapiens
cctcccacctcaccctcctgattagatgggacaataggtgtgctctaccacgcttggccattttttttcttttaatttttttgtagggatgggatttcaccatgttgcccaggctggtcatgaactcctgagctcaagcagtccgctcacctcggcctmccaaagtgctgggtttacaggtgtgggccaccacatctggttcaagaattctttatatattctggatagaagttattttttagatatgtcactcgcaaatatttttcttcctctctgtaagttatctttttattctctttacagtgactttcatagagtagaactttctgattttaataatttcaatttatcaatttggaattccataggtcatatttttggtgtcgtatctaagaatctttgctttgatgtttttaccagtaggtatggcattaacttacaggtatttttagatgccctttattatatttaggaacttcctcgcatttttattctgaagagtttttatccgaatgagatattagatattttcaagcacctttcctgtgcctatgaaaataagcatacattttctccgataagagagagattactaaaattttgtttataattttttcatgtatatgca

SEQ ID NO: 634992 - DNA, 504 bp, Homo sapiens
cttactgcaacctagacttctgggctcaaagtatcctcccacctcaccctcctgattagatgggacaataggtgtgctctaccacgcttggccattttttttcttttaatttttttgtagggatgggatttcaccatgttgcccaggctggtcatgaactcctgagctcaagcagtccgctcacctcggcctaccaaagtgctgggtttacaggtgtgggccaccayatctggttcaagaattctttatatattctggatagaagttattttttagatatgtcactcgcaaatatttttcttcctctctgtaagttatctttttattctctttacagtgactttcatagagtagaactttctgattttaataatttcaatttatcaatttggaattccataggtcatatttttggtgtcgtatctaagaatctttgctttgatgtttttaccagtaggtatggcattaacttacaggtatttttagatgccctttattatattt

SEQ ID NO: 634993 - DNA, 628 bp, Homo sapiens
cctcccacctcaccctcctgattagatgggacaataggtgtgctctaccacgcttggccattttttttcttttaatttttttgtagggatgggatttcaccatgttgcccaggctggtcatgaactcctgagctcaagcagtccgctcacctcggcctaccaaagtgctgggtttacaggtgtgggccaccacatctggttcaagaattctttatatattctggatagaagttattttttagatatgtcactcgcaaatatttttcttcctctctgtaagttatctttttattctctttacagtgactttcatagagtagaactttctgattttaataatttcaatttatcaatttggaattccataggtcatatttttggtgtcgtatctaagaatctttgctttgatgtttttaccagtaggtatggcattaacttacaggtatttttagatgccctttattatatttaggaacttcctcgcatttttattctgaagagtttttatccgaatgagatattagatattttcaagcacctwtcctgtgcctatgaaaataagcatacattttctccgataagagagagattactaaaattttgtttataattttttcatgtatatgca

SEQ ID NO: 634994 - DNA, 607 bp, Homo sapiens
gacaattaaacccagggtagggccgggtgcagtggctcctggctgtaattccagcactttgtgaggctaaggcggacagattacttgaggtcaggagtttgaaaccagcctggtcaacatggtgaagccctgtctctactaaaaatacaaaaattagccagggatggtggcgcatgcctgtaatcccagctacttgggaggctgaggcaggagaatctcttgaacccgagaggtggaagttgcagtgagcccagagcgccccactgcactccagcctgggcgacagagtgagtcagactccatctcaaaaaaaagagtatgctccattaaaactcaagaagaaaaggtgtttagtttagctgaccctcaggaccctgaatactgccagtacttactttatacatattctatgcttttatcagtggatcatcttaatttgtttctctctgaaaactkggttctccgatatggtaagaaacattgccactgacaggttcgaaatttcatatctcatagcatatgctcagataggattgacctatggggtgtttaatctccaattccaaaattgacaaagtgctatgatatgtaagagataaatcccagg

SEQ ID NO: 634995 - DNA, 605 bp, Homo sapiens
actgtgaggtggtaccatttgaccttgtcaggtatttgatattgtgaaacctggttaattggaacgatgaatgcgaaaattcytagccttccttctgttgaaagaggtttctaaatttgaattctgaaaattatttttattgccctcactcatctataaaattgttaagttccttgaacacagagattatgtctatgtaatttgtgagttcttcacatcacttaatacattgcccatgagaaaaaaattcttgaaagcaatatttggtaaaaattatttagcatttctctttctgtccattgtactttcagattcaagggcttatgggttccaccctcatccagagggctctttcccaggcttcttacaggtgcgggggagaagtccagaaaccaggatctgtaataatcacttggtcctgacatctatgatattataaatactacacagaaaattttgttcttcaaaaatgttacgaagacagaaaaataactagtttagaatagctaaacctgaatccagatttccaatataactttctaatacttttaattcttcgaattcatttctctgctgaatttctgttgttaaatatagctacaaat

SEQ ID NO: 634996 - DNA, 605 bp, Homo sapiens
actgtgaggtggtaccatttgaccttgtcaggtatttgatattgtgaaacctggttaattggaacgatgaatgcgaaaattcttagccttccttctgttgaaagaggtttctaaatttgaattctgaaaattatttttattgccctcactcatctataaaattgttaagttccttgaacacagagattatgtctatgtaatttgtgarttcttcacatcacttaatacattgcccatgagaaaaaaattcttgaaagcaatatttggtaaaaattatttagcatttctctttctgtccattgtactttcagattcaagggcttatgggttccaccctcatccagagggctctttcccaggcttcttacaggtgcgggggagaagtccagaaaccaggatctgtaataatcacttggtcctgacatctatgatattataaatactacacagaaaattttgttcttcaaaaatgttacgaagacagaaaaataactagtttagaatagctaaacctgaatccagatttccaatataactttctaatacttttaattcttcgaattcatttctctgctgaatttctgttgttaaatatagctacaaat

SEQ ID NO: 634997 - DNA, 563 bp, Homo sapiens
cagtccctggtaaccacgattccactatttgattctgtgaatttcactattttaaatgcatcatataagtayaataatgcagtatttgtctttctgtaactgtcttatttcccttagcataatgtcctcaatgttcatccatgttgttacacactgcagagtttccttttataaagctgagtaatatcccactgtgtgtgtataccacattttctttattccttcatctatctattgacatttaggttgtttttacatcttgactactgtgagtagtactgcaatgaacataggaatgctaatatccctttgagagcctgacttaattgttgttgttgttgttgttgttttgtttaaatacccagaagtgaggttgcatctattttgtcttaatgaaaaactatttccgatcctgtttctgaattgagacaaaaacaaatgcatttgacaaacaactacatatcctgcacctaagaccatatgtagctgctctaacaataacacaacctcagctacaattggggttccaattttgttgggcttgtaattggttggctactgtc

SEQ ID NO: 634998 - DNA, 576 bp, Homo sapiens
tattttaaatgcatcatataagtacaataatgcagtatttgtctttctgtaactgtcttatttcccttagcataatgtcctcaatgttcatccatgttgttacacactgcagagtttccttttataaagctgagtaatatcccactgtgtgtgtataccacattttctttattccttcatctatctattgacatttaggttgtttttacatcttgactacygtgagtagtactgcaatgaacataggaatgctaatatccctttgagagcctgacttaattgttgttgttgttgttgttgttttgtttaaatacccagaagtgaggttgcatctattttgtcttaatgaaaaactatttccgatcctgtttctgaattgagacaaaaacaaatgcatttgacaaacaactacatatcctgcacctaagaccatatgtagctgctctaacaataacacaacctcagctacaattggggttccaattttgttgggcttgtaattggttggctactgtcctcatggatccatctggtttctgcaagggccagactggaaaattaacaagggatatgaga

SEQ ID NO: 634999 - DNA, 563 bp, Homo sapiens
cagtccctggtaaccacgattccactatttgattctgtgaatttcactattttaaatgcatcatataagtacaataatgcagtatttgtctttctgtaactgtcttatttcccttagcataatgtcctcaatgttcatccatgttgttacacactgcagagtttccttttataaagctgagtaatatcccactgtgtgtgtataccacattttctttattccttcatctatctattgacatttaggttgtttttacatcttgactactgtgagtagtactgcaatgaacataggaatgctaatatccctttgagagcctgacttaattgttgttgttgttgttgttgttttgtttaaatacccagaagtgaggttgcatctattttgtcttaatgaaaaactatttccgatcctgtttctgaattgagacaaaaacaaatgcatttgacaaacaactacatatcctgcacctaagaccatatgtagctgctctaacaataacacaacctcagctacaattggggttccaattttrttgggcttgtaattggttggctactgtc

SEQ ID NO: 635000 - DNA, 576 bp, Homo sapiens
tattttaaatgcatcatataagtacaataatgcagtatttgtctttctgtaactgtcttatttcccttagcataatgtcctcaatgttcatccatgttgttacacactgcagagtttccttttataaagctgagtaatatcccactgtgtgtgtataccacattttctttattccttcatctatctattgacatttaggttgtttttacatcttgactactgtgagtagtactgcaatgaacataggaatgctaatatccctttgagagcctgacttaattgttgttgttgttgttgttgttttgtttaaatacccagaagtgaggttgcatctattttgtcttaatgaaaaactatttccgatcctgtttctgaattgagacaaaaacaaatgcatttgacaaacaactacatatcctgcacctaagaccatatgtagctgctctaacaataacacaacctcagctacaattggggttccaattttgttgggcttgtaattggttggcyactgtcctcatggatccatctggtttctgcaagggccagactggaaaattaacaagggatatgaga

SEQ ID NO: 635001 - DNA, 590 bp, Homo sapiens
atttttttctatatcctctatatttaaatttttccttcttttatagttaataatatataatgcttacaatgtgccaagaaaacttcaaggtgctttacacatgtcttgattttgtaatccttatttaatcctatggtttaccattatcaaatccattttacagataaaggaattaagccagaatttgaatccaggaaatgcggccccagattctatgatcttaaacactgaactattatgttcttcttaagcagaaaaacaaaaaactgtaaaacctcccatctttaaacaaayaaagcaaagaatgccctcccttgattcccacactgtcctctagctataaactcacttcttgtctaggtcagcaattacctcttttgccaaatggaattctttgtaaacgtcatactcaagtaatcagcagcctttaacatggtagtttattcttttaaaatataaatcaagacctgtcactcccttcttgcatagacccttccattggcttccagtcacatttagaggaactctaacttatcatggtatatatcatggtatatgaggctctgctacagggggctttggctatctct

SEQ ID NO: 635002 - DNA, 596 bp, Homo sapiens
ggctgtacttttataagtttttctgtcttcaaggctttgagttaagttcattttacttggcttaatctgaccagaaaatctgtaaaagacagaggtacggaaaagagcttcattagcctcagttgtttcatgaatcaaatggctgtgctttgtagacagatcatctaatttaatttactagactttgcttaaaatcagaaaacatgggttaaagcccgatattatcatttattratcagaacatttgtgctggaataaaaagtattcttagtgctttctgaggagactgtgtttacatatatagtttccggtggctatgcatacagatacacatacacacacatacaaacatgagatacaaatatgagagaaagagacccagaaagagagatggagaaaaggagagaggagaaggaaaggggaggaaaggaaggaaagggaaaagaagggaaggggaggggaaggaagaggatgaaattatgaaattacctctatgtttaaataaaaatgttaatcacctcttttagctcaatgcatatgcattttaatttcctgtggggtatcatttcttctttgcttttaaattaatagcttac

SEQ ID NO: 635003 - DNA, 596 bp, Homo sapiens
ggctgtacttttataagtttttctgtcttcaaggctttgagttaagttcattttacttggcttaatctgaccagaaaatctgtaaaagacagaggtacggaaaagagcttcattagcctcagttgtttcatgaatcaaatggctgtgctttgtagacagatcatctaatttaatttactagactttgcttaaaatcagaaaacatgggttaaagcccgatattatcatttattgatcagaacatttgtgctggaataaaaagtattcttagtgctttctgaggagactgtgtttacatatatagtttccggtggctatgcatacagatacacatacacacrcatacaaacatgagatacaaatatgagagaaagagacccagaaagagagatggagaaaaggagagaggagaaggaaaggggaggaaaggaaggaaagggaaaagaagggaaggggaggggaaggaagaggatgaaattatgaaattacctctatgtttaaataaaaatgttaatcacctcttttagctcaatgcatatgcattttaatttcctgtggggtatcatttcttctttgcttttaaattaatagcttac

SEQ ID NO: 635004 - DNA, 596 bp, Homo sapiens
tttctttctcttgtctgaattaattttgtatcctgaaactttgatgaatttgtttaccagttctaggagctttttggaggaatctttagggttttctagatatacagtcatatcatcagcaaacagtgacagtgacttcttctttaacaattttggatgtcctttatttctttctcttgtctgactgctctggctaggacttccagtactatatcgaatagaagaggttaaagtgggcattcttgtctcrtaccagttttcagggggaatactttcagcttttccccattcagtataatgttggctatggggttgtaacagatagtttttattaccttaaggtgtgttccttttatgccaattttgcagagggttttaataacaaagggatgctggattttgtcaaatgctttctctgcatctattgagatgatcatgagatttttgttttaaattctgtttatgtggtgtatcacatttattgacttggagatgttaagtcatctctccatcactggtgtgaaacccacttgatcatggtggattatcttcttgacatgctattggatttggtttgctagtgttttgttgaaggt

SEQ ID NO: 635005 - DNA, 533 bp, Homo sapiens
ctcaatgcctaggaggatacttttggttccttaaagatggaaagcagatactataatttattctttacctacaagtagatggtacttttattgttgagaatgttttcygttttataatagatatgccaaatacttattatactttgggaaatagttttgctctattttttatcagcatatattgcacatggatgacttccaaaccacactttgaaataaaaaaaagacattttcggcaagtcgcagtgctcacgtctgtaatcccaacactttgggaggccgaggtgggcggatcacttgtcaggagttggagacaagcctggccaacatggtgaaaccacaccctaactctattaaaacaaaacaaagaaaaacaaaacaaaacaaaatttaaataagaaaattaacaaaactgtgataaagttactgcagggggaagaatattatggagttaaagatagtagaattcaaaatctgcatttagggatctggaagttaaaattaaattctttctgattatttgtgttgaaaat

SEQ ID NO: 635006 - DNA, 496 bp, Homo sapiens
ttgtacaagaagcctgtcagatccagagtcttgctaaagtcagcgtctgcctctcctctgtctctaatagcagctctgtgctttcctagagacaggtaattagtggttagaggcttgctgtggagtggttgaagtttccagtaggatcctgaccacacccttcagccgtgtttatccttgatgtggaggtctcttcgggcttcacttgagcactttcagtatttctgtaatgtaggacagagaacaccctgccttgcttggcctgggaccagaggatgacttaagatccacggcagccagccttccctccaccctctggcctggtctccccgttaccatgcagccagggctgaggagagtgtcgcctagccaggggacatcccacagaggaggaaagagaargcagatccaggagagcctcccaccaacctctcgttctttcaggctttctctggcatgccttgcgaagtccggttatctgacccatccctggctg

SEQ ID NO: 635007 - DNA, 496 bp, Homo sapiens
ttgtacaagaagcctgtcagatccagagtcttgctaaagtcagcgtctgcctctcctctgtctctaatagcagctctgtgctttcctagagacaggtaattagtggttagaggcttgctgtggagtggttgaagtttccagtaggatcctgaccacacccttcagccgtgtttatccttgatgtggaggtctcttcgggcttcacttgagcactttcagtatttctgtaatgtaggacagagaacaccctgccttgcttggcctgggaccagaggatgacttaagatccacggcagccagccttccctccaccctctggcctggtctccccgttaccatgcagccagggctgaggagagtgtcgcctagccaggggacatcccacagaggaggaaagagaaagcagatccaggagagcctcccaccaacctctcgttctttcaggctttctctggcatgcctygcgaagtccggttatctgacccatccctggctg

SEQ ID NO: 635008 - DNA, 549 bp, Homo sapiens
tagcatgaaatgtagtgtggacaggtaagctaaggccagaccaaagaaagattccagtgctgctgagaagagtttgagtgaggtatgaaatggcaaaaggattcatttatttaagatacttactgagcacttagaatatgccgggtgttgcgataggctggagattcagtggtgaaggtaaacacagcctcccccctcatggattttagagtatgtaacaatacaaactgcarttgtgtccaagagatcatgtagagtttgacctggtctgggggtcaggaaaggctttcccaagcaaggaattaactaggcaaggaagtggacacagtttaaaagcagagagcatatgtaggttccctgtggtgggaggaaataaggtgccatcaaggaactaaagggcctggagtgtaggggaggataagatgaacagaagccagattgtgcagtatcttacaggctgtgtttaagtctttggactttggttcttagagtaatggaaaactcattggagggttttaagcaagagggtttgtgattaaatttgtgttt

SEQ ID NO: 635009 - DNA, 549 bp, Homo sapiens
tagcatgaaatgtagtgtggacaggtaagctaaggccagaccaaagaaagattccagtgctgctgagaagagtttgagtgaggtatgaaatggcaaaaggattcatttatttaagatacttactgagcacttagaatatgccgggtgttgcgataggctggagattcagtggtgaaggtaaacacagcctcccccctcatggattttagagtatgtaacaatacaaactgcagttgtgtccaagagatcatgtagagtttgacctggtctgggggtcaggaaaggctttcccaagcaaggaattaactaggcaaggaagtggacacagtttaaaagcagagagcatrtgtaggttccctgtggtgggaggaaataaggtgccatcaaggaactaaagggcctggagtgtaggggaggataagatgaacagaagccagattgtgcagtatcttacaggctgtgtttaagtctttggactttggttcttagagtaatggaaaactcattggagggttttaagcaagagggtttgtgattaaatttgtgttt

SEQ ID NO: 635010 - DNA, 607 bp, Homo sapiens
ctctttggggcacagctggactggcagccctgcagggtcaggtgagctgccagtcctgggtgtgttctcgggggtgggggtgggaggatcacgtcctgggctgagatcccttcagctcctcctgggcaggaggaaacagccatgcaggggcggccaggaggactgggtggcgggtggttctgggctctcccagcttcggttggggctgggaccctgggggacatgctctcctgggtgttcccaggctctgtgtytggcctgtgcctcagtgtgtgggttttctggcaccaggcttccttgggaagagcctctggttgtgcaccagccctgagggtggggctcatcccaggctgcaggggactgagggccgagctcttccaccttgaggacaaggatggttcctcagggctgggaggaggaggaggcgctggccaggaccttagattacgcagggcatggtgttggggcctcacagatgatggagaagccagagttcaggcacttggcatgacccctggcatcgccttcagttgatttagtgtctctgccctgggatattccatgggaccctgggctggcttctgtgtgcagaggtgggtgtgggcca

SEQ ID NO: 635011 - DNA, 600 bp, Homo sapiens
gggcacagctggactggcagccctgcagggtcaggtgagctgccagtcctgggtgtgttctcgggggtgggggtgggaggatcacgtcctgggctgagatcccttcagctcctcctgggcaggaggaaacagccatgcaggggcggccaggaggactgggtggcgggtggttctgggctctcccagcttcggttggggctgggaccctgggggacatgctctcctgggtgttcccaggctctgtgtctggcctgtgcctcagtgtgtgggttttctggcaccaggcttccttgggaagagcctctggttgtgcaccagccctgagggtggggctcatcccaggctgcaggggactgagggccgagctcttccaccttgaggacaaggatggttcctcagggctgggaggaggaggaggcgctggccaggaccttagattacgcagggcwtggtgttggggcctcacagatgatggagaagccagagttcaggcacttggcatgacccctggcatcgccttcagttgatttagtgtctctgccctggggtattccatgggaccctgggctggcttctgtgtgcagaggtgggtgtgggcca

SEQ ID NO: 635012 - DNA, 600 bp, Homo sapiens
gggcacagctggactggcagccctgcagggtcaggtgagctgccagtcctgggtgtgttctcgggggtgggggtgggaggatcacgtcctgggctgagatcccttcagctcctcctgggcaggaggaaacagccatgcaggggcggccaggaggactgggtggcgggtggttctgggctctcccagcttcggttggggctgggaccctgggggacatgctctcctgggtgttcccaggctctgtgtctggcctgtgcctcagtgtgtgggttttctggcaccaggcttccttgggaagagcctctggttgtgcaccagccctgagggtggggctcatcccaggctgcaggggactgagggccgagctcttccaccttgaggacaaggatggttcctcagggctgggaggaggaggaggcgctggccaggaccttagattacgcagggcttggtgttggggcctcacagatgatggagaagccagagttcaggcacttggcatgacccctggcatcgccttcagttgatttagtgtctctgccctgggrtattccatgggaccctgggctggcttctgtgtgcagaggtgggtgtgggcca

SEQ ID NO: 635013 - DNA, 357 bp, Homo sapiens
tgccacaggctcacacttatattgaataagtggattaaaatgctccaaatctttactgtctctaacattctcagtgaacttggcagaaactttgattaaggatgctttaatagtaacaatgtagatagttggcacattacaggggtaatatcatatccattttcattagtgattctttcgaagagacacatggttgtccatgactttatagctgttgttttaaaaatgtatgcatgtctaagatgtggataaccttttcaagcatagtctatgtgatacattttttactttccayttgaaagacagtatactatttgaagacatcaaatgtcaaatagaaaatccataaacaatgat

SEQ ID NO: 635014 - DNA, 577 bp, Homo sapiens
cctttaataccttctcactgtgctaaggataaagacaaaattatcaatatggcttacaaagctcttcatgaactgttcgttgcataactgtyaagcatcatgttagagctcatattgattgaatgctgattactgactgagcatagaaactatttcagtgaatcttgtaacaaccttttcaggtgttatccccattttacagaagaggaactgggaagttgagttacttgcctaagattataaagctagaaagtggttattgtcaacactgttgaggaaatcaacacacattccaatcccctctcacttgctgcctccattgttaggggtggacgatctattttctcactttcacatttttcctggttatttgggttgtgttctggcctatgacacccaggtagaattccaacagaagatttctgagaagctttgaactttcctgataaaataacctgacactgcacatcgtcccccttcttcctcaacgggccattgtgcctggggctgcagccgccatttccagatgagggaatgacaaagccacaggctacgaatgcagagcagaagacagaaa

SEQ ID NO: 635015 - DNA, 587 bp, Homo sapiens
ttcacctttcctttctttcagaactatcttagctttacctttggataaatgtatgtcattagtgggagatcatctgcctcttaaattcttatctttcacaatggacaccagacttccttttaaggtgctatgtgtgactcatcagtagtttaaaattttgtaagatacatgaacattttctgattgagaaacactttagaaatgctgaacatattattgtgaaataacaatgactaatattgttgttaaattgttkaattgtaatagctttaaccttttttgattcagtctgtttattccaagttatcttgccttttaaatggctttgaaacattggcaaacaatgctggtctctcttacagatctcagtcctgcttttaacaatgacaggcagtgtattcaaaacatacctgaattggacatgacattttggggaatattttgactagtttgtaataaaagaaaagttgaataaatcagaattgattaaagaggtgatagtataccaaatgctatggtgagcaaattactcttgagaaatgcattgtttatatagatattacaatgtcatgctgttctcaacccaa

SEQ ID NO: 635016 - DNA, 513 bp, Homo sapiens
tgatccaatcacctcttaaagttaccacctgtcaatactgccagattggagattaagttccaacatgcgttttggaggggtcattcaaaccatagcatagagtaatgatggtaagttgtttcaggcataaaatttgaaataaattatgaggctccatgatatgctatattkggtttaccttcagaagaatatttagtttcactcaggtttttcaaagctaaccctgtccccccaaatacggaaccaaaccctaaaaccacccttttaagagttgatggctaatcatttgatttgcctcctgtgctggatcacattagggatttttctttttattgcctgcaaataacagaaaactgactaacagtgtaagaaataaagtgattacaaatagggatttttcctcccacacacactacaatatttctggatataaggtcattatgggtattagtttagtgactcaaataatatcactgctcagggtcagtttgtctgtgattctctatgcctttc

SEQ ID NO: 635017 - DNA, 513 bp, Homo sapiens
tgatccaatcacctcttaaagttaccacctgtcaatactgccagattggagattaagttccaacatgcgttttggaggggtcattcaaaccatagcatagagtaatgatggtaagttgtttcaggcataaaatttgaaataaattatgaggctccatgatatgctatatttgktttaccttcagaagaatatttagtttcactcaggtttttcaaagctaaccctgtccccccaaatacggaaccaaaccctaaaaccacccttttaagagttgatggctaatcatttgatttgcctcctgtgctggatcacattagggatttttctttttattgcctgcaaataacagaaaactgactaacagtgtaagaaataaagtgattacaaatagggatttttcctcccacacacactacaatatttctggatataaggtcattatgggtattagtttagtgactcaaataatatcactgctcagggtcagtttgtctgtgattctctatgcctttc

SEQ ID NO: 635018 - DNA, 507 bp, Homo sapiens
ttttattgaataagtttttctctgtggatgtccaggaacctttcctcccagcctgtttgaaagaataatgattaaattagaacaggacatactgatgtttaataaaaaaaaaaaaatcacaagtcagtatcttgaaagtatatcccaaggctttttttaaggtaacctttatactraaccataaaaagattaaagacaccttcctctagaatcaggccctgtcattcacattgagattgttcagaaaaagaagagttgacacctttactgaaaggagtcaaggtcttgcaagcaggaaactggttttatgacaatcccctgccttgctaggtaagctggtccacatcgagatgactctctccttgacttctgacttactttgtgtttgttggaggaatcctatgagtcatatttagcctttccagcctgattgagtttgaaggagccactggattattgcatacaatggattttgcaaagagttttctccagcatacccacaggaga

SEQ ID NO: 635019 - DNA, 507 bp, Homo sapiens
ttttattgaataagtttttctctgtggatgtccaggaacctttcctcccagcctgtttgaaagaataatgattaaattagaacaggacatactgatgtttaataaaaaaaaaaaaatcacaagtcagtatcttgaaagtatatcccaaggctttttttaaggtaacctttatactaaaccataaaaagattaaagacaccttcctctagaatcaggccctgtcattcacattgagattgttcagaaaaagaagagttgacacctttactgaaaggagtcaaggtcttgcaagcaggaaactggttttatgacaatyccctgccttgctaggtaagctggtccacatcgagatgactctctccttgacttctgacttactttgtgtttgttggaggaatcctatgagtcatatttagcctttccagcctgattgagtttgaaggagccactggattattgcatacaatggattttgcaaagagttttctccagcatacccacaggaga

SEQ ID NO: 635020 - DNA, 549 bp, Homo sapiens
tgtctgtctagctcaagagttgactgtggacgaggaatgcctgtattgattcattaatgtaataactatttactgactgcctaccatgtacaaccagaaacacagttcctaacctcatgaacttaccatgyaacatgggaagacaagcactaagttcttatttgtttgtaattgtgataaggctcagagaacaaatacagattcctatgaacccatgtatagggggaaatatttaggttccatttaatactgacatggctaagtatctcagtatttaagctgagatctgaaggataattagaagattcctcaggcagagggaagagcaaaggctgtgtgtggggcaggaagaaatgtggtcgtttgaggaacttcgagatcagcgtggccactgatgtgctgcagtgtagcaaagagagcaaaagaaagagagaaacagggaggaatggaattcagctcacgggctctggaatcagagtttcaagttggaatcctgacttcctagctgtatcggttaagaatttttttttgtggcatccaaagaacaga

SEQ ID NO: 635021 - DNA, 436 bp, Homo sapiens
agaactagccttaggagaccttagaaagttccctttcttgaaaaatgctacttcagtttgcctgaaattttttcctttcctttttcatatccctgccctctcccaaagaccctatggggagaagaagacaaacaaatttagaaagcagaaacaccagatgaattactktgctcctactcaagctacttcaggggatgtatcagggtacttaaatcacctgattcacctggcatcagaaccacctggagtgcttgataaactgcagattctagggtcctatttcaaacgtcgaaaaatccaaatttctgctgtaaaaccctaatatctgcatttttaatcaagtatgaggaccttcatgaggatgggtatatttgtctttttattcacaaatgtatcccaaaacactagatcacttcctaaaaacaccttaaaaata

SEQ ID NO: 635022 - DNA, 436 bp, Homo sapiens
agaactagccttaggagaccttagaaagttccctttcttgaaaaatgctacttcagtttgcctgaaattttttcctttcctttttcatatccctgccctctcccaaagaccctatggggagaagaagacaaacaaatttagaaagcagaaacaccagatgaattactttgctcctactcaagctacttcasgggatgtatcagggtacttaaatcacctgattcacctggcatcagaaccacctggagtgcttgataaactgcagattctagggtcctatttcaaacgtcgaaaaatccaaatttctgctgtaaaaccctaatatctgcatttttaatcaagtatgaggaccttcatgaggatgggtatatttgtctttttattcacaaatgtatcccaaaacactagatcacttcctaaaaacaccttaaaaata

SEQ ID NO: 635023 - DNA, 436 bp, Homo sapiens
agaactagccttaggagaccttagaaagttccctttcttgaaaaatgctacttcagtttgcctgaaattttttcctttcctttttcatatccctgccctctcccaaagaccctatggggagaagaagacaaacaaatttagaaagcagaaacaccagatgaattactttgctcctactcaagctacttcaggggatgtatcagggtacttaaatcacctgattcacctggcatcagaaccacctggagtgcttgataaactgcagattctagggtcytatttcaaacgtcgaaaaatccaaatttctgctgtaaaaccctaatatctgcatttttaatcaagtatgaggaccttcatgaggatgggtatatttgtctttttattcacaaatgtatcccaaaacactagatcacttcctaaaaacaccttaaaaata

SEQ ID NO: 635024 - DNA, 639 bp, Homo sapiens
tgggcgtggtggcatgttatctgtagttccagctacgtgggaggctgaggtgggaggaatacctgagcctggagaggtcgggacctcagtaagccrtgactgcaccactgccctccagcctaggtggcagagtgagaccctgtctcagaaaaaaaaaaaaaaaaaattgttcctttgggaggtggaatatcacagtagtcaataccttgggcactagaatccaagctctaccatttattaactgagcaaattgagggaaattatttaattctaaggctttaattccaccatctatgaaatggtgatgtagcaaaacctgcctaacagggatggtggcaagattaagggagagtgagcaggtagttactgtgctcagtgttagatactatcttcatcatcgtcatccatgatgatcttagcaatcctgctactgggttgaatgaagttctctgtacagattccatggctgtaggtaagaatgaattgctcataattgtgagcagaataatgtgtggtaaacaaattatgcagttattcgaatccttctactaaatcacaactatagggttaaactaaagggcagttttgaaactgacctctgggtgtgaatgcattgtcaagcacttcatactaaaacac

SEQ ID NO: 635025 - DNA, 639 bp, Homo sapiens
tgggcgtggtggcatgttatctgtagttccagctacgtgggaggctgaggtgggaggaatacctgagcctggagaggtcgggacctcagtaagccatgactgcaccactgcmctccagcctaggtggcagagtgagaccctgtctcagaaaaaaaaaaaaaaaaaattgttcctttgggaggtggaatatcacagtagtcaataccttgggcactagaatccaagctctaccatttattaactgagcaaattgagggaaattatttaattctaaggctttaattccaccatctatgaaatggtgatgtagcaaaacctgcctaacagggatggtggcaagattaagggagagtgagcaggtagttactgtgctcagtgttagatactatcttcatcatcgtcatccatgatgatcttagcaatcctgctactgggttgaatgaagttctctgtacagattccatggctgtaggtaagaatgaattgctcataattgtgagcagaataatgtgtggtaaacaaattatgcagttattcgaatccttctactaaatcacaactatagggttaaactaaagggcagttttgaaactgacctctgggtgtgaatgcattgtcaagcacttcatactaaaacac

SEQ ID NO: 635026 - DNA, 639 bp, Homo sapiens
tgggcgtggtggcatgttatctgtagttccagctacgtgggaggctgaggtgggaggaatacctgagcctggagaggtcgggacctcagtaagccatgactgcaccactgccctccagcctaggtggcagagtgagaccctgtctcagaaaaaaaaaaaaaaaaaattgttcctttgggaggtggaatatcacagtagtcaataccttgggcactagaatccaagctctaccatttattaactgagcaaattgagggaaattatttaattctaaggctttaattccaccatctatgaaatggtgatgtagcaaaacctgcctaacagggatggtggcaagattaagggagagtgagcaggtagttactgtgctcagtgttagatactatcttcatcatcgtcatccatgatgatcttagcaatcctgctactgggttgaatgaagttctctgtacagattccatggctgtaggtaagaatgaattrctcataattgtgagcagaataatgtgtggtaaacaaattatgcagttattcgaatccttctactaaatcacaactatagggttaaactaaagggcagttttgaaactgacctctgggtgtgaatgcattgtcaagcacttcatactaaaacac

SEQ ID NO: 635027 - DNA, 459 bp, Homo sapiens
ttggtgcgccctcatgagtgctgtgatttgctaggccctgaagtggcagctctctgcccgctgctgccactgcacgcaccgttctgtggctgagacagccatgagtaagagcagagctaatcctcggggagtgggaggggagaaggaggggtggccccgggcctgagatttytttgtgtctcaggtctctggtatctttaagcctcttttcttcccccactttctcggagagccattgctctcattaaaaaaaaaaaaaagttccttgacccacctggtccctaaagcagaacgtaccagctccattaaattaacatatgtagttctgcaaagtctaaacagtttaaatttcattattctaggcagtatttgtcaggttgccaaagcaggggaaatctgtgaggggacaaggagaagtttagccccatgcatgcccaggatggtactttgcttctgcct

SEQ ID NO: 635028 - DNA, 510 bp, Homo sapiens
tacaagtggccaacacatatgaaaaaatgctcaacatcactattcatcaaagaaatgaaaattaaaatcacaatgagataccatctcacatcagtcagaatggctcttattaaaaagtcaaaaaacaatagatattggcaaggatatggtaaaaagggaacacatactttgttggtgggagtgtaaattagtacaatctctgtggaaaacaatatggagarctctcaaagaactaaaaatagaactaccatttgatacagcaattccactactggctatctacccaaaggaaaataaatcatttaatgaaaatggtatctgcacacatatgtttattccagcaatagtcacaatagcaaagtcatggaatcaatctaagtgtccagcaacagatgattacattaaaatgtgtgtgtgtatacatgcacacacacacaaacacacacacacacactgtagagtactactcagccataaaaaagaataaaagcatgtctcttgcagcaacaa

SEQ ID NO: 635029 - DNA, 574 bp, Homo sapiens
gacagctatataaacctagttcttttgtccaagatgccaggtatgtttcttctaargcattgattgagttccccattttcaaaaaaattatgcatctttatcaatataaaagtattgcaagaaacctattttatgcattccattataagtatatataccaatatattcatgtattatgttattataagatatacaaaataaaattaaaacaaatgtgacaaaaataaaaatttttaaatttcttatatagcatctttcctccaaagtagattttcctgcataatccgtagagtacaagtttctcatttggtcgaccactgcttaggaatgaaggagccagcacttgttcaatgtgcctcattggggttgtgctgttacattaattatttcatgtcaccctcataagaaatctgtgggctaaaatgtataccatgttatacattgtttatttcaaataataacttaaacagcaaaaagttattaggtaaaaactgtgatctacataaagtatgggcatttattaataacaatgtatcaatattgtttcattaattatgacaaatgtatgatacta

SEQ ID NO: 635030 - DNA, 583 bp, Homo sapiens
gataaaattgcatgagcaaagtattttctgacttataaattgatcttgaaagtacttatcagatatctttattgtgtgccagttacacatacaaaggtcaacagctagaaatatcaaacaaagatcttggattacataatgaagaagttaaaactctataaaaatccaarcataaaatagactttgaaaaatatacaattaaattaaagagaaatagaaatgtaaaacaggcttcttttttaaaataccaaatattttgaaaccccagaattcagtaatcactcaagtagtctacatgtaaagtaaataaatatgtttacgaatatatctttctgagaaagaaaaaataatgttattatgcacaaaagtataatttcagtttttaagagaacaaaatagacaaataatgaagtagacatcaaaagcagttttgaatcagtttaatatgaataatttttataggtataatagtagtcttatttacaaatttgtcacaaattatggaaaacaatattttcaatattgtgaaaaattaatagtgtataaaattttaaattatatcaatagttataaaagagtaaag

SEQ ID NO: 635031 - DNA, 583 bp, Homo sapiens
gataaaattgcatgagcaaagtattttctgacttataaattgatcttgaaagtacttatcagatatctttattgtgtgccagttacacatacaaaggtcaacagctagaaatatcaaacaaagatcttggattacataatgaagaagttaaaactctataaaaatccaagcakaaaatagactttgaaaaatatacaattaaattaaagagaaatagaaatgtaaaacaggcttcttttttaaaataccaaatattttgaaaccccagaattcagtaatcactcaagtagtctacatgtaaagtaaataaatatgtttacgaatatatctttctgagaaagaaaaaataatgttattatgcacaaaagtataatttcagtttttaagagaacaaaatagacaaataatgaagtagacatcaaaagcagttttgaatcagtttaatatgaataatttttataggtataatagtagtcttatttacaaatttgtcacaaattatggaaaacaatattttcaatattgtgaaaaattaatagtgtataaaattttaaattatatcaatagttataaaagagtaaag

SEQ ID NO: 635032 - DNA, 583 bp, Homo sapiens
gataaaattgcatgagcaaagtattttctgacttataaattgatcttgaaagtacttatcagatatctttattgtgtgccagttacacatacaaaggtcaacagctagaaatatcaaacaaagatcttggattacataatgaagaagttaaaactctataaaaatccaagcataaaatagactttgaaaaatatacaattaaattaaagagaaatagaaatgtaaaacaggcttcttttttaaaataccaaatattttgaaaccccagaattcagtaatcactcaagtagtctacatgtaaagtaaataaatatgtttacgaatatatctttctgagaaagaaaaaataatgttattatgcacaaaagtawaatttcagtttttaagagaacaaaatagacaaataatgaagtagacatcaaaagcagttttgaatcagtttaatatgaataatttttataggtataatagtagtcttatttacaaatttgtcacaaattatggaaaacaatattttcaatattgtgaaaaattaatagtgtataaaattttaaattatatcaatagttataaaagagtaaag

SEQ ID NO: 635033 - DNA, 495 bp, Homo sapiens
ttttgccatgtatttaaatatttacacttgttttgaactaaagaaattgatcagtaataagtacccagctctacctgtgctggtatatagagacctttctctatataagaagaaaaagaaaacaaatccagaaatatggcaacattcagcattgaaaagaawaggacaaaatgagaatgagagcaaaaaatgctctgtaaggatagtcattacaagaagaagaagataattatttttgttttaagaaacttagaaagtatatttcattggtaaatccagaactggttcttatgaaatggagtagtaacaaaatgaggaagttcttggaaaggcaaattacaattgcaggtttttgtttaaaaagcaaacagtaataaattgaataaggcagaaaaaataattgaattaaataaatgagaattccaggaaagtctcataattccaagcataataaaacaaaaggagatagaagttaggaagaaaacgaggagtact

SEQ ID NO: 635034 - DNA, 658 bp, Homo sapiens
taagcttaaggacagaattcagagaagaaaagcgtgtgaacttatgttcaatttgcttatttttttttttcaggtaaacaggatttttgaaatgtaaaaatatatgatagagtttgaggaaaaatagattaagtacgtacaagttataaggacaactctaagtattaacaggttggcaaagtcccaattgagaaaatttcatggaacagtttctacagatatgatgcatgagctgagttttgaaaagcaaatgggagttttaggggtagacaaactgggtgagtgcattaaagtagtaggaatggcctatgcaattatattgatttgcaaatcaggagagctctaagtagctgcattccaacattcagttkgctctttcatctattaagtgtaaagcagcttggaaaaatacagtagggagtggtgggacctatgatgaactggaaggtttaaaatcatcttaaataagtataaatatatttattatgccatacatacacacacactctctgtgcatacatgcacatatatacactttgcaataaccagatggaaatggcatctattagcgccaggatttatctatattttgctaattttgtgtcatcaatttttggtgtcaagtttgaggaaagtagtagctagtaatagatcggta

SEQ ID NO: 635035 - DNA, 510 bp, Homo sapiens
atttcaattaataactgtataattattttcagagacttgatctttatgaggaagcagacatatttgccaaaaaaaaaagtaaataaaaattagcagtgtaaaaggataaaggcaagaaacctcaatgctaaatattcaactcccacattggcacctttacctcagccttctgtcagaaacagtgtaagtgatggaaaaatgaaaaagtaacatgtagcggccttgttttcaaagttggaattactggtgactgacaaaggaatctaccatctatgtctgcttgtcactctgggagtcagctgttactggaagaataatggatgtccaacttctgatatgcctttcttaccaaagatgtggataactatatttctgaataatcatcagctcttctgtcataagtgatcatatttccacattcaagttggtttkgttttttctttcccaaattatcatgtgcctggagagtcatagaatggtctctcatgaattcaaagacacagattgttt

SEQ ID NO: 635036 - DNA, 584 bp, Homo sapiens
tttcctaattagaaaattccacacctgagtggtcactgtgaggtggttttgaatgtgagaattgaacccatttacttccttccttgattctatttaaattacattgacctaggagagaaatacataatttaattaggttgtaattattttttaaaatattcattctaatattatgtggcaattacctgtttatatctgttttggtactttggaaattaagcttgaaggtattctgcacagaagagtctccaagaggatttgggaaagagatatataagtatgcacacacacacgtatgctggatgcaggtaatgaagagtatgcrtgtgtgtgtgtttataaatttctaaactttcattccagacagtcttgggagacagatatttctttgggggtgagagggctgttactcatctcttaattaaacaaatataagtaaaggtggaaagaaaaagttagcacaactcaatgtttcccttactcaaaatgcagtacagcacactgatttatttgcagttatcctcatataattgtttatatttaaaattcataaactcctatagagctttaaaatttttaaatct

SEQ ID NO: 635037 - DNA, 411 bp, Homo sapiens
gtaatgcataatctgtggtatatccacaaaatggaatattattcagcaataaaaagagaaagcactattgattcacccaattcacacatgaatgaatcccaatacattctcccaagtgaaagaatatagtttcaaaaggttgccaattgcatgactccatttattctagcaaaggcaaaaatacaagagaagagaaaatatcagtggatgccaggttctcttctatattatttttttgcagggtctgaatatgaaggggcaacatgagggaattcttygagataatagaattattctgtattctgtctctgttagtggttctgataatctatgtataagaactcatatgactatacaccaaaaaagtgaaatttactacatgtaaaattttttaaataacatacagtaaca

SEQ ID NO: 635038 - DNA, 488 bp, Homo sapiens
atctacaccttaaccttcattgatggaaactcatcagatttatgaaggtatttcatgttatatgtttttaatagaacacttttaggaaattctgtatctgcagcgcttgctccctcacatcattcrgccgtctgcttagttgcccacttaccagagaagcctttcttaaccatctgatctaaaatagcatcttcttaaccatctgatctaaaatagcatctattcactcccatgtccaccagcatccatctttctactctgctttatttttttctacaacacttattaccatctaaactagtattttttatttatttacttcctcaactagaataaaagctgcatgataactgtcttcaaaattgtctgttttctgcacttttgtaccccaaattatagagcattgtcaattacatacagagcattcaaataaacacttattgaacaaatgaatgcataaactctatgaaatatttcataatttttgg

SEQ ID NO: 635039 - DNA, 605 bp, Homo sapiens
ttttgctaagtagcttaactgcctcccaaacaaagctgtaatatatacacagatttttttaatcccacacacaatatcttttatccaactaaaagcttttagacatagaaagatacaataaagcattgtccatgatgargaggaaaattaaacaatcatatctaaaccagaattgatatggatgagagaattaatagataagaatattaaaataattattactgtttcatgtatttaagaagctagacaaattttgaatatgttaatcagagctatgaaagatatcaaaataccctgcagccaattgttagagttaactacagtatctgacatgaaaaatactttgaataggattaatgacacattagatgtagcaacacaaatattagcaaacttgaaaatatagtaatagaatgtactcaaaagggaaagaacaaaaaaaggaacaaaaactttaaatagaacttcattgcattgtgggacagctttatcagcctaatagatatgaatatggagtccctgaagaagcatgagggagttcagagtaatatttgaataaacaatggctaagttttaaaatgtgattaaaactacatacctgcaga

SEQ ID NO: 635040 - DNA, 605 bp, Homo sapiens
ttttgctaagtagcttaactgcctcccaaacaaagctgtaatatatacacagatttttttaatcccacacacaatatcttttatccaactaaaagcttttagacatagaaagatacaataaagcattgtccatgatgaggaggaaaattaaacaatcatatctaaaccagaattgatatrgatgagagaattaatagataagaatattaaaataattattactgtttcatgtatttaagaagctagacaaattttgaatatgttaatcagagctatgaaagatatcaaaataccctgcagccaattgttagagttaactacagtatctgacatgaaaaatactttgaataggattaatgacacattagatgtagcaacacaaatattagcaaacttgaaaatatagtaatagaatgtactcaaaagggaaagaacaaaaaaaggaacaaaaactttaaatagaacttcattgcattgtgggacagctttatcagcctaatagatatgaatatggagtccctgaagaagcatgagggagttcagagtaatatttgaataaacaatggctaagttttaaaatgtgattaaaactacatacctgcaga

SEQ ID NO: 635041 - DNA, 605 bp, Homo sapiens
ttttgctaagtagcttaactgcctcccaaacaaagctgtaatatatacacagatttttttaatcccacacacaatatcttttatccaactaaaagcttttagacatagaaagatacaataaagcattgtccatgatgaggaggaaaattaaacaatcatatctaaaccagaattgatatggatgagagaattaatagataagaatattaaaataattattactgtttcatgtatttaagaagctagacaaattttgaatatgttaatcagagctatgaaagatatcaaaataccctgcagccaattgttagagttaactacagtrtctgacatgaaaaatactttgaataggattaatgacacattagatgtagcaacacaaatattagcaaacttgaaaatatagtaatagaatgtactcaaaagggaaagaacaaaaaaaggaacaaaaactttaaatagaacttcattgcattgtgggacagctttatcagcctaatagatatgaatatggagtccctgaagaagcatgagggagttcagagtaatatttgaataaacaatggctaagttttaaaatgtgattaaaactacatacctgcaga

SEQ ID NO: 635042 - DNA, 605 bp, Homo sapiens
ttttgctaagtagcttaactgcctcccaaacaaagctgtaatatatacacagatttttttaatcccacacacaatatcttttatccaactaaaagcttttagacatagaaagatacaataaagcattgtccatgatgaggaggaaaattaaacaatcatatctaaaccagaattgatatggatgagagaattaatagataagaatattaaaataattattactgtttcatgtatttaagaagctagacaaattttgaatatgttaatcagagctatgaaagatatcaaaataccctgcagccaattgttagagttaactacagtatctgacatgaaaaatactttgrataggattaatgacacattagatgtagcaacacaaatattagcaaacttgaaaatatagtaatagaatgtactcaaaagggaaagaacaaaaaaaggaacaaaaactttaaatagaacttcattgcattgtgggacagctttatcagcctaatagatatgaatatggagtccctgaagaagcatgagggagttcagagtaatatttgaataaacaatggctaagttttaaaatgtgattaaaactacatacctgcaga

SEQ ID NO: 635043 - DNA, 523 bp, Homo sapiens
aattgttagagttaactacagtatctgacatgaaaaatactttgaataggattaatgacacattagatgtagcaacacaaatattagcaaacttgaaaatatagtaatagaatgtactcaaaagggaaagaacaaaaaaaggaacaaaaactttaaatagaacttcattgcattgtgggacagctttatcagcctaatagatatgaatatggagtccctgaagaagcatgagggagttcagagtaatatttgaataaacaatggctaagttttaaaatgtgattaaaactacatacctgcagaccccaaaatacagtaaaccctatcgcaataaaacaagaataaaaccacaccaaacttgtcatcatcatattagttaaaaccagtgataaggaggaaaatcttawaagtagccagaggaaggatacattatgttcagaagaatacaaaagaggataaaaacagatttctcattgaaaaaatgcaaacaaaaaggcaacggagcaacatatttaggatactg

SEQ ID NO: 635044 - DNA, 583 bp, Homo sapiens
acataaacatgcttttctcttttttctttttttttttkttttattgtcatttcagggagggttaaggggaaatttctaaacacttgtgtctgtaattttcagactcttttcacaaatactgaagcatgacagagtcgtttacacaaacgagacagaaaaatatgtgaggggcctaaggctcaagataattataattctgacattaaaaaaaaaaagctattgtgttccacttctctgttttgtaagttgagtttttctttccatgcaagagaatgcaaaccactgcattttgtcagttccagaggcaacatttcagtctaaacaaaaacgcctgtcaatgttaacagtaagacaaggttgaaaagtgaagttaaagttcacgcatattgtggtctcagtgctaggtaaatggcacgggggaatgattgacatgttaaaaaaaaacaacagcttttggatggcaagtagttataagcaaaagagaaatgtgaataactcaggtgattgtgatgccatgagatttttcattcataaatgtaaaggtgcatgtctatatccccagctacttgggatgctgaaacag

SEQ ID NO: 635045 - DNA, 503 bp, Homo sapiens
gcaacacaaaatgagattacaaggcaaatagaatatttttctcttattgaatagttacagcattgaaacctaagaaaactcacattctaggggaatgaaaccacaaaaaggaaacagaagcattcactcagactccatagactcaaaacactctggaaagcaatttaatctgaagaacatttagaaccttgattaaagtcattggttcctggccatcactgayaccattatatcagtgagtccaggttcaccgtcagccacatcagaacaatactgccttcagggaaattttaacacccatccagttatatcctaaaacagtttcaatacacagacttcaaaattatgatgatgaatacatgaaaacagaaaaagtatatggcacattgatgaaagagctccaaattttgctgtcagctccaaaccaatgagcagagacaaactgctgtgccctaaggaattgctagaatagcagataaaaataggagaagaataagcttctt

SEQ ID NO: 635046 - DNA, 602 bp, Homo sapiens
ttcatactagagagaaaaaaaagattcctaaagttctagttccctgttctgatttcmtacattccaagtaactgcacagttgcaaattccaagttttccagattatttgatactgggaaagtctgtgtagtgaaggaaatgtttataggtgtgaaagtggttaatctccagtgtaaaactcttaattggcattgtcttatacaacagtctcccatgagattattttgtgttgactccattatattgattgacattcaatagctgggcaataatcatgttttcatacctcttgtctagagtaacaagtccatttgatgacccgaggaatacactgcttaagaatgatttctactcatctcttcgtatccctagatggcatcactaactcttcactttctcaatgcattatctcttccattgctcaataaatttgtaaaggctccaataataaaaatctttaacataataatatcaaaaatatcaacttgaaaataattgcatgggtccctgtgctaaggtaccattaatgatataataaaccttttcaaaaggaaaccattccttttctcttctacttttactttagcaccatgttacttgtt

SEQ ID NO: 635047 - DNA, 602 bp, Homo sapiens
ttcatactagagagaaaaaaaagattcctaaagttctagttccctgttctgatttcctacattccaagtaactgcacagttgcaaattccaagttttccagattatttgatactgggaaagtctgtgtagtgaaggaaatgtttataggtgtgaaagtggttaatctccagtgtaaaactcttaattggcattgtcttatacaacagtctcccatgagattattttgtgttgactccattatattgattgacattcaatagctgggcaataatcatgttttcatacctcttgtctagagtaacaagtccatttgatgacccgaggaatacactgcttaagaatgatttctactcatctcttcgtatccctagatggcatcactaactcttcactttctcaatrcattatctcttccattgctcaataaatttgtaaaggctccaataataaaaatctttaacataataatatcaaaaatatcaacttgaaaataattgcatgggtccctgtgctaaggtaccattaatgatataataaaccttttcaaaaggaaaccattccttttctcttctacttttactttagcaccatgttacttgtt

SEQ ID NO: 635048 - DNA, 602 bp, Homo sapiens
ttcatactagagagaaaaaaaagattcctaaagttctagttccctgttctgatttcctacattccaagtaactgcacagttgcaaattccaagttttccagattatttgatactgggaaagtctgtgtagtgaaggaaatgtttataggtgtgaaagtggttaatctccagtgtaaaactcttaattggcattgtcttatacaacagtctcccatgagattattttgtgttgactccattatattgattgacattcaatagctgggcaataatcatgttttcatacctcttgtctagagtaacaagtccatttgatgacccgaggaatacactgcttaagaatgatttctactcatctcttcgtatccctagatggcatcactaactcttcactttctcaatgcattatctcttccattgctcaataaatttgtaaaggctccaataataaaaatctttaacataataatatcaaaaatatcaacttgaaaataattgcatgggtccctgtgctaaggtaccattaatgatmtaataaaccttttcaaaaggaaaccattccttttctcttctacttttactttagcaccatgttacttgtt

SEQ ID NO: 635049 - DNA, 584 bp, Homo sapiens
tactgcttccctggggaaaatttaacctcctcccaacaataggaagccttttctcttacgttttcctaaatcctaggcctgaagttgaactcaggactccagttgtgtggcaacaatagtcaattcggtcaagacttgcaaggtcttaagtgaaacatgaacttcaacctatgagcagagcttcctgagaggagtagttgttggtaacaactctcacatatataaatattcgctcagataacacagtctcatttcatatcaakatttcagttacataatatagatacaatggtcctccattattgcacaaggcattattaggttctttcctgctcatgctaaggctcagtgttacacacacacacacacacacataaaagtatctgtagcttgctgatgctttgctcatttacccaattgtacactgaacaaatagaaattggctatctactgtgtgtcaaacactgttctaggatctgagtatcaatagtgtctagaagataattaaagtcatagtcttgaaatagatttggatatcaaacatagatttgaaatagatttggatatcaaacaagaagagttat

SEQ ID NO: 635050 - DNA, 621 bp, Homo sapiens
tcatttacccaattgtacactgaacaaatagaaattggctatctactgtgtgtcaaacactgttctaggatctgagtatcaatagtgtctagaagataattaaagtcatagtcttgaaatagatttggatatcaaacatagatttgaaatagatttggatatcaaacaagaagagttataggcctcaaatcatgacatgaagaattataagctttaaaagcaatataagaggctaagcctgargaggaggctaagtttgttgttgttgttgtttttagagacagatcttgctctgtcatccaggctagagagagtgtaatagtgtgatcatagctcactgcaaccttgaactcctgggctcaagtaattcttctacctcagcctcccagactgctgagattataggcataagccattgtgcctgaccaacatttttttaatataggtatacagtccagcaagtaaagaaatagaaaatgttcattagattcactgacctgaagattactggtgatgttgctgagaaatgtctggtcatgtaatggaggaggtggtgaagccagattggaatagaatggagagtaatgagggatgaagaagtagacttggtgaatacagaaa

SEQ ID NO: 635051 - DNA, 621 bp, Homo sapiens
tcatttacccaattgtacactgaacaaatagaaattggctatctactgtgtgtcaaacactgttctaggatctgagtatcaatagtgtctagaagataattaaagtcatagtcttgaaatagatttggatatcaaacatagatttgaaatagatttggatatcaaacaagaagagttataggcctcaaatcatgacatgaagaattataagctttaaaagcaatataagaggctaagcctgaagaggaggctaagtttgttgttgttgttgtttttagagacagatcttgctctgtcatccaggctagagagagtgtaatagtgtgatcatagctcactgcaaccttgaactcctgggctcaagtaattcttctacctcagcctcccagactgctgagattataggcataagccaytgtgcctgaccaacatttttttaatataggtatacagtccagcaagtaaagaaatagaaaatgttcattagattcactgacctgaagattactggtgatgttgctgagaaatgtctggtcatgtaatggaggaggtggtgaagccagattggaatagaatggagagtaatgagggatgaagaagtagacttggtgaatacagaaa

SEQ ID NO: 635052 - DNA, 630 bp, Homo sapiens
aatgaaatgctagaatttcactaatgcggcccacaaaagctagctaccttaaccaccacactctctcaaagataggttctgtggaaccctgctacctccttatattgttttcttcttactcaagtcacacatttgagcttcttgttcttggattgtattctgtgtctaagctattagcaagayagaataagacccgactatttcctgccttaggaaagcaggattcataataaggaacattatctgagcagcagagaggtttttagaatatcctgagaagccacacaatgtggcaaatggcctctaaagccccaaaagatgttacacaaaaataagggaaaaaatgacactataatacattttttcataaagaaattgaaatagtatgaaaaataagtatatttggagtcagaggatcaaggatgggatcctaagtcttccacatggtaatggcatgacttcaaaaaaattaaacattctaaggtttactttcctcttctataaaataatttgaaatgatacgtgaattagatgtgctatataggtaaaggagaggaaaaaaactgctgattttaaaaaagctacaggttcttcactctagggcttaactaaactctgtcttcagtaagt

SEQ ID NO: 635053 - DNA, 630 bp, Homo sapiens
aatgaaatgctagaatttcactaatgcggcccacaaaagctagctaccttaaccaccacactctctcaaagataggttctgtggaaccctgctacctccttatattgttttcttcttactcaagtcacacatttgagcttcttgttcttggattgtattctgtgtctaagctattagcaagacagaataagacccgactatttcctgccttaggaaagcaggattcataatawggaacattatctgagcagcagagaggtttttagaatatcctgagaagccacacaatgtggcaaatggcctctaaagccccaaaagatgttacacaaaaataagggaaaaaatgacactataatacattttttcataaagaaattgaaatagtatgaaaaataagtatatttggagtcagaggatcaaggatgggatcctaagtcttccacatggtaatggcatgacttcaaaaaaattaaacattctaaggtttactttcctcttctataaaataatttgaaatgatacgtgaattagatgtgctatataggtaaaggagaggaaaaaaactgctgattttaaaaaagctacaggttcttcactctagggcttaactaaactctgtcttcagtaagt

SEQ ID NO: 635054 - DNA, 462 bp, Homo sapiens
aataaagatgcttcttggaggacaaaaataactaagtcacttagagccgattcttctaattaggaatgtctgtctttctcaaggaacaattttgaaacacctgtgagtagaggaagcagtcagaaacataactccttttattttctgcttcagtttattttgtaggcagaaatatgcccccmaaaaccctaaaaggagaaaatatttacttcgttatattgactttcttagagttagcaatatgatgcctgaacactgaatttaatatggctcctcattttctctcataagatggaattacttaactgattatcttttttttcaaacatttttctagcccactggcctgttccctgattgtttcctagggaaaagttggcagtcattgatgtattctagagtagcagctatcaatccatgggaattcagtaatattacactatgattgtgtattgatttaga

SEQ ID NO: 635055 - DNA, 560 bp, Homo sapiens
attgggttgttctgcttttcctctgacttaaatcacaaactgttggaatactaagaacttccctggcatctcttgcattccaaatatatatcttcttatcctcgttgtgtaaattcaacccaattaccacttaataatcagaccaaccactctagacataataaataacccccttctttgccttttgattcagtaacacaagcagccaaattggacatgtggcagtctcagctcccagcataatggagcgactgttgggtgtcctgtgtaagtgttttttcttgggaaccaatacttcaagaccaacagaacccaaagttgctgaatgggaagccaaattttgacagtggataaatagtgacacaaaagaaattctcatttctaccccttgacacccagaccaaacctttactgtgaaagaagcagtgcaatatattggtcactcatttagaaacttcctgtggacatagcaaggtcctacgttgacttcacaccacacaaatgtgttatcagtgttgccactgagccagtaggtrttgctaaaaggtgttgccacctag

SEQ ID NO: 635056 - DNA, 593 bp, Homo sapiens
gtaaatttgctttgagtttttactttcctgtaaataatccagggctttcactgacttgagagctgtttaaaaaataatcatcattttagaattttagtttccatgcccttgtataaatttgaaccctatttcggtgctggtgtacatttagtgttttttgtttgtgtgtttcatgtctgtgcttaaacagtttaacaagtttcctggactcctcagataaagttaaaaattttcagttytgcttatgagttctttccaggtcttactctacttatcccttcttcccactgatatcttcctattttcatctccacattctctattccagccgtgtttgactttttttagttttttgatttgccaagctccctcttgcttctgggtttttaaacgactgtttctacttcatataccattcttttccccttctttcctaaggtaattaggaaatcttaagcattatgtaatattctctggtatagacattctagagttttcatgacccatgtgcttcctaaaacttacaacctgccattgtaataacctatttgtcttccttgctaaaaagaatgtctgtcatatttaccaccttg

SEQ ID NO: 635057 - DNA, 653 bp, Homo sapiens
ttgcttctgggtttttaaacgactgtttctacttcatataccattcttttccccttctttcctaaggtaattaggaaatcttaagcattatgtaatattctctggtatagacattctagagttttcatgacccatgtgcttcctaaaacttacaacctgccattgtaataacctatttgtcttccttgctaaaaagaatgtctgtcatatttaccaccttgtacaaggcaacatttctatatatagtaaatattcaacaatatttgttgtatgaaacaaataattgcacatattgcataaatgaatgaataatggctttagtttccttttgatttggttggatacatcatacatactcttgaatccaactatgcttgcaattaacaaaaatcccaatctaatttcatatatacagttgcttaccttattctgtatataaaatatgttgaagaaatttatatgaatttttatgtctagttcctatatatgaggaaatatattatctaccrattcctggacttaatttgtgtctcagcaatttgactaaaatgattggttctgatggtcagaatttgatgccatatggattctcaatgatgctctaaacttgtgcaaaccttccttgtgccttggcccaactttggactgatcct

SEQ ID NO: 635058 - DNA, 615 bp, Homo sapiens
tcacttgcaacctctgcgattctcgtggctcaacctcccaggtaactgtgattacaggcatctgccatcacacccgtctaattttggtattttaagtagacacagggtttccaccatattgactaggctggtctcaaactcctgacctcaattgatccgcccatatcagcctcccaaagtgctggaattataggcatgagccatcgcaccctgccaagtgcatttacttttatatttagcagtcctagctttwaaattttatctagtaatattgatcatctttaaaaaacataatacacacacacacacacacacacacacacacacagaggtatgcataaaaataaaccaggattgcaatgtcaatgtgctgacaggcaaactgcacagaatgctttattttacgtgaagtttggatgcaaattgatctagctctgttaaagtagttgttcaatgtctacatttttatatctccttcaattcatttgacactttagatatcactactgcaaaggttacagttggataaaactctttacaaagtctgaaatatgctccacacagtcttctctgtgattcatttaatgtaacctttatatagtttattagagatgg

SEQ ID NO: 635059 - DNA, 615 bp, Homo sapiens
tcacttgcaacctctgcgattctcgtggctcaacctcccaggtaactgtgattacaggcatctgccatcacacccgtctaattttggtattttaagtagacacagggtttccaccatattgactaggctggtctcaaactcctgacctcaattgatccgcccatatcagcctcccaaagtgctggaattataggcatgagccatcgcaccctgccaagtgcatttacttttatatttagcagtcctagctttaaaattttatctagtaatattgatcatctttaaaaaacataatacacacacacacacacacacacacacacacacagaggtatgcataraaataaaccaggattgcaatgtcaatgtgctgacaggcaaactgcacagaatgctttattttacgtgaagtttggatgcaaattgatctagctctgttaaagtagttgttcaatgtctacatttttatatctccttcaattcatttgacactttagatatcactactgcaaaggttacagttggataaaactctttacaaagtctgaaatatgctccacacagtcttctctgtgattcatttaatgtaacctttatatagtttattagagatgg

SEQ ID NO: 635060 - DNA, 434 bp, Homo sapiens
gccttaccccaataaaccaaatgctaaggacagaaartttaggttgacctgtaggatgataatagggaatttttaggatagagtgaagggttaggagtccccctagaataatgaccccttactttaatatgtctctgtcatcacggacacttgactccctggaagattccactacccttaatttttttggggccaacaaagattttttaatgaaaaaaaaaaaaaaggaggaaagagaatcaaaaaggaaaaaagaaagaactagtaggacaggggactgatttttattatttttattttttatttatatggacatagagtgtgaaatgaaaggggactgttttaaaaacacacatccacattctttcattcgcttttctccttcatcctatgcatggggcagtatgatatggtatttagccttccttgaagat

SEQ ID NO: 635061 - DNA, 437 bp, Homo sapiens
ccaaatgctaaggacagaaagtttaggttgacctgtaggatgataatagggaatttttaggatagagtgaagggttaggagtccccctagaataatgaccccttactttaatatgtctctgtcatcacggacacttgactccctggaagattccactacccttaatttttttggggccaacaaagattttttaatgaaaaaaawaaaaaaggaggaaagagaatcaaaaaggaaaaaagaaagaactagtaggacaggggactgatttttattatttttattttttatttatatggacatagagtgtgaaatgaaaggggactgttttaaaaacacacatccacattctttcattcgcttttctccttcatcctatgcatggggcagtatgatatggtatttagccttccttgaagatgagcttcaagtcttatatt

SEQ ID NO: 635062 - DNA, 434 bp, Homo sapiens
cttaccccaataaaccaaatgctaaggacagaaagtttaggttgacctgtaggatgataatagggaatttttaggatagagtgaagggttaggagtccccctagaataatgaccccttactttaatatgtctctgtcatcacggacacttgactccctggaagattccactacccttaatttttttggggccaacaaagattttttaatgaaaaaaaaaaaaaaggaggaaagagaatcaaaaaggaaaaaagaaagaactagtaggacaggggactgatttttattatttttattttttatttatatggacatagagtgtgaaatgaaaggggaytgttttaaaaacacacatccacattctttcattcgcttttctccttcatcctatgcatggggcagtatgatatggtatttagccttccttgaagatga

SEQ ID NO: 635063 - DNA, 432 bp, Homo sapiens
cttaccccaataaaccaaatgctaaggacagaaagtttaggttgacctgtaggatgataatagggaatttttaggatagagtgaagggttaggagtccccctagaataatgaccccttactttaatatgtctctgtcatcacggacacttgactccctggaagattccactacccttaatttttttggggccaacaaagattttttaatgaaaaaaaaaaaaaaggaggaaagagaatcaaaaaggaaaaaagaaagaactagtaggacaggggactgatttttattatttttattttttatttatatggacatagagtgtgaaatgaaaggggactgttttwaaaacacacatccacattctttcattcgcttttctccttcatcctatgcatggggcagtatgatatggtatttagccttccttgaagat

SEQ ID NO: 635064 - DNA, 434 bp, Homo sapiens
cttaccccaataaaccaaatgctaaggacagaaagtttaggttgacctgtaggatgataatagggaatttttaggatagagtgaagggttaggagtccccctagaataatgaccccttactttaatatgtctctgtcatcacggacacttgactccctggaagattccactacccttaatttttttggggccaacaaagattttttaatgaaaaaaaaaaaaaaggaggaaagagaatcaaaaaggaaaaaagaaagaactagtaggacaggggactgatttttattatttttattttttatttatatggacatagagtgtgaaatgaaaggggactgttttaaaaacacacatccacattctttcattcrcttttctccttcatcctatgcatggggcagtatgatatggtatttagccttccttgaagatga

SEQ ID NO: 635065 - DNA, 628 bp, Homo sapiens
ccatcattacccagagcacagagaacatgtgaaccactaggagaatggtgatgacattgttaacgtcactaggctatttaaggtggggaaaaccttcaataatttagtgatattaataattgcaatagttaatagttatcatatagtctctgtgtgcctgatactatgctaagtgcacccctctatttatctatgtttatatttatatgtgtttaagttagtcttcgcaatagccttgtgagaggggtactgtgattagccgcatgttctagatgaggaaaatgaagcatgaggcatggagttaccttgctcaggatggtacagtgaaggagttggggagctcgatccatacccgggtgggctggcaccaagaggaaagtggccttaccttcaccacatgaacatgaggcctggaaggttcagagggccgccctctctatgctcagagatacctggactcagctgatgtgtgaaagccatgcttcgactccccagtcgagtgtaacccctctagatagactgtccaaaaggctacatacaattcagaacatttagctyatctttactttaaattgtatacttaccttaccaactccactggcattagggattcttcttgctcaccatt

SEQ ID NO: 635066 - DNA, 549 bp, Homo sapiens
caacccacagcacacctgggagaagtctggattgccctgaggtcagccttccctgactcactgacttggtggcttcacagcttcacctccaaagctggtggacaggccttatcctgccctctgcctgtgctgatgtgaagacatcatctggactcttgtcgtatgtagggtgggcgggggccactggacaggtggccatagcaccaaattatacagaaattcattcttttattcattctttcattcacttattgaatggaatygaatatatcacatgggctgaactcgatatggcataaccaggaaatagcagcttctactcctccctcaactcccatcactgcccttccaaccttctctgtcagatcttcttccactagtaaacatctcaggcagatcccacacaattcagtcccttttatgttgagctgttttcatgttagagtgttttaaaaagcctagtgttaaaacagtttaaaactgtttcccatcaagttccatgctctttcccttcccccgagctcaggcctgacccaagctcgtaaagat

SEQ ID NO: 635067 - DNA, 568 bp, Homo sapiens
caaaatcagacaaaagcattaaatgaaaagaaaattaaagatcactatatgtcatgaacatgacacaataattctgaacaaaatgatacatcatgataaagcaggtttgctccaagaatgcaaggttggtttaatatttaaaaatcaarcaaatgcattcctcccaaataacagaataacaacacagattatcacagtagacgcagaaaaagcatttgacagaacttgacactcattcatagttaaaaaaaaataacctctgaaaacttggaacagaagagaacttcctcaatccgataaagggcacttataaaaaatttacaactaatacctatatctattgttgtaaagataaataccttaagattagggaatatctgctctcaccatttttagtcaatatatactggaggtgttagccattgttataattgttgtaaggcaagaaaaacaaaataaaaattagaaaaattagaaacgaagtaaaactctccctatttgcagatgtcatgattgtttacttagaaaaacccagggaatcaacaataataacagcaaaaatctaaaa

SEQ ID NO: 635068 - DNA, 604 bp, Homo sapiens
atgaggagctagagctcaatgacatgaagacagagggctatgaggcaggcctggctccacaacggtagcagtgggtgggtcaagggccagctctccagcgctgctcattctgcaggttatttattagtattggaagaaggctgggagtgtcttgcccaccagcccttgcccatggtggggaggacatcttgtctgagtcagagatctaggcacattttctaaacagcttgtaatgcaagtgtgagcctattgtgttacttgaccttattttgaggctttgaattggcctaggaagaaacccagraatgaaccaggggtatgtcattatcacttttttcatatcaagtctttaccctccctccacataatgctctgtcctctaaggttggaactctgaagttggagaaagtggaataaaattacacctggaaaatgaaataaaatattctggtatcagcatttagctaaatagatcaatggggcaaattttctgaaaaagttagaaacacacataagtaggaacttaggatataagaggtgacactgcaaatcagcagggaaaggatgactattcaataaatggcactgtgactattggctaata

SEQ ID NO: 635069 - DNA, 367 bp, Homo sapiens
gcctcccaaagtgctgggattacaggcatgagccactrcgcctggccccgccccagacattttgattcagcaggtctggactgggggtggacaagctgcattttctgaccatcccccaggtgatactgatgcagtcaagattcaggcccacactgagtattgctgacaggcgcttgggaaattcattccttgtccaaggcgggaaggcagagcgggtaggcacagatggaggtgggagtacaggcgagggtgggaagatgggaacttggcagccacttattttactatctcagtgaatttggaagcaaggtcatcaggtgagggtgaggataggggaggacatgttgtgaatttgagcagggagaaa

SEQ ID NO: 635070 - DNA, 367 bp, Homo sapiens
gcctcccaaagtgctgggattacaggcatgagccactacrcctggccccgccccagacattttgattcagcaggtctggactgggggtggacaagctgcattttctgaccatcccccaggtgatactgatgcagtcaagattcaggcccacactgagtattgctgacaggcgcttgggaaattcattccttgtccaaggcgggaaggcagagcgggtaggcacagatggaggtgggagtacaggcgagggtgggaagatgggaacttggcagccacttattttactatctcagtgaatttggaagcaaggtcatcaggtgagggtgaggataggggaggacatgttgtgaatttgagcagggagaaa

SEQ ID NO: 635071 - DNA, 447 bp, Homo sapiens
aggcaccattattatcctcattttatcaatggggaaactgaggctcagagaggtgaaataacttacccatgtctcacagctagtaagggacagagcagggtttcaaaatcaggtcaatctctcttcagagcctacacaatgcctccatacaaagctacagaatgatatctcatatggtaagaaattctaggatggatgtgcatgtctgagatcagaaatgtctgagaaaattggggataagygggtgccacgagagagggcatctgcatctgagtaacagacagatagacagcaatctggacagaaccaaggcctggctggggaggcagttctgctgccacatgggggcgcatgaccccattccctgcactgctggctatggctcccgagcccactatttttccttacacaacctagcaactgttcttccacagctgctcctttggt

SEQ ID NO: 635072 - DNA, 552 bp, Homo sapiens
gtttatagtccagaaggtttctaggggaaatttcttgtaagtgggcacttgaagtccaaggcctaatgatttctctttacttttttttttttttggtctctgaacctggataggaatgatctgttgacattttgatcatatagaggacataccaaattttgcatttgctgaaagcagaaaatatttgcatgcaaaagaaccagaaggtttgagatattcacattgtacatacctaatattttgaacaaataccttttgctgcgtartaaacaaacccaaaacttattggcttaaaaacaacttaatatcatctctccaaattctgtggattgactggactcagctgaaagattcttgccaggagtgtctcatgtgattgaagttagacacagctgaggctggaatcagttgaaggcaggagactcaagtggcttcttcacccccatgtttggcactgcagctgaaggctggcttggaggagggcagaccagacatttttctctttccatgggtctgtccttagcatgttgtcacagggtagttggactgtga

SEQ ID NO: 635073 - DNA, 552 bp, Homo sapiens
gtttatagtccagaaggtttctaggggaaatttcttgtaagtgggcacttgaagtccaaggcctaatgatttctctttacttttttttttttttggtctctgaacctggataggaatgatctgttgacattttgatcatatagaggacataccaaattttgcatttgctgaaagcagaaaatatttgcatgcaaaagaaccagaaggtttgagatattcacattgtacatacctaatattttgaacaaataccttttgctgcgtagtaaacaaacccaaaacttattggcttaaaaacaacttaatatcatctctccaaattctgtggattgactggactcagctgaaagattcttgccaggagtgtctcatgtgattgaagttagacacagctgaggctggaatcagttgaaggcaggagactcaagtggcttcttcacccccaygtttggcactgcagctgaaggctggcttggaggagggcagaccagacatttttctctttccatgggtctgtccttagcatgttgtcacagggtagttggactgtga

SEQ ID NO: 635074 - DNA, 587 bp, Homo sapiens
actggaaactagagagatttcattgctcaaagatttttttaaactaacatactttcctcagggaaataaaatatatgaaagaatctctttgcatttttttgaccccaagtggaaacaaggtcaatatttcctgttaatcttttttttttttaacaaatctttcccatttttcacagctatacacgtatgaacatgtttctttacagaccttgtgcatgtaaagtagtgcagttctagtttcctacatatttgtgtatktagatatgttgggcaatatttttattcctttctgattataatcttggttattaccagaaatgaatcatagaccttcaagtacaacatccaatttaaacctggcctccttacacatgtttaataatatttatttggtagggataatgaccatgaaggaaaaggattatggacatattgggttttattaaatatgtggtcatattttaccataagaatatgtaaaattctcataagaaatactacagatgccagtctcttgttgaagtctcttgttgttgagattggacttcaaaatggatgatacataaggcatttatttgccacgaacc

SEQ ID NO: 635075 - DNA, 515 bp, Homo sapiens
ataatatgaatgaagcatttcagctatgttttcttctagtagtttgatagtttctggtattacctttgagtctctaatttattttaagttaatttttgtgtatagtgagagataagggtttacattcttctgcatgtggatatccagtttttccagcatcatttattgaagagaactctcctttcctcaatgtgtgttcttggcacctttgtaaaaaatcagttggctgtaatgtgaagatttatttctgagctctctattctgttccattggtctgtatgtctgtttttaacgctgttttggttactgtagctctrtagtattctttgaggtcaggtagcgtgatgcctccagattttttctttttgcttaagattacttcagctatttggggtctctcgtggttccatatgaattttagtattttaaaatgcttttttgaagaatgtcattggtattttgatgggggtggcattaaatctgtatattgctttcagtagtctggctattttaac

SEQ ID NO: 635076 - DNA, 515 bp, Homo sapiens
ataatatgaatgaagcatttcagctatgttttcttctagtagtttgatagtttctggtattacctttgagtctctaatttattttaagttaatttttgtgtatagtgagagataagggtttacattcttctgcatgtggatatccagtttttccagcatcatttattgaagagaactctcctttcctcaatgtgtgttcttggcacctttgtaaaaaatcagttggctgtaatgtgaagatttatttctgagctctctattctgttccattggtctgtatgtctgtttttaacgctgttttggttactgtagctctatagtattctttgaggtcaggtagcgtgatgcctccagattttttctttttgcttaagattacttcagctatttggggtctctcgtggttccatatgaattttagtattttmaaatgcttttttgaagaatgtcattggtattttgatgggggtggcattaaatctgtatattgctttcagtagtctggctattttaac

SEQ ID NO: 635077 - DNA, 613 bp, Homo sapiens
tactccagcctgggtgacagagcaagactccatctcaaaaaaaataaaaaaaataaaaaataaataaaaaaataaaaaaaattccacttatttgtaaaatttttgagatttctcctgttattgatttctagtttaatactattgtggtcagaacagatacttgatataattttgatcttcttaaatttgttgagagttgttttgtggcctaacataatctttcctagagaatgttccatatgcagttgagaagaatgttcattctatagctgtyagatggaatcttttgtaaatgtttgttaggtccattttgtctagagtacagtttaaatctgatgactggatgatctgttcattgataacagtggggtgttaaagtttcctactattataatattgcagtctatctctccctttagatctattaatatttgccttatatattttggtgctccgatgttgggtgcatatatatttatgattgttttatcattagccctttttcttgttatataataacattttttgtcatttttacagtttttgacgtaaagaatactttatctgaaataaatatagctactcctagtctattttagttaccagttgcatg

SEQ ID NO: 635078 - DNA, 650 bp, Homo sapiens
atgttccatatgcagttgagaagaatgttcattctatagctgtcagatggaatcttttgtaratgtttgttaggtccattttgtctagagtacagtttaaatctgatgactggatgatctgttcattgataacagtggggtgttaaagtttcctactattataatattgcagtctatctctccctttagatctattaatatttgccttatatattttggtgctccgatgttgggtgcatatatatttatgattgttttatcattagccctttttcttgttatataataacattttttgtcatttttacagtttttgacgtaaagaatactttatctgaaataaatatagctactcctagtctattttagttaccagttgcatggaatatgtttttccaatctatcactttcagtctatgtgtgtccttacaagtgaagcaagtctcttgcaggcagcatgtagttgggttctgggttttgtttgtttgtttgtttgttttttcaatcgtttaaccactttctgtcttttaattagataatataattcatttacattcaaggaaaatattgatagacagggacttagtactgccatttctagttggttgtagatcctttctttctctcttacttcctttgtggctaagtga

SEQ ID NO: 635079 - DNA, 571 bp, Homo sapiens
attttggtgctccgatgttgggtgcatatatatttatgattgttttatcattagccctttttcttgttatataataacattttttgtcatttttacagtttttgacgtaaagaatactttatctgaaataaatatagctactcctagtctattttagttaccagttgcatggaatatgtttttccaatctatcactttcagtctatgtgtgtccttacaagtgaagcaagtctcttgcaggcagcatgtagttgggttctgggttttgtttgtttgtttgtttgttttttcaatcgtttaaccactttctgtcttttaattagataatataattcatttacattcaaggaaaatattgatagacagggacttagtactgccatttctagttggttgtagatcctttctttctctcttacttcctttgtggctaagtgattttctctagtagyatgttttgattccttgcaattaacattttttgatgttatgattattgaaaaactataaaattaacctcccttttattgttttccatcgatatctttttgtctacaaggaagtattgggc

SEQ ID NO: 635080 - DNA, 583 bp, Homo sapiens
atacatcattgctttgggcttgcatatatctggtaaaaaatctgttataattttttattgtgtttatttacatgtaatatgtatttttcttctctggcttcttttaaaattcctctttttcattgatttttagcaatttgattacaaggtgccttggtatattttgtatgtgtgtttgtgtttttcctgcttcatttattgaatatcttgatctataaatttataggttttgcccaattttgaaaaaaaaaaaaacagccattatttcttcaaatagtgcccacccccattcttctgsggccccagttgcacaaatattacactgcttgatattgtcctaaaaaccactgagactcagttaatttttttaggaagttctttttgcaatttctgttttctttttctattgtatgtatttatcatatataacatgatgttttcaaatatgtgtacactgtgaaatggctaaatcaagctaattaatttatatattacctcatacacttaccatttttatgataagaacacaaagtctagtcagtaatttgcaaaattacaatgtattgttattaactatagtcac

SEQ ID NO: 635081 - DNA, 608 bp, Homo sapiens
gctgtgttctaatgttcactgacttttattctatggttctattttactggtaatcccattcagtgaaattgtttttctgatgtagtttttgtctctagaagttccatttgggtctttattgtatcttcttctttcctttttattatgttcatgttttcttttatatagtttaacataattttgtgatatctgtcttaacattcttgtctactagttctgtcatctttgtcatttctagtcagtttctattattttttcttatcattttggcctatatttccctgctctttggcatatttttaaactttttattggatactgaacattactaattttcacattgccaagtgctagatgttattatgttccttgaatgagtayagggctttattttagtgcttatgttattggaggatcagttgggtcactttaaggtctgtttttaaccttctttgggaggggtcatgagtagcctttaatccaggtattaaactctgctactgctgtgtgacctctgcatactgttcacctgaaaacccttgcttgtccttgctccacattgtggtaatagactctactcatgcacagcttggtatttaattaagagc

SEQ ID NO: 635082 - DNA, 608 bp, Homo sapiens
gctgtgttctaatgttcactgacttttattctatggttctattttactggtaatcccattcagtgaaattgtttttctgatgtagtttttgtctctagaagttccatttgggtctttattgtatcttcttctttcctttttattatgttcatgttttcttttatatagtttaacataattttgtgatatctgtcttaacattcttgtctactagttctgtcatctttgtcatttctagtcagtttctattattttttcttatcattttggcctatatttccctgctctttggcatatttttaaactttttattggatactgaacattactaattttcacattgccaagtgctagatgttattatgttccttgaatgagtacagggctttattttagtgcttatgttattggaggatcagttgggtcactttaaggtctgtttttaaccttctttgggakgggtcatgagtagcctttaatccaggtattaaactctgctactgctgtgtgacctctgcatactgttcacctgaaaacccttgcttgtccttgctccacattgtggtaatagactctactcatgcacagcttggtatttaattaagagc

SEQ ID NO: 635083 - DNA, 554 bp, Homo sapiens
atgagctctaaaggcaatgtattaatttattcagttccttaattattacactttggtaccaagagtcaggaatcctgatgttcatttttggctctatcactgacatctttgccttcaatgaaaccacttaatcagattggtgactcagttccgtatctataaaatggtggcactagttttcttggtaaatgctctcatatcccttattaactaacactttccatatgaacttgcatttttagtactacatatttagttatratttcagaccacagatgaattttggaaacttattgaaaagccattgcatttaatgctgagatatgttttttaactttttattggtataaaagtattctttaatattgaaagaatcagagtccataaaattactcccattcaatggaaaggtcatcatttccatactttggctaaattaagaaataaagacaaaatttgggtattattaaatttagtgacacttgaggggaaaatatgcacattaaaatataattaatgtatctgttaaacagcaattttaataagaatgaaag

SEQ ID NO: 635084 - DNA, 560 bp, Homo sapiens
gataaacagttcaccggaagagacttctaccacagaactccaacagaaaatgcttcttttattgaagacacttgggcattcaaaaattcaagtccaacatgacaaatgtgggggtaacgaataaatccaagatggcgccatcaactgtaacataattggatatctcatcatctaatgcttgctccaggagtatgataactgcttcagacatatttcatttttcacgtattcttagcaaaaactaaaattcagcatatcccctgcaagaccgaagatatcatgatttttctcatctctcagaatactttggtacaaatgtttagaaaactgtgagctgtagagagtgatttcacaattggtatatggaaagkcctcagagaatgaagtattgtaatgtaacttaagtcacatgagactggatatacttctggagtccagcccattaaaatagaactacatgggatcctattcaacaagtttttccattaagatgaataagactaaaacgtccatcagcagcaatgtcctccaaatgtagctatgaaaaataattatccaac

SEQ ID NO: 635085 - DNA, 560 bp, Homo sapiens
cacaaatgctaatggacccatgactatacaattccaatttargctgggcatggtgatgcatgcctgtagtcccagctattcagaaggctgaggcaggagaatggcttgaactcaggagttcaagactagcctcagcaacatagtaagacccccatctcttaaaaaaaaattttttttaagaaaataacttatgaaaacaataaaaccctgatttgtagattcccctgcccttgaaatcttcagagaatgttattaaattattttaacaaatataaaagatataatcaattgaaaagtcttattggctacattttcatccattctgtctatcaacagatgcttatagactacctactggagtcaggcactggactatgcacttgggaacaaataacacacagtcattgacctcaagagactcttgtctgatgtagaagagagaggtgtaaacaaacaattacaaaacagtgagactgcagtatgtatgggagctaatggagatgagaagagaaggtgcctaagaatgtggggagaatcatgaaatgtttcatagaggatgt

SEQ ID NO: 635086 - DNA, 493 bp, Homo sapiens
ctcaaaaaaaaaaaaaaataccgtagaggagattaaaaaatggcacacctatatagggcacttaccttgaatggagcttgcaggactggaaattgctctggtgagtcagtgagtgagtggcgagtgaatgtgaaggcgtaggacattactgtacaccactgtagactttagaaacactgtatgcttaggctacactaactttgtaaaaatatatatttctttcttcagtaataaattaaccgtagctttctgtaaattttttactttataaacttttacattatstttaactttaatatcacttggcttaaaacataacacactgaacagtcattaaaaaaggttttctttctttacatccttatactataagttttttctattttgaaaattttcagtgtgacttttttacttttaaaattttttgttagaaacaaagacacaaacacacattagcctcgacctacacaggctcaagatcatcaatatccct

SEQ ID NO: 635087 - DNA, 493 bp, Homo sapiens
ttaatcttcatgcttttatttctgcacttcatggtgtataactcattctctgatttgtcacaggtagctgcatttccttgaagagacagcattgcaatagcagaagacagactcaatacttgatctatttggctttcaatataggctcttgagaatcaaaagagaaggaaagctgaggatggattttatgccgtcacagtacacaatagattggaaaaagaatagaggggaaatcaggtcaccttggaggacttgttgtgggcagggctgagaaggtagggttggaaatgtcaggaagccattcttgagstaagtaagaagtagtaagttcatggagaaactgctgaggcccatgggtagcattatcagagatgcccatggaagcagagccaatcctctagaaggtccctgtatgtaagagagcatagccagtggcctgggtggagcaactgggaaggactggacttgctcttcttgggacttgctcttcagg

SEQ ID NO: 635088 - DNA, 563 bp, Homo sapiens
tgaggagtttgagaccagcctggacaacacagtgagagcttgtgtctatttaaagtttttttctgaggtaggattaagggaaatgagaccaaggaaggaactgaggcacttgggctgttttgtttcttttatagattaagacatagaaacattgggtgatggttactcaggtatttgttacatttttctttctagtaggtaattttacagaaccttttcaaattaaaacacaygcatacatagttatctaacccgctgtaatttcttataacaaaaaaattgatcttgtcagttttctctttgtgtagcatatgatggattaaggtcctttggcaaggtctcctcaacatgaaatcacaatttacataaatatataaaatagtatgactgattagcaaggtcgaaataaaaaatatatacctaggaaacataatagaaaataagaaaagatattctttaagtattttattcatcaaaaatggacacttagacaattttaccttataattgacagagaaatattccctgtctgtctcaaagggtaaaactcgggtcagtgtgag

SEQ ID NO: 635089 - DNA, 556 bp, Homo sapiens
ttaccatgaaacttcctacttctggctcattttaatagatatgtcttattttacaacaaattaagttgaatagtccttgacaaacatgaatttagcatttacaaaagctgatwattaacattgagaaagtgggaacacttggaaaatttgttggttcttttaactttcaattaaatatacttgccctgggtatctaggataattcagtacaccatttaagaaaaataagtgaaatgaatccatagaaactaaaaacattttactaaagaaaaaaatttgcactaaaattgagtaaggtattctgcattttagtactgtatttgtattttttggttgacaagaaccagacaaagtttatttataatttatataatttataatttaaattatttataatttaaaaatgctaatttattgcatttttaaagcaagataactggatattaacagctttttgaatctcctttcttttcccacttgtatgtaactaggatcttaatctagtacacaaatttatggttgtcagtaaaatataggtagttgttttatttaaggc

SEQ ID NO: 635090 - DNA, 610 bp, Homo sapiens
aaggttcactgaaaataaactgacagcaagctgatcatagaagaagacatgtgaaacttatttaacctgcttaagcacaggggagtcacatgagaacaatttcccagtaacccagtgagatccagatgcgtactacttcatagaagaaagggagatggaggtgtggcaattttgaggagtagtaaatgataattagtgggagtgaatggacctggaggcagtaacttgtaaatgaytctctggaatttcaatgagcccaagaggcaaacattgtcaggcctctgagaccaagctaagccatcatatcccctgtgacctgcacatatacatccagatggcctgaagcaactgaagaatcacaaaagaagtgaaaatggctggttcctgccttaactgatgacgttaccttgtgaaaatccttctggctcagaagctcccccactgagcaccttgtgacccctgctcctgcctgccagagagcaacccctttgactcaacacctttgactgtaattttccaaatcccgtaaaactgcccccgcaccatctcccttcgctgactcctttttcggactcagcccgcctgcacccaggtgaaataaacaaccttg

SEQ ID NO: 635091 - DNA, 614 bp, Homo sapiens
ctcaggccacttcgtatgtccctttgtgttctgattgtgggtttatcatcagaatcacgtggtggtattttataatacagaattcataaccctttcttgggaaatttgatcctgtagctctgggcttgttcctacaagactggtttataagaaatgctctagatgtttctgaaatactgcgttagatggctatatttgtgtcaggcatgcatttctggtctaattggttatgtttagattgtagcgtcaactacccaaagaacaagggaaccttgttttgctgctatcccaagaagagagggtaactggcaggccctctgagggccagcaccatgttggaaataggtggtacattagaagcagagtaaagcccatcacaggagttgaatttcagacttggctcatggtacatgaaagtttgagttaattgtgcttctgacattttgataaatgagccatattgtctggaactcaactygtttgttgcgacttctgtctggtagcctgcatgtctacaacgtttcagttcagagcaagctccgctgtatactctgtagaaatatgacctataatgcatgctcatgggaaatttagacatgggggttaacaaaatt

SEQ ID NO: 635092 - DNA, 632 bp, Homo sapiens
gaataggaattttctgtttttccttcaaatccctcccttccccatgctttgtatggtgaagtggcatttaacatggaaaagattttgggattttggtgttttgggtgggactgaaaaaagaaaatgcatgttgttggtttcatagaactggcaacaggatctgggctttaagagaaatggatgaagaggatctggaagtttcttttaatgttaacctgcctgctccccagggtagggacaacagccctgtgttctttctggaagacaagaggataattggtaytaccattgtgaaacaattaggcagctgagtatgtgatcagaaaaatagaaatagcagtttaaaacactaaaagtattgaatagaaactagacatttctgattccattttaaaaaaccatctcaattcgttttgggttctgattccatttttaaaaaccatctcaattgcattttccaagtagattcccagtgaaaagagatatttctaactgtaagtgttgaaattggctttctgtatcaagttagtccagtttgagcctgcatgttgtaacacaatattctctgggcctaatcacctctgtatgaacaaacattgagactccagaactgcacagcagagggccaaagg

SEQ ID NO: 635093 - DNA, 589 bp, Homo sapiens
ataacaaatattaccagggataaagtaggagttttcccagtcataagtatggataaagaggacataataatcctaattgtgtatgtacccaagaacaaaatattcaaatataggaagcaacaattagaaaaaaacaaaaaaagggaatacataaatccacaagtaaattagagatgtcaacaatcctttctcaatagctggtgaaacaagaagacagagaatcagtaaagatagaaaagacttcaataatactgtctagcaacttgacctaaatgacacttacagaacactccactcatccaaagtggaatatgtagtattttcaagtacatatggagtattcacgaggtcagacatgtgccagactataaaacaaacacaaatgaattcaaaataaatgaaatcatgtagattctgttatttcatcccaaatggatttgaaagtagaattctgtaaaaaaaaacaagctctgtaaaattactraaatatttgggcagttaagataacagacatccaaataacacacaggtggcttctaaaaaattacaaaggaaactagtaaagatttttaactcagtataaataaaa

SEQ ID NO: 635094 - DNA, 494 bp, Homo sapiens
gaccacaaaaacacaggaaacaaaaacaaaatcaacaaatgggacttaaactaaaaagtggttgcacatcaaaagaaacaatcaacagagtgaagagacaacctgttgaataggataaaatatttgcaaactattcatctgacagggactaacatccagaatatagaaggaactcaaacaactccacaaaactcccaaataatcccattaaaatgtgggcgaaggaaacaaatggacattttgcaaaagaagacataaaaatgaccgatatattcaactctgctcaatatcactaatcatcagagaaatgctaatcaaaaccacaatgagwtgttattttatcctaatcagaatggctactattaaaaagacaaaaaaaaataacatgtcggtaaggatgcagagaaaagggaactcttacacactgttggtgggaatgtaaattaatacagcctatatagaaaacagtatagagatttttcaaagaactaaaa

SEQ ID NO: 635095 - DNA, 600 bp, Homo sapiens
gagagtgagcaagagaggaggaggtgccaggctcttttttaagaatcagaactcacatgaattaacagagcaagaactgactcgttactgcagggagggcaccaaggcattcatgaaggatctgtttccatgacccaaaaccaaccactagtcaccacctcccattacattttgacataagatttgcaggggacaaatatccaaactattatcagtaatattctaattttctttttgttttggatttaactctatgggtggtcaaggaacataagctgtatcatttsaattattttgaatctattaagacttcttttacagcccagaatgttgtctcttttggtgaatgttccatgtgtacttgaaaagactgtgtgttctacaattgatgattggagagttctgtaatggcaattgggttaagtttgttgataaagttgtttaaattctgtaagtctctttgatctcacaattaccaagagaagaatattgaaaagtccaattataactatagatttgttactcctctttttaattctttaaatctctgttattaggtctatccacatatatgatatttttatgtcttctgatgaactg

SEQ ID NO: 635096 - DNA, 557 bp, Homo sapiens
gtattaggaatcaacctctgtgggagtggggctgaagcagcaggactgggcagaggggcatgtcaaactgcaatgcaggccaagaaagcctctggcaatgtgagggggtcactgaaaagtatatggaccctcagagtgtcctatrttggagcaaaatagccacttcttaatattagagctgtgatcagtcattaaatatgggatgtccccggaagggcataacctttggtgagatggccccttgcagctcagaggtgacaactgaagggcatgttcttacagctggggtgacaagtccttgtttaaagaagaatttggatggcccatctctgtgtctaccacaacacaaaatatatagaaaaaaataaacgacgtaagaggggaaatattcagcttttcccaacagaaaaaggattggggaaaatgaatttgtgtggccaaaaatgtgactccaacttggatgctgatctgccatgttgacttcttattagccccagtcctgagaatgcctcctgattcctactttatttactttccttagtgtaagaacatgccaa

SEQ ID NO: 635097 - DNA, 579 bp, Homo sapiens
catctttaattatattttgagtcttcaaactcgtctctcatatctgatagaataaataaaccaaactttagtaaggatatacaaaatctaaaaaataattttaactaacttgacctaattgacatttatgtgacattccaactaacaacagcagaatacacatattttaaagtgtgcatagaatattagccaagatagaccatattgtgggggcatagaacaaacctaatacatttttaraaaattaaagtatacagaatatgttctctgaatataatggaaacaaactagaaatcaacaacaggaacttattaagcaatgaacttctacatacttgtaggtcaaagtggttcaccttagctagatttacaaagaaaatagagggaatacacaaattactgatgttagaaatgaaagaaggacattgctatccaccccacagacataaaactaaaaataaaggaatattgcattttgttcacaattaaaaaatttaggtaaaatgagcaaattccttgaaagatataaacttccaaagactaatcaagaaataataaataacctgaatagtcctaaaga

SEQ ID NO: 635098 - DNA, 597 bp, Homo sapiens
gttcttattcaacccacagatgactcaattcatgcttctcaccttctgagaagactgtcccatcctgctaccacaacacaggggcctagacaaagttcagtgccctcacccccatactcagtcactttcctgtatacctcaaccacagtgacttgatctatttatttataataatttgactcttcaacaagaatgtgagcacctttaaatcggatattctggggattttttgcccaagtgcttccccagagcctaacacaacacctagtgtattacagacactagatacacaaataaatgttgattatatatgtccataatcctttttcaaaactctcaaggttagatgcatttgccaaatttggaactttttacattttataaaggtaatagcataccctatattttatgtaacatccccagcaaagtctaaggagtatccccatgatcaaatatatttcttcagcaaaatatatgaccagtcacactagatggaataaataaaggttatacactgacacacgtccattcaggtcatgtttgmctatcacatgagttcaggtcaagtgttctgtcaaataagttatgaaaaagctt

SEQ ID NO: 635099 - DNA, 643 bp, Homo sapiens
tttagtagtgttggtagttagttacttttctctgaggggtaaagcaaaagagacagagaatggttgcctacagttttggagggttggaatttgtggtcttcagttactctatttttagccataaaagtgctcytttaaaaaggcaccttttgctgaatattaaatattaatttcctttctagattatttcagcatcctgtaatttaaggcttaaaaacttgacatccaaaaaagcagcttttaaattttgtatgctcctgtggtgccctcttgtggagtgcagtcatttggttaaaccggtgttgtccaatagaaacatgtgcatcacatgtaatttaaaattttcaagtagccaccttaaaaacaaacacatgaaaaaacccaaaaagtttcgtaaaagtagatttaattttaacagatattcaaccaaatacataccatctttgtcatttcaacgtataatcgattaaaaaattattaatgtaaattttacattctttttgcttttgaagtaaattttcaaaatcttgtgtgtattttacacctatagcatatatcaattcacaccagccacagtttacttgctcatggcaatgtgtggctagtgattaacccgctggactgcacagtgttagaaactatt

SEQ ID NO: 635100 - DNA, 643 bp, Homo sapiens
tttagtagtgttggtagttagttacttttctctgaggggtaaagcaaaagagacagagaatggttgcctacagttttggagggttggaatttgtggtcttcagttactctatttttagccataaaagtgctcctttaaaaaggcaccttttgctgaatattaaatattaatttcctttctagattatttcagcatcctgtaatttaaggcttaaaaacttgacatccaaaaaagcagcttttaaattttgtatgctcctgtggtgccctcttgtggagtgcagtcatttggttaaaccggtgttgtccaatagaaacatgtgcatcacatgtaatttaaaattttcaagtagccaccttaaaaacaaacacatgaaaaaacccaaaaagtttcgtaaaagtagatttaattttaacagatattcaaccaaatacataccatctttgtcatttcaacgtataatcgattaaaaaattattaatgtaaattttacattctttttgcttttgaagtaaattttcaaaatcttgtgtgtattttwcacctatagcatatatcaattcacaccagccacagtttacttgctcatggcaatgtgtggctagtgattaacccgctggactgcacagtgttagaaactatt

SEQ ID NO: 635101 - DNA, 591 bp, Homo sapiens
actgattcaatctcactaattttattggtctgttcaggttttctatttcgtcctggttcaatcttggtaggttatatgtttctagggatgtatctatttcctcaagtctttccagtttgccagtgtgtagttcgtaatattctctatagtctttaaagatcatttgtatttctgtggtatcatgtgcaaagtcctttttcatttctgatttttgtttatttggttttttctttctgcttttcttagttattctagctagcagcttatcaattttgtttacctttttaaagaaccaactttgtgtgtatgtgtttttttaagtctccactttatttagtyctgcttaatttttattttttcttttcttctgctaattttgggtttggtttgctcctgcttttctagtttcttgaaatgcctccttagattattagtttgtaatctctttactttcttgatgtaggcttttattactataaatatcccttgtaacactactttccttatatcccacaggttttgatatgttatgtttgcatttatttgtttcgagaatttttttgattttcttcataatttttttgttaaccc

SEQ ID NO: 635102 - DNA, 449 bp, Homo sapiens
acttttgtgtgttttcacaatggtaaatatcttttgatttccaagtttaggacttccttgagcatttcttgtaaggccagtctaatgataacaagtatcctcagcatttatttgtttgagaatgactttattttttcttcatttatagaggataattttgctagatatagtattcttgggtagcagttttttttttttttttcttttagcccttkgaatatatcatcccattctcttctggtctgtaaggtttgtgcttagaaatctgctgtcagtctaatggggttttctttataggtgactagatgcttttatcttgctgtttttaggatttgctttttaactttgattttggacagtctgattataatgtgccatgaggatgactatttacattgtatctctttgagcatcattaagcctctggtgtttgaatgtctaaatctctt

SEQ ID NO: 635103 - DNA, 626 bp, Homo sapiens
tgtaaatagcattagtagtgtctgtgatttcttcagtgggcaagggtgcagttattagtagaggctgtggtgaagttgtgctggacactgggatgccaggtatgccagtcttcagtcttcagtggtggcagaggtgggctgagcatgcctatctttgtgccccatgacagtgcatgctgacacctgtgtcaacagttactgatggatttattcttgggcctccatgtggcttactcaggtttcagtagtggtaacagtagacctagtgggccagcaggttcgtaggcccctggggagcccagcatggcatgagagtagcattgatgggatgattctctgggtcccaagttgtgtgcattaatgttggtggtagataggataggctgaggaagccagtctccaggcccaaaggtggcacttggaggtgggagccagctaagtggtagtgactaggaatttaggccatcctcaggttcctgggaggagcgcttaggtacccaaggtagtggattgggttgaacaatccccaggacctgaggctacgtactatgtcttggagtaggtggcaaagctggcctgagccagcttgctctctggcccaccawtggtgagcataggtaccaccc

SEQ ID NO: 635104 - DNA, 546 bp, Homo sapiens
accctgctccttcttctgacccaggagtgacagctcgaatttcagtcctgggaccgctgggtcccaggacagtatgcagtttgccagaggctagttttgaaatgacaccttgctgtagccacttaggtctcagaaatgctggagtaacccagcatgygctccctttctggagcagtttcattccatggactcctggcagctctctgtgttagattcagggggttgcatccctgccacacttgctttatggccccagctgaaggagtgctcttggcttactcccctgggactcccaggactgaagtgcaaaagggatacatgttgcccacctgctaacccaagctatgtccaccaatgggagctacaccctcttcagtggctgtccagaagcgacaacctgagtttctgtaatgctcaagtcccagtgcctttggttcctcagagagcatgctgtttgccagaagatagttttgaaaatggcatcttgctgcagctgcttaggtctcacgaaggatgtggggcccagcatgagctccctctctggag

SEQ ID NO: 635105 - DNA, 568 bp, Homo sapiens
tcattaacagctccctaacagaaagatgacaactactgttaaatgtgggcastagctcaatgtggaggattctaaatcagggttagagaatgaaatctaaaaatggtactgtgtactatgaggactccagaaagttcagtttttcttaaaattgtttttctaccttataattccttatgagttagaagctgagaaatcactaaagcatttttctttttattttatacattcaatgactaatttttttaacaaatatttttcattcaacaacaaattacagggttcctactctatgccaggccctgaagtaagtgctgaaatgtacaatagacatggtctctgctctcatagagcttagaatctagtagagaagaaaaaacttttcatatttatgattgaagataagtcctaaaaaagaaaggaatataatctatgaagcaaagaggaagtgatatttgagagacatctgaataaagaaataggtattaacctctataggggagctacaagaaaaggggagggaaagagttcttgctgtagtggattcaacgtgaaaaatggtcaacag

SEQ ID NO: 635106 - DNA, 642 bp, Homo sapiens
ggttgcctcctaagcctcctatagcctcctaagaacttcatatccactcttgttcattggactcttgtctattgtccaatgcattcccccatatcacagccagagtgatattttggacgtacaaatttaatcatgtcacccttctctccaacttaaaatgccttagtggcctctccttgttcagcaaatggcaactccatttaaccagagttcaggccaagaccttggattcctccttgactccttctttttcactaacacccttcatctgattcatctgtacatcatgcagtgtctgcctttgaaatgcatctggaatctgaccacttcttgtcacttccatcaccaccctcatccaagccatcatctttttwaattttttttcagcctggattattacaatgtattaccaacaattttttccccttctgcccatactctcctcctgtctatatccacagaacggccgggatgatccttctaaaacgtaagtcagatcgtcttattcttacgctcaaagtgctccaatcactttccattccattcagagtcaaagtcaaagtctttagccccagggctctttaaccctctccctttaagttctcttcccagatccttactcttcctcttgctgactgggct

SEQ ID NO: 635107 - DNA, 590 bp, Homo sapiens
tctttatgtcttttttctcattccttgatctttttcctgggaggacacgttactgtgaagcctgtttaacagagaggaaggtaggatgagttatgggagagctacactagagttctctcccaaccccggctcttcccacaaatcatgccacctcctgaaaatgggctgatccctttgtggcttgtctgttccctcatttatctcaacataggaatgttaaggacactgttcactktaagaggcttcttatgtggtgaaagcagaaaatgtgcccctgcattacggaagcaaagcccagaaaaacattttagggaaggacggtttccaattaaattattttatctcctgtactcagatctttaagttttctgctcgatttctgaaaattgcagaactacctggaaaagaccttatccaatccaagccccaaagtttatggatgaagaaactgaaaccccaagaaacagggtgaattatctaacattacaaaactagttaaatgcagaactgggagtaaaatcgtggtctgattcctagtctactgtgttcttaggcacacttaggttcctaggaaacccgagggacctaac

SEQ ID NO: 635108 - DNA, 590 bp, Homo sapiens
tctttatgtcttttttctcattccttgatctttttcctgggaggacacgttactgtgaagcctgtttaacagagaggaaggtaggatgagttatgggagagctacactagagttctctcccaaccccggctcttcccacaaatcatgccacctcctgaaaatgggctgatccctttgtggcttgtctgttccctcatttatctcaacataggaatgttaaggacactgttcactgtaagaggcttcttatgtggtgaaagcagaaaatgtgcccctgcattacggaagcaaagcccagaaaaacattttagggaaggacggtttccaattaaattattttatctcctgtactcagatctttaagttttctgctcgatttctgaaaattgcagaactacctggaaaagaccttatccaatccaagccccaaagtttatggatgaagaaactgaaaccccaagaaacagggtgaattatctaasattacaaaactagttaaatgcagaactgggagtaaaatcgtggtctgattcctagtctactgtgttcttaggcacacttaggttcctaggaaacccgagggacctaac

SEQ ID NO: 635109 - DNA, 650 bp, Homo sapiens
acaaggcctttaagtaattcaaggaatactaattctaatgtaattcttataattattcactgtgaattaatgggaaagtaaaaagacccaaggagtaaactgaccatagttacacggttttcacatggtagagatggcaataattacatagtttaacaaaaataagcccactcccttgaaacaggaccagaaatatctccttctgtatgacggggctatgataacaccttccatgtggaaggcattcaagaaatatgtckgaaaaattatgtcaatttttaaaaattttgttaacaaaaggggacactatgacctaaatctgttcgatgtgtgtgtcaagaaatgattctcttcacacagtaatatttcttcatttatggaattaatgaagaaaagaaagatattagcaatactgtttcaatatactctaaagacgtataaagatcctgaaaacttacaatttatgtaagactttgagactttatggaaataatcttaatcaaatcaatacagaaaatcataatttttctgtttgcctctgtgccgtggcccgtcaaatagtttgacctctgaagtttatgaaataatatggaaaatcatctttctccatttcatttttcctaaggacataagagtttgacaggtgtatc

SEQ ID NO: 635110 - DNA, 574 bp, Homo sapiens
ttgaggcaaaaaatattaaaacaattctttacatttttaatttgtaggaggattcctcaatgtcaatgtaagcgaagtcagttttgatgaaattcatcaactcttctccaaggatttagatattgagccagggggtcattggaggccaaaagactgtaaacccagatggaaggtgaggtaaattcttttcataagcaatttgattgttactgagcatttgaggaaagaatgtgcttgattcagaatacagagacaaatgtctttaagtcttgataaatttaaaacatcaaaagttttgtctttaatgtttactatttataattcaaatgtgatttaagtgttatgtgtgaagactgtaaatgcacctgtgtagatacaaaatagatgctcggttcattctctttgagttcctggtaataaatacgtgacttgagtttggcttggaaaatagatttttttgttgttctgttctgtttggaagagaggctgtgagttccctgcckcctgcagctgtccctaatgattactgacacctgcaagcatagcctcaccagtttctgaattgtgagaactc

SEQ ID NO: 635111 - DNA, 456 bp, Homo sapiens
atttctgtgtctgaaatgtttctgtgtctgaaacaggaattctggactagcaacgtcctctctkaagctaaaatccacaagtttatggtcacaggaatgatttaagttactgtaaaaaataagaagtttaggtatatcagagctattcaaaagagagaaagaaactgaccttttcagtcagcaaagtattaataataccaatttgccatgaccaataaggaacaactagaaatggaagcacctggcaacattaagcaaattattaacataattcaacatattaggtcaaagaaaaaaatacagtatcttttcttttttagaataattgtataatattctaaatatctattatcctattatttgttaatgaacattgcttttcaatttgagtcaacaataaattgaactaccgtaaacatatgcacatgtgcatgcatttctgttggttatatattt

SEQ ID NO: 635112 - DNA, 716 bp, Homo sapiens
agctgggcgtggtggtgggcacctgtaatcccagctactggggtggctgaggcaggagaatcacttgaacccaggaggtggaggctgtagtgagctgagatggcgccactgcactcctccagcctgggccacagagtgagactccatttcaaaaaagaaaagaaaaaaaagaacatcatgtaacttctaaagactctcttcatttccataattttatggttaatgttttatagcaaaatgtaacattaataaccagtaacaatgtattccagcctgattttttgtttaagatccccagctgaaagagcttaaatagactaaatcagaaacagcaatagcagtgtcataaagataayttcctaagaactgtgctatttcatcagagaaacttactgagtgctctgcaagaattctaagacattaaccatgttaatatacctaaattgcaggagttgcttatctataaatacctatcttgaatggacatttgtctgcccctgatatgtatgggggtgggaggtgtaaacgccagaaggaaacgacacagagaaacatacattacctatactactctgtcctttttctctcttcataagagggaccacacagcagagtgtctgggaaactatttaccttgcaaataaaagtatggtcaactttttccaaactttttactcagggactcaaaattattaaccatgccctatctgtgagaa

SEQ ID NO: 635113 - DNA, 577 bp, Homo sapiens
tcttcatgtcttttcatggcctgatacctcatttctttttatcgttgaatcgtattttgttgtgtggatgcactacaatttgtttatccactcacctattgaagggcaacttgattgcttccaagttttggcatcaactatgccaaattataaataaataaagctactataaatacttatgtccaggtttttgtgtgcaggttttgattggcagctrgaatgactgacctagctttaagaatgatcttagcttctccaattatatgtgtttattttagcatggtttgcatcatctactacatacagagatttctcatttctctgagctaatgcttcctcgtttaaagagaaacaatcattgtcatataactgcaggcatggtggcttatgcttgtaatcccggcactttgggaggccaaggcaggaggatcgcttaaggctaggagttcaagaccagcctgggcagtgtagtgagacctcatctctaccaaaaaataattagctgggcatagtggcatatcccatagtcccagctacttaggatgctgaggcaggaggattgcttgagctcaggagt

SEQ ID NO: 635114 - DNA, 577 bp, Homo sapiens
tcttcatgtcttttcatggcctgatacctcatttctttttatcgttgaatcgtattttgttgtgtggatgcactacaatttgtttatccactcacctattgaagggcaacttgattgcttccaagttttggcatcaactatgccaaattataaataaataaagctactataaatacttatgtccaggtttttgtgtgcaggttttgattggcagctagaatgactgacctagctttaagaatgatcttagcttctccaattatatgtgtttattttagcatggtttgcatcatctactacatacagagatttctcatttctctgagctaatgcttcctcgtttaaagagaaacaatcattgtcatataactgcaggcatggtggcttatgcttgtaatcccggcactttgggaggccaaggcaggaggatcgcttaaggctaggagttcaagaccagcctgggcagtgtagtgagacctcatctctaccaaaaaataattagctgggcatagtgrcatatcccatagtcccagctacttaggatgctgaggcaggaggattgcttgagctcaggagt

SEQ ID NO: 635115 - DNA, 519 bp, Homo sapiens
ggacaacatggcaaatccccgcttctacgaaaaaaaatacaaaaattagctgggcatggcggcacatgcctgtagtcccagctactaaagaggcttaggtgagaggatagcttgaacccaagaggcggaggctgcagtgagccgtggtcacactgctgcactccagcctgggcaacagagtgagaccctgactcaaaaaaaaaaaaaccccgaaamaaaaccagtaaacccaggcctcactaataacatctaaaaataaaagctgtgataacttgatagttaagtgtgcctaagaatcacctcataaaactgcatgccaaaaatgtaggttcctggtctcatcaacaaaaagtttcattgggcaggtttcaggaacttgtctttttagcaaaaatccacttgtgattctaatattagtatgaggctcacatttggaaatacagtatactaagttcttgtgcttaattgagtcaatggagggaaaattgaactaaatagggatattaagcatttatgtcg

SEQ ID NO: 635116 - DNA, 590 bp, Homo sapiens
aatactctaaattttcttgtttgacaggtgctatcaaaatgtttcaggaggtatttgtgatttgtgattaggctttgtgatttttgttttcagaagatatctcaatattagtggtttttgttttcaggttgtgtgtgtgcatacagtgccagcttcgaagctatgagattggaaactggcctgattaccccaggctcagtgtggctaaaattggactcattatctgtgactgcaaatctgttcttctgcccatatccctgagctcagttactctctcatccattcacacggttagccaggayggaagcctgaggcttcctagactcctctaattctctcacagcccacaacaaagctatcatcactcatctgctgattttctattctaaatacccctatagacatcaaggaaaagaaggaaatatttaaacatcctggtatctgagaagtggcctcaatgttattacaagctaatctggctctctcctagctgagctgtgttgatcccttggacgtaatctcacagaacatcaacaccaaacaaggtcgctctgagaccatgacagcataagacaaaaacagaaatcact

SEQ ID NO: 635117 - DNA, 338 bp, Homo sapiens
ccttttcttgcatttccatgtctgcctccctaatgcaacrtcacatcacctcaaatcttcattgctaccaatatggcagtatgattcctctaccttctcccaatcagtcctatgatgttcattcctacaaactttgttttcctttttaaattcatcccctcaagcatttatcctctgagtcacaaataatccaattaccttctttaggttattttaaaacatacagttaagttattattgactatagtcaccctgttatactatcaaatagtaggtcttatttattctttctgtgttttgtacccattaaccatccctgcctcccccaaggcccccca

SEQ ID NO: 635118 - DNA, 534 bp, Homo sapiens
ataattgagcaccacttattgacagctactatatgcatttaagctacctttttaaaagcagagtaaaattgagtagcattacctcatgtttaaagagaagaactcatgattattgaagaaatggatcatgtcattcgagacaaaatcagtttatctgcttgtgtcatcaatttttaagccatcaatttataggtatgaccacgccagatacctgagatagaaaagccaattatacacgcaaggagaaacagtcagatattgaygaatgacagaggtgctagcatagaattgtcatgtgccacatacgaacgtttcagtcagtgacagactacatatatgacgatggccccgttaaattatcatggagctgagaaatacagagtaaggatgtaaagaaaaaaaatatttttgtgtagctgcacagtgtgtttgtgtcttaagctaaggctcattacaaaagagtcaaaaagttaagaaaatatttaaaagtttatagagaagttatggtaagctaagcctaatttattattggag

SEQ ID NO: 635119 - DNA, 610 bp, Homo sapiens
gattattgaagaaatggatcatgtcattcgagacaaaatcagtttatctgcttgtgtcatcaatttttaagccatcaatttataggtatgaccacgccagatacctgagatagaaaagccaattatacacgcaaggagaaacagtcagatattgacgaatgacagaggtgctagcatagaattgtcatgtgccacatacgaacgtttcagtcagtgacagactacatatatgacgatggccccgttaaattatcatggagctgagaaatacagagtaaggatgtaaagaaaaaaaatatttttgtgtagctgcacagtgtgtttgtgtcttaagctaargctcattacaaaagagtcaaaaagttaagaaaatatttaaaagtttatagagaagttatggtaagctaagcctaatttattattggagaaagaaagtttcatttttttttaaatttagtgtcacctaggtacagtatttacaaagtctgcagtagtgtacagtaatgtcttaggccttcatatccattcactcactcactcagagtaactttcagtcttgcaagcaccacttatggtgagtgctctatacagctgtaccatttttcaaatc

SEQ ID NO: 635120 - DNA, 530 bp, Homo sapiens
tctgttggttttttggttttctccactcttgtttcctgacttcttttgtgtactgcatgctttaggattccactgtagcacctctattgacctttcacctacacccgcttgtgtttactttttaattggttgctcttactgaggaaatataactaacaacaaaatttcctctcaacctaaaaaacctttccacaaagtaaaggagaaagaaaacagtgttatcattgaataagcattaaaccctgaaggtgaggcacatcacaggtagctcctaaagaaactgcgggccgggcacaggggctcacgcctgtaatcccagcactttgggaagccgaggcgggcagatcacaaggtmaggagatcaagaccatcctggctaacatggtgaaaccccatctctactaaaaatacaaaaaattagccgggcatggtggcgggcacctgtagtcccagctactcgggagaattgcttgaacctgggaggcagagcttgcagtgagccgagagcacaccactgcactccagcctgg

SEQ ID NO: 635121 - DNA, 530 bp, Homo sapiens
tctgttggttttttggttttctccactcttgtttcctgacttcttttgtgtactgcatgctttaggattccactgtagcacctctattgacctttcacctacacccgcttgtgtttactttttaattggttgctcttactgaggaaatataactaacaacaaaatttcctctcaacctaaaaaacctttccacaaagtaaaggagaaagaaaacagtgttatcattgaataagcattaaaccctgaaggtgaggcacatcacaggtagctcctaaagaaactgcgggccgggcacaggggctcacgcctgtaatcccagcactttgggaagccgaggcgggcagatcacaaggtaaggagatcaagaccatcctggctaacatggtgaaaccccrtctctactaaaaatacaaaaaattagccgggcatggtggcgggcacctgtagtcccagctactcgggagaattgcttgaacctgggaggcagagcttgcagtgagccgagagcacaccactgcactccagcctgg

SEQ ID NO: 635122 - DNA, 385 bp, Homo sapiens
tgataggtagctagttataatttggagcgagcacccatggagatgggaagatagggaggctagcttccttgatgttaacatttcaaaaagatagccccaggtccttcagaaggacatccctggttataaagctggcaaaggagatagagaaagaagtaacaactgcaagttttttaaactaaatactctaagaaaagagagatgagagatggcaagggaaagttttccttgtttgcactagggaaaattcagtttttttcccatttagatttgtacttacattctagggctatgcyctacgtggcaagcggctaccaattggacagcacaaatctagaacatttctatcattgtgtaaagatttggggggaactgcagagtgaaa

SEQ ID NO: 635123 - DNA, 429 bp, Homo sapiens
agatctctctgataggtagctagttataatttggagcgagcacccatggagatgggaagatagggaggctagcttccttgatgttaacatttcaaaaagatagccccaggtccttcagaaggacatccctggttataaagctggcaaaggagatagagaaagaagtaacaactgcaagttttttaaactaaatactctaagaaaagagagatgagagatggcaagggaaagttttccttgtttgcactagggaaaattcagtttttttcccatttagatttgtacttacattctagggctatgccctacgtggcaagcggctaccaattggacagcacaaatctagaacatttctatcattgtgtaaagatttggggggaactkcagagtgaaaccacctttgcaaaaattataacaatgagaaaatta

SEQ ID NO: 635124 - DNA, 570 bp, Homo sapiens
tgtaccaggttgaattggcttagcagtaaactatatgtatgctcacctagtaataatccatgtgtttctacacttaagagatcctctggactacagaaataagatggaacagaagcactgtggcataactatgrgtgttatatgctttatggccacaagatggcactatgcacgcagtaaaagaggcaaagtcaatctatcaaagctaggaagaaaaaaaaaatcaagcaatttaataagttcgtgagcaacacaaacttgcaaaggccaattccttccttcactaattgtgaccctctcagataaagtgtgatacgcttcagagttgcctgagaaacgagacctggattacggaagtctaataaaacctataccactctttgatggtgaaatacaaaatgtctttctgaaggtcagtcatgagcctttggttctatcaaaaatgctgcactttggaggaaatgacgctggccaatggatttacgaataacacactcagcctgctgtgggctatcttacagaatagatgttgactttttctgaaatattagattcaactaagcatatgtt

SEQ ID NO: 635125 - DNA, 570 bp, Homo sapiens
tgtaccaggttgaattggcttagcagtaaactatatgtatgctcacctagtaataatccatgtgtttctacacttaagagatcctctggactacagaaataagatggaacagaagcactgtggcataactatgggtgttatatgctttatggccacaagatggcactatgcacgcagtaaaagaggcaaagtcaatctatcaaagctaggaagaaaaaaaaaatcaagcaatttaataagttcgtgagcaacacaaacttgcaaaggccaattccttccttcactaattgtgaccctctcagataaagtgtgatacgcttcagagttgcctgagaaacgagacctggattacggaagtctaataaaaccyataccactctttgatggtgaaatacaaaatgtctttctgaaggtcagtcatgagcctttggttctatcaaaaatgctgcactttggaggaaatgacgctggccaatggatttacgaataacacactcagcctgctgtgggctatcttacagaatagatgttgactttttctgaaatattagattcaactaagcatatgtt

SEQ ID NO: 635126 - DNA, 570 bp, Homo sapiens
tgtaccaggttgaattggcttagcagtaaactatatgtatgctcacctagtaataatccatgtgtttctacacttaagagatcctctggactacagaaataagatggaacagaagcactgtggcataactatgggtgttatatgctttatggccacaagatggcactatgcacgcagtaaaagaggcaaagtcaatctatcaaagctaggaagaaaaaaaaaatcaagcaatttaataagttcgtgagcaacacaaacttgcaaaggccaattccttccttcactaattgtgaccctctcagataaagtgtgatacgcttcagagttgcctgagaaacgagacctggattacggaagtctaataaaacctataccactctttgatggtgaaatacaaaatgtctttctgaaggtcagtcatgagcctttggttctatcaaaaatgctgcactttggaggaaatgacgctggccaatggatttacgaataacacactcagcctgctgtgggctatcttamagaatagatgttgactttttctgaaatattagattcaactaagcatatgtt

SEQ ID NO: 635127 - DNA, 234 bp, Homo sapiens
ggaggaaatgacgctggccaatggatttacgaataacacactcagcctgctgtgggctatcttacagaatagatgttgactttttctgaaatattagattcaactaagcatatgttgaattctcactaygtgcagagccctatttagtggctttaaaattactcaaagatgagtaaggcccagcccttgccctccagaggctcacaatatagtggaggaagtagttacaaacag

SEQ ID NO: 635128 - DNA, 571 bp, Homo sapiens
ggtgagtctgagtggggactgactacaaacacatgtaaaggaacttttgggggtgatggagtgttctaaaactggaccatagtgatgattgcaaatccagaactcatcatgctgtacacttaaaatgggcaaattttattgtatataagttatacctgaatgaagctgtccaaaaaggataaaggagatgaacggatatttttaaatatggaaatagrgatagtaaatagtcacatgagaaaaattcacagctttgttaacaaattaacaaataaacttacaatctttaatgttattaaaaaatagcaaaaatggaaatgataaaataagtttacagagttgtaaaaaatagaggtctattccctcacacagcgctcttgatactgaaaattttccatttgctttggagcattatggctatttatgactaacactatgaaacacttatggccccaatacctagcttttatttatttatttattttttcatggtcttggcctttggatactaatgacatctggctggaagattttatttctcatccggcatatatcatgccatcaaacaagc

SEQ ID NO: 635129 - DNA, 578 bp, Homo sapiens
actggctgccaactgatcagcccacctccaaataaggcaaaggctcagctgtaaccaatcaagcagcttccctacctcayttccattttctgtctatgaatacggcctgctcattattgtagaatagagttctccgaaccttttctagttccagggcagcccaattttgtgaacctttctttgcttaagtaaactgttagatttaatttgtttaaagctcttcttttaacattttacacccaagttctaaccacccctttgagctgctcattccagttactccaaagcatgcatgagatacacatgttaacaacagactaatgtttgtttttctcttgttaatctgtgttttgttacagagccccagctggggacctagaagaaaatttgtttttcttctcttatagcagcaactctgatcttttcccttctaaactataacaagcaattaaaacagcctctcaaacattggtagaatgatttcatctctttgggttagatatactagccttcttctgccagacccaacagatttctcccgtgttactctgggcagagagcaaccttcacttccttag

SEQ ID NO: 635130 - DNA, 578 bp, Homo sapiens
actggctgccaactgatcagcccacctccaaataaggcaaaggctcagctgtaaccaatcaagcagcttccctacctcatttccattttctgtctatgaatacggcctgctcattattgtagaatagagttctccgaaccttttctagttccagggcagcccaattttgtgaacctttctttgcttaagtaaactgttagatttaatttgtttaaagctcttcttttaacattttacacccaagttctaaccacccctttgagctgctcattccagttactccaaagcatgcatgagatacacatgttaacaacagactaatgtttgtttttctcttgttaatctgtgttttgttacagagccccagctggggacctagaagaaaatttgtttttcttctcttatagcagcaactctgatcttttcccttctaaactataacaagcaattaaaacagcctctcaaacattggtagaatgatttcatctctttgggttagatatactagccttcttctgccagacccaacagatttctccmgtgttactctgggcagagagcaaccttcacttccttag

SEQ ID NO: 635131 - DNA, 559 bp, Homo sapiens
aaaataagtagtggtagctccaaaggaaggaaattcacaatgaattctccaaaamacaagtgaaaagctttgctgtaattcatgtaaacatgcctaatatatttaattttatactgaagaaacaagcaaaaatgtttagtgcatctaaatggtcagagatactggaaataaaaagcaacaggacctaagtaaactttaggtagttcttttagtaataggatataggtcaacagaggaaaaataatgtgtataaaaatgctgagagcagtattaattacatttagaaattgtgatagcccaaatgcctaattatagaatgactgtctatatctaagtagtagaatactatggaaatgtttataaaaagaaacattgaaaagttggaacataaaatatgtatacagtaatgaactgattatttcaaatggaaattgtgctattacaaagaactatttgaagaaaggttaatcttttatggaattaacagcaaaccagatattaataggtattatgctaaaaaagaggagagtggggttctttgtttaaacagatttgaaaa

SEQ ID NO: 635132 - DNA, 570 bp, Homo sapiens
gatgccttactgccattatttgctgagtatttccagatggaactgtagttgatagccaataaatttggtacgtttttatcgggatgcgcatgccatagatcgtccctgagataatgctttgcaatgtggaacctgaaacacctatgtataagcccaagcctttcattaatattaactgtgagacccctggaagctactactttgtgtgagcctgttttctccgccctcaaacagtggatataataccyccttgcaaggctgtgagattaaatggataactgtgcataatgctaagcatggtgtctgggacgtaagaggttccttatatcccattagttcactaggtgggatcaccaagttgaaattcattttttaatattttgcttgttggagtactcacaactcaacttctctggctaatttgatgtttaatttgaaaggtaatgacactattttgtaacatttttagatgcttaagggaaatttgaaatgcaaagtggaacaacattaaaaggaaactcatttgtaaaataaagaaaaacaaaatctatgcaagccaaagaagtcatg

SEQ ID NO: 635133 - DNA, 480 bp, Homo sapiens
gaagggaaattgtagcaaaaatggctatattagaagatggttctcaaatcagtgacctaagcttccaccctcagaagttagaagagcaaattaaacccaaaacaagcagaaataagataatgatgaattttagagcagaaatcaatgaaatatttagcaaaaagtaataagaaaaaaaattgaagccacaagcttattatttaaagaggtcaataaaattgataaacattttaccagactaattaggatattaagagattaagcacaaactatggatgttagaaataaaataaagaactttactacagatcytacagacatagtaagaataattttttaaaaagtaggactgggtggttttcttgagaacaaggccctgtgctcccatgagaatggacagagttggaatataaggcatctgaagggccctagagaggagtaaggggaggggcttccattgaggaaagcaagttacttctg

SEQ ID NO: 635134 - DNA, 487 bp, Homo sapiens
gaattcccaaataaaaagccagttaaaaccagacctaagaaaatgatcttcccaataatggttgaagaatcatgtggttcttggggttcaattaaaacccaacagaaattcttctctgtggagatgtaaatacttagcagttcctcttctgctggatgcaaagggtctcctgattgctctgtcttcyggtcactttgcttagatttattaatatgtattttccttgaagtttttgctagtgcaggtagaaaaactccatgaaaattgtgaactggctaatgaaggtgagaagccactcttgcacatgaagtcgggtgatcgtgggattagcctggggctgtactttgcctcatggatccatctcttctatctttttttttttaactgagcttgacagcccccagccttgcacacagtaggtgccccaaagtgttcattaggcaaaagccttgggttttgggtgatccatattaactacagacagatg

SEQ ID NO: 635135 - DNA, 476 bp, Homo sapiens
ccagttaaaaccagacctaagaaaatgatcttcccaataatggttgaagaatcatgtggttcttggggttcaattaaaacccaacagaaattcttctctgtggagatgtaaatacttagcagttcctcttctgctggatgcaaagggtctcctgattgctctgtcttccggtcactttgcttagatttattaatatgtattttccttgaagtttttgctagtgcaggtagaaaaactccatgaaaattgtgaactggctaatgaaggtgagaagccactcttgsacatgaagtcgggtgatcgtgggattagcctggggctgtactttgcctcatggatccatctcttctatctttttttttttaactgagcttgacagcccccagccttgcacacagtaggtgccccaaagtgttcattaggcaaaagccttgggttttgggtgatccatattaactacagacagatgcctggtt

SEQ ID NO: 635136 - DNA, 465 bp, Homo sapiens
acacttggattcaccggtgccctgggtgtagagaagacacgtgagaagttaacaaaattgatcagagtgaaaggatttattctttgtggtattagaaatctggagcgaaacaagaattacacactgatcccattatcaggaacgtaagtgtcgacaattaatgagcttccctactcagtataacacagacgtaattgtttccaaagcaagaatggtttctgcctccagacacactgctatcaaccagggatgtgtataatgaattttaagggagaaaataggtcccctgagaacagttgctttgttaaaagtctccatttgagtggaattactgaaaagatgtaatgtaccatacatagggccaaacaggttttcctgagatcattttagttgttgctatagtmactccctcttaccagttgttataaaataatgtcagaactacatccagacccattttatagt

SEQ ID NO: 635137 - DNA, 602 bp, Homo sapiens
acatatgggccctacaccaagagtatcaccattccccagggaacttgttagaaatgtaaattctagggccccagtccagaaacactgaatttgaaactctgggggtgggacctggcaatctgtgttttaacaagccctccagatgattctgatgctaaagtttgawagccattgtcttagatgcaactaataaccaggagtgaggttgggccatggaatctagagtctggtgtctttaaaagctttgccatctcctagctgggtaactttggcctagtcacttaacttctgtggactttagtttcctttcctctaggagataaagtttttgagtcagttgatctcaaattgtagtcattttattctatggctttgtgaacacctgtaaggatagcaatggcaaattcctatttcgttaacagggcaaaacttcagggatggctaggcacattaaaagggctaagctgactggggaccaggtgcatgtctacctctggtttcctctgactttgctcagaaacaaatccatctggccagatgttggacacctggcctcctttaatcagatgctgaagttctgtgtcgagagaggcaaagcaaat

SEQ ID NO: 635138 - DNA, 600 bp, Homo sapiens
ctggtttcctctgactttgctcagaaacaaatccatctggccagatgttggacacctggcctcctttaatcagatgctgaagttctgtgtcgagagaggcaaagcaaatgatctgtgacatgtgggttctactgaatcaggctctctttaatctgcacagaaaggtctgtttgcagacagcactagcttaggaaggctggtgcaaaagcaaygatcaacacaggtttccacaggcagatgagttacccagatagtgacttggtgttgccgtgtcatagtcacttataaattcagtagaggagcttgttcattgtgctctcaattcaaagaatttaaactataaggtcactctgaaaatgagtgctgattcttccagagaagtaaaccatgtcattagctgcttgtgtagtcaatacaattcctttggaacacaattcagcttctgttcttttaatgcatattcatgccaacactataattcttcagttgggataaatgttcacacaagaaaacaaaattaatttatccatagctttatctgagtcatgtataacctcatttggccttctctccactgcttagttctgagaactgctccaa

SEQ ID NO: 635139 - DNA, 600 bp, Homo sapiens
tgtttaatttcctgcattcttccttccttgatttcttcatttcctcctgattccactttccccagtgtggttcataactctcttagggttcctgtcatgctttaaaaaagctatatagttattattttaagtgaattacacagtgcattagcagatgacaaggctgatagttatcttttgttagatagtgttttcatatcactaggttcagagtctactttttgaattatcaactagggttaaagtaggctgaactaatgatctggttgttggaaaagtccttctgatgttttagacagtttgtgcctttgcrggatcttggttctttacagaggaagccagatggccccttaacttttggcattgcttggtaaacggcagacactcaataaacatgtggataaacatgtttccaccctgaacatttttagtaagatcattggaaaagtcagttttcatttaaaaatgtttaaccttgatcagtattcaaacacaaagattctccagaaataacttaaaattgttaaactgcagagtggaaattgtaaagacaccttttacaaagaatttcttgtcagtttttagtatttgcatctgcaa

SEQ ID NO: 635140 - DNA, 627 bp, Homo sapiens
gtttaaattccttatagattctggatattaggactttgttgtatgcacagttttgcataaatgtcttaaagaaatattttagcacctgatggagccagggagtagaaatgcaggtaggtggaagcagggatgagacaggaatcttcctactcattcattcattcattcattctgtgtccaggcattgcccttggcagtggggatgtgtgactaatgctctgtcttatgtttagaatgctcaggtttggttgcttcaagaaaacttgagtaataaatcgtttgttaagcagaggttgtcaaattttataagtcgagaagcttaagtaaagcatttgaaataggcagtrtctagtgttggcttcagaaaggacaggaggtgaccaatggctggatgactcataactgttcagcctcagagctgtgcttaggaggcagcacagagtgtgggagggaatgtcccatcttgtcataaaaatgcttttctagctttggagaggaatttaccctaagggacatttctaggggaaattcaggtctttctctgacactgtcatcagctctttgagctgtgaacatttaaaaccctgagggtaaaacagacaaaagccaacatatccagaattaggt

SEQ ID NO: 635141 - DNA, 550 bp, Homo sapiens
agtttggcacacacgactggaaggtagcttccagctgacttgagttccctgtccttcaccttgaccttctaggtacttggcagcccctccactcttcagacactcagttctcctgctctttcctttctaaccccagcgccaccttcaaaatagtgaaattcagtatttggtaaattatattatttacatttgctgattgtgattacactgctrggtaaatggatttcagtcaacatatttattttctgatctttaaatctctaactgggaaagaaaccacttgtgccagttaaaaatctcagatttatactattacatctgggattaagaacaacaacaaccaatctcagattcaccacagaggagagtgaagattggctctccatggagttcagtggatctcttcagttgcccttgaaatctcagcgagtgaaataaaggggactggcccagttgatggtgtccttctttacaagaaggacattccctctctagcttcattcatagcaggtggttttccgatgccttttgttttgtttttaaagcagtg

SEQ ID NO: 635142 - DNA, 550 bp, Homo sapiens
agtttggcacacacgactggaaggtagcttccagctgacttgagttccctgtccttcaccttgaccttctaggtacttggcagcccctccactcttcagacactcagttctcctgctctttcctttctaaccccagcgccaccttcaaaatagtgaaattcagtatttggtaaattatattatttacatttgctgattgtgattacactgctaggtaaatggatttcagtcaacatatttattttctgatctttaaatctctaactgggaaagaaaccacttgtgccagttaaaaatctyagatttatactattacatctgggattaagaacaacaacaaccaatctcagattcaccacagaggagagtgaagattggctctccatggagttcagtggatctcttcagttgcccttgaaatctcagcgagtgaaataaaggggactggcccagttgatggtgtccttctttacaagaaggacattccctctctagcttcattcatagcaggtggttttccgatgccttttgttttgtttttaaagcagtg

SEQ ID NO: 635143 - DNA, 622 bp, Homo sapiens
gcctcctcgggtacttctgtgttagtgcttccaaacaacggcaaaatgctgataggaggaatttttttttcttttttaatcttccactgaagcctccaagaaagatgacctgcagaagggggaggaaggcgcaaacaaagccagacaaagtgaggagggcaygccatccttgagcacacttctttctcctgggagatgcagcaagtcgggcaagggtttcagtccagaagagcagtaccaccacccacctggctggctcaggaccccccagctcacccccacacctctctagggacagcttcttcccagctgctgttctgggtcatggctgttagaaatttaaagctgatgaacgcaaaccagagtatccaggaagaaatgaaaagcaggtggggttggagggcattcccagctgtggccaggcccttggaggctgcccatctgtctgtgggctctcaggacctccaggtggaagctcctgggagacagatcttacttggttcaattcaaactcaaggattcttaatcttatgctttcagtcccctggaggagggggcagaatgcatgatcagttttcagagcttggacaaccccctgtacctataggcaaaattacttgtg

SEQ ID NO: 635144 - DNA, 576 bp, Homo sapiens
gcttggggatgggagggtgctcttcaggccccagcagccttcaggagcctagggggctttgtrccctgggagggaggccagaaggacatccaagctcacggtggctctgagcacatgggttcttagaatctctgattctctgttcccccttgcctgcccggagattgttttctctccctgactcctgtctgtttatctctgtgtcaccaatatctgtttttatgtatttttgagtccctttcctttgtttcctccattaatacttctcgttcaggggaggataaacagggtcataatcacgctataaagcgagccacgggctgtgtgtcgcttattgcccaggggtctgctaattggaatttataaagttcaataaaaactataatccaataagggctgaaactcttcttcatttatcttaggggtaatattacgcttgcccgcccaccagcctgcctgccagccagcagtgagaagccagggaggagccacccaaggggtgtcccctgggggccacagcattccctagagtgaccagcactgtatctcaggctgggtggcctggacagaggaaag

SEQ ID NO: 635145 - DNA, 614 bp, Homo sapiens
ccccgccctgcccctgcccaaaagccaccctgggaaccacatcaccatawgccaaacacctgcttgcaagacaccttgcagtttcccattaccttccagaaagcccacacttgaaaagtaaaataaatgctctccaacaggaatctgcctgtaccccagccccaaaagcaaaagctggccctttgctcagacttagctctggacattctctgagtggggagaggggacgggacactcagccagccctgtcttccaagcagggcatggggagggagcaactgaccccacagcattcctggctctctcagtgctaagtagaaggcagaagcctgcagagccagttgcctcacccatccctgtgcttggatggggcatgcatgtgcatgtgcacatatgtgagggctgtgtgatacccagagttgaaggcacggtcccgcagcctctcagggcttcccagtctgcagagagagagaacacaggccatgttattgtcctaatgcagctttttggggagggaaattgtgtcaagtattaaaatggggaggagatcccagccacgtgcccccagagctgagctacacagctaaggagcgcagttgttgggagccagcgcc

SEQ ID NO: 635146 - DNA, 614 bp, Homo sapiens
ccccgccctgcccctgcccaaaagccaccctgggaaccacatcaccataagccaaacacctgcttgcaagacaccttgcagtttcccattaccttccagaaagcccacacttgaaaagtaaaataaatgctctccaacaggaatctgcctgtaccccagccccaaaagcaaaagctggccctttgctcagacttagctctggacattctctgagtggggagaggggacgggacactcagccagccctgtcttccaagcagggcatggggagggagcaactgaccccacagcattcctggctctctcwgtgctaagtagaaggcagaagcctgcagagccagttgcctcacccatccctgtgcttggatggggcatgcatgtgcatgtgcacatatgtgagggctgtgtgatacccagagttgaaggcacggtcccgcagcctctcagggcttcccagtctgcagagagagagaacacaggccatgttattgtcctaatgcagctttttggggagggaaattgtgtcaagtattaaaatggggaggagatcccagccacgtgcccccagagctgagctacacagctaaggagcgcagttgttgggagccagcgcc

SEQ ID NO: 635147 - DNA, 586 bp, Homo sapiens
agttaaagttgaactgaaaagcccacagtaaatgatttttttaataaacccatttaaaggagccccaacctgaagcagaatagatatgtggattttcaaaggagagggggaaaaatcatatattgaaaaaataaatttcctaacccattttataccccagattttattatcaccggaaggtttttaaaattctaattccctttgcttttctgaagttgtttgtttaccgcccaggcctccttgrgcttgggaccgggagctcaattggttggtttcagtctcctccaattcctcgtgtgattgtctgttcatgtgtctgctttgctcttcaagggggctctgagctccctgaggtcagataccaggctctcggaagaaactcttttccttctcatcagcatccagcacagagccatgcatgcaataagtgttcaataagtgtttgctggtgatgtgccatactatgaagaagtcctaacccatgatttccatgaaagccctgggccagaaaacagtgttccttttgcaggaagctttggttcccattgtaataccctcgtcctaggagagagaggggaagagggcc

SEQ ID NO: 635148 - DNA, 586 bp, Homo sapiens
agttaaagttgaactgaaaagcccacagtaaatgatttttttaataaacccatttaaaggagccccaacctgaagcagaatagatatgtggattttcaaaggagagggggaaaaatcatatattgaaaaaataaatttcctaacccattttataccccagattttattatcaccggaaggtttttaaaattctaattccctttgcttttctgaagttgtttgtttaccgcccaggcctccttgagcttgggaccgggagctcaattggttggtttcagtctcctccaattcctcgtgtgattgtctgttcatgtgtctgctttgctcttcaagggggctctgagctccctgaggtcagataccaggctctcggaagaaactcttttccttctcatcagcatccagcacagagccatgcatgcaataagtgttcaataagtgtttgctggtgatgtgccatactatgaagaagtcctaacccatgatttccatgaaagccctgggccagaaaacagtgttccttttgcaggaagctttggttcccattgtaatrccctcgtcctaggagagagaggggaagagggcc

SEQ ID NO: 635149 - DNA, 565 bp, Homo sapiens
tttgctcacactgtgcctgggagtccatcccacctcccagatgacagayatggattgaaagagaaggtcctgcatgtggcagagtagggatggaccattagagttggcagaactgggagacactttctagaatgggggataccacagagttttccttggaagacaaagcgacccatattgaggcagggaacaaagggctgttgttccattctcagttcccgcagcagcaccacacatgactggaccaggtggttggtggatgctagggaaggtcatgggtttcaactcttctcccaaacctctagagaaggcacttttctcactttcgcctgggtctcctgtgcccctgagatccaccatgcatctcccagcctctgagaccccacactcctcaaaattcccattctccagctctctgctgtcatccatgggccctgaaggccaatgacacctgcagaactcccgggagaagggtgtttttacaaagacaagggcagagaggagaaggaggaggaggagagagaagaaagaagaggaacaggaagaggaggaagaagaacaagag

SEQ ID NO: 635150 - DNA, 596 bp, Homo sapiens
ctgtcaggcaattagcacagcaaatgggcccagaggggcctgcctctggagagtcaccctcctgcctctgcacgctctcccctggctcatcccatgtcctgattccagactgatgatgacacagacatgccactgccttgctagcacttaccaaccccaatctccactggcacccacagcttccaatgtcttagtctggccttagagatgcggtgatcaagcccagcctgtctcatatgccatagcaactcagtatcagacttcagccaagccagggaaaagaaatgggagaaaggagaggcccagaggtgcctggcagggaaaagcggagaggaggtaacagctcccaggaactgcaggaaacacaaacttggcgagtgatggcgaggtctggacctgggctggggcaggggctggtggagaggaggaatccactttggagatggctgtggggtargtgaggatgaagggggaggaatgtagaactgctgggtttctggctcgggggtgctgatcaccagcgtggcagaacccaggaggatgggcagatgtgggcacataacaggggcctctttgcacaagttaaatgtgagggg

SEQ ID NO: 635151 - DNA, 551 bp, Homo sapiens
tccatgtgtgtagtcagggtagctgagaaacagcagattcttacgttcctggaaagttgggtgcttggtcccttgcagtcctttgaaagatatggttcagggtcttcctaagagaaagacagtagcctcaactcaaagaaggaggcttcctgaaggatgggtaccttgctcataattcctatcatggatatagaattttaataaataatcctgcttactaataagaacaaaggagccacttgtcttccccagcccatcagtctaagagcaggagaccctggcatgggagagaggagggcrgtgaggtgggaaagaggaaaggtagacagagctagcatccagtgattcagagctattccaaattccactttctgccttccagctgcatcccagccgcttctcctcactagtattctgtgccagccaaatttcggtacacacagtgttgcggtttaaccagtccttttaaaaatcctttttttttccaaaatcaatgtaaaaatattctgtggtacagagcagatttgattaaaaaaggaaaaggttgcctg

SEQ ID NO: 635152 - DNA, 551 bp, Homo sapiens
tccatgtgtgtagtcagggtagctgagaaacagcagattcttacgttcctggaaagttgggtgcttggtcccttgcagtcctttgaaagatatggttcagggtcttcctaagagaaagacagtagcctcaactcaaagaaggaggcttcctgaaggatgggtaccttgctcataattcctatcatggatatagaattttaataaataatcctgcttactaataagaacaaaggagccacttgtcttccccagcccatcagtctaagagcaggagaccctggcatgggagagaggagggcggtgaggtgggaaagaggaaaggtagacagagctagcatccagtgattcagagctattccaaattccactttctgccttccagctgcatcccagccgcttctcctcactagtattctgtgccagccaaatttcggtacacacagtgttgcggtttaaccagtccttttaaaaatccttttttttyccaaaatcaatgtaaaaatattctgtggtacagagcagatttgattaaaaaaggaaaaggttgcctg

SEQ ID NO: 635153 - DNA, 672 bp, Homo sapiens
tggctgccctgtgggtgtggactctgatctgatctagggaggcccagggaagggctgggctgcttgaaggagattggtatcagtaatttgaatgtctcaccrtgccccacctggtccccatctcgtcacatctgagcaagacagcgacagcctgagagcagcctctggtgcctgctccatgtttcaggtgcatctccaactctcaaccatagtgacccctcatttcctctgtgtttcttctcactttaagccaaccatcaggaacttggggtgggggctaactcccaccctgtttcaccagggcaggaccccagtctgttcatgaggtgctgggtggtgcctccgagagccttcactggaagcctcagaaagagccatcaagaggtgcacaggagcacccaggaagtccctggtaactaaccgatggatgacatggcccaggtcacccttcagggcactgcaaaaggtctcctggacaagagggtccagggtgacaagggctgaggtgctccaggcagaagcagagggtgtcggggcttagactggaagggcatgctcgggaggcatcctcagcatgttctgtggaggctctgggaggccccctactcccatgtaagttggactttttggcttctccctccccaccgcacttattgcaataactacttctcg

SEQ ID NO: 635154 - DNA, 672 bp, Homo sapiens
tggctgccctgtgggtgtggactctgatctgatctagggaggcccagggaagggctgggctgcttgaaggagattggtatcagtaatttgaatgtctcaccgtgccccacctggtccccatctcgtcacatctgagcaagacagcgacagcctgagagcagcctctggtgcctgctccatgtttcaggtgcatctccaactctcaaccatagtgacccctcatttcctctgtgtttcttctcactttaagccaaccatcaggaacttggggtgggggctaactcccaccctgtttcaccagggcaggaccccagtctgttcatgaggtgctgggtggtgcctccgagagccttcactggaagcctcagaaagagccatcaagaggtgcacaggagcacccaggaagtccctggtaactaaccgatggatgacatggcccaggtcacccttcagggcactgcaaaaggtctcctggacaagagggtccagggtgacaagggctgaggtgctccaggcagaagcagagggtgtcrgggcttagactggaagggcatgctcgggaggcatcctcagcatgttctgtggaggctctgggaggccccctactcccatgtaagttggactttttggcttctccctccccaccgcacttattgcaataactacttctcg

SEQ ID NO: 635155 - DNA, 649 bp, Homo sapiens
atggagcctgacgatttctaccatcgaatgtgrcaggttgggaagattaaaaagaggagctaaactagcagtagttggagatgaggaaaagtagcacatttatgaataatttcagctgaatcctcacaacatgacactccctggacagaacacattcattatcttattcaccacgactactgcaatattagtgatttgttactgaatcaattattaattcatacaggagaacgaggctctgtcacttaactcttctctgaatgttgggcccagggtggggcagggaggaggaagggtcagatttaaccttcattctctttggtatctttcagaaggtggcaaaacagcaaagggtggtggaaagtggaagagcgagaggtttggggagcatctcgtgccacttagagccctggcctgaaaccatagacaccaaatacacagggcaaggcagagcccagtggtcccttggggccatttgaggtcatccatccatccatccatccgtccatccatccatccacccatccatccattcatctatccatccatccatccatccaatatattgcctgccatttgaagtatctgactcaaataatttgctcttgcctgtaatcctcccttctttgacaacccatgcagatcctcc

SEQ ID NO: 635156 - DNA, 498 bp, Homo sapiens
cttggtgtttgtctccccagtggctctgctctctcttctcaggaccacctgccccccactgagcctctgtctgtagttttggggccttcctagacttggcttcatacacaccctgctgcctcaacctttcaatgtcatagcattttcacagtgaatgrcactttggaaatcacctagcccaaccctggaaaaagcagtgaagaaggacccagaatgtttgggttctggctgtgttcctcccacagtgtgacctaggtcaagtcacttggcctcgcttacattttcctcatttccaaaataataacacatactctgcctgtctcgtagaattgctgaggctaatcaaaaaatactgtaaagcacatgtcagacaggaggaagatcattgatcagttttctaagaggagaaactaatgctcagagagattcaggaacttgccaaaggctcatagcttctcaaatcactgaatgggtgcctgctctcagggatgtgtgcat

SEQ ID NO: 635157 - DNA, 555 bp, Homo sapiens
tggagggtccctacaggatttttttaaggacaaagagagaaccagtcctgtctgggttaacagcccatctgctcctcaggagaccctcagcttcaggccagcctggctgacagcgaggatcttggggaagaatctagccctgtggtggcccgaggtcggcgggaagggtgtcctctgtgaaggactcacaaaacggccactccggggttctggcagctacatctagtcatcatgtgagccatctgctcttggtatccagcaacacattgatccacatgcttttgacaccctgctgggaggcttgggggtgggaagggtggaccgaggccatccaagccctggcctaaaagtggcctgctatgtgrtgggggaaccttgaccctcaaaatagaaggagctgcaggggctaattcaggtccagtgtctgatagcaggcagcagctgggagaggcagtgtggcctcatggttagggtgcagaccctgcagccagaacctgggggttgcaaaacctggctctaccgctcactagccatggaacactgggcagccactga

SEQ ID NO: 635158 - DNA, 562 bp, Homo sapiens
atacacacatgcactcatctatccatccattcacccattcatacacacatgcacccatccatccacccacccacccatccacacacacgtacccrtccactcaaccattcacccattcatacacacatgcacccatgcacccacccatccatacacacatgcatgcatgcatccatccatccatccatctatccacccatgcatgcatccatctgctcacccatccacccatgcatgcatgcatccatccatccatctatattctgtgaaaattcaggcctggactaaggactgtggaggtgagggcaagaagaaacatgctgtctctgccccctggaatctccactcttattgggataagatgtgtttctcattgaaccccagctgtaccctctgtatcctcagacagcaccagacactctggtttataacatgccataagcagtctccgtctctgggctggaagttctgcaacagaaggtatcatatctgttttgtccagcaatggacattcggctcctaagccacagtaggtactctgtgaatctttggcaaacttgaa

SEQ ID NO: 635159 - DNA, 503 bp, Homo sapiens
cagacttctaaactcagccagtttggcccacccacactggcaatgctgcccgaarggagacagaggaagaaagtccacgctgatgttctcagatgttctcccgggataactacttccttgtgtgcaatctcagcaaatggacaggtctgtgaggagtctccttgggtctcctgactcctcaggatgctgccatgtgctggatcaccattatcctgcttccgggaaagtctcttaacctccacaggccttacttagtttcctcacctatcaattaaagagggcaattcctgtcaaccttcctccaggctctgggacggccagtgtcttcaggttggggagatgccttaggaaagctctttgcatggaggcctgcaatctttattgcttattatatattatttatttagtcttaatttacaattgcttgatttccagaggatcttagtgccatggggacagaaatgtgctgcccagtcctcaataaagaatgcttttcctgccat

SEQ ID NO: 635160 - DNA, 604 bp, Homo sapiens
tggagtgctggcagagtcaaaggccactgtggaccacatttaaccgggttccttcttcagctcgcctctgccatccccctttctaggccagctgggatgaggctccacaaggggccrgctaagtcgcgcctgctctttctgtctgctcttgatcactgtcagctgcctaaagccaagcgcgagacagcagccctccccagcggagctgagctccctgaagataagatgaatgtctgcaggccacagagctgagatgttccgaaggaagtggaagaggaggaagaaggaataaacacccatcacattaataagagtttgggagaagtgaggggctgaggccaggagtctccagatggtgtttagtgaagtgacagtttgatgcctaaaaggaaaaatggaactgtggtatgctgggagcttcgatcttcatggggtgggggtggggatgtgggcgcatgaaacctggtgtgaggtctgtacttatacaagcctgaccagagcccattctaggtcccagcagaaagggcagacaacttccaggatgtctgcttagggactcccacaaagtgggtctggtcccaagggttcatgtacccatgcagcc

SEQ ID NO: 635161 - DNA, 538 bp, Homo sapiens
taagacggtaaccacgaactcgggagcagttcgagatgccctcaaatgctccctcattcagacagcatctgcaggcacaccggttaccatttcctgagggcttcctgcccggggtgctgtgctaaaagctcctcgccttgcagtgtcttatcctctagagaccctggacagagctggtatcatattcattacacagatgtggaaactgaggctggggtaaatcaagcaggctgcctagggtcacacagcaagaagctgcagaggkgggatcaagagccagggctgacctctgccctctgggggagtttctgttattcctgtttgcttagggggacaggtggccccagcacttccctggcaagcagctcaggctatacagaggctttggttcttcacttcctaggctgcctgctcaggagaacacacaattcagaaactgttcctgcagccctttgaagggatggtcagaaatagaggcgccttctccccatgttggagggaatggctggggctagagggaagtcggggcacttctgta

SEQ ID NO: 635162 - DNA, 538 bp, Homo sapiens
taagacggtaaccacgaactcgggagcagttcgagatgccctcaaatgctccctcattcagacagcatctgcaggcacaccggttaccatttcctgagggcttcctgcccggggtgctgtgctaaaagctcctcgccttgcagtgtcttatcctctagagaccctggacagagctggtatcatattcattacacagatgtggaaactgaggctggggtaaatcaagcaggctgcctagggtcacacagcaagaagctgcagaggggggatcaagagccagggctgacctctgccctctgggggagtttctgttattcctgtttgcttagggggacaggtggccccagcacttccctggcaagcagctcaggctatrcagaggctttggttcttcacttcctaggctgcctgctcaggagaacacacaattcagaaactgttcctgcagccctttgaagggatggtcagaaatagaggcgccttctccccatgttggagggaatggctggggctagagggaagtcggggcacttctgta

SEQ ID NO: 635163 - DNA, 538 bp, Homo sapiens
taagacggtaaccacgaactcgggagcagttcgagatgccctcaaatgctccctcattcagacagcatctgcaggcacaccggttaccatttcctgagggcttcctgcccggggtgctgtgctaaaagctcctcgccttgcagtgtcttatcctctagagaccctggacagagctggtatcatattcattacacagatgtggaaactgaggctggggtaaatcaagcaggctgcctagggtcacacagcaagaagctgcagaggggggatcaagagccagggctgacctctgccctctgggggagtttctgttattcctgtttgcttagggggacaggtggccccagcacttccctggcaagcagctcaggctatacagaggctttggttcttcacttcctaggctgcctgctcaggagaacacacaattcagaaactgttcctgcagccctttgaagrgatggtcagaaatagaggcgccttctccccatgttggagggaatggctggggctagagggaagtcggggcacttctgta

SEQ ID NO: 635164 - DNA, 610 bp, Homo sapiens
aagcttcgatagagatgtcactgtgcccctttgaatgccaaagaaatggaaactcggagagcagtaactcgactgaggttagatacacccagattggtcatatgctcaagccggccacgcttccttgactgcrtgctccctttatggaagtaaataaaaagatcatctcttacatctccctcattttgcagatgggaaaactgaagccctgggacattactggctaatgttttcttaaattatcacacactgtcttgtatggaggatctgaaaaaacacacacacacacacagagatgtgtacacatttatggaaacaaagagataactcacacagacacaccctcatacagatacgcacatacatagagattcaaaaatcagtacacacagacacccataggaacacactcagaaataggcattcatatagatactcatatatgcaagcacacacacacactcaaaaatgcagacacattcacaaacacattcatagacacacacatatagaaacattctggcacccataaagaagtgcacatagagatacacacacggacccagatacataccctcacacagacacacatactcacataccactcctt

SEQ ID NO: 635165 - DNA, 377 bp, Homo sapiens
agccaggccatccccaagcctggccccagcccacctctggctccagcgygagtcattttgctactaggcagcaggaggaaggccagtcctacctgcccaggagtcctgggatctcaggcacagatctggtggttacccattcgctcatctggaggccccaccactcttgcccctgaggacactacccgctcctcacacccaagctgtgtgctttgcccaatgcatctgcagcaagctgctgttgggcacgggtgcccttattatgcccggtcttcctgcagctgaggccagaccctgacccttcccagcctctcccagaacacatgtatcagaatctcctgggattctggtgggaaacgaagctcctgacctcaacc

SEQ ID NO: 635166 - DNA, 403 bp, Homo sapiens
gaattcagctacttggggtgcaggcacaaaagccaggccatccccaagcctggccccagcccacctctggctccagcgcgagtcattttgctactaggcagcaggaggaaggccagtcctacctgcccaggagtcctgggatctcaggcacagatctggtggttacccattcgctcatctggaggccccaccactcttgcccctgaggacactacccgctcctcacacccargctgtgtgctttgcccaatgcatctgcagcaagctgctgttgggcacgggtgcccttattatgcccggtcttcctgcagctgaggccagaccctgacccttcccagcctctcccagaacacatgtatcagaatctcctgggattctggtgggaaacgaagctcctgacctc

SEQ ID NO: 635167 - DNA, 403 bp, Homo sapiens
gaattcagctacttggggtgcaggcacaaaagccaggccatccccaagcctggccccagcccacctctggctccagcgcgagtcattttgctactaggcagcaggaggaaggccagtcctacctgcccaggagtcctgggatctcaggcacagatctggtggttacccattcgctcatctggaggccccaccactcttgcccctgaggacactacccgctcctcacacccaagctgtgtgctttgcccaatgcatctgcagcaagctgctgttgggcackggtgcccttattatgcccggtcttcctgcagctgaggccagaccctgacccttcccagcctctcccagaacacatgtatcagaatctcctgggattctggtgggaaacgaagctcctgacctc

SEQ ID NO: 635168 - DNA, 451 bp, Homo sapiens
gtctccctccaacatgaaaggacatagcaagaaggcggctgtctgcaagcccagaaaagagccctcaccagacactgaatctgctagcaccttgattttggacttcccagcccccagaactgtgagaaataattgtcttgtttgtatgcccctcagtctgtggtttttggtatggcagcccaagttgcctaagacaacctcactatgctgatgtggagactgaagcctgaaaggtcaagtgattgactgtcagtgaagagtgggttggttccagactaaatgatgtgactggtgttccagatgtcagtgttamcccttgaaatggaccgagtatccatggtggggcaaggggcttggcaaggcaggatgaaggtatgtagaagactgggatgtgatcctgtgcccaggatgctgacagagtagatagagtagatacagtttaagcagctgt

SEQ ID NO: 635169 - DNA, 514 bp, Homo sapiens
cacctctggctggggctggacttggtgtccagacttgagatgsacatgctgtgggtgtccttacaagctgctcaactgttctcaaggtgccccttggggaaggaggccttctgggatagtaagtcctgcatcacagcctcttcttaggacctgctctgcgtagtagctgccagcactctggtggtcccttcttcttacctgagaggtgttgcctcagcaagtccttttaattgtgatgttttactaattagtttttaattatgttaatttattgtacatgagccctgaggttttcaggcactgggctcactttggaaactggaataggaagttgtatttattacacacacaatgctatgggtaaatgtcacttcagcagggccacgatttctctgataatgccattagatcaacagtttctacctgggctctctctaatcctaacattccccactgcctccaggctcctacacaatccttcagataatgcaatgcctccaggctgtgcatgtga

SEQ ID NO: 635170 - DNA, 177 bp, Homo sapiens
aggtatgtgtgatccacacatcattaaagggcagctttaccccgtgggggtcaatccaggccatccttactcccaaaaaagagccacctctcctcctgaagaaatgggaaaccccggctaacaaggataaaaccacaratcctcccaggctggtggcaaagggcagggtaaaggtca

SEQ ID NO: 635171 - DNA, 528 bp, Homo sapiens
attttctaatctacttttctcattttwcgcctttggcaatgtccagagagttgaggtgacttgttcagggttagatagagaatgtagatctgtctctgtctttctcacgtgcacacatgcacatccacactcactgtctggtaatggtaatggatggctgtttcctctctttttctccccctctccatgtgcctcctttcctccatcagtctgtctctctttcctcctctccttctgttctgtggtcctggctggcagctgaggatggcacagggcgtgcagaggctagctcccagggaggctgccccagcagctggctgtgccccaactcccccctcctccctgagttgggaaatggaggcacagtgtgttccctggcttccctattagtcaggaacctaagggagcactacctcagtcctggggaagagcaaagaggaaggacagatgactctgtttgcaaccggatcccccttccctggctgtctccaagtggagctgactttctcctaggggaggaaatggggt

SEQ ID NO: 635172 - DNA, 618 bp, Homo sapiens
acgtgcacacatgcacatccacactcactgtctggtaatggtaatggatggctgtttcctctctttttctccccctctccatgtgcctcctttcctccatcagtctgtctctctttcctcctctccttctgttctgtggtcctggctggcagctgaggatggcacagggcgtgcagaggctagctcccagggaggctgccccagcagctggctgtgccccaactcccccctcctccctgagttgggaaatggaggcacagtgtgttccctggcttccctattagtcaggaacctaagggagcactacctcagtcctggggaagagcaaagaggaaggacagatgmctctgtttgcaaccggatcccccttccctggctgtctccaagtggagctgactttctcctaggggaggaaatggggtttcctccttgacactgctccttcctgaatccttttctctagcccaagccacatagcctccagttcaactacccctttagggaagatgcaatgctatttgcttcatatccaaaaagcccagggaaatgctgcctgctctaaccccctctaatcctggtattctggtgctgaagtgtggctctcaatcctaaaccagc

SEQ ID NO: 635173 - DNA, 569 bp, Homo sapiens
agaatatttctatttttgtcttaaatatcctagccaagaaagccttatgaatactttccaaatcaagtgctggcattgcacgatgcttcctcattgatggcaggcccatttcattgttttttcacttcttggctctgctttccatggcagcagtgccaagtctcagcttgagggtgggggagagggttgaccctgatgcagaaccctgtgtgcctccctttcttggacaagagctccttcctttcttcttgcccatgactgtcatacacgatccccactacaccaccctcatcttagacttttcaaccttggaatgctgtaaatgatgactggtattttttctcagtaaggtttcctcctgcccttcatcctgcttctgcaccattttccctccatccccatcatcatccattctgtgtctagtcattcaagtcacttgaatatcaaccttccttgaatgtaaaagagaccctctcatgtagtagattctagaccctgctagttcataaggaccatgtcactctcacttaccactgtgtytgggcacttgcacaggggcctggcacatg

SEQ ID NO: 635174 - DNA, 318 bp, Homo sapiens
tgacaggaacctcaaggtcccatgttaccactgtgtagggatgggaaaaatgctgcagcctgggatggtcgggggaaaattaaataggtggacaagagataatataggtgctagtcatgagacaaaacagaatgacaggaagggagggagggagaagggaagggaagagggaggagtcaggcaatggaaaggacataaagaagaaagagaaaaggaagggaagaggaggggaggggaacaaaggggaagggaggggaggggagaagagggaagaggagggaagagaaggggagakgatggaaaggagggaaaggaaag

SEQ ID NO: 635175 - DNA, 531 bp, Homo sapiens
agccatggtgagcagaccacagcccagcacccctcccacacacattttaatcaatttggtgctttcttgtcaagaagacaagctatttgcttcctgaagatcagatggtgatggatgaaatatagggaataattaaattagcagtgtaatggtggtgcaaggctcaattaaaamaatatttccattgtcataaagtctagccataaattttaggagccctacattccggtggcctgcagtgcttggcagcccgactggctgccctgtgggtgtggactctgatctgatctagggaggcccagggaagggctgggctgcttgaaggagattggtatcagtaatttgaatgtctcaccatgccccacctggtccccatctcgtcacatctgagcaagacagcgacagcctgagagcagcctctggtgcctgctccatgtttcaggtgcatctccaactctcaaccatagtgacccctcatttcctctgtgtttcttctcactttaagccaaccatcaggaacttggggtgggg

SEQ ID NO: 635176 - DNA, 579 bp, Homo sapiens
tactttcagctgttagtcaaggacccctcagatgatgggagaagtggagcagattaccttgaacaccagggccagagaggatcagagcctctagttgtttgagatgggtcagggtacaggaaatgcagaaagaggtaccagggacccagtgctctgctgaccagtagaccagagagatctgtgtctccacatttctagggacttgccctgagcatctgcgtttgctggacttggtagagccatcacctcagaagtcaccatcccacacctctgtcagaaggtatacacacacacacacacacacacacacacacacacacacacacggcaccacacagaagggaagagggacaaaattagggcctcatggacccatcagaggacaacacaagagaggtagttaggactgtaactgctggagcaagacaaggcatgcagaagttcatgaacccttcagggaggctccatagaggagggagcactgsggattggcctgaaagtacaggttggataaagataagcagaaagtgctagggagggtattccaggagctggaaccaggatgagcatggacaatct

SEQ ID NO: 635177 - DNA, 575 bp, Homo sapiens
aaagaggccctggagtgagtgaaagaatggagacatcaaatccattccataagaatggtccacgcccctgcccagtagctctccatgcctttctctttggaaagtaaagctcagaccagaggaaacccatattgctgccaatccatggacacacatttgctgaacacctgctggacacagaggagcctgtaagaatgaggctttctccaactctcagtttgctcacactgtgcctgggagtccatcccacctcccagatgacagayatggattgaaagagaaggtcctgcatgtggcagagtagggatggaccattagagttggcagaactgggagacactttctagaatgggggataccacagagttttccttggaagacaaagcgacccatattgaggcagggaacaaagggctgttgttccattctcagttcccgcagcagcaccacacatgactggaccaggtggttggtggatgctagggaaggtcatgggtttcaactcttctcccaaacctctagagaaggcacttttctcactttcgcctgggtctcctgtgcccctgagatccacc

SEQ ID NO: 635178 - DNA, 483 bp, Homo sapiens
acaggggctggggccatcgctggctacgtgggaggtgttcctctgagtacttgttctgaaatgtagttctctaccttgactcctgacaacctaccttctctggttacaaggaccctctatgggtgtggccaggagagaagagcctgaaagctgggaaggtgcatgtgtaagtctgtgtgtgtgtgtgttggggagcatgtgtatgtgcctctgtgtgtgctctgtatgtctgtgtgcattttatctgcctctttgtgtttgctggtgtgtctgtgtctgtgtgtgtctatagtctcattgtgtgtgcatgtctgtgagtgtgtatgtgtgcctatgtgtgccagcgtctttgaatacctgtgtgtttgcatacattctgtgtatgtttgggtgtgtctgtttcatgcagcatctgctgcatgtctatgtcagaggtcttggagtttccaagtgggyagtgctacctcatgcagggactgcttc

SEQ ID NO: 635179 - DNA, 440 bp, Homo sapiens
gtgttgtctgatttatttcctctcgacgctctaagaaggatgcggttgttaataacaataatgccgcccatcttacagcactctctgcttttcggggcattttaaaatccattatcctatttaatagaattgtagactcacagggaaattgtaaagtcgggggaatttgtccttggccacccctatggccctctctgtgcctgccccctccctgggctccctggcctcccttctgtgggggtggcccagccctgcggagccactgtcgggccataccccacctcctgmgacccaagcaacaagcaaggggtggcagagaaagcaccttccgctcctggggtgggcgtggggcgagcagtcctctcgtagcctctgtccagggagtgctgctctccagaggaggggtccaccatggggaaagaactggggagagggtcaac

SEQ ID NO: 635180 - DNA, 590 bp, Homo sapiens
tgctcagtctcaggactggtaaccatcccgccacctctgcccagtctttctctgtggtgtacacgccacttcctgcctctacccttccttcgaagaggggctctgccccgggatgcaggagactgagaagatttagagaactagcagagagatgtgtacaccttaccaacaaggccagcaaggcccatctttgtgttccaaaatgcaggggaagccttctctctataaccatcatttaattcatttataaaataggcctttagctcaacaccagagggtccctaagattgctttcagttttaagaacctgtggctatgttcttcccgctaaaagcaggagtcccctctctacctgttgagggaagagggcggtgggctttggctgtggagggagagtgcctgtgakatattagtgggggaggtcccattgtctctgtctgtccccttcacacatcatttccatcacttcaggccaggcatggggtggtggtggggggctgggctggcccccctccagccgggagtggaaaaatccatcacgaacctaacatatattttaaaataacttacatgcataacacccccacgct

SEQ ID NO: 635181 - DNA, 565 bp, Homo sapiens
ggggaagtgggggaatggggaaagccaggaattcaaggtgggcctgtctaggagcgggtgaaggagaccagtctgaacaaaatggaacgtctgggagagctgctgatgtgtctatcatccatccaagcaaaggtggaaggtcagacctcactttgttagacctcaggaaagacagcatggtttattgaaaaaagaaaacaaaccttaggatctaatagacctactgcttactcttctttggacctgggccagtttccttacatctttgtgcctcactttcctcccttacaagacagagaggatgatattatctgcagaactgctatgggggttaaaggcaccagtgtacataaagttgggcacacgggaaactctccgaaaacattgtccctacccaacaacatcactccagggagagggctgctggatatttactccagttcctgccargctctttttagaatgaggcaggttttgccagcccagcatgagtgagcagacatggcacctgcctggccattcctgggtcccatcacttcatgggctgttgctggatgagacaaat

SEQ ID NO: 635182 - DNA, 550 bp, Homo sapiens
tctctgcaatgattcatcactcaggtgccttcttcctgcccccacctcatcacgtcccaacaaggcactggctcccaggcgactctcagcaggggaggctgcaccctgtcagttcagcctcagttgacaccccagtcctcagcactgtagcccaccctagcgtgtcttccagagagggtcagagcccygtaggatgccacatccccaggcagagcctggcaagaccccagaccttgagagagcctatagggaggagaagaggtgaactagtggatatgaggaataaacccaggacagagtggtgtctccctagggttacagattggagcaggtggtgggcactccaggacccccgctgcagggcccgcacctctctgctcacctctctagggaggggtgagctggaggcagcaggaatgacttcacatttttgttgctgtagctgctgggctgaaaatagtcctttctcgggcaggctggctcagggtgtgaaaagctccgttcccagggagcggcaggaaccagccagggagaaaaattaaccacaggc

SEQ ID NO: 635183 - DNA, 611 bp, Homo sapiens
gcaaattatgtctgttttctcagagcagtgatgctggtgggattagggcacagtgagctctagcgtgcgggtctgctgattcactgtttccatgaccatcgtgtgtgctggggtggggttggagggcagagcataaaacctgagttatctgggtggataggaactggtgttgtcctaaagcaccaggatagatgacgagcagggccaagtccacacaagcgcgtccacaagtaggtgggcaaggactgcccctcctcagaaaccacmcaggaatggggaggtaagagctgccttcctggtgaaggctgcaaattatgtctgtttggggaagatatgaatctgtgtctccaggggtattcctccaaagcttggcgaggtgagcccttctgctgagcagggagccaggtatcttcaggctccaacacgtcccaaaaggaaccagaaggaccctcagctctgaggtttgaatagtcactctggagagcattctggccatcccatgggccagtcacctcggctgccagcgcctatcctccctctccccagctccctgcggggcatcagtccccaccttccagtgcaggctgacctttgctgagaacctgctcttg

SEQ ID NO: 635184 - DNA, 561 bp, Homo sapiens
atacacacatgcactcatctatccatccattcacccattcatacacacatgcacccatccatccacccacccacccatccacacacacgtacccgtccactcaaccattcacccattcatacacacatgcacccatgcacccacccatccatacacacatgcatgcatgcatccatccatccatccatctatccacccatgcatgcatccatctgctcacccatccacccatgcatgcatgcatccatccatccatctatattctgtgaaaattcaggcctggmctaaggactgtggaggtgagggcaagaagaaacatgctgtctctgccccctggaatctccactcttattgggataagatgtgtttctcattgaaccccagctgtaccctctgtatcctcagacagcaccagacactctggtttataacatgccataagcagtctccgtctctgggctggaagttctgcaacagaaggtatcatatctgttttgtccagcaatggacattcggctcctaagccacagtaggtactctgtgaatctttggcaaacttga

SEQ ID NO: 635185 - DNA, 591 bp, Homo sapiens
gggagctaagctatgaggatgcaaaggcataagaatgacacaatggactttggggagtcagaggaaaaggaggggaagtgggtgagagataaaagactacagattggtgcagtgtacactgctcaggtgatgggcgcaccaaaatctcacaaatcaccactaaagagcttactcatgtaactaaacactacctgttccccaataacctatggaaataaaaaatttaaataaatacwtttaacttccaaacaccccatctccaaataccatcacattaagggttaaagcttcaacatacgaaactgggtagggagtggggcacagaattcagtttatagcatcccccaggtcagaagcttgtgggtcagtctagaattcctccttctcatcaccccgctcaatagtcagtgataatcatcaagtcccaatgatgcatcctaaatatgccttgcattcttctcgtctccatccctgttgtcaatagctcagtacaggccttcattaactcttgcctggagttttgcaatagccttctacctgggctccttccaatctcatcgttgttaaatccatcctccaagtagcagctac

SEQ ID NO: 635186 - DNA, 506 bp, Homo sapiens
ttacttatagaatatgcaaaatgtttgctgtctgatatttaagtttaaacaatattatttgaagggaagaacttctaaaaatcaaatccaatcaagggagaaagccaaataaaatatacagcrgtcaccccaggatatgttggtcattggaaggaaatacaaatgaaacttgaaagtccttctctccacctcttttcatgaattatcatataatgctcactccttagtcttcccagttctcttcccaagaacccaaagcaaaagctgtagcaggagtgatagttcaccgcacatttttcttttgagagggggagatgtaagaaatagattcatgtacataagtttcacaaagatccacttggctaggattttttaagatgctaaatgcttggccgggctcacgcctgtaatcccagcactttgggaggccgaggcgggtggatcatccgaggtcaggaatttgagaccagtctggccaacatggcaaaaccctgtctctactaaaa

SEQ ID NO: 635187 - DNA, 506 bp, Homo sapiens
ttacttatagaatatgcaaaatgtttgctgtctgatatttaagtttaaacaatattatttgaagggaagaacttctaaaaatcaaatccaatcaagggagaaagccaaataaaatatacagcagtcaccccaggatatgttggtcattggaaggaaatacaaatgaaacttgaaagtccttctctccacctcttttcatgaattatcatataatgctcactccttagtcttcccagttctcttcccaagaacccaaagcaaaagctgtagcaggagtgatagttcacmgcacatttttcttttgagagggggagatgtaagaaatagattcatgtacataagtttcacaaagatccacttggctaggattttttaagatgctaaatgcttggccgggctcacgcctgtaatcccagcactttgggaggccgaggcgggtggatcatccgaggtcaggaatttgagaccagtctggccaacatggcaaaaccctgtctctactaaaa

SEQ ID NO: 635188 - DNA, 597 bp, Homo sapiens
attagaacccccaaatccattgctctctgcagcatcagtgcagtagtgtagactctgtgatgggagtcctatccgggctgaacaygccatcaaggcctgtcttctgagttgacacacaggggagcagcctgagtctctggaggagcccaaaaccctgaggcagcccttctgaactcccctgcctgtacagcctgcttcatctcccagagtcacatctttctgtttccctcatcccttttaatttcatttttgttcttttgtggtttttttgagacagaatctttctctgtctttcccaggctggagtgcggtggcacgatcttggttcactgcagcctctgcctccccggttcaagtgattctcctgtctcagcctccccagtagctaggattacatgtgcatgccaccacaccctgcttatttttgtatttttagtagagatgggatttcaccatcttggccagggtggtgtcgaactcctgacctcagatgctctacctgcctgggcctcccaaagtgctgggattacaggtgtgaatgaaccattgcacccagcctcatttcatttttgacagggtttcactctgtagtccaga

SEQ ID NO: 635189 - DNA, 597 bp, Homo sapiens
attagaacccccaaatccattgctctctgcagcatcagtgcagtagtgtagactctgtgatgggagtcctatccgggctgaacatgccatcaaggcctgtcttctgagttgacacacaggggagcagcctgagtctctggaggagcccaaaaccctgaggcagcccttctgaactcccctgcctgtacagcctgcttcatctcccagagtcacatctttctgtttccctcatcccttttaatttcatttttgttcttttgtggtttttttgagacagartctttctctgtctttcccaggctggagtgcggtggcacgatcttggttcactgcagcctctgcctccccggttcaagtgattctcctgtctcagcctccccagtagctaggattacatgtgcatgccaccacaccctgcttatttttgtatttttagtagagatgggatttcaccatcttggccagggtggtgtcgaactcctgacctcagatgctctacctgcctgggcctcccaaagtgctgggattacaggtgtgaatgaaccattgcacccagcctcatttcatttttgacagggtttcactctgtagtccaga

SEQ ID NO: 635190 - DNA, 383 bp, Homo sapiens
tcctgcttgtagcctgagtcagatgatggtgatgccagccgtccctgacgccaggacgagtgagacagattctgtccctgctgaactcctgcttcctgggcccatcagtagatacttgtggagaggcttggctgccttccctaatttaaatcccctactcttaccatgcctgcggttacatttctgtttcagggatgtttttagatttgcccatttctatatgctttcactggcaaytcactaaggtcacatcctccaactctcgctttcacctttttggtcccaaagaagaaacctcaagaatattatcactgatggtgaagagatgtccatggatgacaactatgaggcggccctagagaaatgctagtcctaactggagc

SEQ ID NO: 635191 - DNA, 558 bp, Homo sapiens
ggaggctaagggctggtgagggtggaggtttccagaaggccttttggcctaaccgctagagatgttaacagtgttatattgttaagctagtccctgtagacttgtgccagggttgttggcaggagggttgtaatgaaaagcaagtggagcgaactatatctttagagttctttaagtaatggaggccagggtagagttatcttgtgatgagtaatggaatacatcacggggttgtgtgtgtgtgtgtgtgtgcacgtgtgtggacacatgcacaccccatctccaagtaccatcacattgggggttaaggcttsaacatatgaaattgggtatggagtggggcatgcaattcagtttatggcatctctcacatcagaaacctgtgggtcagtctagaattgttccttctcatcaccccactcaatagataagtagatcattcagctggaacaaataaatgttccttggctacagtcaaggcgatacccagctggtgatgacagggctgtgacagtggcagcagggaaatggtgaaagaactggaggccaccaataagg

SEQ ID NO: 635192 - DNA, 662 bp, Homo sapiens
tggtatcattgctgacttgtgagtgggttttttgtgcaacattttccaactttttaaaaagttttttaattytataatagttgtggtaatattttcatccaccttcttcctgtaaataattgtatctgtcatttactaatttgagaagctctttccgtgtaagtggattgtttgtttctctggaactgcaactggtttaaccaacatattttttaaagaaggcattttgaattagtttttaatcttctttggtatcaatatcaagtttcatactgccatggtcatagtttgtgtattctgcaagtctttgaactgtagtaaaatttattcttgtgacataagctttcccttgtcaattgcctttctcttcttcctgttgaggatgatggtggtaagaagaatgctttctaaatggttatgtcttttatttgaaattttaacgtgatatgtggataatgaatagtattgttctggaattttccaacataaattgaatatttgatctttatctcattatttaaataatacagaaataattatatgcatacaaacccacagttagataaaggaaataagttctaatgtttaacataggatgactatagttaacagcaatgtattgtatatttcaaagtagattgaaggaggacttgaaatgttct

SEQ ID NO: 635193 - DNA, 640 bp, Homo sapiens
aaagagcactagggataacaggctattcgggtaaacttgaaggggtaagtggaagcctaatttagaaggcagaactgaagtaggaaatttcaaactgagaataaatgtagaaagaccagaggtgctaagcagacactgtgttgaagaaatccactgtggtcttacatggtggatggtagcaacagaagaggctagaagggtagactagactcagatggtagaggtagaatccatgggctaaggtattaagctagtttctttttatatatgctcagatcagtaattagccagactctaggaacttccttccttcctttcttccttccttcctttcttttcttttattctctccttccttccttccttccttccttccttccttccttccttcyttctttctttctttctttctttctttctttctttctttctttctttctttcttctttctttcctttttttctttttctttttctttctctctctctctctctcatctctctgtttactctctcaacgaagctccaccttggcctccttaagctccaaaacctccgtaagctcaatcagtgacagtccttgtgctctggttagattccatatccctgaacttcaacctgaaaacttccatcagtaagta

SEQ ID NO: 635194 - DNA, 530 bp, Homo sapiens
tccctgggtttccttgggggtcaggagtgtgtatacagctctttccgctgcttcttctactttgatatttcacttggctctctaaatttgtttcagcactagataaagttaaactcttcttccacgatctggattttcaggttccccagtgaggatatgtgttcagaggtagactctccccctctcacactctgggcattcacaatttttcagctgtctcatggtgtttgcagcagcaagctacttctttcaaagggtcagtgaattcttttggtttttctactatgcttctgtggtagttcttgaagcaactgttcacaatgtgagtttccacatgctgttctgtctgtctaagtgggagctacmagttattcctgcctcctatctgccattttttttttccaatttgagttgggaatggtcttttaaatgtgttgttgaatttggtttgctggtattttttcatatctaaattcatgagagatgttggcctgcagtggtctttttgttgtgttcttgtctgattttgg

SEQ ID NO: 635195 - DNA, 578 bp, Homo sapiens
ttgccccagaccacaagcctccccattgagaaagcaaacagactcactgtttttcagtgtctcagggagcctgcagaggtaatccagtttcttcaaatggtctgtggattctctcagctttcctggtatgtacccacggtagttcttggagcagaatttcaggatgtgagtcttcatacacggctctgtccatccgagtgggagctgcaagctagtcctgccccctatctgccatcttaatctcaattcctaggttgttaatttgagatcttgctaactttttgctgtaggcagtcagtgctataaactttcctcttaacactgctttggctgtatcccagaggttttggtatgttttgtctctattttcattagtttcaaagaatattttgatttctgccttaattttattgtttatccaaaattctttaggaacaacttctttcatttctrtgtatttgtgtggtttgagaattcctcttggtattgatttgtatttatattccagtgtggtccaagaagatgcttggtatgactttcagtttttttaaattcactttatgactaaacatgtggtc

SEQ ID NO: 635196 - DNA, 561 bp, Homo sapiens
acatgtgcaaccacataaataaatgcatacttagaaattgtgggctgggcacagtggctcacgctgtaattccagcactttgggaggctgaggcaggtggatcacttgaaggcatgagtttgagaccagcctggtcaacatggtgaaaccccttttctactaaaaatacaaaaattagccaggcataggaggtgtgcacctgtaatcccagctactcaagaggctgaggcaggagaatcgcttgaacctgggaggcagaagttgcagtgagctgagactatcccactgtactccarcttgggcaacagagcaagactccatctcgtgaaaatagcaacattgtggtgctttaaagggaaaactgaaagtagctacaaatcaatataatatagagtctcaattcacttgagggagttgcaggaggtccctcttagaaaggtaggtgagatgttctaggcactggcatgaaaaatagatgggattcagaggtacggacaggtttagaggtccatttttaccctgaaagtaacttcgactcattcaggtgatcacttgaccacc

SEQ ID NO: 635197 - DNA, 561 bp, Homo sapiens
ttgtggtattgtgacttgccctatccgtagtggcctctccgcagctccgtggtataaaccaacagtcctacaatcatggtgaaagccaggagcctagcaactattggacaggcagtatgggtttggagctccctgaaagcaayattctcagaggtttgtggctatttgacatgtctggcagttccctgtgaaccccaacgctcacagcttttttcagatgatcttagtcagggcttgcttactgtgcaaagccatttcccccagtcatctgctgaaaacagtcagcatcgattaatacatcatagctgcctgacatggcaacgatatttagggcaaacaaaaacctaaacaaaacatttaaaaggatcagctgggggatgagatgtccatagacagctttgaaagctctgacaaatttctaagaatctagaaggctacatgtttgcatatagctgtggacatgcccagggaagtacgagaagactctaacaagatctccgatccaattgaccttgaggctgcacacacacaggaaatgaaggttaaggcagagttgtaaac

SEQ ID NO: 635198 - DNA, 591 bp, Homo sapiens
atgttgcttccagttatgatgcctggctggccaaggacctctggtaaattctctgcattctgtggaatagatttggtacgtgttggtgtagtgatcaaggtcatctgtcatctcctggatggctccaaaaagaaaaagaacagactttgaaacactagagaacttatgcagatagaaaagttgttcatcccaactctgacaaaaatatcaccaaaaaatgggctcatgtcccagttagagaacagtcactcctacctggtcttgtggccagatgaggactgtgttgaaattaggcacctgtccactygcacctgaagcttgaatgcgttcctctgctttatatggaaaacagtacataatctgtagcataaatctgtagcagctcaaagaataggaagagtcaagaccctggaaaaagcaacaaagcattcttcaataaattcacagactcttatggctgccagtgttggagtctgtacagcatattcaccaactggtatctgctcgaagagcttgagttacagggaatttgttactttcaaaggcaaccaaatatgcccttgttcagctctaacaatttttaaaaacatt

SEQ ID NO: 635199 - DNA, 634 bp, Homo sapiens
taaattaaataatagacatttcattatttgggtatcttcccataaaaatatattgtaggaaaatattcttgctaaaaaataaacaaaactgtgtgtgtgttttttaaagaggtgaacaagtttttttccaattcaaagcttatttaaaggttatgtataaaacaaggtaaaagggactaggactaaaaaaagatatgaaaaagctatttttaacaaaggtttttttaggtaaaaaagcttaaagagaaataattttatataagacagaatcttgtgtggtaaatttaatcctaaactaaaataagtggttgtttaaaaaagagggatgttcaggacaaaccagaaattccaagcatgtcatgaacagtcrgtgtaagtcacaataagaggatttctatatttaaaaagtttatatgatcaagttatcatattaagttttcatttgcttagaaaaaaactgagataaaattttttaattaagattattacatccatgtatcttcctgtatatgcttttaaagtccttctaacattgaatcacagagctttaactcctgcatctataaagcataccaagtcctgctaaattttaaacactgacagcaattaaagcctcatcttcaggccctgtaga

SEQ ID NO: 635200 - DNA, 609 bp, Homo sapiens
ccaatcttttccctccacacccctttctcagctctttaatcatcttagattgtaaatgtgaagcatgagagtagagaacatgagggctgaagtkgcaccagtctggatgggaccccaactctatgacttactagcaagttacttattgcctctcagcctcagtttcatcaactctaaaatgagaataggacctgcatcaacaggtggttttaaagattaaactgtataatatcttaaatgtctagcacagtatttgacatagaatgggctgtttgaagtataataacaattattgtatagcaataattggttgaatattactcaacaacttgaagctctgtcaggtgaaaataaaaggtagaattgttcactatggccacaaactgagaatgaaacatgagatcaccagggagatccatttctactaagcagaaagcaaacctttctattagtcagagaagatcaagggcagactgggttgcctttgaaggtggtgagttctctgtaactatagctgttcaagcagataccacttagtgaacatgctgtatacagaccccaaccctgccatccctgagagcctatgaatttatgtcaagatttatccgc

SEQ ID NO: 635201 - DNA, 609 bp, Homo sapiens
ccaatcttttccctccacacccctttctcagctctttaatcatcttagattgtaaatgtgaagcatgagagtagagaacatgagggctgaagtggcaccagtctggatgggaccccaactctatgacttactagcaagttacttattgcctytcagcctcagtttcatcaactctaaaatgagaataggacctgcatcaacaggtggttttaaagattaaactgtataatatcttaaatgtctagcacagtatttgacatagaatgggctgtttgaagtataataacaattattgtatagcaataattggttgaatattactcaacaacttgaagctctgtcaggtgaaaataaaaggtagaattgttcactatggccacaaactgagaatgaaacatgagatcaccagggagatccatttctactaagcagaaagcaaacctttctattagtcagagaagatcaagggcagactgggttgcctttgaaggtggtgagttctctgtaactatagctgttcaagcagataccacttagtgaacatgctgtatacagaccccaaccctgccatccctgagagcctatgaatttatgtcaagatttatccgc

SEQ ID NO: 635202 - DNA, 609 bp, Homo sapiens
ccaatcttttccctccacacccctttctcagctctttaatcatcttagattgtaaatgtgaagcatgagagtagagaacatgagggctgaagtggcaccagtctggatgggaccccaactctatgacttactagcaagttacttattgcctctcagcctcagtttcatcaactctaaaatgagaataggacctgcatcaacaggtggttttaaagattaaactgtataatatcttaaatgtctagcacagtatttgacatagaatgggctgtttgaagtataataacaattattgtatagcaataattggttgaatattactcaacaacttgaagctctgtcaggtgaaaataaaaggtagaattgttcactatggccacaaactgagaatgaaacatgagatcaccagggagatccatttctactaagcagaaagcaaacctttctattagtcagagaagatcaagggcagactgrgttgcctttgaaggtggtgagttctctgtaactatagctgttcaagcagataccacttagtgaacatgctgtatacagaccccaaccctgccatccctgagagcctatgaatttatgtcaagatttatccgc

SEQ ID NO: 635203 - DNA, 441 bp, Homo sapiens
aagcatggggagagtacagacttggcccaagtgccatcccacgtgggcagcccctgggcgctgccagcaaattacactcctcacagcgtttctcacttgcagggagatgtgtgcctctgcatctgcaccgccctctgctggtcggtgatgctgacacagcgaggagttccaggcttccagaataaaatcaactgctcaycactaaagaagacttgtattttattggcttttaaaacaggcagaaagtatggtcatgggtaacaatttagtgaaaagcctgcactataaaccaagaagttcgaatgtcatgtcctctgtatcagtccattctcacactgctataaagatactacatgagaccaggtaattgatgaagaaaagagatttaattgactcacacttctgcatggctgaggaggcctcaggaaacttacactcatg

SEQ ID NO: 635204 - DNA, 433 bp, Homo sapiens
aagaaaattgaacaaatgtaatggatcaatttaaaatattttatttcttaaaagccttttttgcctgttgtaatgtgcaggacccttctcctttcatgggagagacaggtagttacctgaatataggttgaaaaggttatgtaaaaagaaattataataaaagggatactttgcttttcaaatctttgttttctcttattctaggtaaggcatattaaaaataaatatgtaaagaagaaaaataaaagttgtcttcatggaagcwacttgtcttccttggttgtactgagttacagttatcctaggggtgaaacatgtgatgctgctaagcaaaccaaatgccctcagaacaggtgttatgtggggcatactattgtttgcttttgttgagaatcaggtggttaatttttgactgttcttgatttctaatgct

SEQ ID NO: 635205 - DNA, 376 bp, Homo sapiens
tctaaatttcaaaaaaaaaggaggcaggaatttctgaaataagaaaggatacatgtactttctcaactgtggtagagtacaagaagaaggtggcttccatgcaagtaaatttttaaaattagttaaaattttattcaatkgctgaaggccaaatcttagctaccatgagaatacagaacttctgggagcctcagacacaagagcaattccacctactcatgtatttttgcatggaccttccccaggtgccaacattaagtattagagacaagcagaaaaccagaaagtgcctccccttggttctggagggaatgtcatgagaaaaagacatgaagcccaactcctgcctggattctcttctcctataaagtaaaac

SEQ ID NO: 635206 - DNA, 592 bp, Homo sapiens
aaatgtttttaaaaattgttagagctgaacaagggcatatttggttgcctttgaaagtaacaaattccctgtaactcaagctcttcgagcagataccagttggtgaatatgctgtacagactccaacactggcagccataagagtctgtgaatttattgaagaatgctttgttgctttttccagggtcttgactcttcctattctttgagctgctacagatttatgctacagattatgtactgttttccatataaagcagaggaacgcattcaagcttcaggtgcgagtggacaggtgcctaatttcaacacagtcctcatctggccacaagaccaggtaggagtgactgttctctaactgggacatgagcccattttttggtgatatttttgtcagagttgggatgaacaacttttctatctgcataagttctctagtgtttcaaagtctgttctttttctttttggagccatccaggagatgacaratgaccttgatcactacaccaacacgtaccaaatctattccaagaatgcagagaatttaccagaggtccttggccagccaggcatcataactggaagcaacatt

SEQ ID NO: 635207 - DNA, 644 bp, Homo sapiens
ggggtctcactctgtcacccaggctggagtgcaatggcgtgatcacagctcaccacagcctcgatcctcaggttcaagtgatcctcccacctcagcctccaagtagttgggaggtcaccacacccagctaatttcttatttgtagagttgcggtctcactatgttgtgcrggctggtcttgaactcctgggctcaagaaatcctcctacattggcctcccaaagtgctgagattgcaggcatgaaccactgcgcctggactaccttcaacttttaataccatctgtatgggttttttccaagtttatattccaaacaataacctgttccattttattagataatgacaaactgtcttccgaagtgtttctactaatatatattcccaccagcagtgtatgagttacggctgctacatattctgcctaacatttgatactgacagtctttaacattttcctcaatctaatacttatgaaaacttccttgtggctttagttttcatttcctgatcactaatgtggttggaccattttttcatattcattggccatttgtgtgttacctattttggaaagtacctgattaaaccctctaatcagattattactcattgcaaatatgcaaataatacaagtgatacac

SEQ ID NO: 635208 - DNA, 644 bp, Homo sapiens
ggggtctcactctgtcacccaggctggagtgcaatggcgtgatcacagctcaccacagcctcgatcctcaggttcaagtgatcctcccacctcagcctccaagtagttgggaggtcaccacacccagctaatttcttatttgtagagttgcggtctcactatgttgtgcgggctggtcttgaactcctgggctcaagaaatcctcctacattggcctcccaaagtgctgagattgcaggcatgaaccactgcgcctggactaccttcaacttttaataccatctgtatgggttttttccaagtttatattccaaacaataacctgttccattttattagataatgacaaactgtcttccraagtgtttctactaatatatattcccaccagcagtgtatgagttacggctgctacatattctgcctaacatttgatactgacagtctttaacattttcctcaatctaatacttatgaaaacttccttgtggctttagttttcatttcctgatcactaatgtggttggaccattttttcatattcattggccatttgtgtgttacctattttggaaagtacctgattaaaccctctaatcagattattactcattgcaaatatgcaaataatacaagtgatacac

SEQ ID NO: 635209 - DNA, 606 bp, Homo sapiens
aaaggagaaacggcaggacaaattgaatgtggacataagaagagaggaaagagtctagaatgattccctggtttctgagtagaatggctgattaaatggtaagaagggtaatcaagatcaagaatataggaggagcccgggtgcggtggctcacgcctgtaatcccagcactttgggaggcccaggtgggtggatcacgaggtcaggagttcaagaccggcctggccaagatggtgaaaccctgtctctactaaaaatacacataaaaattagccgggcctggtggtgggcacctgtaatcccagctactcgggaggctgaggcagagaattgcttgaacctgggaggtggaggttgcagtgagccgagattgagctactgcactccagcctgggcaacacagcaagactccatctcaagaaaaaaaaaaawatatatatatatatatccacacacacacacacacacacacacacacacacacacaaacacacacgaggagtattgggaaagaggagggggcaaagaggtatttgtactatgtttgagtatacatctataatcttagagttgtcataatactattatattgaagagtttcaaaaa

SEQ ID NO: 635210 - DNA, 600 bp, Homo sapiens
tattggtaccttttatagttctaatgtctgtctcattcatccatgtgattaattttagtggaggtcattttaccaagtgtttaytttttctagagcttattatttcttgtttcctaaggggataaaaccccactatagtgtattgtttcctttaaaatagggaaacttgcttcctaatcattttctaacttttcctgactatgggaaaaacttgtcaatatctaagggtggtaaatgcttaggttaattgatagtttgtttccatgatatcatgaaggcaaaatggtcttttcttttggagtaattgtttacctagaaaatagttgaaaattctttcaaagatttctgaggttttgtagtctgaaacatctccttagtgataaaggattctttctttctctgtgctgaacttaagttctagtttgtggatgagagcgaggaaagagttactgagatgtgttcttactaatgaaaaagggagcacagggaaaatatatataattcgcatttattaacgtagttgagatccattatcttgaagctatatgtgttaaatttgaagtgttatttcctaatttattagaatatcttgtaaaatgt

SEQ ID NO: 635211 - DNA, 600 bp, Homo sapiens
tattggtaccttttatagttctaatgtctgtctcattcatccatgtgattaattttagtggaggtcattttaccaagtgtttactttttctagagcttattatttcttgtttcctaaggggataaaaccccactatagtgtattgtttcctttaaaatagggaaacttgcttcctaatcattttctaacttttcctgactatgggaaaaacttgtcaatatctaagggtggtaaatgcttaggttaattgatagtttgtttccatgatatcatgaaggcaaaatggtcttttcttttggagtaattgtttacctagaaaatagttgaaaattctttcaaagatttctgaggttttgtagtctgaaacatctccttagtgataaaggattctttctttctctgtgctgaacttaagttctagtttgtggatgagagcgaggaaagagttactgagatgtgttcttactaatgaaaaagggagcasagggaaaatatatataattcgcatttattaacgtagttgagatccattatcttgaagctatatgtgttaaatttgaagtgttatttcctaatttattagaatatcttgtaaaatgt

SEQ ID NO: 635212 - DNA, 579 bp, Homo sapiens
taggcactgattttatatattacacattgaactactttatacatatctgatttactctttatcactctgtgaaggattattctttattgtttagataaataatgttgtagctcaacaatgttaggtaatttgttggtgttggaggtagattttgaatccaggaatgtcagtgtcttgatcaactatgtcttactgcattctgcattctgctttttctatacttacataaattctatgtacatactgaggtgtaagttgggaaagtccatagagagaaagagagagagcacacgtgcatgtatttggttgtttggatgatgctgtaggtgagtagtagttaccatttttggtgacacaagagatggctaaatgtgactgtgtgttagaagggagaataggtgaaagacagatgagtagccaagggctatggggtagggatayaggaagccagagccaaggtggttaatagttaaatgtccaagctcagattaagtggacatgaagaagaggtgaaagtgagggagattatgaataggctgtggaagtcttgctagagatcagggaaaaagaatagcccaa

SEQ ID NO: 635213 - DNA, 564 bp, Homo sapiens
attgcaacagtattaagaggtgtggcttttgagaagyaattaagtcatgagggctcccggctcatgaatgagatttgcacccttataaaataactcaatggactgggcgcaatggctcacacttgtaattccagcaccttgggaagccgaggcgggtggatcacttgaggtcaggagtttgtgaccagctggccaagacggtgaaaccccatctctactaaaaatacaaaaacaaaaacaaaaaaaataaaaataaatagttgggcgtggtggctcatgcctgtagtcccagctattcaggaggctgaggcacgagaattgcttgaacccaggaggcagagattgcagtgagccgagattgtgccactgcactccagcctgggcaacagagtgagactcagtctcaaaacaaaacaaaaactcaaagttaaacagggcccttctcttttgcccttttatccctcctaccatgtgagaagccagcatttgtcctttctgggatgcagcaacaaggcatcctcttggaagcagagagcaaccctcaccagacaccaaacctactgg

SEQ ID NO: 635214 - DNA, 559 bp, Homo sapiens
aacagacatgggttatttgctggtaagtttgcatgtgtatttatgtgacacaggttggtagtgttatttgtgtgtatgtttatgtgacacgtgtttgttgatggtcaagatctacggaaactggggttatggagagggggctgctgtcatgctctgaggcctggtgtaattagagcctgtgtaagagtgaatgcctctccagtggagctataaaaaagacagcctgctctaaaatcatcttgagggaaagaaaagttgtcaggtatatcagtttgcattttgtccaattggatataatagaacacccaaatataaagacttaagcaaatggagattyatttatttttcacataacaagaagctgagaggtagcatttctcagctttagttcagtggcttattgatgttaaggctcatatctctttaattttcctggttcttttctcatggttgcaagatagctgcgacagctccagtagccatgtaaccattccaggaagggacaagagagaggaaagaagggcaaaagaggaaggataaagaggaagggttgacataa

SEQ ID NO: 635215 - DNA, 555 bp, Homo sapiens
ctaagttcttatttttactttaaaaattatgcaagtaactgtatttattgttagaataggagaaggtgtaacttagtaaaaaagaaaaaataggagagaaaaatcttaatttctttcctttactttactttactcttcatattttgatacatagatatttcccgccaaatgtgattacactatacattctgttttggtatcttctttttaacacttaccaatatattattgatattatttcttgtcaactagtgtacaagttttytcatattacaattattatacttatcttagcccaattccctatagttgtttatacttttaatagctatggtttatagcaccagttgaaagagaaactggttcagcagaaaacgtcacctatctttatggttgtttatactttatttttttgagacagggtcttgtcctgttgcccaggctggggtgctctagtgtgatcttggctcactgcagcctggacctcctaggctcaagtgatcctcccatctcagcctcccaagtagctggtactttaggcatgcaccaacacac

SEQ ID NO: 635216 - DNA, 543 bp, Homo sapiens
ccaagtctcacaggacattgcatcttggtagaccctttgcacccagagggccctgtcttcagtttcgcatgttcagggctgtattaaggcacctggcccaccagatagcatgggacctgggaaaagtgaatgggagtatcctacaggatatttcatcgatctattaaagaattcctttgcaattttccacaggggtgaaattgtgcttgaagaggtgaaaattgattcttaggggattgcagaaatttggatattgcaatggtttgtggtttgtcaggtagctcaatgctacctgacaaaatcatagtccttaatacttaatttctctcattagggagaaatttaatttcaaattgaaatttattaattaatttaaagtttaaatatttttttttcttcgtagaggtacaataatgaaaaagaaaaaaaaagtctgagaaacacggttctggagcacacatctcttctgtggcttwggaaactacccacgataaatattccttgatctccctccctcaggtaaaaccagcactttaaacatat

SEQ ID NO: 635217 - DNA, 628 bp, Homo sapiens
agcatgcacaatctttgttctatgttcctgagcatatagaatatagttacawgctttactatttttatttactaattttgtagttctgtgtcatttctggatcagcttccattgattaatcttactctatatgatggctaatctttacctatttctttgcatgcttggtaattttttatttgatgctatatattgagaattttactatatgggatgctgaaagttttatctattcttctataaatatttgaactttgttctagaatgcagttaagttacttagaaacagttgttcctttcaaggcttgctttcaacttttgttaggcagaactagagaggcctttaaggctaattttaccccactactgaaaccataccattccatatactctacttaaatgctctgtgaaattacaaggttttccactctggctggtttgaatacatactagttttagccttatgtgagctttaagcatcgttccctcggcttctttggatagttttttcctcatcattagctaatttcctcacatgtatccactgagctgtactcagctgaagacttgatggggagcctctgctgatctcttgagctttctctggaaactctgcaggcaatattct

SEQ ID NO: 635218 - DNA, 628 bp, Homo sapiens
agcatgcacaatctttgttctatgttcctgagcatatagaatatagttacatgctttactatttttatttactaattttgtagttctgtgtcatttctggatcagcttccattgattaatmttactctatatgatggctaatctttacctatttctttgcatgcttggtaattttttatttgatgctatatattgagaattttactatatgggatgctgaaagttttatctattcttctataaatatttgaactttgttctagaatgcagttaagttacttagaaacagttgttcctttcaaggcttgctttcaacttttgttaggcagaactagagaggcctttaaggctaattttaccccactactgaaaccataccattccatatactctacttaaatgctctgtgaaattacaaggttttccactctggctggtttgaatacatactagttttagccttatgtgagctttaagcatcgttccctcggcttctttggatagttttttcctcatcattagctaatttcctcacatgtatccactgagctgtactcagctgaagacttgatggggagcctctgctgatctcttgagctttctctggaaactctgcaggcaatattct

SEQ ID NO: 635219 - DNA, 605 bp, Homo sapiens
acacagcaacatctcattccctgagaagagtttggtcctaaaaccactcaaaacaaaarctgacagatgagaaaatgaaaggaagatctttatctatgttatttttgcttagcaagctcaataatgacaagtttagagggttccagtatgacacttagcaggtgctcagttaaatactgattgttagttctgctcccagtgaggaattcctggtaaggtgggagacactaggagatttttatctcatgcttggttcaaggtagttttcatttttcatttcgtcccaagattccatggtgctgtattgtattatttttaatttaaaaagagcaagcaatctaaatgtttaatcaaagggaacagtttggtaaatatggcatatctacttgtgggacgcccatgacattattataaataattactaagatcattatgaaaaaatattgtaatggtaatgggaggaaagcagaatgtaaaattacatatcaactgatattctaaacactttaacaattgtgtgcctgttgcacaaattctcagagatggagtacagagatttgagccaatgactggtgaaaggcaggcctccctgccctcaagagggg

SEQ ID NO: 635220 - DNA, 605 bp, Homo sapiens
acacagcaacatctcattccctgagaagagtttggtcctaaaaccactcaaaacaaaagctgacagatgagaaaatgaaaggaagatctttatctatgttatttttgcttagcaagctcaataatgacaagtttagagggttccagtatgacacttagcaggtgctcagttaaatactgattgttagttctgctcccagtgaggaattcctggtaaggtgggagacactaggagatttttatctcatgcttggttcaaggtagttttcatttttcatttcgtcccaagattccatggtgctgtattgtattatttttaatttaaaaagagcaagcaatctaaatgtttaatcaaagggaacagtttggtaaatatggcatatctacttgtgggaygcccatgacattattataaataattactaagatcattatgaaaaaatattgtaatggtaatgggaggaaagcagaatgtaaaattacatatcaactgatattctaaacactttaacaattgtgtgcctgttgcacaaattctcagagatggagtacagagatttgagccaatgactggtgaaaggcaggcctccctgccctcaagagggg

SEQ ID NO: 635221 - DNA, 514 bp, Homo sapiens
ttttaaaaaaagaaaattcttctgaggtcagaatacttagtcccacctctgtgttttggaaactagactgtgtggttgactaaaaaggccacagattctttgcagtttctcccacggagactgggctctatttccctccctttgaatttggcctggttttgtggttgctctgaccaatagaatgcagcagaagggacactgtgggaattgcaagcctaggtgtaggcttctgatctcaccctcttggaaaatcatctgccatgtggccaagctcaggctagcttgctggaaacacatgacacagccgacagtctcaccagccaccatacaagcgagtgaggtcacattacatcgttsaactgcagttgagccactaaataactgcagccacgtaagtgatctcaagtgagaccagaagaagaaccactcagctgagcccagttcaaattgttggcccacagaatcatgagcaaataaaatggttgttatttttaagccactgagttttgggatg

SEQ ID NO: 635222 - DNA, 510 bp, Homo sapiens
taaccaaatagttaaatttaataaaattccagtctaatccagacaattcatggccaactaggaactttctcatcaagttgttttgttatacttacttttatgatgtgtggatggattcaaaatcaattatcatgctagagaatactatggatgagtcagaagaagtgagctaaatttacatgtagcaacatacatagacctcaaaaacaaaagactgaatgaaaaaagcaaggtacacaatgggatcaatagtaatatatcatttataaatataatatgcacacacaaaataatgtcaactatttttcaaggttgaacacatatctaaatgacaatatgaatgatggaatgggaatatatgcatttaataaactaaagtgagtaattctattggggaaagggaaattgagaytggggttggaggataaagggggaaaacaacaaaccaaaccaaaccaaatcaaaccaaaccaaaccaaaccaaaccaaaccgaacaacaaaacagggac

SEQ ID NO: 635223 - DNA, 529 bp, Homo sapiens
ctggtcgatattatactgttgctgtcttcatctcagcgtgactatggtctactaatagttggaatttctgtgtgaaatccccacaaaagacatgaatattttatcccacattcacacatatatatttgcacttgacaagaggtgtgctgagtcatctatatatttcaaatgaaaatttaaacttgagtcatgaaaggaagttctcctggggacatctgctccagtgtctctgccatgtgcttaggaatttgctcatcctatctgataacggttcaaaatgctctggagggaactgagctgagttttcaactcatgcctgggaacgttaatgtgactgagtaaatcctttattccttaggataatgtgggactaaaatacctgtagtcaggtaatcaatcaatggtgcagatrttgtgtattagtttgggcagctgtaacaaagtaccctagaccaggtggcttgtaaacaacaggcatttatttctcacagttctggagactggaagtcccagatcagggtgctagcat

SEQ ID NO: 635224 - DNA, 498 bp, Homo sapiens
ctgtgcttcctcccttgtagaccatctttgagaattttatgccaatcacttggcaaaggcaggaggctaggggaaggcatgagaatgggaaaraaggaaagaaaagggagttggagtcgggctggaaggaccaagcatccacccacccattagattaggggatgctcacaaggttaaggcagctggaggctcttccagttttccactgcatgtctccatttatagcccggcatcccccaacttgatggccaccaagaccttgctaagctagtaagtgatagcaggtcatgaagctcccaaagaggccatccttccccatgcgagcctcctggttcgaagtgcttcctctggctgattgtaaacctttcctccctaagtctcagctggggctcttaggcttgccttttggaggctcacagaacactgaagtctctcttttcttcctccagccatccctttacactttgggagacatcccatcctctccacttgccccag

SEQ ID NO: 635225 - DNA, 498 bp, Homo sapiens
ctgtgcttcctcccttgtagaccatctttgagaattttatgccaatcacttggcaaaggcaggaggctaggggaaggcatgagaatgggaaagaaggaaagaaaagggagttggagtcgggctggaaggaccaakcatccacccacccattagattaggggatgctcacaaggttaaggcagctggaggctcttccagttttccactgcatgtctccatttatagcccggcatcccccaacttgatggccaccaagaccttgctaagctagtaagtgatagcaggtcatgaagctcccaaagaggccatccttccccatgcgagcctcctggttcgaagtgcttcctctggctgattgtaaacctttcctccctaagtctcagctggggctcttaggcttgccttttggaggctcacagaacactgaagtctctcttttcttcctccagccatccctttacactttgggagacatcccatcctctccacttgccccag

SEQ ID NO: 635226 - DNA, 498 bp, Homo sapiens
ctgtgcttcctcccttgtagaccatctttgagaattttatgccaatcacttggcaaaggcaggaggctaggggaaggcatgagaatgggaaagaaggaaagaaaagggagttggagtcgggctggaaggaccaagcatccacccacccattagattaggggatgctcacaaggttaaggcagctggaggctcttccagttttccactgcatgtctccatttatagcccggcatcccccaacttgatggccaccaagaccttgctaagctagtaagtgatagcaggtcatgaagctcccaaagaggccatccttccccatgcgagcctcctggttcgaagtgcttcctctggctgattgtaaacctttcctccctaagtctcagctggggctcttakgcttgccttttggaggctcacagaacactgaagtctctcttttcttcctccagccatccctttacactttgggagacatcccatcctctccacttgccccag

SEQ ID NO: 635227 - DNA, 572 bp, Homo sapiens
gagtcacacatgtgagccacagatgcaatttaaaagtttcctaatagccacatgtaaaaagatccaaagaaactggtagaattttaataatatgtttcatttaattccatttaccatctcaacatataattatgtaaaaatgtattaatgagctattttttcattctttttcttgtactaaggcttcaaaaatctgcagtgtattttatataggtagcacgcctcaatttggattagccacatttcaagtgtaatagccacatatggtcaggggctactgcactgggcagtatagattcagactcttcaaaatctgtccctaaaatcttctaacacttcccatagccccctctatctcctctccaacgtccagtttcttgacccctggacctcactttgcatcaaacatcttacccctgtgaggctttatccttgcagttgttaacaggacaaccacagctcaatacagcacacaaccccaacagacagatgaaacccatgatayaccaggcccttcccttggaaggatgtatgcctctgtctggcacaaagtctggcacatagtaggacct

SEQ ID NO: 635228 - DNA, 557 bp, Homo sapiens
agccaggatggtcttgatctcctgaccttgtgatccgcccgcctcggccttccaaagtgctgggattacaggcatgagccactgcgcccaaccaatttgctctgttttgttcccagctgcactgtgaacaccaaacttggtgtccagcacataagatgttctcaataaatattggataatgaataaataattgaaggtaggactatgtgtgtgcrcgcagggattgtaacaggaagagacacaatgaagaaatggatacaactgctgtgaggtggaaggaagggacgaagagggcagatgtaacagtgggtcactagcctcagcaaagtgttttgaagattgagaagaacaatttgcatttggttcattgggccattgggagctgtgtttggccctggagtagggtaatggcaggataaaagcccctaagaaggatgttagctgggtctcctacaggaagggttaaagaggtagagaggctgggaggtactgtcacagcccagtgaaagtgagaagaacttgttgcagggagcaggtccacttcagagccaggggat

SEQ ID NO: 635229 - DNA, 587 bp, Homo sapiens
aatgaataattcaatagattatcctcccacaaaagttaaatagcaacgtttgtgaatgattttcttcttttattgtttttttacgaatagagcctactcaaggttatccctctaatgatagggagtacagtcattctcattcctgttgtatgcctgtcaagagggagggggtggtgacaggcagggccctggaatgcgctcacctgggccagtgtgaggatrgcagtaaaggtgaacaggtgtgttgtgcatgaggccagaaggctgaggtcactgacccagcaccccaatatgggaagaccccaatgtgtgctgggtgcaactgactcccgggacaggatccagaccttgggtgctgagaggcctgaactgggagtcaggactcctgggttccaggcctatctttgcccccaggtggcttgagctaacttcccactctatgcctgtttcctcagctgtgatggctgatggtgcactctacctctctccctcacaggactggggtcaggatggagcaagatgctgcaactcaggggctgccaatgggtggtctgcagcctacagcgtgtcgtatttggtctgcacag

SEQ ID NO: 635230 - DNA, 587 bp, Homo sapiens
aatgaataattcaatagattatcctcccacaaaagttaaatagcaacgtttgtgaatgattttcttcttttattgtttttttacgaatagagcctactcaaggttatccctctaatgatagggagtacagtcattctcattcctgttgtatgcctgtcaagagggagggggtggtgacaggcagggccctggaatgcgctcacctgggccagtgtgaggatagcagtaaaggtgaacaggtgtgttgygcatgaggccagaaggctgaggtcactgacccagcaccccaatatgggaagaccccaatgtgtgctgggtgcaactgactcccgggacaggatccagaccttgggtgctgagaggcctgaactgggagtcaggactcctgggttccaggcctatctttgcccccaggtggcttgagctaacttcccactctatgcctgtttcctcagctgtgatggctgatggtgcactctacctctctccctcacaggactggggtcaggatggagcaagatgctgcaactcaggggctgccaatgggtggtctgcagcctacagcgtgtcgtatttggtctgcacag

SEQ ID NO: 635231 - DNA, 587 bp, Homo sapiens
aatgaataattcaatagattatcctcccacaaaagttaaatagcaacgtttgtgaatgattttcttcttttattgtttttttacgaatagagcctactcaaggttatccctctaatgatagggagtacagtcattctcattcctgttgtatgcctgtcaagagggagggggtggtgacaggcagggccctggaatgcgctcacctgggccagtgtgaggatagcagtaaaggtgaacaggtgtgttgtgcatgaggccagaaggctgaggtcactgacccagcaccccaatatgggaagaccccaatgtgtgctgggtgcaactgactcccgggacaggatccagaccttgggtgctgagaggcctgaactgggagtcaggactcctgggttccaggcctatctttgcccccaggtggcttgagctaacttccyactctatgcctgtttcctcagctgtgatggctgatggtgcactctacctctctccctcacaggactggggtcaggatggagcaagatgctgcaactcaggggctgccaatgggtggtctgcagcctacagcgtgtcgtatttggtctgcacag

SEQ ID NO: 635232 - DNA, 536 bp, Homo sapiens
aggtttttttgattacctgtatttctctggccagacactatgttccatgaacatagtgattgaatgtgcatttgcaactcttgtattctcaaatactcaagtagtttgacctaaacaggggttcgaaacatatttgttgaatgaatgaagtgacaaataatatgcatttgataaatatttattaaactataatcaccttaatcttcagctcgttcatacattcattcattcaaaaatatgtattgaagttccacttccctgttcgtcagatctttttcttactatgatatacagaagacaggccaggcacagtcgctcatgcctataatcccagcactttgggaggycaaggcaggagggtggcttgagcccaagagtttgagaccagcctggacaatatggcaaaatcccatctctaataaaaatagaaaaattagctgggcatggtggtgcacacctatggtcccagctacttaggaggccgaggtgggaggatcacctcagcccaggaggcagaggttgcagtgagccaagat

SEQ ID NO: 635233 - DNA, 544 bp, Homo sapiens
atttgcgtgcggcgcgcagggcactgagtcaccatcgtggccgcgtcctcgcgctctcctagcgatttctccggagaaagcggagcaaggtcagccgggcagcccttcaaggacggcgcgccgctcctgcatgctgatggcctgcggggctgcctgcccgtgccccggcgcccaactcctacaaggaagaaattcagggggctccccgcccccgccacagkcctcttccccctccccagctgcaactcggcagccgttcgtcaaagaccctgttgtcaccgagacactgggaccttgtctcatccttggaaccactcgtaaatcttaggtcaggcagccggcagccttcggggaccacagtccccccaaagctttaggaagccagttactacatccggaaagattcgtgcttcagaacgcaagccagggagaataatcacagaaacgcaatgcgaatgtcgtgcctctcagaaattcttagcctgaaataccgtccccaccccccaacccggccaggcgacagtcctgtcatcctaacaccgca

SEQ ID NO: 635234 - DNA, 560 bp, Homo sapiens
agagagttggggggatgggcaggagactgccacaattctacatatggttctgaaacaacatttctgggaagttggaggaggacatctcaccatcctcttgtttttctgccatcaacactactcttaatcacagcaaccgtgttccattgaaaggaagaaaggggaaaataagtagaagaaagtgccactctggatcatagaggacatgcgggttgactccarcatccattgcctctccatccaggtagcagcaatgtggttctggacttgatcccagctcctggggatggctcttagccaactaagccaactatgagctatcatacccttgtcagtgattggttcaggaacccaggcataagccaatcactacatggatccctctggtgattattattggtctcaggctggaggagaatcttccctcccctcccctcccctctcctctcctctctccactctcctgctattgtcccagttacagctggcctctatccctgaccatgaggacagctcctcttaggcagaagcctatattgtagatggtagagcaaaggatg

SEQ ID NO: 635235 - DNA, 584 bp, Homo sapiens
ctggcaattagaatataaaaatggtgttcactgaatctggcatagtgatcatttatccatgtgtttactcttttgtttgcaaggccttctgagtgtttgctgcaattctacaatcagaatataaatttggcttaaaatggaatctagctccatactgataggaacaaaagggacttcagacctccatgttttgagatcttaggtctccagcttcactagagatgcctgtgaggtgtttgtgtgtgtgttaaagatacctctgatatgaagatagtcagaattaaaatgccattaggattagaagagcagtgtcagcagagaccactggactattgctgatcatgtgcagaggatcaagtgaccaaaatctattctacatagagtcttgctgcaaagttctagctattcctaatgccagcatcaatctcattcactgccaattcatgcaggagacctaactgttgagtacctcctcaagggagagtgkgtgcctttggagctgttgttgtccctcaactatcttggctcttgattgggtgggctttttgctattaggttagccagttagttttattgtggggacg

SEQ ID NO: 635236 - DNA, 622 bp, Homo sapiens
gaggatgtaaattagtacagccaatatggaaactcgattggagattcctcagagaactaaaaatagaactataatttgacccagcaatcctattattgggtacatgcccaaaggaaaataaatcckaccaaaaagacatgtgcactcatatgttcatcgcagcactattcacaatagcaaagacattgaattaacctaaatgccaataaacaatggattggatgaagaacatatggttcatatatacatcatggaatattatgtagccataaaaaagaatgaaatcatatcttttgcagcaacgtagatgcagctggaggctattatcctaagctaattaacacagtaacagaaaaccaataccacatgctttcacttataagtgggagccaggcacactggggacacatggacataaagatggggaaaatagacactggagcctccaaagttggggagggagggagagagggagtaaagggttgaaaaactatctactgggtaccatactaactacctgggtgatgggatcagtcatactctgaacttcagcatcacctagtatatgcatgtaacatatctgcacatgtcctgaacctaaaagttgaaattttaaaacatg

SEQ ID NO: 635237 - DNA, 622 bp, Homo sapiens
gaggatgtaaattagtacagccaatatggaaactcgattggagattcctcagagaactaaaaatagaactataatttgacccagcaatcctattattgggtacatgcccaaaggaaaataaatcctaccaaaaagacatgtgcactcatatgttcatcgcagcactattcacratagcaaagacattgaattaacctaaatgccaataaacaatggattggatgaagaacatatggttcatatatacatcatggaatattatgtagccataaaaaagaatgaaatcatatcttttgcagcaacgtagatgcagctggaggctattatcctaagctaattaacacagtaacagaaaaccaataccacatgctttcacttataagtgggagccaggcacactggggacacatggacataaagatggggaaaatagacactggagcctccaaagttggggagggagggagagagggagtaaagggttgaaaaactatctactgggtaccatactaactacctgggtgatgggatcagtcatactctgaacttcagcatcacctagtatatgcatgtaacatatctgcacatgtcctgaacctaaaagttgaaattttaaaacatg

SEQ ID NO: 635238 - DNA, 607 bp, Homo sapiens
aacatctttaaaagatttcaggactctttgtgtttggttaaggttccaacaggtggaagatatcttccaagactgaccatagtcatatttgggaaggaaagatcagaatcaatttaatcaagatactaaatatgaaatgggggagggagcagtcagtggaactaaccagagtaacattctgaacttggaactgaatccagagtttatacttgcacaaatcctggcctccttccccatacaaacccctagtacaggtctttgagattgtttctagcaaactgaatttttcttccttagcctggggggaaaatgcagactctggctttattttctgcatgggaatcacgtgggtagcttaaatattccaggcatcttgacttggcatattgaacrcattttcttattccataagctgttctacatgtcgttagagtgacagcagtgagtagtaaaataagcactggctttggagtcaggtagacctggattcttagtagaccctggacttcaagagtcagtattgcaccatgggtaagaacatggaccatggacccagactgcctggctgcagatcctgctcttgttacaaaatatgtgactatggatc

SEQ ID NO: 635239 - DNA, 613 bp, Homo sapiens
tgcagtgagctctaattccaccactgtactcccatctgggcgaaagaacaagaccccatctcttaaaaaaaaaaagtaagaaatgggaacccagaaaagaagtgagcagcctatgtcctgtggattaatgaagaattcataaaggaagaactatttgagctcaatctgataggatgagtagcttcctaggtgggaaagtggaagcagcattccccagagaaggaatatggaatgtagggcacagttagaagaaaagaagcaggagatwacatggtgtgaattgggaacacatcatgaaaggattggaatcaaaacttaatattataaaaatctaaggagccggacatagtggccctagcctgtcgtcccagctagtgaagaggctgaggcaggatgatcacttgatcaagcccaggagcttgaggctaaagtaagctatgatctaccactgcactccagcctgggcagcagagcaagactccctctcttgctaaaggaaaaaaaaaaaatgcatgaggatgtcaagtattttaagaatgactctaatgtgttgtgcatggataatcgagaaaaatatgggtgctatttttttctttactgaaatgtgaattaa

SEQ ID NO: 635240 - DNA, 613 bp, Homo sapiens
tgcagtgagctctaattccaccactgtactcccatctgggcgaaagaacaagaccccatctcttaaaaaaaaaaagtaagaaatgggaacccagaaaagaagtgagcagcctatgtcctgtggattaatgaagaattcataaaggaagaactatttgagctcaatctgataggatgagtagcttcctaggtgggaaagtggaagcagcattccccagagaaggaatatggaatgtagggcacagttagaagaaaagaagcaggagattacatggtgtgaattgggaacacatcatgaaaggattggaatcaaaacttaatattataaaaatctaaggagccggacatagtggccctagcctgtcgtcccagctagtgaagaggctgaggcaggatgatcacttgatcaagcccaggagcttgaggctaaagtaagctatgatctaccactgcactccagcctgggcagcagagcaagactccctctcttgctaaaggaaaaaaaaaaaatgcatgaggatgtcaagtattttaagaatgactctaatgtgttgtgcatggataatcgagaaaaatatkggtgctatttttttctttactgaaatgtgaattaa

SEQ ID NO: 635241 - DNA, 657 bp, Homo sapiens
gatcacgaggtcaggagatggagaccatcctggctaacacgatgaaaccccgtctctactacaaaatacaaaaaaaattagccaggcatggtagcgggcacctgtagtcccagctacttgggaggctgaggcaggagaatggcrtgaacccgggaggcggagcttgcagtgagccgagatcgcgccactgcattccagcctgggcgacagagcgagactccgtctaaaaagaaaagaaaaaagagaaaaaaaaaaagggaaaactctttctactagtctatgctgtcttccagttacttgacagctgtgttagtgggcctatttgatcccttatcattcagagcacaattataagggatcgaataggctcactaacacacaccgttggtaaggagaataactcaatgctaaactgttatgccacctgccaaagatgccttataggcttctgtctttggccaagattggtttcatattctggagtgagatagaactcaaaggtgtggataaattggcacagccacaaaggttaactaaattcagggctgggatccaggaagaacattagatgaaagtctttggaaagttcatagatgagaaaggttataaatcagacttccttctgtcaagcctcttccaaccccttaaagtccccag

SEQ ID NO: 635242 - DNA, 567 bp, Homo sapiens
gaggtcaggagatggagaccatcctggctaacacgatgaaaccccgtctctactacaaaatacaaaaaaaattagccaggcatggtagcgggcacctgtagtcccagctacttgggaggctgaggcaggagaatggcatgaacccgggaggcggagcttgcagtgagccgagatcgcgccactgcattccagcctgggcgacagagcgagactccgtctaamaagaaaagaaaaaagagaaaaaaaaaaagggaaaactctttctactagtctatgctgtcttccagttacttgacagctgtgttagtgggcctatttgatcccttatcattcagagcacaattataagggatcgaataggctcactaacacacaccgttggtaaggagaataactcaatgctaaactgttatgccacctgccaaagatgccttataggcttctgtctttggccaagattggtttcatattctggagtgagatagaactcaaaggtgtggataaattggcacagccacaaaggttaactaaattcagggctgggatccaggaagaacattagatgaa

SEQ ID NO: 635243 - DNA, 585 bp, Homo sapiens
gcacatgctctgaagactggctctccccatggctgctgcttccaccaattctggacactgaagcgtatacttccaagagcctgagagccaactggctgtggctgctgtcactgaaaataaccccaattcccagaaacaggcccacagtgtacttgcacgtgccttgaggatggattctccctgctcattgctgtcattgctgccaccacccagcactttaccaggggagcctaggtttcaccctggcctgccgatcacagcctgtacctgtgtgcacaatggaggaggcctaatgacaggcttgtctggcctggcaacatcacccatgcctgggcacattgtctagggacctggggatcatcttgccccacccactaccactggtatcagtgcaagtatttcaggtgcttaagcgcaggcccacccagctcatcacagccaccactaacagaaacatgtttatctgtgagcccatggggttgtcctgtcacagatatggccattgctcatgccatgcatgctacccaggaacttaatgaaccacatggcccratactgccactgccagaacccaagaaagccacc

SEQ ID NO: 635244 - DNA, 468 bp, Homo sapiens
atcaaatactccaggatacaatatctacctaattctgagggcaattcattttctaaayttgctccagaaataactgtttcccctcagcttcaacatactcattgagatggcccctgatcattgctttccttcaaaatctttgcaggatatttgaatcagcagcctccctctttttaatgttcttagttcttatcaagacaacatcagaagaactaatacatggtttttgtttgttttttgagtttttttggatataggacagggcagtccatctgaacctgttttgattaaggtagcattcttctctcactccttcctttgcttactctggcatgccaaacctgcttgcaaagtgtcatgatctattagattcacagaatcaaagaaaaaaatagtcatttctccagaatcttttaaaaaatgtaatcactacttaaatgtgagccaacaatcaagtacaattagagt

SEQ ID NO: 635245 - DNA, 468 bp, Homo sapiens
atcaaatactccaggatacaatatctacctaattctgagggcaattcattttctaaatttgctccagaaataactgtttcccctcagcttcaacataytcattgagatggcccctgatcattgctttccttcaaaatctttgcaggatatttgaatcagcagcctccctctttttaatgttcttagttcttatcaagacaacatcagaagaactaatacatggtttttgtttgttttttgagtttttttggatataggacagggcagtccatctgaacctgttttgattaaggtagcattcttctctcactccttcctttgcttactctggcatgccaaacctgcttgcaaagtgtcatgatctattagattcacagaatcaaagaaaaaaatagtcatttctccagaatcttttaaaaaatgtaatcactacttaaatgtgagccaacaatcaagtacaattagagt

SEQ ID NO: 635246 - DNA, 441 bp, Homo sapiens
atcaggcacttttgtctttcagcttcacttttcttggcttccggctctcgttattatcaaggtcaaaaatatggcttatacggctctaacaatgacttgtatattccaggcagtaagaataaagagaaactgaagcaaacataccttacactttgaaagggaccttccagaaggtccctttcaaatactaatttttttttttacaaactattcgctaaagcttagtcatactgttatawttcactgcaaggtatgctacaaaatataaattttgtatgtttgtttgtgtgttaatcctgcacattgctttccccagtgtaatcagagttctgtttctatgaaaaagagaatggatattgggtggcagctaacagtttctatcatattccctctatgattaccaaaatcacagcagtacacatatcatagtcatatttttgc

SEQ ID NO: 635247 - DNA, 583 bp, Homo sapiens
atcagtattatggtgaaggcaaaaattgtatcatgatcagttgagtactgagtatgcaatgacagataaaatatggtggcacagrctcaattttccaaaagtttgaagttgaaaggaataaaagagagagaaagaaagagagagatacttgagggtcagagcagacagagtcaccaaaagcatttttgtttgttaacatttttatttatatactgcctaaagtggcagtaattgagaaatgtttaggtaaagaaaaaaaagcgaccagaagagaatgaacctgtgaaaaattaagactacaactgatggaataaagtcaagcaaatgagagaatgtgatgttagaacgggtagaaagattaggtttggaaaaaaagaaaaaagagctcttcttctcagccaggatgaagttgaattaagatataatcacatttattaaataaagaaaatgtggtacatatacaccatggcatactatgcagtcatataaaagaatttaattatgtccttcacatccacatgaatgcagctggagaccattatcctaagcaaattaatgctaaaacagaaaatcaaataccaca

SEQ ID NO: 635248 - DNA, 588 bp, Homo sapiens
atgtatgtgccagacactattacaaatgtttaaataaatatataaccgtataatttatgtaattgtcatgtctacttcattaggtagatatgattattatgcctgtttttcagatgggaaaactgaggcccagaaaagttaaataaatcatccatggtcacttgtttaataagtgacagagaaaagttttcaacatagactatttgcttctgaagtctgtgtttttaatcacttttaatcattatgctacactgctggggagaaagtttggcttgcatttgagatccttatagcacatctaagtgtaaatttccaaaaggcaattggaaatatgataataatggaacccaaatgtcagagctgaagatgtggawttcttcagcgtatgaatgttcattggagttgtagacactgtccaacaaataatgtataattttattggcccaaatgagagtaatagggacttcaagacagcttgatgccatcaagagtctacttctagaccccttttatagcgttaatacaaagcaacaactactgtattatttcataaatatatttggtttcatggttgtttatatattcaaa

SEQ ID NO: 635249 - DNA, 538 bp, Homo sapiens
ctgaagtcatgctctaaattaacatgcatttcttatccaattggcttataaaacttgatttactctttaatctctgaagtaaataaaaacaacatttttaacctttctttaagaaatctgctagtttaagatttcttgctagtttaaatacatgtacttttaataaaaactccaatttagtttttctaaactaattttacytaaaagatttggtcatgtaaacaagggtgtagttactctgtttcaagcatcttccacctgtgatcatgtaagtgctaggcagtactcacagctgacatgatgagctctcctcccaggttctggatctcagctttaacttgactgcagattttcagttggtgggagtagaacttaatctgttccaggtaggccaacaagtcctgtttacaagatggatctgggcactaaatatgcatcaaagataaaaatagatacagcagaataaataatagttagatcaaggtgagtaaatacagtattcacatggcaggtaccttataaagcagcaattttattt

SEQ ID NO: 635250 - DNA, 538 bp, Homo sapiens
ctgaagtcatgctctaaattaacatgcatttcttatccaattggcttataaaacttgatttactctttaatctctgaagtaaataaaaacaacatttttaacctttctttaagaaatctgctagtttaagatttcttgctagtttaaatacatgtacttttaataaaaactccaatttagtttttctaaactaattttacctaaaagatttggtcatgtaaacaagggtgtagttactctgtttcaagcatcttccacctgtgatcatgtaagtgmtaggcagtactcacagctgacatgatgagctctcctcccaggttctggatctcagctttaacttgactgcagattttcagttggtgggagtagaacttaatctgttccaggtaggccaacaagtcctgtttacaagatggatctgggcactaaatatgcatcaaagataaaaatagatacagcagaataaataatagttagatcaaggtgagtaaatacagtattcacatggcaggtaccttataaagcagcaattttattt

SEQ ID NO: 635251 - DNA, 567 bp, Homo sapiens
aaaatttggaaataacctaaatgtcccaaaataatggaaagactaaataagaatgaatatcaatataatgtagcattactcagtatcaagaaaatagagtttcaaaggatgtggaaaaatgtttttggaagttaaaaaaatcaatatgtaaatattgcaatcaaattctattaaaaattgtgtgtatttaaaacatgctgaatgccagacgcagtggctcatgcctataatcccagcaatttgggaagctgaaacaggaaaatcctttgagcctaggaatttgagaccagcctggggaacatagggagacacyatctctacaaaaaataaaaataaattagccaggtgtggtcccagctattcaggaggctgaggtgggaggattgcctgagcccgagaagttaatgctgcagtgagccatgattgcaacactgcattccagcctggtcaacagagtgggaccttgtgtcaaaaaataaataaataaaaataaaaaataaaataataaaacctgctgagacagcctgagctgtccatccttcctaggcatagatcatggtgcatcag

SEQ ID NO: 635252 - DNA, 567 bp, Homo sapiens
aaaatttggaaataacctaaatgtcccaaaataatggaaagactaaataagaatgaatatcaatataatgtagcattactcagtatcaagaaaatagagtttcaaaggatgtggaaaaatgtttttggaagttaaaaaaatcaatatgtaaatattgcaatcaaattctattaaaaattgtgtgtatttaaaacatgctgaatgccagacgcagtggctcatgcctataatcccagcaatttgggaagctgaaacaggaaaatcctttgagcctaggaatttgagaccagcctggggaacatagggagacaccatctctacaaaaaataaaaataaattagccaggtgtggtcccagctattcaggaggctgaggtgggaggattgcctgagcccgagaagttaatgctgcagtgagccatgattgcaacactgcaytccagcctggtcaacagagtgggaccttgtgtcaaaaaataaataaataaaaataaaaaataaaataataaaacctgctgagacagcctgagctgtccatccttcctaggcatagatcatggtgcatcag

SEQ ID NO: 635253 - DNA, 585 bp, Homo sapiens
atgaagtatacacccatcggtattggtcatacacaccatctacaggcttgtaggtggaactgaaccgcccaatatgaaacctgctgacagaaaggtgtaggagtacacaagttaagccaaaagaccttacccagcattctctaaagtcacactccctagggaaaaatagatgggaaagggaaagggaaagaaaaaaaaatcaatagtattatagggaaagaaaagaaaaattatatctgcacaaatataattacaaaaatttgaagtatcaatgcttcaagatgagaaagaaccagtgtaagaattctagcaccatgaaaattcwaaatgtagtgataccatcaacataccatactagttctccagctatggtccccagcaaagtggaaacttggaaatgacagataaagaatttgaagtgtggattgcaaggaagctcaataagatccaagatgaggttgaaaattaacacaaagaaactttttaaagcaatccagagaatgaaggaagagataaacatctttaaaatatcaatcagagattctggaattaaaaaactaatttaatttcaaaacacaactggaa

SEQ ID NO: 635254 - DNA, 601 bp, Homo sapiens
cagaccacatgattctatatctagaaaatcccatagtctcaaccccaaagctcattaagctgataaacaactttgggaaagtttcagcatataaaatcaatgtacaaaaatcactagcattcttacacaccaacaacatccaagctgagagccaaatcaggaatgcaatctcattcacaattgccacagaatgaataaaagacctaggaatacaggcagccagggaggtgaaagatatctacaaggagaactacgaaatgctgctcaaagaaatcacagatgacacaaacaaatagaaaaacattcctactaggaagaatcaatattgttaaagtagccatactggccgaagcaatttatagattcaatgctattcctatcaaactaccaaggatattcttcacagatgagaaaaaactattttgaaattcatatgaaaccaaagaatagcccaggaaatcctaagcaaaaagagcaaagctggaggcatagactacccaacttcaaactataytatggggctacagaaaccaaaacagcatggtaatggtacaaaacagatatttagaccaacttaatagaatagagagtccagaaataa

SEQ ID NO: 635255 - DNA, 604 bp, Homo sapiens
agagaaacagctgcagctgaagttaccaagatggttagaatgtggaacctcatctaagagactgattacgttgtcttcatctgaactattttaggctggaaatagagaaatgaaaatgggatttggaaaaggagtacttttaattgcaagtaacaaatcttattatcaatgacttaaatcataacaagaagtccagattatggttattacaaagtttaataatgtcattaaacctagattatttaacatttccttctatcatcatttgtttcttactgttatgtgtttcctcataatttcaatatggatacagcagctctaaatttcatgtttttacaccatcacttaagaagtaagagactgagcattctctttatatgacatgcaaaaaagaatctgtgccagaaccactcyagcagatttcctcctacccagctggtcgggactgggtcacatgaaacacctctagaccaatcagttgtaaaaggtcaggtctggtttaattgcctgaataaaatcaggttatcattatcaaggaaaaatgggcaaatagtgtctgccacagaagacattgtggaagatgaatgaaaatgaattgaaaact

SEQ ID NO: 635256 - DNA, 616 bp, Homo sapiens
tcaggtctggtttaattgcctgaataaaatcaggttatcattatcaaggaaaaatgggcaaatagtgtctgccacagaagacattgtggaagatgaatgaaaatgaattgaaaacttattaaatgggtaagacaggttattaaaaatactttagacccttgaatctgggatcttagaacatggccatttttttttacactggtgttatgaggaagatcttaaaggcaattaatctgtttagtcctaatctctagttcctggagaagacaatctcaaatgtttacttttcgtttttttgctatgatgcacattcacatgcagaacacatttcttatgagtaggcccatttcactgaacactgtcttaataaggtgggcttctaagcttgattcctaggaaactagctttagcccttcccctttctttcctgctccaggargtatatcagaatgcaagtgagtaaaagggcataattagagggataaccttgaagccactccaatttgtgagaaaacagtaaatcattttctaatttcaatatttgaactattgttattactatcaaattatggctcttgtgagacatgtcacaaataattgaaatgcaccaatgtgt

SEQ ID NO: 635257 - DNA, 607 bp, Homo sapiens
acaactttatttattatagcaaatgaaataaacaaaccaaatgccagtcacaaagataatgaattaacaaattgcagtatatgtataaaatgtartacttctcagcaataaataaaataaactactggtacatgcagcaacatacgtgaagcttacacatgtaatgccatgtgaaacatcacacaaaaaattacataccatagaattccatttatatacaactatagaaaatatacatctaatctgtggtgctctatagcagatctgtggatgcctgatacctggggtgggaaggatcttgactgataataggcttaaggaaaccagttgacataaatagaacactgatgtaacaatactagaattcacattcctttctagtgtacctaaagcatatgatatttgattatacgtcataaacaaagcatccacaaatataaaatgttttaaatcattcagagcttattctttaatcacaatagtattttaggttagaaatcaatagtaaaaggaagactagtaagtcctcatttactagaaaaatttttaaagactcgtttaatacgtgagttaactaaaaaatcagtgaaaacatattgaaatcatt

SEQ ID NO: 635258 - DNA, 565 bp, Homo sapiens
agaaaaatatataaggattattaaaaattgaattgaacaatgtctgtatgtgcaagtcaaagctgtaaccataggagaatatgctgagcttcattagtaattaatgagatgccaattaaacctcaatataatatctctacatacttgcaaaaatgcctaatgtgaaaaatatgggaaaaaaaatgtagatgaagatgtgtgacaattggaagactcaagcctgtaatcccagcactttgggaggccaaggcaggcggatcacctaaggttgggagttcaagacgagcctgaccaacatggagaaaccctgtctctactaaaaatacaaaattagccaggtgtggtggcacatgcctgtaatcccagctacttggwaggctgaggcaggagaatcgcttgaacccgggaggcagaggttgcagtgagccaaaattgaaccattgcactccagcctgggcaacaagagtgaaactccatctcaaaacaaaactgaacaattgggagccctctttttttgttgctagaaatataaatttgcagaagcactatggaaatccctggaatt

SEQ ID NO: 635259 - DNA, 594 bp, Homo sapiens
gtctgcttatttcatatttgttgtaagtgaagtaatctgcagaacaagtgggaatatgaggggctagaggtttgatgaaagtggaagtttagactagtgtttgggtagaatggatacaagaattagctaaaaacacacagatgcattttctgttagtttcaggttggggaccattaatttatctagaaactaatttgttcagtgagggtgttgtggtttggctttgtgtccctacccaaaactcatcttgaattgtagtaatccccatgtgtcatgggagggacccagtgggaggtaattgaatcatggggcaggtttttcccatgatgttctcatgatggtgaataagtctcacaggatctgatggttttataacagggcagttcctctgcacacactctcttgyctgccaccatgtaagacatgactttgttccttcttgccttgattgccatgtaagacatgattgtgaggcctccctagccctgtgaaactgtgagtcaattaaacctctttccttattaaattacccagtctcaggtatgtctttattagcagcgtgagaacaaactaatacaaggggattctctaaaa

SEQ ID NO: 635260 - DNA, 594 bp, Homo sapiens
gtctgcttatttcatatttgttgtaagtgaagtaatctgcagaacaagtgggaatatgaggggctagaggtttgatgaaagtggaagtttagactagtgtttgggtagaatggatacaagaattagctaaaaacacacagatgcattttctgttagtttcaggttggggaccattaatttatctagaaactaatttgttcagtgagggtgttgtggtttggctttgtgtccctacccaaaactcatcttgaattgtagtaatccccatgtgtcatgggagggacccagtgggaggtaattgaatcatggggcaggtttttcccatgatgttctcatgatggtgaataagtctcacaggatctgatggttttataacagggcagttcctctgcacacactctcttgtctgccaccatgtaagacatgactttgttccttcttgccttgattgccatgtaagacatgattgtgaggcctccctagccctgtgaaactgtgagtcaattaaacctctttccttwttaaattacccagtctcaggtatgtctttattagcagcgtgagaacaaactaatacaaggggattctctaaaa

SEQ ID NO: 635261 - DNA, 594 bp, Homo sapiens
gtctgcttatttcatatttgttgtaagtgaagtaatctgcagaacaagtgggaatatgaggggctagaggtttgatgaaagtggaagtttagactagtgtttgggtagaatggatacaagaattagctaaaaacacacagatgcattttctgttagtttcaggttggggaccattaatttatctagaaactaatttgttcagtgagggtgttgtggtttggctttgtgtccctacccaaaactcatcttgaattgtagtaatccccatgtgtcatgggagggacccagtgggaggtaattgaatcatggggcaggtttttcccatgatgttctcatgatggtgaataagtctcacaggatctgatggttttataacagggcagttcctctgcacacactctcttgtctgccaccatgtaagacatgactttgttccttcttgccttgattgccatgtaagacatgattgtgaggcctccctagccctgtgaaactgtgagtcaattaaacctctttccttawtaaattacccagtctcaggtatgtctttattagcagcgtgagaacaaactaatacaaggggattctctaaaa

SEQ ID NO: 635262 - DNA, 565 bp, Homo sapiens
ttcagcgtttcccatcatagagattatctactattcgttaccaaataaacacaggagaggccagagagtcctgtttatctgtaatacttcatgtacacttatcatccttatcttgaattaaaacactaacatgagctcctaacttggttttttaatagaaacaaaagacttttataaaatattttcccatttaatctccatgctttctttatctgatctaacctggcacctaaccaggcagaaatgtatgattcctgccatagcaaaaaaamcaccttttaatctctagatagctgtactcattgtcaacttattaggctaatatccattataaactaatcaaatttgaatagttaggctacttgctggattttgaaggtcaaccttgtttattaataaaatgctttcttaacattataaaggttacaatgagttctgatgccacatactcaccttttgggtttccaatgtgttagagagttctgtacttttgagtgttaggcctatccgaatacatatgtgaaagaagagttatcacccattgggaaaatgagacaacaaacta

SEQ ID NO: 635263 - DNA, 526 bp, Homo sapiens
atttagtaatattgtttgcaagttgagaaacagaaattcagccattctcctgactgatggtaggtgaaattcttcccaatattagagccaatctgggttaccatacgttcatatatttaacagctatttrttaaacaactgtgatgttccaggcactgttctaggttcttaggatacaccatataacaaaacaaatagtgatccttgccctcatgtgccagctctgtgttaaatgctaactattatcttattcaatcctccaaataaccctataggatatatatcattccacagacaaggaagctgagggttaaatgggataagaatcttgctcaaagtctcactggctttaaaatattaatatatattttacatcattcaagacagatatataattagctgaatattctcacctctattaactgaatgtagagtgtcaggtacatgggaagtaagttatttacgtgatctgaaataagaggacaacctttgccaaattacttttattaccatggagaagaaagct

SEQ ID NO: 635264 - DNA, 444 bp, Homo sapiens
gagtaagtcagagatgctagcccctgctctcagttaaacagaactatcctccttcctgaatatttaaacataaaattaattttaaactactataaaaatcatgttccattgcttgccaaatcttataccattataatgctgtatttttacatgttagtatacattgtgtccatagggatataaatatgagaatttcagcaactgtcttgcagggttaagatgtgctatttgttgattttgcaaatttttctcatgtggtacagtccctccaaagaaaatttccttagacctaaatggtagcataataatttctcctccatatccgtgactaacaagttcctgaaaacagaagtagacatattttatgcccmatttagtacctaataattgaggcttaaaacaaaattttcttgggcaagttgggtgattaaatatgaattaaaa

SEQ ID NO: 635265 - DNA, 569 bp, Homo sapiens
ctgggtttgttttggttatatagtattattttactttattctaatttcaactcatgtcactctgtagctcattaagaatttgttcaactgaaaattaaaatgtgtgttaaagcaataaaaatgaaaagattggctatgcattttatgttgatatttggtggcggatttcttgggtgggatgaaaaaaatggagattaataaattgctgagtagtccaaccatgtgtttctaagtgtcaccttcactctcatcctctttcagttttatatttataattcaggaasgcacttttccaaactactgcatgcacacaagtaatctgaagcatatctgatagaattaaattcatagtctaaatgagcatttttggtctaatacaggcactagtcttgggcattagacatgcctttaatagttctgtgtagctcaagagttgttctttagcttaggactttatgaaaatgatcaataacttttctgagaatgtctgaacacatactccctagtggtcatggaataccattggttctaccaatgctcttgtatctaaaaattggtgggtttttaac

SEQ ID NO: 635266 - DNA, 374 bp, Homo sapiens
tatctgatagaattaaattcatagtctaaatgagcatttttggtctaatacaggcactagtcttgggcattagacatgcctttaatagttctgtgtagctcaagagttgttctttagcttaggactttatgaaaatgatcaataacttttctgagaatgtcygaacacatactccctagtggtcatggaataccattggttctaccaatgctcttgtatctaaaaattggtgggtttttaacatccatcttggcctcctcatttttaggctgataataatcctttctcagtatgaatcccatggggttagcctctcgatcctcttccaggggtcacacaggctgttgctatctactctagaacatcaatcacat

SEQ ID NO: 635267 - DNA, 618 bp, Homo sapiens
ccatctgactctgctaatggaaatgccagtgtggtgttgcctttctgcctcattctgtcctggaccccaggagcccataattgctctggcagcagtattctatctgccttgatcagtttgtcatgcttgctctgggggtggaagtggaactaaaagcactcttggcaagaagagtctgttcctgcctagaggctgagctgatgccctgacatttcctgggcaggaccattaaacattccatccaggagcagtaactcrgagatgtaacttccagtcactgcatgtccatcttgtggcctctggaggaaaagctgctgtccctgatcaagtaaccctgacttcctactttgtctgaatttcctagttttagaaaggagaagttcccttggtgtataggccagaaaagggagttgtcaggaagacaaagagagtgtcaaacccaagggagctgacagaggaggggtttaggtacagtggatcacacacaggcttttacaacattgtcatttgtccctgaggctcagggaggtagcctggagacagggatctgctactctgagcttcacaaagaggtgaaatgctctccttcctgccacattcttgccttctcactgtccc

SEQ ID NO: 635268 - DNA, 577 bp, Homo sapiens
tgttaggtgtgcagatcaaatctgcatgtttcctttctaacatcagaaaagacagttttctagcagtgggtggagtactattcagattaaactgaaaggaccaaaagtgggctatcctcctgaatgcagacctgaacacttcccttgggagtctgccatctgcaggcattgatttggagaaggtaggggaagagaactaactatgcttttgttctgctttggaggaagcctgtgtggtgatgctggggatccacagccggatcctggaatagctcctcctttccaataattgctcatagtatctcccacccactaggttaatcaattatgtygcagtcactctgaggctaggtttggaagactctaatgctgtaccaggtcccaacgccagagaaatgtttgagccccttaactccattatattctgaaaccctgggacagttatatcatttatacttttgtatctccaacaactggcacagtgaatggcatggcacatgggaggaacccaactgatagttttgaaaggaatgaacaaaaccatgaattagtttatttcaaatgaatgaatgcagaa

SEQ ID NO: 635269 - DNA, 516 bp, Homo sapiens
acaaagcagtcaaggcactctgtgtttcttcgtcattacaaagaaaaaaagtaagggcaacttgggggaccctacagactttcaaatgaccaaggacaaataggcccatgtctgttagtttaaacattaacttattttcttagtctgatcaactctagcccgactgacaatctgaacagtcagctcacaagaggtatagtagcagcacttctccttctaagttacttgtcccaatttttaagtattcaaaagaatgtatgtgaaaacaagagatatccataacactcagtgctgtttcaaattttcctttcatgtatgcctgaccacaaagtaaggagctcagaaaatatgagacaccgtaactgaagagcaatsagaagtcttagattttatcttaaactttagatacattttgcaatctactatgggatatatccttgtttactatagtacagcttattttattttaaaggcaatttcacatttttctgccaaataatgatggtcaagtgggtc

SEQ ID NO: 635270 - DNA, 516 bp, Homo sapiens
acaaagcagtcaaggcactctgtgtttcttcgtcattacaaagaaaaaaagtaagggcaacttgggggaccctacagactttcaaatgaccaaggacaaataggcccatgtctgttagtttaaacattaacttattttcttagtctgatcaactctagcccgactgacaatctgaacagtcagctcacaagaggtatagtagcagcacttctccttctaagttacttgtcccaatttttaagtattcaaaagaatgtatgtgaaaacaagagatatccataacactcagtgctgtttcaaattttcctttcatgtatgcctgaccacaaagtaaggagctcagaaaatatgagacaccgtaactgaagagcaatgagaagtcktagattttatcttaaactttagatacattttgcaatctactatgggatatatccttgtttactatagtacagcttattttattttaaaggcaatttcacatttttctgccaaataatgatggtcaagtgggtc

SEQ ID NO: 635271 - DNA, 573 bp, Homo sapiens
tcaagcaagttgctaaacctctcattacctttcattacatagtctcatttgtgaaacagagcttacatttcagagttcaagtaacaaaatatttatatgtcttataatggatcctaccacacagaattgtcatgaatattgaatgaattaatatacatactatgaataatgcctagcataaacacaacataaaaatttaaacatctttattgttatatatacaactgagaagcttcaagattaaaacacgcaaatcacacttttaaaactttcttttatagagggaacaaagagaaagaaatgcctggaacagaaaaccaaaagcacgccaaggaatcatagcgagtagccaatttatattaattctgtcaacaaatatttgttgaatacacatgggttggatattcttctaggtactagggctgcagcagtcagtaaaaacaatctttcctctagaaggactttagagactagcagaggacatagcagttaattaaataatrcatccaagagtacacatttttatctttaaaaattgccacaaaggagagccacactggtgcaatgaaccta

SEQ ID NO: 635272 - DNA, 349 bp, Homo sapiens
aaggactttagagactagcagaggacatagcagttaattaaataatgcatccaagagtacacatttttatctttaaaaattgccacaaaggagagccacactggtgcaatgaacctaagttgaggggatttggctgagtcagggaaatctggaaaggctggtctgagcaagtgagttccaagcggacatccgaagaatcagcaggagcttgctggtgacatgtgatgaccgagcattgtaagcagaatgagcagcctgtgcgaaacccctgtgggaaragcagctccacacacaccaggttctgaaaacaggctggtggagagtgtgaaagtcagctcgcaggagaggg

SEQ ID NO: 635273 - DNA, 557 bp, Homo sapiens
agtaactgagctgcaaatggcacccattgaagctactcaaccacattgctgaaggccaccaaattgcttcttgcaggcttctactattcagaaattattaaatactttcaaaaaagtttaattttaaaaatctgagcttaaatgcacccmaaacacgtttctgtagggcattctttgtatgtagcgtaggactttcattttgttactccccttctgtgcattcattcctagcccatgataaaaataaaaaaaaaaaattatgcgtataatgaaaggtctaaggaaacttggatcaggacagatgttggcctgtagaagacttttattccttcacaagttgttattactgaaacattttagaaatttcaggagaatgttgaggttttaaaggaaagtattaatacacttgacaggttttaattttttaatctagtcaaggcaaacagctttgaatcaattatccacagttttcaacatataatcaaggattttgacaatatttagatgttgaattgccaagctattagcaaccaagagatttgattagacatccatat

SEQ ID NO: 635274 - DNA, 566 bp, Homo sapiens
aaaactatatatgagttatttttgtttatttctaaagacttaaacacactagcacggagagaatggaatggaagataaaataacagcaagaaatattaacaaactcaaaagcagatgacaagtactaaatgacatagccaatcggagaaagtcagagttcaaaccagcaacagggaaaattaagaatcaagtgattttatgcagaaagacttaggtatgattaaacttggggatgaagagagggactgaaaaaggcagtttgatcccatctcctatttcacaccactgaatatctacccccacctcagcccagcataattccagatattattctctgaagaggataaaatggtctttgcattgtgggtctttagacttattttaggggtggggtacattttatgaacaacaggtgattaratgaatgtgtgaatactcaatgctaagtgtcaaggtcccagtcaccccatcctctaccactctgctcctagttccttaccttctaggaagaaatttgaaagatgtttttctgggaaagaaagtgattagtacaagaagaaatactt

SEQ ID NO: 635275 - DNA, 567 bp, Homo sapiens
aatactcaatgctaagtgtcaaggtcccagtcaccccatcctctaccactctgctcctagttccttaccttctaggaagaaatttgaaagatgtttttctgggaaagaaagtgattagtacaagaagaaatacttgctttcctctagaaagttttaaatcctttactctgattctagaaaataycagaagatgtataaaaggaatgctgggttgttagaagatgccaccttctcaatgttaacaatgtaacacagtttatgtgactgtaggaatggcccttcaccaaggagaaatcatgttttcaaatcataaagcctgacttctctgcccttgaataaggctatcacaaggggaacagagatgccttgctgcatttgtaactgtgcacaaatgactagagtagaacttgctccacatcttcagtttaggctggaaggtcaaggttcatgtgccaatactcagaaatggctacatcaagttttatgtaagtaattttttcacactgctgatacagtactttctatgagtttattgtgtttgaattagtctataccagactttctcca

SEQ ID NO: 635276 - DNA, 594 bp, Homo sapiens
ggttttagaccctctctgcctcagggagtctctattttgattcctcttgccaacacaacaccagccccagaagaatattggtgtccttttctttctttcctcgtatgggcaaaaatgaaatactactacttctttatccctcatcaaatgagaaacattgtataatattatatatgctacctgaaacaccaaatgagaaattgayaacagcaatgacaaaattttaaacaggatacactttgcacatgttgtatttgaaattcaataacatttataagacatttagaaatggattctttcattgaagccaaaatactctagaactctttctcatctcctaataacagcactgagaaccttccattgaactttggggctttgaggaattcgatttgaaaactactgacctaaaagactaaagtcacagtagttaccaaacttcagggtgtataaaatcagtgggaatcacttgaaaataaacattctgctgcagggtatctatagaccaatataggagggaaatactcagccagatcttaaaaatcaggcctagtatttcaagaaaaatcttgagaaatcttattttaaaaattt

SEQ ID NO: 635277 - DNA, 581 bp, Homo sapiens
tctaatattaaaagaattactttgaaaatataaattaagacatctaaagaagaaaaaaagcattctttattcttcttcctgcctcctttactgtgccttacaaaaaaatattgttgacagttggctagccatctgttccagcagggccaaagtgtaaaagttggtgatatttttcaatgacagcagtctgaaaataacacattattttcagaaaatacgtctgttaatgtctcattaaaacattaaccaacaaagcagccagtttgaaaagaatcctcaagatcgagaaggcatgttttttacgtcccaagttatccmaaattgtatctttcaggttaaagctcctttaattttaaatatatcattgggcaatggggagggataatggagtgaggaacagcctaactttccaattctacattgctgacttcataggccaagaccaaactggtcattattattatgatgacaacacagtgacagcagcaagctatagtgggataagttctttgagctactaaatgagaaaatagcaaatatattgcaattccttccaagtctttatgtagctagcagctagc

SEQ ID NO: 635278 - DNA, 581 bp, Homo sapiens
tctaatattaaaagaattactttgaaaatataaattaagacatctaaagaagaaaaaaagcattctttattcttcttcctgcctcctttactgtgccttacaaaaaaatattgttgacagttggctagccatctgttccagcagggccaaagtgtaaaagttggtgatatttttcaatgacagcagtctgaaaataacacattattttcagaaaatacgtctgttaatgtctcattaaaacattaaccaacaaagcagccagtttgaaaagaatcctcaagatcgagaaggcatgttttttacgtcccaagttatcccaaattgtatctttcaggttaaagctcctttaattttaaatatatcattgggcaatggggagggataatggagtgaggaacagcytaactttccaattctacattgctgacttcataggccaagaccaaactggtcattattattatgatgacaacacagtgacagcagcaagctatagtgggataagttctttgagctactaaatgagaaaatagcaaatatattgcaattccttccaagtctttatgtagctagcagctagc

SEQ ID NO: 635279 - DNA, 624 bp, Homo sapiens
aactagctccttctgatttctagctctgtcactgaatgtctgtgtcatcctgctttatatgtgctttagatgaaagactgtggcatctgcttcgtataggagaaaatagagttaaagggttggctcaagatgccagtcattataataattcccatatttaatcctctatgttcctaaaaggctttttatattaatgtttactttgattaaggtatttaatcaatgttttcattgaactgagttcyatcactcctaaagtttttatccctttcttccggtttagtctcgattgttctctaaagcacagaaaagggaagatatatttaaaacttctatcaaaacaaagtgaaagagtagaatcattagattttttcaggaacatctgcagaacaacaagggccaaaaatgacttcaaatgacacataaaaatgtctcagtctaaaatattggcattctgctaggccctatttgactgataagtattatgcattttcctctgtctctttcacctacaaggctgagcaacaaactgtgtctagagtttcttcattttaatattcttgttgttccatctgggtcatttattaacaaatcccacaaaagtgtatttgagtcatcttattg

SEQ ID NO: 635280 - DNA, 499 bp, Homo sapiens
tttgttctatttcaagatcgtttgattattctaggtctcttgtatatctatataaatttcagaatcagcctttcaattttaaaacaaaacccagctggatttatttctaaattagtttttctgttttatttaacgaaatttagattttaattacaactgtgcactaaatcttagaatgaacaaagaataaagtgggcttagattttggtgcaatttttttgcagggcaggggacaaagttatacaatggtataaggtgtataaattctcaggacaacccataaagaccattttggaaaacatattcgaggggttcatgaaagaggcattttagaagtctttgatacttaagtcattctttttgcaacacatttatttacctttaattcttttaaagtttttttgaatttttractaatctcattctgctagattctcacttgacaaatgcttttcgtgtaaaattgtctctttcctgccttggtcaattttgccaaagg

SEQ ID NO: 635281 - DNA, 584 bp, Homo sapiens
catttctttaattttactatgttttgctttagaacttttttttcttctttctttggatttattattttcaccattcttcaaatgactgcttagctcattaatttcaattttttttctttttaaaatagatgtatgacacctgtatctttaccactatggaaaatgggcttattgttgtyccgttttcctttttcaacttttattttagattcagggggtacatgcgcaggtttgttacctgggtatactgcacgatgctcaggtttgaggtatgaatgatcccatcacccaggtactgagcatagtacccaatagttaatttttcagcccttttcccacttccagtagtccccagtttctattgctgtcatctttatatccatgagtacccaatatttagctccaacttataagtgagaaaatgtggtatttggttttctattcccatgttaattcatttaggataatcgccttcagctgtatccatgttgctacaaaggtcatgatttgattctacggctgcacagtattccatgatatacatgtaccaatccaccatttcttcatccaatccaccggtgatc

SEQ ID NO: 635282 - DNA, 590 bp, Homo sapiens
acctctctgggttactttcttctcttagattttggccccataaatttacactgctttttaagcttgctggtgctttcaaagataagtttttgagtatgctattcagttctaattgttcttagcgagaggttggtttgctttacctagtctgctgttactggaggcagaagtcttaacatgtattttttgttgttgttgttgttaaatagtttatgtttcttaactgttgggcctatttcagttttttactcatggttcctatttatgtcttkcttataagtaattctaacagttgaatgaaattaccaagaattatacttgcaatcacaatgactcagtggcttttcaatctcaatatcttaagtttttggttttaaattattatctgattcaattttaccatgtctttcattcctgatgatttttaaaaaacaaatgataatcaattttgtaaataacctggtactatataattaaagttgatagcagctgtctttttcattaggatatttaactggtatgcccttaatttttttgttgccattagatcctacatcatgcttataaagatcaaactaatacagtagcct

SEQ ID NO: 635283 - DNA, 596 bp, Homo sapiens
aaatcaaaccgttgtttttgacaaccagcctgaaccaatgatgtgcactaatcattttagtgttagaatatttgctcagactgtggccacatgatagtgttaaaatgttaaaagaaagtcaaagtcatttaatattgacaaggctactcctgaaggctccctctttacctgacaacattaaaaaacaaaagatatttatttagtttaaatagggggaagtggagagacaaaaagggaaagagattgtatggtagggttaaaatatgtattaaaataatttacttattattattgtaattttaaagctttttaacatgaaaaatgtgaaatatatgtaaagttagaacagtataacaggctgggcgtggtggctcatgcctgtaatccaagcactttgggaggccgaggtgggcagatcatgasgtcagaagttcgagatcagcctggccaatatggtgaaaccccgtctctactaagcatacaaaaacaattagccgggcatggtggcacacgcctgtaatcccagctactcaggaggctgagccaggagaattgcttgaacctgggaggaggagcttgcagtgagctgagatcgc

SEQ ID NO: 635284 - DNA, 596 bp, Homo sapiens
aaatcaaaccgttgtttttgacaaccagcctgaaccaatgatgtgcactaatcattttagtgttagaatatttgctcagactgtggccacatgatagtgttaaaatgttaaaagaaagtcaaagtcatttaatattgacaaggctactcctgaaggctccctctttacctgacaacattaaaaaacaaaagatatttatttagtttaaatagggggaagtggagagacaaaaagggaaagagattgtatggtagggttaaaatatgtattaaaataatttacttattattattgtaattttaaagctttttaacatgaaaaatgtgaaatatatgtaaagttagaacagtataacaggctgggcgtggtggctcatgcctgtaatccaagcactttgggaggccgaggtgggcagatcatgacgtcagaagttygagatcagcctggccaatatggtgaaaccccgtctctactaagcatacaaaaacaattagccgggcatggtggcacacgcctgtaatcccagctactcaggaggctgagccaggagaattgcttgaacctgggaggaggagcttgcagtgagctgagatcgc

SEQ ID NO: 635285 - DNA, 534 bp, Homo sapiens
  misc_feature 522, 523, 524, 525, 526, 527, 528, 529, 530, 531, 532, 533,534: n = A,T,C or G
atttcctcaaataaacaaaacatgatttttatagttcatttgtctaaatcaagatctgactcagaaacacaattttttcctcaaatttcttttactttagcagtgtccttttatttaattattgtttttaatatcaacttgttgaaaaaaactgaagcagttatccaacaaaaggttccacttttgcattggtcttgagatgttgtttaacttgttcctctatcctcggatttctaatcccttgtgttttactcttatatttaaagatttgtcaaattctaattaaatatttttgtccagaatgcatcctaaatacttcatattgcatgttatcagaaggcatcataacatatgattaacccacttgttccyttttttttttgaaataaggttggatggggtcttgctatgttgcccaggctaatctcaaactcctgggttcaagctttcctcctgccttggcctcttaaagtgctgggatttcaggcatgagctaccatacctggcctttttttttttttnnnnnnnnnnnnn

SEQ ID NO: 635286 - DNA, 647 bp, Homo sapiens
actattcattaagtggaagtgggtcatcataaaagtcttcgttcttgtcatcttcacattgagtaggctgaggagggagaggaagaggaggggttggtcttgctgtctcaggggtggcagagacagaaggaaatctgcttataagtggactcatgaagttcaaacccatgttgaagagtcacctgtaaatgctaaaagccccagtaagtcactctcaacttcttctgtatcagatgatgacatctctcaggggcacttctgacaataaattcaatatggactgtagtatatattccttttttatttttattttttgagaccacatttcattctgtttcccaggctggagtgcagtggtgtggtcagggctcactgcagcctccaactctcaggctcagtggatcctcccacctcagcctcccaggtagctgggactacaggtgtgcaccaccactccccgctaattttcttcttttttttttttkggagagatagagtctcattttgttgcccaggctgatcttgaattcttaggctcaagcagtcctctcacctttgcctcccaaagtgcttagattacagacgtgagccaccacactcaataatatattccttatcttgcagagtcttaaggtttattaagcgag

SEQ ID NO: 635287 - DNA, 488 bp, Homo sapiens
taaattcctggaaatatacaaccctccagattaaatcaggaaaaaacagaaactgaacagaccaataacaagtagcaagattgaaagagcaataaaaaaaaattgccaaccaaaaaaagtccaggaccagatgaattcacagctgaattccatcagacattcaaagamgaattggtctcaatcttactgaaactatttcaaaaggtaaagacggcatcctccctaaatcattctatgaagccaaaagcaggaaaagacataaccaaaaaagtaaactacacaccaatatccctaataaacatagatgcaaaaattctcaacaaaatactggttaatccatccaacagcatatcaaaaagataatccaccatgatcaagtgggtttcataccagggatgcagggatggtttaacatacgcaagtcaataaatgtgatacatcacataaacagaatgaaaaacaaaaataatattgttatctcgatagat

SEQ ID NO: 635288 - DNA, 488 bp, Homo sapiens
taaattcctggaaatatacaaccctccagattaaatcaggaaaaaacagaaactgaacagaccaataacaagtagcaagattgaaagagcaataaaaaaaaattgccaaccaaaaaaagtccaggaccagatgaattcacagctgaattccatcagacattcaaagaagaattggtctcaatcttactgaaactatttcaaaaggtaaagasggcatcctccctaaatcattctatgaagccaaaagcaggaaaagacataaccaaaaaagtaaactacacaccaatatccctaataaacatagatgcaaaaattctcaacaaaatactggttaatccatccaacagcatatcaaaaagataatccaccatgatcaagtgggtttcataccagggatgcagggatggtttaacatacgcaagtcaataaatgtgatacatcacataaacagaatgaaaaacaaaaataatattgttatctcgatagat

SEQ ID NO: 635289 - DNA, 608 bp, Homo sapiens
acagcgccctaattttgtcaattttatggaatttttcttaaggaatcccatcaccatcttatacctactacagtaatgtattagtcacttaccatgggccatgcattgccctaagttactttacatggacaatatcacttcatttcccctacaaccctatgagctcaatactatggttattccccttttgcttcaaattcacttgatcactaatatgaaagaatcttaaaaagtatttttaaaacatctatcttatacgttttattattacaatggactgaatataagtgcccctccaatatttatatcttgaaatcctaacccccaatgtgacggtattaggaggtggggcttttgggraaaaattaggttatgagggtggagccctcatgaatggcattagtgtccttataaaagggactgcagagagttctctttccaccatgtgaggatacaacaaaaagttggcagtgtataactcaggagaggaacctgcacaaccaggcgggtactctgatattgaacctacagactccagaaatgtcagaaataagttcctgttgtttataagccacccagtttatactattttgttatagcagcccaaa

SEQ ID NO: 635290 - DNA, 629 bp, Homo sapiens
aaacttggtcatttcatagtgataaccaatgtcatgaacaacagacattttacctgtcttagatggaaatcccacaatctacaaagagcatatgagcagccaaaccagcactcaaatccagatctgtcaattaggaaggagttagttgttccatgtctggatacttttcagtagaaaatacagatgggtagtcagaaggtacataatgaggtatttagtccattttattattttctggtagtttaatgtacaaaatatgtcaaaggaaatggttatgcagtctgtagttatagtttctctctctctctctctctcagctacctcaaagaaaagatgaaattccctgtgtcaggattttgattctatgctcaaatatttttatggtgaattaccaccagtgattgtcatgttactaagaggtcaagaataactagccccatgtcataaagaagcacggctgaaggttcgatgttactttgaaaccaccctgrtactctgcagcagaactaggagcaagactcaaaggctgctgtgccgtctttatttcttagctcattctttcattctttagaagggactatgccttgctttagaagatgctgtcattactttgtgacatttattatgag

SEQ ID NO: 635291 - DNA, 459 bp, Homo sapiens
tgcctatgatcccagcactttgggaggccgagacaggcagattgcttgagctctggagttcgagaccagtctgggcaacatgacaaaactctgtctctacaaaaatacaaaaattagctgggcatggtggtgcactcctgtactcccagctrctcaggaggctaagttagggggattgcttgagcccaggaggtggaggctgccatgagctgagattgtgccaaaacaaaaaacaaaacaaaacaaaacaaaacaaaacaaaaaaacacaaccatttaccttgagatatccttcttgacccatgtattatttgaagtgtgttgtttagtttccaaatgtttgaagattctcctattatctatttttatttctattttgatttcatcatagttggaaaacacactctgtgtgagtttaactcttttaaattatgttctaattaattctgttaactttgtc

SEQ ID NO: 635292 - DNA, 597 bp, Homo sapiens
ttggaaaacacactctgtgtgagtttaactcttttaaattatgttctaattaattctgttaactttgtcctatgggctagaatatgatctatcttggtacgtattttatggtcacttggaaaaaaatgtgttttctattgttgctaattgaaatratctataaatgtagatttacatcagtttactctcccctgtttataagatagttgtgttaaatattttctcttcatacatttagaaccacattagacagtgtgataatctttgcttcaatcataaaacataatttacaaaactcaagagaaaaaggaaagcccatctactcatagttttgcttactatgctctttctttcttcctggcattataaggtttcttcttttatcttttcctttctttttagaggacttcctttagccattcttttagggtagttctgcttatgacaaattcttttagtttttctttatttgagaatgtcttgatttctcctttattcctgaaaaataacttttgctatagtattctgggttgcagttcttttcttccagcacttgaaaaatattgtcctatttccttctggcctccatagtttctg

SEQ ID NO: 635293 - DNA, 568 bp, Homo sapiens
ttggaacttcttagagacttgttaaatgttgtgatcaaaatgctgatggaaatatggacagtgaagcttaggctgatgaggtctcagatgcaaatgaggaacttattgggaaatggagcaaagttcacccatgttacaccttagcaaagagcttggctgcactgtgtccaggccctagggatctgtggaagtttgaatctaagaatgatgagatagggtacctggcagaggaaattcacaatcagcaaagcattcaagaagtgtcccagctgtttcttacagcctatgaccagatrtgggaacaaagaaatgactcagagttggaacttatacttaaaagggaagcaaagcataaaactttggaaaatttgcaggccggccaagtggcagagaaagaaagagtgttttcaggagagaaatacaggtgggttgcagagcaacacttgctagagagagttgtgtgactaaaagagagccaagtgttaatatccaagacaatgggaaaaaggccttgagagcatttcagaaatctttgaggcagcccctcccatcaccagaggctaggagg

SEQ ID NO: 635294 - DNA, 571 bp, Homo sapiens
agcaaagcattcaagaagtgtcccagctgtttcttacagcctatgaccagatgtgggaacaaagaaatgactcagagttggaacttatacttaaaagggaagcaaagcataaaactttggaaaatttgcaggccggccaagtggcagagaaagaaagagtgttttcaggagagaaatacaggtgggttgcagagcaacacttgctagagagagttgtgtgactaaaagagagccaagtgttaatatccaagacaatgggaaaaaggccttgagagcatttcagaaatctttgaggcagcccctcccatcaccagaggctaggaggaaaggatggttttgtgggccaggcccagggccctgctgtcctgtgcagcctcaacacaccactccctgaatcccagccactgtagctacagctgtggctcaaaggaccccaggtacagctcaggtcactgctccakagggcacaagtcataagcctcggcagcttccacatggtgttaaatctgcagttgcacagaatgcaagtatgaaggaggcttggcagatccccactagatttcagagttgt

SEQ ID NO: 635295 - DNA, 562 bp, Homo sapiens
agagcctaggtcataggccttaatgacacagagtaaattggttaaggccaccagaaccagacctcaggagtttggatgttcacttgctttttccagtatacctcattcccgaaatagtataactactcaagtgactcctcccccattgtgtctcattaccctttcccttcacttccccatccatggtgtgtagcaggagtttctaagggtggtgggggtggatggctggagagagccctcttgcaaacctttccttaggggcctggaatttaaagtagagcttctccatcttggaggggcttccactggcaaaagctggaacaatctgagcattaaaaagaatatgaagtagaatttattgtaagtcattgaacaaatatccagcagagtatgacaataagatatagatagataaaaaccggatgagaagagaragggaaactcacttaccatcattgaaggtgattattgaaccaattccttattcaggaaattagtaattaaaaagaaagaaccaggcatttgcctgtccttttcaggaggcaatgtagttaattcctgt

SEQ ID NO: 635296 - DNA, 491 bp, Homo sapiens
cccagttttctcccagggctggccggtgtttgggtctctggttatgcggaggtgaataacgggtgaacactcaaacagacctgatctgattcctggcattgctgcttgcatggatsctgggaaagcctcttaactgttctgagcctcaggtgcctcaggtatccaagaggagagtaatctgcctcagggtgagggagactggaagccatgatgtggggaagctctatgcaactgcggctcttggaatgctggctggtctgtccatgagatccacgagtgtgagggtctcaggtcctggaatcccaaatgctctctgtggggactcaggcagggcagaaagactctgggggttccctgagaagcagaggaggaagtagggtgggcagtaactcccaccccccagggacacagaaggagccaggaaggagggatattcaattagcaggcgccatgggggctttgggccctgctggattgtgtgtgagtcccaa

SEQ ID NO: 635297 - DNA, 576 bp, Homo sapiens
tagcctggccagagcctgagagaggctgctaaatgagactgtcagattccctggctttgctcgtaatctagaaattcacaagctgcagaatcacaaatggagtccggggctttgttttcagctgacagggggagggatgaggagctgagccaaggtgagccgactcctcagtcaaggagagccacttggaaccatcagcgaaagaaatggagaggcctggtgatccctctttgggaagtcaaaaggtctcagggcacctctgaatggtgtggcccagagggcgggaccagactcaacctctcttggagcatgtggaaccctaaacaytggggatttcagaggtgtcagaaagactcctctgaccacaaagcctacagttccatcagtcgcatgctatacctcttgagttaggcgtcacccttaaaaacagcaaatatcctcaaaagagtaagtaatgaagccactaacctagtccctcaacagagcactgtacatcaacaaataatgtattatttgagctccttctgctcagccaggcccagtgctgggctctggggacacagagagtgggacaga

SEQ ID NO: 635298 - DNA, 532 bp, Homo sapiens
gagtttagaatcctgcctcggtgaataagaccatgcctggtcccaccctgagagacagcatgatgaagcatgggaacatggtacagccatggaggcactggtggggttgggtctcaggcgcccayggctgtgatgctgcactctgccaagtggcctctccctgtgctccagcagggcctcaccatgcagcctcctctgccttccaagcacatcagcgaggtaggggatccacacagcagatgcggaagagttaatccaatagaagagattgttattcacaggtccttctactgcacttaggaagtgtgcattattgagtctccttagctgctgaggaggagatctgaggatcaatggagaggaaagtgagcatgagggattttcttgccagctgcccatcttgtcaccccaggggagctgcttcctccctctgacaggcagtggggaagccaggccataagccagggcctgcctgggctctggtcctgccctccaagcaccttgtgcctcctctgaggttggcaacaagtgg

SEQ ID NO: 635299 - DNA, 421 bp, Homo sapiens
aggggagcgctcctcctcccagcctccagacgctgcgggtgctggccayggtgggatgacctggccaagccagctgggaacaccttagaaaccatggcctagttctcctctcaacctctcccagccccaaataggcaagcaccagaaaatgcagtttcaccacaggacaccctctctctctagcttagtagccccagtgtggggctgcgcgacgggacctgggttgaaatgttgtaattttcagaacatatcattaggaactccccaagatggtggcctgggcccacaggttccctgggaatccagttgctgtggcaacaggaaagcatcccacggaggcagggcgaggtggcctggaaagtgcagaggctgtctgtggtgttactgcctggggaccggaggcctttgtgccctccttccc

SEQ ID NO: 635300 - DNA, 291 bp, Homo sapiens
aagaaattctgactgtggactgactatagcctcagctcctgctagagagtttccagcctgccagccyaccctactctacagatttcagatttgctagccccttcagtcacatcagccaattccttgaaattctgtctctctgaacacacacacacacacacacacacacacacacacacacccctgtatatctatagaaatatagatatccagtaggttctgtttctctggtagaacactgactgatgatacacgattcaaatagaactcatcaaaaagctagagttacta

SEQ ID NO: 635301 - DNA, 291 bp, Homo sapiens
aagaaattctgactgtggactgactatagcctcagctcctgctagagagtttccagcctgccagcctaccctactctacagatttcagatttgctagccccttcagtcacatcagccaattccttgaaattctgtctctctgaacacayacacacacacacacacacacacacacacacacccctgtatatctatagaaatatagatatccagtaggttctgtttctctggtagaacactgactgatgatacacgattcaaatagaactcatcaaaaagctagagttacta

SEQ ID NO: 635302 - DNA, 520 bp, Homo sapiens
ggaagggcaactctcacacgagggtcttatgacctgcttcagaaggtcagagtccttcccaaagtttatgaccacttcaggggaccgcctcaggggaccttcctgcttctgctgttttctcaaattcctctagcttaaaatattcaacatgccaaagtgccatattgtggggcagtatgtcctgaacccatgattttttaayaccaagtcttctcttccccttcttgactgctgcagagatcctgtgtttcctttaaaggcccggttctaaagtcatctctcgtgtgatgcctcccctgagtcgccagggacggccgctctgttcccggtcactttgtgcatgtatagcatcatcacacagtgctgtagcatatgcatctgtgtgagtacacatctgtcttctccgagattgcgagtgccttgggaagaagcaccgagtgttcttcatctcagtctcccctgtcccttgtacggtgtctggctgaagctagaaagtcagaaagtgctggtcaaatgaata

SEQ ID NO: 635303 - DNA, 520 bp, Homo sapiens
ggaagggcaactctcacacgagggtcttatgacctgcttcagaaggtcagagtccttcccaaagtttatgaccacttcaggggaccgcctcaggggaccttcctgcttctgctgttttctcaaattcctctagcttaaaatattcaacatgccaaagtgccatattgtggggcagtatgtcctgaacccatgattttttaacaccaagtcttctcttccccttcttgactgctgcagagrtcctgtgtttcctttaaaggcccggttctaaagtcatctctcgtgtgatgcctcccctgagtcgccagggacggccgctctgttcccggtcactttgtgcatgtatagcatcatcacacagtgctgtagcatatgcatctgtgtgagtacacatctgtcttctccgagattgcgagtgccttgggaagaagcaccgagtgttcttcatctcagtctcccctgtcccttgtacggtgtctggctgaagctagaaagtcagaaagtgctggtcaaatgaata

SEQ ID NO: 635304 - DNA, 520 bp, Homo sapiens
ggaagggcaactctcacacgagggtcttatgacctgcttcagaaggtcagagtccttcccaaagtttatgaccacttcaggggaccgcctcaggggaccttcctgcttctgctgttttctcaaattcctctagcttaaaatattcaacatgccaaagtgccatattgtggggcagtatgtcctgaacccatgattttttaacaccaagtcttctcttccccttcttgactgctgcagagatcctgtgtttcctttaaaggcccggttctaaagtcatctctcgtgtgatgcctcccctgagtcgccagggacggccgctctgttcccggtcactttgtgcatgtatagcatcatcacacagtgctgtagcatatgcatctgtgtgagtacacatctgtcttctccgagaytgcgagtgccttgggaagaagcaccgagtgttcttcatctcagtctcccctgtcccttgtacggtgtctggctgaagctagaaagtcagaaagtgctggtcaaatgaata

SEQ ID NO: 635305 - DNA, 411 bp, Homo sapiens
atgggccagtacaagccatttctgggatgctaaacatttttaaaaaaataccaattctacaaaaactgttgcagaaaagaracggggaggaaacatttctaaacagaattctagcagaaaaaaaatcagcaatatatacaaagaataacaaagtgtgatcaaatgggatttatcctaggaattcaaggttggcttaacattcaaaagtcagtttttttaagttttaaaatctttatttatttattttatttaaatagctttgggggtacaagtggtttttacctacatggatgaattctatagtggtgaattctgagattttagtgcacccatcacctgagcagtgtaactgtacccagtatgaagtcttttatccctcacctcgctcccaacctccccacccacaaatcc

SEQ ID NO: 635306 - DNA, 411 bp, Homo sapiens
atgggccagtacaagccatttctgggatgctaaacatttttaaaaaaataccaattctacaaaaactgttgcagaaaagagacggggaggaaacatttctaaacagaattytagcagaaaaaaaatcagcaatatatacaaagaataacaaagtgtgatcaaatgggatttatcctaggaattcaaggttggcttaacattcaaaagtcagtttttttaagttttaaaatctttatttatttattttatttaaatagctttgggggtacaagtggtttttacctacatggatgaattctatagtggtgaattctgagattttagtgcacccatcacctgagcagtgtaactgtacccagtatgaagtcttttatccctcacctcgctcccaacctccccacccacaaatcc

SEQ ID NO: 635307 - DNA, 556 bp, Homo sapiens
tacaacaatgtgaatgtagttaacactactgaactgtatactcaaaaatgataaayggtaagtgttatgtgtttttaaccacaatttttaaaaagtcaatctataatttatcatatgtggtagtcataatatctatgtcctaatccacagaacttgtgaatatactactttatgtagcaaaagatattttgcagatatgattgttaaggattttgagatgggagattattctggattatcaggatgggcccaatgtaatcacaaagatccttgtacctaaaagagggaggcaggagagtcagacaaaaagatgtgtcatgacagaagcagagattggagtgatataaatgctggctttgaagatggaaaaagtcatgagccagggaacatgtgcagcctctacaagctggaaaaggcaaagaaacgggttatcttctagagccttcagaaaagatgcagccctgccaacattttgattttagcccattttgggcttctgacctccaaaactataagataataaatttgtgttgttttaagccactaagcttgttac

SEQ ID NO: 635308 - DNA, 556 bp, Homo sapiens
tacaacaatgtgaatgtagttaacactactgaactgtatactcaaaaatgataaacggtaagtgttatgtgtttttaaccacaatttttaaaaagtcaatctataatttatcatatgtggtagtcataatatctatgtcctaatccacagaacttgtgaatatactactttatgtagcaaaagatattttgcagatatgattgttaaggattttgagatgggagattattctggattatcaggatgggcccaatgtaatcacaaagatccttgtacctaaaagagggaggcaggagagtcagacaaaaagatgtgtcatgacagaagcagagattggagtgatataaatgctggctttgaagatggaaaaagtcatgagccagggaacatgtgcagcctctacaagctggaaaaggcaaagaaacgggttatcttctagagccttcagaaaagatgcagccctgccaacatyttgattttagcccattttgggcttctgacctccaaaactataagataataaatttgtgttgttttaagccactaagcttgttac

SEQ ID NO: 635309 - DNA, 503 bp, Homo sapiens
agttcatgagggaggggctcaggacagacaccccaaggcattgcttcctgctctttcttcttggtgcttgcccaccccccagctctgccaccctacgtctccccagggtggaggcaggcagggctcttgcctcactgtcatctgagtgccagcacatccgtaacaggatggacaggctgctattgtcccgacaygtctcctccacctggcttccctgaaaactgtcagattagtggaaatttgagccaggttcacagccctgcaccctggccggcctccctgctggagctgccctgctctgggcagccttcctcctcaagccttcaccttccaccagacttggcctcactgccgcagcagtcagcatcccacaaccttgcatcctgatctgttcttgccaagaaccagctgagtgcctggcagtcctctggaaaccttgggctttggggcagtacccacaggttgcctgcagtctgcgctggctttgttctgttttaaccacc

SEQ ID NO: 635310 - DNA, 563 bp, Homo sapiens
tgaactcttgacctcaagtgatcctcccgcctctgtctcccaaagtgctgggattacaggcgtgagctaccacgtccagcctatttccttacattttaattggataaattaaattggataaactgaagtgtggcctaaaagaatagtctctgaaaattggtcagactctagatgtttgttcttatatatatgtctggctttttacagacaaactatttgacataagtttatttagctttcattttttrgtgttgtatgaaataaaccttagctgctgataggcttgtacattgactgttcatttttctaacagcagacactggtctggagacttctacccgtagcaggaactcaaagactgctgtgtcagcatctagaaatatgtctattatagatggtgagtatagactgcaagtgattatttataaattccaacattagaaagaccaaggtaatcaccattggtagcccttatttgtgttgcaatcattgggaagttataagggcaattaggatcacaggataaattattttttaaaagatctttgctatgcattagagtt

SEQ ID NO: 635311 - DNA, 500 bp, Homo sapiens
atatctctttttattgcactgtagtccaagagtatacttggtatgattttgatttttttgaatttatttagacttactttgactgaacacgtgatctatcttagaatatgttctgtgtgtagatgggaagaatttgtatcctgcagttactggatgaagtattttgtagctttcaattaggtctgattggtcaagtgtcaagtttaagtcctgaatttgttagttttctgcctggatgtctttctaacactgtcagtggggtgttgaagcctcccactattactctgttgctgtctgagtctttttttaggttaagcasaacttgatttatgaatctgggcatgtatatatttggcatagttaggtcttcctgttgaatcaaaccgtttatcattatataatacctttctttgtccctttttactgttggttggtttaaagtcggctatatctgataaaagaattgtgactcctgcccttttttgtttttcatttgcatg

SEQ ID NO: 635312 - DNA, 500 bp, Homo sapiens
atatctctttttattgcactgtagtccaagagtatacttggtatgattttgatttttttgaatttatttagacttactttgactgaacacgtgatctatcttagaatatgttctgtgtgtagatgggaagaatttgtatcctgcagttactggatgaagtattttgtagctttcaattaggtctgattggtcaagtgtcaagtttaagtcctgaatttgttagttttctgcctggatgtctttctaacactgtcagtggggtgttgaagcctcccactattactctgttgctgtctgagtctttttttaggttaagcacaacttgatttatgaatctgggcatgtatatatttggcatagttaggtcttcctgttgaatcaaaccgtttatcattatataatacctttctttgtccctttttactgttggttggtttaaartcggctatatctgataaaagaattgtgactcctgcccttttttgtttttcatttgcatg

SEQ ID NO: 635313 - DNA, 539 bp, Homo sapiens
aattttggctgtgatccagtagctggcatttaacattagtgtccagtggataggctcttactcagctgcatagttcttttgtatttctgtgtgttcacagcygtgctctgtggtggggttggggagagagatgaccactcataagggccactcctggaccatgggtgaggtccctcctatcactggcactgtacctgcattactgttgtttggtgtcttgggttgcagggctcccttagacagaggccatggctgccagacaggccacacccttcccagaccagcactatggaggaaggcatgtcccattcctgcactggcccacgaacccacgtgtctcactcctttcagtgttctgaaagtgggatttctcccctacttgagtgccagccccagctcttagctcgacagccccagctgtgtgctgtagccctgtagcactgggaccagcctgtggctccatcgtctggaccctcagggtcaggcaccagctgtgctggggaatctgaaatgctcccaggctgccaggaaggtactca

SEQ ID NO: 635314 - DNA, 539 bp, Homo sapiens
aattttggctgtgatccagtagctggcatttaacattagtgtccagtggataggctcttactcagctgcatagttcttttgtatttctgtgtgttcacagctgtgctctgtggtggggttggggagagagatgaccactcataagggccactcctggaccatgggtgaggtccctcctatcactggcactgtacctgcattactgttgtttggtgtcttgggttgcagggctcccttagacagaggccatggctgccagacaggccacacccttcccagaccagcactrtggaggaaggcatgtcccattcctgcactggcccacgaacccacgtgtctcactcctttcagtgttctgaaagtgggatttctcccctacttgagtgccagccccagctcttagctcgacagccccagctgtgtgctgtagccctgtagcactgggaccagcctgtggctccatcgtctggaccctcagggtcaggcaccagctgtgctggggaatctgaaatgctcccaggctgccaggaaggtactca

SEQ ID NO: 635315 - DNA, 513 bp, Homo sapiens
ctgtgggacctccccagtgtgctgctgtggctgggctctcagggaaagtacagggcataagacctcccttaaccactagtttgttttgcagaaaacccttttttcattttctgtttccctttattttggcagttggagaccttccccagacgcctccaggggctgtcccagacccctctcttgccagtacagactcttcagagccttctcccctggctggagatggagcgccctggagtgggagcagcatggctgacactcccatgagccccctgctgaaggggagcctcagccaggagctgagcaagagcttcctgaccctgacccrgcctgaccgggccctggtgaggaccagcagtcgacgggaacaacgcaggggggcaggtggctatcagccccttgaccggcggggctcaggggagcccacgccccagaaagccggctcctcagactcctgcttcagcggcactgacagggagacattgagcagcttcaagagtgagaagaccaact

SEQ ID NO: 635316 - DNA, 597 bp, Homo sapiens
ctcacctgcactggggagggtcctctgctttcctcaatctatccattcaaatgctaatatcatctgaaaacaccccaaagacacacccaggaataatgtttaatcaattatctgggtaccccataacccagtctatacttaaaattaaccatcaagactatatatgcatttatagaaaaatatatatgaaatgtatctaaaaacattttaaatttaaaagtcagccctccctcagagtgstctcaccccacggacaagggagtttaccctccaactcccatcaggcattggctgagagttgcttcaggaggtgttaactcgtcacacttctggccttccagatgcataggctggacatactcctgcagccaggggaagccccaaacaaagttgcaggtatatgtgtgagataccttgatcagggatgtgggggatgggggcagagcactatcagacatgttgcgtttttgcaacaatgggcataagaaggatatttgaaaatctttaagcacactattagtggttaagaagacctattgatttttggatgcccatcatgtgctgaataccatgcccgacccccaagtgcatcatctc

SEQ ID NO: 635317 - DNA, 546 bp, Homo sapiens
caacaagcacttgtggggccccakctatgggcccggccctgccctgggatccaaggataaaatggcgagccagaggcacgcaacccttccctctggaggcggccgccggccacgcttccaccccacatggttacaaggaagaaatgaaccagaagcgggcaggtgggagcttctgggggctgcccaacctatctgtggccttgagggtcaggtgccgggtacccttttatgatcattctttaagctctaagatggcgtttcacgcatttttagcgcttctggtgttaatagattaagtatacaaatttactgtccaaactgtgatattcttaagagtgacagagcgctggtaatgagtatactgagacaggaagtgttaacagagagcaccccagcagccacacgtgcacagtgtatgcagggcagcacagtcatcacagggtccctgcttgctaacagaacactgccacttccgcaagtatcatcattaacacccatggcccctgttcactgtgggaccctccagagttaggaatgtactccaaa

SEQ ID NO: 635318 - DNA, 420 bp, Homo sapiens
ggattcttacaattcaacaataaaaaagcaacccawttaagaaacaagcaaagaatgtgcatagacattcctccaaagaagacatacaaatggctaaaaagcacaaggaaaagatgctctaagtcattagtcatagggaaatcaaagcaaaaccacagtgacataccacttcacatccattaggatggttagaatcaaaacgacagacaagtggtgatgaagatgtggagccctcatctgttgctggtagaaatataaaatagtacacctgctttggaaaacagtgtgatagtttttcaaattgttaaacagagttaccacatgacccagcaattccaatcctaggtatactgccaagagaattgaaaacatgtccatgaaaaaacttgtacacaactgtttgtagcatcattactcaaa

SEQ ID NO: 635319 - DNA, 574 bp, Homo sapiens
tgttttagttctgacataccacaagtgaaaaatccacacctaatctcatgtgacagttcacaggcaaaacacattcaaacttgttttatgcacaaaattattaaaaatactgtataaaattaccttcagggtatgtgtataaggtgtatatgaagcataaacgattttcatgtgtagacttgggtcctgtctcctagatatctcattatatgtatgcagatattcccaaatcttaaagtatctgaaatctgaaaacacttctagtccaaagcattttggataaggtgtacttaacctatactacccaaagccatctatatagatccagtgcaattcctgcaaaaaataccaatggcattcttcacagaaagagaaaaagataattttaaagttcacatggaaccacaaaagaccctgaatagccmaagcgatactgaacaaaaagaacaatgctggaggggactgcagcagatgggtgggctcctttgactccactttgcctccttggcaatgagtgggctatcccactctcccacggcatctgtatttaaaaaaaaaaaaaatactgaggcat

SEQ ID NO: 635320 - DNA, 549 bp, Homo sapiens
acaggtgcaacaaaccaccatggcacatgtatacctatgtaacaaacctgcacattctgcacatgtatcccagaacttaaagtaaaatawaaaaaaaaaagttctggggtaaaattcacattttccttctctgcattttttttttttttaaagctcaggtgactggacaatgtctttgtttgcaggacaggatggcctctgagcctatcttgacataacttagcctaaaagaaactaacatttggcttggttttctgtggtctttttctaaaagatctttcaagctggaagaaaaactgttccgttagaagttcatgtttcatctacataataaatatatcagattagaagacagcatcctagtagtaagttccaaacacatttatgagaccttttcattactttttaatttcccaaagtttcatttaagctctcagatttgaccaaaaccattttactaaacatatttttttttattgtatatggataaccttcaagacctaaagaaataccatagtgtaaaaatatgaaggatgttagctacacaga

SEQ ID NO: 635321 - DNA, 408 bp, Homo sapiens
cagtcgtcaggctttaggcacccaactattttgttttggaaggaaatcttcttagaatacatggcatactttcctaacctttgtaaaagagtaaaccaaacacagtgatccaagagcatcatgacaaccatgagtaaagctgctgtaatataaaagcagcacccctggcctccatggtattttggtgsggggtgtcactcctcactaatggatagggatgtgggcttttgctccatttcctagtccctcccttgctgtcattcttcttgctcggcagtgtcgccctgaaggagaccctttgttatgttactaacctgatgtaggcttagataccagagcagcagtgttagaggttcccaggctaaggaaaggacagcagccacatttcatgggttgtcccaggcaaag

SEQ ID NO: 635322 - DNA, 507 bp, Homo sapiens
caaaaagaaagaggtatcatagaccaaaatataaaaccaaaaactataaaacttctagaataaaacatagatgaaaatctttatgaccttgaataagaygaagatttcctagatacaatactaaaagtattatccataaaacaacaagttgataaattagacttcacaaaaactaaaacctgttgagattaaaagaaaagccacagacttggagaaaatatctgcaaaacatatatcttataaaagatttgtatgcagaacataaaaagaattctcaaaattctaaactgagaacacacaaaccaaatatagatatgggcaaaagacatgaacagacactttatcaaagaagatctacgagtagcaaataagtacatgaaaggatgctcaccctcattagtaattagagaaatacaattagaacaacaagagatagcactacataccaaatagaatggctagaattacaaagacccacaatagtgagcgttagggatggtaatgagt

SEQ ID NO: 635323 - DNA, 507 bp, Homo sapiens
caaaaagaaagaggtatcatagaccaaaatataaaaccaaaaactataaaacttctagaataaaacatagatgaaaatctttatgaccttgaataagacgaagatttcctagatacaatactaaaagtattatccataaaacaacaagttgataaattagacttcacaaaaactaaaacctgttgagattaaaagaaaagccacagacttggagaaaatatctgcaaaacatatatcttataaaagatttgtatgcagaacataaaaagaattctcaaaattctaaactgagaacacacaaaccaaatatagatatgggcaaaagacatgaacagacactttatcaaagaagatctacgagtagcaaataagtacatgaaaggatgctcaccctcattagtaattagagaaatacaattagaacaacaagagatagcactacataccaaatagaatggctagaattacaaagacmcacaatagtgagcgttagggatggtaatgagt

SEQ ID NO: 635324 - DNA, 539 bp, Homo sapiens
gaactagacaataaataataacataaattaggaagtgatagaataaactagaaaataagtgctatgaacaagagaaaagcagagcagggttgggtagacagagctgggctgcgggtgggtaagtagcaattttaaataggaatttcatggaaggcctaagcatccactatgggtcttcctccagtttcagtttttcaactcagacccatggtactttcatgggccacactcacaccaaggccacccagaagaacggaggtcagaacaccaagcaccagcagggcagcgccaggtgcccctcttgctgggagtcctgcagcagtctggcacagacacgggaggcragaacctcctgtgtggggtcaccggggctcaaaagtctcattcttcacagaagccaacagctcttgtaacaaactccatagtcacaacttccaggttccctgcagggaacatgccagttgcaggagtaacccttccttcttcaaggtctctcacagtaagtgtgagacctgagccaagacctgaggcaggagagg

SEQ ID NO: 635325 - DNA, 561 bp, Homo sapiens
gtaacaattttcttcatcaagtgctacctacttcttacatttattgctagatattttatacatttgctgatattgttggtggaaagttgttgtggattgtggagtgtgctgtgtgttatgtggattttgtatttggccctaatattttggtttcttctctgaagttttccttttgcttattaaaatatatattactcatgtattttttttggttttgttgcattggttagaactttcaaagtattacgtaaaaacagggacactgcctgtatatttgtattgctgctcattctaaggtagatggaggaatcgtaaagctggacctttggtttcaccatttaaccaagtgtccagttttaagagaggtttttttaaggaagaaagctctattcttagtgtatatatatatatctwatatatacacatttacatttatatatatacaatatatgtaaatttacatagaaatgattttaaccagaaatattattttttatttaaatataattttttctttaatctttaaatttctgaagttacatttacttgatcatgtgtatt

SEQ ID NO: 635326 - DNA, 566 bp, Homo sapiens
ctaccttgtctttaagctgtcgtttcttttgccatgtagtttttctccatgtctagttcactctcagctttaggtgttccatttatactatgatttagagagattttctttgtctttatttttattatttttcatattttaaatttctattttttgtgtgattaatgtacttcaatttcaatgttagagatttttgagggcgtttgatttagaatatcatctctataataagttatttctctactgtaaagatagaaagggagaaatgtttcccctcaactgtaatggacagtttggaggagcaaacacgtaaaagtgtccctatccttttccttttttttgatttwcaatgtttaagttcaggggtacacgttcaggatgtgtaggtttgttacataggtaaacgtgtgccatggtggtttgctgcacagatcatcccatcacctaggtattaagcttagcatccattagatattcttcctgatgctctccctcctctcacctgccaccctccaacaggccccactgtgtgttgttcccctccatgtgaccatgtgttctcatca

SEQ ID NO: 635327 - DNA, 505 bp, Homo sapiens
ggtatttctgcctctagatctttgaggattccccacactgtcttccactatggtgaactacgttacactcccacaaacagtgtaaaagcattcctttttctccacaccctcaccagtatctgttgttgttgttgttgttgttgactttttagtaatagccattctgactggtgtgagatggtatcttattgtggttttaacttgcrtttctctaatgatcagtgatgttgagcttttgttcatgtttgttggctgcatatatgtcttcttttatgtcctttgcccaattttttaaatgaggtcgtttgttttttttcttataaatttgtttaagtttcttgtagatgctggatattagacctttgtcagatggatagattgcaaaatttttctcccattctataggttgtctgttcactctgatgatagtttctttggctatgcagaagtagacaagggttttttttttttcatgcacttgtacctgtcttagcagaattccatt

SEQ ID NO: 635328 - DNA, 592 bp, Homo sapiens
tatctgttgttgttgttgttgttgttgactttttagtaatagccattctgactggtgtgagatggtatcttattgtggttttaacttgcgtttctctaatgatcagtgatgttgagcttttgttcatgtttgttggctgcatatatgtcttcttttatgtcctttgcccaattttttaaatgaggtcgtttgttttttttcttataaatttgtttaagtttcttgtagatgctggatattagacctttgtcagatggatagattgcaaaatttttctcccattctataggttgtctgttcactctgatgatagtttctttggctatgyagaagtagacaagggttttttttttttcatgcacttgtacctgtcttagcagaattccattattacttgttactcaatgttttttagccttgtggtgaggagcaggtgtattctctattcttctaattaagcatcagccttatataggcactgtgcctgggcttcaggactgtggtcttctcagtgttcctgtgcttctgctgggcataattctgagcccaattatatattcctgcaccttccctagagcagattttttttttc

SEQ ID NO: 635329 - DNA, 592 bp, Homo sapiens
tatctgttgttgttgttgttgttgttgactttttagtaatagccattctgactggtgtgagatggtatcttattgtggttttaacttgcgtttctctaatgatcagtgatgttgagcttttgttcatgtttgttggctgcatatatgtcttcttttatgtcctttgcccaattttttaaatgaggtcgtttgttttttttcttataaatttgtttaagtttcttgtagatgctggatattagacctttgtcagatggatagattgcaaaatttttctcccattctataggttgtctgttcactctgatgatagtttctttggctatgcrgaagtagacaagggttttttttttttcatgcacttgtacctgtcttagcagaattccattattacttgttactcaatgttttttagccttgtggtgaggagcaggtgtattctctattcttctaattaagcatcagccttatataggcactgtgcctgggcttcaggactgtggtcttctcagtgttcctgtgcttctgctgggcataattctgagcccaattatatattcctgcaccttccctagagcagattttttttttc

SEQ ID NO: 635330 - DNA, 600 bp, Homo sapiens
tgacagtgcttgttggctttcctccagcagttttggccttattatgaagaggaaaaaggcaaggagaatctgggtggggttttatgcctttcctgacacagccactgttcttttccttcaggcttgcattgcaaggggatactcttcaggactctcatcaatctgttttgtgatcactggtgagttgcatgtagaaaagcctgtgaatgggtgcaaatttttcttatatctgcaccctcaggagtactttgttctcctgagatscattgcttggccttaacagttcaataacaattttagctaaattcttaccagcatctggcagcatctgtcctgggtaattgagtgctcatgttctatctctccttgtagacacttgcaaatacttagatttcagattagctggtttttttttttttctgtaaactcagatctctgatgggttcgagtacaattataaatttgtggattgtttggcatttttgttgcaagagttgaagtgatgctttttctagttttctacatcttaagcaatagccagaagtagcactattcttaataccccaaactggaaactgccataatgtctattaacagtca

SEQ ID NO: 635331 - DNA, 457 bp, Homo sapiens
tgcaaaactaatttatgcttttgaaaattaaggaagcaatgatcattggaaagccagagactggaatggagaacaagaggggcttctgagatcccagccatgttctgtttcttgatatgtttgttatttctataactttgtatttctgaaaacagaaatacatgtataatttccacttttctgtgtgtatattatgattcatcaaaaatatttttaaaatatctattaataaaagcatggattcataacttttcaaatagctaactaaatgcarctaaaacataatccagcaaaagagaaaattaagagaatggcaagaaagctgagaaaataaagtgctaaagcctaaggacatcaattatggcaataaatataaatgcttaacatttttccccattaaaagataataaaatacaataaaactcatgtatgtttttaatgatgtacaaatgcaaaa

SEQ ID NO: 635332 - DNA, 532 bp, Homo sapiens
tctagcttcatgcatgaggctgggcatcagaggacaatgccaccctctcctagaccctggaaaggaagcacttcatagtgtggccactatgtaagagaagagatggagaaatcaggcctgggggatttggctgaaggagaatggaggctttgtatgggaattaaatagaagagctttaaaatattttgttttgaaagctttgagacataaatatttgatattttaagatctggtrttttaagaattgcacatatttaatatatgcattttgatggatttggatatatgtatataccatatttaagacagtaaacatatccattacctctgaaaatttcctcatattcttttgtgggtttttttgtgttcacatagctgaaaggagtctatggaagtagaaataacaactatttccatcaggaatttttccttgaagacagtgtgggtttgggatatgtagtcttacaggaattcagataaatctgagaaaatggagacctgtgggtgaggcttagattaataaatggatctt

SEQ ID NO: 635333 - DNA, 449 bp, Homo sapiens
ggcttagattaataaatggatcttaaaatttaactactcctggctgggcgtggtggctcacatctgtaatcccagcactttgggagggcaaggcaggcgaatcacttgaggtcagaagtttgagaccagcctggccaacacagtgaaaccccgtctctactaaaagtacaaaaattagctgagtgcatctgtaatcccagctactcaagaggctgaggcaggagaactgcttgaacccaggaggcrgaggttgcagccaagatggtgccactgcactccaacatgggtgacagagcaagattccatctcaatgactccattttgaaaataagaaagaaataatttggagaaaaactttcaagactttaaaaagatcttacctcactatagctcattataactttctagaaaacttcacattttttatctaattgaaattacatgaattc

SEQ ID NO: 635334 - DNA, 423 bp, Homo sapiens
gaattctctgtttaaagatgcycaaattgatgtgcatctacgattttatctagattaaattatcatattattattcaatacatacatttgagaccccaactatgtgttatatgctatgtaaagcccagaataacaaggttcaatttctattgtcacaaagttcaacatctaatgacagagatagacagttataaggttaacaggaactcagtgttataaaaactatgatcacagaatgttcagtgtgttggcagatacctctctatgggtctcaagtttctgcacatctaagtgatgcactaattatcccttgttttagactgtctgttcaaagatgttatgtaacagaaaatcttgaaagacaaagataatctatttttcaggagcaaaaggcaggtgtgtttactacccattacaaaagat

SEQ ID NO: 635335 - DNA, 504 bp, Homo sapiens
tatcacctgggagatgaaggaagcagaagggagaggaaagtagggagctatatatgctttttttgtttgaaaaatatactatacctgttagttcactactaaaagaaaaggaactgargatttatgtttgggtcttccttgttaataaaatagctcaaaaatgtatattcttagaggcgctgatcttagatgactcaagaagaaatatgttctgccgtaaggtggatgctcatctttgaatctccaatcattagtctaaacttgttcacaatagcacaaggctagagcactgactttgtgtctatataatcctaaaacatcccatcagccagttcagtgaaaaccatgaaaagccatgtaagtcagtcttcttgtttgatttttgctgttatagacagaggttttatcattggttcccaaatcaagttttggtatggtctcagaaactgtcagttttctgtctgggcctcagtttggtgtctgcaacacagtatgctctcacat

SEQ ID NO: 635336 - DNA, 594 bp, Homo sapiens
gttccattctccctgtctctttcaggttctccaatcaatcataggttcggtctttttacgtagtcccatgttttttggaggtttttttgttccttttcatttttctttaatcttgtctgcctgccttatttcagcaaaatggtcttcaaactctgatatcctttcttctgcttgattgatttggctattgatacttgtgtatgcttcacgaagttcttgtgctgttttcagctccaycaggtcatttatgacctctaaactggctattctagttagcaactcctgtaaccttttataaaggttcttagcttatttgcattggattagaacatgctcctttagctcaacggagtttgttattatccaccttctgaagtctacttctgttaatttgtccacctcatcctccatccagttctgcacccttgctggagaggcattgtgatcatttggaggaggagaggcactctggccttttgggttttcagtgttttttcactgattctttctcatcttcatgagtttgtctagttttgatctttgaggctgctgacccttggatgaggtttttatggggacttttttgttgatgtt

SEQ ID NO: 635337 - DNA, 586 bp, Homo sapiens
tccaagaagagcctggcccaggggtcaggaagcaccaaaggtgtttcagtggtgatgctccacagtgacagttcgggcaccagcaacyaagtgacggtggtggggaggtgcattccaggccccgtagcctcaaaagtcagctcgcgtggccacctcccttctgcacctgaggccttgcggctggcgctgtctctgctcaggggcctaaataaagccgaaaaaggaaggagatgctgttcgccttcccagatgggaccaccagggggcagtggagcacactcgcaggctgcaggctgccggccgcctcaggactaggaaaaggcgtcgggagctgctgtggcaggggaaacaggcgaccctagggtcagaaatcatcttcagagcaccgggtctcctctcagagaatggcaggactgtgcattggcttcaaaccagccagcttttatcgtcactcagaagctgcccaaccctaacaaccccatcatcattttgttccgaatcatcacccttattttactggcatgaagagcccagagaggttgagtaactgcactgaagccacacagccatgaaagtggtcgagcac

SEQ ID NO: 635338 - DNA, 586 bp, Homo sapiens
tccaagaagagcctggcccaggggtcaggaagcaccaaaggtgtttcagtggtgatgctccacagtgacagttcgggcaccagcaactaagtgacggtggtggggaggtgcattccaggccccgtagcctcaaaagtcagctcgcgtggccacctcccttctgcacctgaggccttgcggctggcgctgtstctgctcaggggcctaaataaagccgaaaaaggaaggagatgctgttcgccttcccagatgggaccaccagggggcagtggagcacactcgcaggctgcaggctgccggccgcctcaggactaggaaaaggcgtcgggagctgctgtggcaggggaaacaggcgaccctagggtcagaaatcatcttcagagcaccgggtctcctctcagagaatggcaggactgtgcattggcttcaaaccagccagcttttatcgtcactcagaagctgcccaaccctaacaaccccatcatcattttgttccgaatcatcacccttattttactggcatgaagagcccagagaggttgagtaactgcactgaagccacacagccatgaaagtggtcgagcac

SEQ ID NO: 635339 - DNA, 596 bp, Homo sapiens
gccacagctggtgtgttaggctgtggggaatacctcctgggaccaagccgtctatcctccatggctccagcaggagaaaagtggggcctggagctatagagatggctgctacttttccctgcccctgggagcttggtgtgttaggcagctagcagtcacagtgttgtctgccacctctctcccaaggagctcaaacggcttagacagcagacagatgcagctgtggtgctggctgcccctcccactggaaacttggcagtcttaagaagattctagctgagtggctgttgagaatcggcatagttcggtggttgggaccttaggccctggtggcttgggctcatgagtgggatcttccaatccatggaatgcatagttccatggaaaaagcacagtttcccaggctgggtagcacactcactcactgcttccctcggctggggagtggggactcccctgccccctgtgcctctcaggtgggctgctgcactacactgctcttccttcctctccgtgggtcacaccagccgcctagtcagtcctgaygacaggacctggatacctcagttgctggtgcaggattcatacactgttat

SEQ ID NO: 635340 - DNA, 553 bp, Homo sapiens
gggggtagaaggcttgaggattaataagatctagagtctacctccaagtagcttataatttaggtggaggaaacacctataccccaagtaatttaaaacaaaaaaggaaattggtaacataaagagtatacttgacattcttttttagtttaggataagtagtgaggcttttaaggaatttagagagctagaatttgctcagaccttgaaggatgcttaccwtctaaggagagaacacctccatctttccattcttcttcctgtcaggcgtgcctgcctccactcatctcttcttagcttcctctctaccccaaaaaggaagaaggattagcccaattgcgttacttgagtctggcatacttgattgggttgggtttactggtgggtggggtctcagagttaaaaggcatagatcctcatgcagctgttgatctttttctcaatacaaggctgggtggacttgctaggcaagtcaggccctggccactgcctggcttgcctttcctatctcaatggtgaatggagccaggattagctgtgtctccactcaccc

SEQ ID NO: 635341 - DNA, 480 bp, Homo sapiens
ttattataaagtggcacagaacttggctggattgtgttcatgtcttagtgtttggtggaagatagaacatgcaagcaacagaactggaaatttggyggaggaaatatctttaaaagtattgaaggagtggcctagttccttttgactgcttagagtaaaatgtgaaaagaaagaaatgacttacaaacagaattattaatcaatatggaaactgaacctaaagaattggaacattttcagaatatctgcattgaaaataatgagaaagactactcaggaaagaatactaagggtgtggccaaataactgtccaatagagattagtcagtcatctcaaaagaagctacaaaaaaaaatgcagaggagtatccacctgcattgcccaacactgcctcacatcactggcttcactccccacactgcaactccaagcaattcagccaccccaaattgtggcttcagtgggccctagtgggggtt

SEQ ID NO: 635342 - DNA, 486 bp, Homo sapiens
cttttatgttatagggtttgagtttccttttttcaaccttccaggaaaaaaaaaacagtagtcaagaggctgtcaggcagctcagtgtctccattagaattcagagtattccacggtaattacaaaacagctgtaatggaaaattggtagtcaaacccattttccagcgactagaacggtgaatgggctccattatgttcctaattctcattaacttaatttgcataggaaayaatgaaggaatacataatgaggtacagtgggcaagcagcccagccctggcccctacggtgctgggctcaacccacagtgacccaccccaagggagggaaggccaagtgctgctgttgggctggactccactgggcaacctgaggctgctgccctgagctagtccaaaaactagcgaggtggaggatgactgcttgcctgtcacttgcccaggatcaccttgcctcagcacgcccaatgcaaatcctatttctt

SEQ ID NO: 635343 - DNA, 486 bp, Homo sapiens
cttttatgttatagggtttgagtttccttttttcaaccttccaggaaaaaaaaaacagtagtcaagaggctgtcaggcagctcagtgtctccattagaattcagagtattccacggtaattacaaaacagctgtaatggaaaattggtagtcaaacccattttccagcgactagaacggtgaatgggctccattatgttcctaattctcattaacttaatttgcataggaaacaatgaaggaatacataatgaggtacagtgggcaagcagcccagccctggccccyacggtgctgggctcaacccacagtgacccaccccaagggagggaaggccaagtgctgctgttgggctggactccactgggcaacctgaggctgctgccctgagctagtccaaaaactagcgaggtggaggatgactgcttgcctgtcacttgcccaggatcaccttgcctcagcacgcccaatgcaaatcctatttctt

SEQ ID NO: 635344 - DNA, 560 bp, Homo sapiens
aagcctccaatccacccaagagaccacaacacccatctcatgtgcagtcagagaggagtggcacggacagagaccaaaatttgctgtatcatttaaagagatgaacaaacaagccaagatgtgtgttgactaggaaagtttacaaaagacaaacaaacaaatacacaaacaaaaaatcctctactttaaatacataaaaaatgtaaaatctctccatgtwccttaatccaactgaatccttttggtgccagcaactcattaaaggctttaacaggccgcttaagagttacaaacatggtatctctaagtaccagagtctccttggaaggttatctgaatgcaaggctccactgaataacatggtccttctgaaaagtcaggaaagattatgccaaactaataagaattataaagtgtccaggaagaatatggtgttcagatatttgtacctgctgatcaccattcaaatcactccaaagttgctctgccccagcaacggggttcataattttcaaaccctgagggtggatggcaacagaaaagaatgctcatggtctata

SEQ ID NO: 635345 - DNA, 597 bp, Homo sapiens
ttataaatatggctatggctttaggctcaggctgagacagagattcattatctcacctgctgagagtgaactagacatgaggccccttcacaaggtagccttgtgtctttttgcctcttgttctctctcattgtgcccaaccacatgccatcaatgttgtcacagccaaacgttccctcatggatgaaatagacactggatctttctgaggcagttgttctgtctacctgcataggagagatagctgacagttacaaggtctctgggtacacctctcctagctcgcagctgaaagccctgcaaaggtcagcacccaagggccctgcatcgatgacatcaccatctccccactctgtttctttcaatgtgttttttaaaacttttttacacagcacatataattatggggcatttgggcccartgcattatctcagctgaaacacaaacctcgccatgtgtggcagcacaacatcatgatcagggttcagacaatttcacaaaccagcaaaatatcaactcatacaaaatcacacagaagtgcttcagtacataccaaccctcttgataaacagcatgcacagtaaaggtatattctg

SEQ ID NO: 635346 - DNA, 593 bp, Homo sapiens
atggctatggctttaggctcaggctgagacagagattcattatctcacctgctgagagtgaactagacatgaggccccttcacaaggtagccttgtgtctttttgcctcttgttctctctcattgtgcccaaccacatgccatcaatgttgtcacagccaaacgttccctcatggatgaaatagacactggatctttctgaggcagttgttctgtctacctgcataggagagatagctgacagttacaaggtctctgggtacacctctcctagctcgcagctgaaagccctgcaaaggtcagcacccaagggccctgcatcgatgacatcaccatctccccactctgtttctttcaatgtgttttttaaaacttttttacacagcacatataattatggggcatttgggcccaatgcattatctcagctgaaacacaaacctcgccatgtgtggcagcacaacatcatgatcagggttcagacaatttcacaaaccagcaaaatatcaactcatacaaaatcacacagaagtgcttcagtacataccaaccctcttgataaacagcaygcacagtaaaggtatattctggcac

SEQ ID NO: 635347 - DNA, 572 bp, Homo sapiens
gttgataggggaaaggaatgagggtggtgggagattgggtgtggtgggcagagaaaaatttccagacttgggacttgtgactgttctgatagagcttggcagactagctctgagcagaaagaacatgtgaggactagaaaatttgtggcagtggtttttcaggagactaatagaagatataagatttggaatgtgattatcatctatttgaatcttcacttgattgctaaaagtgaagggattatcttctgatactttgttacctcattgtgaaatgaggctaggaatgccttcttcttatgtcagcagygaggggtaaatgaatcaatgtatacttggtgtacagtatctaaattctccctcctagccccaagacagttgctcagtaaacacaggatagatggttagtagcatgttctctgatttgttattttataatgcatgtgacttggtgctgtgtagttggttgcaaaggccagcaagcaaaggggtggcaccttaacattttaaaatattaggtcctttagaagaggaccctacacacatatgagccatttattaaatatactgtt

SEQ ID NO: 635348 - DNA, 645 bp, Homo sapiens
agtcatgtatgatatattaaaatgcaaatggagccctcaatgaaaaaccacagcacaagatgtcctggggaagaggaggccagtgctgtgagcaacctgctgggccatgtttattgcatctttagaggaggatgcatgtatttgtgtctcactcagctagygagttgtggggtgtgactcatgaatcttctcagctaccagcagtccctgcaggaaagaaaagtaaaggcaactttctgcaggcaaagatacttggatacagttcaatgaactggtatttaataatgaccatctgggtggagcttgggctttggcactgaagagaaggagaaagcaaggtttctgcccctttggagccatcattctgttggggattcaagatttccacatgtaagcaagtgtagaatgacagaacctagtgggcatttggtgattaggaatccacaggtcccagggagagaaataaagttcaaggcatagtcatatactgcataatgatgtttccatcaatgatagaccacatatatgatggtggtcccataagattataatatcatatttttatggtaccttttctatacttaggtgtatttagatgtaccattaccactgtgttacatttgcctacagtagtcaatacagtaa

SEQ ID NO: 635349 - DNA, 430 bp, Homo sapiens
aaggcatagtcatatactgcataatgatgtttccatcaatgatagaccacatatatgatggtggtcccataagattataatatcatatttttatggtaccttttctatacttaggtgtatttagatgtaccattaccactgtgttacatttgcctacagtagtcaatacagtaacatactgactgtacaggtttgtagcctaggagcaataggctataccatacagcctaggagtaggctataccatctagktttgttcagtatactctataatgttcacaacaaaattgtctaacaatatgtattccaacattaagtgatgcaagactgtagcttaagtgtagaagcttaatttattggctacataactgagaaaaacaggagtgcttgtccttggggactcctgaggtacatacagctctctgcctcc

SEQ ID NO: 635350 - DNA, 564 bp, Homo sapiens
gtcccttaagcccgtctgttctctgcctctaatatattatgcagatattttattaccaaacaattagatccactaacttgaaaaggaaacgagcaggaaattgcaattataagagtaaaagcaatgctcttttatttctcccctttatgcatatgaaatatggtttgtcattgctgcaaaacagacttttctcctcttccatggctcttcactgccttgtctttaataattgagcagaaagcagagtaataattagattcctggtaacaggggagatatccatagatttgcagcatgtggaggctcagcttggagccatggggcccacgaccatgcctccatgggagaaagcatacttcaggctgtttcacttgagtaccttccaaagccttctgtacatccatggtcttctatgtagattaaatatttgctcacaattattgtttcctttctgcctttgccatgctttcccatcccattgactctgggcttggccaagacttcttttggtcaatggaatatgagtagatgtgatgtacagctyattgtactacacagaagctt

SEQ ID NO: 635351 - DNA, 557 bp, Homo sapiens
caactgtgtgaagcatttatgtctcttgttgattaaaaaaaaaaaactctgtaaaatatttcaagaggtttattctgagccartatgagtggccatggcctaaggtatagtctcaagaggtcctgagtccaagcgcagtggctcacacctgtaatcccagcactttgggagaccaaggcgagcggatcatttgaaatcaggagttcgaggccagcatggccaacatggtgaaaccccatctctacttaaaataccaaaaattagctgggcggtagtggtgtgcctgtaattccagctactcaggaggctgaggcaggagaatggcttgagcctgggaggcagaggttgcagtgagccatgatcgcaccactgcactctggtccgggtgacagagtgagatcctgcctcaaaaaaaaaagaggtcctgaaaaagtgtgcctgcagtggtcagattgtcaggttacaacttagcttcatacatttttagagggacagaagttacagccaaagacataagtcagtatatggaaggtatactttggttttgatcagaaagg

SEQ ID NO: 635352 - DNA, 638 bp, Homo sapiens
gaggagaaaagccacatggtgataggtgagtaatcagyaggggacatgagagatattaccatttaaacccctggagagacttttttcagagaagtaacagattaatcctacagaactcccaggataaaggctggaaattactgagatgctcagagttttaaattattataaggaaaaactttcctcttagccaggatgcaccatacctggactagtcttgattgtgaaacaaagagttctctttgttaaacaaaaatgtatgggaagctattgttttgacctaagctccagtactaggccccaacatactagaccaaaccagaatatcgtcactcatgctatgtgccaccaatcaaattgaacttgaaatggcccagttaaaaaaaaaaaaaaaaagagagagagactcactgcagccaatcagaagaagcccagtttacaggaatcctcttgataaggaattcccctctgttataaccctatattgaaagtaactctgaaacaatcagtcctccttttgttaccaatttctgctttcttcagcccttttctgccataaagtccacttcctttgcttagcttgtgggagcacctattctattttatagaataagatgctgctcccattcataaaatgc

SEQ ID NO: 635353 - DNA, 578 bp, Homo sapiens
ctatttttggcatttttttctttcagttgtcctccaaatcccatgatatcttactggctcaagcacccctgaaaaactatgttctcagttattgaataggtaaaaaagagcctgtgtctgcttcactgtctagggactcactcccaaggctgtcaactcgaccaagggggttaaagcctaaatctaaaagctcaacttccattgacattgaaggtggatgttgctggtagaataccattcatcaggcaggtgggcagggtgatarcttcctgaggcagtgtggacttcctgaaatccatcacatagcaccacccaggctacacttgtgattaagcttgccatggcaggaatataacttgtgttaacaaattacctcctacagttacatctctacctctcccataaggctaggactgcaccaaatattgaggctccatcccttttctgaagcccaaataggtagacccaacctagcctttggtgatgaattcagttgaagaaaaaacagcatctgtttcagagcagcagcaagtcccaatgtgttagagacactcagtttgaagacctaaagccatggg

SEQ ID NO: 635354 - DNA, 527 bp, Homo sapiens
acctcactccttgtgactttacttttactacatgtgcatagccataaaaacatagacattgtttgcaagcttttcagctgtatgcactgcacactttacatgagattaaggttttcaaatgctccacatgtgtgcaggactcctagttcattcattgtaatagctgtgcaggtgtattaggtgaacatacaatttataatatacaatttatttatccactctcatattgatagacaygtatattgttttcaatttgctacaacaaaccatgctgaaaaagacttccttgtgggaatctcacttcagcacctgggtctgagtatctttagtatatatacaccaaatagtagaattctaaggtcataaagcattagcatctttcactttagtgcacaatgctaaattgctccccaaaatcattgttacctacttatttgtgtgtcaacagtgtataaaaatccctgtctctctgaagcttcaccaagacttggaattattaaactttttacctggtgtgtaaaaaggaa

SEQ ID NO: 635355 - DNA, 499 bp, Homo sapiens
tactacatgtgcatagccataaaaacatagacattgtttgcaagcttttcagctgtatgcactgcacactttacatgagattaaggttttcaaatgctccacatgtgtgcaggactcctagttcattcattgtaatagctgtgcaggtgtattaggtgaacatacaatttataatatacaatttatttatccactctcatattgatagacatgtatattgttttcaatttgctacaacaaaccatgctgaaaaagacttccttgtgggaatctcacttcagcacctgggtctgagtatctttagtatatatacaccaaatagtagaattctaaggtcataaagcattagcatctttcactttagtgcacaatgctaaattgctccccaaaatcattgttacctacttatttgtgtgtcaacagtgtayaaaaatccctgtctctctgaagcttcaccaagacttggaattattaaactttttacctggtgtgtaaaaag

SEQ ID NO: 635356 - DNA, 576 bp, Homo sapiens
agttacagtgaagcagatttcagcttgacacaagaactaactttctaaagaacagagatgtgggatgaagctcttgaactcatccccctcctccctccaagcctgaacagccatctgtcaaagatgttggatttcaggaaggagaaccttccacctctaagagtctgagattttctagacgagtttaaagtttatttaaaagaaaggtaaagaccatttgagctgatttaacatgaatcttgtctgggggctgggggactatattagagtctgagttcctttcagccttttgagcaggtaactcttctattgggrccataactgaggcatattttaaatcagaaagggagaatatcgtttttattctgaatctgaatactccttaaaaataataattgttggatggtatttttgtatttaattcatttcagtctttcctgtgtgtttattttgtgttcagccctgcataggtgataaatttgtaaccataccccctctctagcccatccctctttaataccaccctaggacaagaccatgaatagtcctgcctttcatggcgcctccaattcctcc

SEQ ID NO: 635357 - DNA, 596 bp, Homo sapiens
gattacttgcttcatgataggtgctgtcctaagctcgtatcattttagtcttagttaatattcacaacagcactataattatatactattactatctgcattttacagaggaggaractgagccttagaaaggttaagtactttgtctaagttcacacagctagtaaatggtggagtctggatttgccttcaaaacctatattcttaaccagtatgtaacactgttgctagtggtctctagatataataattatctgactctcagacacaggagagagttcagcttaagaatgctatgtgtgtgtgttgggggaggggggtaggagacacagggaggttttattgtgaattaaccctaaatcctaaccctaggtcaactattaatctaaaatttatctgagatggttaatgtaatgctgacttctgacatagtaaggtcatcattagcattttactatttgcctcaaagtcaactgaagtacgtatcaggaagtaattacttatggactaacccagctacattctctctcccttcctccctcctttccttccttcttgccttcctccctcttgtttcctcccttctcaggtactca

SEQ ID NO: 635358 - DNA, 596 bp, Homo sapiens
gattacttgcttcatgataggtgctgtcctaagctcgtatcattttagtcttagttaatattcacaacagcactataattatatactattactatctgcattttacagaggaggaaactgagccttagaaaggttaagtactttgtctaagttcacacagctagtaaatggtggagtctggatttgccttcaaaacctatattcttaaccagtatgtaacactgttgctagtggtctctagatataataattatctgactctcagacacaggagagagttcagcttaagaatgctatgtgtgtgtgttgggggaggsgggtaggagacacagggaggttttattgtgaattaaccctaaatcctaaccctaggtcaactattaatctaaaatttatctgagatggttaatgtaatgctgacttctgacatagtaaggtcatcattagcattttactatttgcctcaaagtcaactgaagtacgtatcaggaagtaattacttatggactaacccagctacattctctctcccttcctccctcctttccttccttcttgccttcctccctcttgtttcctcccttctcaggtactca

SEQ ID NO: 635359 - DNA, 596 bp, Homo sapiens
gattacttgcttcatgataggtgctgtcctaagctcgtatcattttagtcttagttaatattcacaacagcactataattatatactattactatctgcattttacagaggaggaaactgagccttagaaaggttaagtactttgtctaagttcacacagctagtaaatggtggagtctggatttgccttcaaaacctatattcttaaccagtatgtaacactgttgctagtggtctctagatataataattatctgactctcagacacaggagagagttcagcttaagaatgctatgtgtgtgtgttgggggaggggggtaggagacacagggaggttttattgtgaattaaccctaaatcctaaccctaggtcaactattaatctaaaatttatctgagatggttaatgtaatgctgacttctgacatagtaaggtcatcattagcattttactatttgcctcaaagtcaactgaagtacrtatcaggaagtaattacttatggactaacccagctacattctctctcccttcctccctcctttccttccttcttgccttcctccctcttgtttcctcccttctcaggtactca

SEQ ID NO: 635360 - DNA, 639 bp, Homo sapiens
tcttggtcccagaagctgtctaagagggaaaaaatgattaactattcttctcaatgagatgctggaagaccatttggagccttggaatagtgatgaatagtttagcaccatccccttggtgataagtgagctttgctcagttagttcatgggagatcccgttgtttgaaagagtctgggacctgccccttctctctctcttgctcctgctcctgccatgtgatgcacttactccccctttgccttcatccatgactataagcttccaaaggcctcaccagaagcagaygctggcaccagacttcctgtacagcctacagaactgtgagccaacagggaccatcaacctagtggtgttgcaacctagtccactcacatcatttctcaggtctttcctgttcagctgactctgagcccctgctgtcctaggttacaagcttcttatgaacagagctatgacttagacaccctcatgggtacaaaaaataggcgtacattaagcatgtcatagactaattaaatggaatccatagcaacgttttgggttgcagaattttacctcttcaagaaagcatttactaattaaggaaaagttaggagacacatctttcctctcttcctttgctatggtttggatgtt

SEQ ID NO: 635361 - DNA, 593 bp, Homo sapiens
ctctgtgtgcaatagaaggtcatacccaggaagagcaatgtgcaacatgagagatttcattagacagcaagatttgatctgctccttgaaggaaagaaatgaggacatgtggagaaagagaagagcgatgagggcacaaatgccagtgctctgtccagaagtaatgactctctgacttaaggaamtgaggaagtggcttcccaggccttgtgactctccctatctttctttacgttgcctttagtgctgagaattatcacccctctcatcacttcctattcacctaagtccttgcagccttcccttaccaattcttggaaatacaggtgaattctccatggcttccaggtagaagtcataggactttttcagttcttatcttgctttctgcaataaatgagcataaacctcctcctataggatcttagtaaacatctttcctcttgtgatctctaggacaccactttctctgtagtctccttctttctctgtgcccattcaccacatccttctttctgtctctgttcttctcctttcctgtctcaactcctaatcccagtctggctatcattccccatcatggagcaagctct

SEQ ID NO: 635362 - DNA, 594 bp, Homo sapiens
catacttcccatctcctgcaagcttcccaacatccattccatgacctagccatacaatttcctaaagctgatcattaaacatggatccattcctgccggatgagactcactggcactgagtgccccaggaacctgcatgtctaacaagtgctgtacaaagtcagccagttttcactatgctgrtagtccttggttctctctctcctcttctccctgcttccttttggcctcacacactgagcagggccaggttttattctagtaaacttgggtaacaatagatatgattgtcagcctccctggggctggccaggtttttatgaaattagacatatttgtcttgatgtttaggagcaagcatgaaattcaaatctgtgtgttggcattccgcgggctgggcctttaatattcaatgacataacttcattgcgggtttgacaacactatatagaagttgtgcttaccactgaaaattaaagctactgaaagcgttgacagcagcaaaattgtgaatgcttcccagctcccgaagtgattgctattccagtttgtctagaagtgcttattgtgtttgtaataccgtcagttccactt

SEQ ID NO: 635363 - DNA, 603 bp, Homo sapiens
ccttaattttgagaaatgtctattcaaattttttgcccactgtttgatcaaattattagattgttttctatagagttgtttgggcaccttacatattctggttattaatcccttgtcagatgcgtagtttgaaaatattttcttccaatttgttgtctcttcaatttgttgattgtttcatttgctgtgcagaagcatttaaacttcatgtgattccatttgtctagttttgttttggttgcctgtgattatggggtattgctcaagaaatttttgctcaaaccaaagttctcaagattttccccaamgttttcttgtagaagattcataggttcaggtcttagatttaagtctttaatcaattttgaactgatttttgtatgtggcgagagataggggtctagtttcactcttctgcatatggatatccagttttcctggcatcttttattgaaaagactctcttttccccagtgtatgttcttgacacctttatcaacaatgagttcagtgtaggtgtatgggtttgtttctggattttctattctgttccattggtctatgtttctgtttttaagacagtaccatcctgttttggttact

SEQ ID NO: 635364 - DNA, 570 bp, Homo sapiens
cttgttttgtgacctaacatatggtttatccttgagaataatccatgtgctgagaaaaagaatgtggatcctgcagccattgaatgaaatgttctgcaaatatctattagatctattgggtctatggtgcagattaagtctaatgtttctttgttgattttctgtctggaagatctgtccaatgctgcaagtggggtgttgaagtattggaacctatctccctctttagctttaaatatttactttatatatctgggtgctccagtgttgggtgaatatatatttaaaattgttataaccccttgctgaattaactcctttatccttatatagtgacatttttgtctcttcttatagtttttgtcttgaaatctattttgtctgatataaatatagctactcctgctttttcttagtttctgttagcctgaaatatctttttccacccttttattttagtctatgtgtttataagtgaagtgtgtttttytgtaggcaacagattggtggatattgttttttcatccatttggccactctagatcttttgatggaggacgtcagcccatt

SEQ ID NO: 635365 - DNA, 553 bp, Homo sapiens
tttctctgttgatatgatttactttcttgctttttatttcttatgtgtcattgtgtatttttttgtttgaggttaccatgaggcttacaaatactatcttataacctattattttgagctaataacaatactatttgcatgaacaaataagcaaaaaaactaacagaagctctacatcttaactttttccccttgctttttaaactttttatcatttctattttatcttattgtactgtttacatcttgaaaatttgttgtagttattattttttgttggttcatttcatcatttagtctttctatttagggtaaggatagtttatacaccgcagttacgcagagctctggaacacagggcatcttataaactacaaggcaacatacatttggttcaacacacatttattagacttctaatattatcagagttatgaaaaggagatgtgatccctactrttaatgggatcgttttccaggaagagtctgatattcaaaaagaaaataatctcaatgtaatagcaagcatatggtcattacagaatgaccaacc

SEQ ID NO: 635366 - DNA, 596 bp, Homo sapiens
tctgtcttcattaaagtcaccataaagagtgaaaaaacaagctacaaaataagagaagatatttacaactcaactatctgataaaggaatagtatccaggatmtataaagaactcattcagggcaggtgcagtgggtcacacctgtaatcccagcactttgggaggctaaggcaggcagatcacttgagaacaggagtttgaaatcagcccgggcaacatgggtaaacccccgtctctacaaaaaaatacaaacgttagccgggtgtggtggtggcacacgcctgtagccttagctacttgggagactgagatgaaaggattacttgagcccaagagttttaggcttcagtgggccatgatcatgccactgcactccagcctgggtcacagagtgagaccctgtctaaaaaacaaaaaacagaaagccaaaagaacttgttcaaattaattagaaaaaaattttcaaaagacttaaacaggtgcttcatatttattggccaatgttaatgtccaataaatagattataagcacttaacctcaatagtcatgagggaaatgcaaattaaaaccaccacgaaatatatccacatagtt

SEQ ID NO: 635367 - DNA, 596 bp, Homo sapiens
tctgtcttcattaaagtcaccataaagagtgaaaaaacaagctacaaaataagagaagatatttacaactcaactatctgataaaggaatagtatccaggatctataaagaactcattcagggcaggtgcagtgggtcacacctgtaatcccagcactttgggaggctaaggcaggcagatcacttgagmacaggagtttgaaatcagcccgggcaacatgggtaaacccccgtctctacaaaaaaatacaaacgttagccgggtgtggtggtggcacacgcctgtagccttagctacttgggagactgagatgaaaggattacttgagcccaagagttttaggcttcagtgggccatgatcatgccactgcactccagcctgggtcacagagtgagaccctgtctaaaaaacaaaaaacagaaagccaaaagaacttgttcaaattaattagaaaaaaattttcaaaagacttaaacaggtgcttcatatttattggccaatgttaatgtccaataaatagattataagcacttaacctcaatagtcatgagggaaatgcaaattaaaaccaccacgaaatatatccacatagtt

SEQ ID NO: 635368 - DNA, 596 bp, Homo sapiens
tctgtcttcattaaagtcaccataaagagtgaaaaaacaagctacaaaataagagaagatatttacaactcaactatctgataaaggaatagtatccaggatctataaagaactcattcagggcaggtgcagtgggtcacacctgtaatcccagcactttgggaggctaaggcaggcagatcacttgagaacaggagtttgaaatcagcccgggcaacatgggtaaacccccgtctctacaaaaaaatacaaacgttagccgggtgtggtggtggcacacgcctgtagccttagctacttgggagactgagatgaaaggattacttgagcccaagagttttaggcttcagtgggccatgatcatgccactgcactccagcctgggtcacagagtgagaccctgtctaaaaaacaaaaaacaraaagccaaaagaacttgttcaaattaattagaaaaaaattttcaaaagacttaaacaggtgcttcatatttattggccaatgttaatgtccaataaatagattataagcacttaacctcaatagtcatgagggaaatgcaaattaaaaccaccacgaaatatatccacatagtt

SEQ ID NO: 635369 - DNA, 596 bp, Homo sapiens
tctgtcttcattaaagtcaccataaagagtgaaaaaacaagctacaaaataagagaagatatttacaactcaactatctgataaaggaatagtatccaggatctataaagaactcattcagggcaggtgcagtgggtcacacctgtaatcccagcactttgggaggctaaggcaggcagatcacttgagaacaggagtttgaaatcagcccgggcaacatgggtaaacccccgtctctacaaaaaaatacaaacgttagccgggtgtggtggtggcacacgcctgtagccttagctacttgggagactgagatgaaaggattacttgagcccaagagttttaggcttcagtgggccatgatcatgccactgcactccagcctgggtcacagagtgagaccctgtctaaaaaacaaaaaacagaaagccaaaagaacttgttcaaattaattagaaaaaaattttcaaaagacttaaacaggtgcttcatatttattggccaatgttaatgtccaataaatagattataagcacttaacctcaatagtcatgagggaaatgyaaattaaaaccaccacgaaatatatccacatagtt

SEQ ID NO: 635370 - DNA, 582 bp, Homo sapiens
ccatggtagatcaacttgacataatattttacagccataagatgattatcaaaatagtatagtgttcccaaaatggcagatgaggttatttgtattaaccttcttgttaaaactaaataataaagctcagttattattttaaccttcttttaaatcacaaagaagaaatgacaagtcagtaaaaaattaccaggccaaaaatgaaaggaaaatgttatcccgaagatgtaactgtgcaagacgtggcttttgccctgagagtatttgccaatcttgaaaattttgaaccttaattttaaaactgtcacgggcaagacagaaaataaagccaagktctgtgtaagcttgagggtctaacaggagaaacttctcacaatattggaaccccaaagagctatgcaatccaagtaaactataaactagaagagaaatattttacatagaattacagccaacatagggtcacccgagcaccagataatttcaagccttaaaatagttgaactaccaggtacttggcaattcctctctagagaaaagaactttctctataaagagaagcaaatgcaaatcctctctaca

SEQ ID NO: 635371 - DNA, 582 bp, Homo sapiens
ccatggtagatcaacttgacataatattttacagccataagatgattatcaaaatagtatagtgttcccaaaatggcagatgaggttatttgtattaaccttcttgttaaaactaaataataaagctcagttattattttaaccttcttttaaatcacaaagaagaaatgacaagtcagtaaaaaattaccaggccaaaaatgaaaggaaaatgttatcccgaagatgtaactgtgcaagacgtggcttttgccctgagagtatttgccaatcttgaaaattttgaaccttaattttaaaactgtcacgggcaagacagaaaataaagccaagttctgygtaagcttgagggtctaacaggagaaacttctcacaatattggaaccccaaagagctatgcaatccaagtaaactataaactagaagagaaatattttacatagaattacagccaacatagggtcacccgagcaccagataatttcaagccttaaaatagttgaactaccaggtacttggcaattcctctctagagaaaagaactttctctataaagagaagcaaatgcaaatcctctctaca

SEQ ID NO: 635372 - DNA, 527 bp, Homo sapiens
gtgagtgaattctcacgagagctgatggttttataaggggctcttctgctttccctctctgacttgctctctctcctgctgccttrtgaagaaggtgcttgcttccccttctgccgtggctgtaagtttcctgcggcctccccagccatgtgaaactgtgagtcaatgaaatctcctttgtttatatattacccagtcttgtgtaatatctttatagcagtgtaagaacggactaatacaatctcataaacatatatagttgttatagggtttgtcaagttttccctcccaagagatctataggtcattttagtggccagactgttctctaaattcaaattggacctagtgtataattatttaattctagagagtcagtaccagcatgggatgaaagcctcatgagaaagtagatgtagaagccactgcaggggtctaggtgtgaggggtgctcaatggggccagggaaaattttagaccctgatgtaaagttcatggcacaaatgttgtgccctgttggaggcagt

SEQ ID NO: 635373 - DNA, 527 bp, Homo sapiens
gtgagtgaattctcacgagagctgatggttttataaggggctcttctgctttccctctctgacttgctctctctcctgctgccttgtgaagaaggtgcttgcttccccttctgccgtggctgtaagtttcctgcggcctccccagccatgtgaaactgtgagtcaatgaaatctcctttgtttatatattacccagtcttgtgtaatatctttatagcagtgtaagaacggactaatacaatctcataaacatatatagttgttatagggtttgtcaagttttccctcccaagagatctataggtcattttagtggccagactgttctctaaattcaaattggacctagtgtataattatttaattctagagagtcagtaccagcatgggatgaaagcctcatgagaaagtagatgtagaagccactgcaggggtctaggygtgaggggtgctcaatggggccagggaaaattttagaccctgatgtaaagttcatggcacaaatgttgtgccctgttggaggcagt

SEQ ID NO: 635374 - DNA, 548 bp, Homo sapiens
aaataattagatttgaggacttttcatctaatgagctactgttcactttaaagacacagaaagagtttcagagtcaacagaaagagtatgtgatacaccctaatactaaagctcaccattactaacttgtttcctaattcacctttctacctccttactacaaartaaaaattaaaaagtcaaaaacctccctgctacaacaaaaacaagcaaataaaattataatagtggtctttagaattgttcttctttctcttttgtgcccattatacttcttcttgctatagacataaactaggaaaacatcagaatcttaggtgtgaatcaactttcagtaccttctattttgctatttgtgttttagaaagcataaggttgaaagctctatttcataaagccaggtacaattttcttttactcagtcaattagtgttaagacctgtagcctgactatggctcaagaaaaatgtccagggacattttcactgatatttggcaaagatggcagagaaaaagcaatttagttaacatggctgcaaaaatggtca

SEQ ID NO: 635375 - DNA, 548 bp, Homo sapiens
aaataattagatttgaggacttttcatctaatgagctactgttcactttaaagacacagaaagagtttcagagtcaacagaaagagtatgtgatacaccctaatactaaagctcaccattactaacttgtttcctaattcacctttctacctccttactacaaagtaaaaattaaaaagtcaaaaacctccctgctacaacaaaaacaagcaaataaaattataatagtggtctttagaattgttcttctttctcttttgtgcccattatacttcttcttgctatagacataaactaggaaaacatcagaatcttaggtgtgaatcaactttcagtaycttctattttgctatttgtgttttagaaagcataaggttgaaagctctatttcataaagccaggtacaattttcttttactcagtcaattagtgttaagacctgtagcctgactatggctcaagaaaaatgtccagggacattttcactgatatttggcaaagatggcagagaaaaagcaatttagttaacatggctgcaaaaatggtca

SEQ ID NO: 635376 - DNA, 631 bp, Homo sapiens
ggagagccagagaagtgacagggaagctataggttacaacagatctgtgaactcagccaagcacagtggtggcagggcctagctgcgacaagacatattttagacaaatactcatgtgtatgggcmaaaaactcgaggactgtatttgtgacaaattgtgtaacagttattttagttcctgttctgtggaaagtgccaagcattcccaccaagaggtttaaaatggatttttttttttgcacccatgctgttgattgctaaatgtaatagtctgatcatgatgctgaataaatgtcttttttttttttaatgtgctgtgtaaagttagtctatgctgaagccatcttggtaaatttccccaacagtgtgaagttagaattccttcagggtgatgccaggttctatttggagtttatgcagaacttgcttgggtagagaaatcattgttttcagaaacctcggtgtagctgaactgataattactattgtgacctgaacttcaccattaaaagggattacccaagcaaaatcatggaattattggttataaaaatgattgttgacacatactatgcaatgtatctaaattgaataatgttaccagataaaattataaacaggaatgaagctt

SEQ ID NO: 635377 - DNA, 631 bp, Homo sapiens
ggagagccagagaagtgacagggaagctataggttacaacagatctgtgaactcagccaagcacagtggtggcagggcctagctgcgacaagacatattttagacaaatactcatgtgtatgggccaaaaactcgaggactgtatttgtgacaaattgtgtaacagttattttagttcctgttctgtggaaagtgcmaagcattcccaccaagaggtttaaaatggatttttttttttgcacccatgctgttgattgctaaatgtaatagtctgatcatgatgctgaataaatgtcttttttttttttaatgtgctgtgtaaagttagtctatgctgaagccatcttggtaaatttccccaacagtgtgaagttagaattccttcagggtgatgccaggttctatttggagtttatgcagaacttgcttgggtagagaaatcattgttttcagaaacctcggtgtagctgaactgataattactattgtgacctgaacttcaccattaaaagggattacccaagcaaaatcatggaattattggttataaaaatgattgttgacacatactatgcaatgtatctaaattgaataatgttaccagataaaattataaacaggaatgaagctt

SEQ ID NO: 635378 - DNA, 622 bp, Homo sapiens
atgctaccaagggaaaatacagggtgtgttttgaataatatgaagacttgaacctagtctgcagacaaataaaatgtccctgaggaaatgactcaaaggatgagtaggatttagtctgtcagaaattccgcatgaatcaggaaagagcttgccaagagcaagaaatgaaaagacaaaaggccagcatggctggagtggagagagcagaggagagtggcacaagctgaagctgagggtggttattatttccagagaagcctttctcttttcctgacttaataattatttgaaaatcttgatcttttcctcaactcttttctgtcaatttttttccattttaaaactcaaaagccttattatagtaacatttcctcaaaactaatayaaatttttcactattttgacattcagaaatagggatggtctagtaatacaggttgaaaaaaaacttgctatttagcaagttgttccaaacaggaatgtaagttgagccctcacaaacttaccagtgttcggaaaatacctattctaatgtcgtcatgtaattatttacacttgtagcataatttcattaaattttagtttgttttagttaaacttggaacactgctattactcaaag

SEQ ID NO: 635379 - DNA, 565 bp, Homo sapiens
ctctcctgttcctgccttccaatgtccagttaccataactattgatcagacaatgagttatgaatggagattaaaaaaaaaaaaacaaaactcatcctccaagagaccttttgtaggtcattgcttttgtgtagaaacagtgttggggacatgatctacctgtggaaacacaattggtagctacacatgacaacagagctacttgaagggacktagcttaggagcttttaaaattcacagagacctaggttccactctaagccaattcaatcagtctgcaggactgtggccttaacctaagtatttctgtactgagaaccactgacctatatccatccaaaaagattccaaataatcttttatcaagaggcatttaactaattgaggacatgccagtttctaggtatacgggaatgaataatacaaatatgcctgctgtccagaagagaatagtctagtaggagtgggtaatagagcagtaatcaaaccacagtctaatggtggaataatgaaggcagctacaatatgctaagggaatattctttagtaagtattctgtaaaaca

SEQ ID NO: 635380 - DNA, 554 bp, Homo sapiens
ttcacactgcgtttagtcatcttgtctccctagttctctctagtcttagtctttccttgaaaattatattataaaatgtctctcaagttgggtttgtctgctgttatctcataattaaattcaggttatacacttttcggccaaaaaaaaaaaatctcaccccaaatgccatccttatcaatgtattatatcaggggttcttgatgttgatatgtctcgttagtgatgatgctaaccttaaaaagttttttatttcaatagcttttgaggtacaagtgggttttggttacatggatgaattgtayagtgctaaagtctgagatgttactgcacacattgcacccattgtactggtccattttcacactactataaataactacccaagactgagtaattcatgaagaaaagaggcttaattgactgacagttctgcagacttaacaggaagcatgactgggggcctcagtaaacttacaatcgtggcagaaagtgaaggggaagcaaggaccttcttcacatggtggcagcagagaaagagagagtgagggggg

SEQ ID NO: 635381 - DNA, 658 bp, Homo sapiens
tgatagtgatgactgacacctcctctgtcccacagaatgcttgtcccaatcaacccatcattaaggttttcagaatatccttataaaatatatcttgaatcttctttactcttttgccaccactctagtccaagctccctctcttgcttgtctctctgaactccctgcccctgctataattccatctccwcaagaaccagaatgagtgagtttttagaatctaaatatcatgccattcccctcattgaatgagtctgcccattctcactgcccacagctttctcttgtactttgagggacaccacagttctttacagatctacaggaagctgtgtgatgtgctcaccgcttactcctctgggtctcctcactctgcttttcccctgctcttgactggctacagccatactgtcctttaccagttcctagctaaataactaggcctttgtatatttcagcacccagaaaggtcttgcctccctcttttcacccaatttctgtttgtccctcaggacacaagcttaaagagtcccttcctaacttccagttcaaatagcatgtccctgttattatctaaccaaattatttatttgggtgcttagatttgtgtcttcttgttcactataagttccagacctggcagtgtgcccagcatatg

SEQ ID NO: 635382 - DNA, 628 bp, Homo sapiens
atgcatctacaagcaactcatgtttgacaaagatgccaacaacttacattggggaaaggagatgttcaataaatgtgctaagaaaactggatattcatatgcagaagaatgaaatgagatccctacctctcaccatatacaaaaagcaaataaaaackgattgacgacttggatttaaaacctgatactaaaataattagaagaaaacaaggggaaaatgctttagaacattgtcctgggcaaagatttcttgagtaagaccttaaaagtacaggcaacccaagcaaacatggacacatgggattaaatcaagctaaaaagcttttgcatgacaaaggaagcagtcgatgaaggcacaacctacagcatgggataaaatattttaaaactattcatctgacaagggattaataatcagaatatgtaagaaactcaatagcaaaaaaaataattttatttaaaatgggcaatagatctgaataaacatttctcaaaagacacaaatggccaagagatatgtgaaaaattttcaacattactaatcatcagcaaaatgcaaataaaagtcataataatataccatctcaccccagttaaaatggctattacaaaatacatagaaaataat

SEQ ID NO: 635383 - DNA, 495 bp, Homo sapiens
atcaaatggggttaatttagtaacataaggttggttgaacaaattaaaatcaatcaatgtaattcaccacattaagaaatttaatctcaatctcagaaaagcatgtcacaaaatccaatatgcacaataaaaactttcagaaagctagaagtaaaatggaacatttcaacctaattaaaagcatccctgataaacctactgctagcattagacttaatggtgaaagactgaatgctttcagaaacaagacagggatgtctgctgtcactacatctattcacgattatatkgcaatttccagctaatgtaataaagcaagaaaaaaatcacaatatgcagattgaaaagaaatagtattatttttattcacagatgtcatcacatctatacagaaaatctgataaaatctacaaaaagatgctagaataactgtatttcacatggtgacaaaaaaaattgtccaaaaattagttgtacttctatttattagcaatg

SEQ ID NO: 635384 - DNA, 670 bp, Homo sapiens
tactcaaaggaatataaatccttatgttataaagattcatgcacatgtatgtttattgcagcactattcacaatagtaaagacaaggaacaaacccaaatgcccatcaacgatagagtagttaaagaaaatgtggcacatatgcaccatgaaatactatgcagccacaaaaaggaatgagatcatgtcctttgcagggacrtggatgaagctggaaatcatcatcctcagcaaactagcacagaaacagaaaaccaaactccacatgttttcactcataagtgggagtttaacaatgagaacacatggatgcaaggaggggaacacacacaccagggactatcgtgtgggggtgggtaaggggaaggagagcatcaagacaaataactaatgcatgtggggcttaaaacctaggtgataggttgataggtgcagcaaaccaccatagcacacatatacccaagtaacaaacttgcacgttctgcacatgtatcctggaacttaataattaaaatattttttaaaattcaagttttattttagatacaggggatacatgtgcaggtttttttacatggctataccctgtgatgctgaggtttagggtatgagtctcatcacccaggtagttagcatggtatccaataggcagtttttcaacccatgacccc

SEQ ID NO: 635385 - DNA, 396 bp, Homo sapiens
aactttctcatccttttcttcttccatcctcaggtacatctcatcccacactgccccttatgattgccataagactgacaaagaccccagcttcacctcctctcatgataatatcctaagcatgaagtaataggagcagtggcataattgtctcctgctcttttatttcttgtggggagaaaagacttccccaggagccttcaacagactttcccttctgtctgtcatgcccacctctgtaccaaacatggataaagtggactgtggctagcaaaactggcttggctaatcttgtctcactgactcaccaggagctgggctcattgccaytcccagcaaaatcaggttctgttagcaagaaggcacaggagaatggccttaggtaggcaccagcag

SEQ ID NO: 635386 - DNA, 479 bp, Homo sapiens
tgcaatctcagctcactgcaaactccacctcccaggttcaaacgtttctcctgcctctgcctcctgagtagctgggattacaggcacctgccaccatgcctagcctatatatctgcttttatgctagtactatgctcatttggttactatagctttgtaatatattttraagtcaggtagcatgatgcctcaactttgctctttttactcaggattgctttggctatggggggtcttttgtggtgccatatacattttaggattgttttttctatttctgtgaagaatgtcattggtattttgatagggattgcattaaatctgcaaattggtttaagtagtattgtcattttaatgacattaattattcctattcatgagcatggaatatctttccttttttttggtgtcctcttcaatttctttcaccagtgttttatagttttcattgtatagatctttgatctttcacttctttg

SEQ ID NO: 635387 - DNA, 324 bp, Homo sapiens
ttctaatggttttttgatggagttttggttttctttaattataagatcatgttcatctgtgaacaaggctaatttgactttttttgtgatttcaataccctttcttcctttttttttttytttttttttttttttttttgagacaagatctggcactatcccccaagctgcagtgaagtgacatgatcttggctcactacaaactctgcctcctgggatcaagccatccttttacctcagcctcctaagtagctgagactacagacacacatcaccatgcctggctaattttggtattttttgtagatatggggttttgccaca

SEQ ID NO: 635388 - DNA, 618 bp, Homo sapiens
ccttgatacccagcttggacatcaggcactaagcgattccaggctgctaccgcagctaaatagccattgatcccactgcttccttttctgaagaagtcaacaattccactctaattggaacagaccctactcagcccctgaaccctggtatgacattctcactggctgatctggagttggaggctgggcatagaccttatyaaataaagcaggtttggccttattatatttccaatttcttttttctcaaggggatgatataatcaaaggatgatgagtacaagaatatttagacaattacttgcctgctggtttctacttaaattgattattcagttacaacacagtcaactacacagtatttaaatgtatttatttgtaaaatgctgcccaccaataatgaaatagaccttcactaaaacgactcttccttgctctgactctgcccagactttctaggtcagggttatattatatatcttgcattatagcagtggttctcaaactatggcttcagcacctttttacatacttaaaaattgaggacactgaagagttttcgtttatgtaggctaaatctatgaatctttaccacattaggaattaaaactgaaaaat

SEQ ID NO: 635389 - DNA, 618 bp, Homo sapiens
ccttgatacccagcttggacatcaggcactaagcgattccaggctgctaccgcagctaaatagccattgatcccactgcttccttttctgaagaagtcaacaattccactctaattggaacagaccctactcagcccctgaaccctggtatgacattctcactggctgatctggagttggaggctgggcatagaccttattaaataaagcaggtttggccttattatatttccaatttcttttttctcaaggggatgatataatcaaaggatgatgagtacaagaatatttagacaattacttgcctgctggtttctacttaaattgattattcagttacaacacagtcaactacacagtatttaaatgtatttatttgtaaaatgctgcccaccaataatgaaatagaccttcmctaaaacgactcttccttgctctgactctgcccagactttctaggtcagggttatattatatatcttgcattatagcagtggttctcaaactatggcttcagcacctttttacatacttaaaaattgaggacactgaagagttttcgtttatgtaggctaaatctatgaatctttaccacattaggaattaaaactgaaaaat

SEQ ID NO: 635390 - DNA, 658 bp, Homo sapiens
ccctgaaccctggtatgacattctcactggctgatctggagttggaggctgggcatagaccttattaaataaagcaggtttggccttattatatttccaatttcttttttctcaaggggatgatataatcaaaggatgatgagtacaagaatatttagacaattacttgcctgctggtttctacttaaattgattattcagttacaacacagtcaactacacagtatttaaatgtatttatttgtaaaatgctgcccaccaataatgaaatagaccttcactaaaacgactcttccttgctctgactctgcccagactttctaggtcagggttatattatatatcttgcattatagcagtggttctcaaactatggcttcagcacctttttacatacttaaaaattgaggacactgaagagttttcgtttatgtaggctaaatctatgaatctttaccacattagraattaaaactgaaaaatttttaaaacatgtttattaattcacctaaaaacaataaccctacttaatcatagcataactttttatgaaaaataaccatattctccaaagccaaaaaaaaaaaaaggagagaagtgtggtagtgtcttccagtttttcaaatctccttaatatctgacttagttgaagactgct

SEQ ID NO: 635391 - DNA, 549 bp, Homo sapiens
gtcctgaagggagctcctcctagatctggtcagatctttgtatggtaattaattaagacttagatcctctgttargaaacctgctgggttaaggatttttgataggaaggctatgggttgtcagtggcctcagtgtttttgagctatgcccttgtttacactgacaacaaggtggtgttggagtgttatagggctacatataagaccttcaattatcaattatgggttttaaatttaccctggcttttaaaggaatagggtacactgttttttctttactacttctatctctctctttctctctgacttcttctttgtctcttcctctctttccttcttctctttgtctctgtttcttcctctctctctctttctctgacttcctgtctctctctttcctttctgctgcctctgccagctgcttatgctgctgttctcccctctccttccccttttgatggcttcagcagtgtaagactgccacctccttgagtttttgcactgcgtgcagtaattccatggtttctttgtgatatttaatgagggttc

SEQ ID NO: 635392 - DNA, 522 bp, Homo sapiens
attgtgaagagcaaaagaacaaagcttccacagcatggaaggggacccgagtgggttgctgctgctgactcaggtggccagcttttattcccttatttggccccacccacgtcctgctgattggtccatttttacagagtgctgattggtccatttttacagagtgctgattggtgcatttacaaatctttagctagacacagagtgctgatttgtgtgtttacaatcctttagctagacagaaaagttctccaagtccccacctgacccagaagcccagctggcttcacctctcaatagtgagacctcatctctacaaaaaatcaacaaaattagctggttgtggtgtcatgtgcctgtagtaccagctacttgggatgctgaggtgggaggatggtttgagcytgagagatagaggctgcagtgacctgagatcacaccactgcactgggtgacagagtgagaccctgtctcaaaaaaaaaattttttttacaacatagcatatcacatacacattgttt

SEQ ID NO: 635393 - DNA, 567 bp, Homo sapiens
aataaacaaataaataagaaactctgagatgtagtccagcaatctgtgtcttagtgagctctgtaaatcattctaatgccctctaaattttaagagcaactgacccaactgattcctcttctattactgatcacctgatgcactgtatccagaaataaaatacacaaagagagaacctgtctggcctaatttaatcatcatcaccctgcctgggcagagctcttgttaccatatcatctcataaatcattgtacaaacattaaactgaccatcctgggtgatgtgcttcccttaggttcagtcagccccaggcccagtagccacagtttggaagaggcaaggagggtcactgataaacaacacggccaggcatgcctgcataaccacctggaastgtccactcagcaggggccagaggttggcagtttcaagaggggctgtgggtgcagcaggtaccaagagtgttctcttcaataagttatagcaaatatagaatataggataacaaaatagatgaccttaaaggagttgaaggtgatctcggcttcatgattgcagcaaagtatt

SEQ ID NO: 635394 - DNA, 537 bp, Homo sapiens
gacagtggtatgcattccttgtactgtcatttcaactcactcctggatctacaaaaaattcctggagtcatacatgtaccctctgatttctctttctgttagtcawatatggcctagaaaagctgtataagaagccaatgataaaaataaaggccaagtagactgtaaaggtttagacataaatggattaccaacaaaaggaccaacaaaaatctctgataagaagaaaaactgaggcgatttttccaaaggacctcatcattttaaaaatggacctggtaatatgaatcaccttctttttaattgtctctgacctctttctctgagacttgaattcaggaaaggtagtttagatatttaccttttacaaatcaggaaatacatggtaggtatatttaaaatgtagttagttgtatttaatgacctcatttctgaattcagttttcattaatatagctttcatttctgtatctgccattttaacaatatgacaaatggaaggcttgtgatttagacactgtttctaaatcagtactt

SEQ ID NO: 635395 - DNA, 583 bp, Homo sapiens
tttagatatttaccttttacaaatcaggaaatacatggtaggtatatttaaaatgtagttagttgtatttaatgacctcatttctgaattcarttttcattaatatagctttcatttctgtatctgccattttaacaatatgacaaatggaaggcttgtgatttagacactgtttctaaatcagtactttaaaatctttggttgtcaggtgcctcctgagcgcagtaggtatcacgtcagtctcataaaatctttagttgtctattattcattcatatgaatttgatgactgctctaatttctttggactcttctcatttgagtggggtacaattttaccatgaaacagtgcggtcagactgcagttttggaggtgataatgatgtcaaacacaaagatagaattactgtccaacacaatggagcagtttgtccatgcaatagtaatataatttattgctctgaagaagatagaaaagatagggaaataggggaaactttcttgaaagatgaaacatcttttacataaatgtttaatataattataaaattctatttaaaaaaaaggagttggggccgggcac

SEQ ID NO: 635396 - DNA, 583 bp, Homo sapiens
tttagatatttaccttttacaaatcaggaaatacatggtaggtatatttaaaatgtagttagttgtatttaatgacctcatttctgaattcagttttcattaatatagctttcatttctgtatctgccattttaacaatatgacaaatggaaggcttgtgatttagacactgtttctaaatcagtactttaaaatctttggttgtcaggtgcctcctgagcgcagtaggtatcacgtcagtctcataaaatctttagttgtctattattcattcatatgaatttgatgactgctctaatttctttggrctcttctcatttgagtggggtacaattttaccatgaaacagtgcggtcagactgcagttttggaggtgataatgatgtcaaacacaaagatagaattactgtccaacacaatggagcagtttgtccatgcaatagtaatataatttattgctctgaagaagatagaaaagatagggaaataggggaaactttcttgaaagatgaaacatcttttacataaatgtttaatataattataaaattctatttaaaaaaaaggagttggggccgggcac

SEQ ID NO: 635397 - DNA, 471 bp, Homo sapiens
atgggtctgacttcattttcagaggcatcatatgtcctctccgagttcagagggaatattcttgagcttccagctggcatgcagacatgactaatgcaggctctggaggacttgtggtctggaaatctagttaatgtgcagagttaacccaatgcagcatggaaaggttaggactccctttacatcaggtgctaaggggcagagatttgggcaccaaggatcagagaaggccttctggaggaaatgatgcccatcccacatcttaaagcaggcrgggaggcttgcccagggaataaggaaaccatgttctaggaaaagaagaaagggaacaaaggcatgaaatattaaacatatgtaagctcagaattcaagcactcagctaccagcatttctcaaactgtggtcccacaaccagtttcaccatcacctgggaacttgggagaaatgcaaattttcaggccctaccccagt

SEQ ID NO: 635398 - DNA, 476 bp, Homo sapiens
gggtctgacttcattttcagaggcatcatatgtcctctccgagttcagagggaatattcttgagcttccagctggcatgcagacatgactaatgcaggctctggaggacttgtggtctggaaatctagttaatgtgcagagttaacccaatgcagcatggaaaggttaggactccctttacatcaggtgctaaggggcagagatttgggcaccaaggatcagagaaggccttctggaggaaatgatgcccatcccacatcttaaagcaggcagggaggcttgcccagggaataaggaaaccatgttctaggaaaagaagaaagggaacaaaggcatgaaatattaaacatatgtaagctcagaattcaagcactcagcyaccagcatttctcaaactgtggtcccacaaccagtttcaccatcacctgggaacttgggagaaatgcaaattttcaggccctaccccagtcctacca

SEQ ID NO: 635399 - DNA, 672 bp, Homo sapiens
atcacctagcaagcaactcaagtgccattttaaagctattccttgctttgtaaatctccaactctgtctcagtggatgacttcacttgctaccttggaaagaccataggtactgacgactcttgattggtgattgctttcaggttaacacatcatggcccccttatatagttccatcttttccttcaccctcaaaaggagagatgatccctcctctccaaagctaacccttcacctatactctgatcctcactccctgtccccctgagctaaccctcacctgtcccctggtccccatcactccatgggtccttgagcagctcacctcccttgataatatggcctatataccagtgggattatcaatcccaaccttccaaagaaaaactscctgtctatataatgagatctgaaattcctaattcgcttgcaaaaacttcaggtgtgtcattttacaaatatgtgcaaaatgtaattttttctacttttctataatacccctcattttttaatacaaatccatgtcatcagatggcagaaacatagtctcagttatttcagggtttcttttacccacacattttccttgaggctttgtttaaattgtggcaggcttatgtgacaataataacatgagaaacaatgactaacccttatatgccactaactaacc

SEQ ID NO: 635400 - DNA, 672 bp, Homo sapiens
atcacctagcaagcaactcaagtgccattttaaagctattccttgctttgtaaatctccaactctgtctcagtggatgacttcacttgctaccttggaaagaccataggtactgacgactcttgattggtgattgctttcaggttaacacatcatggcccccttatatagttccatcttttccttcaccctcaaaaggagagatgatccctcctctccaaagctaacccttcacctatactctgatcctcactccctgtccccctgagctaaccctcacctgtcccctggtccccatcactccatgggtccttgagcagctcacctcccttgataatatggcctatataccagtgggattatcaatcccaaccttccaaagaaaaactgcctgtctrtataatgagatctgaaattcctaattcgcttgcaaaaacttcaggtgtgtcattttacaaatatgtgcaaaatgtaattttttctacttttctataatacccctcattttttaatacaaatccatgtcatcagatggcagaaacatagtctcagttatttcagggtttcttttacccacacattttccttgaggctttgtttaaattgtggcaggcttatgtgacaataataacatgagaaacaatgactaacccttatatgccactaactaacc

SEQ ID NO: 635401 - DNA, 585 bp, Homo sapiens
gaggccaggcacggtggctcatgcctgtaatcccagcactttgggaggccaaggcagacggatcgcctgaggtcaggagttcgagaccagcctggccaaccatggccaacatggtgaaactaaaacactcttctctactaaaaacacaaaaactagccaggcatggtggcacatgcctgtaatctcagctactcgggaggctgaggcaggagaattgcttgaacccaggaggcagaggctgcagtgagctgagatcatgccactatactccagcttgagcaacagagtgagacttcgtctcaaaaagaaaacaaaaacccagatgagcagcatcactggcgaaatcacctggggaaagtatgtttcagagggagtgcaaaggccctgaagtaaaacagttaggcatagtgggaacaggctcagtatgtttaagggacacacaaaaggccagggtggctggagtatggtggggaaggggagtggtcagaggagagatgagtttggaasagtggacagaaaagaccatttagtttcatagaccaaggtaaagagtttagctcttaatctaaatgggatagaaagcaa

SEQ ID NO: 635402 - DNA, 620 bp, Homo sapiens
tttggagaaagaagagtgatgttgcaaggtttttcatcaaacacaaggaggtatttagaaatgtctacagtgcttttggttttcacagtgacggggcacattgaagccattaaatgctagaaatttagggatgatcaatattctgccatgtgggggacagtcccacaaaagtaagaattatgttgtccaaaatgttagtagcactcttagttgagaaaccctggctgggtattgtgggaattagttagagttatgtgaaatgataactcatgctgaagaagtaggttgttatcctttagacaatgggagctatcaagtgtgtttaagcatgggggagacttgattagcttttgattttagaaaggaaactgaacatgtataggcagaaataagatgcaggaagaccacatagtgggtaatgtcagcagtgcagctaaggagttgtttcttgtttctcatcttggtgtagctctgcccagggcattgtaagacataaaatcatcaaatattttytaaaaaatagtcaggaagaagagattctagcaaaagtgacatgcccatctttaagcacatttgcatgctcaggtgatgggacatgctaattggattattgtgattgg

SEQ ID NO: 635403 - DNA, 600 bp, Homo sapiens
ggcaaatctttcaaagttggagtttgattacatttgggtaaggattgtaataaaactgtccaggatttgtggaaatagcacagtgaatattttgagttaggaattcaaataatttgggagaacaaagtgttgatgttttccattgaagaattgagtctttcaggaagttcctgtaatgaacaatcaaaatatttgcccaggcaagagacttttgaaagaataaagccatgctaatgaagaaatagcaataacaaagacaagctaacagagacagaaaaatggcacagtcatgctattgtaggtgataaaatgtggtttcagttctcagtgcccagacagagtgtggagatcgacagctttggctctcattgtcaccacagtatctgtcagtattttctgattattttgcccatttgtttttcaactttattaattatctcacaatgagattttgctcatttattccactcagtggaactgaagatattgatatttgataggattaagtttgaattcagggtctgccatttcctagcactgtgaccttggttgagttatttcatctcrcagagcctcaactttcttacctgtaaattgggt

SEQ ID NO: 635404 - DNA, 615 bp, Homo sapiens
atcgacagctttggctctcattgtcaccacagtatctgtcagtattttctgattattttgcccatttgtttttcaactttattaattatctcacaatgagattttgctcatttattccactcagtggaactgaagatattgatatttgataggattaagtttgaattcagggtctgccatttcctagcactgtgaccttggttgagttatttcatctcgcagagcctcarctttcttacctgtaaattgggtgtcttagtctgttcctgctgctataataaaatacctcagactggataatttatacaacagaatagtattgttttcagttctggaggctggaaagtccaagatcaattctcctacagatttggtttctgggcaaggtttgctctctttttgaaatatgatgccttattgctacatccttctatgattaaagaaggcaagagagctcacttgagactcttccataagtacactaatcccatttatgagagtggagcccttatgaccgaattatatcccaaaggccccaccttttaactatattaggtatttgggtccaccatataaattttgagaggatactagccttcagactatagtgttggg

SEQ ID NO: 635405 - DNA, 585 bp, Homo sapiens
tttcttgcaggattttctagtagctgctttcataccccattccagtaatatttaatgttgcctcatcgttccattgtgctcaaaggtcttcgtaaggacactgaaataaaaacgatgattcctggcatctgcacagagtgaagcaagagaatgttacaaatgagaaaatagagctggggtctgctttctttcttttggcaaaaaacctgctatagaaactaatgtagatgagggggcactgagccatatataagtgagtaattatctactgttacaggccttattatctctccaaatgtttgctaaaattctgttgggcagccatctggacccagagatttacccrtggatagagagtagattgttgttttaacttgagataggaaaatttctttctttaattcttttctgtcatcttctgttaaataatttaagtgaatgtctcttacacagctctctgtgagtcctcagagtaagtggattcagtgtgataaactcatataaaatattttttgaaagttttcttttttcccttttcccccaccggagaatccaaggacagtttgccatctgttgtaagaattt

SEQ ID NO: 635406 - DNA, 540 bp, Homo sapiens
acgctgctccttatgttcctgcatcagttataaaaggcatgaccatataatttattgcccaaaccaggacatatttgagagtaaaaaaaggtgcacttaatatttatgtcaagaccacaggtgtaaatggaaaatgcttcatgtaacagggatatatggtcaccttaaacataatctccctaccttgtgtttgagactatgtttccatactacttatcaacctaatcttattccaaaggtcagagcactactgcaatactaaaaataatagcagcaaaggcaaccataatgctagcaaccactcatgagttctcttctgtatagcaagcactatgtctcagtgacatttactttttcactttccacattcttatgagatcagggtgccatttttgccattttacaagtgggtaaactgaaataaagaggtttaaatacttggccaaggtcakgcagctggtaaatggcacccctggaatttaagtccaggagagtttgaccctgtgcttaccactgtttgccaaaccatctccttacttt

SEQ ID NO: 635407 - DNA, 554 bp, Homo sapiens
gcagctatttttccaccaagaaggaatgtggttttagaaactagtttactctgagattacagacttaaccaatccccttcccaaggttgctcatattttaaaaaatctcagaatagaaacattgcatgtgtgtctagtaaaatgtcatcccaacggtagataagatttttctttgtataagactagtcttttttactttttttaactttaagttctgggatacatgagctgaacgtgcaggtttgttatataggtatatatgtgccatggtggtttgctgcacctatgaactcatcatctatgttttaagccccacatgcattaggtatttgtcctaatgctctccctctccttgcccccctcccacccaacaggccccagtgtgtaatgtttacctccctgtgtccgtgtgttctcattgttcaactcctacttatgagtgagaacatgaggcgtttgaatttmtgctcctgtgtttgtttgctgaggacgatggtttccagctttatccatgtccctgcaaaggacatgaactcattttttatggctgcata

SEQ ID NO: 635408 - DNA, 651 bp, Homo sapiens
atacactcctggaacatggttgagctatggcgaatggagggagggagttgagatttgaagcattaaaaactatagcagtgacagcattcttggaaagcagttctaccagcacagagtttagtctaatttgccccacaaactggcctttctttccatgaaacccatttgttcctgagtagtcaatgaatgatttctggacaaagtagagtttcatcaaaacattgcaatacactctacatctgtggagtgccatattttgccttttcttttctatttgttttgcaatctgtttttttttttttyccacaacaaacttctaagaaaaggaatgagggcacaattcccattttatgggtggggaaactgagacacacaaaggttcaaggccatgcctaatgccacatgggtaattatgggaaaacaagaagacaaaatctggtgttctggacccttagccctatgtactctcttctataacatgctgccttcacaactgcagtcattagtctgtggctgggattgtgatggtgtcatgtcagtggagccagagcaacaaacttaatgacacagctgggaaaacttaaaagtctgcccttggctgggtcataagtggaggttaatacaatggtgtcattacagagttttgcccgc

SEQ ID NO: 635409 - DNA, 561 bp, Homo sapiens
tcccaggcttaagcgatcctcctatctcagcttcctgagtagctgggactacaggtgtctgccaccacacctgactaatttttttttttttttttttttttaaaaaaaagggggttcacaatattgcccaggctggtctcaagtccctggactcaagtgaccctcctgcgttgacytcccaaagtgctgttattacaagcatgagccacggtgcccagccaccaccaggtgattcttatgtaaatgtttttagggacacactttgagaaatactgttaggccctaaagagccattgccattacatctataaatagctctctctttttttcttgtttgtttttttaatggaattttattgaatgatgttattaacagaaaagtataaacaaacactgaatttcatctaagaaaaaatagccaattctgtaagtgaatttatatcataccactagactcaccattccaatttttgtatttggtccagggagttgagataatttgatataatttattaaataatttcctttctcctctcttctctttggtgctatgtagatgaa

SEQ ID NO: 635410 - DNA, 561 bp, Homo sapiens
tcccaggcttaagcgatcctcctatctcagcttcctgagtagctgggactacaggtgtctgccaccacacctgactaatttttttttttttttttttttttaaaaaaaagggggttcacaatattgcccaggctggtctcaagtccctggactcaagtgaccctcctgcgttgacctcccaaagtgctgttattacaagcatgagccacggtrcccagccaccaccaggtgattcttatgtaaatgtttttagggacacactttgagaaatactgttaggccctaaagagccattgccattacatctataaatagctctctctttttttcttgtttgtttttttaatggaattttattgaatgatgttattaacagaaaagtataaacaaacactgaatttcatctaagaaaaaatagccaattctgtaagtgaatttatatcataccactagactcaccattccaatttttgtatttggtccagggagttgagataatttgatataatttattaaataatttcctttctcctctcttctctttggtgctatgtagatgaa

SEQ ID NO: 635411 - DNA, 561 bp, Homo sapiens
tcccaggcttaagcgatcctcctatctcagcttcctgagtagctgggactacaggtgtctgccaccacacctgactaatttttttttttttttttttttttaaaaaaaagggggttcacaatattgcccaggctggtctcaagtccctggactcaagtgaccctcctgcgttgacctcccaaagtgctgttattacaagcatgagccacggtgcccagccaccaccaggtgattcttatgtaaatgtttttagggmcacactttgagaaatactgttaggccctaaagagccattgccattacatctataaatagctctctctttttttcttgtttgtttttttaatggaattttattgaatgatgttattaacagaaaagtataaacaaacactgaatttcatctaagaaaaaatagccaattctgtaagtgaatttatatcataccactagactcaccattccaatttttgtatttggtccagggagttgagataatttgatataatttattaaataatttcctttctcctctcttctctttggtgctatgtagatgaa

SEQ ID NO: 635412 - DNA, 654 bp, Homo sapiens
agttttgattcaatggaactagattcaagtgacaatttctgccacctactgcctgtgtgatctttagaaagtagctcaaattcttaaagctatagttttctccttcataaaatgggaataataatagtagctacatcacagcactgttgaaattattaagttagttaatattatcatgtactcaaaagattgcctaagagagtgcctaacatagtgtaattttctatgaaagttagctagtggtggctcttatttcaatggttatttcttcctctgttaacctgggatagtaataccttcttgcttaatttctttcttagtttatataagtaaacaattacagaaataaatggtttctggaaactaaagcactgtatcctttttttttcgttttagtattattaatattgaatctgcttagtaggagtagctttgttgcagatgctatagggctctcaaagacagatgcactcattagctcttcagttacactggggcccagaacaaaaatatactgaatacccagaaaacaatggcaagggaacatatgacataagaatggcacataggtgaatgtctacatgctactggtgctaaaggaactcactgtgatccaaagcgtatcasaatgatgttcttgggatgaggaaaagg

SEQ ID NO: 635413 - DNA, 580 bp, Homo sapiens
caacacactaattgattttaaagtttctgtaaatgttgggaggacttcttgccacacacttaagatggggaagtgtgcattctgggaagtctttctggcctctgctgagtggtgggatgttctgattctagtctgttctccatccttcatcctgtgagtatctctgggtcttagctggtgtcagctataacatggtaactccttaactgctggagcaagggatcccaatacctcttttagtcctatagtataaactttgttctaraaaatgcttctgtggttctgtggaactcttttagatgtccatcatgactctgttcatagcgttccttgacagacatgctttagtcagaaagttcagccactaaagtcagagataagaagtgtagcaaatttctatccttagcctggtgatcaagtgtccttaaccatgattccaggtcatgagatacttgagcaacctggaggaggggaggaaccttgggtggttggagggctcttgtcatgaacatggggaaccatacatagctcagtacttactggcctctctttaccttagtctgtggtcataactgacttt

SEQ ID NO: 635414 - DNA, 493 bp, Homo sapiens
gctcttgtcatgaacatggggaaccatacatagctcagtacttactggcctctctttaccttagtctgtggtcataactgactttgcttctattttcctcatcacaayaccttattttattatattttctcccattaccaagctccttaaacattttttaaaacattcttataattaagaccctttcctgtttttcttttcaatatgttttaattttttaggaatttatgagattgatctttatattcggatgagtgacaatctttggctctgctattgcctaggtctccagatcttctaaacatttccagtctcaaacattcatcttgggtgaccactaccactatttttcacttcaggacctttcatatttgaacttcactgctacttagacccaagcccaatggagatgctgtgctccatctctatatacatttttggtctagaggtttcagaaaacatgactgataatttcaccaaggtagccatgtta

SEQ ID NO: 635415 - DNA, 485 bp, Homo sapiens
cagggactgacccacagggtagtgagtgaaggagaggatgggaaggttgcttttaaataaattaagtttgaggtacatatccgaagaaaactaatattttattagtgagaacacaaaggatgttgggaaaaaaattagttcaatcttttacttgaggaaacagaccaatacaacagtttggtgtttaaaatatatatatatrtgtgtgtgtgtgtgtgtgtgtgtgtgtgtgtgtgtgtttataattcttaacaagaggacctatgtccaactctgtcccagtttatgtccatcacaatgaaaggaaatgacatataaggtggttgcttgtaaacttacacatccaaattcttgctcattcagactttattatgaatatcaggtcctaatatctcaagtcacccaaatatctctgtttattttgggaagcaactaaaatgtagaatttcccttcctgtattcttccctcacccccttccctcctg

SEQ ID NO: 635416 - DNA, 551 bp, Homo sapiens
taagcatgcctcagtccaaatgctcaaataatgtttttctcattttgtgtcacactgtctcccacctggtctcagcactcctttcctgggagtttattttctttctcaggcaactcttttcacagaagaaagagggccacttccagcttctggtttctatcagtcctcactatttggtatcccagcgscaaagcatttttcctctctggtttctgtctgtctaatggaatctccgtaggacacctattggctctgcatggctgggaactcaccttgtaggcagagtaccatggacagagttgccacaagtatcaaatgcccatccctgaggccaggagtggtgaggtaatatgagtgacagtcctctcataatccatgagatggggaagggcaatcacctaatagaaatgagagtaggtaggtagacatgagcaatggctgtccatgcatcttcaacaactgaaaaataatgtctaggcagagagaagaggtggaaagctataaaagtgtattgataatatatgaattaagttttatagaaggaaattagc

SEQ ID NO: 635417 - DNA, 551 bp, Homo sapiens
taagcatgcctcagtccaaatgctcaaataatgtttttctcattttgtgtcacactgtctcccacctggtctcagcactcctttcctgggagtttattttctttctcaggcaactcttttcacagaagaaagagggccacttccagcttctggtttctatcagtcctcactatttggtatcccagcggcaaarcatttttcctctctggtttctgtctgtctaatggaatctccgtaggacacctattggctctgcatggctgggaactcaccttgtaggcagagtaccatggacagagttgccacaagtatcaaatgcccatccctgaggccaggagtggtgaggtaatatgagtgacagtcctctcataatccatgagatggggaagggcaatcacctaatagaaatgagagtaggtaggtagacatgagcaatggctgtccatgcatcttcaacaactgaaaaataatgtctaggcagagagaagaggtggaaagctataaaagtgtattgataatatatgaattaagttttatagaaggaaattagc

SEQ ID NO: 635418 - DNA, 620 bp, Homo sapiens
tagtattattttaattagagaaaattgaaagtgaacatttaaatatggtaaatagtaaatgtgcattaaatcatttgatatgtctttaaaaatgataataagattaatattttaagtttgggttttggaaattagcttgtcatattgatagcatatttgcaattgaccagaagtgcttcagaaaaatattaagaatcagaatgtgaaaaaggcttacattctgtttgagataatgaggaaaaagctatttgtgtaaaaaatagactcttctgtgtgaatatgggtatgtgtagtgtgtgtatattctgaagatatgcagtgtgtgtgtgtttatgtattttacagaaaaactattatcaaatcaatatgtgttttattatcaatggtaacagagttgagggaatttggtacatgtgtttaagctgttgttaattttaaatcttgcaagttggagccaagactacagataggtaaaaatattccaggtaggcagttyaaagaaattaacaatgtggattattgtaagcagctcaatctggtaaaaggtctacttcatttttaatatgaggtctaagatttcataaaatttaagttaactaaattgtcaataagttagctcc

SEQ ID NO: 635419 - DNA, 618 bp, Homo sapiens
tcaagtgggatttttaacatttttctaattacaaaattaaactttccttgtgaaaagatctcatccatcaccagcaaaaacttgaggttttaccggagagaataagggctttacattgcccaagaaatcttcgcatttgaaccacactaaagaactctcggattctccaaccactccttgatccattagacattgttctacaatacaaatggctacatggctaaaagttccgtgccacagtggcacaagagccatgtgcaaggagcatccttgaaactcaggtttaaatgttgctagtttggtgtgcctgacgaatttttgaattyaatcaaatactatttgtagatcagtcaaaatgtgaaatacatagaagggcttccaattaacattaattcctttacaccctgatctccccgagtctgcagaggcctttccactgcacagaagcatggtccaaacagcctggtagtctggctgccttttttttttttttaaaccgacattttaaacctattatttgacctgtctccttaaggttcttcttcctgtgacagaaaatatatgagtaactattttcaggccaggcattatgggtaaaaatggtttaataaacctcac

SEQ ID NO: 635420 - DNA, 618 bp, Homo sapiens
tcaagtgggatttttaacatttttctaattacaaaattaaactttccttgtgaaaagatctcatccatcaccagcaaaaacttgaggttttaccggagagaataagggctttacattgcccaagaaatcttcgcatttgaaccacactaaagaactctcggattctccaaccactccttgatccattagacattgttctacaatacaaatggctacatggctaaaagttccgtgccacagtggcacaagagccatgtgcaaggagcatccttgaaactcaggtttaaatgttgctagtttggtgtgcctgacgaatttttgaatttaatcaaatactatttgtagatcagtcaaaatgtgaaatacatagaagggcttccaattaacattaattcctttacaccctgatctccccgagtctgcagaggcctttccactgcacagaagcatggtccaaacagcctggtagtctggctgccttttttttttttttaaaccgayattttaaacctattatttgacctgtctccttaaggttcttcttcctgtgacagaaaatatatgagtaactattttcaggccaggcattatgggtaaaaatggtttaataaacctcac

SEQ ID NO: 635421 - DNA, 597 bp, Homo sapiens
ttacaaagttagataattttctttctaatattaatcatatatttttgcttttcaaagcaatttatattcactcttatgattgatcctcataatatctcaaagataaacggaattggtgtccaagtatatatgagcatgtgttcatactaagagtaagtggcagagtctagaactcaagactcataattcccaactgatgtgcttgactctaaataacattggcatagagccgggtgcagtggctcattcctgtgatctcagctacttgggaggctgaggaaggaagayagcttgagcccaggagttcaagtctgcagtgagctatgattatgccactgtccttcaacctgaatgacagagtgtgaccctgtctctttaaaaaaagtagtcctgagtaacagtggcatgacttactgcccatttaggaaaaattgtgccttaggttctgccagataatggcatcattaagacagtgttactaaaatgtaatggaaaaaaagagtttccattaagtttggcagacaccagaaaatgtccccctcaaattcgtaactgaaaaaggaaatggctacacacagggttaaagtagaattactg

SEQ ID NO: 635422 - DNA, 597 bp, Homo sapiens
ttacaaagttagataattttctttctaatattaatcatatatttttgcttttcaaagcaatttatattcactcttatgattgatcctcataatatctcaaagataaacggaattggtgtccaagtatatatgagcatgtgttcatactaagagtaagtggcagagtctagaactcaagactcataattcccaactgatgtgcttgactctaaataacattggcatagagccgggtgcagtggctcattcctgtgatctcagctacttgggaggctgaggaaggaagacagcttgagcccaggagttcaagtctgcagtgagctatgattatgccactgtccttcaacctgaatgacagagtgtgaccctgtctctttaaaaaaagtagtcctgagtaacagtggcatgacttactgcccatttaggaaaaattgtgccttaggttctgccagataatggcatcattaagacagtgttactaaaatgtaatggaaaaaaagagtttccattaagtttggcagacaccagaaaatgtycccctcaaattcgtaactgaaaaaggaaatggctacacacagggttaaagtagaattactg

SEQ ID NO: 635423 - DNA, 640 bp, Homo sapiens
tatgcatatttaaagagctaactggtgattatattgtttgtttaagaagtcatgtttcctggagacatatggcaagttcaatctagtgctactgagaaaaagaaatccccattcctcgttaaagtttgacagtgtcttgataagttgataygtattaagtccatatgcaatgctctataacactatctgaggcatgcttagaaatataaatataaggaaaggatcctgctctcaaatgctcaacaatcttgctaggaagtaaaacatatagatgtgagcaattttctggcaactcaaagaagtaaataataaataacaaattattggtatgtttactgtcaaatcatgtgctgataaatgtttaacaactgactctttggcaggggctgaggcaggggtggaataaccagattagcagcatttgccaattttcgtggtgtaaatattcctacactggtcaatttcaagccaccaacctgaggtcactggacagagttggggacaggtgcacacaacaggctctggcaatccaattctagctgactccagcatgccagcatgcttgtagaagttttgatcaagtaaagatctcaagggccaaagtggttaagcctcttctgtggaggaatgcctctcatat

SEQ ID NO: 635424 - DNA, 570 bp, Homo sapiens
ctgccaattgaatctggagagctaggtggtttttaagactcccttgcttcttcctgaggcaccacagtaaagagtggcagattatgatgatattgaaacggaaaagaagaaagtttggtgcagagttcaggccctttgatacagtcctgagttgcattttatcaatagtaataataatttccataagttgaaggctaaaatgtgcgaccttgggcaaatcaattcctctctccaaggcctctgtktccttatttctgaaatgatggtataaaatgctgcagtctctaaggcaccttacacacacacacacacacacctggagaaataacttgatatcttacctttgcttctattggcaactccttacttgaactgatatctgagagaaacgctaatgttatcagacttgaggaagcataggttgaatgatctggccttttgttgctgctccatttcgtggaggaaaagctggacaatgtaactctctatggtcagcaactagcaacaataaaaacagattaaataatcattcaaatgttctttcagacacccaaaaacttagcacacagg

SEQ ID NO: 635425 - DNA, 524 bp, Homo sapiens
attgccccaaaatattcccttggaatacccttctgccattttccagttcttaatagtttgccttaaataccatgccttttttgaagctgcatctagtgccccagtcaaatcaaattctctctcttgtgtggctatccacactgtgcccctccattacaggcttatgtattcttcatctcattcaaaagagacttgtggcacttagtagcgctatttgtgaaatgcctgtctttccccaccagcttctgaattcctcatgaaaacggatgcagctttatttatctaaagcctctgtaaaatccattaagggccccttgaaacaagtatgaacctaaacaaagtttattccctcgaatgacctggccttatcttacccaacttacattctgtaatctcctaagtgaatggcaagagtcattttgttaaatgaaattaatgtcattaaggtgaaattaatttgtacatgggraaaaaaatgtagtctccaggttgtctccaagccagttgccaatatttgagaacca

SEQ ID NO: 635426 - DNA, 495 bp, Homo sapiens
ttctatgaagagaaacttctttttatcaaatattcattccctgagatacctttgtagaagaaaggcataataagtatttcacttttacctctaccaagcaatttttacaataataagttggttctctagcattctccaaaataatccatgaggtttttttttttcaaatatcattataaacacatagaattatatgtcattaatttgttaccctcagtcacaattgctattgttatcagtgctcaaaacctcttccagttggcctttgactttatctgacataaggtggaagtctctgctttttgatttggtaaggtgttccaggctcatcttacacattcccagccttagacctayattcttttcactctccaaagccatctggttctttttactggaaagtggtatttcaaaaccgtaattctttttcctcatgtcagctctttttttgcttctcaaggatatttaaaaatgtgtttatccagaatgtttggt

SEQ ID NO: 635427 - DNA, 535 bp, Homo sapiens
gaaacatttagatataaatctggaagcacagatatctaaacacaatgaaacaaacaaaaaatctgataatacagaattatacaaaagggttttagaatgtcttagacaaagaataytagtttctaaaaagcaattaaaaggaaccataggaaccattgcatgccagtacaatggactaaaaataaaagactcccatcgaagcatattataacaaaatttcacaacaccatggacaaagtgatgaccctacaagtgcttatgcagaggcaaatgtgctaattaatacataagttcaggagttacaatgacattcaacttctctacagtaacacacctttgctaaatcttgaggagaatgattgtcaatctagaatatattattgatcaagtgtaaggaggagaataaggaaatattcaaacacaagttctcatgaagacagatttcagaatgatagcaagcatagaaaactaggagcctgaatagtagagtaggatgaaggcccacatggaatatctcctagcaatgaagaacaga

SEQ ID NO: 635428 - DNA, 601 bp, Homo sapiens
tcaactcgtcttgtactaagcatgtctaaatgcatgaatacagagaagaaaagcaagaaaggagagaggtctaggctaggcatcatgagagttatgggaccctccaataaaattaagattaacccatattagagatgggttaactgaggctaagaaaaagtaaataatttacttaatgaccacaaaactcgaaagtgtcatgtttcatatcaggactctctggcttcaaagactatcttatgtccacctagtgatgtgtaggaagagaatatatacattgttcagagtaaatgtcatgtcaagaaatctacatttttacacaattgcttgacatccagttgaaaaagatttaaagacaccctcctcttcactgccaatgtatgctgaaagaatgcattcacacacacacacacaccacaacaaatatactaactaccaggttagtaacagagagaagcagcatcgcatagccacactgtataactaatgcaacagaaattagcattaaagagagtataaytgaagaaaaagttttctgtaagcatcaatttataaaaaatcaggacacatactaacaaaaacctgacagccaatctatttt

SEQ ID NO: 635429 - DNA, 632 bp, Homo sapiens
gttttataaggggctctccccacttcgcttggcacttctccttcctgctgctttgtgaagaaggtgacttgctccccctttgccttccaccatgattctaagtttcctgaggcctccccagccaggctgaactgtgagtcaattaaacctctttcctttataaattacccagtcttggacagttttttataccagcataaaaatagactaatacagatgggaatcaaacatcaagaatacatacatgcttcattgaattctgagctttgggctgagagctggccagtgagaagaaacagccagatgaagaggacaaggaacactctctaacaaactttgcaccagaggtgaggctaggacatgaaatcttgtcttaggattcacaggcaagtaacggattctacctactttttataagtctcaaccccactcccaccttctcaattatggaaagaagcttttgattataccatcccctgcccattctttctctcctcgcacaccaattaacagggaacagggggagctaaggaatagaaaaggaawgtgagaactcagcccaggtgagctgggacttttgaagactcatccttctctgtgtctagtcctaactcatgctgcagccatcaccc

SEQ ID NO: 635430 - DNA, 578 bp, Homo sapiens
tttctaaagaatttttgtagagatgggagtctcactaagttgcccaggctgatctcaaactcctgacctcaagtaatcctcccatcttggcctcccaaatgatctcttcattgactgacatttagcaaaaagagcaaaaggaactaagggtctatcaaggatttaaagtagcaaacacaaaggccagggaacaatactctgcatgtcttctatctttaagatgctctttctcttagtttccacaaagctgccttccattttttctctttcctcactgcaactcctgggctcttctgctagttccttctccttcatgcattctctttsggctcttctggcttttgttgttgttgtttagtttttttattctacacctttttttttcttttgtttttggagacagagtctcactcccaccatccaggctatagtgcagtggcacaatcatggctcactgcagcttctatctcccaggctcaagtaatcctcccacctcagcctcccgagtagctgggactacagttgtgtgccaccatgccctgctaatgttttgtactttttgcagacattgggtttca

SEQ ID NO: 635431 - DNA, 578 bp, Homo sapiens
tttctaaagaatttttgtagagatgggagtctcactaagttgcccaggctgatctcaaactcctgacctcaagtaatcctcccatcttggcctcccaaatgatctcttcattgactgacatttagcaaaaagagcaaaaggaactaagggtctatcaaggatttaaagtagcaaacacaaaggccagggaacaatactctgcatgtcttctatctttaagatgctctttctcttagtttccacaaagctgccttccattttttctctttcctcactgcaactcctgggctcttctgctagttccttctccttcatgcattctctttgggctcttctggcttttgttgttgttgtttagtttttttattctacacctttttttttcttttgwttttggagacagagtctcactcccaccatccaggctatagtgcagtggcacaatcatggctcactgcagcttctatctcccaggctcaagtaatcctcccacctcagcctcccgagtagctgggactacagttgtgtgccaccatgccctgctaatgttttgtactttttgcagacattgggtttca

SEQ ID NO: 635432 - DNA, 633 bp, Homo sapiens
cagctgtcttcattttaaacaaaaaaagtaaaaaaacaataacactaactttaaaaattcaaatagcttctagaatgaggatacaaagaaataaaatatttttgtacagttctacaatgtgtttgtgttgtgttattaccaaagtgctaaaaagttataaaaaattaagtttagaaaatgaataagttactgtaagctaaagttaatttagtactgaagaaataaattttatataactttagggtagcccaagtgtacagtgttgataaagtctacagtagtgtgcagttatactctaggtcttcacagtctcactagtcactcactgactcaccccaagcaacttccggtcctgtcagctccattcacagtaagtgccctataaaggtataccaatttttatcattgatgtcatgtttgtactgcacattttctatgtgtagataggtttatatagctttagatacacaaatattatcattgtgttacaattgcctacaatattcagtacagtaggatgttgtacaggtttgtagcctaggagccataagctataacttatagtctaggtgtrtagcaggctatactaggtgggttgcactactctataatgttcacaggaggacaatatct

SEQ ID NO: 635433 - DNA, 619 bp, Homo sapiens
ttgactgttaacatttatttaaaatatagaagcatgagatttaccaaaaacatttaaaaattacaatggttttcctcataagatagcaaacaatactaaaaagttcaatgacttgaaaaataggattctattgtggaatacatatctaactggtgggaagcaggagcaaattaagaaacagcctcaggagttcaagagawttaagtagataaatatgctatcatttcaaataggagaaaaaatgatgaattatccaataaatgatactgagggaaataattatttttttccacacaacatgtagatgagggagataattatatgtttgggaaaaatgttaagtctaggcactatatcagcagcatatgttcaatgaaacaagacaagttgacaaataagatgattccagtcatttctaagaacacaaaagaaactaaaagggtggagagagggaccaagttagggatagtggggaatttcaatagggaagctccaaaagattttttaggaaaaatatcaagaaatcaagatacttaggagaaatccatcatgtaaaatttgggaaagtatattctaggccaaggagccataagtgcaaagaccctgtagtagaaatggg

SEQ ID NO: 635434 - DNA, 504 bp, Homo sapiens
aagcaaggtttctcaaaaattgtgaagaaaataacagtgtttagccttatccatttgcactctaaattctcatttccagaagtaattatctttattttccaatgttacatttttttctgaatattcttccctccctatgcctaaataacgtgtttattctatttttttcaggttttattgttatctgtttagttcctgctgcrgaagatgagactctcgctctctttgtcatttccccacatgcacagaaacacacatatttctacttttctcatcctctcaacaggctatcataactttggttaaatcaatagtcagtgtttgtatattattattggataaatattacttacagtggaacccattttgtgtatgattagatattctttcttgtagaactttatgtttatccaggagttaatacttatctgattattttcagttgcttaatgtcctatacacctgttattaatttatgctgaactctccaacagaaactgaaat

SEQ ID NO: 635435 - DNA, 628 bp, Homo sapiens
ctttttttctgattattgtatctttaaaaatatgaattccatcttgactgcctctttaaataagattaattcatagcattccccatttaattgctttatctgttttggtccattagattctattcgagaatatagcttttatgataaattaaattctagggttttattttgacatctaagttaayttttaattctggaaaaagttctgccctgtgcaatttagttctttcagaagtgctgaaaaaaatgagagttgaatcgctgtaagttttctataaaacaggtatttcacagccagcctggctgggttttctttggtttttcttaggccttagccactccaatgaaagccttctttgagggatgcttgcatattagcttttcctaaaatttccaagaagcgacttcatcacaggaaattgtttgtttggtacatgcctgcctgtcaggatggattgaacctctgatatagtttggacgtttatccactccaaatttcatgttgtatttgaccatcagtgttggagttggggcctggtggcaggtgtttggactatgagagtggatccctccttaatgacagtcctcatgataatgagtggaatctcactcttggtttccatgagac

SEQ ID NO: 635436 - DNA, 599 bp, Homo sapiens
tgtggttcacccaaacaaatgcagtatttccctcaatgtctgcctttgatactggtatgaccactgatacctcttccacttatgtggcacctcaatgcctagaatagaaccaagaactaggaaaatggtcaggaaaacctctaaataaccagcacgctctaaattcctgagatcacataccatcccaagataaccactcaggccttcactcagggtctttacttcattacccagagatcagaaaatgatacattatactcatcattcgatttgttactttggaaagtttatgaaatactttacaaagttttcaaaacaaattatttcagaatattttcaagcaatgcacaggactaaaatattttcaattaaaaaagccatttaaaagaaaaaagataattttttaaagaattattgtatacgcgtttttgccgtgtttcatgttattaaaatagtaataaatatatttcttggtgtgcatggaatgttaaaatctcagcctatgggaggtrtgaggctgaagccaaccactacatagattgggagattaggtgttaattatcatgacttagtcattaatagcttgtgtttaggctcaa

SEQ ID NO: 635437 - DNA, 611 bp, Homo sapiens
ttcaccagtgatcattctttgctttccatgcttgagacagcttttttacccttcttctttaattttataatttctgattttgttatttgctcacataccatatggctcttcttttctgaaaatatgtgtttctcccttttacccactgtaaagccaactacacctccacaattcttcctcaacaatcaaaaagactcacatgaaaaggccaccccttcgtacacacacacacacacacacacacacacacacacacacacacatcttcctctcttgtcctctggaaaacacatctctaactcgcgttgtggtgccttcacacttcaggctgaggtcctgacactcaatctgcatagctcttatctgtcctacacaggaggaggcaatggggtctggggggcaatggagagaatatttgttgcagttcaaagcaagccatcttttttttccttctctctttttttsccctttcaagataaatagaagtagaaagtacaagcagttttgattagcatttaaaatgttgtcaatttttaatgaaagcgtaacctccagccatcaacttcacacaaactggagacaaggttgcaaaacgaatgctaatatatttg

SEQ ID NO: 635438 - DNA, 618 bp, Homo sapiens
tgttggggtgcataatctatagatatctctatggtaggttggtttagaaaatgaagcattttaaaaggtaaatgacttctctaattaaccatgtagtaaatattgtccataagatatatacacattatatatatatataatatacatatgtgtatatatgcccatataatacattaaaaatatatttttttgaccaaagacaagcaaaacaaaataaaagaaaacatacccccctacctggtgagggctctcacattctcacattttggatctggctggtggtcctggtattgctgattttttagatggtccctgaaagcagatkcctctgtctgtatttccttaggaaactccagaataggataagctcagaaaacgaccactgtaccctggaagcataaattagcttcggaatagggatagggctcagttatctcctttaaaagggggcctgccaacctcgtctaactgttttaagaattctttgaatggtaagagcattgcataaacaggagcattcattgcaatatcggctttgacctcaactcaaccctcttcccctttcaaaaccactgaagaacattttactccatttataaaatatgaaagggaactttt

SEQ ID NO: 635439 - DNA, 510 bp, Homo sapiens
acagcatttctgacatttccctagttagaacacaccaaaaaacatgttcttttccatgtctcttccattgcatattctttgcctgtaatggcctgactttggttttgcctttcttagaaatcccaggctaagagttaccttctcaaagataccctccaacaagcctttggagaatgtctggctctctgtgaactaatatgccttgtctctacttccagtatagaattgttggtcatccatccgtctcccttactagaatgtcagctatttcagatatgtgagggaaaaggactttaacttatttgacctttataaatacatcacattataacttatttgacccagtatctgtcaaatgtttgttgaactaataatgaacaaatcttagagatcatagarggcaactctattgttaaatcaaacacattagcttcaaatacatacatttatgtacattaaccctaatgttgaggtggctactacttcaaaaactaacagtaaactcaaatt

SEQ ID NO: 635440 - DNA, 589 bp, Homo sapiens
aaaaaccattcaaaagatcagcaaggctgggcaccatggctcaagcctataatcccagcactttgggaggccaaggtgggtgatcacaaggtcaggagattgagaccagcctggccmatatggtgaaaccttgtctctactaaaaatacaaaaattagctgggtgtggtggcaggcgcctgtagtcccagatactcaggaggctgaggtaggagaatcatttgaacccaggtggcagaggttgcagtgagctgagatcatgccactgcacttcagcctgggcaacagagtgagaccccatcagaaaaaaaaaatcaacaaatccaggagcaattttttggaaaaaattaatgaaccagataactagttagactgataaagagaaaaaagagaagattcaaataaatataatcagaaatgataagagggttattaccactgataccacagaaatacaaacaaccatcagagagtattattaacacctctatacacataaaccagaaaatctagaaaaaaaaatggattaatttctggatacatacacccttccaagactgaatcaggaagaaactgaatccctgaacaga

SEQ ID NO: 635441 - DNA, 319 bp, Homo sapiens
tagtaagcacttatttgctgtgtgcttatggatttcaacaagaatatgtgattttttctggacaaatatacacaaattcactctcttagggcctattcttttcaaattcttttaccwtcttttgagaactgtttaatactctagagaaggcttttccattgttgtcataggagagttttctattagtgactaatcttaaaaataaaacatcttgtcaaaaatagaatttaatgagctagctcttcattttattataaactgaaatatgcaaagcaataaaaagaaaatcaaagattgagtcttttaatattgtaatgtg

SEQ ID NO: 635442 - DNA, 580 bp, Homo sapiens
ataaaaataagcatatttatattgtcattttcaggcttttgtgtttaactctaaagtgttaatgtattaagtgtctaagttaatttaggcagaaacaygcacatacacactcacatacatacacacatctttattaaaaataggaattgcacacaaagataagatggaagaattaaaactaaaggtcatgaaatttgatcatctccatatttaaggttactctaagtactctgcaaataacaaggtgctttaatgccgcgcctgcactttcgtctcatttaatgtgaaacctgtgaaagattgttcctgaagtcattatcttcaactgttgagagcatagatcatgactaagtgactgaagtgccatgggaactctcaatgggatcctgctcagcatctgatatatgtctcttggtatccatcaaactcagttgatatgcaaaagataagaaagacagaactttaatttttgtgtgtgtgaagtttccttcctgcttttgaaatgcaggcccaagataagttagttgagaaactgatgcccaagaaaattaaaagtcaattttaaaaagtcatgtgagag

SEQ ID NO: 635443 - DNA, 521 bp, Homo sapiens
gagagagcagggaaaatagcgtgtgacctgggagacactctgatttcaagctgggcagagaagaggaagccatggctcttgcaatttgtccttttcatacctcacgttacagagatagaccctgagcagctttggagtttttctccttgtttttgtcattcattagtgctcccaacaacagactgagttctaagcagtgtttgaaaagtagtgggtaatatttcgatgcccccactctgctacgtcgcttctacwtagacttaaagctgttaaaatttagaattaaacctcaggccaaggcccaagggccaaggtccctgatgcagttgatccacacaatttcttatttcttcacacatcctctacctctgcactgcccttctctcccatacaaatacattccagtctcctttgtgacaagctgacatagatcctgattccaggaaccttgagcacttgtaaattacctcagtcattaattcctcaacactcagctatatgattggttttagtaccattcc

SEQ ID NO: 635444 - DNA, 408 bp, Homo sapiens
tttattgctcaggatttaacaaactccaatctaaagtctcagtgccactttcgtccaggctcccagtctcagatgaaattctaaattctaacaatgtcagcccaggactcagtgcatcacccaagtttctttgctgaatctcatacaccagagacctcacgcctcttctcttctcatgtgcacctttctcctgaaatttctctgctcaacactcctgacarcaacctgtctgcagatgcaccaacagctgctgctgctgaaaaatgggcttgtctctctcacgggggctatgatttctggcatatgcatgcctcctactgtctgtttggttttaaagcaattttcggcacacctgcttgcttgaactttactgagaagccctctcaagagttcactgaagaaaaaaat

SEQ ID NO: 635445 - DNA, 633 bp, Homo sapiens
tttctctgcatttttccaacagcactcattattagttccatctttaggctttgcacttgctattgtctttgcctgagcttaaactttctggtttctctgtaccatgcaagctgtaggtcaaatgctctctcctcagggaagccttctctgatcacccatttgagagtaacttctcagtcaatccctgtgacataaccctttgcactgtctttgccctttacactcagggctattttgaattatgagtacacaagcagtgatagctagccactggtattctttctatagatattttaggaaatttgatctgaacttctatcattggattataactttattagttatactattaatcctttgatatattgtttatatctaaggttcattccagccacataatcccatggttgaacatagagttatttggaaagattttaagacacaatgttttccaataaaaaaacgctagtatgctgtcaaagcatasggcttacactaggcaaagaataacgtgattgtgagcatagaacggaccaggttcctatcaatatgccataaaaatttgccactccactgatatgtgacctttatagcttgtagcttttaaagtcatactcttacccagtgctgcat

SEQ ID NO: 635446 - DNA, 650 bp, Homo sapiens
attttaatatcacttgtatacttacaagcacaaaactcagtataaattccttatgctagtagctgttctgtaactctaaaccaagacaaatggaaaataaacacaattactaaccctataaaattcaaacaaacattctaacttagtatgccagaagatgttttactgaagttaaattgccatttgaagcctgagtatggggcagactgctatggcacaggcttttttagtacagcacacccagagcactgtagacygcaggcagctcccactgtgcttctctggtcaaactcctggaaagtcttcattttgaccgtgcaccaagtccccatttgacttttacttggcatagaagtatcatttacattaagcccacctctattttccttggttgggctataacaatgaacgtaaagcactatctggcttcaaagtgatcagaaacacaaagtcagtgtccaaatgccatggcaggtggtagccttccagacaattcagaacatgctgattttgtttggattaccatcaaaatgaaacataacatttagaagttttcacagacacatttcaggctcctcacaatatatttatttattaaccttgaggggtttatagtcccaggtctgagaaactctaatctaatcatttcc

SEQ ID NO: 635447 - DNA, 547 bp, Homo sapiens
ataggaaagacagtcttgagttgctgatgccaccccttccccattgccgctgcagagaaatctatgtgctttggagacagcacagcaattgtgagactttacattgaattcagtgctgccctctcacagcagaaagcaaaaccaggctgggctcagctgacatctgcctatgaagggagcattcagaccaaccctagccagtggggtatcacccatctcagcaataggaacgtgagttccaggaagcctcaccaccatgggctgaagttctctggagcctaatataaacttgaaaggcagtctaggccacaaggactacaaatcctagtgctgagctgggcttggggggcatgacatacttagacatcagcaagggcagctaagggactgttwgtaccaccccgccccactgccaggcagcatatcccctggctccaaaagagacccctttctcctgcttgaggagggaagagtaaagaggaccagctcagccacagcaagatagagcattggtcagagttgtgagatccccattccaggccctagc

SEQ ID NO: 635448 - DNA, 593 bp, Homo sapiens
cagatctgtgaactcagccaagcacagtggtggcagggcctagctgcgacaagacatattttagacaaatactcatgtgtatgggcaaaaaactcgaggactgtatttgtgacaaattgtgtaacaagttattttagttcctgttctgtggaaagtgcaaagcattccaacaaagagttttaatatggatttttttttttgcacccatgctgttgattgctaaatgtaatagtctgatcatgatgctgaataaatgtctttttttttttwaatgtgctgtgtaaagttagtctatgctgaagccatcttggtaaatttccccaacagtgtgaagttagaattccttcagggtgatgccaggttctatttggagtttatgcagaacttgcttgggtagagaaatcattgttttcagaaacctcggtgtagctgaactgataattactattgtgacctgaacttcaccattaaaagggattacccaagcaaaatcatggaattattggttataaaaatgattgttgacacatactatgcaatgtatctaaattgaataatgttaccagataaaattataaacaggaatgaagctt

SEQ ID NO: 635449 - DNA, 592 bp, Homo sapiens
aattgactatagtgatgtttatacatatctgtaaatgtaacaaaaactattgaattgtatactttaaatgggtgaactgggcaggctctgggcacactgcctatgagttagccctgctctgcaaggagcagtaaaaaataaaaaataataataataaaaaataaataagtggttgaattgtatagtatgtgatttatatctcagtgaagtgttaaaaaatgtaatgaggcaccgactctcaggtgccaaccctgcacttcacaaacctaagcgcaaaggcttcctcacattttgcaccttgggttctttgccttgcttcactatattcctgcatatgttctgcatccatcccccctttcacaaagataatcatctttttatttgctsttcttgttgtatccccttgcctcgaggcttttatgtaagaaggctaaaagtagaaaattgcttgtgagatacttcctttttgggctctctctttttaacagagtttactagagtttatgacaaatatgtttgtgagcaataagaaaatacttctcttttcagagcaatcacagagcagaatgatacattttgtcaagatttaaag

SEQ ID NO: 635450 - DNA, 421 bp, Homo sapiens
agcatgactcaaacaggtttggagcgcaggcacacaactctgcacgttatgtagccacaccacatgaggcgctttaggaaaccactcacgtgtgctcgtgcttgactgagccactattgtttgtaaaaggtataactacccagctgacactgtacatatggcttttgcccctggcttgtgcccacagctcacaccgaggttggtgcccaagctcgcttgcayccagagagacagaaaatgctatgtgaaaacttgctacgattccttgagtgttctttcagctggccaccacttgtccactgactcccctcagacctcagttagaacatgacaattggcatcacgaacacaatccaagagtgagtgagtctttggtccccactgagtccaggtcggccatgtgaccgcaacatggatggtg

SEQ ID NO: 635451 - DNA, 421 bp, Homo sapiens
agcatgactcaaacaggtttggagcgcaggcacacaactctgcacgttatgtagccacaccacatgaggcgctttaggaaaccactcacgtgtgctcgtgcttgactgagccactattgtttgtaaaaggtataactacccagctgacactgtacatatggcttttgcccctggcttgtgcccacagctcacaccgaggttggtgcccaagctcgcttgcacccagagagacagaaaatgctatgtgaaaacttgctaygattccttgagtgttctttcagctggccaccacttgtccactgactcccctcagacctcagttagaacatgacaattggcatcacgaacacaatccaagagtgagtgagtctttggtccccactgagtccaggtcggccatgtgaccgcaacatggatggtg

SEQ ID NO: 635452 - DNA, 272 bp, Homo sapiens
atttaccatgacttatttagtctctattgaggacatttagtttattactaatcttaggcttttacaaacaaagctatartgagaatttgtgtgcatgtatgtgtgtatgtgtgtctgtgtgtgtttcatacatggtgagtacagaggctgcatttctagaaatggttttctgagtcaaaggatatgtgtattttaaatttagtagacattgtcataattgccttccataaaagttataccaatttatactcctgtcagcaatataatgatgt

SEQ ID NO: 635453 - DNA, 272 bp, Homo sapiens
atttaccatgacttatttagtctctattgaggacatttagtttattactaatcttaggcttttacaaacaaagctatagtgagaatttgtgtgcatgtatgtgtgtatgtgtgtctgtgtgtgtttcatacatggtgagtacagaggctgcatttctagaaatggttttctgagtcaaaggatatgtgtaytttaaatttagtagacattgtcataattgccttccataaaagttataccaatttatactcctgtcagcaatataatgatgt

SEQ ID NO: 635454 - DNA, 520 bp, Homo sapiens
ctctctcccctcccatcctgtggtcttctaccactgcctcctgttggctcaacccagttggaagctccagagtcaggcggcctactgtgggtggagaagggtggtgaacccatgaagggacaygtggaaggatccagcacaggcagtgcatctgtcagatgagtagggtcctcccctgatccttttcagcgtgctccaggcaaggggtgggaggaaggagtagaagaactaaggaatgtgggtggaggatgcgagcttgggttttcaccccagaaaggagcaggaggggacaatctcagttcctcaaatatccacatactctctgtcatcttcaggcctttgcctatgctgttctctctgcctggaacatacttcctcctggggccggctaactcacccttagatgctacttcctcccggaaatctcccctgccctaaattagatgcctttgtctgtgtcccctgactgctcccatcccacgtatctcccctttttcatatgtatcatccttgtgtaagt

SEQ ID NO: 635455 - DNA, 548 bp, Homo sapiens
cttgggtcctactttttgctaaactcactcattagtcctatgagttttttgtagattctttaggattttctatggagaccatcatgtcatctgcaaattgggacagttctattttcttcctttctgatgtgtatgcctgtaatccccccccctttttttttttkgccttagagcactgactaaaactttagtactatgttgaataagagtggtaatagcagacatccttgccttgtttccagtctgggagggaaaacattcagtctttcaccattaaatataatgttagctataggttttgggtagatgctttttatcaagctgaggaagttctccctttactaccatttttttcagagtttttatcatgaatggtgttgaaatttgagaaaactttttttgtactgattgatagaatcatggtttttctttagcccattaatgtgtacattacattgactgatttttgaatgatgactagctttgcatagctggaataaatcccagctgtataaatcttttactactttgttgcatttgatttgcaa

SEQ ID NO: 635456 - DNA, 548 bp, Homo sapiens
cttgggtcctactttttgctaaactcactcattagtcctatgagttttttgtagattctttaggattttctatggagaccatcatgtcatctgcaaattgggacagttctattttcttcctttctgatgtgtatgcctgtaatccccccccctttttttttttggccttagagcactgactaaaactttagtactatgttgaataagagtggtaatagcagacatccttgccttgtttccagtctgggagggaaaacattcagtctttcaccattaaatataatgttagctataggttttkggtagatgctttttatcaagctgaggaagttctccctttactaccatttttttcagagtttttatcatgaatggtgttgaaatttgagaaaactttttttgtactgattgatagaatcatggtttttctttagcccattaatgtgtacattacattgactgatttttgaatgatgactagctttgcatagctggaataaatcccagctgtataaatcttttactactttgttgcatttgatttgcaa

SEQ ID NO: 635457 - DNA, 585 bp, Homo sapiens
agtatatagaaatgcagttgattttttgtgtatttatcttgggtcctactttttgctaaactcactcattagtcctatgagttttttgtagattctttaggattttctatggagaccatcatgtcatctgcaaattgggacagttctattttcttcctttctgatgtgtatgcctgtaatccccccccctttttttttttggccttagagcactgactaaaactttagtactatgttgaataagagtggtaatagcagacatccttgccttgtttccagtctgggagggaaaacattcagtctttcaccattaaatataatgttagctataggttttgggtagatgctttttatcaagctgaggaagttctccctttactaccatttttytcagagtttttatcatgaatggtgttgaaatttgagaaaactttttttgtactgattgatagaatcatggtttttctttagcccattaatgtgtacattacattgactgatttttgaatgatgactagctttgcatagctggaataaatcccagctgtataaatcttttactactttgttgcatttgatttgcaa

SEQ ID NO: 635458 - DNA, 616 bp, Homo sapiens
cctcttactttcaacctgcctttgttgttatacagtcacataccagataatgatgttttggtcaacaacagaccacatgtatgatggtggtccmataagattataatggagctgaaaaatttatgttgcctagtgacaacctgatgattctgatgctgtgtaggcctaagctactatgtgtatgtcttagttttaactaaaaaattttaaaaatttttaaaaaataaaaaatttaaaaatagaaaaaagcttatagaataaggatataaagaaagaaaatatttttatacaagtatacagtgtgtgctttaggccattataaaagagtcaaaaagtttaaatatttaaatgtttataaaataaaaatgttacagtaagttaaggttaacttgtttttgaagaaagaaatattttaaaggtagtgtaacctaagtgtgcaatgttcacacctacagtagtgtgcaacaatgttttaggccttcacattcactcactgttcacacacagactcatccacgacaacttccagccatgttaagtgccctatataccacatttttactctccctttactatgttttgatatgtttagatacacagatacttaccattgttt

SEQ ID NO: 635459 - DNA, 616 bp, Homo sapiens
cctcttactttcaacctgcctttgttgttatacagtcacataccagataatgatgttttggtcaacaacagaccacatgtatgatggtggtccaataagattataatggagctgaaaaatttatgttgcctagtgacaacctgatgattctgatgctgtgtaggcctaagctactatgtgtatgtcttagttttaactaaaaaattttaaaaatttttaaaaaataaaaaatttaaaaatagaaaaaagcttatagaataaggatataaagaaagaaaatatttttatacaagtatacagtgtgtgctttaggccattataaaagagtcaaaaagtttaaatatttaaatgtttataaaataaaaaygttacagtaagttaaggttaacttgtttttgaagaaagaaatattttaaaggtagtgtaacctaagtgtgcaatgttcacacctacagtagtgtgcaacaatgttttaggccttcacattcactcactgttcacacacagactcatccacgacaacttccagccatgttaagtgccctatataccacatttttactctccctttactatgttttgatatgtttagatacacagatacttaccattgttt

SEQ ID NO: 635460 - DNA, 557 bp, Homo sapiens
aacgatttaaaattagcctaataaaaattctaagacataagaaactagtagtaatatgaaataagaataaaaaatatactcaagcagctatattaggtaaaaaacatgatagctgaaataaaactgtaatgagataaatggcagaatgaatacaactgaaaaataaattagaattggaagaaaggattgaggaaagaatgaaggaaagtacatacaaattacaaattttttttaaaaagctatacaaaggaaagaaataatggttataagttctggctaataagagtccaataaaagaagtaataatgaaaagtacacatggaaggatacatttcccacgatttccaatacaaggaagaaagacttcaaattgcmagagcccttagaataacagataaagaaaacctacaaggaaacatatttcaattgaatagttttgaagaaaaagagagttctaaaaaagcagattacatacagaggaacaggatcagattgatatgatagtttttgaaaaacaatttaagaaatagtggtttttatttttgttttttgttttt

SEQ ID NO: 635461 - DNA, 554 bp, Homo sapiens
aaaacaaaacaacttttttcttctccttggtgaaactagtgtttttctagagaggctgctggcctccaacctgaatcttgataacattatggggactgtgtttgttccaaatgtagcagtagtactgcttggccatctaatgaacctgaggaaaaagaaagaacagagtgataatgggggctggggtgggatctgtaatgttgtttctcttttagttttaagttggatggtgatgtattttactaaataaacccttagcataaactctaagctgtttggtaacagtatgaaagatctttgaggagctctgaaggyacaagtgtcttcttttcaactgtaatatttctttgtttcttttagatgttttcacctcctgtgagcagtgggaaaaatggaccaacttctttggcaagtggacattttactggctcaagtatgtaaattcttttcttagtgttaagttaaatgttctgggctgtttatttactcaattgtatgtttttggctctgttgaagagttctgaaaaagtcattgaattttagcctgtaatcat

SEQ ID NO: 635462 - DNA, 571 bp, Homo sapiens
aaatgcctagaagaaaacattggggaaaaacttcacaatattggtcttggcaatgatttattagatatgacagcaaaacacaagcagcaaaagcaaaaatggacaagtagaactacataaaactaaaaagtttctgcacagctaagaaaacaacaaaatgaaaaagcaacctaccaaayggtataaaatgtctgcaaaccatatatctgatagaaggttaatataaaaagtatatagggaactcctgcaacacaatagcaagaaaaagtacttttaatgggcaaaagactggatggacatttctcaaaaagagacatataaatggacaacaggtatatgaaagatgctcaacatgactagtcatcaagagaatgcaaatgagatatcacctcacacctgttaggatggcaattattaaaaaaagaaaagataaatgttggtgaggatgtgaagaaattggaacccttgtgcactgttggtgggatggtaaaatggtgcagctgctatggaaaacagtatacagactccttaaagaattaaaaatagaaacaccatatgatccagtaatccc

SEQ ID NO: 635463 - DNA, 527 bp, Homo sapiens
acatctaacaaaaatgtgcaagtgttgtacactgaaaactagaaatcattgctgagaaaaattagagatctaattaaatgaagagatatagcctgttcattcatcaaagacctgttaacatgtcaattctccccaaattaatctatagattcaacatggtcccaatgaaaatcttagaaggctatgtagaaattgacaaaatatttctaatttattatcaagtcactgaggtattkaccacaatgcagacaaagaacagagttgggggtccaaaaatagatgcacacataaagaaaactcacttttttccaccaatgatggatatccttaagcaaaatcataataataaaaataataactttgattcatactttggaacatatataaaaattaactcagaatgggtcacagacttaagtggaaaagctaaattgacagaatatctaggagaaaatctgtgtgacctttgattaggcaaagatttattggataccataccaaaagcatgatccaaaacagaataaatt

SEQ ID NO: 635464 - DNA, 604 bp, Homo sapiens
ccaccagcagttttcaggctctgagcaaaggtgaggcagcctcagaactactgaaacgggtgtgcttatggcttgtgtgtacagaggaacgtgatagctgtgagcaccagagttgcagtaaaattgctgagtctgaattttaaaacacaaacaaaaaaggcaggagtatcatgacatgaacatgtcataaccctgaagacacagatgatatgtgaacttggctcactcattctgttccagccactttagactctgcattttccctagcataacaagcatccttcctcagggcctttgcacttgctgttcgctctgcttggtgcactttttccctaaatatctgcagggctccttttcctacctctgttgggcctttcttctaatgttaccttcccagagaggcttccctagttactttgtttgatatcmcaacttccacactcaccccctgtttgtgtttctttttctcaatagcacttttcaccatctgtagtaccatatgttttacttatttgcttatttttttttttagtcttctctgccaaaaatataatctgccatgaaggcagggtttttgtctgtttcttcacctagtagcacctag

SEQ ID NO: 635465 - DNA, 556 bp, Homo sapiens
tcaaaccatattattagaactatcacaagacagatttccaaagactgccgatagaaacaataaatacattcaacaaacaaatgttttaaaatttctgaggagtaaacattatgagtttcattgccagtaaaactgaataaatttgctcaaagaacaaattttgtatgtatgtatattacaaagtatgtatcttccatcatacttttaaaagtacttccagtttctggccgggtgtggtggctcacgcctgtaatcccagcacttgggaggccgaggcggrcagatcacgaggtcaggagatcgagaacatcctggctaacatggtgaaaccccatctctactaaaaatacagaaaattagccgggtgtggtggcgggcgcctgtagtcccagctactggagaggctgaggcaggagaatggcatgaacctgggaggcagagctggcagtgagcaaagatcacaccactgcactccagcctgggcaacagagcgagactccgtctcgaaaaaaaaaaaaaacaaaaagtacttgcagtttccaactggaaaggcttt

SEQ ID NO: 635466 - DNA, 600 bp, Homo sapiens
aatgaaattcctgagaaattggcagaaactaacagaaaaccactttgtaagaactgtcccataacccagagcacaaacttccaaaggagacaaacatcccagatgaagatgagctcacaatcaaaaaytagaaacacacacaaacttatccactgtggacaagtcagtagacacacaaaggaggattagtgcccccaagatcttgacaaatagagtaatttgaaagagattttttaaatgatcatatttaaagtgttaatacagacaaaaataatgtacatcataatgaaaagataagtttgaatgggaatcaaatagaacaccaataaattaaaaatacagccattgaaacagagcttgaattatacaatacacgagaccaatgaaagctaggtaaagtgaaaaacagatcagaataaattacacagaaatcgttcatttattcaaaaaatgcttccacttgcgcaccggacatccattctgagtcactctttcaaatgctcaatatacgttattgaacaaaacagactatggtcctcagagagcttatattctagtgaatgaaacagagatgcaaaaaaaaaagtagactatattaaa

SEQ ID NO: 635467 - DNA, 594 bp, Homo sapiens
agagaaatcaattctaaggaaggaaatactcagagatacaaggatttatgcataagaatattcatgatagtattatttataataacggaaaacaatctcactgcctccaaataaaaaaacggttaagtgatactgtatctatagaatgcaataatagaaaatcattaaattcatgctttcagagaacacttaatgccgtggggaaatcctcataatatgctaaatgagaaaaacagttgaggtcagcctacatgtaaaaatatacaggtgtacatgtgtataatatacacacataccaacataggtagaagcacatacaaaatatctaaacacacgcaaaacttttaaaacgcatagaatagacagtttttttctcccaatatggtctgccactcatatacctcagaatcaccttgggggcttattaaaaatgcaaattcttgggtatyaccccagacgtttgaaaacagagcctaagtctttgaaaacagagcctaaggatcgctgtctacctacacaccctgagtaattctcacccacccctcagtttggggaccactggatcagaaataacagctctctgtgggtgaagga

SEQ ID NO: 635468 - DNA, 609 bp, Homo sapiens
accctattctttaaacagacatgaatttgtccaatatacatatatgtatttcctggactattaggtcctaaaatactttagtaaagaaagcaatgacaggggcatggtggcagatgcctgtaatcccagcacttygggaggcccaggtgggaggatcacttgagcccaggagttcaagaccagccaagaccccaactccacaaaaaaatttaaatttaaaagaaagcatgacaaagtcaggttctagaaatcagaaagcccacaacacccagaagtgaaaccactacttcctcaaatttctcacagtccattcgtttcagaacttctaggctatgacatttggaaggcattacccagtacagaacaaagcagggactcaaacatttgaaaaggtaaatagctctacaaccacttttttaaagaagtaaattaataaactttacttttttagagcagttttaggttcacagcacaattaagcagaaagtacagagtccctgtccccacacccaaccttccgccactatcaacatccccactacagtggcacaattgttacaatcaatgaatttacactgacacatcattatcacccaaaacccagtttac

SEQ ID NO: 635469 - DNA, 444 bp, Homo sapiens
ttataggagtcaatcactatgcccagtctattctgcccattgtttattttattgttgcattattttattgttgagttttaagagttctttgtaattttggataacagtcctttactagatgtgtcttttgcaaatattttcacccagtctgtggcttgtcttctcattctctgaccctgtctttcacagagcagaagtgtttcatttcaatgaagtcaggcctatcaattctttcctttatggatcatgcctttgatgytgtatcttaaaagttctcgctttttctcttggccaggcacagtggctctctcctgtaatcccagcactttgggaggccgaggcaggaggatcacttgaggtcaggagttcctgaccagcctggccaacatggtgagaccccatctctactaaaaatgcaaaaattagccaggcatgatggtgcaa

SEQ ID NO: 635470 - DNA, 598 bp, Homo sapiens
ttatttgcattccgtgaacacactcacagagaaaagagagcgattaaaagaggatcatcgaacataaaagaaagaggtcaaaaactaggcccacatgaattttaaaatttgtcctcaagtataaataatctatagtcaggaattcacattaataatttaatttctgccaccattctgagtttttcttcattttttcctactagggaccaaaagttctctataagaatgtccaaggttctggaaatggagttatcctatttgaacacaaatactcaacagctaagaggcatagaagtttctctagaagagtacattgttctacaatcagaatgggtattggggtcatgtggaaggcctattaaatcacagatttctggcccataccccaaatattttagttcggtagtccggrctgggtcccaagaatttactttgtcagcaagatcccacgtgatactcatgctgctgctccaggttccaactatgaggacaactattctattaaaagacttatcgacatcgctggcaccagcccaggggttcattcaggaccttctctttctttccatcactgcccctattctaaacacttccttca

SEQ ID NO: 635471 - DNA, 608 bp, Homo sapiens
aatacctgctcctattcacagcaaagcatcttgaaagagctgagctgtgttcacagtctctatttcttcatttcccattcactctgagcccctctgatcagattttcacctccatcacttcatcgccaatgacttctgcatgctaaatgccaatgtcagttctcaggtcctgcctcatgtccaaacatgttttaatrcaggggattacattcttgtgggaaatctttctttggtgcttccctcctgtctctcaactcatcagcggctcctgttctattttctttgctggttcttttccttacacctaactcactcttcaatgtttgctgtaaacagagctggctctgggtcctcttcttttctcaatgtacatactctctctaaatgatattcatgacattacatgtcatttagaagctctaatgacaaccagcatgtttctctccagtcctgccctcatcccacatgtttgaagttatccaactacctacttgatatctctgcatggatgcctagtaaacatctcaagctctatccagagcacaattctttatttctcctcacaattttttcttcctccaggtgccatatagatggaaaaccataaa

SEQ ID NO: 635472 - DNA, 677 bp, Homo sapiens
atgtgctgaaggtcaaaggcaggtagattctacttttaacattaggaggagacccacaggaattaggagggcaaagcaaaatgaccagagaaagcataggccattcgaaggaccttgtttccaagaaaaggaattgttatcacaggaaacctcttatgtgatttccggtaccattcaaaaccattcttgagatatgtgcatcctagggcctgagttgaggatacagttttaaagggaaggttgaataggttggaaacaattaaagttgatttgggtatgagaaaaatgtggcagtcaataaagaacagaattttttaaatgaaaaagttaagctgtttataaagaaacagaatggataagaagtgtatatttatcaaactatatgagttcatttttaaaaatttggggacagtaaaagcatctagcaagattcagtgcaactatttggatattttacctaattgtctacaratttttccacatgctactaatgcaatgagtaatcaaggcagttaattaactggcttaaggcaaaaaaattgtcttcatttattttagtaattaagataattctaattgacttgaaattatctaattgacttgataattctaattgacatgtgtagatgtaggctacatgtaaagaaataaatgggctaaaggaaaaaagaaaaaag

SEQ ID NO: 635473 - DNA, 677 bp, Homo sapiens
atgtgctgaaggtcaaaggcaggtagattctacttttaacattaggaggagacccacaggaattaggagggcaaagcaaaatgaccagagaaagcataggccattcgaaggaccttgtttccaagaaaaggaattgttatcacaggaaacctcttatgtgatttccggtaccattcaaaaccattcttgagatatgtgcatcctagggcctgagttgaggatacagttttaaagggaaggttgaataggttggaaacaattaaagttgatttgggtatgagaaaaatgtggcagtcaataaagaacagaattttttaaatgaaaaagttaagctgtttataaagaaacagaatggataagaagtgtatatttatcaaactatatgagttcatttttaaaaatttggggacagtaaaagcatctagcaagattcagtgcaactatttggatattttacctaattgtctacagatttttccacrtgctactaatgcaatgagtaatcaaggcagttaattaactggcttaaggcaaaaaaattgtcttcatttattttagtaattaagataattctaattgacttgaaattatctaattgacttgataattctaattgacatgtgtagatgtaggctacatgtaaagaaataaatgggctaaaggaaaaaagaaaaaag

SEQ ID NO: 635474 - DNA, 592 bp, Homo sapiens
actgtgtgaatttctgagaatacaaagatgaatgagtgaggaaccctgtcttcccagtgtgagtgcacactctgggaaggaagccaaaaatggtagacaataatgacagtgtaaggagggcaattatagagctcaaagggggtctagaggagagtaggggaggattaatagaaaggatgctgtttgtgctggttaaggatgaataggagttttccatatggaccagatgtgaaagccatttcagaggaaacaatatatgcaaagtcatataaaaacagcacatgcaaaggcatataatgaagacataatgatatatgtcacacagtgccacattacaagttgtcatgtgatagtgactttaagaaagagtacagagccaggaggaaataatgctaggttcaattccctctctatagtacaccagctgtaccatttgaaaaagttatttaccttctaattttcagtgttcttatccataaaatggggataataagggagactaggtcaaagatggttgtattaagtgaaacaagtgctctgtaaatgttagctgttaytgttatcagggttaattaggcattgttggatcaca

SEQ ID NO: 635475 - DNA, 517 bp, Homo sapiens
ttatctgtgtatcttactttgtagaacttaattaagcacaagtatttatcaagtactttgtgctaagcacagaaatcagtgttaccatgggggcactgggaatcrggccactggtatgaccacatggatggttgatgacaacatccattctgacggaccagtacccacactgcactatttcttaaatgtgccaagaatcacaactgcaagacctcatcttcgcactctcagcgcttgcaccctgtgtacagagacaaaccagtgcttctgaaacaaacagatctgtgccaacaccagagaggctcctaaagtgtcaaattacgatcagcatggaaaaaatattatttattcatgtagactgacaacttcttgaggcagaaaaatgttttttatactttttttactccctaatgtgtctatcttttggctgagcgtatattcagtagccaaaaacatctggtaatttgctaattttaaaaagaattgtagacatcgacattgcatagcattggctttg

SEQ ID NO: 635476 - DNA, 560 bp, Homo sapiens
gagtctggcagtgtcaatgggagaaggtcacagcaaagtaaaaggatggggatgacagggaacatactggtaactagtgactggctagtacttcctgtccttctacccctctgagtttcttgagggagcaggaagcaagttcgttcagctttgaatgaaagctcgcagctcacaaaagactgaacaagctagggcctccttagactgatgttaaacacaagtaaagcacagtggctgtggggtcyttccttagagtcatattggcttggttgggatccctggcccctgccagcttggggtgactgtattttataggtcaaaatctattggaagatagagcaaaatgaattaagtgatagtcagaagtgggatatctcaaaattatgaaaagtttatctgctcgggtgttaccacactctctcctcctgcttcccccctcaacttcttcctattctctacctttgtgccacccctccccccggccacctcagtgtaaaagccaccaacctcagcctgcttctccagctctcacaacttaaatcccacgcactgtctacagc

SEQ ID NO: 635477 - DNA, 600 bp, Homo sapiens
cctggcccctgccagcttggggtgactgtattttataggtcaaaatctattggaagatagagcaaaatgaattaagtgatagtcagaagtgggatatctcaaaattatgaaaagtttatctgctcgggtgttaccacactctctcctcctgcttcccccctcaacttcttcctatkctctacctttgtgccacccctccccccggccacctcagtgtaaaagccaccaacctcagcctgcttctccagctctcacaacttaaatcccacgcactgtctacagcaatccgacaattctggttttggaaagaccatcaatgtctgtcttgacatacagtgagcaccctattaatacctactgaatatctctcaacctttttgtatatttcaaaaaacatttgaaatgatcctagaaaagctcagaataaagcagtcctaattgtttttctttctaaagacacagctgaaagcctcaagagttttaacagagcacctattaatttcagggcaattagaagggaggggaaagatcagagaacgtatcaacttgctgtaagaggcaaacctgtgcaaattaagtttgtcgaaattatcagcaaac

SEQ ID NO: 635478 - DNA, 600 bp, Homo sapiens
cctggcccctgccagcttggggtgactgtattttataggtcaaaatctattggaagatagagcaaaatgaattaagtgatagtcagaagtgggatatctcaaaattatgaaaagtttatctgctcgggtgttaccacactctctcctcctgcttcccccctcaacttcttcctattctctacctttgtgccrcccctccccccggccacctcagtgtaaaagccaccaacctcagcctgcttctccagctctcacaacttaaatcccacgcactgtctacagcaatccgacaattctggttttggaaagaccatcaatgtctgtcttgacatacagtgagcaccctattaatacctactgaatatctctcaacctttttgtatatttcaaaaaacatttgaaatgatcctagaaaagctcagaataaagcagtcctaattgtttttctttctaaagacacagctgaaagcctcaagagttttaacagagcacctattaatttcagggcaattagaagggaggggaaagatcagagaacgtatcaacttgctgtaagaggcaaacctgtgcaaattaagtttgtcgaaattatcagcaaac

SEQ ID NO: 635479 - DNA, 612 bp, Homo sapiens
gctcagttgaggatctccttgttttagtgtagttataratgtattgggtggagtagagaatcatctttatacattttatcattaatacaaacatacctaattctccacaaaagctgagaaggttcagagttccagtctaaagaaagaaaaataaattctttctatagatacatataatttcagattacacagcatgcctttatattaaacagatgttgaaccacacctataatattattttcaaattttatcactgagccacataaaagatatgaaaaaagctggagaagtttcagagaacagtaactcaattgattggggctgtaaagtaattccacacagcattgactttaaaagattggggatttatattcaggaagtgttcagatttagaaatgatatcattgaaaactttgaaagcattcctaaagaggagaaaaagttacttaatcccagaatactagtgcaggaaatttcttcttaaagtttgagaggagaaatattcaaacaaataagattctactctacacataagttataaaagagatgtaacaaggcagtgttctgatttacacaatttacagatgaaaaaaggctataagagggaagaag

SEQ ID NO: 635480 - DNA, 614 bp, Homo sapiens
gcctggtcataatttttttcattatatgtaaagtggctcttttctccttgattatattctattcaaatctgttttttttcatgtgaaagaagcaaattctgtatgatatggacaagcacaatcttctatttyttaaagattttaaaataaaacatctaaaagtaaatattgagatttaaactgatgagaaacagattgggtattgcctgtcaaagccccaaaggctacaaaataaatgacaaggtaacagcagcctcagatcattgaaatgcaggctgtgttcactgaaatttcatatgcatgtcttccctccactgtctccttaacagatgtcatcaaatcagatatacaggccagaaatgaagtgcaaatactaccccaggagctactgagacccaaagctacaggctccccaacttgtgaactacaaatgtgcaactgtctaggtttaaattcatcaggcagcagtccaacatgtcattttcaccaaaaagtaaaacctggcattttaaggctttatcctgaataacttttctgatgttttgactatattcaacccacatataaaactagctatgctatttttaaaagtacatgggaaaacatgtttcata

SEQ ID NO: 635481 - DNA, 407 bp, Homo sapiens
cattcttttcctaccttgttaaaagctcctattatagaaattgccagktctattagtatatcttaattaccacatcttgtgctgcttttagcctctagtggggcaaaattgccatgatttatgctttactaacaatgatatttttacattagtaagcaattaaagagcccaacagctctcctgggaacttcaaaaaaccgtagaaggactgccatcattttgatttatatctacactaattgtatgcatcagaaaacttataaaataatacagtgtcaaaatgtttatgctactcacaataaatgtttgtaaaaagaggaacattccacttcatatttactgtagaagctgcatataaaattaaagataatgggctcagatgaggtcagatcagggtgatgagtggt

SEQ ID NO: 635482 - DNA, 495 bp, Homo sapiens
ggagtttccccagtgtcaattggtgccgccgtctcacctttgagcagctccctctgattagccatcagaatgtactttcgttttatgaggaattatttgtattttggactaactctcaaattctcctgtgtggcaaagtcaagaacctgaactggcccaatggctataacaacattttggataccaagcaaccacagtgtatttgttaaaataggaatacagacactgcttcatagattgaaatacgtagcacggtaaggataactttttaagttacaatcagctcaaactttaaaatcactagctattttctttaagttaatctaataataaattatatgctgtgtaaatatttacacatattcgccccatttcttagaaaagcacaagtataatctttcttcaagcaaatccagtgtatgaaaacagttaacaaastatgttagtgtatggttattcatatcacaagaggtttttagttacaaaaggatagcg

SEQ ID NO: 635483 - DNA, 370 bp, Homo sapiens
tgggttaccctaagtttcactatccagtggaatgacagagaaaagagaaaacagtgtcatataggtggttttgatgagccaggcctggaagtgacccatagtaaattttctagaagtcagtgtgaaattgccacttctatcttcaaggaaggctggaaaatatagttagctctgttccccagaagaaacagaaatgcattttggtgaacacaaagcaattactactacacagtgctaccatttactatctatgtattgttggacaasttgcttaaactcccagacccaattttctagtctattaaaaaaaacaacaaaaaacaccataatacttgccctattggattttgtgatgtcaataagaatgaca

SEQ ID NO: 635484 - DNA, 501 bp, Homo sapiens
tttctggggcatcttgattttaaacattcctctctgttattacctccagcacaactttgctgtagaattttcaatctattatatgctgtggaattctgattacttcttatatctggacggggacctgaaaaaaaaaaatctttgtcaaattatgtgttctgaattttggtttggaaattataggataaaaaatgctagaagatatagrtgactcaaatatcttgaactgaactatcttacaagaaaagcccataaaacaggagctaagttcatggtatgttgatgatatcactgtataaggtaggagtgacagccttattgtctggattttaaaggatttttatcttcaaaagggtaaaataggttaaatgtactggtttctaaaagaaatattaacaaatgtttattttctttgcttttaaaataccatctaagactgggcgcggtggcttacacctgtaatcccaacattttgggatgctgaggcgggtggatcgcctg

SEQ ID NO: 635485 - DNA, 587 bp, Homo sapiens
cttatgcctggaaaatttgaaaggcatatggaaaattatactcagttgataacatacccatttgataataagcagcacagacttttctaaaaaggcacagagttcacattttaaggagacaaatcagcagtctcatgcatacaaataaaaccaatcacatttccaagtctctaacccactggttgtcatctgaaggcaatttttattccccataggggatatttggtaatgtctggagacattttttggttgtttgagaactgggggagaggtaatctgtgttactggtatccagtagagggtagaggccagggatgctgtcaaacatcctacaatgcacaagacatcacctcacaggaaagcattatctggcctcaaatatcaatwaaaaaaatcctgtctaagcagcaatcctgaatctttcaatacattcccaactataactttgtatctctctctatacacatatacatatacacacacatatacatgcatacacatatatgcacatgtgtacgtatatacactatatatacacacatacattatatatatatacacatatatacagagagagaggattttat

SEQ ID NO: 635486 - DNA, 585 bp, Homo sapiens
taactttgtatctctctctatacacatatacatatacacacacatatacatgcatacacatatatgcacatgtgtacgyatatacactatatatacacacatacattatatatatatacacatatatacagagagagaggattttatcaaaaaataattaaatgattaccctatattgtcaagagaagagtgcaactcttaagaaaaatttctttaatagattaaaaatgcttttaaagtccaaactatcttgtggaagtaataagttactctcagaaagccaaaaataaataaagcaataggaacagatgatacctatagactgtgaaggtgaaatactgggaaaaatggcatgatggaattgtggcttttaggttacttctcaccatcctgatccctgctgcagcacttctctgttaatcgaaatgaaacaaacctcaaagaacttttgctggacatctgttgaatgtgattgagatatttaatagcagactgaggagtgcaggcccataaatagctttgggtagcatctgacaacctgaccatcatgtagtatggaggaaagggacctagttttggaggaaa

SEQ ID NO: 635487 - DNA, 585 bp, Homo sapiens
taactttgtatctctctctatacacatatacatatacacacacatatacatgcatacacatatatgcacatgtgtacgtatatacactatatatacacacatacattatatatatatacacatatatacagagagagaggattttatcaaaaaataattaaatgattaccctatattgtcaagagaagagtgcaactcttaagaaaaatttctttaatagattaaaaatgcttttaaagtccaaactatcttgtggaagtaataagttactctsagaaagccaaaaataaataaagcaataggaacagatgatacctatagactgtgaaggtgaaatactgggaaaaatggcatgatggaattgtggcttttaggttacttctcaccatcctgatccctgctgcagcacttctctgttaatcgaaatgaaacaaacctcaaagaacttttgctggacatctgttgaatgtgattgagatatttaatagcagactgaggagtgcaggcccataaatagctttgggtagcatctgacaacctgaccatcatgtagtatggaggaaagggacctagttttggaggaaa

SEQ ID NO: 635488 - DNA, 628 bp, Homo sapiens
aaagaacaaaacaaaacaagcaaactgtctattactatcccttctttccaagctactatcatttcttcctaggagaactataatagactcttcactggttttcctgcccccatcttgttccacctatagtttttcaactcagaggagcaagagcagttctctttagggatcacaggatcaggatcacaggcccacaaggatctatattttctactcctagctccctctctattggtataagccatcttcatttcttctctccaccctgaggccacacagtcctycctaatatttcttgaatgaataaaaaacattctgcttcagggttttttatatttttgttcatcatccttagcactcttccagataccacatctaatgagatgtggaccatctcattcaaaacagtaaccactgtcaatccctatccctttacattgctttcttttttccccccagcatttatcataccttgatgttctactgtatatttactagttcaccatctgtatccttcactaagatgtaagctccatcaggacagggcttctgcctatggtatgtatgactgaatactaagcgctcataatttttatctggcacatagtgggtgttcaagaaatatgac

SEQ ID NO: 635489 - DNA, 564 bp, Homo sapiens
tccaacttttagttatttattggtttaagccaaggatcagcaaacattttctgtgaaaggcaagatagtgaattgtatatatttctggctgtgggcgcatgatctctgttgcaactactcagtggtgcctctgtcgcaggaaagcagccattaaaagtatgtaaataaatcagtatgtttgtgtcacaataaaactttatttatggacactgaaatctggattgtatataattgtatataattctgtgtatcatgaaacattgttctttccgtttattcaactattaaaatatgtagtaaaccattcttagctcactgctgtacagaaagagctagacttgccctggggccatagtgtgctkctctctggttaaactgaataccctcattgcaaggattttggtatctatggcctctctcataaacaagtgagcctgtttatgaactagtgagctctcccagatagtctcccacttcatccttctgtagaatagaaaaacaaaaagtgaaggaaagcaaaagacacctcttaaatactctttgatcttgatccttgttgagtag

SEQ ID NO: 635490 - DNA, 564 bp, Homo sapiens
tccaacttttagttatttattggtttaagccaaggatcagcaaacattttctgtgaaaggcaagatagtgaattgtatatatttctggctgtgggcgcatgatctctgttgcaactactcagtggtgcctctgtcgcaggaaagcagccattaaaagtatgtaaataaatcagtatgtttgtgtcacaataaaactttatttatggacactgaaatctggattgtatataattgtatataattctgtgtatcatgaaacattgttctttccgtttattcaactattaaaatatgtagtaaaccattcttagctcactgctgtacagaaagagctagacttgccctggggccatagtgtgcttctctctggttaaactgaataccctcattgcaaggattttggtatctatggcctctctcataaacaagtgagcctgtttatgaactagtgagctctcccagatagtctcccacttcatccttctgtagaatagaaaaacaaaaartgaaggaaagcaaaagacacctcttaaatactctttgatcttgatccttgttgagtag

SEQ ID NO: 635491 - DNA, 577 bp, Homo sapiens
tttagaagaatatatctctttctatttatctatatctatttttatatccatccttttcaaatgataaattgcattatgacctattactaaatatttcctgaataattagcttttcttggyaaagtttattgctgttcggtttggtttaacgtgtatatttcactttatactttgaatgataatttagaatcatagccataagtcacaaagtttaaagaaaagtgaaaaataaactgaataagagttaacagtaattctggttgttacagatcttctcaggtttaacaacgtaaaatatgacttaggttaggaaaggtttggaaaaaatgtttttaatttgacaagggcctctaaatataactcactttatatagcaatgtcccatttccataaccttaattgctttctctttcttccttttctttcactccctctcatctccgcattattctctttatgtattttgcattcaaagccacctactttcgaaacttactgcctagaagcagatagtgaatgtttcagaatttgtgtttcttgaaacagcatttttttcatagctgaattataataactg

SEQ ID NO: 635492 - DNA, 548 bp, Homo sapiens
taagtgtcaaatacacattgcttacttagcatgtctatatgtggaatactattttaggtcctatgaagaatttctaacaaaccaaaacaaaatgattcctaccctcatgtggcttgcacttgattcgagaggtgtcttcctaaatgtatatatgtatgggtgtacgtgcacacacacacacacagaggaaatccagatagctagaaaactaaattaatacaaaataagatcacgttagcaaagtacactggagakctatagttaaaacagagaataggagtggtgttgatggggatgtgtggatgcctggggatgtgtagatctggaatttgtagacgagaaccctagattgacaaagaagaaagatcaaagccacgacagtatacagcaaagaagtagaaacaaataacatatatgtagggagcagcacagcctgggttgtccagagcttatgaagtagatttttcttcctctctcagacaacacctacttacctctgacagttcttgactggggacacctatcagaaggggactcatagcctagca

SEQ ID NO: 635493 - DNA, 517 bp, Homo sapiens
actctcagtaagctctttgcaaaaggtagcatagtgcagtggtttagactaacgcacagatatacctctgtcgatggacaactttggttcaaatcccagtttctctctttactagtattataaccctgggcaagttatttgctcaagagatacatctgcctcagcctcctgaggagctgggactacaggcacacatgcaccaccatgcccagataatttttttttttttkggaaagacatggtctcgctttgttgccgagactggtctcgagctcctggcttcaagcaatcctcccacctcagctttccaaagtgttaggattaccgagacgagccactgcacccagcctaaaccactactttaggcagtaatctacctcacttaatcacccaatgctatggcataaacctggggcatatggctctagtcacattcctttaggaatattctcagttgcacttagtaccagaacacgataattactaaacatttagaacttcattggagagtaggtac

SEQ ID NO: 635494 - DNA, 517 bp, Homo sapiens
actctcagtaagctctttgcaaaaggtagcatagtgcagtggtttagactaacgcacagatatacctctgtcgatggacaactttggttcaaatcccagtttctctctttactagtattataaccctgggcaagttatttgctcaagagatacatctgcctcagcctcctgaggagctgggactacaggcacacatgcaccaccatgcccagataatttttttttttttgggaragacatggtctcgctttgttgccgagactggtctcgagctcctggcttcaagcaatcctcccacctcagctttccaaagtgttaggattaccgagacgagccactgcacccagcctaaaccactactttaggcagtaatctacctcacttaatcacccaatgctatggcataaacctggggcatatggctctagtcacattcctttaggaatattctcagttgcacttagtaccagaacacgataattactaaacatttagaacttcattggagagtaggtac

SEQ ID NO: 635495 - DNA, 517 bp, Homo sapiens
actctcagtaagctctttgcaaaaggtagcatagtgcagtggtttagactaacgcacagatatacctctgtcgatggacaactttggttcaaatcccagtttctctctttactagtattataaccctgggcaagttatttgctcaagagatacatctgcctcagcctcctgaggagctgggactacaggcacacatgcaccaccatgcccagataatttttttttttttgggaaagacatggtctcgctttgttgccgagactggtctcgagctcctggcttcaagcaatcctcccacctcagctttccaaagtgttaggattaccgagacgagccactgcacccagcctaaaccactactttaggcagtaatctacctcacttaatcacccaatgctatggcataaacctkgggcatatggctctagtcacattcctttaggaatattctcagttgcacttagtaccagaacacgataattactaaacatttagaacttcattggagagtaggtac

SEQ ID NO: 635496 - DNA, 517 bp, Homo sapiens
actctcagtaagctctttgcaaaaggtagcatagtgcagtggtttagactaacgcacagatatacctctgtcgatggacaactttggttcaaatcccagtttctctctttactagtattataaccctgggcaagttatttgctcaagagatacatctgcctcagcctcctgaggagctgggactacaggcacacatgcaccaccatgcccagataatttttttttttttgggaaagacatggtctcgctttgttgccgagactggtctcgagctcctggcttcaagcaatcctcccacctcagctttccaaagtgttaggattaccgagacgagccactgcacccagcctaaaccactactttaggcagtaatctacctcacttaatcacccaatgctatggcataaacctggggcatatggctctagtcacattcctttaggaatattctcagttgcacttagtaccagaacacrataattactaaacatttagaacttcattggagagtaggtac

SEQ ID NO: 635497 - DNA, 610 bp, Homo sapiens
aattatacaagttaaacttttgtttatctttccactggaatggctaatagtttcttagtttaaaggaaatctttagattggtttcgagtcaggaaaaggttgaccaaaggtaagcccctgatgtgaaatgttagacaaattaatgtgagcacttcagaattctttctttggtggacatgtatgtcaaagttgaaggtagttctttcattctccctcacccaataattaaagtcaaaaatagatatgaaagcaaacctaatcatacaattccctaagtattctactcttcttcagaatttaccagcattagggtggttaaattagaataccaacactgtcggccgggcgcggtggctcacgcctgtaatcccagcactttgggaggccaaggtgagtggatcacgaggttaggtgatcaagaccatcttggctaacacggtgaaaccccgtctctactaaaaatacaaaaaattagctgggagtcttggcgggcccctgtagtcccagctactcgggaggctgaggcaggagaatggcrtgaacccaggaggcggagcttgcagtgagccgaaattgtgccactgcactccagcctgggcgacagagcaag

SEQ ID NO: 635498 - DNA, 458 bp, Homo sapiens
ctacacacctaacagaataaaaaatagcaatgactccaaatgcttgtgagggtaaggagaaactggatcacccctagattgctggtggcatgtaaaayggtacagccactctgaaaaacagtttgacaggttaaaaaaaaattcaaatatcatacagttcagcagttgtactcctgggcatttatttcagagaaatgaaaactcatgttcacaaaaataaatatataagtgtttatatcagttttatttctaacacacaaatctttaaataggctatgtgttgtcagcaggtaagcggttaagcaaattgtgatttgtgttgtggaatactactcagcaataaaaaggagaactctgaataagattggtgggccacaccaaagtcaatatttgtgtgtgatactttattatagttttgctaaatgttaccattaggaggaactgaacaaactgtactt

SEQ ID NO: 635499 - DNA, 577 bp, Homo sapiens
cctgcatattacaataattattttccacctgccatttatttgtaggaatctttttgaggcacttgttcattttaagagggatttttaacataaggtaatctgtgtctgtgtaaccaggcacatgtaagctaccagatactgcagcatgctgaaaacagtmaacaaaccagtaagagctccactggcttcccttggcatcttaggactctacactcatttcaggaagctttgcatgtggaccataagtgacacccaacctccgactttcaatagaggaagggtgccagaagcaatctgtgttgtaaacattaatagagttaagtgtctttcatatctgttctagatgaaattattattataaaaagaagtccaacattttcatcttgaacactaaaggatctttctcgatagctgcggtggtatttgccagttcagagaccactagttcaaagaataaagccatgtgtggatcaaaaagacttgatacactgcattgcaggtagaaaggaccaggcagtgagaaagccagcaaggtgctgcgtagaatttaggttaactgaatgctacaggccttctg

SEQ ID NO: 635500 - DNA, 577 bp, Homo sapiens
cctgcatattacaataattattttccacctgccatttatttgtaggaatctttttgaggcacttgttcattttaagagggatttttaacataaggtaatctgtgtctgtgtaaccaggcacatgtaagctaccagatactgcagcatgctgaaaacagtcaacaaaccagtaagagctccactggcttcccttggcatcttaggactctacactcatttcaggaagctttgcatgtggaccataagtgacacccaacctccgactttcaatagaggaagggtgccagaagcaatctgtgttgtaaacattaatagagttaagtgtctttcatatctgttctagatgaaattattattataaaaagaagtccaacattttcatcttgaacactaaaggatctttctcgatagctgcggtggtatttgccagttcagagaccactagttyaaagaataaagccatgtgtggatcaaaaagacttgatacactgcattgcaggtagaaaggaccaggcagtgagaaagccagcaaggtgctgcgtagaatttaggttaactgaatgctacaggccttctg

SEQ ID NO: 635501 - DNA, 633 bp, Homo sapiens
ttgccagttcagagaccactagttcaaagaataaagccatgtgtggatcaaaaagacttgatacactgcattgcaggtagaaaggaccaggcagtgagaaagccagcaaggtgctgcgtagaatttaggttaactgaatgctacaggccttctgtatcttgcttatgacccctaaacccagttactagctaattgagaaagtcctagaaatgaagacatcatcatatctaaacatccaagttgtaccaaatagcaactccttaggtccaatttatctctttcctttttattaagtaaacatttccttaaagtataacacacagatggaaaagtgcatatgtcataaataaacagctcaatgaaattactaaaaaggaaaacactggcataaacggtccccagatcaagatatagaatgttactagcacttgtcaggccctcttgttcccacttttctaattctgttccatggagaamcactatcctgacttctgataccataaattaatgcttatttgggggtttaattttaaagggattaggaaatacatagtgttctgggtctggttttatccatgccattgattatgcttgtagttcattcattctcattgctgcatattattcttttaa

SEQ ID NO: 635502 - DNA, 521 bp, Homo sapiens
gaatgtagctgccagattgggagcagaccttgtattcacgtgtgcctttctgaagctcagtttacagctttcctaggtttatctgttctgtgcctgggttttgcttataaagtaaggtcttgcatgcctcaagaagtggactttgttaagtgcagtgcagttaagatctgcagtgcagtggggacttttttctttatataattttttaaaaagaagctgatgggagaaataagagccccagggaatggatgcttatgtgtagattttgctgatataggagaagaaaagataactgtgttttgaaaagacatgtgcaatagtttaatcatttccactagctttactagttaggatatctggataagttgcaatgagggacaggcaatgggatgggggaaagtaagagaggaacaggtaaagcaaagytaaaagaaatggaaggaatttggttatgtttgcctctttgtgttgaatctttttgctctaaatcagggtttttgcaggtttataaagtggagccc

SEQ ID NO: 635503 - DNA, 640 bp, Homo sapiens
actttttgttatattatgacaaggttttttttaagaatttaggcaatgattttttttttaatttagaatttcctaatagtgttaagggccagagaatcaaagtattctttccattttataacattggttaaaagtgccttacaataatagtttgtgttttgctgctttagttagtgttctcatgcatgagttacactgctgtggtcaaaacctgtaaacaaattctttggacttacaaacagttttggaaattgccatatactgtcctgacaagtaattttactttctgtttaattatgcaaacttaaggggactattgaagaaaaatagtgtatttttcaggccaaaaatatacatggtggtatatttaaagccaaaaattctgttgagakaattcattttgtctaggaaacatttgtattctttttctcgctttgcatgtgtacattcagactatgatgctcaggatttgaaaaaaaatgcatacttgaattgtgaatttttttttgagatttaactaagttaatttttgtaattagaggaaattaataaaatattttggaagaaacttaaatttatatgtcaacctctgggtcaaatagattcatttgaggttcacatttaaactcccatcatgttc

SEQ ID NO: 635504 - DNA, 640 bp, Homo sapiens
actttttgttatattatgacaaggttttttttaagaatttaggcaatgattttttttttaatttagaatttcctaatagtgttaagggccagagaatcaaagtattctttccattttataacattggttaaaagtgccttacaataatagtttgtgttttgctgctttagttagtgttctcatgcatgagttacactgctgtggtcaaaacctgtaaacaaattctttggacttacaaacagttttggaaattgccatatactgtcctgacaagtaattttactttctgtttaattatgcaaacttaaggggactattgaagaaaaatagtgtatttttcaggccaaaaatatacatggtggtatatttaaagccaaaaattctgttgagataattcattttgtctaggaaacattygtattctttttctcgctttgcatgtgtacattcagactatgatgctcaggatttgaaaaaaaatgcatacttgaattgtgaatttttttttgagatttaactaagttaatttttgtaattagaggaaattaataaaatattttggaagaaacttaaatttatatgtcaacctctgggtcaaatagattcatttgaggttcacatttaaactcccatcatgttc

SEQ ID NO: 635505 - DNA, 587 bp, Homo sapiens
agatctagattccatggaaattmtggacattcccatcgttagacacaataaccaagctgagagatgcctcctcttgttctcttccaggtgtagtatcttagtgctgtccaaggactacaccaaattctcaatgagaccccctgatccagaactaacaacactctcccgaaaatctctccttttttctttctctaatttcagagtgccagataaaatataggatacccagttaaattttagaaaacaagtactgcatattgcgttatttacttatatcaaaagtatcctatttttatttgccgaattggcaacctttctctaagcctgtcccaagtgccactttatcattgcattgtaattttaaccacccttcaaaacacagtctatttgaaagaaaggattgcagtcatgtataaatgtctcatagctagattaatgtatagtcattaaactaagtatgtttgtatatttatccagaggatcagtcttctggaggttaattttgaatataaatattttatagtaccccacctcaagagagaattgatactttcttctcaagtttgaatggtcaagaagaggttggg

SEQ ID NO: 635506 - DNA, 420 bp, Homo sapiens
gattaatgtatagtcattaaactaagtatgtttgtatatttatccagaggatcagtcttctggaggttaattttgaatataaatattttatagtaccccacctcaagagagaattgatactttcttctcaagtttgaatggtcaagaagaggttgggtgtgacaatcattgcagatctgtaagagtggtaattctagcaccacagtttgagaacgggacccagctatagaaagcatgtgatagtcatggccacagactaaaattattctggtaayattggtatgaagtgattgtttgttctgatgtgcagaaacatttatctttttatttacttactgtcctctgaaatgtggatgaagaacactgggttaggagtaaggaaacctagatcttattcccagatctgccattgttttttag

SEQ ID NO: 635507 - DNA, 564 bp, Homo sapiens
gaattcaagatgcattcattcttcttttctaaaagtttcataagaagtggtggttgtccttgtaggaaaagctaggtgtgagttgagcaaagacaaagaagtatctttagacagtgtttgaggatttagtaaaccttatctgacagggaacaaaatttctggcaggcccartggagagaaagaagggagagtgtgtgtcagataaaagaaagcagagcttggagaaagaggaactaaggggaggagacagatggccaatggccttgcaatgagaatattgagtatggtgaattattagctgttcagtgttcccaacaaaatcagtgacagcagcccctgatatataggcaatcaaaggcaaggtcttcagacactgcaaggggctagaaaacctggtagttggtaaacaacaattcagaacatttgatctttaagaggcttctgagggccacgaaatgggcactgatctagaatgcagaaaccattagatttaaggccagccttttctatctcatgtcatcatgggtaagtctcagtttcttcatttgtagatttagaatatct

SEQ ID NO: 635508 - DNA, 574 bp, Homo sapiens
cttttctaaaagtttcataagaagtggtggttgtccttgtaggaaaagctaggtgtgagttgagcaaagacaaagaagtatctttagacagtgtttgaggatttagtaaaccttatctgacagggaacaaaatttctggcaggcccaatggagagaaagaagggagagtgtgtgtcagataaaagaaagcagagcttggagaaagaggaactaaggggaggagacagatggccaatggccttgcaatgagaatattgagtatggtgaattattagctgttcagtgttcccaacaaaatcagtgacagcagcccctgatatataggcaatcaaaggcaaggtcttcagacactgcaaggggctagaaaacctggtagttggtaaacaacaattcagaacatttgatctttaagaggyttctgagggccacgaaatgggcactgatctagaatgcagaaaccattagatttaaggccagccttttctatctcatgtcatcatgggtaagtctcagtttcttcatttgtagatttagaatatcttccttaggtacttcatgagacttcaaagaattt

SEQ ID NO: 635509 - DNA, 574 bp, Homo sapiens
cttttctaaaagtttcataagaagtggtggttgtccttgtaggaaaagctaggtgtgagttgagcaaagacaaagaagtatctttagacagtgtttgaggatttagtaaaccttatctgacagggaacaaaatttctggcaggcccaatggagagaaagaagggagagtgtgtgtcagataaaagaaagcagagcttggagaaagaggaactaaggggaggagacagatggccaatggccttgcaatgagaatattgagtatggtgaattattagctgttcagtgttcccaacaaaatcagtgacagcagcccctgatatataggcaatcaaaggcaaggtcttcagacactgcaaggggctagaaaacctggtagttggtaaacaacaattcagaacatttgatctttaagaggcttctgagggccacgaaatgggcactgatctagaatgcagaaaccawtagatttaaggccagccttttctatctcatgtcatcatgggtaagtctcagtttcttcatttgtagatttagaatatcttccttaggtacttcatgagacttcaaagaattt

SEQ ID NO: 635510 - DNA, 470 bp, Homo sapiens
aaatatcattttttcagggaaaatgaatgaaattaccaaaaactgaagaagatatgtcttcattatctttatcccaaagcatttacttggcatccaaaaacatattcagaacactgtgctaggtaatggaaaagtcctaagacacycagagagagattgtttccttactctcacagtggatgaaaaatactgagaggcaaatgagagaagatgcctatgtcagcttcctgcagcatcagtctaaattattttaacaggctttagtgacctcaaaatagcaagaaagccttaaatgtaaaagacctagataggtgatggaagatagagacaaacactgaaatttcagcaagagatattatagataaataaggacaacttggcctctaaacatcttctatttactgcacagttcctgttaatttcagtatctttggggtacccttctaagcattcacacatctactctgaag

SEQ ID NO: 635511 - DNA, 651 bp, Homo sapiens
catttccatatatttttgtatgtgtgtgaatacaagtttttatttatctgggataaatgcctaagaatgcaattactgggtgatttgctaattgcatgtaaatttcctaagaaattgccacactgttttccagggtggttataccattttacattcacatcagcagtgtataggtgatccagtttctcttcaccctcaccaagatttcatgctgttactattttttttattttagctattctggtaagtaggtagtgaatatgtggactttgtgactggcttatttcacctagcacaacattttcaaggttcagctatgttgtggygtgctttagtagttcattcctttttgccaccaaataatgtcctactgtatggatataccacatttggtttacccatttgtgaattaatggaaaaatatgtttagtagcaggaaaaatgttttcaattttttttcatattaggatattatttatgtctaacatctattattaaaactatcaggcactgtattagatatttgatgtgtgttttctgatagaggttacataacaactctaagatccaagacttgatgggtaaactggaaactcacatattaaatcaagcatatgaaaaaataataaatttgttaagaatacttattta

SEQ ID NO: 635512 - DNA, 527 bp, Homo sapiens
tgcatggccctccaacagatatgtccaccctagacctgtgaaagcgatcttatttggaaaacagtcattgcatatgtaattaagaatcttgagatgaggtcatcctggatttaggggctaccctaaatccaatgacacacatccttattagaggaaggcagaggcggatttcgcagagatacaggagagaaggccatatgaagagggagccagaggttagagttatataacagcaagccaaagcatgtctggagtcaccaaaagctggaagaggcaaaggaggattatcccaggagccttcgagggagagcatactatcacctccatttgagactgctggtttccatagctgaaaataaatacatttcaattattgttagtccccaagcttatcataatctgttaaagcagccctaggacagcagccctaatacaaggggatatggaaaatgagacatccaacatacgaaagggktaaagagaatcattaggatggaggtgaagagagatcacaaaataactgcagc

SEQ ID NO: 635513 - DNA, 572 bp, Homo sapiens
gattttgtagatgtcctagtagctttaattgtccaaagaacattcccaaaaccattcacaaacaaactacaggctacagatgaaaatttcaaattaaagaccaagggaatatgaacaaaatgtttccacagtgctaagttaaatttttcaagctggtgaaatgtgtctttggtggtaagtgatttttctaacaggcagtaacacaaaaggtcactttagaaatatggcttaaaaagatagattaaatccatcctcttaagaagagaaaatctatatgtgcttaagtatttaaaagataagaagcattggccctttacaatgagccagttgctgtactaatatgcactgtacatatctctccatatcatttaactttcacaaacaagtctatgaggtagttactattattcccaccattctaaaaaatgtaactaacttgtccaaagataatacctctcaggtggtaaaggtgaactttttagcaattgaatgccagaagcaacaagtttcattccyatgccagcagagccatttttcaattgacatggtattacctatgtcatctagcacag

SEQ ID NO: 635514 - DNA, 425 bp, Homo sapiens
aaacatttcctgggtttccactcagaatttcaatgattagatgtcaggcccttcacttgtcaatgtgggggtaggaagttgagatcatgatgactgaaattatgatcagttctcacataacttatctgtgttttcttatgcaaattgaagaagctccaaagaawaactaatatcagaggagtgatttactttccaaaactttagacaatttagggaatgagaattttaaagaccaaatggtaaagtccattgaacaatggtctaaagataaccggtgttggggtccccatttcactgtcctccataaaggagaaagtctttcccgtgggctctctgagacagaaaaccattatgatacaggaggaaccagatggagcggaagagatctgaattcttatcctgggtctgtctctaacaagttctat

SEQ ID NO: 635515 - DNA, 647 bp, Homo sapiens
tgacactttacctctgtgttctttctctctaaaaaaaacatcgcccaaacataatcatgagaaaaataacagaaaaaaacccaaatgagaaacattctacaaaacacctgaccagtcctccttaaaactgtcaaggtcatcacaaaccaggaaggtctgagaaactgtcacaggcacaacgagcctaaggagacatggggattaaatgtaacgtggtctcctgaacagaaaagagataaaaaaaaacaaaactaaggacatctgaataaagtatggattttatttwaaaacaatatatccatattagttcgatatctgtatgttttctatttgatgaacggtttctcacttggcattctttgttttagtgacttatttgtctaagcctatgggctttgatatctagaagtccaggcaaaatcattactaccttctgtttctcttacatgtatcaatactgccccctgacacacacaccaaatccacacaaggctccaaggtacatatcctaatacaacaagaggaagatataaactttgtctgcaacttaagccctggaatagacaatactgctcatgaggatagttgaaatccatgataggccaccaaagctgactgtggtacctctttccatctctcctctatta

SEQ ID NO: 635516 - DNA, 632 bp, Homo sapiens
atgactctgcacttcctcagtgtagtgtttaattccaaagagtaacctatggaaagaccaaaaaaagtaactttatagtagagaaataggacacacatcaccttagccaagtgttcaaggtggatatcaacagcaataggtcatgttgatagtatgtaccctttgtaggatgtgatgagaatgacactttacctctgtgttctttctctctaaaaaaaacatcgcccaaacataatcatgagaaaaataacagaaaaaaacccaaatgagaaacattctacaaaacacctgaccagtcctccttaaaactgtcaaggtcatcacaaaccaggaaggtctgagaaactgtcacaggcacaacgagcctaaggagacatggggattaaatgtaacgtggtctcctgaacagaaaagagataaaaaaaaacaaaactaaggacatctgaataaagtatggattttatttaaaaacaatatatccatattagttcgatatctgtatgtkttctatttgatgaacggtttctcacttggcattctttgttttagtgacttatttgtctaagcctatgggctttgatatctagaagtccaggcaaaatcattactaccttctgtttctcttacatgta

SEQ ID NO: 635517 - DNA, 622 bp, Homo sapiens
tctgcttcctaggcacttctgccatgtgagtaaaatctgtccaaagaatatgatcaaatgtgatgtatgccacttccaggcctttctcctcaaatctgtatgctctccttcctccaactggtgttttactcttcatctggcagctggaggcaggggatttgctagaggactgtgaggtcccagtaatgcagggccactaggagaaggatgcctggatctctaaatcactakatggaacaaagagagatacttactgactcacattttactgtaatatgagcaattaaaaagccttattgagattgtgtttgttacaacaattagtatatcctgattaatataccaacctaagtcaggtgggcacccaattaaagctaaaattttacaatttttgtaaaatgtaattatttctgtgattatcaatgtttattagactgtatttcttttttatcattagtataagtattagcctcccattttccactcattcttataaaataagtatattcaaatattcaaacatatatataaatgcctctctataggctaagatggttatattgtctaaaataaactgttggctaatagcaacaccattaggagatagcttgaaaattgtttt

SEQ ID NO: 635518 - DNA, 531 bp, Homo sapiens
ggctacagtttgctgacttttaagtagtgtaaattttggctttctttctcatgttccttctgttcagttttagaattttccccttttgacagagatttaggaatgtttgttgccaaagtggttagaataaatagtggtaaaatgttgtaggtatgtttaatcagttatgttttgtttttaattctcacttttattttctccacctataaaccttcagtgacccccccctcctgacaaccacatcttgtatcagtcactgtaaacttctgctgatttcagctcacagggtgyctttcccaggtgtgtgcctataccccgcacctggaagaaaactccctccctgccatctttcctctgaatagttcttaggagttcatcaaggtcccattcagttctcacatctagtagaaatctttatagccattccctaacatactgataggtacaaatatatagttttgtacctaattttttatacactctcacacatgtttttcagtactccgagaggcagatgaattcttcattaat

SEQ ID NO: 635519 - DNA, 675 bp, Homo sapiens
gagaggcagatgaattcttcattaatacattgattaatttttcagttgccccttgatacaaagcatgtgtctgagcaggtgctggtgggtaaaatgtcctgactggctgatgtatgcagagatagtcctcttccaaaaactgtaagtaaactgtcttttagatcttcakgttgggtgtctcctattagctttattgaagaattacaaacagcaacagacaataaatagttcagtaattcaaatctactttagaattcccattctgacactaactgcttgattttagaaaagttaagtaaactgtttcagcctcaattttctcatctgtataataggatcactgatttctaccttgcaaatggacagaataaattacatgatatactacatggtttataatgggtactcagaaatggtagccattattagcttacttcagtgtgctgtggggtagtatgggaatatgaagaatataaatgattacatatgtgatttagaaacacaaaaactttggcatgaagtagacaataaactagaggagaaaacagagataggttttggcattggatttttttaaataagtatatgcttttccctacaagattttattgggagttgaggcattcatccacacttctgtgggttgatgactctcctgttgatatgcttacccag

SEQ ID NO: 635520 - DNA, 675 bp, Homo sapiens
gagaggcagatgaattcttcattaatacattgattaatttttcagttgccccttgatacaaagcatgtgtctgagcaggtgctggtgggtaaaatgtcctgactggctgatgtatgcagagatagtcctcttccaaaaactgtaagtaaactgtcttttagatcttcaggttgggtgtctcctattagctttattgaagaattacaaacagcaacagacaataaatagttcagtaattcaaatctactttagaattcccattctgacactaactgcttgattttagaaaagttaagtaaactgtttcagcctcaattttctcatctgtataataggatcactgatttctaccttgcaaatggacagaataaattacatgatatactacatggtttataatgggtactcagaaatggtagccattattagcttacttcagtgtgctgtggggtagtatgggaatatgaagaatataaatgattacatatgtgatttagaaacacaaaaactttggcatgaagtagacaataaactagaggagaaaacagagataggttktggcattggatttttttaaataagtatatgcttttccctacaagattttattgggagttgaggcattcatccacacttctgtgggttgatgactctcctgttgatatgcttacccag

SEQ ID NO: 635521 - DNA, 607 bp, Homo sapiens
actaattgtacttatattttaccaatattaggctataaaatcagacattgtcaaagacctttcaagattcaagatttatgtccttattatgtgtaaaatgaatgagccatcattttctgtcatattcagagtttcctaatctaatattctrtaaaattttaaccttacctagaataaagaatccacgtcaagaaagcaagaaatggcacatggataaattttccctacgcaaaatccagccccagtcaccctctctctgataaattgagtccattggaaaaggcaaccacctctcagtgataagcaccagtcataaattaatatctaggacttgattattaaaattactacgtactgtgctggaaggaaagattctagaaacttgatggcttagattaaattgtcactacccactagacttgaagaagccattggaaaggccattgaggccccctcgtaatttatataaaggaactgacaacctcattggttttcagatttgccagttaattaaatggctcaggcatgtcattttggaaaagctttggatttggagactgaatttacttctagttcttatctaacttagttttatgactttggacaa

SEQ ID NO: 635522 - DNA, 493 bp, Homo sapiens
tattaggaatgaggggcctggcttgataacacaaaccaatttcttttttgaacctgtctggggaaataaatttgagtcagcagacttaaaaggcttaaagcctgatatttatttattccatgtgatatttattctatattatatttagaatacagaygagaattataacagagaaattataacatgtcatttattgatcagatatacttatcaaaactgcctaatgattaatataagaaaggaaaagagatttttagggatcttagctgttaagtgctattttaatgactcagatttgatattagttattctgcttgtttcctggatactgaagggagaagaacattttcattatcaccttccagagtttatcttagaagcctcctggaaccacagctgtgtagagatttgatttaggctcagaggtgctaaggttttaccttaaaaacttctttttttctaaacccaactctattgaagtattaatttgcat

SEQ ID NO: 635523 - DNA, 568 bp, Homo sapiens
gggattgctggatcaaatgatagatctactttcakttctttgagaaatttccatactgttttccatagaggatgtactaatttacatttctaccaacagtgtataagtgttctcttttaaccatatttgcaccaatatctattgattttttaaaaaatactttttatagtggccatcctgactggagtaaggtgatatctcattgtagttttaattttcatttccctgatgattagtgatgtagagcattttttttgcatatatttgttggtcatttgtatatcttcttttttatttatttattttactatactttaagttttagggtacatgtgcacaatgtgcaggttagttacatatgtatacatgtgccatgttggtgtgctgcacccattaactcatcatttaacattaggtatatctcctaatgctaggtcatttgtatatcttcttttgaaaaatgtctgttcatgtcatttgcccatttcttatttgagattatttgttttttttcttgctgatttgagttcattgtagattctggatattagtcctttgtcagatgcat

SEQ ID NO: 635524 - DNA, 568 bp, Homo sapiens
gggattgctggatcaaatgatagatctactttcatttctttgagaaatttccatactgttttccatagaggatgtactaatttacatttctaccaacagtgtataagtgttctcttttaaccatatttgcaccaatatctattgattttttaaaaaatactttttatagtggccatcctgactggagtaaggtgatatctcattgtagttttaattttcatttccctgatgattagtgatgtagagcattttttttgcatatatttgttggtcatttgtatatcttcttttttatttatttattttactatactttaagttttagggtacatgtgcacaatgtgcaggttagttacatatgtatacatgtgccatgttggtgtgctgcacccattaactcatcatttaacattaggtatatctcctaatgctaggtcatttgtatatcttcttttgaaaaatgtctgttcatgtcatttgcccatttcttatttgagattatttgktttttttcttgctgatttgagttcattgtagattctggatattagtcctttgtcagatgcat

SEQ ID NO: 635525 - DNA, 518 bp, Homo sapiens
tgtctagtgcaggaggcagcaaattatggcccacaggccaagtcaaacctaccacctgtttttatgtggctcacaagctaaaaatagtttttacatttttatatagtagaaaaacacaattaaaaaaatatgtgacatataatgtgacacttgaaaattatatgaaagttagatttcagtgaccataaataaggttttattggagcacagccatactcatttatttatgtattgtctgtggctgctttctgcctcagtggtggagctgagtagatgcaacagaaagcatatggccccccaagcctaaatttttttctccttgacatttttcaaaaaagatttgccaaaccctggtctaatggagagattcctggtgtgctcaagtggcactcgartttgcaatacctccagtaaaaagtctgaaatttccaatggaaggatgtgcgttacaactgcaatggtttgacatactccctcctttctttgaaggttgcaaagtagattttgagtgctggtca

SEQ ID NO: 635526 - DNA, 613 bp, Homo sapiens
caagttctgggattcattaaggtccccagtttgtggaagatactgaataactttcaaaagaacaataactgcctaaaaatgtttacatatattaatgtatcaatgaaaagccatcagatttcacataccatgacttagaatataattatattcttgcaaagatgacttcaagttataaataaacttctaaagccaraagcattgtcattttcaactgaaaaccaaaagaagtctaaagttttatagtaaattatttactacttttagcactttgaccatagattttcagttaactttctccaggttatcagaaagttcatgcataaactttttttcctgtttcctcagggcagtctaaccttgcttctatccaactacagagaatagtaaagaataaccattattaatgggctcttgaaatcccaatctctatccagaaggtaaggaatattatttatgagttctcccataatcactgatgacctcaatcagaatttgaaccaaatcttttacagatttggtctctagtagataacacatctctacaataaaagtcaaaagtttaaaaataacccaagcaaactaggttaaaatataatagcagtcatttagc

SEQ ID NO: 635527 - DNA, 458 bp, Homo sapiens
ttcagacagaagcactcattcctccagctatggggtatgttaactactgatgtggatgattacaattgtctttagctaaagaaaactgcctaatccaaggtcacgctctcacctcaatcatattcaaaagttgctcaatacaagaatacaaagacctgttccttttgcctcagttcaagacaactgtaaagagcctcaagaggtgagatcaagaaatctataattgtaatgaatacccttaggagattctggtgcagttggaccaaggaccatactttgagaaacagtgcattcaacaagcctgaatctatggatgagctataacttggtatcatgaaagaaaagtatctggcatcttgttgccagaatccataggacttcctccacaccctcacactcaacttccaggataaaatttaaaggtmaattagaagtcctaactatgcccaggcacagtg

SEQ ID NO: 635528 - DNA, 619 bp, Homo sapiens
gtccaaaatttcctcttgtagggaccttaattatgagattagggctttccctaattcagtgtgacctcaacttgattacactgacaaaagtcctgtttccaaataaggtctcattcatagattctggatggatgtgagttttgggaaggcactattcaacccaatactcttagctttgtcaccatagaagtagagaattataacatagactttkgcttcactttcctcatgtgtaaaatggagaagataatggtttcaacctggaggttattgtgagaagatgtttgtcattctttgacctcccattttatttatcttataatatcctgaattccttcggaggaatcattgcttcctcagtgaattggtaatcaacccttcctgagataatgggaatatgtgtcaccctgtgaataccaactggataggccctttggagtctgaacttgaccagagaaataaaatgactaaaagtggatgaaattatagtatggtggttaagggcacagattctagggatacaccatacactgcaactgcatgactttgggaattatttagccttcctgtgcatgcttcgtcatgtgtaaaatgggagtgttaagggtacctatcttat

SEQ ID NO: 635529 - DNA, 577 bp, Homo sapiens
tataacatagactttggcttcactttcctcatgtgtaaaatggagaagataatggtttcaacctggaggttattgtgagaagatgtttgtcattctttgacctcccattttatttatcttataatatcctgaattccttcggaggaatcattgcttcctcagtgaattggtaatcaacccttcctgagataatgggaatatgtgtcaccctgtgaataccaactggataggccctttggagtctgaacttgaccagagaaataaaatgactaaaagtggatgaaattatagtatggtggttaagggcacagattctagggatacaccatacactgcaactgcatgactttgggaattatttagccttcctgtgcatgcttcgtcatgtgtaaaatgggagtgttaagggtacctatcttatcctrtatgctgactacatccttggcgttaggtatgcatcagtaaatacagtacacatgatttctgtccacatggagctttcaagctttgagatagacagacaccaaacagagaaaaatggatatctactatacattgtgatatgtgcatatgtatt

SEQ ID NO: 635530 - DNA, 550 bp, Homo sapiens
aaactgacagaattgagatcttgaatgaaataaaggtattgtttactgttgacagtagtgctcaggggatttaatccaatgtatgcagtcctattcagaggcaagctcttctttttctgtatcacctgagaaaggattctataaaaacaaccttcaaagaatatggtgtttgttcttggcataaagtactatgaaaggaaaactaataaagaatggtagaaccrtttgtttgacaccaatccatgtagactcattattctaaagtgcaaaaggtatacattttaaacgcaggaggaaaggtaatattgtgctgatggatgcaatatcataaatatgcacatgcatattcatatgttgccaattattcttttgaagctgtataaagtacacatttgaaaactaagaactgaaaacatgatacatatggaaaacccttcagcattctgagataaaaatggcataaaagaggattactgcaaaagctcttttcctgtcaattttcttctatttcattgctaatcaccaaattctactcagtccttttaactat

SEQ ID NO: 635531 - DNA, 590 bp, Homo sapiens
tcatggcaccttaaacaagttctaagaaacactgacaaaatttctggaaactacatatgtcaagctgaatgccccgagcttatctttcttatggaggggattagcaaagcttgtgaaatctgtgcaaaatctccattacaaatgaacctggtctggccagagggacctgaaaagcacaggaaaatcctatgagaatttttaaaaagtttagctgtcatgtctgtcttctaagcagacaagacatagacattgagccgttgccttaagatgtcttagagattgcagaaaattggtttgattggatcaataatcccatttaaaattataaagaaagtatacatttggcttcaaggcaaaactttaagaagaaattaaagcttttgagaaagaaatgagaaacagagatacaggccttggcaatcagagccttggacgttaaagtaacaggatatgtctgagttaccttttatgcccttaagatattcctcttttttcagcaggaattcagtcttctgggggattcrgttctccactatttttcttttgatttggtcccagtctctattaaaggtcctttatgacatataatt

SEQ ID NO: 635532 - DNA, 551 bp, Homo sapiens
atagtaaaagaaaaggaaaggctgcagttatcccctgattggaggtcctgatatgaggaagctgtgggggtctgcatagaagcagattatcttatctaattggtttgggagtatatttggctttctctgattggtcttgaattgggagaagaggcaaaaataatgaaagctgaaggacactgacaaagtcctgatcgctctaggccaatcgctgcagaggttatggtctggcttctctcactggttgcttgctgccagaggttgtgggtgagactgttatgatcatatatggtcttgccattgcctatttgtatattcaatatctccatatagtattcttcaaatgggagaatttgaggtcctcatttgatttttcccccaaattttatcttcagtatcagatacagggtgggtgcttaatagatatttgtgtgatagtgaggaatgagaagagaagaaggygaagtcttccttccctctgttgtagagaatataccatctagtgaaatagccaccagttacctgtagctggtgggcccctgtgtagtcag

SEQ ID NO: 635533 - DNA, 551 bp, Homo sapiens
atagtaaaagaaaaggaaaggctgcagttatcccctgattggaggtcctgatatgaggaagctgtgggggtctgcatagaagcagattatcttatctaattggtttgggagtatatttggctttctctgattggtcttgaattgggagaagaggcaaaaataatgaaagctgaaggacactgacaaagtcctgatcgctctaggccaatcgctgcagaggttatggtctggcttctctcactggttgcttgctgccagaggttgtgggtgagactgttatgatcatatatggtcttgccattgcctatttgtatattcaatatctccatatagtattcttcaaatgggagaatttgaggtcctcatttgatttttcccccaaattttatcttcagtatcagatacagggtgggtgcttaatagatatttgtgtgatagtgaggaatgagaagagaagaaggtgaagtcttccttccctctgytgtagagaatataccatctagtgaaatagccaccagttacctgtagctggtgggcccctgtgtagtcag

SEQ ID NO: 635534 - DNA, 588 bp, Homo sapiens
tccacatacaaaagtaaaaaaccgtacccttattctacatcatacacaaaaatcaattcataattaagtaaagacctaaatataaaacctgaaaccataaaacctctaggagaaaacagtggaaaagctcctggacactggtcttggcaatgagttttttgactaggacaccaaaagcacaggcaaaaaaagcaaaagtaaacaaatgggactttattgaactaaacacgtctacagaacaaaggaaacrgtcaacaaagtgaagaggctgcctacagacttagggaaggtatacatgaaacatgtatctgataaggggttaatatctaatatatataaggaactcacataactcaatagcaaaaaaaatgaataacctgattaaaaaatggacgaagaacctgaatagacatttctccaaagaagacatacaaatggccaacagatatatgaaatagtgcacatcactagccatcagggaaatgcaaataaacaccataatgagatgtgacctcacatgtgttaggatggcgattatcaaagtaacacgaaataagcattgcaaaggtgtaaagaaaagggaacaca

SEQ ID NO: 635535 - DNA, 588 bp, Homo sapiens
tccacatacaaaagtaaaaaaccgtacccttattctacatcatacacaaaaatcaattcataattaagtaaagacctaaatataaaacctgaaaccataaaacctctaggagaaaacagtggaaaagctcctggacactggtcttggcaatgagttttttgactaggacaccaaaagcacaggcaaaaaaagcaaaagtaaacaaatgggactttattgaactaaacacgtctacagaacaaaggaaacagtcaacaaagtgaagaggctgcctacagacttagggaaggtatacatgaaacatgtatctgataaggggttaatatctaatatatataaggaactcacataactcaatagcaaaaaaaatgaataacctgattaaaaaatggacgaagaacctgaatagacatttctccaaagaagacatacaaatggccaacagatatatgaaatagtgcacatcactagccatcagggaaatgcaaataaacaccayaatgagatgtgacctcacatgtgttaggatggcgattatcaaagtaacacgaaataagcattgcaaaggtgtaaagaaaagggaacaca

SEQ ID NO: 635536 - DNA, 572 bp, Homo sapiens
tgtacactgttggtgggaatgtaaatcggtacagccattataaaaaatagtatggaaattcctaaaaaaattaaacttagaccttatgacctagcaattttctaggtatacacctcccaaaaaatgaaaacagcacctcatagarataactgccctcccatgatcattgcagcattattcacaattgccaagatttggaagcaatctaattgaccattggtggatgaacggataaagaaaacatggtatgtacatatatatagtatgaagagtatctttaatgatactatattctggaaattctgtaagattttagatgctcttaatgcaaataaaaaagggctatgagatgatggttatattaaattgcttatctctagtaattatttcactgtatatatgtatatcaaaatatcttattgaacaccaacttgactttatacagtaaaaaaagtatttcctgaaagtagtcatctgataattgagaaattctttgaagtttcctcttccttcacatagatgatattaaaataccccattctctcatgatccagttgactccaagggataag

SEQ ID NO: 635537 - DNA, 572 bp, Homo sapiens
tgtacactgttggtgggaatgtaaatcggtacagccattataaaaaatagtatggaaattcctaaaaaaattaaacttagaccttatgacctagcaattttctaggtatacacctcccaaaaaatgaaaacagcacctcatagaaataactgccctcccatgatcattgcagcattattcacaattgccaagatttggaagcaatctaattgaccattggtggatgaacggataaagaaaacatggtatgtacatatatatagtatgaagagtatctttaatgatactatattctggaaattctgtaagattttagatgctcttaatgcaaataaaaaaggkctatgagatgatggttatattaaattgcttatctctagtaattatttcactgtatatatgtatatcaaaatatcttattgaacaccaacttgactttatacagtaaaaaaagtatttcctgaaagtagtcatctgataattgagaaattctttgaagtttcctcttccttcacatagatgatattaaaataccccattctctcatgatccagttgactccaagggataag

SEQ ID NO: 635538 - DNA, 363 bp, Homo sapiens
agatagcacatacagcagaactcttatctttatttggggatgcagcagatgaaagaggatgaagagggtcagagtactttaaagaattgagtcttggagctagccagctctgtaaaatgacagaaaggcagtctaggaagaagggaaaacatagaagtttaggatggctgaaattgtgaacaatgtggttggaaaaaatagagtatcagatcatgaaagactttgtacaaaatactaaggcatgtggacttcattctgaaagtgagaaggagtctccaaataattttaaycaggaaagtgtcatgtctaggtctgccttagcaaaaatacaaatttgatggcaggtttcactaagaagctgga

SEQ ID NO: 635539 - DNA, 604 bp, Homo sapiens
ggtgaatccaagtagagagagctacaggtagttggatatgtgagtccacagctcaggaaaagattgggctgaagacacatattagggtgttatcaaaatatagatgaaaattcataggaatagatgagattacccagaagaagtctcaaaagttaaacgataagtggacacataatggaatcttgagagattctagggtttaaaagatggatggagaaagaattgccatcaaaggatactgaaaaatagtagctagagatgccagtaggctcattggtctaaaacgggaaatcccacttttttgctagtgaatggttcyggagtgaggatgtgaccctcttcaggctaatgacttgcagagagatttcactctccaagacccagggaggaatagaaaaataagcatatcttaaagaaaatagggattaaagcaaaacttgtcaaaaattgtaaatgtttatgtctacaaatgtctctttaatgctgcttttttttttttaagagatggaggtctcactttgttgcccccatcagtgaggagatcatagctcactgcagtctcaaactcctgggatcaagtgatcctcctgccccagccccctga

SEQ ID NO: 635540 - DNA, 638 bp, Homo sapiens
gacattatcttatgtatagaaaaccctgaagattgactgggcatggtggttcacgcctgtaatcccagaatattgagaggacaaggcaggtggatcacctgaggtcaggagtttgagacaagcctggccaacatggtgaagccccgtctctactaaaaatacaaaaattaaccaggtgtggtggcgaatgcctgtaatcccagctactcaggaggccgatgcaggataactgcttgaacccagaggtggaggttacagtggaccaagatcatgccattgcactccagcctgggtaacaaaagcaaaaccccatytccaaaaaaaaaaagaaaaccctgaagattttacctaaataaaagctgtccaaataaacaactgtagtaaaattgcaggatacaaaatcaacatacaacaatcagctgcatttctctacacaaacgacaataattcaaaaagaaattaagaaaacaatccaatttataatagtatcaaagagaataaaatatttgaagggacctcggtaccacatatatcctccacagtgtctaccatagtgccttgattcaaatagaagacatattgagcataaatgaccagctttgaagggtataggacaataatgagaaaatttagccctc

SEQ ID NO: 635541 - DNA, 557 bp, Homo sapiens
ctttatcttagtggtaaaaagagctgatcaagcctttcctctgagttccgtgcagatggggactgccagggagatttagaaggatttgctatggtaaaggccctcgcatagcatgctcaaaaggtacaataccttcattatgaaatcactgaagagtaatagctgactagtaccaacctgtgacggcttgccccagggtgcctaggaaaygagaaaaacgaatagaaagttttgtctaaaattaactttatttgtacagctgtcctttattctgagatgatggcctttctaccctttggcatttaacatgccctttcttctattaaataataataataataaataaaaacactttttaactgtcctttcttgactatataaaaaataacaatcctacaatgattcccatactttttctaactcacagttccgtgaaatctaaattccagaaacagttgttcattatggaacataataaaggtcatacatatgtcttattcattgaataaacaaataaattaataaaattaaagtaaaactgacataaaagttgagaa

SEQ ID NO: 635542 - DNA, 621 bp, Homo sapiens
gactgcagccctggatgacatcttgactacaatttcatgaaggacctagagccagaacactcagctaagtgctgtcttagctcttcctttcagttgaaggggaatctctttttaatccagggggaaaatcttcaattttttttaatatccagccatttttcacatgcatttgactgctttttaccagctctgcagactttaccaaattctcctaacccttagtcctttgaaaaaaaaaaaaatgaccaaaaagtatattggctccttctactcactctttaccccatgcctccctgaggcaactaagatacaaggaaacctgcttsacaggaaacaagggaaaggaaaatccatacagggataaaaacatatcacatattgacccaatctgacttaatataggtacatgtaactgagttctgttgattcttatcgtctccgttctcttcactcctcttcattccactgccactgtattagttcaggactatcatttcttactacaaaaaccactgagcccagcctccttccccactactatcagagtgggtttcctaacaacaacaaaaaatcaaatgataccatgtcactggactggctgaaatggtttggaacatcttg

SEQ ID NO: 635543 - DNA, 584 bp, Homo sapiens
gtgtcaagcaaattcaaatcaaggtaataagttttgctgatcaattctaaactcactgactaggttaacattttgatttttttcccctgagaacacyactctcgtatcagcctaaatatctggaggctgtgatttatctttgatgtcagtaacaaggttctatattttggcattcatagaaaaacaaaacagtaaatgaagcacatattggcataactcatatgttacactataccttactacaatcttatacccttgggtaagctgattgaaaattaaatgggaatagacatttaaattacaccaaagggatgtcaatggattgcagacttacttttgtatcaatctattcttgattgcacagtattttgttagtggtcactatataacacttttcaacaggccattgcatactgtgtattttactagatgcaatactctgtgtttacgcaattacagaataaccaatatttggctacttatttcaggtagcatattaagcttaaacaaagaaatttaaattaagatcttgacattatctaaatgaatacagtgtttaattttgtaaaaattaatttgaccta

SEQ ID NO: 635544 - DNA, 584 bp, Homo sapiens
gtgtcaagcaaattcaaatcaaggtaataagttttgctgatcaattctaaactcactgactaggttaacattttgatttttttcccctgagaacactactctcgtatcagcctaaatatctggaggctgtgatttatctttgatgtcagtaacaaggttctatattttggcattcatagaaaaacaaaacagtaaatgaagcacatattggcataactcatatgttacactataccttactacaatcttatacccttgggtaagctgattgaaaattaaatgggaatagacatttaaattacaccaaagggatgtcaatggattgcagacttacttttgtatcaatctattcttgattgcacagtattttrttagtggtcactatataacacttttcaacaggccattgcatactgtgtattttactagatgcaatactctgtgtttacgcaattacagaataaccaatatttggctacttatttcaggtagcatattaagcttaaacaaagaaatttaaattaagatcttgacattatctaaatgaatacagtgtttaattttgtaaaaattaatttgaccta

SEQ ID NO: 635545 - DNA, 561 bp, Homo sapiens
atatagctcttgcccttcaagatctcacagtcgttccttgcattctctcagtgaatattttgcttggccttagagaatataatgaccaatcagaagtacagacttcatggagtttataatctggaaggctccattgacaggtaaaaggacagtcatgatactgtgagataatcaaccaacatttatatgtttaaataaattaacccacttaattctcataatgaccagctgagaaaggcactatttaaagctccattttagaaagcggaaaacagttacagaaagagtatgtacccgatccaaaattaaatatccaagaaaatgcaaagctaaaatttgaacccaggaaatctggtgccaggacctgtgctctagccaaaatgatatcmccaatccaagttctgtgatggggtctgtggtgctcagacatgagaactaatctagaagtggaaggggtgccaaattaatttaagcacataaatgctggctagctattattattatctcacagtatcatgattatccttttacctgaaagaatgacatccacgttgacacttg

SEQ ID NO: 635546 - DNA, 615 bp, Homo sapiens
cctagtttctggtggttttctagcaatattgggcattcctttgattaatgtatggcccccgtctctgccttcatcttcacattgcattctcctgtgcctgtgtgtctttgtgttaaaatttcccctttttataaggacaccagtcatattggattaggtccaccataatggcatcatcttaacttaataatctgcaaagacactatttccattaagatcatatcacaggtactgagggttaggactttaacatcttctggagggacacaattccacccataacaccttggtcggtggggcatccaggaattggcacacagacaactgcctccagaacttctttattttaacaactacactttccttctcttcattttcaaagtgacattagctatggtttccctctctctcaagtctttccactgacataatttattctcctcctactcaggactttcataaccaacaaaacagctgcttttaagatcttctctcaggattaagatatttaaaaatggttattgtataacaaagtttggttgagctaagttgtcctaygttttgaaagatgggtgtttacttatgagaaattcaagggatgtgctggggtttagt

SEQ ID NO: 635547 - DNA, 537 bp, Homo sapiens
agcactatgtcagcaacttattttcaacagctcaggaaaagtaaatggttttcttctcttcttagagcttttctgtaagtttaatattatttcaagttattttttaaaatctggtttatcttcagtcaactatgcctattctacctgtatggataatattttcatgagtttcttaataaactggtgatcagaaacttatttgcacctatttacaaaattaaaacatttaaacaaaaaaattaagttaatacatttaaaacgcttggagaaatttttcctccaattatgatgaagtaacaagtcctagatatgtcctcctaccataaataactagaaagatggaaaaaaagtaccagagtagtggggagaatctgtttccagacaatgcctaggactgagattcctaggagactggaaataaaaaatatgagtcatagttacttcacctttctacctggaggcaatttctcaactacagtgcwggcaggaaagcccaaagaacaacagttttgttacattgaggaaagagagatataa

SEQ ID NO: 635548 - DNA, 301 bp, Homo sapiens
tctgaacagcagccttgagccccaaatcttccatctgacatggcctacccaaatgagaaagaatcagaaaaaacaattgtggtaatatgacaaaacaaggttaacacccctaaaaaatcacagtagctcagctcaccagcaatggattcaaaccaagaagaaatccctgaattgcctgaaaaagaattcagaaaaatgattattaagctaatcaaggaggcaccaaaaaaaggtgaagtccmaattaagggaaaaaaaaaaaaaagatacaacacatgaggagagaacttttcagtaaaat

SEQ ID NO: 635549 - DNA, 598 bp, Homo sapiens
tcctgaggaagaagagaaatctaaaagtttggaaaatatatttggggggataatcaagaaaaacttccccaaccttgctagtgacctagacatccaaatacaagaagctaaaggaacacctaggaaattcattgcaaaaagatcatcacytaggcacatagttatcaggttatctaaagtctagacaaaggaaagactcttaagaggtgagcagcaaaaggataaggtaacccataaaggaaaacctattagagtaacatcaggtttcctactgtacatcctacaagctagaggggattgagactttatcttcggcctccttaaacaaaacaattatcagccaagaattttgtatccagtgaaagtaagctttataaatgaagaaaggatacagtttttttttcacactaacaaatgctgagagaatttgtcacgacaaagacagcactataagaactgctaaaaaggagctctaaatcttgaaacaaatcctggaaactcatcaaaagaaaacctctttaatgcataaatctcacaggaccaataaaacaaaaatacaattaaaaaaaaacaaggtatacaggcaacaaacagcaca

SEQ ID NO: 635550 - DNA, 605 bp, Homo sapiens
tcacaatcctaaatatatatgtacttaacagtggagctaccaaatatataaaacaattactactagacctaagaaatgagatagagagcaacacagtaaaaatgggggacttcaatactccactgacagcactagtcaggtcatcaagacagaaagtcaacaaagaaacaatggatttaaactataccctagaccaaatgaacttaacagatatttacaaaacattctacccaacaagcacagaatatacattctattcatcagcacatggaacttcctctaagatagaccatataataggacacaaaactattctcaataatttaataatgttgaaattatatcaagttctctctcagaccacagtggaataaaattggaaatcaactcgaaaargaacctttgaaattatgcaactatatggaaattaaataacctgcttctgaattatcactgggtcaacaatgaaatcaagaaggaaatttaaaaattcttcaaactgaataacaatgacacaatctatcaaaacctctggaacacaccaaaggcagtgctaagaggaaagttcaaagccttaaatgcctacatcaaaaagacagaaagag

SEQ ID NO: 635551 - DNA, 589 bp, Homo sapiens
cagtgcaccagcatggcacatgtatacatatgtaactaacctgcacaatgtgcacatgtacactaaaacttaaagtataataaaaaaaatccaaaaaaaaaaartaaacgttaatacccttatacttctccatcagagctcttggataactagacactttctcaatgagcagtagtatttggaaagaaatcttatttatgagcagtaggtctcaacaatggacttaaaatattcaggaaaccatgacaaatattcaataaacagatgtgctgtcatccaggctttgttgctccatttctatagcaaaggcagagtagatttaacactatcttttagagctctaagattttcaatatgacaaatgagcattggattcaacttaaagtcaccggctccattggccctcaacaagagtgtcaggttgtctttgaagccaatagccagtcattgacatctctctctacatatcccagatggcatcttcttccaatataaggttgttttgtcggcattgaaaaatctgtgttttagtttagccatttttatcaataatctcagctagatattctggataacttgcttcagcttc

SEQ ID NO: 635552 - DNA, 589 bp, Homo sapiens
cagtgcaccagcatggcacatgtatacatatgtaactaacctgcacaatgtgcacatgtacactaaaacttaaagtataataaaaaaaatccaaaaaaaaaaagtaaacgttaatacccttatacttctccatcagagctcttggataactagacactttctcaatgagcagtagtatttggaaagaaatcttatttatgagcagtaggtctcaacaatggacttaaaatattcaggaaaccatgacaaatattcaataaacagatgtgctgtcatccaggctttgttgctccatttctatagcaaaggcagagtagatttaacactatcttttagagctctaagattttcaatatgacaaatgagcattggattcaacttaaagtcaccggctccattggccctcaacaagagtgtcaggttgtctttgaagccaatagccagtcattgacatctctctctacatatcccagatggcatcttcttccaatataaggytgttttgtcggcattgaaaaatctgtgttttagtttagccatttttatcaataatctcagctagatattctggataacttgcttcagcttc

SEQ ID NO: 635553 - DNA, 657 bp, Homo sapiens
tgacatctctctctacatatcccagatggcatcttcttccaatataaggttgttttgtcggcattgaaaaatctgtgttttagtktagccatttttatcaataatctcagctagatattctggataacttgcttcagcttctttatcagcacttgctgcttcaccttgcacttccatgttatggtgatggcttctttccttaacctcacaagccaaactctgctaccttcagactttttttatgcagctttctcacctatctcaggcttcataaaattgaagagcattaggatcttatggattaggctttggtttaagggaaggttgtggctggattgatcttcagtgcagaccacaaatagtttctctgttttggaattagggctgttttgttttcttgtcattcatggagtaatacttttaatgctttcttcatgctttccttgctaattttaataatttctgattttttatttaaaatgagaaacatgtaactctttcacttgaacatttagagacgattgtagtgttattaattttaatattggcctaactgaaattcaatattggtctaatttcaattgttgtattacaggcaatagaaggccaaggagaaagagagagccagggaaacaggctgctcagtggaacagtcag

SEQ ID NO: 635554 - DNA, 662 bp, Homo sapiens
tgcctgtaatggccttttgtgtgtattaaaagctgaagaatttatttaaatattcaaaaataaataaataaatattcaaaaaactaagtacaaatgtctacttctaatgtatgactatagcaaatcttccttagaactataaatgtaattttctccaggactgcttcaagttcacttagttttcagcctgattgaattcttcattctcagagaagctaagtgctagtgtcttcttagtataagataataggatttctccctaaaatctctgcatttgctatggatctcataacaaaacaccagaaactgaatgtcttaaacaatagaaatgtattgcctcatctatgggttctagaagtctgagatcaagatgtagtcaggattacttccttctaagagctgtgaggagaaatctgctccatgcatttttcctaacttctggtggtttgctggcaaactttaatatgccttggcatgtgcatacattacctcactccctgcttccatcttcacatggcattttccctgtatgtttatctgtgtccaaattgtcccttattataaggacacactcacactggattagagcctaacttaatgaccccatctagctttattayctgcaaatattctatttttgaataaggtcacattcaaggtac

SEQ ID NO: 635555 - DNA, 594 bp, Homo sapiens
aggaacagcaagcacaaaggctctgagacaggaacaaggttgatacatttgaaaggaaaaaaatagcattgtgaggccttccagtttctggccaggcatgtaaggagcttggaagtcatcactccatcctaacaaataaaatgctgaacggactaaaaactcaacaactcttagctgtcagagaaatgaggtcacggtgcaacccattacctccaaaactgggaagacagagaggtgaatatagagaatcacaacttaccagagcagaaacctccaagagaacaagtgctggggtaggaaaatctaaactataatttatgtattgctggaggctcagtatggacgactctgagtgggtacaaactccagaggaatacagtcaagaaaggagaarggaagtctcgcttttgcaaattctcccacctggagctctaccacattctcattggaagtatcacaaaaaatccccttgcacttcctgggagaggggagaaggaccaattttcaaataaaccagatcattctgttctccttaacaaggtcttccctcagatgaaactatttaaccagagctgcacctgctggattttatca

SEQ ID NO: 635556 - DNA, 587 bp, Homo sapiens
tctccatgggagaagggacatactcaactccagtcccccaccgccagccatcctgtcccatttktaaaattcacagttcagagggtcaccagctaactaaaagactgaaacctaatcccagaactatagaatgcacccctggctcccctggctcccctcacaccttaccactatgataaaaaggatcatttacggcagttctttttacccagtatattatgccagtctaccaaggaaacattcacaaagcatacaaaaaaaaagcaaaaacaaaagcatgggttgaaaagagagcaagtactagaactaagggctctaattgatggataaagtagacagcgtgcaccaacaggtgggcaatgtaagcaaagagatggaaatcaaagaaagaaccaaaaagaaacgttaaagctcaaatgaagaatgtctttgatgggctcattagtagactcaacatggctaacaaaagaatctctgagcttgagaatatttcaacagaaacctcagacacaaaaaagcaaagagaaaaaagactgaaaacaaaaaacctatccaagaactgtgggacaactgtacaagttgtaaat

SEQ ID NO: 635557 - DNA, 587 bp, Homo sapiens
tctccatgggagaagggacatactcaactccagtcccccaccgccagccatcctgtcccatttgtaaaattcacagttcagagggtcaccagctaactaaaagactgaaacctaatcccagaactatagaatgcacccctggctcccctggctcccctcacaccttaccactatgataaaaaggawcatttacggcagttctttttacccagtatattatgccagtctaccaaggaaacattcacaaagcatacaaaaaaaaagcaaaaacaaaagcatgggttgaaaagagagcaagtactagaactaagggctctaattgatggataaagtagacagcgtgcaccaacaggtgggcaatgtaagcaaagagatggaaatcaaagaaagaaccaaaaagaaacgttaaagctcaaatgaagaatgtctttgatgggctcattagtagactcaacatggctaacaaaagaatctctgagcttgagaatatttcaacagaaacctcagacacaaaaaagcaaagagaaaaaagactgaaaacaaaaaacctatccaagaactgtgggacaactgtacaagttgtaaat

SEQ ID NO: 635558 - DNA, 594 bp, Homo sapiens
actgtacaaataaataaagtggagtgaaatatttaaagtgttgagacaaaaaaaaacctaaaattttgtactctgaaaaattatatccttaaaamataaaggagaaatacagacattcttgaataaatacaaattgataaaatttgttgccagtaaacctgttttgcaagaaatgttaaaataaattgtgtagagagaaggaaaatgatataggtcagaaacttggatacacataaaggagggaagagaatccaagaaggaataagtaaaggcaaaatataaacttatttttcttattcttaattgatctaacagataacagtttattcaaaataataatagtacgatttttaaaaaatgacatagggatacgatgtaggacggacttgtggctcccactcagacagagcagtgtgaaaacacatactgtgaacttttgctccaagaactactacaggaacatatcaggaaagctgagaaaatccacaggccctttgaaggaggtggatggccactgcagcctccatgggacacccaaggaactgtgagtctgcttgctttctaagctgggagggttgcagcctgtgcggcagg

SEQ ID NO: 635559 - DNA, 489 bp, Homo sapiens
aactcatgcttgcctgtgtaaggtaagaactgtttcaaggactttctaaaataaccctgcaagaaattattttttaaggactgcagcaattcagctaagatgctctggaaagaccacttgccccctaatggcatcttcaccaatgaactaatgccaactatatctttgaccctgtaggaccaatgaactctgtttctaagcacctttcctgaatgtctcctttttgccaataaaagcttctatttaccctccccttttcagatgtgcctatggcttgccactgctgtacctcccrtacctcctgaattataatcctttttgtttacttctgaataaactcatcatattagaagaaattgttctcttttttttttttttaggttgacaactctattttagcttctggtggcctcaggcatttcttggtttgtgcagcattactccaatctctgcctccctcttcatgtggccttctgtgtatttctttgt

SEQ ID NO: 635560 - DNA, 314 bp, Homo sapiens
taagccttccaggatcatgactatgtaagtgttgctccctgtagcgctaagcagggtgctgtgattatactgcttccttctgcttttccacctcttccactggcccttcgttctccatgattttcactgactcttcctccttacacataagattatgtgtaaatattggaggtatcycagaatttgtttaatcaaatgggattaggaagacaagagaaaaagtaagtttggtggaaaaaataatttttggcatatagagtttgagatgtctgagggtgagacataatatttggagatgtgcaaaagagagatgg

SEQ ID NO: 635561 - DNA, 596 bp, Homo sapiens
tgatagtagatattggccttttgcttccaaatataggacattatataatgtccctctttgtgttttttaactgctttaaagttgctttaaagtttgtttggtctgatataagaataactatttctgctcacttttggtgtccatttgcatggaatatcttttttcactcttttaccttaagttgatgggggtctttatgtgttaggtgagtctcttgaagacagcagacacttggttggtgaattcttatcygttctgccattttgtttcttataagtggagcatttaggtcatttacattcaatgttcatattgagatgtgaggtactattctatttgttgtgctgtttgttgcctgagtaacttgtgtgcatgttcttttttttactgtgttgttttataggtcttgtgagatctatgctttaaagagattctattttgatgtattttgagaatttgttttaaggtttagagctccttttagtagctcttacagtgctgacttggttgtggcaaggtctcttgacatttgttttctggaaaagactgtatctttcctttatgaagcttagttttactgaatacaaaaatactgg

SEQ ID NO: 635562 - DNA, 578 bp, Homo sapiens
atattaatttgttttggcacaaacttaaattccaaagtctcatctgagactcaaggcaactttcttaaagctgtgagtttgtaaaatcaaagtcaagttatttacttccaaggcacaattgtggttcaggcattgggtaaactttcccattccaaaaggaagaaatagacctaaagaaaggggracttgcctcacgcaacccaaaacacagcagaatagacattaaatcttaaatctgcaaaataatctcccttgacttcatgtcctacattctaggcacactggtgccagagtgggctcccaagaccttgggcagccccaaccccatggcttttctgggtatagcccatgtgactgttgtaatggtttggagtccaatgcctgcagcttttccaggctgaggctgcagacagccagtggctctataattctagggtctgcagggtgacacctgtactcccatgactccactaggcactggcatcatagaggctctctgcagtgtcttcacccctgcatcagacttctgcctgggtactcaatatattcctgaaatctaggtggaagctgccaagcct

SEQ ID NO: 635563 - DNA, 578 bp, Homo sapiens
atattaatttgttttggcacaaacttaaattccaaagtctcatctgagactcaaggcaactttcttaaagctgtgagtttgtaaaatcaaagtcaagttatttacttccaaggcacaattgtggttcaggcattgggtaaactttcccattccaaaaggaagaaatagacctaaagaaagggggacttgcctcacgcaacccaaaacacagcagaatagacattaaatcttaaatctgcaaaataatctcccttgacttcatgtcctacattctaggcacactggtgccagagtgggctcccaagaccttgggcagccccaaccccatggcttttctgggtatagcccatgtgactgttgtaatggtttggagtccaatgcctgcagcttttccaggctgaggctgcagacagccagtggctctataattctagggtctgsagggtgacacctgtactcccatgactccactaggcactggcatcatagaggctctctgcagtgtcttcacccctgcatcagacttctgcctgggtactcaatatattcctgaaatctaggtggaagctgccaagcct

SEQ ID NO: 635564 - DNA, 599 bp, Homo sapiens
caagacactgtcattaggaacagaaatattaaaaataataacatatgaagaaaatctgtaatagggcaaaacccacaatgtgtaagccacgctccttttttaaaayctgaaacaaagtcacagacccggaaatatttttacagtttgctacattattattttggactgggtgcacagtttagtttctatttttatttctaagtttaaaaaaaactgtaaaaaaaaactgggttctctaacaactagaataaccttttggagctgttcatataccacacttggactttatagagaaatctggctaacttacttttggagaacaagagtcttacaacagagaagtagtttctacgaatgcagctagaagtatatatattttttaatactgaatattcttgagaaatgaaaatgacatggatttgatacctttggggctttagaaccaacagaataatgcaggcagtttgtgcttgtataatcctcttggaagattccaaaaaagtaatgacctagaattgaaagacatgtgtgaagcaccataggaataccatgagtgcatgaaaacaagattcccctgttctaaaggtcttggtggctta

SEQ ID NO: 635565 - DNA, 599 bp, Homo sapiens
caagacactgtcattaggaacagaaatattaaaaataataacatatgaagaaaatctgtaatagggcaaaacccacaatgtgtaagccacgctccttttttaaaatctgaaacaaagtcacagacccggaaatatttttacagtttgctacattattattttggactgggtgcacagtttagtttctatttttatttctaagtttaaaaaaaactgtaaaaaaaaactgggttctctaacaactagaataaccttttggagctgttcatataccacacttggactttatagagaaatctggctaacttacttttggagaacaagagtcttacarcagagaagtagtttctacgaatgcagctagaagtatatatattttttaatactgaatattcttgagaaatgaaaatgacatggatttgatacctttggggctttagaaccaacagaataatgcaggcagtttgtgcttgtataatcctcttggaagattccaaaaaagtaatgacctagaattgaaagacatgtgtgaagcaccataggaataccatgagtgcatgaaaacaagattcccctgttctaaaggtcttggtggctta

SEQ ID NO: 635566 - DNA, 520 bp, Homo sapiens
catataacattcagctcagttgaatgattgatacatgaaaagaaaggcattgaactttgtggaatactttgtaaaaaacccactaagtctcaactgcttgcagagttctcatttcartgacccatcctatgaagcaatttctccattgtgtaagttttaaagacagaaatcaaaaatgttgtgggtataatctgaatcttgacatgaattctaaaaataatggagttgacatagtttgctttactttttatttactctgaaatgttgatcttttatgtatttattaggaggaaaatttcttccatatgtgactaattgtcaattgtgttttattcatcaaactatatttgagagaatcttgaggttctaattcaaatagcttttgaaatagactttgtaagttgtttttcaataagctactaaaatattgtttttgaaaaagaggaagtcattattctaagcccatagtaacaaaagacccagcagactcaagttatattttaaatattaaaccccaaat

SEQ ID NO: 635567 - DNA, 466 bp, Homo sapiens
ctaaaaagctcaaatgagtgatacttgaagagtaagctggttgcatttgaaccgaggatctacgtgtgcaaaatccacttatagaagttcagagttcagctgtgcagctgcatgttcaagtgaaagataaactcatctccaaattgttgcatggctatttgttttaagaagtttgcatttgcgaaaactcttaagtagacagtttaaatacctttgttagctataccttttgttagaagacacctggastataaaaataaagatttaattagaaaaatgtgtgaggtacttgggaaagaaaatgaaaaacaaactaacaaaaaaaaaccaggccttagcttctgggtagccccaggcccctgcagcatcctgccattagctgtgcatccttgggtgagtcactttatcaccctgggtctccatttcctcatctgcaaagtgagacatttggatttcatactaaatt

SEQ ID NO: 635568 - DNA, 584 bp, Homo sapiens
gactggactgagtcttccagcctctgtctttctcccgtgttagatgcttcctgccatcgaacattggactccaagtatttcagcttttgggctcctggactacaccagtggtttgccaggggctcttaggcctttggccacagactgaaggctgtcctgtcagtttccctactttwgaggttgtgggaatcgaactggcttccttgctcctcagcttgcagagggcctattgtgggacttccccttgtgatcctgtgagtcacttgtccttaataaactccctttcatatatgcatctatcctattagttctgtttctctagagaaccctaactaatacgcaatccccgtaggagagttctgtagaaatagagatgaaaagggcaaggctaaagtctttccttgcatacatgagacatacttgggtagcatttctgtagagcccagtaatcacttgtgttgcttggtttactctgacatgaatttggaagcttgcactctcagttttaaagtggatgtgaagtacagagatgaatggttctttttgaactgaatggctttaaagatatctttgcacaggataaa

SEQ ID NO: 635569 - DNA, 559 bp, Homo sapiens
aatcagagtggtcctgccgaagaggattgtatttttgtatcttcaggagtttattggcatcaaaatgaggtagcttttttttttagaattatgtatgtaacatcagttcaataatgatagattgattaggtttcatctctgaagggagytgatagcctaacacgagggcaggaatcattacctttagcttgtcattaatccttatgaaatatcttttcctatagtagtaattgctcttataaattgaaagtggaaatatatttatgcaaggctgaagatttctgttttctgctatttcaggtatatgtgcaaggtatttctagagacttaatgttctgtacttaggcttatcagattgcttaatacaggtttccacactcagtctgtgtagtggataagatttcctccttcatcacttctaaccctgtgatcaaagcaacaatcaaaacccacttcgtgtaaatgttattctgaagaacatttgtaccttttgcaacagccattctgccttattacaacataacttagttgaaatttctggttatttgtttatatattg

SEQ ID NO: 635570 - DNA, 511 bp, Homo sapiens
agcacattagccttggaagggacccacagtcaaagttctctgtgtatatcaatcaatcagagcacattagccttggaagagactcacagatcatataattrgaaagtattcatttgacagataaggtatattcacctctgacagaactaccactagagatgaatgctggtaaaccaatactattttccaattacccatgttttcttctattcttatgctctgtcactttataaataagtgtaaaacctatacagtatgctgaagttccctgctaaatttggttagtaatgtaaaaacaaaagtttcaacttgattgatatataatttaatacaactgagggtttttctcagcctaaatcaagtattttaatgagacattcttccaggtacataacattggacatccacttgccttaaaatctcacccagttattactgggagtgtccctagggtgtcacataaaggttgttaagagtttgtatacaacaagatgtgaatatcccaatgtga

SEQ ID NO: 635571 - DNA, 511 bp, Homo sapiens
agcacattagccttggaagggacccacagtcaaagttctctgtgtatatcaatcaatcagagcacattagccttggaagagactcacagatcatataattggaaagtattcatttgacagataaggtatattcacctctgacagaactaccactagagatgaatgctggtaaaccaatactrttttccaattacccatgttttcttctattcttatgctctgtcactttataaataagtgtaaaacctatacagtatgctgaagttccctgctaaatttggttagtaatgtaaaaacaaaagtttcaacttgattgatatataatttaatacaactgagggtttttctcagcctaaatcaagtattttaatgagacattcttccaggtacataacattggacatccacttgccttaaaatctcacccagttattactgggagtgtccctagggtgtcacataaaggttgttaagagtttgtatacaacaagatgtgaatatcccaatgtga

SEQ ID NO: 635572 - DNA, 541 bp, Homo sapiens
tggctgcatagctaaagcacatataatgttctttagttgcttatatctgaataaccatccaacacatcaattcccaagctcttttaaatcatagttccaaaaacacacaggtagtttttactgaatttgcctttgtgtttgattctcataatggatttgttccttacaggattggccctgagctcaattgcaatgcacatttagtttatcttgggtacacctgccttctccttttctttctttyttttttttatatttattttcttttaatttcaagggcacagtggtgcacaaattgcagctttgttacatatgtatacatgtgccatgttggtgtgctgcacccattaactcatcatttacattaggtatttctcctaatgctatccctccccccacccccaatcccatgacaggcctcagtgtgatataccatctcacaccagttacaaagggaatcattaaaaagtcaggaaacgacaggtgctggaaaggatgtggagaaataggaacacttttacactgttggtgggaccgtaaa

SEQ ID NO: 635573 - DNA, 588 bp, Homo sapiens
aacttctaccttctacctccctgcatcccttcctctcctcaggggtcatgaaagaactgatgtcacagcccccgctcctacaaatctgattctttcactatcaaacgaggccttaccctaatctgaataagyttgataccttctgcccatacttttctcttacttttatggagaaaggtgtccacattttaaacaatggatttaaataccattttgaaactaaccttgttatgaaccgaagacacacacatataactgtctttttcttttgacttctttttcttcttcctcttgtcctccccatgccctcatctcctcctcccaacctgttcctcattctctttctcttcatcttccttatcacatagttctaagcttttaatgcatgttggaataatagtaaatgtattttatatagtcagagatattagtttaaatcaattttgtctgggtgactgaaatgtattctaaaatgatttcattttatatccattttggaaatgctaaattatgtgcagtggacatggaaaggaatgtattgatagtatagggatttgtcatgggaaaccactgtgctaacaacaaata

SEQ ID NO: 635574 - DNA, 588 bp, Homo sapiens
aacttctaccttctacctccctgcatcccttcctctcctcaggggtcatgaaagaactgatgtcacagcccccgctcctacaaatctgattctttcactatcaaacgaggccttaccctaatctgaataagtttgataccttctgcccatacttttctcttacttttatggagaaaggtgtccacattttaaacaatggatttaaataccattttgaaactaaccttgttakgaaccgaagacacacacatataactgtctttttcttttgacttctttttcttcttcctcttgtcctccccatgccctcatctcctcctcccaacctgttcctcattctctttctcttcatcttccttatcacatagttctaagcttttaatgcatgttggaataatagtaaatgtattttatatagtcagagatattagtttaaatcaattttgtctgggtgactgaaatgtattctaaaatgatttcattttatatccattttggaaatgctaaattatgtgcagtggacatggaaaggaatgtattgatagtatagggatttgtcatgggaaaccactgtgctaacaacaaata

SEQ ID NO: 635575 - DNA, 608 bp, Homo sapiens
aaagaaacgagcaaagcctccaagaaatatgggactatgtgaaaagaccaaatctacgtctgattggtgtacctgaaagtgacggggtgaatggaaccaagttggaaaacactctgcaggatattatacaggagaactttcccaatctagcaaggcaggccaactttcaaattcaggaaatacagagaatgccacaaagatactcctcgagaagagcaactcagtttkgaaaagatgtcagtactgtttaaattggttcttaggttcagcaaaatctctatgaaaatattagaaagctttctttttgaagttaacaggatgattctaaaatttatatggaaatgaaaagcagaaatgaaatcatcaagaagataaagaaagggggaggacatgcacgggcgggcattttttaaacttataaaactacaatgacgaggaaagcgtgacacagcactgactatactaataaatcaatgaaatagaagtaaatctgtatttacactctctcttatttagaataaagctggcaccataacacagggaggggacagatggtctgtttaataaatggtgcaatgtcaattggatatacatgtgacaaaagcaaa

SEQ ID NO: 635576 - DNA, 598 bp, Homo sapiens
actcaacaaacttagccagaacaaaacaaataacttcttcaaaaagtgggcaaagggcatgaatagacatttcacaaaagaagatatacaaatggccaagaaacattaamaaatcatcaaaacatcactaatcatcagggaaatgcaaattaaaaccacaatgagatacatcatcttactcctacaagaatggccattattaaaaagtcaaaaaataatagatgttggcatggatgtagtgacaaagaaacacttatacactgctagttggaatgtaaattagtaccacctgtgtgggaaacagtatggagattgttttaggaactaaaagaagacctaccatttgatccagaaatctcattactaggtatctacccaaaggaaaagaagttattatatgaaaaagatacatggacatatatgtttatagcagtacaattcatgattgcaaagatatggaacaaacctaattgcccattgacccatgagtggataaagaaaatgtggcatatatgcaccatgcaatattactcagtcataaaaagaaacaaaattaaagaaaaccaaaaactgtacattctcacttataagtgggatg

SEQ ID NO: 635577 - DNA, 598 bp, Homo sapiens
actcaacaaacttagccagaacaaaacaaataacttcttcaaaaagtgggcaaagggcatgaatagacatttcacaaaagaagatatacaaatggccaagaaacattaacaaatcatcaaaacatcactaatcatcagggaaatgcaaattaaaaccacaatgagatacatcatcttactcctacaagaatggccattattaaaaagtcaaaaaataatagatgttggcatggatgtagtgacaaagaaacacttatacactgctagttggaatgtaaattagtrccacctgtgtgggaaacagtatggagattgttttaggaactaaaagaagacctaccatttgatccagaaatctcattactaggtatctacccaaaggaaaagaagttattatatgaaaaagatacatggacatatatgtttatagcagtacaattcatgattgcaaagatatggaacaaacctaattgcccattgacccatgagtggataaagaaaatgtggcatatatgcaccatgcaatattactcagtcataaaaagaaacaaaattaaagaaaaccaaaaactgtacattctcacttataagtgggatg

SEQ ID NO: 635578 - DNA, 394 bp, Homo sapiens
tgaaacttatattggctaataatctatatgtgaaagtaatttcaactgtgccatatacaactaagtaaattgcagaggaataaaaagtcttgcctaatcttggtcttagggaagtcttcctaaagaagttgcagaaaaaaatcttatttatggcaaatgaaaaccagggatatgacaccaaggaaaagaattttaaaatatatgtttgrcatggtaaggaagctaagtgtattagtccagtctcacttggctatgaaaaaattcctgagactgggtaacttataaagaaaagaggctgaattggctcacagttctgcaggctgtacaggaagcatggtggcatcagcttctggggagccctcaagaaactcacaatcatagaggaagacaaagg

SEQ ID NO: 635579 - DNA, 606 bp, Homo sapiens
ccttttgtgacaagacaggttatttgtgttttaccaaaattacctgagatttttatttatgaaataaaaatctattaaaatcaatttcacccatctataagtatctatatgtaatatattttgtctgaatattttttcaacctgtttctctccattcccaccacaaaaaagatagttcaatttactatttatgtccatgccagatccagttaataaaaaataatggccctgacattttatattttccgaggatgatcaaataagaaatggtctccagaccagagtaaacatttattgtgattaagaaatgtttagtcttccttatatcattgtgcactagtcaccagtattactttctaaatctttaaaaaaaamacacatattagtttatattattattgtgtcttttttaaaaacttaagtttaattggtagaaagaccaatacaaatatgagaaaccacattactaatattgctctttctgtggtaattaatgtgcttgtaaatagaaaacagcataggatcaaaaattaagattttatttttattacattttctaggtgataaatttaaatacttgtaacagtttgccactggatttaaaaa

SEQ ID NO: 635580 - DNA, 259 bp, Homo sapiens
tccaaacctgttagtttgctctgactatcataatggaataccacaggctgggtggcttcaacagcagaaatgaattttctcacacttccggaggctggaagtccaagatcaaggtgccatcaggtttggtttctgatgatgcctctcttcctggcttgtagatgaccrccttcttgctgtatcctcacatggcctttcctttgaccatatatgagaaaaagatctgtgctgtctcttcctcttcttataaggacattgg

SEQ ID NO: 635581 - DNA, 583 bp, Homo sapiens
ctatcataatggaataccacaggctgggtggcttcaacagcagaaatgaattttctcacacttccggaggctggaagtccaagatcaaggtgccatcaggtttggtttctgatgatgcctctcttcctggcttgtagatgaccgccttcttgctgtatcctcacatggcctttcctttgaccatatatgagaaaaagatctgtgctgtctcttcctcttcttataaggacattggtccyatcagactggggcctccttttattacctcactttgccttactttcttccctaaagcatcttcaaatacagtcacattgagggtcagggcttaatgtcccatgctttcatttttaggacatgatgcttctgctaaaactgtcgcctcggcttgcaatgtcttgtctctcaaggctcacttctaatttccagggcttctgtgacagggggaagaaatcattcccaaaactccttgagcagaagttagttgctgacttgtctgtctttatcaaatattctgagcttgttaaggccgagaatgtttgttcatattttaactaacatagccaaaacaacagagaagcag

SEQ ID NO: 635582 - DNA, 481 bp, Homo sapiens
ctgatgatgcctctcttcctggcttgtagatgaccgccttcttgctgtatcctcacatggcctttcctttgaccatatatgagaaaaagatctgtgctgtctcttcctcttcttataaggacattggtcctatcagactggggcctccttttattacctcactttgccttactttcttccctaaagcatcttcaaatacagtcacattgagggtcagggcttaatgtcccatgctttcatttttaggacatgatgcttctgctaaaactgtygcctcggcttgcaatgtcttgtctctcaaggctcacttctaatttccagggcttctgtgacagggggaagaaatcattcccaaaactccttgagcagaagttagttgctgacttgtctgtctttatcaaatattctgagcttgttaaggccgagaatgtttgttcatattttaactaacatagccaaaacaacagagaagcagcccttt

SEQ ID NO: 635583 - DNA, 596 bp, Homo sapiens
ttgacaaatagaaaagaaaaatgagcatgtttaaattcttctgatatagatattaatgtaagtacattttttaagcaattgtggcaatttgaatagaaaaccttaaaatttttatggatacatctctactcaagtaatttcrtttatagaaattgtttataaaaagaaattttattgagacttacagaggatgatatgaaacttaacaataacgtagcagaggtataaagtggaaaactagaaatgctatattattgcattaaaaacaacatactatattagttttctattactgtgtaacaactatcacaaatttaacagcttaaaacaatgcccatttattggctcaggattttgtaggtcagaaatctggcaaagtgtcactggattagcctgatatcagagtgttggctggaggctctaaggaactacttagtatatttccaaactcattcttgttagtagcagaactcattttttgtgactgcagcactgagtccccctgttttgctggggacactctcagctcctggaaggagcccttcaatcttccagccatgttttgaatctctgacttctcccatctctgacttcta

SEQ ID NO: 635584 - DNA, 596 bp, Homo sapiens
ttgacaaatagaaaagaaaaatgagcatgtttaaattcttctgatatagatattaatgtaagtacattttttaagcaattgtggcaatttgaatagaaaaccttaaaatttttatggatacatctctactcaagtaatttcgtttatagaaattgtttataaaaagaaattttattgagacttacagaggatgatatgaaacttaacaataacgtagcagaggtataaagtggaaaactagaaatgctatattrttgcattaaaaacaacatactatattagttttctattactgtgtaacaactatcacaaatttaacagcttaaaacaatgcccatttattggctcaggattttgtaggtcagaaatctggcaaagtgtcactggattagcctgatatcagagtgttggctggaggctctaaggaactacttagtatatttccaaactcattcttgttagtagcagaactcattttttgtgactgcagcactgagtccccctgttttgctggggacactctcagctcctggaaggagcccttcaatcttccagccatgttttgaatctctgacttctcccatctctgacttcta

SEQ ID NO: 635585 - DNA, 568 bp, Homo sapiens
tttagatttaccaaagtttctgattttaaacaagtaaaccattgattgattatcatttctttgagagatgaataaagaagttatttttgcccaaattattgacaataatatgattttgtcatgtaaatgcattttttagaattccttttccaaccttttctctaaaaatggtagcacattggaaattaatcaatgagggatatctacatttcttcaaactgtattataatgtgcaaccagattaagctatctctagaatgggtataggagttttagtgcaactcaactaatggggagtggagtgggggaatgcgtagtttgcccaacaaaatcttatgtaaaagagatcacttttgcagaatatctcataagcttcttgagataactttaaagatggaaatttcaaaattaatgttaatgatatgttcaaaaaaagaaagctaaagtcttcattcctacaataaaaaaaatagtttcagagcgatgactccatttacccaactcaagagacaaatatgagtccaaattcttgtgagtaawttagacaaagaagcaaaacagcaatgtt

SEQ ID NO: 635586 - DNA, 603 bp, Homo sapiens
tgtcaaaaaagatcatattttcagaaaaaaagagaacctctgattttaacatatttacctatcaaacggtgttaccaatgttaggcttctaagccagagaccagagaccacagtgacagtaccagagggagcttatacagacgcatgcaaatacacttagaaattttgcagttactttgagcagttaaaatacccttwtgatgcatgctcaattgagaattaaaagttcaaatattgatttgcataggaaattagtaattaagtacccataaaattaacttgcacctgccaattgatgtaccaattaactttgcagataccttaaaagaaacttcttgaaaataaagtttctgatattatttgacaataatatgttgtacatgtttaaaaatacacaatgctgcagaaaggtacatatggtggccatgagaatgtatgctgcagatagccaattacagagaacataatttaccaaggatccagctgccatgctctgaaattcatcaccaggttagcacagaggccagacttcccacaggctgctcactggccagtgattgaatgcaatagggacactcatggacatctgtgcttgggagaacc

SEQ ID NO: 635587 - DNA, 510 bp, Homo sapiens
taaaaaaatacatctggcaacccttctgtaataacctcactcaggtagaaacaggcttctcagttaaatctagtagagcacaaatctccatttatgaatatttaatactagtaacccacactattaacttattttagcatgttagtagtagataggctttttgagtaagtgaagagtaaaaagctatggcattttgtgttattaagcttcaaaaaaataaagttctgttaaacaaaagtttgcaggacattaggaggctgcaacctgacctcataccatactgttttcttatttaaattttatcttatagtaatttaatatttatatatatctattgagtacaaagtgatgttacatttatgaatgcmatgtggaacaaataaataaagccagtcaatatattcatcacctcaaatgcttattatttgtgtggtgaaaatacctgaaatttgctgtctcagcaatttggaaatttgttaatacaatattattaactagtattcaccactc

SEQ ID NO: 635588 - DNA, 513 bp, Homo sapiens
tcgttacttttaatttttaaatttttttatttttattttttgcagaacgtggaggtttgttacataggtatacgtgtgccatrgtggtcttgctgcaccttttgacccatcctctaagttcccttccctcaccctccactcccaacaggctgttgtgtgtgttgttcccctctctgtgtccatgtgttctcaatgtcaccatgaatttggtggcctttagctgttattaagaatttgacatgtgctccaatcacattagctgtaataattatcactaaacccaaatattattgggctgcaataatgagttttcttgtataatactcaaatattatataaatttgagtggacgttattcaatccaaaacatgaaactcaataacaccacagtagatgagaaatgacctcactaaagcagtggtgtcaaagatcatagaacatctttacatacaacacattattttttcctttagcttaaaaaaggggatgatatagattttttccatattcaag

SEQ ID NO: 635589 - DNA, 571 bp, Homo sapiens
tactgagtttgagtttatctacctatgctgatgggccatcagtgtatctggtagcaatacagtagtcccccatttcctgctgtttccctttctgtggtttcagttacctgcagtcaaccatggtccaaaaagattaagtggaaaactccagaaataaacaattggtaagtttcaaattgtgcactgttctgagtagcatgaggatatctcacgccacccmaaacctgaacactccccttgttcagtgtatccacactgtagaggctccctgcccattagtcacttagtagccgggaaggttatcagattaaaaaaaaaaaacatggtgtttatagggttcagtactatccatggtttcaggcatcctccgggggtctcagaatgcatccccaatgcattatgggggactactatatacagaagccagggctatctatcagcagcttcaatcaggatgtaagctacctgtcaggagaagtggagatacaccttttaatggaaacacactaaagaaggaggaatatctgaagccttcatctcttctcatcagcaatcttctaccaatgccttg

SEQ ID NO: 635590 - DNA, 644 bp, Homo sapiens
actgtattagtccatttttacgctactgataaatgcataccagagaccaggaagaaaaagaggtttaatgaacttacagttccacataactggggaggcctcacaatcatggtagaagacaaggaggagcaagtcacatcttacacggatggcagcaggcaaaaaaagggcttgtgcagggaaactaccctgtataaaaccatcagatstcatgagacttattcactatcatgagaacagcatgggaaagacctgcccccattacttaattacctcccaccgggtccctcccacaacatgtgaaaattcaagacgagatttgggtggggacacagtcaagctatatcattgaccttgatattcaccccttgtattgaaaagaaaatggccatccagagcaactggcttacacagcacataagtggcaaagctgggataccaagctagagggcttcacctcaaaagcgtatgatttttggcttaatgaatcctgtgtctctagtcacaatagctaaatttgttctgctttcatccacatttacactttccttacaatatgtgtaccactttattttcttagtagaccaggaagatagagttctaggaggcattacttctggcccaaatgagatcatatcaaaatc

SEQ ID NO: 635591 - DNA, 644 bp, Homo sapiens
actgtattagtccatttttacgctactgataaatgcataccagagaccaggaagaaaaagaggtttaatgaacttacagttccacataactggggaggcctcacaatcatggtagaagacaaggaggagcaagtcacatcttacacggatggcagcaggcaaaaaaagggcttgtgcagggaaactaccctgtataaaaccatcagatgtcatgagacttattcactatcatgagaacagcatgggaaagacctgcccccattacttaattacctcccaccgggtccctcccacaacaygtgaaaattcaagacgagatttgggtggggacacagtcaagctatatcattgaccttgatattcaccccttgtattgaaaagaaaatggccatccagagcaactggcttacacagcacataagtggcaaagctgggataccaagctagagggcttcacctcaaaagcgtatgatttttggcttaatgaatcctgtgtctctagtcacaatagctaaatttgttctgctttcatccacatttacactttccttacaatatgtgtaccactttattttcttagtagaccaggaagatagagttctaggaggcattacttctggcccaaatgagatcatatcaaaatc

SEQ ID NO: 635592 - DNA, 621 bp, Homo sapiens
aatgagactctactttcacttaaaaagtatattaggtacaatttaatacaataataaagacagcaaaagattttagtgtatgttattttctgtggtgtgtatttctaaattraaaatattaatttatttcagaaaattaattatgataaaaataatattttatcctctccttactttcttttttcatggtattctttctttttcttaagtttaaacataatgtaaaggttaaacaaattgttttaaaaggaaaatttaataaatgccaaataggaaaaaattttaaatggtgattatatttaatcagaaaaattttgcaatgttttagtgaagataattttgataaaatataaccttggaaatctagattctagttattagaattttaatttaaattttattgaactttttgcttatggatgattatttatctatctttttccatttcttaagaaaagcatgttattttttcaggcttctggcaatgtatttttactctgttgtgctgtgataatgggcctaaatgtctacgggaagaaaatgctagaatggcattatgttaagaaaggggaacaggtgccagaaaataatgcttatgttcttgtatgtttactttaagtc

SEQ ID NO: 635593 - DNA, 548 bp, Homo sapiens
ctttttcctattgcatttgtgtatattcaaatcaagaaaatccagaatttattataactagaaaatatctataataactgattatcagtattgcaaatatgactctggaaattacatataggaacacaaaacctggtggaaatatgtctgcatatattaacagagtgagtagttcaagctttgttaaaactttcattttgactgaagactgtgacataaaattgaatattctaatattctttgcatcagtattggcagttacattttataaaacmaaatgacaatgcaaaacagcaggtaaaaaaaattccagtggaataatttgacatataaatagtcaatgaatgcttcatagtgaaaaattcactgtatagtattagaagctgaaatttcctaacaatgattttttatctaaattatttcatgctattccaatatttctgatcaatgaaaataagttcctatatattgccaacatataaagactacttttgcatatatgtgaacatgtgtgtttctatcagtttcaagtacaggatatttgttgg

SEQ ID NO: 635594 - DNA, 573 bp, Homo sapiens
ttgaaaaattttattgttatatagtgatttggtgctaagttggtcagtagcacaagtagcatwgcaattgtgtttttatttgttggttttaatccatgttaacaattagtatacaaaactaaaatcttttagcacttagtgaaaagtgttcaaatattgctatctggcacatattttttgatgcatctatttaaactttgaaagcatttgcacttattgtgaaagtattgaggatgattagggagtttggtaactggtaggagttgagccaacacagacattctgtattgtggaaactcattgccctttatagaaacttcctgattctctctgctttggctagaaatcaatgaatggacatttgatagctagaaataattactttgtcagtgttcccttttgcttacttttctttaactgcagcaggtggaattgaacaagtgttgcttatgcattttggaaaaaatctgctctggcttgtgctttagcctcataagattattttagcaaacaaattattttacatgttcttgttaactggtcctagaatcttactccattcttcatggcttc

SEQ ID NO: 635595 - DNA, 573 bp, Homo sapiens
ttgaaaaattttattgttatatagtgatttggtgctaagttggtcagtagcacaagtagcatagcaattgtgtttttatttgttggttttaatccatgttaacaattagtatacaaaactaaaatcttttagcacttagtgaaaagtgttcaaatattgctatctggcacatattttttgatgcatctatttaaactttgaaagcatttgcacttattgtgaaagtattgaggatgattagggagtttggtaactggtaggagttgagccaacacagacattctgtattgtggaaactcattgccctttatagaaacttcctgattctctctgctttggctagaaatcaatgaatggacatttgatagctagaaataattactttgtcagtgttcccttttgcttacttttctttaactgcagcaggtggaattgaacaagtgttgcttatgcattttgraaaaaatctgctctggcttgtgctttagcctcataagattattttagcaaacaaattattttacatgttcttgttaactggtcctagaatcttactccattcttcatggcttc

SEQ ID NO: 635596 - DNA, 481 bp, Homo sapiens
gaataattttatcattgacattttttagttctaggtcatatggtaacatgtacaataaattgtattgttcaaaaaaataaaattaataagttcatttactgtaaaccttggggaaaatgaacagagggctagacagagttaaaggactgcctaggatacataaagaatagaaaagctgttcaagtgagataccactaagtaatrggtgagtaaaatacttagaagaaaaaatttcaatgttgccactgcaaacatgtatatgtttgcatatctgcttggtgtcagtgttcggaggagggaggaaatagaatatcttttacaaatattaacaatatttactaattttgagaagttatctgtgtgtacttaatccaataaaatactgttgagttgaataaatgaccaaacaattttctcatcgatttaagcatgatttgggggtcctccttgatactctacactcagtacagagttgacaagg

SEQ ID NO: 635597 - DNA, 514 bp, Homo sapiens
ttttctgttttttgtgtccacaaaaaacataagccctcttcctcctttccagcatcaaaaacatttttctccctatcattccatttttcactagcagtctgctttggactaccttctatctgctttctaggtccaaagccaatgccaaatgttttagctttttgttgtttcagcacctcactaatttctgttttggttattattgctgtgtattactgcaaaattcatggcctaaaacaacaaccatttcattatctctcatggttctgtggattgactaggttcagctgggtggttcttctgctyaattgcactggaacatctaaatggttcactcaaatggctgatacttgatgctgcctattcgctgggacagctggggctgtcatctaaaagtgaacatccatttagcctctgggttctggaggaaagtgtcccaagtgtgagcatttcaagagagaagcagcagtgcttttaaaggctgggcctagaactaccacaacatcacttttac

SEQ ID NO: 635598 - DNA, 514 bp, Homo sapiens
ttttctgttttttgtgtccacaaaaaacataagccctcttcctcctttccagcatcaaaaacatttttctccctatcattccatttttcactagcagtctgctttggactaccttctatctgctttctaggtccaaagccaatgccaaatgttttagctttttgttgtttcagcacctcactaatttctgttttggttattattgctgtgtattactgcaaaattcatggcctaaaacaacaaccatttcattatctctcatggttctgtggattgactaggttcagctgggtggttcttctgcttaawtgcactggaacatctaaatggttcactcaaatggctgatacttgatgctgcctattcgctgggacagctggggctgtcatctaaaagtgaacatccatttagcctctgggttctggaggaaagtgtcccaagtgtgagcatttcaagagagaagcagcagtgcttttaaaggctgggcctagaactaccacaacatcacttttac

SEQ ID NO: 635599 - DNA, 556 bp, Homo sapiens
gttttgtttgtttgtttctttgtttgttttsagacagagtctcactctgtcgcccaggctggagtgcagtggcgcgatctcggctcactgcaagctctgcctcccaggttcgcgccattctcctgcctcagcctcccgagtagctgggactacaggcgcccgccactgcgcccggctaattttttgtatttttagtaaagatggggtttcaccatgttagcgaggatagtctcgatctcctgaccttgtgatccgcccgcctcggcctcccaaagtactgggattactggcatgagccaccgcaccccgccgtcattccattcgttactgaacctgtatggtttctgatgagatgtctgtagccagatggattggagctcctttatatgttatttgcttcttttctcattctgtttttatgttcctttctttgtccttgagatctgagagtctgactgttgtatgccttgaggtagtcttatttggattgaatctgtttggtgatctctgaccttcctgtacctggatatttatatttttctctatgtttgaaaag

SEQ ID NO: 635600 - DNA, 556 bp, Homo sapiens
gttttgtttgtttgtttctttgtttgttttgagacagagtctcactctgtcgcccaggctggagtgcagtggcgcgatctcggctcactgcaagctctgcctcccaggttcgcgccattctcctgcctcagcctcccgagtagctgggactacaggcgcccgccactgcgcccggctaattttttgtatttttagtaaagatggggtttcaccatgttagcgaggatagtctcgatctcctgaccttgtgatccgcccgcctcggcctcccaaagtactgggattactggcatgagccaccgcaccccgccgtcattccattcgttactgaacctgtatggtttctgatgagatgtctgtagccagatggattggagcycctttatatgttatttgcttcttttctcattctgtttttatgttcctttctttgtccttgagatctgagagtctgactgttgtatgccttgaggtagtcttatttggattgaatctgtttggtgatctctgaccttcctgtacctggatatttatatttttctctatgtttgaaaag

SEQ ID NO: 635601 - DNA, 431 bp, Homo sapiens
ccttagcttggttcatgcatatagcactcstgggaattatgtggaagaaaggtctggccatggggccggggtcgggggaggcaggcgaggtggaggtgcccaggtgtgaaaactgaggaagtgatgactctcaggctgtgccagagctgggtggacactgcctggccccacgtgatgtcccccagtgtgtcccctccctgcctcctgctgtctcatcccagatgaaggctctcacttccacgccaggctctgcctatctcaggatgagactgtcaactccgtccacaggagatgccacacgtgttgtaaacagatgtgactggcatagaatattccccaagtctgagttgtgtggttttgagtgacacatgtcctgaatgggacactcctatccaatccagatccttccatgcagcctcgcctccatgcca

SEQ ID NO: 635602 - DNA, 229 bp, Homo sapiens
cgtggacaatgcctgcatcgtgctgcagattgacaatgcccgtcttgctgttgatgactttagagtcaagtatgagacagaactggccatgcaccagtctgtgaagagtgacatccatgggctccrcaaggtcatcaatgataccaatgtcacttggctgcagctggagacagagattgaggctctcaaggaggagctgctcttcatgaagaagaaccatgaagaggaa

SEQ ID NO: 635603 - DNA, 580 bp, Homo sapiens
  misc_feature 1, 2, 3, 4, 5, 6, 7, 8: n = A,T,C or G
nnnnnnnnattgtatcattgtaatatgttttaaaatcaggaagtgaaattcctccaaatttgttcttatattcaagagtgttgtggttactctggggtactttatactccatatgaattttatccacgtgtaaatttgtgcaaacaagccagctaggattttaatagagattatgttgaatctatagatcaattttaaaatatatattctatctttttatttactttatatgaggagacactgtcgtatcttcctttaattctttaatcatggttttctttagtttttaaaatatatttataatggctgctttgaaatcagttaaatctgacacctgtaccttctcaaagataatttctgttgtcttccttttttttttcttgtgtatgrtttatactttactgattgttgttgtttggcaagagttacaatttttattaaaaaaacagacttttagatattgtagcaattttgcataccgatttttcccttcccttcttccctcctaggcttgttgctatttgcttatttatttatttagtaagttggctgtactattttagtgaagtctatttccctc

SEQ ID NO: 635604 - DNA, 542 bp, Homo sapiens
ctaaatccatgttttgaaacttttttttttaagtctcatcttttgttgttgttactgtttcaggcaagaacacaaatctggcccctgttactgcattttggccagaggaaggagtctagagtccccctttcaatgtctatatttctctcagaatccagtaaatggaactacattagatctacatgctagtaagaatagctttaaacatagatagtttagattatttatgtataaatatagtaaagcattctagataatcatattacttctagatgtcaaaaacctagtgcaaatagctgctctggataaatctaacctttcctggtgggctgcatattctggaaagatcgccccagctgaaggaagaaaagggatataggaatcacctaaaacattcataagaacaggcacaactgtctcaaacttcctttttatctgtggtgtgtccttcstctctctctccctccttctctcctaaaattgccgaatctcaaactggcttttgggcaacaaggaagactaaagtgtttctgttagtagct

SEQ ID NO: 635605 - DNA, 553 bp, Homo sapiens
atttcaacgtttggtgtgtctgaaagattccatgcagaatatattttgacacaatcttcstattttacttaacaattgctgcttcaataaacctgttctccaggcaagaagatgattttttttttttggagagtcttgctgtgtcgcacaagctggaatgcaagggtgtgacctccggtcattgcagcctccgcctcccgggtccaagtgattctctggtttcagcctcctgagtagttgaaataacggggttgcaccaccacttccggctaattatggtatattgggtacacatatcttggtattctggggttccaccatgtggcccaggctggttgcgaaccccatcacctaagtgatccacatgcttctgcctcccaaagtgctgaaattacaagcataagccactgtgcccgggcaagaagatgaaattttagattaaattgaagtgaaatttcttctatgaatgtggattgatgctaacttttatcatagaaaatatacatgtgatatcctaatcacatttttctaattgcactttctgtggctgctt

SEQ ID NO: 635606 - DNA, 538 bp, Homo sapiens
ttctttcaagactttttttttttaatggggtcttactctgttgcccaggctagagtgcagtggtaccatcatagcccactgtagcctcaaattcctgggctcaagctatcctccacctcaccgtcccaagtagcttggactacagaggtgcaccaccacacctgggtaattctcatatttttttgtagagacagagtctcactatgttgcccatgctggccaggaaacrctactaatcaaggcaagacaagcaacctcacggaccttccagggaattcttctcccctttttgactcaagagcctaccccacaaattattgattccattcagataatgtttcccattgaaccttaccaaaaagatcactatcattgttctttaatttaaaaaaaaaaaaagcacagatttctttactctttcctgcaagaaaaaagagaagatgagaaaaagccatatcctaattgtagccatccatgtcatctaattggcagttctcattgtactgctatacaagggttgtcgctgttttaaggggag

SEQ ID NO: 635607 - DNA, 619 bp, Homo sapiens
agaaaaataatagtaataaatcagtacctcccatgaaagctcctgttatgtggcaatgaattagaatrtcaaggtcaaacactgtaaaactgaattaaacagcccacataatttctccatctgactcccatttgtcagaattcatttttgtattaatacagaaaatgaatcattgttcaaacaggcatcatttttatgaattaaaaatgcataaatcaactgaatgtcctttattcaggaaacatttctctttatacgttgtgcagcttacgcagatgtctgatcgcgggagaactgactgacaaaatgttgatgagtcaaactgtcattccccaatagggagaatgcctcacaattaaatacgagatttaagaagatgagttgtaacactaattgttccttcagaaatgtcacaaaggaagcacatcattttttttccccttttgttgcgatttgggaagaacaagggcctgggaaaagtgcttgtacagtccttccctcaagcaaggggcctgcatgtcattgggttctgggactggtaggctgggagcagtgagtttcgcccctcatcctgggatctagggggaaggatgcacccctgtttgcccccactatctta

SEQ ID NO: 635608 - DNA, 473 bp, Homo sapiens
tttgttgtcatttcaacaatgttcacagcatcatcactaggaggagattccatcttgagaaaccactttctttgctcatcctaagaggcatttgttcaagtttggtcaggagagccggatatagtgaccatgtgcctgtaatcccarctgaggacaggaggattgcttgagaccaggagttcaaggctgtagtggttatgattgtgcctacatataaccactatactccagcctggacaacataacaagaccccatctctaaaattaaaacaacagaaaacgtttgattatgagattgtagcatttcactcacgttttcaagctccactcctaattttagttctcctgctatttttaccctacctacagttacttcctccactgaagtcttgaatccttcagtcatttatgagggttgaaattaccttcttccatactccctttaatgtggatattttgacctcctcccatga

SEQ ID NO: 635609 - DNA, 505 bp, Homo sapiens
ctttgtttgctttaaaaattccacaattaaaatatctgtcattgaaagcttagacaaacagctgacttctctgttttgtgtagttaaatctataatgttaaatttatatagctaaattctccttgatggaaagtctcaaacgccctgatggggtacatttagcattggggatctggagatactgaggtgtgagacctgaggtcacctcccaagatgggctctagtgctgtgtgatcttttttttttttcactgcagctgtttctgtgaagagcacattgcttgttatgtattaggatatcttaagaacaaacacaccttctgcgtccagccaggctgagcaagatgcagcctgggctttctggagctctcgatggggacccgtgcccaattccatgtgttcagcctcagccctggcccatggttctcatgagggatagaaggaaaagccggagtcaattagcaggcagaggcttcagcrtaagatcccacagcttttagggaagg

SEQ ID NO: 635610 - DNA, 600 bp, Homo sapiens
aaacaatacattcaaagttgcaaattaataatcacaattttattccctagtaagataataactatgaaacccaggtagataatcccaattatttcctatatcagtacttttagaatcaattaaagagctacatgagaccataaaaatcatccattctaaacacctgattttgcaaactcaaaaattattttccccaagttagcagaatggccaaaactctgactcgcagtacagtgctcttcccactataatgcatttccaagtgcccaaccttccaattttgtcaaatcttaagacatcatttttaaaacatttctcttcaatagcagctgggatatacaacagttctgaaacctcaaaaaccacaagcaactgctatatcaagaagaggggaatatcgagttagcacaatacatcaaaaaataaaaagagcttccttcaaagagggagcaattccttaacaaagctacaaacaggacacatttttccccttaaaaaagtaattactcattttgatggtttctgtttagtctttggggaacataagttaatactaatgcaagctgtcacagcacrgcaagctcagatgtctccactcca

SEQ ID NO: 635611 - DNA, 592 bp, Homo sapiens
agaattcagcctaagtttggttatcctgcttcaaagtgaaacaatatataacctttgtcttgtttttgtcaaaaagctaccaagaacatataaagatgaaacaaactcataaagagctttagataactatgtgttttaattatgctgctgccaagttcccatgtttctttctgatggggaggttaaagatgttcttctgttaatgcggtttcttttcaaaaaaatatttttgaacaagaattttcaaacataaagtctactcaaacagcatctactcaaagctcaataagttatttcttactcttagaaataaaaagactatagaaattacaatagaaagaaaaaaactagaagtgtgtgtagatggacaggcaaatctaaagcatttcatacattttcacatttaatactttaaaaaaaaaacaaggtacagacygggcatggtggctcacacctgtaatctcagcattttgagaggctgaggcaggcagaccacttgagctcaagagtttgagactagcctgggcaacatggcgaaaccccatctctaaaaaataaaaaaaaaaactaaaattaggtgggtacagtggca

SEQ ID NO: 635612 - DNA, 559 bp, Homo sapiens
ttttatgtaacatgtgaaatacttttatatctctgggttgttttttaatatttaatttttttattgttttatttttgtagagatgggtcctcactttgttatccaggctggtctcatactcctggcttcaagcagtcttcccacctcagcctcccaaagtgttgggattacaggcatgcgccaccatacccaacataatatttagtttttcaagctaattgttaatcagagctgtaactatttttctttatgtaaatttttttagagggcarattgcaaacgtatcatgcattcattcagttcattagttcagatggttagatatgagtcccagttgacctttttaacatttctcagtctgatatctgttcctgttgaaccttaagtgttttcttatattttcacgtggcaattctctttagtccttagtagcataccaggcttggtgttttttctattgactggccaccagttcaggtagaaacagctgatgcagcagccttctctaatcatgctcaaaggaccaaaggccagagcatcattatctgtcagcatcata

SEQ ID NO: 635613 - DNA, 624 bp, Homo sapiens
aaaggcctatatggatcaattctctccacacctcagtttcctgtttccatatgtaaaatgagagatttttgatctttaaatatccttccaattataacattgtctaggtctgtgaaagtaaaattaatcattctgagatttggctgcatggaactttgtatgaaggtggaaggaagtttagcttcagaaagattccagaagtaattgactttgtccttgaaaaagaggtaagatttggtggaaattagtgagaagagttagtttctttccattgtcccatgaagaaagctaaaaacagacattgtacagttgtcttagctgcatattttagggccctctcactactgggcattaaataataattttggggtgaagccaagtgtggaggaaaamtacattgtggctgttttgtgataagtatttttgcagattatcatgaactcctccagcttcacctgaacataggcttttctcatttcctcacacctctacccaaagctgcattttcttattctttttcccccttttaagaatatccatgggatttctgctctggccaagatggagtaacaggaaccagatttattctccctatggaacaacttttagaagggcaataaatat

SEQ ID NO: 635614 - DNA, 624 bp, Homo sapiens
caggggccaaaatgaaggatactatgaaaagaatgatgacaagtggtctgaggacagatatcaagttctgagccagttattccaaggcgaaggggaacagcaatggtgagtagacccagggggaactggaaatgatcgaatcaagggaaaattgtttaagtcgataatgcaatgacaattataccagtaattttttgaagcgtggagaagaaagcattttaaaatgactcaggaccaagaatccctgatttgattattaacccaaattataactttagaaaatacattttacctctctggacattatgactgtaagataataggggtgaacaagagcagtcattcaacaaatacttattgaataccttgtttgggtgaggcactgtgctagggcataggacatttagtggtaataaaacagatacttccttatttttaagaagctttaggtctatggtagtagtttttaaacatcctaatatgactcattgtgagaaatacattttaaatcaaatartcgtgtgtgtgtgtgtgtgtgtgtgtgtgagagagagagagagagagagagagagaaagagagcagagagagagaatattcatgaaacaatatctaatcttatttca

SEQ ID NO: 635615 - DNA, 632 bp, Homo sapiens
aggcgaaggggaacagcaatggtgagtagacccagggggaactggaaatgatcgaatcaagggaaaattgtttaagtcgataatgcaatgacaattataccagtaattttttgaagcgtggagaagaaagcattttaaaatgactcaggaccaagaatccctgatttgattattaacccaaattataactttagaaaatacattttacctctctggacattatgactgtaagataataggggtgaacaagagcagtcattcaacaaatacttattgaataccttgtttgggtgaggcactgtgctagggcataggacatttagtggtaataaaacagatacttccttatttttaagaagctttaggtctatggtagtagtttttaaacatcctaatatgactcattgtgagaaatacattttaaatcaaataatcgtgtgtgtgtgtgtgtgtgtgtgtgtgwgagagagagagagagagagagagagaaagagagcagagagagagaatattcatgaaacaatatctaatcttatttcatgcaatgcaccttgctatattggtactgttctatgttttaatgttgttgttgaatggatttcatgactaactaagggcttatgaccattatt

SEQ ID NO: 635616 - DNA, 564 bp, Homo sapiens
aactgtctgtgggtattttgtaggcgaaaaatgctgttagatttttttctcttctgcatatgactttatttcccccttcattgctgagggatattttcagtagctatagctcagtgttgacagttcttttctttcagcacttaaaaaatgttgtggcacttttgtgccacttccttctggatcccatggtttcaagatgagaaatctgctggcattcgaatagtttttgtcctctataggttagactaacttctttaagaaaaaaaaaagtctttagttttcagaagtatgtcttggtgtatatttattgagcattattctggttggggttctctcatcttctgaaattaggtttatcctttcaccagatttgggaagtttttcagccattatttctttgaatattttttcagctccatatgtttcctcttcttttgtaactcaaacgttatgttagatctttygttattttcctaccggtctctcaggctgccttcattttttgttttgttttgtttttcagtctcttttctctctgttgtttatgttgggtaatttttattg

SEQ ID NO: 635617 - DNA, 545 bp, Homo sapiens
taaagggtccaattcaacaagaagactaaactatcctaaatatatatacccaacattggagcatccagattcataaaacaagtatgtctggacctgtgaaaagacttagacatgtacattattaatagtagtgagggacttcaataccccactggtagcattagacagatcatcgaggcagaaaactaacaaattttggacttatagaaatcaaaaccaagaagatctctcaaaacaacaaaattacataaaaattaaagtacttgctcctgagtgacttttggataaacaatgaaattaagaaagaaaacaaaaaattatttgaaataaatgaaaatagaaacacaacatamcaacacctctgagatgcagcaaaaacagtcttaaaaggaaagtttatagcaataaatgcctacctcaaatagttagaaagatctcaaattagaaatctaacttgatacctagaggaactagaaaaataagaccaaactaaccccaaaacaagcagaagaaagtaaataactaaatcagagcagaactgaatg

SEQ ID NO: 635618 - DNA, 588 bp, Homo sapiens
ggctaatcacccgcttagacttcattgtattttcactttatcatcaccttagtatagtcatgtgcctcatcatatcatttcagtcaacygcagatcacatgtacaatgatggttccgtaagattatagtactttatttttactgtactttttctcttttaggtatgtttagatacacagatacctaactattgtgttacagttgcccacagtattcagtacagtaacctgaagtaacaagtttgtagcctaggggtaatatgctacaccatataacctcggtgtgctataggctataccatctagatttgtgtgttacatttcatgatgtttacacgactaaattgcttaatgatgcatttctcagaatgtacacctgtcgttaagtgacatgtgaccatgtttgcttttttattttaaaggggacacaattatataaataacttttttttatgttggaacaagaagtaattattccgcagtatatttaaagtgtggataaaaatttacaaatgacaaatcattttaagaccatttataaattgcgaaaaacttgtaaaggctatacttggtaaactcaaatggcctc

SEQ ID NO: 635619 - DNA, 443 bp, Homo sapiens
aagatttaattaattagatttagtatgtattaacattactggaaaacacacccctttctcaagatttttactaccataaatgaaaagaaaggatgacagggaraagcagaaacaggaaatggactgcagtgtaagagatcaccagtgaaaggcctacttgtgcaactgtacatgacccaaactatatgacctctatctttcccacgtatacaaccctcgaaagcactgtaaagatcacttcaaggccagacatggtggctcgtgcttgtaatcccagcactcaaaaggccgaggcaggaggattgcttgaggccaggagtttgagaaccgcttgggcaacatagtcggacctcatctctacaaaaaaataaattaaaaattagctgggtatggtggtgcatgcctgtactcctagctaccagggaggctgaggcaggaggatc

SEQ ID NO: 635620 - DNA, 443 bp, Homo sapiens
aagatttaattaattagatttagtatgtattaacattactggaaaacacacccctttctcaagatttttactaccataaatgaaaagaaaggatgacagggagaagcagaaacaggaaatggactgcagtgtaagagatcaccagtgaaaggcctacttgtgcaactgtacatgacccaaactatatgacctctatctttcccacgtatacaaccctcgaaagcactgtaaagatcacttcaaggccagacatggtggctcgtgcttgtaatcccagcactcaaaaggccgaggcaggaggattgcttgaggccaggagtttgagaacmgcttgggcaacatagtcggacctcatctctacaaaaaaataaattaaaaattagctgggtatggtggtgcatgcctgtactcctagctaccagggaggctgaggcaggaggatc

SEQ ID NO: 635621 - DNA, 443 bp, Homo sapiens
aagatttaattaattagatttagtatgtattaacattactggaaaacacacccctttctcaagatttttactaccataaatgaaaagaaaggatgacagggagaagcagaaacaggaaatggactgcagtgtaagagatcaccagtgaaaggcctacttgtgcaactgtacatgacccaaactatatgacctctatctttcccacgtatacaaccctcgaaagcactgtaaagatcacttcaaggccagacatggtggctcgtgcttgtaatcccagcactcaaaaggccgaggcaggaggattgcttgaggccaggagtttgagaaccgcttgggcaacatagtcggacctcatctctacaaaaaaataaattaaaaattagctgggtatggtggtgcatgcctgtactcctagctaccrgggaggctgaggcaggaggatc

SEQ ID NO: 635622 - DNA, 589 bp, Homo sapiens
gctgccaaactcctggcaacaggttttcatctgttatcttaattgaactttattttgttttcatttttattattattttttaagttctgaggtacatgtgcaggatgtgcaggtttgttacataggtaaacatgtgctttattacatccttgcaatatatggggcacattactgccaccacatgagaaggcagctagagccatgacacttgtttaggtccccgtcaggtgaaagctgggctagcctggaatatgggccaccccgatcccagcttctgtgtttcactgggagcagaaaactgtgacctcagggaaatcagtctcaaacttgagcttgagttcattcaggcagtgtgatattctcttctggaccagagtgctgtttctcccctccaggttgagggaataaagtaatcgaagaactttgaataaaggccaatcacctgatcactacttctaacagtgtgacaaagaaattcagaacaagtgaataataagggaatggaaatttcaacttgccttaactttcagttctactgaattattctgtcttagcctartccttcccacttcccactcttttaacctca

SEQ ID NO: 635623 - DNA, 617 bp, Homo sapiens
atgaggtgggtgtatcacaaggtcaggagtttgagaccagcctggccgacatggtgaaaccccgtgtctactaaaaatacaaaaattagccgggcatggtgacacactcctgtaattccagctactcaggaggctgaggcagaagaatcacttgaaccagggaggcagaagttgcagtgagccaagatcgcagcactgcactctagcctgagtgacagagcaagactctgtcttggaaaaaaaaaaaattacaagtgcaaacagggaaataggcacatttkgtaggttgttgaatagactgttggggacagatttatgaagaaatgctgaaacagtcaactctggaaaaaggagcactttctaaatatgagaattatgtaaaatacatgataaatattgtggggtggatgttcaatatagcttttgcggtatttcttaatctgtattttgctcagaatcatgttttctatgtcttttcactgtgttttggtttaagccatttcttcttatatatccatcttttagtgattccagtttttcagttttaccagaggaacatttatttttctaatctttttttaattgcccaagtttaaatattgttctactattctatt

SEQ ID NO: 635624 - DNA, 617 bp, Homo sapiens
atgaggtgggtgtatcacaaggtcaggagtttgagaccagcctggccgacatggtgaaaccccgtgtctactaaaaatacaaaaattagccgggcatggtgacacactcctgtaattccagctactcaggaggctgaggcagaagaatcacttgaaccagggaggcagaagttgcagtgagccaagatcgcagcactgcactctagcctgagtgacagagcaagactctgtcttggaaaaaaaaaaaattacaagtgcaaacagggaaataggcacatttggtaggttgttgaatagactgttggggacagatttatgaagaaatgctgaaacagtcaactctggaaaaaggagcactttctaaatatgagaattatgtaaaatacatgataaatattgtkgggtggatgttcaatatagcttttgcggtatttcttaatctgtattttgctcagaatcatgttttctatgtcttttcactgtgttttggtttaagccatttcttcttatatatccatcttttagtgattccagtttttcagttttaccagaggaacatttatttttctaatctttttttaattgcccaagtttaaatattgttctactattctatt

SEQ ID NO: 635625 - DNA, 573 bp, Homo sapiens
aaggacattatttgacacacagttatcggagccatgtaacagtgaattctactagcagtatgctacaacacttaattaaaatgtttaatttattgctctggtgtttttgcatttaaaaaatgtgcaaaacacaacacagcgcagcccccactcccttaaattggcataatrcacaaattatacattcagcatctatggcaatatgcaaataaagcatcaacatatttgcagattcatcatcacaaagcatttattttgcacttattttccatatgcacgccagaataacatgatttttgatgcgtagagtttctacccttttggagtttgtggtataaaagagacaatactgagctctgtctcataggtagacagacagacagagaaatgaaagagagggagagggaacaagagagagagagcagatactcttaaggcagaataatatttttgtactgaattagttcatagaaatgttattgatctatgtggtgacatagaaattcattttagatgagtatgagataccctatttggaaccttatacatgggcaagagatttctattaaattt

SEQ ID NO: 635626 - DNA, 606 bp, Homo sapiens
tttttcaagtgcatcacatttagctttcataatatttttataaacataacattttcamccttagtgcattctttcttcaaattatttttggccaatcccaccaaactgccatctctagctttaaaaaaaaaaagtgggattccccatttaagatgatgctacacttgctatggaaatattgattctaaaaagaaggactgagatcaggtagtgttggactcaaatgccaaatagaagagaagcacattaacgccaggatgatgagtgtcctcacataaggccatcctttcttatagtttccaaggtaagtcatgttggcaggggtctttggagagaagaatgaggaataagtataagaatggagaagagaaagacaagtaaggtaggaaaaatgtctgtagcttaaatacacattacatatcattaataaattttaaaaattattaaaacatgttcatttcaaagaaaagtaacacttgttaatagggtgctgggagtctaacacgaattattatttgcccataggaagtaggcttaaagatgagaatatggcatctcagaatatgagataacatattctcaaagtggtgattaaatcatatatta

SEQ ID NO: 635627 - DNA, 606 bp, Homo sapiens
tttttcaagtgcatcacatttagctttcataatatttttataaacataacattttcaaccttagtgcattctttcttcaaattatttttggccaatcccaccaaactgccatctctagctttaaaaaaaaaaagtgggattccccatttaagatgatgctacacttgctatggaaatattgattctaaaaagaaggactgagatcaggtagtgttggactcaaatgccaaatagaagagaagcacattaacgccaggatgatgagtgtcctcacataaggccatcctttcttatagtttccaaggtaagtcatgttkgcaggggtctttggagagaagaatgaggaataagtataagaatggagaagagaaagacaagtaaggtaggaaaaatgtctgtagcttaaatacacattacatatcattaataaattttaaaaattattaaaacatgttcatttcaaagaaaagtaacacttgttaatagggtgctgggagtctaacacgaattattatttgcccataggaagtaggcttaaagatgagaatatggcatctcagaatatgagataacatattctcaaagtggtgattaaatcatatatta

SEQ ID NO: 635628 - DNA, 485 bp, Homo sapiens
ccaaatttatcacgccagcgattccattcttacataagaatcacctgttgctgatgcataaatttcrgcacctagcagagccaagggtaatcaggatttaaaaggaaggggcctgaataaattcaagcagatttcctctctgtgggactgagtcttgaaaaacctttgtgccctcatctgcccctcaacagagactgtcatttttctactttctgtctgcatcactattgtcgagggaatgatgctctcagagccacaggcaatctgtcttcttggaggttctgttccagctctgacctcggtttgttgcagtttatgtctcttctcacaagtttcagcttgctctcatcaccagctaaattaaccataaagcaaaaccttgactcacattactgaagcctcagagaaattggtagaagcccggagtgatgcatcactatatcaaataaagcactttggatcaatgagaagattcccttgtcttg

SEQ ID NO: 635629 - DNA, 485 bp, Homo sapiens
ccaaatttatcacgccagcgattccattcttacataagaatcacctgttgctgatgcataaatttcagcacctagcagagccaagggtaatcaggatttaaaaggaagrggcctgaataaattcaagcagatttcctctctgtgggactgagtcttgaaaaacctttgtgccctcatctgcccctcaacagagactgtcatttttctactttctgtctgcatcactattgtcgagggaatgatgctctcagagccacaggcaatctgtcttcttggaggttctgttccagctctgacctcggtttgttgcagtttatgtctcttctcacaagtttcagcttgctctcatcaccagctaaattaaccataaagcaaaaccttgactcacattactgaagcctcagagaaattggtagaagcccggagtgatgcatcactatatcaaataaagcactttggatcaatgagaagattcccttgtcttg

SEQ ID NO: 635630 - DNA, 547 bp, Homo sapiens
atttcctctctgtgggactgagtcttgaaaaacctttgtgccctcatctgcccctcaacagagactgtcatttttctactttctgtctgcatcactattgtcgagggaatgatgctctcagagccacaggcaatctgtcttcttggaggttctgttccagctctgacctcggtttgttgcagtttatgtctcttctcacaagtttcagcttgctctcatcaccagctaaattaaccataaagcaaaaccttgactcacattactgaagcctcagagaaattggtagaagcccggagtgatgcatcactatatcaaataaagcactttggatcaatgagaagattcccttgtcttgaaaccttggaatgtgtacaggtatgctagatgasagcaaagaaaatgccatttgaaagcattggaaggaaggagagttgtctaagaagtggtgggatagggacaacactggatggtgggaagcatctaggaaggagggtatttccgaaactaaaaaagggccaaggccaagaaaatcacctacagttctatt

SEQ ID NO: 635631 - DNA, 514 bp, Homo sapiens
ggtagaagaaaaggcctttgaagccaacataattactcctctgtccagagaaatataaacaacaataactccaacagccttcagctctgcttttgaatgagttctttgcttctgcctgagaggtaaagtagttcattccttggggaaaagttgaatgtggaatgctaggccatgcccttctcactttggtttcattatgttatttcgaattattaatacaaagaacattcaatgtaagttaacaaggctttactgagtaccatgtattcaggcctgcagttggtcctctagggtagatgaagaaagagtgtgggacaagttcagggtcttcaattcccttaatctcccttaacagaggtttgcatgtcccatttcaaaagccaagcacaaaatcagcaaaaatgaggctaattgtttaaatacatcttacttctctgtrtttacataagcaattgaattgaatgaaatttgctaattttgatgctcttactaatacatactgcatatgtgtttt

SEQ ID NO: 635632 - DNA, 485 bp, Homo sapiens
cctatgtgttctaacgacagccagttcacaactacacagatcagtactacttcttctgcaccttactttctccttgaactttaagaaaacccacgttgtctttgcctttttgtgtgctacccttccaaaagtgctaggttgaataccatgggcagtactgaatggggccctttgtctatgctgcaaattactcaggaggaacaacattgccactttgtgttttagagagaggaatgagacgttataattatcacagcgctctaaagcagaggaagcactagtacaagttctgtctacccaccaattatctkttaagaccactaagatatctggtcttgactgggccagatgtataatttcatgaaacaaatcaacctaaatgaacctcaggaaaaatggccaggtaaccaccttttgaaccactatacgctgacagctaacatttactgaaggcttacagtgtgctgggcgctgtgcttagagct

SEQ ID NO: 635633 - DNA, 592 bp, Homo sapiens
taaataatacatcctgagcttctataagaaatgayggtgtaaaacaacagaaagcactaagcaaactgtaaagtgctttaaaacaattatttcatatgttaagcagcttacaaaatagcaatttcttcaaatgcccttgcaaagcaaatgagacacagctgctaaaatgctctgcaaagaggcggaaatccagctctttaaaatgtccaaggggaaaacgcacactgtaaaattactccaaagatgaattttacaagaaggatggaagtgtcatcaagtttttccatggttaattctaaaagagtgccagcatcgaaaagataaaaaaaggcagttcttcaacagaaacctgggaaaatattcttcaatgacgttgcataatagaaataggaattaaactcacctgaggagcagaagcgaggaagccaagtttatgagttcttctcaattttgtccaaagacaagtctgttgggaataaaaaatattaagagaacttataaaaggaaaaaggaaaagggaaaaaaaaaggaaagtcaagaaggatgagctgtcgtggaatgctgtgaagtttgagagtgactcagcactagc

SEQ ID NO: 635634 - DNA, 592 bp, Homo sapiens
taaataatacatcctgagcttctataagaaatgatggtgtaaaacaacagaaagcactaagcaaactgtaaagtgctttaaaacaattatttcatatgttaagcagcttacaaaatagcaatttcttcaaatgcccttgcaaagcaaatgagacacagctgctaaaatgctctgcaaagaggcggaaatccagctctttaaaatgtccaaggggaaaacgcacactgtaaaattactccaaagatgaattttacaagaaggatggaagtgtcatcaagtttttccatggttaattctaaaagagtgccagcatcgaaaagataaaaaaaggcagttcttcaacagaaacctgggaaaatattcttcaatgacgttgcataatagaaataggaattaaactyacctgaggagcagaagcgaggaagccaagtttatgagttcttctcaattttgtccaaagacaagtctgttgggaataaaaaatattaagagaacttataaaaggaaaaaggaaaagggaaaaaaaaaggaaagtcaagaaggatgagctgtcgtggaatgctgtgaagtttgagagtgactcagcactagc

SEQ ID NO: 635635 - DNA, 576 bp, Homo sapiens
tgtaatcccaacatgttggtgactcctaggtctccatctttggctgggggaagttgacattctggttagctccaaatatgcatgatcaacaaccaacttgacatctataatttggtgtctaatagtcatttcaataccwgtatgtccaaaacctaaaacccaatattcctcacaaactggctcttcctatagccatctcagtcaatagcatctcaatccatatctcaacccatagctatatttctagttgctcaagccaaaactttgctttcttttcaactcacactccatatccaatctatctcaaaatcctattgaattttgatttcaatatatatccatatgcagactacttctcataacctctactgaccaacctatggcctgagccacatcatctttttcttgggttactggcacggccccctaattagtctgtttgcttctatccttgccctgctcatctagtctctacataatatcctgaaagacccttgttaaaaagtcaactcttcctcagcaccttgaagtaacacccatttcactcagattaatgccaaagtcttctatcagtaa

SEQ ID NO: 635636 - DNA, 533 bp, Homo sapiens
tccacccaatgatcactttttcttagataacttggtaatatttaacagaaatataacatttctataagaaatataatacttagttctatagacatagcaacacttacatattataacmcgaacgtcagaaaacctcctttaattatgtttcgtctgcatctcagtaatttctgatgaaaattgaattcagctacatggttctcaaattttgttctgatgtattatgtgatccagtaatactccacgatatgatatctggccttttcgttttttatggtttcttttttttttttttggagaacaactaatactttgttacttttcttgtatgttttcctttttgtttggttgatttttctccctagcagaaacagcatgatgttaggatgaggattaagctgtagtgtctcgatttctttcttccttttgtaatattcttttattccactcttattttatacactaaaaatatgtaaggaacttaagagcatttacaaaattcttaaaatacagttttagtacatttaaacaat

SEQ ID NO: 635637 - DNA, 641 bp, Homo sapiens
gctgaataatattctatgatatggatataccatattgggcatttgcttgtttccatttttgtctcttatgaataatgctgctgtraacattcacatatatttctctactactttttaaatcataactttgtttcaaaaattcctccacccctctgatgctcttgtctctcagtaggctctccagtaatttacaaggttcttctaggctttttattattgattattaatggttattgaaggcctaaagtttacctggcaaagattcagccttcctgttattgtaattattatcaatatagaaaatatttcactgaactaatgaaacaactgtatctccaatgacattttgtgacctgttaaaagatgccaaggaaggctgggtgtggtggctcacacctgtaatcccagcactttgggaggctaaggtgggagaatcacttgaggttaggagtttgagaccagcccggctaacatagtgaaaccttgtctctactaaaaatacaaaaattagccaggtatggtggcccactctaatcccagctactcgggagtctaagacacgagaatcacttgaacccaggaggcagaggttgcagtaagccaagatcacaccactgcactccagcctgggcaatggagtg

SEQ ID NO: 635638 - DNA, 607 bp, Homo sapiens
tcagggacttgaacatctaagggtttttagttagggggagccggtcctagaaccaatcccctgtaaatgccaagggatgactatatatatatatatatatatacatacatttctgtattactattattatttttgccctcattttaccctatttcacaatttctcttcggttgttayatgtttggaatttattctacaaaattgtgaggtttttttcttttgcagtattccttatgatatgttttagtcaaactgcagaagctaaatatatagttttccagtgaaataagtagtcttttgactctatggtctgtttctacttgcatgatctttgtgtgttactgctttctggttcttatgtatgagtgggttttctctttttgtagctagggtatctcaccaagagtttgatgttaaaatagacaaatgtcaaaaatatgtcatattttgtatccttttattattactgtttttctttgtgtggcttttgactcattaatctttgctctggctttatcttaccccactttagcttttttatgtgctttagaaatgcaccaagtatggcaagttgactgactttgcctatgattgttttgtatttgaa

SEQ ID NO: 635639 - DNA, 594 bp, Homo sapiens
aattgtaccttgtcttttctcttccataggaatcatttttattaagctgttttgtctattcagcgtcattttacaaatataaacatgtatacatacaactaaccacattcccaccttattgctgtacaaaagtagcataatattccttattttgtatatcttgaaattatttttttatttttatttttttgcttaattccctgtaggtcattccttatcagttcacacagaatttagaaagcactgtcccctcaattttctagactccactactgatactggtaagtcccacataacttttattcctgatcctttaattggggtttaaaaattgtttcgctccagaagctcttaatatcttagctcttacrcttttctttcctttgccttcaattttagtgagatataggaaaaaggaaaatgaatgtgttcaatttgccatatttaataaagttcccaaaaggcatcctttttagaaagtaaagaggtctgtagtctttacatcacacaccccaaatactgaaattgtagttttcaaagtgtatctttaagaaaacaatgatgcttacattttcattagtttgttccttaatt

SEQ ID NO: 635640 - DNA, 564 bp, Homo sapiens
tgaggtagacccagaaacagagataaaaggaggcagagggcagcccggaagagatgatcaatgtgagctaagatgcaaaggctggagaacacaagagatatgcagaacacattggtgaattcacctgttagttttgagggctcagtaagagagtagtgggatgaagtctagaatggtacatgggagccaaattctggcagtctcaaatgccatcctgtctggtgggtggcatagagacatgaaatgttctgagcagaggagtgacaaggtcacagtgtaggtgataaagaggagtatggtagtgagaggtaggagtagaatggggaagacactgaaggcatggactagaattaggggrctgttgccatcctttacctctgaggaatatggcttttacctttaagtgggggtagtgactgtggttgccccccaaaaatagctgaacatatgaattatttccatgcaataaatagttggacttggtatttgaacacagcatggagcttaggagaggaagaaatcaaggaggattccaaggcttggatgacagaaatagggaagctt

SEQ ID NO: 635641 - DNA, 644 bp, Homo sapiens
gacaggcaagaaaggtgagaaaaagatgatcccaagagagtctagacattgagctgccaagggctgcggtaggacaggaaagatgagaaaactttcacccagatactcaggacattgatctaccgaggctgaaatgagtagcgaacttgaagacagggtaggattgctaaaagaaacctctggaaggtattaatagcagaaagatgtctcactgggcacaaaagcttggaggcaggactagagaaagagggggtggggggaaagaaaataagaatgaccaaggaattgacagctgagctatagagaaatttctcatggttcagaaagctgayggctcagctataaaccaaaaagagatccaaaatcacacttggacaaaacaagaaatgatggaccattttctaaaagtaaatattatttacttcaatctccattgtttttatacaaatgttcagcattcaatcaaaaattacaagatacagggagtagcaaacagtcaaaacatgaataaaatcagataactataataaaaatgctaaagaaactgatggaagagatagcaacatgaataatgaaaaaacttcatcacagatatcaaagttacaaaagaggatcacaggaaaacgttagaaatgaaaactata

SEQ ID NO: 635642 - DNA, 484 bp, Homo sapiens
ccttcaccaaatgtgaactggaaccactcaattggctaaggggtaggacagaaaataaaggtgaaggaagatggaattttctttctctcttccagagctaagaaacccttcttctcctgcccttgagtatcaagactctggggttttcggcctttggattctgggactttcatcaccagcttcccagattctcaggtcttcagcctttaactgggagtttaaccttcagatttcgtggttttcaggccttcggtgttggactgagccaggccaccagctttcctggttctcctgcttgcagatggtctatcatgggacttctcagcctctataattgcatragccaatttccctaataaatccccctaattcatatctatttatgcctatatctatatttctctctttttctctgtatcccttctattggttctgtgactctggagaacgctgactaatacaaaagtctagtaaatgaacaacc

SEQ ID NO: 635643 - DNA, 594 bp, Homo sapiens
tcttatagagcaatacatgtgagactcagcagtacaatctaaatacaaattacaaaataaagatgacaaacaaaatcataagcaactaaaataacaacatcagaagaacccagaaattggaaaattatatgtattatatttgtactgcatatgataaagctttaataatartctgaaaattactctcacaaattgataagaaaaacacaaatgacagcaagaattgggtaaatcatgtgaacaggaaattcactaaagcttaattccaaatattaatgaaaaatatgtgaaaaattgtaaaccctactagaatatttaattataaattaatataaaattacctataaaataatgagatataacattagtgattgagatattgacaaaagtagtttttgcagtggtaggttaagaattagtcatttcatcttcgtttaaatctaatatggtaatatttattgggaacaataataataaaaaaaacccttctaattagcaattccagttctgtgaatctattccataaacagtgcaatacaattacataaagtataagtaattaagtataagtaataagtaatttatcaaagtcca

SEQ ID NO: 635644 - DNA, 589 bp, Homo sapiens
agcacaaactgatgaggcaattattttgtgcagagagggatggataaaaaaacactaatcagcgtaggaacaaagtgtgctgtgaaaacctgactaaaataaagtgcatctagttatgatgtagttttaatatattaatgacctattaawtataaaaacaaagggttgacatattcagtttgggtatcattttgttaatatattaaggaagaaaactcttaacataaaatctgaaaaacaaagactttgagcaaaaacacatttaccacaagaataactcggtgatattttataggacacaaattaaaaagtataaaaattaagttgtagactttaattatgacattctagaatattcattaatgttaaatcaagctgcttcaaaacaacggttatcatcatgaagtccatccacttgtacacataaatcttgttaatatgtatacacagttttgtgacatttggagaagctataaaaaccaacacgcatgttatctcacatagtacatgcatttgagttcatgatttcacccataaatggtaaatgcaaatcataaaataattcattcaaaaatatatattgaacttc

SEQ ID NO: 635645 - DNA, 588 bp, Homo sapiens
attttcctgttaccataaccacatgaattatgaatttgcctttggaaagatgtctttctttcccttagggtgagttttattcgatcattagaaacagatgagttccatttaaatgataaagtttctctacaagtaaagacaaagttacagaattctttccattgtttatttccttaatttctcaaaaaaatgttggtaagttataaaaatgaaaaccaagagattatttttaaaatgttttaaaatcatatagctctcagcattataatatcttattaggaaatatttcccttcttcttgttagcaaaaacatatatttttaaaattccctattgttccaccactccaacatatcaactgtctccactatatattttwaaaattttaattaatatgcctatacatattctaatcaactatttttagaatagttttagattttatagaaattttgagaagatggtaaagagggttatcgtacacctctcaccctgtttccctattattaacatcttacattagtatggtatatttgttatggctaataaactaatagtcatatattattattaactaaaagtccacagt

SEQ ID NO: 635646 - DNA, 644 bp, Homo sapiens
tattttaaaaattttaattaatatgcctatacatattctaatcaactatttttagaatagttttagattttatagaaattttgagaagatggtaaagagggttatcgtacacctctcaccctgtttccctattattaacatcttacattagtatggtatatttgttatggctaataaactaatagtcatatattattattaactaaaagtccacagtttattcagattgtctttctttttgcctaatgttctttttctgtcccaggagcccatcctgggtaccacataacacttacttatgccttccttggcccctcttgactgtgatattttttcagacttatcctctatgataaccttgacagttttgagaaatggtggtcagatatttgtagartgccccactattggaatttgcctggggttgtaagttatgggaaggaaggctacagaagtaaagtaccgttttcatcaaattatatgaaggctatgtattatcaacatgaattatgactgttgacattaaccttggtcgtctagttaagggcgtgtttgtcctatttctccatgttttttgcctcctttcccttactgtactcatcggaagaaagtcactaaatgcagccaacatttaaggactgggg

SEQ ID NO: 635647 - DNA, 594 bp, Homo sapiens
gacagttttgagaaatggtggtcagatatttgtagagtgccccactattggaatttgcctggggttgtaagttatgggaaggaaggctacagaagtaaagtaccgttttcatcaaattatatgaaggctatgtattatcaacatgaattatgactgttgacattaaccttggtcrtctagttaagggcgtgtttgtcctatttctccatgttttttgcctcctttcccttactgtactcatcggaagaaagtcactaaatgcagccaacatttaaggactggggattgatacttcctgtcctgggtggcagagtatctacataaattgtttggaattattctgcatgggatatttgctaattctttcccattggtagtttactcaataatgtatgcatatcattatggactcatgaatattttctttgtcctttgggttacaattcagtgccactttgcttattttggtgcccaaagtgtctcaggttaggctactgggaactctttcaggaggcttctggttcctttgacatacccctgtaagtgtatatgttatttttcttttgagccctttcttactttctggcactatca

SEQ ID NO: 635648 - DNA, 608 bp, Homo sapiens
aatgcagccaacatttaaggactggggattgatacttcctgtcctgggtggcagagtatctacataaattgtttggaattattctgcatgggatatttgctaattctttcccattggtagtttactcaataatgtatgcatatcattatggactcatgaatattttctttgtcctttgggttacaattcagtgccactttgcttattttggtgcccaaagtgtctcaggttaggctactgggaactctttcaggaggcttctggttcctttgacatacccctrtaagtgtatatgttatttttcttttgagccctttcttactttctggcactatcaggtactctaagttcatcttgtgtatttcttgtctctgtcctggaatcagataactcttcaaggatccctgatttattttactgaagaatgggatcttagaggctaatatttgggaaattggtgtgcttgtgactacggttatcattatttatagggctgcctagatgacagagcaagtaactaaatgtgtgtataataaaccaaatatatacatatacatctctaaaaatatcttcatatgtaaccatctatacctatattaagctaaaca

SEQ ID NO: 635649 - DNA, 609 bp, Homo sapiens
tgtgtatttcttgtctctgtcctggaatcagataactcttcaaggatccctgatttattttactgaagaatgggatcttagaggctaatatttgggaaattggtgtgcttgtgactacggttatcattatttatagggctgcctagatgacagagcaagtaactaaatgtgtgtataataaaccaaatatatacatatacatctctaaaaatatcttcatatgtaaccatctatacctatattaagctaaacatgagtacatatgaatgtatccaactttaatcaattactacctggaatactctaccctcctccactatgtctttgtaaattcccattccagcagtgagaaatctgtctcccatcgtccattacctgtatatttaattgttcamttccagtctatatgtgtagcagtaccaacattttgaacctgaacccctgttgcctatatatttttgaatgataagaacaatagggtacatgtagttttgcatcctggctttttaatcaaaaattgaccctaaagttaagctaaggatccccagaaatctttgggtaagtgagtcttattcctcttctgcagttctgggctcaggaatgtgttgg

SEQ ID NO: 635650 - DNA, 609 bp, Homo sapiens
tgtgtatttcttgtctctgtcctggaatcagataactcttcaaggatccctgatttattttactgaagaatgggatcttagaggctaatatttgggaaattggtgtgcttgtgactacggttatcattatttatagggctgcctagatgacagagcaagtaactaaatgtgtgtataataaaccaaatatatacatatacatctctaaaaatatcttcatatgtaaccatctatacctatattaagctaaacatgagtacatatgaatgtatccaactttaatcaattactacctggaatactctaccctcctccactatgtctttgtaaattcccattccagcagtgagaaatctgtctcccatcgtccattacctgtatatttaattgttcacttccagtctatatgtgtagcagtaccaacattttgaaccwgaacccctgttgcctatatatttttgaatgataagaacaatagggtacatgtagttttgcatcctggctttttaatcaaaaattgaccctaaagttaagctaaggatccccagaaatctttgggtaagtgagtcttattcctcttctgcagttctgggctcaggaatgtgttgg

SEQ ID NO: 635651 - DNA, 597 bp, Homo sapiens
tgaccctccctcttctttacgtgttcttattttttgtgtacacaattgtttccactctcagaagtttttaccatcctctgatgacagaaataatgtcttattcaagtttatcaagcctgtgttctcccatgactttgcaaaatgcttcctgtatggtaggtactcaaaaaatgtttattaaatkgaatattaaaggtaatcagagcaatgctattgtcctaataacctcaaatagtcccatatccaacctttctccccgagaagcttttcaggacttctccagtccacatggctctctctctttccaacactctgtcagcattttacaactccgcttcataaatgctatctaatacttcatgagtattagattttcagcttatccagggcacagcctctgccacatttttcccctttggagtccttataagtgtctgccatggcgctctccttatagtgtaagtcaatagaacttataggttgcttactaacctggactccagcagatttttactgagtcaaaatgacaatcaaaatgttcatgttgaacaaatgaaaaatatgtctaataggtgagaaaaaaatcagataaagtat

SEQ ID NO: 635652 - DNA, 632 bp, Homo sapiens
accccccactaagaatagaacaatagaactagatagaataattatcctggtgattayttaattttttaatgtgggatattttaaaagatttctatttttgtactagtgttccatctgtacttatgccattttaagtatccttagtctctgttctcttattaaaccttttactattgggtatgtcaattgttagtggtattctttctcccctgtattaactataacaatcaatgagctgctccaggttcctattttcctctgtcttacatttctcagttgatttatttctactttgccacacatagcgcctttgcacatcagtcttccacctttgaccctgcttctatttcagtttcgatgtttacttattaaaatatccattgcctttcttcttgcagaaaattttccagtcattgcttggtttttatgaagctcagtctgaaacatactcttctaaatgtgctggtgatagaggattctcccaatttttatgttttagacttttttccccactgttctgaaagtaaagttcaaattgtttagtgggttgttttttgattgtttggcttggtagtggagggaggaattgtgtgtcctcttgcagtttgctttccttttgttctacagcctca

SEQ ID NO: 635653 - DNA, 632 bp, Homo sapiens
accccccactaagaatagaacaatagaactagatagaataattatcctggtgattacttaattttttaatgtgggatattttaaaagatttctatttttgtactagtgttmcatctgtacttatgccattttaagtatccttagtctctgttctcttattaaaccttttactattgggtatgtcaattgttagtggtattctttctcccctgtattaactataacaatcaatgagctgctccaggttcctattttcctctgtcttacatttctcagttgatttatttctactttgccacacatagcgcctttgcacatcagtcttccacctttgaccctgcttctatttcagtttcgatgtttacttattaaaatatccattgcctttcttcttgcagaaaattttccagtcattgcttggtttttatgaagctcagtctgaaacatactcttctaaatgtgctggtgatagaggattctcccaatttttatgttttagacttttttccccactgttctgaaagtaaagttcaaattgtttagtgggttgttttttgattgtttggcttggtagtggagggaggaattgtgtgtcctcttgcagtttgctttccttttgttctacagcctca

SEQ ID NO: 635654 - DNA, 515 bp, Homo sapiens
atttaaaataaagttgcatcataaaagtatgcttacatatatatttcagttcatatgtacatacacacatttaagttataagagtaaattaagtgcaaatgaggaaaaaaagagtaagaagtaataagactatacttataatcagggttaagaaacaatatttttccaaatacaatgcaacatttggttaactatacattttcgatgttggcagctctatgagtatataaattcaaatgtctctcctacagatgaggcatagggccccctacattgtacattagagaaagtgagttccttaaaaatatatcctattttctaatttttaggattctttagttgtaaaccacacacaccaaatctggcaaatctgaataatagaaagaatayattgtatttatgtgtagaggttaaaataattgctgagaaagctgaaaaaaaatctcacaattagaacaggacccaaataactacaataatttgtgaagaagaactaaagtttagttaattcatag

SEQ ID NO: 635655 - DNA, 478 bp, Homo sapiens
ttccttttgttctacagcctcaaattcctttcctttggcttctttttcccttttaccactgttaaaagaaaaactttcaccgaattaaatttaaaagagtttaactgagcaaagaacaattctcaaatctgtcagcctctccagccagagtaggctcwgagatgccagcacagccacatggtagaagaaggcttttggacagaaaaaaggaaagtgacatacagagaacagaagtgagatgcagagacagccaggttgggtacagctctgtgtgtgccttatttgaacacagtttgaacagctggtcactttagattggccaaaacttggtgagattggcacaagatgtagactacagtctgtttacacctccatttaggttatagttcacaatgtacagagaaacctttaggctgaacttgaaatatgtaaggaggcagcgttaggctaaacttgatttaacaccattcaattatca

SEQ ID NO: 635656 - DNA, 553 bp, Homo sapiens
agttatcccttgatatggagacagacaatcactgtcagcaagattacagcctgagcatgtatagaactgaactatatgataacaatggcacagtaggagaaggcaaattggcaatgaaccattatgaagtcatttcactacatatgaagtggtgtatcagtatataaagggggggttcagattattttgaaatgtatattgcaagccctataacaattattttaaaacttcccaaatatgtataaataatattaataaataaattaaaaattagtagaaacatttaaatggaattattaaaaagttcacttaaaatcagaaagtgtaggagaaaaacaatgatttaatgartagaaaacagtgagcaaaatggtaacttttaagccaactttatcaataatcattataaatggagatgttctaaaccacttaaaagataaaaattgtcaaactgtgtacaaaaggaaaacccatctatatgttgtgcacaagaaaacatcattaagacgatatttagacagtttaaagggaaaatagggaaaaataattaatt

SEQ ID NO: 635657 - DNA, 553 bp, Homo sapiens
agttatcccttgatatggagacagacaatcactgtcagcaagattacagcctgagcatgtatagaactgaactatatgataacaatggcacagtaggagaaggcaaattggcaatgaaccattatgaagtcatttcactacatatgaagtggtgtatcagtatataaagggggggttcagattattttgaaatgtatattgcaagccctataacaattattttaaaacttcccaaatatgtataaataatattaataaataaattaaaaattagtagaaacatttaaatggaattattaaaaagttcacttaaaatcagaaagtgtaggagaaaaacaatgatttaatgaatagaaaacagtgagcaaaatggtaacttttaagccaactttatcaataatcattataaatggagatgttctaaaccacttaaaagataaaaattgtcaaactgtgtacaaaaggaaaacccatctatatgttgtgcacaagaaaacatcattaagaygatatttagacagtttaaagggaaaatagggaaaaataattaatt

SEQ ID NO: 635658 - DNA, 592 bp, Homo sapiens
tggaattttgtcctgttcattcctgtatctccagtccctagaagaatgcctgacacatcataggcattcaacaaataatacctatcctggaaggtgagatttgtatgtgaaatattttgttttattattattattatactttaagttctagggtacatgtgcacaatgtgcaggtttgttacataagtatgcatatgccatattggtttgctgcactcatcaacttgtcatttacattaggtatttcttctaacgctattcctcccccagccccccaccccctaataggccccagtgtatgatgttcatgtttgggaatgaatttatagctactacaccagaagtacaatgaataaaagagaaaagtgttattggactttataaaaatttcaacttttgctctgcaaattattgtttagataatgaaaagataagccacactctaaataaaaatatttgcaaaatccatatctggatgaaaggactttcagccaataaccataaagaatattaaatctcaccaataagaaagcargtaaccactttctaaaagttgtcataaatttgaaaagatactacaccacagaaaata

SEQ ID NO: 635659 - DNA, 592 bp, Homo sapiens
tggaattttgtcctgttcattcctgtatctccagtccctagaagaatgcctgacacatcataggcattcaacaaataatacctatcctggaaggtgagatttgtatgtgaaatattttgttttattattattattatactttaagttctagggtacatgtgcacaatgtgcaggtttgttacataagtatgcatatgccatattggtttgctgcactcatcaacttgtcatttacattaggtatttcttctaacgctattcctcccccagccccccaccccctaataggccccagtgtatgatgttcatgtttgggaatgaatttatagctactacaccagaagtacaatgaataaaagagaaaagtgttattggactttataaaaatttcaacttttgctctgcaaattattgtttagataatgaaaagataagccacactctaaataaaaatatttgcaaaatccatatctggatgaaaggactttcagccaataaccataaagaatattaaatctcaccaataagaaagcagrtaaccactttctaaaagttgtcataaatttgaaaagatactacaccacagaaaata

SEQ ID NO: 635660 - DNA, 573 bp, Homo sapiens
agcacatcatgctaagagaaataagccagtagcacacagtagcacacacatacaaatcaactactgatcccacttatatgaggtaccttgaatagtcaaaattatagagacagaaagtagaatggtggttgccagagggtgggggcaggagggatggggcatcactgttgaatgggtatagagtttcagttttataagatgaaaggagttacagagatggatggttagtgatgctgcatattatgaatgtatttaataccattgaacaatatcctggaaaattgttaagatggtaaattttatgttaggtgtattgcctcacaatagaaaattgggaaaaaattcacaaattaataaaagaactatcaayagaactgaaaatttggctaagtgtatgaagaaatggttgataaaacaatgtatactaatgcctttaaaacttatgaaaagttacaattactatataagaacatattttgtaaatatgattacacactctttcttaaattataagatttaaaatatcagttcttttagcatacagtgttggtagggacttaggaaaatagaccc

SEQ ID NO: 635661 - DNA, 610 bp, Homo sapiens
tctgtttggctgtataaaatagtgaaatttctgtctttacaatctcttagaagattgcctgtgatgttcacattttggtttaatgcttatccaaaaataaaattgttgtatttctcttttacctctgttaagagctttctggattgggaaactatttttttaattatattttctcaacataatcataggaataaacatgagcatgctaaaaatcataattatttgtatgggttgaattgtgtctccccactagataaaggaatgctctaatcccctgtaactgtaaatgtgatctaacttgtgatctaatttgaaaatgtgatgatttaaaatagtgaaaaaaattaggaaaaagaaaaatatctataaaaattaacacataggatagcatattacaaggatagattgtgggcaattgcagatgatcataatcccaaaagacacaatccagaacaccataattccaaatgttgaaatcccaaaaatctarttctggaaaaaataacttaaaattatttgaaagatgtttatttacatttaaaaataggatttgagaaacatataaaacatgacagaacactttaagggcccctttacacaataaaacaga

SEQ ID NO: 635662 - DNA, 636 bp, Homo sapiens
ggcccctttacacaataaaacagacaataatagcattcttaattttgtargcataaacacttatgtatactaatgatagtcacacgagaataagttacaagcagatgaacagtattcataaagaaataggtcaaaaaggaaaatgcataaatacatgtcatcatgattggtacttgtgagcatgcagctttataatttcagtcatctgaaatactgtgatggacattctaagtcctttgagttcatcaaaactatgatgagccaccaccacatcagttacccaaagaaccaagatcttgagaaattgtatctttcacaaatgccgatgttcaaaaaggatattgcttcatttactgaggaaatgtcaacatttttatgtacatgcacaatgtttacacacaaaatcagtgctgtgataatgtacttttatgtagtcatttgcaaaaaaaaatgcatgaaacaaattagaattctaaaagtctttaaacaatttacacctccagcattggaaatgatgtgaagatgaaatacatagcatagtgaattgtaaagaaaaatatgataatttaaaatattaaaaaatactacgaaaaaattatatttaaaaactgacatgaaaaagtgtattacaggaat

SEQ ID NO: 635663 - DNA, 636 bp, Homo sapiens
ggcccctttacacaataaaacagacaataatagcattcttaattttgtaggcataaacacttatgtatactaatgatagtcacacgagaataagttacaagcagawgaacagtattcataaagaaataggtcaaaaaggaaaatgcataaatacatgtcatcatgattggtacttgtgagcatgcagctttataatttcagtcatctgaaatactgtgatggacattctaagtcctttgagttcatcaaaactatgatgagccaccaccacatcagttacccaaagaaccaagatcttgagaaattgtatctttcacaaatgccgatgttcaaaaaggatattgcttcatttactgaggaaatgtcaacatttttatgtacatgcacaatgtttacacacaaaatcagtgctgtgataatgtacttttatgtagtcatttgcaaaaaaaaatgcatgaaacaaattagaattctaaaagtctttaaacaatttacacctccagcattggaaatgatgtgaagatgaaatacatagcatagtgaattgtaaagaaaaatatgataatttaaaatattaaaaaatactacgaaaaaattatatttaaaaactgacatgaaaaagtgtattacaggaat

SEQ ID NO: 635664 - DNA, 594 bp, Homo sapiens
tctgtaagagctggtggacattcacaaacattaactatataatgacatcttgcatcatgttgaatmgttgcatttatttatttatctattttttaggacatggttctcattggagaatatgttcacattcctttctgctctttctgaaactcttctgtgattcagtataaaacaacctaagtgtcccatattaaatcttcccatcttctgtgtcatgcttctatactgttttgggtacaaagaaattcatttagcatgcatttacatacagaccacaaatttgctggaaacaaaattgataagtgattggtttccaagatggccaaataggaacagctcctgtctgcagctcccagtgagaccaacgcagaaggtgggtgatttctgcatttccaactgaggtacccagttcatctcattaggactgcttagacagtgggtgcagcccacagagggcgagctgaagcagggtggagtgtcgcctcacccggaaagtgcaaggggtcaaggagctccctctgctagccaagggaagccgtgagggactgtcccataagagacagtgctatctggcatagataccatgcttttccc

SEQ ID NO: 635665 - DNA, 564 bp, Homo sapiens
aagacaccttccagcaggggtcaaaagacacctcatacaggagagctctggctgccatctggcaggtgcccctctgggataaagcttccagaagaaagaatgggctgcaatatttgctgttgtgcagcctctgctagagatacaggcaaacagggtctggagtggacccccagcaaactctagcaaacctacagaagaggggcctgactgttaaaaggaaaactaacaaacagaaagcaatagcatcaacatgaacaaaaaggatgaccacgcaaaaacactatatgaaggtcactaatagcaaaaaccaaagatagttaaatccacgaagatgaggaaaaaccagcrcaaaaatgctgaaaattccaaaacccagaatgcctcttctcctctaaaggatcacaactcctcaccagcaagggaacaaaactggaaggagaataagtttgatgaattgacagaagtaggcttcagaaggtggttaataacaaactccaccaagctaaaagagcatcttatagcccagtgcaaggaagctaagaaccttgataaaaggttaaagga

SEQ ID NO: 635666 - DNA, 409 bp, Homo sapiens
tgcattggcctgaatggaaaaaacaaactttattggtaacaccttgaaagtcacttttagaagccttgattgcacctaatttcaaatatgtcgttatggtttgaggattctattaaaatycattttattctgcatacagaaaataacaagataatgtttctgcctaacataatgcaactatcctgtaatttttttcggattttagacgttagagatgttagattttagggatttaggctagagggattttgttctttagggatttcaatatttgggactttggcattcaggattgtgtcttcaggataggattattatccaaaatctgtatgctttttgagaggtcctcgtgagtttaaataatacagtcaatgaagatcctgtcaagaagatgacattgtgtgaagat

SEQ ID NO: 635667 - DNA, 409 bp, Homo sapiens
tgcattggcctgaatggaaaaaacaaactttattggtaacaccttgaaagtcacttttagaagccttgattgcacctaatttcaaatatgtcgttatggtttgaggattctattaaaatccattttattctgcatacagaaaataacaagataatgtttctgcctaacataatgcaactatcctgtaakttttttcggattttagacgttagagatgttagattttagggatttaggctagagggattttgttctttagggatttcaatatttgggactttggcattcaggattgtgtcttcaggataggattattatccaaaatctgtatgctttttgagaggtcctcgtgagtttaaataatacagtcaatgaagatcctgtcaagaagatgacattgtgtgaagat

SEQ ID NO: 635668 - DNA, 590 bp, Homo sapiens
agagggaatgtatttctggcaggtgaaagatcaagtacaagactttgcagtggaaaccaatcttatttgaggaacggcaaacagatcaataaagatggagaggatgtgagcaaaagggaaaatagaaagaaattaagttagggaggaaacaggaaggtcaaatcgtgtaatgtctyatggcttttaacttagattttgctcttagagaagtgcaaaatttaagcagaggagagacacaatctggcttatatttcaaaggataattccggctgctgcgttgaggatgaactaaaaggcagcaagggtgaaagaagagaaatcacgtaggaggtaattgctgtaattcagataagaggtgatgaaggctcacagcagaatgatggcacaagtgaggagtcatcagattctggacttatcttgaatccaatggaattgactattgatgagatatgggatatgaaacaaaatggagaatcaaagaggaaaccaaggtttgggggctagaaaatctaaaacatacaaaaatccaaaaaataaaaaataaccaattgcattgtcgctgaaatagagaagctctgggaaagtgaatt

SEQ ID NO: 635669 - DNA, 584 bp, Homo sapiens
tcttgtgtgaaaagggaaaaatagcaattttgttttatagttaatcctctgacaccctcaggatcaacagggaagtccacacaaccttttctgggsatcttgatatgacttattaaagatgatgggggggaagaaaatgaaaacaatctaatgaaaccaataaggaattctgtgccatagaagttaccaacaagcccatcatgaagcaacagtatttacagttgaagtgcttatgtgctgcctataaacaagctcaaaacaatgcatctatttctcatctacttttagcttctttcataaatgagacacttacacaacgattggtccagagtaggggaggaaaaggaatttgaggggagggatgtatctgcaaaagttttgaagcgtctatcacaccctagacagttagctgtgcaccatgtacgcaccattttatttaatctaaccaataacccagtgaagttggtattatttctctcttgattgatgaacaatttgatataaataggtttatgaatatacctaggatgtagtataaaatactcagtgaattccaatttttaagtatgaggaaactgtggagc

SEQ ID NO: 635670 - DNA, 584 bp, Homo sapiens
tcttgtgtgaaaagggaaaaatagcaattttgttttatagttaatcctctgacaccctcaggatcaacagggaagtccacacaaccttttctgggcatcttgatatgacttattaaagatgatgggggggaagaaaatgaaaacaatctaatgaaaccaataaggaattctgtgccatagaagttaccaacaagcccatcatgaagcaacagtatttacagttgaagtgcttatgtgctgcctataaacaagctcaaaacaatgcatctatttctcatctacttttagcttctttcataaatgagacacttacacaacgattggtccagagtaggggaggaaaaggaatttgaggggagggatgtatctgcaaaagttttgaagcrtctatcacaccctagacagttagctgtgcaccatgtacgcaccattttatttaatctaaccaataacccagtgaagttggtattatttctctcttgattgatgaacaatttgatataaataggtttatgaatatacctaggatgtagtataaaatactcagtgaattccaatttttaagtatgaggaaactgtggagc

SEQ ID NO: 635671 - DNA, 584 bp, Homo sapiens
tcttgtgtgaaaagggaaaaatagcaattttgttttatagttaatcctctgacaccctcaggatcaacagggaagtccacacaaccttttctgggcatcttgatatgacttattaaagatgatgggggggaagaaaatgaaaacaatctaatgaaaccaataaggaattctgtgccatagaagttaccaacaagcccatcatgaagcaacagtatttacagttgaagtgcttatgtgctgcctataaacaagctcaaaacaatgcatctatttctcatctacttttagcttctttcataaatgagacacttacacaacgattggtccagagtaggggaggaaaaggaatttgaggggagggatgtatctgcaaaagttttgaagcgtctatcacaccctagacagttagctgtgcaccatgtacgcaccattttatttaatctaaccaataacccagtgaagttggtattatttctctcttgattgatgaacaatttgatataaataggkttatgaatatacctaggatgtagtataaaatactcagtgaattccaatttttaagtatgaggaaactgtggagc

SEQ ID NO: 635672 - DNA, 584 bp, Homo sapiens
tcttgtgtgaaaagggaaaaatagcaattttgttttatagttaatcctctgacaccctcaggatcaacagggaagtccacacaaccttttctgggcatcttgatatgacttattaaagatgatgggggggaagaaaatgaaaacaatctaatgaaaccaataaggaattctgtgccatagaagttaccaacaagcccatcatgaagcaacagtatttacagttgaagtgcttatgtgctgcctataaacaagctcaaaacaatgcatctatttctcatctacttttagcttctttcataaatgagacacttacacaacgattggtccagagtaggggaggaaaaggaatttgaggggagggatgtatctgcaaaagttttgaagcgtctatcacaccctagacagttagctgtgcaccatgtacgcaccattttatttaatctaaccaataacccagtgaagttggtattatttctctcttgattgatgaacaatttgatataaataggtttatgaatatacctaggatgtagtataaaatactcagtgaattccaatttttaartatgaggaaactgtggagc

SEQ ID NO: 635673 - DNA, 622 bp, Homo sapiens
tcattaagcaaaaagtatatttgaaatcaattttacagattaagactaatttcaggaaggactgtacaaaaggaaaattaagaaaataggtcaacttaaaggagaggcaaagttaaaaattattatcaaccatttccccaatgacttgaattacctctggataatagcaatatgcttaaaacatagcatattatgtttctgaacgtaagtgcattataaaacatgatatactttttggaaacataagtgtattatttttgtgcttcctaacaagttcccacaaatttagcagtttaaaacaagtcagttattattaatatttcacaggtgctggggattgagaatccaggcaaaagaattagctgcaccctctcctgagggtctcataaggttatagtcaaggtgttgackgggctgcatcctcatctggaggttcatctggaaaggaatgtccacttccacagttactcaaggtttggcagaattcatttccttgctgctatgggactaagggtcatggattcttttggactgtccgctaggggttgtcttcagcaattacaggccacccacagctccttgacatacgaacacttccatcaagccaataagaaaattctct

SEQ ID NO: 635674 - DNA, 268 bp, Homo sapiens
ctctttcccattaaaatatacggcctgagggctcatattttgttttgttcattgctctatttctagcatatagaatagtgcatgatataaagtagaagctcagtattatttcattcattcaatgaatagatgaatcaaaacytaaaaagttgtatcataatagcaaagcatagaatatttagctggtttgccttagaactgtgttaaaggataaacttaggcacactgaaattctaaagagtttacctgagcagatggggactcatga

SEQ ID NO: 635675 - DNA, 558 bp, Homo sapiens
tgaagcagtagccttttttgggttgttccagtggaaagtccctagttagaggttagttggtgatttctgacgggttaagcttaagttttgttttactatttatactgagttgggtttctgtttgcttacataagaacacagggctctggagatacttcaacygatcatgaatagtctcccaattaattatttgaacaattggaagtttatgacagcccttgacagcagtaacatagcttaagcataccctgaaaatgaccctatggtctaagaagaatatgtgtttggagtcccaagccaaggaatcctggagtggccaaccctgagattcattccttatctatgaaggacatctgaccctctgacccatcccttggaatgcaggttatatagggaattaaggccctttgttttggattagatagagggtgctaggtggggcttgctagatggaggtggctaaataaaaatgctatacaaactgcatgcttttttacaaacagtagtggttctcctgtccagtccactgccatggggccatccctgtatataagtccc

SEQ ID NO: 635676 - DNA, 461 bp, Homo sapiens
agcggtcatctgagcagttttctggctggacagatctttatgacacatttcctgatttgattagcacatgagggcaaaactttggcaaggttaatgagttgctcccagatatcaagatggaaaataagttatatttaatacctggctacttactgtctaatmaaaaacttatccatatcatgcaaatctggcataaaaatgatttcaggcctgaagacttgaaagaccacacctcatgcttttacaaaggacgcacagtgttggttatttgaatttagatcactgtctgaatctcctactggcattctttgcttacttgttctacttttgacttcctaaggccccaggtatctgatgattaccatcattttaaaatcactttaattttgctttttaaaattccctattcatcccttgctgctattaattaataccagaggaccacttacttttgttgctgc

SEQ ID NO: 635677 - DNA, 578 bp, Homo sapiens
agggtagagttaaattccaagaaaatttatccaggttaagaatttctagaattttattgtatattgaaattattttctttttttgcttwttgtttagttggaaatatttcaaatgagaaaaactaccatgtaccaatgtaatcagacataacaattattaacattttgttatatctgtaacacatctttatgttagatactatttaaaagttccctgtgaagatgaatgacacattttccattttgttttatatttttgcattaaagtttatttactttgatactactgttattaaaccatttttcttggtaattatttatatgatacatagtttctatacttttctctcaaactttgccattatcttttagatatatttctagttaagtgtatatagctgagtttataatatctattttgagaatctctgcctcttaaaaggtcaagttacatatttaaacttatatctgctatcttaatttatgttccccagtagccattcttttttgtttgtttatttctgtttgaaattgaggtataattcacatgcagtataatttacaattttggtgtgcag

SEQ ID NO: 635678 - DNA, 622 bp, Homo sapiens
ataccatctatgtttgtgtgaatacactttttggtgtttatacaatgataagatttcttaacgatgcatgtcccagaatgtagccttgtcagtaagtaacgcacaactcaatttcaataattttaaatttattgaggtttgttttatgaccctgtaaatagtccatcctgatgacttctccatgtacatttgaaaaaatgtatatgtgctgttgttggtgagggccaatcctttgatggttttgttgaattcttctgtatcttcattctgatcaatttttgcttcttatgttttgtacttctgtttggtgcatacatatttagagctaacatatgcttgtggattgattttctaaatcattttgtaatgccccatttgtctctattaatattcaatttgttagtattttatttaaggtttctgcatctatatccataagggatatgattaattaattatctgtaaatgcctaagtctagttttagtatcagaataatactctgtccataaaataggccttcctcttatgttgaagagcttaaggagaattgctattatttattaactgacytaattcacccataatgtcatctaggcctggaattttctttgtagaaagcct

SEQ ID NO: 635679 - DNA, 609 bp, Homo sapiens
tattttttctatatttataaattgaagtaaatcttaacacccagtttgtgcatttgaatcttgtgttactatttcttcttgmcgttgttttccatcttaagcatacatattttattgtcttgtattgccgtttttattttccaattgttatgtctcaagtacaatgtgctggacaccgtccaacatgttttatgaatatcaagtcattctatgataaatcctgatctgggcccctcagtgggctggcctgatcaggccacacaatcccaacttggggtcaccccgtataaagcagaggcagctggacagctttttccaaaacattcacccatgtcttatagctggccacgcccagcaaacccgatgatacctacacagccacgcagtaacactcggaggctttgccgtactaaatgcgagcagaggtgattcatgagattgtggctctaaaatccacccccttcctttcccctcatatctcatcttggagaggtactggcatttccttcttgatagtaaaaatgttcagactcgatctttcagtttctgacagtattttctcttaagcaaatatcacaactctactgtctcccgttcttggagtgatca

SEQ ID NO: 635680 - DNA, 469 bp, Homo sapiens
gaattcgatgttttgcaaggatacttggaactcattctaatgatattctgggatagccctgaaatatagtcataactgtttctacagtaaacaaagtaaagatgccagaacatgctggcatagtattaaaggcaagtgaactcaagtggttacatrtatcaatatggatatcttaatgccagtcaaataaactatcacttgactgtgctctacaggagggtccagagaacattttcttcactaatgtgctaagaaagccattgatgatgtggacacctgcatttctgagaatctcagtaatggctttcctttgtaggtctgtgttttcagtggaagaaactgctgtgcaactgagttttctattatcagcaggaatgcttggatccctaaatggcagaggccaagtatcagtacttaaacatgaaaggtaggatggtcattactgccactatagaagtcaaggctacag

SEQ ID NO: 635681 - DNA, 601 bp, Homo sapiens
ttggaactcattctaatgatattctgggatagccctgaaatatagtcataactgtttctacagtaaacaaagtaaagatgccagaacatgctggcatagtattaaaggcaagtgaactcaagtggttacatgtatcaatatggatatcttaatgccagtcaaataaactatcacttgactgtgctctacaggagggtccagagaacattttcttcactaatgtgctaagaaagccattgatgatgtggacacctgcatttctgagaatctcagtaatggctttcctttgtaggtctgtgttttcagtggaagaaactgctgtgcaactgagktttctattatcagcaggaatgcttggatccctaaatggcagaggccaagtatcagtacttaaacatgaaaggtaggatggtcattactgccactatagaagtcaaggctacagtgacaatcaatatgctacaactgtcaataatatttggtagtagctaacaggccatggtattcctagaagacaactagacagctgtttagggtattgatcaaattatataatcagagaaatgttaagagctaagtagcagaagactgacatcgaatt

SEQ ID NO: 635682 - DNA, 602 bp, Homo sapiens
ttggaactcattctaatgatattctgggatagccctgaaatatagtcataactgtttctacagtaaacaaagtaaagatgccagaacatgctggcatagtattaaaggcaagtgaactcaagtggttacatgtatcaatatggatatcttaatgccagtcaaataaactatcacttgactgtgctctacaggagggtccagagaacattttcttcactaatgtgctaagaaagccattgatgatgtggacacctgcatttctgagaatctcagtaatggctttcctttgtaggtctgtgttttcagtggaagaaactgctgtgcaactgagttttctattatcagcaggaatgcttggatccctaaatggcagaggccaagtatcagtacttaaacatgaaaggtaggatggtcattactgccactatagaagtcaaggctacagtgacaatcaatatgctacaactgtcaataatatttggtagtagctaacaggccayggtattcctagaagacaactagacagctgtttagggtattgatcaaattatataatcagagaaatgttaagagctaagtagcagaagactgacatcgaattc

SEQ ID NO: 635683 - DNA, 602 bp, Homo sapiens
ttggaactcattctaatgatattctgggatagccctgaaatatagtcataactgtttctacagtaaacaaagtaaagatgccagaacatgctggcatagtattaaaggcaagtgaactcaagtggttacatgtatcaatatggatatcttaatgccagtcaaataaactatcacttgactgtgctctacaggagggtccagagaacattttcttcactaatgtgctaagaaagccattgatgatgtggacacctgcatttctgagaatctcagtaatggctttcctttgtaggtctgtgttttcagtggaagaaactgctgtgcaactgagttttctattatcagcaggaatgcttggatccctaaatggcagaggccaagtatcagtacttaaacatgaaaggtaggatggtcattactgccactatagaagtcaaggctacagtgacaatcaatatgctacaactgtcaataatatttggtagtagctaacaggccatggtattcctagaagacaactagacagctgtttagggtattgatcaaattatataatcagagaaatgttragagctaagtagcagaagactgacatcgaattc

SEQ ID NO: 635684 - DNA, 625 bp, Homo sapiens
gatgctgagcccctcatatatcactgttgctcagtctagagtttagttacttggctaaggttggtttcttagttttcacaaatgcaatgtgataagatagtagtaactaaaattgggtgaaggtcatataggaactctctgtactatcgttgtaacttgtctgtaaatctaatattccaaaataaatagtttattacaaaagagtcaatggcatgaataaaatgagaataaacctcatttagtgaaaatatctgttcttttcaagataagtatgattcaagtactgagaaggcccattggraaatttccttttactttttcatcttttaaaaatttctgtttggttagccaagcactgtttaaccaagagttgtcatgatttaaatatatcagtccatacatttagatatccaaacatttttttcttgatattaggttctattctaaaaaataatattttcatcaaaatgtgcatcaaaacaacctagttaaatagatctgaatatttctgagagaagagtagaaataagctcaatatagcattgatttcactatgcaatattgagcatattatcctcaaatgtatatttttatgctgtcaatgaaatgaaataaatgtatattt

SEQ ID NO: 635685 - DNA, 608 bp, Homo sapiens
agttctcctgcctcacacgataaccggtgttctgatttttatcacyatagatgagtttgacctattcttaaacttaatatacacagaattataaagtatatatatttctctgcccggtttcttttacacagcatgtctgtgagattcatccatgttgtcaaatgtacctgagtttattccattttattgctagatcatgttccattatataaatagagcacaatatttttttccctttctctggatagacatttgagttatgtcatgttttaggctattatggataaaccatgcatggatattcttttgtgatgctttttgtggatataagcttttacttacaaaggaaactgtttggaatggaaattctgggtcatagtatggggcacaatgtattacattttataagaaactttcaaagagttttccaacacagttgtaccattgttaacatttatcagcaatgtatgagagttccaattgctctacattcttttcaagatttggtattgatagtctttttaaactgaaacggtatactgagggtgaggcaatatcttctggtttttcattttcaattatctgataactggatttggagtagtatc

SEQ ID NO: 635686 - DNA, 608 bp, Homo sapiens
agttctcctgcctcacacgataaccggtgttctgatttttatcaccatrgatgagtttgacctattcttaaacttaatatacacagaattataaagtatatatatttctctgcccggtttcttttacacagcatgtctgtgagattcatccatgttgtcaaatgtacctgagtttattccattttattgctagatcatgttccattatataaatagagcacaatatttttttccctttctctggatagacatttgagttatgtcatgttttaggctattatggataaaccatgcatggatattcttttgtgatgctttttgtggatataagcttttacttacaaaggaaactgtttggaatggaaattctgggtcatagtatggggcacaatgtattacattttataagaaactttcaaagagttttccaacacagttgtaccattgttaacatttatcagcaatgtatgagagttccaattgctctacattcttttcaagatttggtattgatagtctttttaaactgaaacggtatactgagggtgaggcaatatcttctggtttttcattttcaattatctgataactggatttggagtagtatc

SEQ ID NO: 635687 - DNA, 535 bp, Homo sapiens
ctattcttaaacttaatatacacagaattataaagtatatatatttctctgcccggtttcttttacacagcatgtctgtgagattcatccatgttgtcaaatgtacctgagtttattccattttattgctagatcatgttccattatataaatagagcacaatatttttttccctttctctggatagacatttgagttatgtcatgttttaggctattatgrataaaccatgcatggatattcttttgtgatgctttttgtggatataagcttttacttacaaaggaaactgtttggaatggaaattctgggtcatagtatggggcacaatgtattacattttataagaaactttcaaagagttttccaacacagttgtaccattgttaacatttatcagcaatgtatgagagttccaattgctctacattcttttcaagatttggtattgatagtctttttaaactgaaacggtatactgagggtgaggcaatatcttctggtttttcattttcaattatctgataactggatt

SEQ ID NO: 635688 - DNA, 363 bp, Homo sapiens
agcaaccctgcatcgagaaagtttattgacaccatttttccaatggcatgtgttcacttagtgtctccgtgtcacattttggtaatttccacattatttcaaaccatatatatatatatatgttakggtcatctgtgatctttcatgttactattggaattgctatggggcaccatgaactacccacatataagatgcggaataataaataaatgttgtatgtgttctgactgttacactgtccgactgttcactgtctccctctccttggacattcctattccttgagacacagcaatattgaaattaggccaatgaataactctgcaatggcctccacgtgtttacatgaagggaagggtc

SEQ ID NO: 635689 - DNA, 647 bp, Homo sapiens
ttatttttatacctgttaacagaacatccgttctgcagcctgtggatcagggagtaattttgacattctaatcttattatttaagaaatatatttcataagggtattgctgccaaagatagtgattcctctcatggatctcggtgaaataaattgaaaaccttttagaaaggattcaacattatagatgccattaagaacatttttgactcatgaaagggggtcaaaataccaacattaacagaagttagaagaagttgagtccatcactcatggatgactttgaggggttcaagacttcagtggaggtagttaactgcagatgtggtaaaaatagcargagaaccagaattagaagtagagcctgtgatgtttctgaattgctttaacctcattatttaatttactggacgaggagttgcttcctatggatgggcaagaaagtggttcttgaggtggattctactcctagtgaagatgctgtgaacattgttgaaatgacagcaaaggatttagaatgttacctaaatttagttgataaaacagccacagggtttgagaagattgactccaatttcgaaagaacttctgctataggtaaaatactatcatacagcatcacatgttacagagaaatctttcatgaaa

SEQ ID NO: 635690 - DNA, 647 bp, Homo sapiens
ttatttttatacctgttaacagaacatccgttctgcagcctgtggatcagggagtaattttgacattctaatcttattatttaagaaatatatttcataagggtattgctgccaaagatagtgattcctctcatggatctcggtgaaataaattgaaaaccttttagaaaggattcaacattatagatgccattaagaacatttttgactcatgaaagggggtcaaaataccaacattaacagaagttagaagaagttgagtccatcactcatggatgactttgaggggttcaagacttcagtggaggtagttaactgcagatgtggtaaaaatagcaggagaaccagaattagaagtagagcctgtgatgtttctgaattgcttyaacctcattatttaatttactggacgaggagttgcttcctatggatgggcaagaaagtggttcttgaggtggattctactcctagtgaagatgctgtgaacattgttgaaatgacagcaaaggatttagaatgttacctaaatttagttgataaaacagccacagggtttgagaagattgactccaatttcgaaagaacttctgctataggtaaaatactatcatacagcatcacatgttacagagaaatctttcatgaaa

SEQ ID NO: 635691 - DNA, 534 bp, Homo sapiens
gctatcaaccatttgaatctgaagaaatgctactactaccactaagcctgtttcgctgcagtttgaaatgccctaatgtttttttttaaaaaatttactctagaaactcttaaaagagtaaagaaaatagcacaatatcctcacctgacacctcaccagcttcaacacatatgaatattttgccaatcatgtttctctagaatgcttttttattcctaaaatattctaaagaaaatcccaaatatgtaatttcagtgcatagactgttttacctgtttatacattttctgacccactgtggatgctcagtattgcggctattgttattatygcccttcaagttttagcttgcatgatgcctttgtgaaactttttgatacattccatctgtagggattcagtctgacacaccattatctctccagttcctggtagtgttataaaaactctgtcaatatacgatgagctttttagtttattcatctattcactctgtataaaactactaagcaaattcaggattgatcagttctt

SEQ ID NO: 635692 - DNA, 588 bp, Homo sapiens
ttcatgcaataccctcttaaagcttcatacctcactttaagtaaaaaccaaagtcctgacaataacttatacataagaaagccattcagatctattttcctaggacagtccaagttagtgcctgcaacctctgtgtaattattaatagcacccccttacatcctttcatgagtcctgttcaaacggtaagtaatggccaccttatttatgaggcactccataatctgacccctataacctctcagatctcagctcccactacyccacgcctgcttcttctccagaaacacaagctctgttcctcacacagatgaggcccaggcccacctccaggcctctgcccttgcagttacccctgtccggaatgcctttccttctaaatccgcacagcttacttcctcacttctttcaggtttactcagtcggatctccttgtccatcatatcagtcacagtctactcaaaacagaaagctcatgccaggtttttaaagagataatttaatagaaaaagtgttatatgggtataaagacttgttaactaagtgactgcaaaaggctccatgaaaacacgaaagtatcacggaggt

SEQ ID NO: 635693 - DNA, 572 bp, Homo sapiens
ggtgtaccctttgaaagagatttctgactttaatgaaagcaaatgtctctgggcttaaataacatttctagagtcaaaatttctttggaactaagcctttgcttagttcagtaaaacaagcattcaaccaacaatagtagtgccttcattactgtgatgtcaaattgtttgcattattagctcagactgctcagtatggtgcacaaaaaacttcttatgacccaaacatctatttttcttgtgattaatattttattaagcattaataaatacaaaaaagagtgcctaaaaagaatataatgacattcatcttcacagtcacagagggagataatctttcttgatacacagcatatatacactactgtaatatttatattggagtttttctctcaaattttaaaactgaatgagaacaaaaaattatgtaaaaatgtagtgcatttcattaacaaaatggagaaaataattccrtttcaaatgacctgaaatcctttaacaccattctgatatgtttctttttccttaaaatgaggacttgggttgtctttatggctgtgtctataatcaca

SEQ ID NO: 635694 - DNA, 578 bp, Homo sapiens
ccaggctggtctcaaactcctcacctcaggtgatccacctgcctcggccacccaaagtgcagggattacaggtgtgagccaccatgcccagctgtaaaagtaagatttaatagtgcgatagtcctgctagatcaatttgttctgcatggaaagacagctagaagtcatatcaattcatctaaagccgaagtgtttattttagaaaatttctcttatactgtatttgctaataaaccaacaatttactaaggcacatgtggagataggagatacrccctcatgttccaccaaagttatcttgctgggatttggaagtatttctaaattctatgggtaattctttgggtaatgtagatgatctgtggttgcttcgtcagcaatgtgttattactaacaataatattttctaacttctgcttcataagttttgcagatgaaagttaacaaaagtcagcatctgtgctgcagaatctcaggattgcaggcagatacttatggctcctctgcggggtggagagccttctcttcaagcttctctcttggttgggttcctcagctcttaggaagcaatgtcaccg

SEQ ID NO: 635695 - DNA, 617 bp, Homo sapiens
ctatgataggacacaggaagtgtttacataggttatttctacaacagggtttcccccaattcttggtcttagggccacttgcatgattgatctattgtgagcttagaacaaagagaacctctgctaacactgtggtgttttcttacacttagtactcataggagaaaacaagcagatgattgataatcccgtttgagacatcttgatcttgtggtcatcctcaggttstacaagatgtctgactgtcatttccgttagtcctttcaagaacattaaggcactctttgatacttttaagatattgctacctcctcaggttgaatcatatgaacttgacatttactaagctaaaaacagtcaaatattgttaatttcatatgagtcaaactaattttatatagaaatgcttctagtatatgatgtcaatataaagatctgcttttcagggaaataaccctttccattgagatttaatttaatccagttttttattgttttgtgaataatgatttcttagacatagcattgggcagtaagcctatcgtggaagaaggctggtcaaggtgagatgagaagcaatctcaccttggtgaaatgtatcagcttttggtgaagct

SEQ ID NO: 635696 - DNA, 611 bp, Homo sapiens
ctcctttcaaaacaacctatgacaattacttcttggttgacaattacattattttttaggtgtatcatgataaaatgacttgaaagagtgaccatcaagagcaaaaattgtgttttcatatagaagctctttgcatttttggaacaccaaaataagaggaaagattaaggtaacccaagtcttacatcttttgctgaaaactttgctgagaaaaagtgggcttgggcaactactcctggtactctgcctccccctggggctgtagagcaaggtttctgacttcaggcaaaactatagtgactaggaaagcagtaggaatttaggtgagacttataaataagagagaagtcaaaaatcattttggaagctggagaataactacttgaaaatatacaaagctattaaaatccccaaggaaatttgggttggtcattaaagaaacattcttatatatattctgtaccttcttcaaataaaaaaatctgtatagatgttctgaagatgctgtgtgtgtgtgtgtgtgtgtgtgtgtgtgtgtgtctgagtgtgtktgagctggcaggatgacattcattaagcaaataaatatcgagtacctacttgtgtaccac

SEQ ID NO: 635697 - DNA, 623 bp, Homo sapiens
ttttatggtctaattttaaatgtattagaatagaaatgcaaccttatgttctgcttcaagttatgtgatgatagtaacagcaacgttagggaagtcatcgtgtaattatttagaaataaaaaagaaattttagagccaatacagatctctctttttttttttttctccctggcctgagatagcwttttcaaaaaaaaatagccccaaatgctatgactgttaaagtagtttggtaggccatattgcgactctcctggtggtaaagaagctgctgtcatgtgacaggtctcccatggataaccattacctcctgtcaatgagaaatgtgaagattaaaaacagtgtcaccaaacactgacatcatcctgcattttttatttaagagctgctgaaagatttcctgctggctgaccaaatatgtgaacagctggctcctgaccataatctgtcacttgcagcacatttcagactgcccatttaagagcaacataacatccttgggaccttcaagctagtcaaaggggcagaagaacttaaaaggaagcacaaagctagccaaaactatgagtaatccaaagaccattaagtggtttgtgagtattaagtatgataggtgaaggcaa

SEQ ID NO: 635698 - DNA, 594 bp, Homo sapiens
gagtaaaaaactcatttattatacatttagttagatataatttattatttaaccaaagtttttgggcggatggtcaaataaactaaaaggaaaaatgaaaactctgagaggaaaggaaaaaaaaaagattcttcyagtagaaatgatcttttgctctcatgttgccataagacatttaggtttggaacaggttggtttttaaaaagcagttgttacagatgaagatcaacctgtagtcattttaaaatcatctttacaggctatatcagctaaagtgcacttcagttgtttcccccctcaatggtttaatgctagacttacaaaatccgaatccttgaaaattaggtcccaggatttttaacatcatcctcagtatattaaaaaactcagaaattttaaaaaccactgatttaaatggattattttttcttaaggaaaaaatcttattggttttattttacacaggataatgaggtcttttatgttttatatttaattcttgaatgcttttatataatgagaacacggagaacttttactagaatttttgtgtgtgaacatcaaatagatgcataaattcaagttatcatatgt

SEQ ID NO: 635699 - DNA, 529 bp, Homo sapiens
cactgctgcctggaaactctctaaaggtagtaagctggggcaagagtgggtctcatcccatttgttttgtmtctcccagtgcaaaacaaatgttttgatgtcaggcctcatgtcaagtttcatttttgaataaaactcttgttccaaatattatgttattttattggttgattaaagtggaaggtaagtgatatggtttggctgtgtccccacccaaaatctcatcttgagttgtaacctttataatcgccgcgagtcgagagagatcaggtggaggtaattgaatcatagagtggtttccccccatgctgttctcgtggtagtgagtgggttctcacaagatctgatgattttataagtgtttggtagttcttcctgtgttcattctccttcctgtagcctagtgaagaaggtgccttgcttcccctttgccttccatcgtgattgtaagtttcctgagccacccgctacccagccatgctgaactgtgagtcaattacatctctttcctttataaattgcccagtct

SEQ ID NO: 635700 - DNA, 569 bp, Homo sapiens
catgctgttatgtctcatatataaaaccaaggtatagaaagtggacagggcagatcccattcattaatacttyctagtgactcactttggcactgtacttcttgtcctcataaatggaggctatgctgggtgaaaggtcttggcttttagatgggaaaatgtgatgcttatactaattgacagaattaatgttgcactgaaccagacactgtcacctgggcactttgagtcccctcaagccatcgggctggcaggcaacaaaaggagttactctcattgttgaaggtattcaaccctaattatcatgggaagctaaggttgctacaacaaagtggggaaaagaaaggagtgtgtctggggttatagggaatcacagggtgtgtctcagtgctcctgtgcccagtgatctatttgtggcaaatgcatctgaagcaggcaagtgaaataacagctacaaaagcctttggggaatggagccgtgtgtcatcacaccatggtacaatgttgaagtgcccaccagggtgagtgtgtgtgtgcaagtatacattgtctattttttacaatttcat

SEQ ID NO: 635701 - DNA, 569 bp, Homo sapiens
catgctgttatgtctcatatataaaaccaaggtatagaaagtggacagggcagatcccattcattaatacttcctagtgactcactttggcactgtacttcttgtcctcataaatggaggctatgctgggtgaaaggtcttggcttttagatgggaaaatgtgatgcttatactaattgacagaattaatgttgcactgaaccagacactgtcacctgggcactttgagtcccctcaagccatcrggctggcaggcaacaaaaggagttactctcattgttgaaggtattcaaccctaattatcatgggaagctaaggttgctacaacaaagtggggaaaagaaaggagtgtgtctggggttatagggaatcacagggtgtgtctcagtgctcctgtgcccagtgatctatttgtggcaaatgcatctgaagcaggcaagtgaaataacagctacaaaagcctttggggaatggagccgtgtgtcatcacaccatggtacaatgttgaagtgcccaccagggtgagtgtgtgtgtgcaagtatacattgtctattttttacaatttcat

SEQ ID NO: 635702 - DNA, 569 bp, Homo sapiens
catgctgttatgtctcatatataaaaccaaggtatagaaagtggacagggcagatcccattcattaatacttcctagtgactcactttggcactgtacttcttgtcctcataaatggaggctatgctgggtgaaaggtcttggcttttagatgggaaaatgtgatgcttatactaattgacagaattaatgttgcactgaaccagacactgtcacctgggcactttgagtcccctcaagccatcgggctggcaggcaacaaaaggagttactctcattgttgaaggtattcaaccctaattatcatgggaagctaaggttgctacaacaaagtggggaaaagaaaggagtgtgtctggggttatagggaatcacagggtgtgtctcagtgctcctgtgcccagtgatctatttgtggcaaatgcatctgaagcaggcaagtgaaataacagctacaaaagcctttggggaatggagccgtgtgtcatcacrccatggtacaatgttgaagtgcccaccagggtgagtgtgtgtgtgcaagtatacattgtctattttttacaatttcat

SEQ ID NO: 635703 - DNA, 582 bp, Homo sapiens
catggttttctatctctgctaggtgaatattagccaggatgttagcataggacatgtgatactgtctacacagtcactaaatatgtgcccaaggagagttctttctacctatatgacctaagagttctttttagggtaaatctgataaataaaatagataggcctcaagaagmctattttcattttgaatgagaaatatttgatttgctcttttataaaaagttattctccatttatatttttttctttctatgctaaaagaaataaaacactaggataatgcctgaacactgaaacaaatgcaaaagtgactttctagtttaggcatacttttctaatttacagagcacattaaactcagggaagacgaaggagctagaaaaaacaaataatgggggagttttaccagctctttgctgccttaatagagctttagatctaggtagcacaggagcctacacattctgtcaaatggttgcttggacatagatgcctgtgaccgtgtgtttcagagcaacatctaactaaaaacataatttttttgtaggaaggatagaaatgtctcatggaagagaatgtgcc

SEQ ID NO: 635704 - DNA, 386 bp, Homo sapiens
gctttgaaaaaatggagattgtcctggattcaactctggctcttcgggagagtagaacactttttttttttcttcccagaatgagttgccttatctgatgtacagacygagtttatctgtgtcatatatcagctttccaacactgagagcccagtgttgcaaaaacattctgtattctttactgtttgattgtatttcttcctgcttcctgagtgcttgtatcaccataaactaacatcaggtcaccaaaaatttgacttagtctgaaagaactatggtctgacatgaaagagataacaagtgtaattaaaagcataaactctctcaaattacaacctcattagtcttagaaactatacctcatcattccaatgttgaaactgcat

SEQ ID NO: 635705 - DNA, 406 bp, Homo sapiens
gagaaaccccgtctctactaaaaaatacaaaaattagcagggcatggtggtgggcacctgtaatctcagctactctggaggctgaggcagggagaattgcttgaatcctacaggcagaggttgcagtgagctgagatcgtgccactgcactccagcttgggcaacagaatgagactccatctaaatatacatatatatatacacacacacacatacacacatacatacacacacacacasagagaatattgagtcatgtatacgaatgtatataaagattggggagaaagaaattcacttgtctctctctgtgtaatcacacactgctcattccttgtgtgtcatatacaaaaggtcaaaacatatttcagaagtaacctattgcattttttacaggatagaattt

SEQ ID NO: 635706 - DNA, 590 bp, Homo sapiens
tacattgtgctcaaccttcctcagggggttttcacacacattttttagtttttcttgtatggtgagcatactatgctcttaggcttatcatagttctatccttcagtctctttctctctctctctctctctctctctctctctctgtgtgtgtgtgtgtgtgtgtgtgtctacatgcacatttacaatgcattactaggtaaactaaacagggtgctgatggatcaagtgagctgagccatgacaatgggagtgaggacattcatccatgtatatgtttgcaggaaggctaggataagtgtctgtacctaagttaacagggaatcaagcaagcacttcagaaagttaatatttctaaatcttactaaactrctagattaataataaaagttacgtagatatttgcccattgaggaaaaaagtactctcttcttaaccacaaccttggtatgagatttaagaggtaaaatgcatagagaatacacatccttattgcaaaagacacccatcttctctgtaaaataacatgtcatttttgctaatttggataatattaatttttatctgtaaaatgggaaaaatagtaactgt

SEQ ID NO: 635707 - DNA, 594 bp, Homo sapiens
tttgtcatgtaaatgtcaaatttaaaaaaaaaacatttttccttattgtcttctatttctctcttgctcttttgaaatgtatagattgtttttgtagcataaacgatgctttttctattcagtttctttcttccacaaagaatctatgaaacttaaggattaaaaataaagacttaatttaagttatcatcctatcatataatttcctgtaaaactgtttctttatctcaggctttctgtcttcactatttkggtgctgttgcatctgattttctttcacaggaattttattcataagggattcattttctttatgcatctccttgagcctcctaaacttagttgttgtgatgctttgtcagactgattcaaagaataaactttttcctcaagttaattgctgtttcacttttgatttttttttttttttgggttaacttcttagaagacgatttattatttagttttggaattttggttgttaggaattttacaaatgtcttgaagccaaaaatacaaatatgaatataaataaaaaatgatgaatatctctaagagaaaaggacaaaaagttagagtagggtgaagtcccaa

SEQ ID NO: 635708 - DNA, 324 bp, Homo sapiens
atctgcttccatgaacccattctcagggtgcactcattgccttatgcacactcaatttacattgactgagcagtggkcagctcatttaatctgcacagagaccctctgaggtaggtgcaaatattaagcccattttcatagaggtgcttagaagaggcccagacaggttaagttggtcagaatcccacaggtagtaagaggaggtacctggattcacatgtgcccccttgcccactactatgccctccacaccatatggcaccacctccacaagcctcaagctgtgcagtgacagctgtggggccccaggaaaaaactgtgcag

SEQ ID NO: 635709 - DNA, 492 bp, Homo sapiens
gaaccatcatattgttttttacagtagcttgcagtgtacattcataccagcaacacacaaaagtttccatttctccacatcctcgcaaacatttgttattttcttttctttctttttttttaaataatagccatcctaatgtgtgtgaagaggtatctcattgtggtgagataggtactgttatctgcactttttcagatgaggaaacaaaagtttggaaacttgccaaakgttctatggccaattaaaggcagaatcaggatttaaaccagagcccatcctatcctgcgctgtgttctgaagcactactgaggctgcccattaaagaacttggggaaagtagagggatggataggtgggggtgtgaatgaagatggggctgtaagagtatgcaggggccaaatcataaagacctttgtgtttttttcctagagaaagtttcagttcttataaatagcttgcaagcataaaatgtatatagtaattatatta

SEQ ID NO: 635710 - DNA, 502 bp, Homo sapiens
tgtcaacttgactgggttaagggatacccagatagctggtaaaacattacttctgggtgtatctgtgaggttatttccagaacagattagcatttcaatcaatggactgagtaaagaagatctgagctcccaatgtgggcagacattattcartatgttgaggtcacagatagaaaaaaattgcagaggagggaaaaattcattctctcttttagagctggaatatccatcttccgccctgagatgtgagagaggttcaggttctcgggccttcagattgtggggcttacaccagcatccccactactctctggtcctcaggcctttggccttgtcatggagagttacataattatcttccctggttcttaggcctttggattcagactgaattacaccactgacttttctggttctacagcttgaagatgccatatcataagacttcttggcctccacaatcacatgggccaattcccataacaaatctccttttgtatat

SEQ ID NO: 635711 - DNA, 502 bp, Homo sapiens
tgtcaacttgactgggttaagggatacccagatagctggtaaaacattacttctgggtgtatctgtgaggttatttccagaacagattagcatttcaatcaatggactgagtaaagaagatctgagctcccaatgtgggcagacattattcagtatgttgaggtcacagatagaaaaaaattgcagaggagggaaaaattcattctctcttttagagctggaatatccatcttccgccctgagatgtgagagaggttcaggttctcgggccttcagattgtggggcttacaccagcatccccactactctctggtcctcaggcctttggccttgtcatggagagttacataattatcttccctggttcttaggcctttggattcagactgaattacaccactgrcttttctggttctacagcttgaagatgccatatcataagacttcttggcctccacaatcacatgggccaattcccataacaaatctccttttgtatat

SEQ ID NO: 635712 - DNA, 542 bp, Homo sapiens
tcaactttttaaaaagtggtgttagaataattggatagccacatggaaaaaataaaattgaatggaatccctcacattgtacaccaggataaattccaaatacctaatacaaacaaaaggaccaaaagaaaacatagttgaattcctctataatctaagagcagtgaaaatttaatctaactctgattaaggaaaaagatggaaattgtgatatttaaaaaatttaaattttatatggaaaatacatcataagtaaaataaaagataagataaaataggaaaaatatttgcaacttacatttataataatataaagagtttatacaaatgcagaagaaaaaagccaacaatcatatagaacgatgggctagaaatacagaccattgaccaaaacagtacaaatagctcttaagttatgaggaaatgctcaaccctaaacataataagaaaattgaaatttaactatgctatcagattggcaaaaattcaagtttaataacaaattctkttggcagttctatggggaagtgggaactcataaa

SEQ ID NO: 635713 - DNA, 394 bp, Homo sapiens
gattaaaaaataattcgattactatttccaggatatttacctttttacctctaattatttttgctgaggagatacattagttagaatactggtttgaggctgggcatggtggcccacgcctgtaatcccagcactttgggaggctaaggtgggcagatctcctgaggtcaggagttcgagaccagcctggccaacatggtgaaaccctgtctctmctaaaaatacaaaaattagccgggcttgctggcaagtgcctgtagtcccagctactcgggaggctcaggcaggagaattgcttgaacgcaggaggcggagtttgcagtgaggttgcactccagcctgggtgacagagggagactctgtctcaaaaataataataataaataaaaataaa

SEQ ID NO: 635714 - DNA, 610 bp, Homo sapiens
aagccatcctcatgcctcagcctgccgagtagctggaactatcgacttgcaccactacttttttataatctttgcaatgatcatcttacacgactaaagagtccatctagaagttgcactataactgaatcagatattcctttatggttgaacacttaggctctctaaaacatttttataattataattaactatacaaatttttgactttatgcaatgaaaaatttcaaatagagaaaatataatgatgaaccccccaaaactcattacctacatttaacaataattaacatttacaatttttgtacttatttttgccaaggtgtttaaaaatatattacagatatcataatatgtcaccaccaagtactccagtttgcatcgctaaacaataagggcatttaatgccaacatcaatatcagttctaacaaagttagtatttattccttaatatcacctaatacctggccaatattagaagttgccagtagtctctgcaaaggtcttcttaccatttttgctcaaatctaaactcaaacaaggtgcatgaattgcattttgctgtcrtggctcttgagtctcttttaacttagaatcctccctctgtcc

SEQ ID NO: 635715 - DNA, 604 bp, Homo sapiens
acacatcacacctcaacttcgaatttcctgccttttgttttcttgaatcatagccttgatgttgtttaaatagtgtgctatgcatttaatttccttcttctcttcacaaagaccaaacaatttttaaaaaccaccccgtctttcacagcgggttataaaagtgttcttgagttgaaattgaactggtctcttatttaaacatataaatatatatttagtcattctaacccattgtcrtttattttattggttgactacttaagcagaaatgtatttgtgcacattttatccatgtcgtgtgttttacatttaaagataacaccgctgatagtggcttctaattgtgtgcacagatggttgagcaaagaacatgcaccttccaaggtacatgtatgcaaagtctgtccttcactgttagcagactgtgttgtttgtgactctccttcttcttctcaggtcctcccagaagagccaaagatatgtagagttagaagggcatttagatattattaagcctgactaccagctgaaccaggcacccaacattctccagcctctgcttgcaactttcagtgttaaaacattcagctcttcaaaaaggcag

SEQ ID NO: 635716 - DNA, 604 bp, Homo sapiens
acacatcacacctcaacttcgaatttcctgccttttgttttcttgaatcatagccttgatgttgtttaaatagtgtgctatgcatttaatttccttcttctcttcacaaagaccaaacaatttttaaaaaccaccccgtctttcacagcgggttataaaagtgttcttgagttgaaattgaactggtctcttatttaaacatataaatatatatttagtcattctaacccattgtcatttattttattggttgactacttaagcagaaatgtatttgtgcacattttatccatgtcgtgtgttttacatttaaagataacaccgctgatagtggctkctaattgtgtgcacagatggttgagcaaagaacatgcaccttccaaggtacatgtatgcaaagtctgtccttcactgttagcagactgtgttgtttgtgactctccttcttcttctcaggtcctcccagaagagccaaagatatgtagagttagaagggcatttagatattattaagcctgactaccagctgaaccaggcacccaacattctccagcctctgcttgcaactttcagtgttaaaacattcagctcttcaaaaaggcag

SEQ ID NO: 635717 - DNA, 567 bp, Homo sapiens
atttgggaacatattttggaggcagaaaagaggaattattggtggattggacgttacaatttaaggaagggatcacaaaagaataattcctaggttattatcttgaccaactgggagattcctgatgtcatttattgaaatgtagaagagtgggggaaaatargtttgggttttgaaaccaatttgagatgcatattaggcattcaagtgaaaatgtcaggtaagcatttacatacatgaatccagaactgagggaaaagatatagatttccaactcatttgcataaaacatgacagttgaatggctggacttgttggaattaagtagagtgtgttggtagagtagattaatccctgaggagctcaagtatttagtggtcagctagaaaagaagtcagcaaaggagaccagacagaatgaacaatgaaaaaagagagaaatgggtcattgtgctgtcacagaagcctagaggagaaagtatttcaagaaggaggaagtggtcactgtgttgaatgttgctgaaaggtcaagtaccatgcagacagagaagtgctcatgagtgaagca

SEQ ID NO: 635718 - DNA, 336 bp, Homo sapiens
gtctctgtctttgaatgattgtctctgatgtacggacttgcatcataaacttttttgtgtatatatgtggcttacctcctcaatgatayggtaaggtccttgagactgtatcttcttcatcttagtatctcccataggcccttatacagtgactggcacatattgtgcacttaatattggggtcataaatataatgttgtactattaaaaatatttattttttatgattaatatacaaatcctgactctatcattcattatttgggcaagttacttatcttctctgtgccccagtttccttaagtgtaaaattgggataataacatcaaaatcata

SEQ ID NO: 635719 - DNA, 336 bp, Homo sapiens
gtctctgtctttgaatgattgtctctgatgtacggacttgcatcataaacttttttgtgtatatatgtggcttacctcctcaatgatacggtaaggtccttgagactgtatcttcttcatcttagtatctcccataggcccttatacagtgactggcacatattgtgcacttaatattggggtcataaatataatgttgtactattaaaaatatttattttttatgattaatatacaaatcctgactctatcattcattatttgggcaagttacttatcttctctgtgccccagtttcyttaagtgtaaaattgggataataacatcaaaatcata

SEQ ID NO: 635720 - DNA, 550 bp, Homo sapiens
cttctcactctttctctgaatgatrcaatgagttatatcttgcactcaagtggctcaaatagcagttgtagatgatggggcttttattggaaatagcatatagagctcttaatatcatgtcttttgctttcccttcatgcaaaagagatgttatgtccatgctattacattttaacatatataataaaaactcccaattatctgagtgtttgcagttttaattctaagcatttaatatacattttcttattgacttgacataataatcctttgccattttattgatgaggaaaatgaaggttagggaatgcggcattataattgttcattggtatccacttctgtcttctttctgcgcacatggaagtagctatgctctgccatatggatattagttgtggtcatatgaattctgtccagtgaaaaggaagcagaagtaatgttgtttttcctggataggaacatttagttgttgatgcttaattctccacttaacctttcttgtgccatggtgacccaggaaaccagtgtagacgtgaatggttaatgc

SEQ ID NO: 635721 - DNA, 576 bp, Homo sapiens
tcctgtccactgggagaaaaagattaaacccatccatgtgtctgtcatttgagagcaagaagaaacattcacagcaaacccatcttgccatcactttggtcaaaaccaggtcacatggccactgagccactcatttataggtggggtggaaatgtccttggagttttgggccccttggaattttcagggcacctccttactgatttccttactcacttacttactttatttatattccttataacttttaagactggaaagatttaagtatgtttaactatctgtagttcaagccgtgatcgataatagattgtaacagagaaagatggtaaaagtgatagcataaagttcccataaatgaggaagaggataggagccaaagcattggtgggcaatggggagagttgttctcaagtgagagaaggacccctcctccattataacaggagacacagagcagatgggtccccatctaggyaggtgactggccaaccttgctcccttcagaggtctgagtcaaagccacccacagcacacttttagctgaatctacttccaaagggacaagttttcgct

SEQ ID NO: 635722 - DNA, 532 bp, Homo sapiens
tgtagttaaaaaggatgggaacctctaaataaatgcaccatctgctaggaatttaaaatatttggtctcattgatgtttgggatgagatttgacatatttggcaaatgttgctttaaygtttattatgttttccaccatacttaggatcatgagtgttaaataaagaatgtttaaaaagttaattcattattgctcctttgctaaaagaataaaatgtggaatttgttatttctcatccaaggcggactatgtcacctgaatgcatcaagcccacccctggctcctatggctttaatgtggcagaaatcaaggataaagcaccaaaagtcaggaacccgtgggggcaggcagctgggagtaggggggcagccctggagtagtgattgtggcagtgcacatggacacagctgcagcggctgtggggctgccaagaaactactaaagttcctggtgaagcaatgtagaatttgataagaacatatagatggaaggaaaaaaacctatggtgactgtgaaggccctgatgccatg

SEQ ID NO: 635723 - DNA, 589 bp, Homo sapiens
tatatgggcttttgaattgtgaactagccttgcatacttgggctaaatctcacttggttatggtgtatawttttttaatgcatcgttggatgtcaacttcctaatattttgttgatttttgcatctgtgtgttcatgagagatattggtccgtagttttttctttcttgttatatctttgtctttgtgctgcatggcgattaatgttggcctcatacaattagttagaaagtattccctccacttctattttccagaagaaattatagagaattagtatatattttttccttgaatgattgtggtagcattcaccaatgaatccatctggacctggggctttctgttttgaaacattatcagttactcttatcagttatccattcaatttttaaaataagtgtagacttgttttaatttttaaaataaatatagacctgtttggataatctgtttcttcttgtgtgagttttgatagattttgtctttcaaggaattgatccatttcatctaggttgtcaaatctgtgggcataaaggtgttcatattatttctttattatccttaaaatgtccatgggctccatagtg

SEQ ID NO: 635724 - DNA, 446 bp, Homo sapiens
tatctttctcttgtttatttctagtttaatcccattgtaatctgagagaatctgctaaatgatttctagtcttctaaacttgttatggtgcattttatggcacataatttgatcttccttgtgaatgttccatgtgacctcgagaagaatgtgtattttagtgttgtgggataaagtaatctataagtgttgattagacccagttggttgatggtgttgtttagttcaactatgttcttattgattttctgcctgctggttctgtcaattactgatagaggagggttggawgtctccaactataataacagattcatttatttctccttgcagttctatcaatttttgccacacatattttggtgctttttgttaattgcttgcttacatattaagtactgttatgtcttcttggagaactgacccccgctacctgccccctccta

SEQ ID NO: 635725 - DNA, 598 bp, Homo sapiens
tgataattctaacatccttgtcatatctgagtctaggtatctgatgcccactctatctctccaaactatgtcttttagtatgccttgtacttttctgttgaaagctggacatgatgtactgggaaaaggaactgaggtaaataggcctttagggagatggtggtggggtatgagtggaagggaagcatcttatagtcatatgattaagtctcagtctctaaatgagcccgtccccctgggctatcaactttacagtgtttttgagtcctaccttctacccagtcccattctttaggtgagacagaaaggctagatggggctggaattggaaaatttccttccccaagtccrttaggctctggtaaaacatcagtaagttaggctctggtgaaatagtttgtttttgttttttgtttttgttttgagggcagaccttgctaagacagagtgctctgggagtgtttcaaaatggctacttcttcttatcttcctccccatctcacagaagtacaaggggattcttcttctttgatcttcactgtgagaatatggtagagctcctggagataaaactcacaaaagtgtgccccatccctat

SEQ ID NO: 635726 - DNA, 541 bp, Homo sapiens
agtcagaggaggaagattgtattacaggctctttcgttctccctttctggactccatggaggcatccataggactcgaaggctaagtccagttcctgggacctacacacctaggcacttagtagaaagatttccctgggyattgtaagttcctatgagcctttgaaaggaagcctcagcagctttccaaaactaggctctcaccttgtcatggagctcagaaggagctcagaatgggaagaggaatggcatctctctggtggaaacatgttcaccctagatggagcctattttccctgaaaaggtaagtttttatcaaaaggagaagaggggcaagggccctgagtctgctagggatttggctcagatttcactttcagggctccaggatgtttccaggtcacatgtggggtaggcagagggttgagacttggggccaggaagcagatccctgctgtgtatccctagagagcaagatcctttagttccaggctcagcaaaattctcactttcttcctccagacctcatttttccagcagac

SEQ ID NO: 635727 - DNA, 545 bp, Homo sapiens
tctgtcattttgcaataaaggaatctgacggatacagggatttttaccaaaaacttttcagagaggctgtgggggcagggcagagctaggagcaccaagggtagcttatatggaagcagatttggttcaatgtaagtctatattcagcaactgacatagtaagtgcttaaaaacaaacagaaaacaaacttctgttgaatgaaatactgaaatcaaatgtttctaggctagtctgtgggtagtgggtatgaataatgtcacagtcatagtaataactaaagtttcactggcctatcgcatccacatacataggtcagatcctcttgtccccccaaactcattcccaagtgcccttctgggcctgaatgctcctgyactgggcactcctgtctaaagtggtggacacctcaggaccaatgctgggaaatggttggaggtgaggtgaagatggatgtcttctcccttcagagtggcactgtctgttacgctgctcctgtctccagatctgacagagttttaaatgcagcagcttgtttgggttttgt

SEQ ID NO: 635728 - DNA, 545 bp, Homo sapiens
tctgtcattttgcaataaaggaatctgacggatacagggatttttaccaaaaacttttcagagaggctgtgggggcagggcagagctaggagcaccaagggtagcttatatggaagcagatttggttcaatgtaagtctatattcagcaactgacatagtaagtgcttaaaaacaaacagaaaacaaacttctgttgaatgaaatactgaaatcaaatgtttctaggctagtctgtgggtagtgggtatgaataatgtcacagtcatagtaataactaaagtttcactggcctatcgcatccacatacataggtcagatcctcttgtccccccaaactcattcccaagtgcccttctgggcctgaatgctcctgcactgggcactcctgtctaaagtggtggacacctcaggaccaatgctgggaaatggttggaggtgaggtgaagatggatgtcttctcccttcagagtggcactgtctgttacgctgctcctrtctccagatctgacagagttttaaatgcagcagcttgtttgggttttgt

SEQ ID NO: 635729 - DNA, 582 bp, Homo sapiens
ggcttttttgtgtgtgtgtgaaatggaatctcactctgtgcccaggctggagtgcagtggtgccatctcagctcactgcaagctccgcctccctggttcaagcaattcccctgcctcagtctcctgagtggctggggtaacaggcacactccaccaagcctggctaattttttkgtatttttagtagagacggggtttcaccatgttggccagactggtctggaactcctgacctcaggcaatccacccacctcggcctcccaaagtgctgggattacaggcgggagccacagtgtgtggccactttttttaaactagaagtaatcttagagctcatttctccctctcctgtaatctcagagatatttatacctaggttcaaggtcacatggcaagtggacctcagagggggactaaaacgtggttctcctcaatccttttcccacactcttcagagtatgccacactgtaaactaactttcaattaagatgaatataggactctgcatttgtattttcttaagatgacagaaactcgccaacaatagacattaagacattgttaccacaaacaacagcaac

SEQ ID NO: 635730 - DNA, 501 bp, Homo sapiens
ttatttaaaggaaggaaaaaagtctccaaagcaaaacctggcttgtttagataacttggtctaggaacatggcggaagctgaacccaagaacatgcctgcacagtgcaacttctgggtgggagtcagttgtcttttctgagttccctggacctgagagtgtgacactgagaccaggggtgtggagaaatctatctcatatttatgacatgtggtgggatctttactgagcatttcaacccatcctgtagtaaagagtgctgaatcatggtgggtcacccttctagactagagacagcctgggtgggttcactggaaccagccaaaatggccacaggaccagcttgagtctccactacaaagggcaggtgaggggagcaggaggtagaacgttcacaggacaggacgatcaggagcagagagttgctctaagataygagcaccagatggggaaatttaacagagtggactgtagagtcacttggaaggaaaaatggaagagg

SEQ ID NO: 635731 - DNA, 568 bp, Homo sapiens
gccaaaccatatcaggtgctcgataaatacttgttgaatgaacaaatggagcctattagtaatgattttgtcttgagcaccagttataatgatgataacacagcagcagcaccaatagtactaattggtactattaagtgtttattataaaccacatattgtgctaaatatgtgaagtagacactgttattgccccattttgcagaggatgaaactaagacttagagcaggtacatgttgctggtgtcaccatgaagccaagaagccctcaagaacatatgtatatgccaaagtgtagaggatgaatttactgttattgaagcaaaggccrcaggcaatccctgcacaccacggtgagcctctgtgcctcctggggcttccatttccctctcagaggtaagcaagtgaaaacaactagcacccgtgactagtgggcagttggaactcaataaatatatctttccttcctccattccttggtgcaactcatccagtatttatcccctcaaaacgtcctgtgatctctgaatgtttgaattccatagcctcaaattatgccccaaactat

SEQ ID NO: 635732 - DNA, 616 bp, Homo sapiens
gtttattactatgaggaaaatcatatcaaattaagaccatctttcattcatcattctgggaatacccatttttgtggggaagagtgactaacacacacacacacattcactctctgcaatgaaattagaaaaacaaacatgttggcaagaagtggatctttagggttgacttctcttcctttactgtacctcttccttctctccccacctctagatcaagtgatttctcctctatttttaaaattctgttatatcctgtctccttgagcaccactgttttttgaaatcttccaccctcactatcatttcaaatacctatccccaagaaagggtgacaagtgtaagaaggkgttaatgggaatatgaagggagaggaaagataaatcacatattagattaaacacaatgtatttcaagcctttaaatagtcacttactacatgttatttgatttaataacaataataattctgcaaggattactgttatcaccattttatagttgaggaaatggagactcagagaggctaaataaactgtctattgttgcacagttgatttagccaagttaggctttagccaaggtctgcttgactccaaagcctgtgctgtttttt

SEQ ID NO: 635733 - DNA, 553 bp, Homo sapiens
caaggattactgttatcaccattttatagttgaggaaatggagactcagagaggctaaataaactgtctattgttgcacagttgatttagccaagttaggctttagccaaggtctgcttgactccaaagcctgtgctgttttttctttgctctattgattgtcygtgactgctaaacaaattactagcaagacttagttgcttaaaacaacaaacatttattattgcacaatttctgtgagtcaggaattgggtgtgacttagctgggtgctttgaactcagggtttcccacaagccttcaaacaaagtgttggctgatgctgcctcatctatctcaaggctcaactcagggaggatcctcttccaagctcatgcatgtgctgttggcaggcctcagcttctcattggctgtatgctgaggacataaattttttgccatgtgaacctctccatagagcacctcacaacatggcacctggcttcccctggagtgagtaactaagagggggagagaaggcacccaagatggaagccacagtcttttttataacct

SEQ ID NO: 635734 - DNA, 368 bp, Homo sapiens
tatgctatacacagtgtacattgctgtctgtctgtctgcccatgtttgttttcagtgtcttagcatattggctctgagttcatgctgtgtgttgtgtttggcaggaggaggtgttttaatatccttgcttgactggaactatctcaatgctagtgaattctattattttgaataagataaagtatagccccaggtttctgcataatcacagcaaggaatagttcaactttaaatttgagttatctaccttaataaatactaaaataaatgcatctggagtgttcccttacaggttcctgragctctgatcaactcgggcaaaccaagcatgtcaaaatacactggatcctttgtctgacctgtaatct

SEQ ID NO: 635735 - DNA, 520 bp, Homo sapiens
agcggagggtctgtacaggtcagtggtgacgggccctcccaagggctctgctgcagcgggcttcagtctgcactttgacaagatctccatctcaggtaatccctgtgcacattcaagtctgagaagcgctgagctaaaacattaccacttttcaaaagcactttttgaaaccccaggcagaaaagtcctcagattttcactcacatacacacagagatctccacgcgcttgataaccatcattcagtcatgcttggggttcttatgaagragaatacatctaattatgctcaggctaaacttcagtgttccctaaaatcctaatctcaatctttctctctttacttcttcttttgaatttaatttaatgtttaatttttgtggttccatagcaggactattctctttacttctatctctacctcttttgagatgttggagactctctcactccaggagttctcaatcctgggtaagttaagagaatagagcagttagaggtataggctttggaatcagaa

SEQ ID NO: 635736 - DNA, 498 bp, Homo sapiens
ttctatacatgtttctttttatttttaaactttttctaagttggaagtttgaaatgggatctaaataaagccaacactttcaattgattaatatatctcttgaatttcttttactatatgtttaaaaatgttccttttccattgcttttttttaaaaaaattacactttgttattgttgtaaaaccacattgtttaacttacagtttcccatagtctattgcatcttcatggtttttgttaacatgttactttgttctctgtgtatccttcaaatggtagttagatctggaagcttgattagattaatatttttaaaaaatactatataggaagtgctgtgtttccaccaggaggtacaagatgtctggttgtctcctgtttttgaccattgatgattgttgcctagatgcattatttcattaagttttgcaaattggtgaaattctaattccatcatttcttctycaagtattaacagaaatacttgtaaaaggcaa

SEQ ID NO: 635737 - DNA, 615 bp, Homo sapiens
ttgtacgtgtaaatttttgtacatttatgtacatataaatacatgtatattttgtacatataaatatatgtatatcttatacatatatatgtgtatatccaaactagtgagcacccagatatataaggaagcaaatactattaagtctatagggagatagactaccatacaatagtatttggggacttcaacaccccactctcggcattgtacagatyacctagatagaaaattaacaaaaacgttggacataaactgcactttagaaaaatggacccaacagacatttacagaacattttataaaacaaatgcagaatgtacattcttctcagcagcacatggaacattcttcagtatagacaatatgttaggccataaaaccagttgcaacaaattttttaaactcgaaattatatcaagtatcttatttggccacagtgaaataaaaccagaaataaataacaagaggaacttggaaaactgtacaagtacatggaaatgaaacaacatgctcccaaatgactgtggagtcaatgaagaaattaagaagtaaatctaaaatattcttgaaacaaatgaaaacgaaaatacaacataccaaaacctgtgggat

SEQ ID NO: 635738 - DNA, 615 bp, Homo sapiens
ttgtacgtgtaaatttttgtacatttatgtacatataaatacatgtatattttgtacatataaatatatgtatatcttatacatatatatgtgtatatccaaactagtgagcacccagatatataaggaagcaaatactattaagtctatagggagatagactaccatacaatagtatttggggacttcaacaccccactctcggcattgtacagattacctagatagaaaattaacaaaaacgttggacataaactgcactttagaaaaatggacccaacagacatttacagaacattttataaaacaaatgcagaatrtacattcttctcagcagcacatggaacattcttcagtatagacaatatgttaggccataaaaccagttgcaacaaattttttaaactcgaaattatatcaagtatcttatttggccacagtgaaataaaaccagaaataaataacaagaggaacttggaaaactgtacaagtacatggaaatgaaacaacatgctcccaaatgactgtggagtcaatgaagaaattaagaagtaaatctaaaatattcttgaaacaaatgaaaacgaaaatacaacataccaaaacctgtgggat

SEQ ID NO: 635739 - DNA, 528 bp, Homo sapiens
aagcctttaggtatattttgtaccaaattaaattaaagacaaaaattatgctttcatagttgctgcaaagataaataatgaagaaatttggtacaaaacaacaaaatataacatatatatacatattcatttttatgtatgtatatatatatatacagctaataaaattacctgaggagtgtaatgctttgttttgtgtgtgtatatctttgcmatctattttatatatatattgacaaaagagactgaaatatttagccatgcagaacatgtgaccagaccagagcatttgtaggaagactttttggtaatcattaactctaccctgaaatgatggactacaagttataatgtgtgttacctacacttcaatcagtaatattagcaaatctccaaatgttagccacattgtttgtctcccttgtacattctttattcatgatactacagtgctgtaactgggtaatcctttttaaacaaaagattatttacagaacgggaggtattatttgtttttagagcttttgt

SEQ ID NO: 635740 - DNA, 574 bp, Homo sapiens
aacagtttcttccagttagaggaagaaagagcataatgaaggacaaagctcaagcagaatgaattggatttgccttggtttaaagcatctgagtctgaaaagaaattatgaaaagaaattatctactaaaattttggcaaactttggtcagttctgatggacctgctttctgggtttattgattaatgacttcatttacaacgtgaaaggttattaattatcatctcttcaatctgcctacagataaaaatttccatgtcttagaataatttcctgtgttttgttgactttatgattattaaaaaaaacagaagtactaagtttctgtggagctgtattattttctttggtttattttttaatattttattataattaggttaagttgctaaatgttgctcctcagtcacccaagaccctgtctacatcaagtgatcaattctgttcctacgacctttygaatttgctctcccaagatcaggtcctacatttaggacaaataaaaagtaatattttcagaatattatttatacctagaactattattaagataaccccaagagcccatggaaaa

SEQ ID NO: 635741 - DNA, 612 bp, Homo sapiens
atgggtgaaatattgttaatataaatatttcaaaaacaatatgctttatgtgaaggccctggagatttttcagtgtgttcactatccataatatgtttttatcctcaaggaaaaatattgatcaaatgtatacaaaatagttataggccaggcatgggactcacacctgtaatcccagcactttgggaggccaaggcaagaggattgcttgagtccaggaattgaagaacagcctgggcaatatggtgagacactgtctctacaaaaaaataataattagccaggcatrgtggctcgtgcttgttgccctagctactcaggagactgaggtgggaagattgcttgagtacaggaggttgagatcacagtgagctgggatcatgccactccacttcaacctgggtgacagagtgagaccctgtctcaaaaaaaaaaagttctgtattataccccaatggggaattttactttcctaccttatgatataattggcctcatccttctagtatttctcatctacaaataatttttgttttactctgattcttgccaaacagctaaaaagcttttagaggctgtgttttcaactaaggaaagtttcagaaccccatg

SEQ ID NO: 635742 - DNA, 600 bp, Homo sapiens
tccttttctccaggttttttatctttactgaattttttwttttgtttttggccaaagaaactttttgatcaaaaagttattctctactggtagcagcaataattgagaatttggttttatgcactcacaatttgggttatttttctagataaatgatagacatctattctcttttgagagagatgacaaataatcccatttgacaccccttttcctttatttgtccacgtttatctcaaatcaactaagtatttggtgcacactgagaagaaaaagagattttttatatctgtaatggtgatgtttttgtttttgtgtctattttttattactctctagaaagcatttattaacatttactttaattttctttccgtattctggaaaataaatataatacacaaaatgcaataaaatgctctcttcccatttcaaataaatataatttgctcttgcaaaacatgtaataatctgtgtaattcactacagtatatgtgttagtccgttttcacactgctataaaaaaaatacctgagactgggtaatgtatgaagaaaagaggtttaattgactcagtttcacaggcttaacaggaagcat

SEQ ID NO: 635743 - DNA, 496 bp, Homo sapiens
aattcactacagtatatgtgttagtccgttttcacactgctataaaaaaaatacctgagactgggtaatgtatgaagaaaagaggtttaattgactcagtttcacaggcttaacaggaagcatggctggaaggcctcaggaaayttacaatcatggcagcaggaaaaggggaagcaagcatgtcttaccatggcagagcaggagagatagagtgtgtgagggtgtaagtgctacacactttcaaaaaaatcagatgtcatgagaattcactcactatcacaagaacaaaagggaagtccacccccatgattcaatcacctcccagcaggctattcctccaacacattgggattacaacttgacatgagatctgggtgggggcatagagccaaaccatatcaatttactatcaggaaaataaggataatccctagttacattgtcacttattttaatgactgccacaagcatcttactctggagaaaaagaacacca

SEQ ID NO: 635744 - DNA, 497 bp, Homo sapiens
aaccaacttttcattttgttaatcttttgtatggtttttctttgtttcaatttcatttatttctgctccaatctttattatttatttttttctactaactttgaatttggtttgctcttgcttttctagttctgataacaatgcattattaggttgtttatttgaagtttttttttaagtatgtacttacagctataaaattccttctgagtactgctttcactatattccatagcttttggtatgttgtgtttctattctcrtttgtttcaataaatcttctgtattcttgattcctctgctctttcatacccctgggcactgttcccacccagagaccctgatgactgacacacatgctctgtgggctgctctctcaacaacttgaactcatggttctggttcttctgtccttactcattttccttattctactttttgttgctctaaattctttcaactctttatttatcctctaagaccctgatttctttgtt

SEQ ID NO: 635745 - DNA, 523 bp, Homo sapiens
ccagttacgcaggaggctgaggcaggaggatctcttgagaccaagcgttcaaggccagcctgggtgacataacaagacccccatctctaaaaaataaaaataaaaacaagtccttgaaagccttccctttccttctactcccattcaakcacagtcctatggtttcatcttcttactccctctcaagtttttcattttttccattttcaccactacccccaaaccactactatgttcttctgggcttttaaaatagctggctgtgtggtcactcatctccaatcttgcctctcttcaatgtgttctccacacagcactcagtgtgatcttcttaaactatgatctggttcctatcacttcgcttagaactcaccagtggctttccattgatctaaggataaagaccaaagttctcaaaggcctcgcaaggctgcccgttttctctttgggcttgtctggctttaggcccctacccttctgtccattccagcctcactggccttccttcagctcctttaatagg

SEQ ID NO: 635746 - DNA, 516 bp, Homo sapiens
ttaaataaatcaatatatgacacccgccatgtctagttgtatgaacttggcacttaatgtctccgttcctcagtttcatcatctgaaaatggatgcgatgacagtgtctacctcccagggttcttgtgaatattaagtgagaagatgctggtgaagtgtgcttaataaatgttagccatcatcatcactgtcaccatcactaagggttctcactaaccagstgtgagcaagatggttgaacagagagtaagagcaccatttgaaaagacaaggagactttcttctcctgatctctcagggttacaggggataaaaccatggccccctgcacatgccacagggaggcagaggaggcacgtgactgacacacatgtttatgtacctgtaactgatatgagattcttatcagccataaaggccccataagaagggtagatattagagagacaataaaatctaacggggaaaagtcaattaagttcattcaggattaagttcagctgagtgtaactgttt

SEQ ID NO: 635747 - DNA, 575 bp, Homo sapiens
ggactgagccctcatgtgtgccaccttcccgtgtgggtggcatgtcctcatgggcatccccatttattatggtggggtgggaagaacacaggctctgctgcttagcagctaggtgagactacatcgcccatggggattccctttcctggctggttttttgtagtctgttattttcctttatcccagctgaratcttttttctccatctacttcaagaaggaggactctgaacattccacagttacagagggcaagccaaacacaaggcacattctgtactgcagacagaggatggggcacctgatggtaggtgatatggtttggctgtgtccacacccaaatctcagcttgaattgtatctcccagaattaccacgtattgtgggagagacccgtggggaggtaattgaatcatgggagctggtctttcccatgctattctcctatagtgaataagtctcaggaggtctgatgggtttaacaggggtttccacttttgcttcttcctcattttctcttgctgccgccatgtaagaagtgcctttaacctcccgccatgattctgaggcctcccca

SEQ ID NO: 635748 - DNA, 452 bp, Homo sapiens
ttttgacttacccaactcttctctggagacaaatcacaagaccatttaaaaagggaaagtcagaagatggtatggagtataaaatcttcctttctgggacagctctcttcccgtcttcccccaccaagtctttgtaaaattctaccaccactcccaaraagaaaactaaaaaaatgaaaccaagcagccaaaagttccagactttctcactcacgggctccaaaccttggggtggctggctggggcctctttgaaggaatgtacatctaactcctccatctggggattggccctaaaacggaacttgtgtttaagctgagggattaaaatctttccgaaatacctggagagatctgacgatgtaggggctgcatccatgtggaatattcacaagacattacttcacatggatcacaacaattttcaagttataaccaaaaccaaacacccaa

SEQ ID NO: 635749 - DNA, 452 bp, Homo sapiens
ttttgacttacccaactcttctctggagacaaatcacaagaccatttaaaaagggaaagtcagaagatggtatggagtataaaatcttcctttctgggacagctctcttcccgtcttcccccaccaagtctttgtaaaattctaccaccactcccaaaaagaaaactaaaaaaatgaaaccaagcagccaaaagttccagactttctcactcacrggctccaaaccttggggtggctggctggggcctctttgaaggaatgtacatctaactcctccatctggggattggccctaaaacggaacttgtgtttaagctgagggattaaaatctttccgaaatacctggagagatctgacgatgtaggggctgcatccatgtggaatattcacaagacattacttcacatggatcacaacaattttcaagttataaccaaaaccaaacacccaa

SEQ ID NO: 635750 - DNA, 452 bp, Homo sapiens
ttttgacttacccaactcttctctggagacaaatcacaagaccatttaaaaagggaaagtcagaagatggtatggagtataaaatcttcctttctgggacagctctcttcccgtcttcccccaccaagtctttgtaaaattctaccaccactcccaaaaagaaaactaaaaaaatgaaaccaagcagccaaaagttccagactttctcactcacgkgctccaaaccttggggtggctggctggggcctctttgaaggaatgtacatctaactcctccatctggggattggccctaaaacggaacttgtgtttaagctgagggattaaaatctttccgaaatacctggagagatctgacgatgtaggggctgcatccatgtggaatattcacaagacattacttcacatggatcacaacaattttcaagttataaccaaaaccaaacacccaa

SEQ ID NO: 635751 - DNA, 649 bp, Homo sapiens
tgggctggttaaatcaaaaaaagaaagcctagaagagccaaaggactcataaaagcaagtgaatgaaatacgcaacttcgctttttcagtaagagagaactcagtgactgctagtacccagaggaaaacagatgatgtttaacaacacgttaagatggtgcctggttagtggtaatttcacagaggactcctggttttacttcttctagacagcaggcagagagcaggggtgggggaacttgcttacaagaaaggatataaaatcactcattttacctcagtgtgaatttaaaacgcttagtcctcaagggtgttttcaccttaatccttatctataattgtgaatagaagttagtccctgcttgaaaagatgtagacatcactggtgttaaccttaaataatgagattcaaagaatatgattggggccaggtgtggtggctcatacctctaataccagcactttgagaggcygaggtaagaggactgatcaaatccaagagttcaaaacaaacctgggcaacatagtgagaccccctctctacagaaaaatttaaaaattagctgagtgtggtggcaggcacctgtagtcccagctactcaagaggctgaggtgggaggattacttgagcttgagaagtcaaggctga

SEQ ID NO: 635752 - DNA, 621 bp, Homo sapiens
aataactcttggaggtgtgaataggagagatgtgttcataaaaagcagtgagtcctttctatacctgcaggcctttaaagacaatatggcagctcttaattttgcacataaaatatatggaataatcatttgaaatagtgattttactgtaatataaaaaccatttgatgtatttttaatgaatagaaatgaaattctaggcagggcgtgttggctcatgcctataaccccagcactttgggaggctgaggcagratgattgcttgagtccaagagttcgagaccagcttgggcaacataatgagatactgtctctacagaaagaaaaaaataaaagaagaaaaaattctaaaccattaattatgctgtgtggtgaattggctattgttcaaaatggccaaaagagtagcttcttctcttctcctgaacatattatacaaccccttttccctggccatagttgcttgtccagagataggcatgaacaaagcataatgaaacaggaaattttccttgatcccttctcaagccttgtgacaggggtgcctcacttactcagcccgcagcttttaacccctcgtgggagggggagcatgcaggtgagcaggtgcagaagctgga

SEQ ID NO: 635753 - DNA, 621 bp, Homo sapiens
aataactcttggaggtgtgaataggagagatgtgttcataaaaagcagtgagtcctttctatacctgcaggcctttaaagacaatatggcagctcttaattttgcacataaaatatatggaataatcatttgaaatagtgattttactgtaatataaaaaccatttgatgtatttttaatgaatagaaatgaaattctaggcagggcgtgttggctcatgcctataaccccagcactttgggaggctgaggcagaatgattgcttgagtccaagagttcgagaccagcttgggcaacayaatgagatactgtctctacagaaagaaaaaaataaaagaagaaaaaattctaaaccattaattatgctgtgtggtgaattggctattgttcaaaatggccaaaagagtagcttcttctcttctcctgaacatattatacaaccccttttccctggccatagttgcttgtccagagataggcatgaacaaagcataatgaaacaggaaattttccttgatcccttctcaagccttgtgacaggggtgcctcacttactcagcccgcagcttttaacccctcgtgggagggggagcatgcaggtgagcaggtgcagaagctgga

SEQ ID NO: 635754 - DNA, 621 bp, Homo sapiens
aataactcttggaggtgtgaataggagagatgtgttcataaaaagcagtgagtcctttctatacctgcaggcctttaaagacaatatggcagctcttaattttgcacataaaatatatggaataatcatttgaaatagtgattttactgtaatataaaaaccatttgatgtatttttaatgaatagaaatgaaattctaggcagggcgtgttggctcatgcctataaccccagcactttgggaggctgaggcagaatgattgcttgagtccaagagttcgagaccagcttgggcaacataatgagatactgtctctacagaaagaaaaaaataaaagaagaaaaaattctaaaccattaattatgctgtgtggtgaattggctattgttcaaaatggccaaaagagtagcttcttctcttctcctgaacatattrtacaaccccttttccctggccatagttgcttgtccagagataggcatgaacaaagcataatgaaacaggaaattttccttgatcccttctcaagccttgtgacaggggtgcctcacttactcagcccgcagcttttaacccctcgtgggagggggagcatgcaggtgagcaggtgcagaagctgga

SEQ ID NO: 635755 - DNA, 618 bp, Homo sapiens
gttgcttgtccagagataggcatgaacaaagcataatgaaacaggaaattttccttgatcccttctcaagccttgtgacaggggtgcctcacttactcagcccgcagctttyaacccctcgtgggagggggagcatgcaggtgagcaggtgcagaagctggagtgagtgcttttgggtactggaaggagcaaaactccgtgtagcctgatagcggtgtctacgggactacctgttacccctgaagcaccagagggagtgtgttacagtgctcttttagctttgctgtctgcagacagcttcagtgtttaatagctcagtggaccctctgccttttcatgagggcagatggttagtgtgacagttttctgtatcccaagctcttgtctggtgtccaggaaaaaccaggttgcacaaattcaaggatagtaaatgtgggggattttattgctgatggaagtggctctcagtgagaaggggagctggaaaggggatggagtaggaagaaggcattcttcccctgatgtcccaatgtcaagttgtccctctgaagtgaagctgcttctctcttatgtcaaaccagagtcttcaatgtccagctgcttctcctcttctcccct

SEQ ID NO: 635756 - DNA, 614 bp, Homo sapiens
aaaatatgaccccctggtgtaatgagtgttttaaatgaaagacctttagaaatcaacagattctggaggagatttttcccctatctacataaaaactgaagggacccaccaaagagaacactgtttttccttcctcttcaggttttctcattatctgtcacagaaaagaagaccaagaaggtaatcacgcctgaacaggtgcattcacaagataatgtccctctctcaggctcaatttccaaagagaaacatttacaagttaatctctgttgctagacccattcattctccctagtaatcatttattgcctttaaacagaattatctttattccccatcttccccctttactctgaaataaggctaaataagtatttgagcctcaytgggatattgggcaattattctgtgactctcccctgcgtgcacattaataaatttgtatgtcttttctccaattaatctgccttatttcggttgattttttggcagaccttcagagggtgaagtggaagtttttgtttggccctgacaacatgattaagaaggtcctgtcagactgaagagagtaactactattaagagtcttatagaagagattcatgcatagcata

SEQ ID NO: 635757 - DNA, 588 bp, Homo sapiens
agcaactttactaagaatgtaaaggaataaaagaatggctactccataggcagaacagcagcttgggcttcttggctgataatacttatagttatttcttgattatatactaaacaaggggaggattatttatgagttttctgggaaaaagctgagcaattcccagaactgagagttcctccccttcttagaccatataggttaacttcctgacattgccatcgcagcactgtggaagtgttttttaacatgctaatgcattacagttaacatataatgagcagggaggacgaccagaggtcactttccttgtcmtcttgatttggtgggttttggctgtcttctttaccacaacctattttatcagcaaggtctttgtgacttgtatctggtgctgacctcctatcatcctataacttacaatgcttcgcctcctgggaatgcagcccagcaggtctcagcctcattttacctagcaactagtcaagatggagttgctctggttcaaacgcctctgacatttacaaaagggcagcttttcagagctaccactgtgtctgcagtttctcaaaataacctgctcaaaat

SEQ ID NO: 635758 - DNA, 495 bp, Homo sapiens
cttgtctgagtattgtttatatgttatgaaaattgtttgtatacattcagaaacactacagctgtcagctgctggctgctggctgttggagataacttttacttttttatacatagtcatgagcaaatacaatggttgtcttaaactgcmaagttttggggcttaaattcagcaagagatgagtaatatgagcactgtgtaatgcctgaagtgctgtgcagccttcctaattccttccatggttatatacacagaaagttccaactctaggggattttgagtggaggacgtgggcagaatgtggatagtcaatcaggacctgccaagatctagggactagaaagggcctcagaggcctgagggggccacaaacctggcagcagacagggcctgtttaaccacctcctccctgagcctcgctccatctcattcagatgcagctttccaggaccagaccttgatgctctgtctaccatctcagccccactccatcca

SEQ ID NO: 635759 - DNA, 495 bp, Homo sapiens
cttgtctgagtattgtttatatgttatgaaaattgtttgtatacattcagaaacactacagctgtcagctgctggctgctggctgttggagataacttttacttttttatacatagtcatgagcaaatacaatggttgtcttaaactgccaagttttggggcttaaattcagcaasagatgagtaatatgagcactgtgtaatgcctgaagtgctgtgcagccttcctaattccttccatggttatatacacagaaagttccaactctaggggattttgagtggaggacgtgggcagaatgtggatagtcaatcaggacctgccaagatctagggactagaaagggcctcagaggcctgagggggccacaaacctggcagcagacagggcctgtttaaccacctcctccctgagcctcgctccatctcattcagatgcagctttccaggaccagaccttgatgctctgtctaccatctcagccccactccatcca

SEQ ID NO: 635760 - DNA, 495 bp, Homo sapiens
cttgtctgagtattgtttatatgttatgaaaattgtttgtatacattcagaaacactacagctgtcagctgctggctgctggctgttggagataacttttacttttttatacatagtcatgagcaaatacaatggttgtcttaaactgccaagttttggggcttaaattcagcaagagatgagtaatatgagcactgtgtaatgcctraagtgctgtgcagccttcctaattccttccatggttatatacacagaaagttccaactctaggggattttgagtggaggacgtgggcagaatgtggatagtcaatcaggacctgccaagatctagggactagaaagggcctcagaggcctgagggggccacaaacctggcagcagacagggcctgtttaaccacctcctccctgagcctcgctccatctcattcagatgcagctttccaggaccagaccttgatgctctgtctaccatctcagccccactccatcca

SEQ ID NO: 635761 - DNA, 606 bp, Homo sapiens
aacagttagcatcccgaatgtgcactgtaagaaagactgtcatayaaccaggaccaggcaatgaaatgtatcagttgcctctcattttgagaagggaaaaacatagtgactgtcattcttcaacagagaatatattgaatgatattttataattagctcccattcctctgacacaaagcatgaaagaattggaatatctcaattccctgcatcagagtaacagaaaagaaacattgcagtaatatcagggcagccacctccaatagcacctgccaaattgtaagtggagattttcttctgccaacattattctccattcccctaccgttagggaactggctgaattttcttcttcgtatgtaatacagtattcttttttttctgacaaggtataataactatagtgtcaaatagtaacacgttagaagaaataaacataacatagacaaaagaaggcttcagtgtttgctgaatgcaccaactgcatgggtctccagtgttccagggttgatttatatcatcattaactgctctttttcccatcaccccattccctcccatgctccctggaggtcccagcacagcaaatgcttttgcaagttccca

SEQ ID NO: 635762 - DNA, 613 bp, Homo sapiens
gaattttcttcttcgtatgtaatacagtattcttttttttctgacaaggtataataactatagtgtcaaatagtaacacgttagaagaaataaacataacatagacaaaagaaggcttcagtgtttgctgaatgcaccaactgcatgggtctccagtgttccagggttgatttatatcaycattaactgctctttttcccatcaccccattccctcccatgctccctggaggtcccagcacagcaaatgcttttgcaagttcccatgaaagattcccctcaagctcccagcccctatccaccaggcctgggtctgtgcatctgtgtgtttccagggcatggcttgtgcctggggaactgaagcattgagccatgagcctcaccaggaaggactcgtagcctggctcccagcagatggtggcagttgtctgggggtgtgaatggcactagctgttcctgttcatctgacctccttgcacaggcactgacaatctgtgggaacaggacagtcctctcagtctgattggagggtctcattatcactgctgctcagggctctccttactaacaggtaagttctataatcataacaaatagagtttttaaaaagaaaa

SEQ ID NO: 635763 - DNA, 356 bp, Homo sapiens
ctaggacaatttgagcatcaaaataaatgtcaatgcctgtagttgaaccatttgggttcattaccccttacagcgaggaagaatgcacaccatggggactatggtggaagggatctcagtaagaagatttcagaaaaaaacctattataggattaggcagtggtttgggagggttttgggagagtccaggaacttggcttcacgtggattgcacattgtcagaaagtagggacgatgctatgactggacacctcaataaaccttctatacaggaaaaacaagctagagcagataatgmtggaatggtcaagaagcagtggtctcttattagccaggagacagggatgggattgtat

SEQ ID NO: 635764 - DNA, 614 bp, Homo sapiens
aattaactaaaatggaagaatggtgagaaatgggatttttaaaaaatagactttattgttagagcaatttgaggtttacaggaaaattgagggggaagtacacattcctgtattcccttactcacccccgactgtttcccctatttcctatcttgcacatttgttacagttgatgaggcaatattgacacattatttttaacaaaagttcasagtttacattaggactctgagtcatacatttcacaggttttcacaaatgtataatgacacatccaccattataatataatacagaatagtttcagtgccctaaaaatttcctgtgcacctcctcagcaaatgtagaagaacagaaatcacaacaaactgtctatcagaccacagaaaactagaactcaggattaagaaactcactcaaaaccgcacactacgtgggcactgaaaaacttgctcctaaatgaccactgggtaaataacaaaatgaaggcagacataaagatgttctttgaaaccaatgagaaaaaagatacaacgtaccagaatctctgggacacatttaaagcagtgtgtagagggaagtttatagcactaaatgcccacaagagaaaacag

SEQ ID NO: 635765 - DNA, 650 bp, Homo sapiens
gtaatttaaaggttaattgtctgtctttttagccacagagacatggaaagaaaaattttcctgagttccttaagacaaaaatttctggaaagggcagagttgagaaaggaggatattaagacagaaagtgtagtgtgggaacaaaagagaaggcctttggaggtagaagcatgtgaggctatttggaactgtggtttaaattattgaaatgtataaatcttaaataactcaatgcaagttttttggttgcaagttctttataattttcaaaagatacaaacatcatgtttcttacctgcccagtgtctgattgaaggaaacacgtttttggatccacagaaggattggaaagacatgacctacgattttagcaagggttttctctagtggaggaattcatggcctttattcttactttttaacatttacaattttcargttttcaacttattttatcagtagagtttttaaagtttattttaaacatacaaatatatttggaaattcagactctgttgggagtcttataatggcacataatgccacatttgcagtactcatgatggtactaagtaggtttttgattcagacaaaatacatgcatccctgagatctcatggccaggcagtaggagggatagaactcccacc

SEQ ID NO: 635766 - DNA, 632 bp, Homo sapiens
gaacttgccttggatgcaaattaagggggtaaaaaatgcaaaatgattgttttgctttaattttgcctgatttaaaaaaaattgcattagaatattatttgtcttcattactgagctttttacccacacccccccatattacagtttgcacttgagaacagtgcctcacttcctttgtttgcaccaccctagtcacaccccactgtcttcctattttatatattagctgctcaggacagttatttccagctttgtgaaattagtagattgacagtatgctggaagcagactagagtagcacagaacagcaggaaaactgcctggcttgatatcaggtggcttgggtaccagtcaaatcttctctaattagctatggaactttaataatatcatttcacctaaaagtgtctcagtttcttggtgataaatttgaagaggccaaactagagattttctaaggccmagtaaaggcttaacattttaacagcatatagccttagagtaccagatgacattttcccttcccttacatccatcatctgtagctagagacctgaaatccattactcttcagagtaaagctaatgctttcttatgtgcttgttgtttttaattttaatttggaattatgc

SEQ ID NO: 635767 - DNA, 593 bp, Homo sapiens
gagcacaggtcaataaaaaatgtccaaactgaaccacagagaaaaaagataaagggattaaaaaaaaaaaaacagccttgatgatcaaatacatgcattgacctggaaggagagaagatagagagtggaggctctgaaggagactcttattttctccattctgtggttgctggtaattcttggcttgtcagatgcctcactccaatctctgccattgtcttcacttggcattactctctgcatgtttttgtgtctttcttctctgcctcctcttataaggacactagttacattgaatttatagcccactttaatccattatgaccttatcttaactggatctgcatagactccgcagtgagtcgaattgtgtccacaggtaagaaagacatgtttagtcctacccactaatacgtcagaatgtgacattatttggaagtcgggtctttacagaggtaagcaaattaaratgagatcattacggtgaaccctagcccagtatgactgatggccttattaaaaggggaaatgacacagacacatagagaaggaagatgatgtgcagatacagagaaacaccatccacaaaccaa

SEQ ID NO: 635768 - DNA, 568 bp, Homo sapiens
ggtgaacattagcattttttggcagtaaagtatttttaattaagaatatacattgttttgtttttagacataatggtattgcacacttaggctacagtatagtgtaaacataacttttatatgcactgggaaacaaaaaattgtgtgactcactttattaatgcaatattcactttactgctgttgtgtggaactgaacctgcaatatctctgaggtgtgcctgtagatgcaaatagcctctacaggatactagtaaaccaaatgcagcagcatattaaaaggattatacaccatgatgaagtggtatttatcctatggatgcaaagttgttttaacatttgaaaatcaatccatrtgatacaccatgttaatagaataaagaacaaaagccacatgatcatcttaataaagaacaggaaatccaacatgcttttacggttaaaacaaacaaaaccgggactaaaagggaatgtcctcgatttgataatgggccccaatgaaaagtccacagctatcatcatatttaatggtgaaagactggatgcttttcccctaagatcaggaaca

SEQ ID NO: 635769 - DNA, 501 bp, Homo sapiens
caaacagaaaccaaaaaagagcaggagtttctattattacatcagaaaaacagactcgaagccagcaatgataaaaaaaggacaaagaagggcattacatagtgataaagggttcaattcagcagtacttaactatcataaatatatacacacacaacattggagcacctagattcataacaagttcttatagacctatgaagagacttagccacataataatagtgggaaacccaaaacctcactgacagcattagacagatcattgaggcagaaaactaataaakatattctggaattaaactcaatacttgaccagttggacctaatagacatctggagaatactccatccaacaactacagaatatacattctcctcatctgcacatggaacatactccaagactgactacatgccataaagcaagtatcaataaattcaaaaaaatcgaaatcataccaaccacacactcagaccacagtgcaataaaaatagaag

SEQ ID NO: 635770 - DNA, 542 bp, Homo sapiens
ccaaggccagccatggtggttcatacctgtaatgctgacactttgggaggatgagatggaaagatcacttgaggccaggaatttgagaccagcctgggcaacatagcaagacccccatytctacaaatttttctttttttaatagctgggtgtggtggtgcgtacctgtagcccagctacttgagaggttgaggtgggtggattgcttgagcccaggggtttaagactgcagtgagctatgattgtgctactgcatatcagcctcagcaacagagcatgacacagtctctaaaaaataaggctgtgcagacagagcagtcccaggagcctgagctcctgcctcataggctgtaaagaacttttcactttctgtcctcagtttcagcttttgccagatttcagaacagcaggccaacattgcactgtagctcctatacaggggtaaagggagggagtgggacatggtctcaattcataattatgccatttaaatgaccaaagttaaggggtcagttgtgagaggagactggcattgtggaaag

SEQ ID NO: 635771 - DNA, 426 bp, Homo sapiens
ccttctagagatttttattttcttatggcatttttgaatgtatcttttgtatcatcttttttaagcagttgctcaaggtgttttagtattaatacataacaccacagtctatgttcagttcaagtgycctattaggtttttaatgttcattttaaaaaattgtgttgtgagtatacacgtaaggtttttggattggaatcagttttcttattatttatattatagaaaataatgagcatatacttctgtgtccccaggacaatgtgatgagatccaggacaatgtgatgagatccaggtcaaatgtcctatacatacaaaatctgtattgtaagtgagggacagcgaaaagtccattttagccatttatgttcaagagaaagaaacaaccacctccctctccccttctgaaagattcttcttagaa

SEQ ID NO: 635772 - DNA, 426 bp, Homo sapiens
ccttctagagatttttattttcttatggcatttttgaatgtatcttttgtatcatcttttttaagcagttgctcaaggtgttttagtattaatacataacaccacagtctatgttcagttcaagtgtcctattaggtttttaaygttcattttaaaaaattgtgttgtgagtatacacgtaaggtttttggattggaatcagttttcttattatttatattatagaaaataatgagcatatacttctgtgtccccaggacaatgtgatgagatccaggacaatgtgatgagatccaggtcaaatgtcctatacatacaaaatctgtattgtaagtgagggacagcgaaaagtccattttagccatttatgttcaagagaaagaaacaaccacctccctctccccttctgaaagattcttcttagaa

SEQ ID NO: 635773 - DNA, 426 bp, Homo sapiens
ccttctagagatttttattttcttatggcatttttgaatgtatcttttgtatcatcttttttaagcagttgctcaaggtgttttagtattaatacataacaccacagtctatgttcagttcaagtgtcctattaggtttttaatgttcattttaaaaaattgtgttgtgmgtatacacgtaaggtttttggattggaatcagttttcttattatttatattatagaaaataatgagcatatacttctgtgtccccaggacaatgtgatgagatccaggacaatgtgatgagatccaggtcaaatgtcctatacatacaaaatctgtattgtaagtgagggacagcgaaaagtccattttagccatttatgttcaagagaaagaaacaaccacctccctctccccttctgaaagattcttcttagaa

SEQ ID NO: 635774 - DNA, 657 bp, Homo sapiens
tgattgatccattcaaaagttgatggatgtcagggtggtttctactttttggctattattaataacatagctataaacatttgtttgcaagtttttatgtggagttgttttttcatttctcttgggtatatagcttgaagtagaattgctgggtcatattgtaactatatatttatctttctgagaaactgccagacttttccagagtagctgtactgcttacattctcaccaacagtgtatgaagtctctaattcctccacatccgtatagcayttattataatctcttttttttttttaattctagccatcctagtgactgtgcagtagcgtcgcaatatggctttgatttgcatttccttgaggactaacaatgttgagtgtctcttcatttgcttattggccatttgtatgtcttctttggagaaatgtctattctgattctttgcctttttattattgaattgtgttctttatatattttaaatacaagttatcagatatattagatacaattcagatatatatatttatatatttagatacaattatcagatacataatttgctaatatcttctcctattctctaaattgtcttttcactttcttggtcatattcttagaacaaaagttttttaaattttgatgaagtcca

SEQ ID NO: 635775 - DNA, 510 bp, Homo sapiens
tccccactctgggtctcagtgacccccagccctgcagtccagttactctttagaatgaggctttgggagggagttagtttatgttggtgagccagcctcattctatcatggcctaggtccagcatccttttggccaaagagaatcattgaaatggcccaggtgccaagtacctgagttttctgcccttggcctccatcctccaggtgtccccagccccttttgccctgcagggtctctgctcctgtgcttgctctctggcctccttgcttcctttctaaagcctgtccctgctttggtgtccacatgaaggccatcactrcctctaatcctttgtccttttaggaacaaagggccagacctacacatgtaatgggacatatgaaaggcagtttgggcagacagcaaattgcacaagctgccatgttccagggaagtgtgagcctacaaaggaggacttgttggaaattctgtgacttttccacctgtaaccctcatccagggcataatgg

SEQ ID NO: 635776 - DNA, 601 bp, Homo sapiens
tactcaggaggctgaggcaggaaaattgcttgaactctggaggtggaggttgcagcgagccaagatcgtgccattgcactccaggctgggcaacagagtgagactctgtctcaaaaaaaagagaaagaaatcagatcaaaagttgtttctggtgggaggtttgactgggaagggggaatagggatcttcctggggttgatgaaaatgttccgtatcagsggggaggagccaagatggccaaataggaacagctccggtccacatctcccagcgtgagtgatgcagaagacaggtgatttctgcatttccaactgagctttgaagagagtagtggttctcccagcatgcagcttcagatctgaaatcaggcacactgcctcctcaagtgggtccctgacccccgagtagcctaactggcaggcaccccccagtaggggcagactgacacctcacacggccaggtactcttctgaaacaaaacttccagaggaacgatcaggcagcagcatctgcagttcacaatatccgctgttctgcagccaccgctgctgatacccaggcaaacagggtctggagtggacctctagcaaattccaacaca

SEQ ID NO: 635777 - DNA, 624 bp, Homo sapiens
taatttttttctttaactacaaggaccaggtggtggctccaggccatctggctatttatcttacttttgtttccttttaacttttcgctttctccctttcctcacgtcttaaaaactaggcaaggtggcaggtggcggtgggggtgggggtgggtagcaggagaagtggtggtccccacctcatttcccctgtagagaatctcacttattatggggagttctcactttcatcatcagtttttaagtctctgtacatgatagagtgacagcgattcatgtaatacacttgtgttgaagttttctgataaacaaaggtagcaacaaaaacttttatcatttgtaggagcaagggtaatacacaggggaagagcaagcaacttcctattactagcaataaacttacaatgagggttttaaattctcccctagctgaaagacatttttcaaatacagacataggattaaacctctgccaaacctatacaggcatatgtgccaackttgtcacatccctgaccatatttttgaccaccaatttttgaaaatctattggcagacagcaattgctcaagttgaatttttcacagacctgatattcaggtgagagaaaatagtccaaggcca

SEQ ID NO: 635778 - DNA, 596 bp, Homo sapiens
gggcagttgctctgtactttttaagtctcagggacggcccagaagcaactgtttaaaaccctatatggtttttaaatacttgttggtataaatacttgctagtttactaaaatgcaaacagatttaaatatgccaaagtaatccatatacactgtcataactgtactttgtgtactatatatgtctctatatttcataatgtacaagtgagagaatattaaattgtaatcctggcaagccattttatactctaattcagtgctgtccaacacaaattaatagaagacacacattaaacctcctagtagtcacattaaaaaaactaatttaggccaggaacagtggctcacacctataatcccagtgcttttggaggccaacacaagaggatcacttgagcccaggagttcgagaccacactggacaacatactaacaccccgtctccacaaaaatttaaaaattagcyagccatggtggtgtgtgtgcctgtggtccaagccactcaggagactgaggcgagaggatcacttgagcccaggaatttgaggctacagtgaactgtgatcacaccaccatattccagcctaggcaata

SEQ ID NO: 635779 - DNA, 660 bp, Homo sapiens
aataaactactcattagtcattcacaagcattgtaagcagttcgcttgtgttagagtggggttgcctgtatccaggtgggaattagaggtgagactggacaggaagggtggaagcaaggcatagtgaaaagagcactggcttcagtcaggaaacaggtttgcatcctaactctatctagaactacttattaataatttggctttttgggcctgtttgcataactgcaaattggggcattaataacttctccatgttgtgttaggattatattagatagccaagtaaatcgcatagtacgttggtgctgtagatgtttaataaattacagttatgattattaattagaaagtggtccacaatttcacatggtgccaagttggaataagataaagaatattaaataatctgtaatcggatttcccmattaggaagttattgacgactctggaaagaactgcttcaaaggagcaggaccagaatgtgttgagaaatgggtggaaggtgaggaaatgaggaagaggatagctagtcctttcagaaagcttgccctgaatgggagaaaggtgattcagttcaacacttacgagaactttttttttttgtagattgaggaaacttgaatatttttgtatcctgaagggagaatggatgaagaagaa

SEQ ID NO: 635780 - DNA, 592 bp, Homo sapiens
gttagcagcatcagggagcctaactccccctagtgctgaaaggacagagtagtttccagaacagagaggtcacccagagggatacagctaacagatggtaacagcaaaacggtgccaggggaacatatatccagtcttcattctcctgcctctcatctgctagtgtcttctattgatcaaagccaacaggaagccagagggcaagggcatcattaagcaagctaaatggatcagctccacagaccacagagcagggtggaaaagagggtgaagggtaaatctcaagcaagaccaagtgaaagatattgtagcattctatcmaaataaattatgagcttatttctaaccataaactcctatgtcggatgggtgtacttcagtgccaccaaagaccaatcagaaatgttactgcatgtaaatttcatgaatactcaaaggaaactacttttttaagggagagataatgaatataatgtggcaatagctaaaatcattaggctgaaaaataggaatatatcagttttgaactcagatccacagctcaataaaatcttctgttttatatattaaagattaattttacaaagcaaaa

SEQ ID NO: 635781 - DNA, 624 bp, Homo sapiens
ggtcacccacaaggctgcaatcaagattttggctgccacagtcatctcaaaattctataggggcagaatcagctttcaagctctctaggtggttgttgataggattgtatctttcaggctgttggaccgagttacttgctggccactgatggaagcttttctcatttacttgccacttggacaaggacagcccaaaacacagcagctggcttcatcacaatgagcaagagaagctccaacaagatagaaatcatagtcttttataatctaatatgagaagtggcatcacaacacttctgcagtattctgtttattagacgcaagacactaggtgtattagtccattttcacactgctataaagaactacctgagactggctagtttacaaagaaaagaggttaattgcctcaccattccacatggctgkggaggcctccaggaaagttacagttacagcagaaggggaagaggcacgtcttacatggtggcaggagagagagaaggcgaagggggaacagccacacacttttaaaccatcagatcttgtgagaactcactcagtattacaagaacagcataggggaaaactgcccccatgatccagtcacctcccaccaggtcc

SEQ ID NO: 635782 - DNA, 613 bp, Homo sapiens
tgttatgagatttctcaaaagataaggaagaaatagttaatagagaaatatgtgcattctctatttctacagctaccaggaggaaatacctggtaaccaaattgcttatggaatcaattcaggaatacattctatttagaagctagcctattattcttaaagctagtgctagataaattatgtaaatgaaaacctttttaatttttacctatgaggttaagagacataaacatgcttttctcttttttyttttttttttttgtttattgtcatttcagggagggttaaggggaaatttctaaacgcttgtgtctgtaattttcagactcttttcacaaatactgaagcatgacagagtcgtttacacaaccgagacagaaaaatatgtgaggggcctaaggctcaagataattataatcctgacattaaaaaaaaaaagctattgtgttccacttctctgttttgtaagttgagtttttctttccatgcaagagaatgcaaaccactgcattttgtcagttccagaggcaacatttcagtctaaacaaaaacgcctgtcaatgttaacagtaagacaaggttgaaaagtgaagttaaagttcacgcatattgt

SEQ ID NO: 635783 - DNA, 613 bp, Homo sapiens
tgttatgagatttctcaaaagataaggaagaaatagttaatagagaaatatgtgcattctctatttctacagctaccaggaggaaatacctggtaaccaaattgcttatggaatcaattcaggaatacattctatttagaagctagcctattattcttaaagctagtgctagataaattatgtaaatgaaaacctttttaatttttacctatgaggttaagagacataaacatgcttttctctttttttttttttttttttgtttattgtcatttcagggagggttaaggggaaatttctaaacgcttgtgtctgtaattttcagactcttttcacaaatactgaagcatgacagagtcgtttacacaamcgagacagaaaaatatgtgaggggcctaaggctcaagataattataatcctgacattaaaaaaaaaaagctattgtgttccacttctctgttttgtaagttgagtttttctttccatgcaagagaatgcaaaccactgcattttgtcagttccagaggcaacatttcagtctaaacaaaaacgcctgtcaatgttaacagtaagacaaggttgaaaagtgaagttaaagttcacgcatattgt

SEQ ID NO: 635784 - DNA, 604 bp, Homo sapiens
catttggtaggcatagttctatgtatattttataaggggctaaaatgaaaattatctttaaaattatatttcctaatagacataaaatataaaaatgttatccagaaatttkattgtacagtcttatttattcataactgtctgtggagtctattggtgctctatgtaattgttccattttcatttcttttttccaaatctttgtatgtatttcctcctttatttttaggcaggtacttattatttcatgtgtacatattgaacataaaccaggataattatcatctgtatttactttccaatttaaaaaagtagattataattttcatcatggagttgtatttataccattatgtcattgctgttgttttgtttgttttgggttttttaggtatcgtatatcaggttaatgaaaaaggaaagctcctcatttacttacttttcttatttatttatcgtgcattcatattgagttttatgaaattcccaggctaaacctgattttcacttcttacttttaattccctaataaactcagtttgagaatattttgctttggacacatacctctatattcatgattatggttggaatttttcttttc

SEQ ID NO: 635785 - DNA, 527 bp, Homo sapiens
tgtgatggctaattttatgtgtcaacttgactggattatgggatgcccaaatagctaataaagcattatttctgagtgtgtctgtgagggtgtttccagaagagattgacatttaagttaattgagtaaagatcttcctcaataaagtgggtcatcatccaaagtgttgaggtctcaattagcattaaaaggtcaaggagaagtaaattttctttttgtcttcttgatgaaacacccatctcctcctgtcctgggacatcagcgctcctgttctcaggccttctgactcggggacttcatcagcagccccctggttctcaggacttctcattctgcctgatttcaacactggctttcctggtctccagcttacatatttatggggcttcttgattttcattgtcttgtgagccaattcccataataaatatcctcttatatatctatctctttatatatcctattggctttgtttctctagagraccttgactactacctagcaatgtctcctttttctgggcccaa

SEQ ID NO: 635786 - DNA, 607 bp, Homo sapiens
tgtgtctgtgagggtgtttccagaagagattgacatttaagttaattgagtaaagatcttcctcaataaagtgggtcatcatccaaagtgttgaggtctcaattagcattaaaaggtcaaggagaagtaaattttctttttgtcttcttgatgaaacacccatctcctcctgtcctgggacatcagcgctcctgttctcaggccttctgactcggggacttcatcagcagccccctggttctcaggacttctcattctgcctgatttcaacactggctttcctggtctccagcttacatatttatggggcttcttgattttcattgtcttgtgagccaattcccataataaatatcctcttatatatctatctctttatatatcctattggctttgtttctctagaggaccttgactactacctagcaatgtctcctttttctgggcccaactatattcaatagcaacattttttttttctataatagtctygctagaagtttatctcttctattaaattttacaaataccttacctttgaatttgtcctattaaaaaaaagtatattaattaccttccactctttttatttttattttcattattt

SEQ ID NO: 635787 - DNA, 564 bp, Homo sapiens
gtttgtatgtggatcaatagttctttcctatttagtgctgtgtagtattttattgtatgggtagttcacaaatctttattcacatgttgatggacatttgggtactttccagatttagattatttttaaaaggcaaaaattttcaaatttttaaaatatttttatatagatgtatactttcatttctcataagtggaatggaatgaatgagtatatggtaggcataaatttaatattttaagaaatttccaaactattttccaaagttattttagcagtttacatcagcaaagcatgagagttccagttgttccatgttcttgccaatacttggcatcattcgtctgtatgattttagatgccatcataggtatataggggcatctcactctggttttaacttgcatttacctaatgacaaattatgttaagcacctttttatgtgctcatttgctatctgataaggtttggatatttgttccgtccaaattccatgttgaaatgtaatggtggggcctggtaggaggtgttagaatcatgrggcagatcccttatgaatggct

SEQ ID NO: 635788 - DNA, 535 bp, Homo sapiens
tccctgaagcctcaccagaagctgatcagatgctaatgttatgctttctgtacagcctgaagaaccatgagccraataaacctcttttcctttataaattactcagcctcagatgtttccttatagcaataaaaagcagcctgatacactacccatacattttaaacattttaaagattgacaaataaaatgtgtataatatttatcacatacaatatgatattttgaaatatatatccattatggagtgtataattgagccatttatcttctttaatgaagtatcttcaacttttttgctgttttttattgtaatatgtgtttacttattgaggtttaagagttatttatatattctgcattcaagtcctttttctttcagatatgtgatttgataatatttcctccaagcctgtggcttgtctgccttttcattctcttaatagtgtcttttgaagaacagaaatttttaattataataaagttctattcatcaatttttttcttttattgattgtgctttcgatatgataga

SEQ ID NO: 635789 - DNA, 607 bp, Homo sapiens
tcaataaataaatgactgctacagcatttctataaattactttctgcagctgtcctgatggattgcaccaggtgaaacatataacctctgtctttagatgggaggtgggggtggaggcgcttttccgggataaatttcacatggaaggttctattgtcctattcagaaatccttttcttttcgccccagatgcctccaatttgcagcttggaaggttaaaaggagtttgcttgctgcctygcctagggtattaatctgtgttatatctctatattctgtttgcccttttcatattagagtgctcccatttgatactaacaagaataaaaataaattagtagagaaggccttcatattaccaattaaaatatgagaaaattgagggtcaagtatcaatatgttcaggatcacatagcttgtaattagtagaggcacaaattaaaatcagtattttttttcttttccatttccttttttttctcctttgttgtagttgttttgttttattcacatcagggtaacattcacctatgaacaaactcaaaaaatttagaaaacatgctcaaaagagaaatccaacattttcgaaagtggaaaagataggcag

SEQ ID NO: 635790 - DNA, 583 bp, Homo sapiens
aaaaaaggaacactgtgttctcagatggctgaaagcagaagggtaagtaagcagaacaccctgtgaagtctcttttataagggacttaatcccattgaaaaggaaggagcaattttggccttgtcatctcttaaaggtcccacctcttaataccatcacattgctaattaagttttatcatctgaatttagaagaggacacatacaaaccatatcaagcaggtcatggatacgaagagaaatagatattgtcaagaagtaaatatgagttagtaaaaataaaaagagagtctagttagaggtgttttacatatgtgtgtctgtgggtgtgtgtgtcatatataaattagggaaaattagatcagtggagaactatttttttttaaccaagcacaaatktaaatttagacagtaaatggtataaaattctaagagatggaaatcagtgggaagtgttcttagttaattgcttctatttttattcaggaaaacacattgtcatacccaaacttgttacccagcacatagaataagaggtctctcatttaatttctggaccacaccaactatcctgaacagacatt

SEQ ID NO: 635791 - DNA, 440 bp, Homo sapiens
accacaaactgagttgctaaaacaacagaaatttattatctcacagttcaagagactagaacctcaagatcaaggtattggccgggtttgttccttctgggaactgtgaaggaaaattgatcccaacttctcatagaggttggtggtttgctggcaatctctgctgttcctaatctctactttcctgttcacatggcattctccctgtgtcatgtctktgtccagatgtccactttttataattacaccaatcatattggactatgacccaccctatcctagtatgacttcaccttgattaattatatctacactgaatccatttctaaataaagtcacattctgaaatactagggattaatactttaacatgtatttgagggaacataattcaacacataataaactatttatcttcccttccctaacacacactgttg

SEQ ID NO: 635792 - DNA, 593 bp, Homo sapiens
aaaagggtgaatggatgacctttcttcactttaccttcatttaaaaagaatgcaaaggagacagccaggtgacagcaccctggtatggaggaaaagtctagaaatctctgtctctgtaataaaatataagactttcagctttgccataataggtaagccagatatttttattaattcattcattcattattttgagacagggtccactgtgtctgccaggttggagtgcagtggtgtgataacggctcactgcagtcttgacttcccaggctccagcaatcccacctcagcctygcaagtagctgggaccacaggtgtgcatcaccacgtccagctaagttttgtatttttggtaaagacaggatttctccatgttgcccaggctggcctcaagggcctgagctcaagcagtctacctgcctcagcctcccaaagtactgggattacaggtgtgagtgaccacgcttggccaggtaagccagataaatgatgaaatgcacacagacccagattccaagataaaattgactggttttaaaaagaaaaaaaaaacatacacacacacacacacacacacacacacacacacacac

SEQ ID NO: 635793 - DNA, 569 bp, Homo sapiens
tcccctagacctcttacggagtcatttcaatccttctcctagctcttgaaatgaccctaggcaagtaatttaattcattctttctgtcactggtcatagtgaagaaggatttaaggatttatatgcaataagaaacatgctttagagttttatcagtctaagctctgaagataaagagggtgaggtgagagttgagtgttttcactcattcgaccattttcagctccagggacatggtaaattcttccagtagctttatatagtgatcatacttttcttagattttggtgcattatttatcatgagtactttcactctcttacattttggamattcttgtgattgcttaatgtgttgttcttattcttgtttttgaccatttctagttgtagtagatttatacaaagtcctataaattttgtaggctcttttagggaagtgtaggttattaaagttttactgtgttcagtaaatagaattatgtgaaaccaacacagtaaagttgtgaggttttgccccaaaacttagtagtttaaaacaccaaacatttatttctgagttaggaattc

SEQ ID NO: 635794 - DNA, 553 bp, Homo sapiens
aatagcctaggtgtgtagttggctaacaccatctaggtttgtgtaagtacacactgatgtttgcaccatgaagaaactgcctaacaacacatttctcaagatacatccctgtcattaagtgatgcatgtctgtacttagtatttgagccaagtactttataaaagcaggaaaatgtccctgcctggagggtatgtacagtaacctagcataggagacaggctggaaagaacatagattattccatcaggtttagtgatatcagtaatctcctccaatgcaggagttttattcctgaaaacataaggaataattctctccgacagaaagagaattcagagctatcgagtaaatacacggtcaagagacagatactaagatctaaactgaamatataaaagccattgtatatactgatttaaaatagcacaaataaagaaaaagaacaagacctttacactgaccttgtacacatcttcaattaatggtacagtagaatcagattccattgcctgtctgctacaaacttttcaggctgcctctcccagtttcagt

SEQ ID NO: 635795 - DNA, 587 bp, Homo sapiens
catggcccagtcatcttgctgaccagtgctcagcccattgtctgggacctaacaagctcttaaaacatattcactaagtaaaatratgtggaagggaaggaagaatgatgcagaagaaagtttgagatgtctattgcaccatgctatttatagtacattattaattatttgttattattcccaccctttgcatctcttttaaaatagtttaagcatgtggaataatatagaaaaatagcataacaagtgaaatggctttcaaaaatgcacacgtatttatgggaatagtgtaaatactttaatctgggtgctgggtggggagtggcggagaggagaaatgaagaaaaaagaaaaaataataaaatagaagacaagtggctgatagtggacagtgaagtgggaagtataagtcagtcatttctggtcacttgcttttcaacatttaaatgaaaatatagcaaataacaagaaacgccgtagactaaaaagaactagaaaatggcgtcataaaaccaggaaataagatcattttgaggaaagagtcctcgacattgccaagtgctgagaatagagcagcagtgtcaaga

SEQ ID NO: 635796 - DNA, 587 bp, Homo sapiens
catggcccagtcatcttgctgaccagtgctcagcccattgtctgggacctaacaagctcttaaaacatattcactaagtaaaatgatgtggaagggaaggaagaatgatgcagaagaaagtttgagatgtctattgcaccatgctatttatagtacattattaattatttgttattattcccaccctttgcatctcttttaaaatagtttaagcatgtggaataatatagaaaaatagcataacaagtgaaatggctttcaaaaatgcacacgtatttatgggaatagtgtaaatactttaatctgggtgctgggtggggagtggcggagaggagaaatgragaaaaaagaaaaaataataaaatagaagacaagtggctgatagtggacagtgaagtgggaagtataagtcagtcatttctggtcacttgcttttcaacatttaaatgaaaatatagcaaataacaagaaacgccgtagactaaaaagaactagaaaatggcgtcataaaaccaggaaataagatcattttgaggaaagagtcctcgacattgccaagtgctgagaatagagcagcagtgtcaaga

SEQ ID NO: 635797 - DNA, 539 bp, Homo sapiens
agctgctgccctttccatctattgcccaaagatcatgccagggccactaaaacaggacagctacaaacccacctcgcttcttttcttcccaatgtctactaaagatgagatcattatcttccccatatgctctatctgagtcatcttcagtagcctggaaactaatcttggaagaacatccacagctggggaattggagttgaacaagagaaaaggaaaatcagattttaaataaaggttttataaaagggttggagtgtgttgaatgattgcccctgagactatatgtctaagtcctaatcctcagaacttgtgaatgaaaacagtttgggaaaggggtctttggtgatgtaattaaggatctagatatgatatcattctggatcttacgggttatgttccagagaatcataacccataggatacacacacacacacacacacacacacacacacacacacacacacacasagagagagagagagagagagagagagatttaagaaattggctcatgtgatggtggggcctagcaaat

SEQ ID NO: 635798 - DNA, 546 bp, Homo sapiens
tgtgagtctcttctggaaatgtattgagtgtagtttactttgtcttccctttaagacaatggccttatgtgggacttcayattataaccacttggaaagactaaaaaaataaaattagtgttcttgctccttttccccacttccttctgatttcatttgtctgggatggggctagggggtgatatgggttaagagtccctgtgttgagccaggtgtggtaacttatgcctgtaatcccagtactttgggaggtagaggcaggcagatcatttgaggccacaagtttgagaccagcctggaccagcctgtccaatatggtaaaactctgtctctaataaaaatacaaaaaaattagccaagcatggtggtgcacgactgtagtcccagctactcaggaggctgaggcatgataatcactttaacctgggaggatgagatttcagtgagccaagatcatgccactgcactccagcctgggccacaaagcgagatcctgtctcaaaaaaaaaaaaaaaagagaaaagagtccttgggttgattctaatc

SEQ ID NO: 635799 - DNA, 463 bp, Homo sapiens
tggttgtctttgtcctttacagatggccatcacagcagtgacccttggagctcctccagtgggatgaatcagcctggctatgcaggaatgttgggcaactcttctcatattccacagtccagcagctactgtagcctgcatccacatgaacgtttggtaaggcagacatacacggtaaygggaatgtcacagctagttgattaaacctcgtcctctgtctttccatgcatatacacaaggactctgcaaataagtgcaaaaatggcacacacccattattcttaagttgtattgtttctgtgatcaaagacataacaggttcaaatcacctttgtaaattcttccagattctctctggcattgttcttttgtttattgtgttttgctctgtgccttctttatcacaatgtcagcttccttgggtacataaatagatacctatttaagttgtagaatcttaaca

SEQ ID NO: 635800 - DNA, 523 bp, Homo sapiens
ggactaatacttttcctccttggccaactgttccagccaaggatccctgcatggctccactcaccatttcaggctaacccattctccacacagcaacttgatttattacacgctctggctaatagactctgactgctgtttcaacctttactaactcttctggctgtggcttctttcttgccatttctatctaaacaaacttctggtcttagaccctaccatcaatcctatcctgtcgacgcctgcgctagataattttgttggcctcccaagcatccctcctccttctcccatccacataacctttcttcctgttggggaatttgcctgtcccctcttcyctgtgtgagtttgctcactgttgtccctagttctacttttaggggtgatgcctgattggctcaaaacagtaagtgtatcctacccctccttggccacagggattaaagaatgagcagagcagagatagagataagggaaagtatttgatggaacacctgtgaaagaaaaacttgtccatatt

SEQ ID NO: 635801 - DNA, 583 bp, Homo sapiens
aagctttcctttctgttaaccaaacaaccctgtttttgtatawgctatgaacagttaaacttgggtcatacattaattgtgaataaaggtttaagctatagacctaagtttagggtgttgtctctgctacatgtagttttaagatgaggctgttaaataagctggaccactcctttgaagcagtaggatgtgaaagtctgttgtacctttagcatcatctagcaccacttattaaaccatagcataaagttgcaaaaggtcagtatctatctatctatctatctatctatctatctatctatcatctatctatctatctctctatctatctatctatctatctatctatctatctatctatctatctaactatcatctgtttatctatctgtcacgggtagaccgcaaggctaagcatgcctggctacactatcactgatggaagagcaatgcaagttaggcatctttccgccgtgctgaaatagaggaagtgcagctctgagagattcaggaacttgcctgtagtcatagttgggaagtgggacagctggaattgcaaagctgtgactacaaatctggagca

SEQ ID NO: 635802 - DNA, 503 bp, Homo sapiens
aggcaagaaccttggacttgtcctcaggatacctagtttgcagattgggtgcttgttgtatctctgtgacttatgggatgcgaccgcacttctcttctactcagtttctttatctgtaaaagaatatttttccctcctgtagagatgtccctttgtgtcaggtatgacccccaactcatgtttctaacatggaagaagttttgaactgctccattstaggtccttcaaatacttttctgttgtatgcttgtgatcatgcatttgtggggctgggaggctgggaggaagtctatggcatgagacctttaaataaagcaggggtcagcacaccaggtctgcttttacatggatcctttgaagaccatactctaatattctgagctgaatatgaaatacaggccaatgggactggggcctaaaatggtgatacatgaacacttaaaaatatacaagtcactcaaaggaatggttcaaatggctaataaatttggaacgaatacaaa

SEQ ID NO: 635803 - DNA, 571 bp, Homo sapiens
tgcaaaatacatacaaattattatgaggttcttttaagttcttgctcagtagtattctcctgtccatctttcagtttctcttaataaaagtctaagattaagagtaccattctgaacggtgtagtattgaaatctgcaaccaatttgaaaccaaaaatactggtttataaatagaagcaacgaactcacatctaaaatgtggaaagatatttttgaatgccaaagagaaatctttttttctttcccttgacctctgccctaaaaattcatcattgaataaaaattgtttatatgttcatggcagttgcttagagtttacaaaagaaaagtctagattttaatttagcttggcctcaggtaatgtgttaaatacacttgggatgcatataatatgagattttcgtttgtacagctcttttttttctaactacartgtttaaacatactgcttttaattaagaaatctggctttattaaaagccagatctgtgacttataaccatttctgtatatctgctctcaatcaacagaaaaatagtttaatttctgtagctgtgttcattttgcatat

SEQ ID NO: 635804 - DNA, 563 bp, Homo sapiens
agttgataaagttgataaaatagaaaactattttctaaatagcctgttasagaatttcagcgaagctattggtggtcagcatcatcttttaatagctactatcttgtttttctttaaattaggatatttgccttctctagtgttctgtcatctctcctaatctccacaactatcaggtatttcggagagcagattagtaacctcaactgaaagttttgatctttatcaatttatcagttgctcctcttgggctttcacaggttttgattccataaagttctgtgtctatttgagtgcatacttcatttctaagcagttattcccatggactctcagggaatttaagagattatctctactgaaatctccctacagatttcctgccaagcagtcaacaagtcttgatcagcctccttccttcaagggtgactagctccaaatgcccacaaagtccattttcatcaaatatttgaaagttcttcctaggtccagcccaaatttgcttttttctacagtccttatgtttctgcccaatagaattgcccacaaatcaagtccaacaa

SEQ ID NO: 635805 - DNA, 660 bp, Homo sapiens
catcttttaatagctactatcttgtttttctttaaattaggatatttgccttctctagtgttctgtcatctctcctaatctccacaactatcaggtatttcggagagcagattagtaacctcaactgaaagttttgatctttatcaatttatcagttgctcctcttgggctttcacaggttttgattccataaagttctgtgtctatttgagtgcatacttcatttctaagcagttattcccatggactctcagggaatttaagagattatctctactgaaatctccctacagatttcctgccaagcagtcaacaagtcttgatcagcctccttccttcaagggtgactagctccaaatgcccacaaagtccattttcatcaaatatttgaaagttcttcctaggtccagcccaaatttgcttttttctacagtccttatgtttctgcccaatagaattgcccacaaatcaagtccaacaagcacttgagaaactcagttatttgaagacagtctgctgagtgttttttccctctagrcgaaacatcactatcttcaaatatttaacctgaaaaaaagtttggactccctgtcatgaactccattgcttcccagtgcattctccctagtttagcaaggatgcctttttctccacaagaac

SEQ ID NO: 635806 - DNA, 529 bp, Homo sapiens
tattttgaatccaaacaattaatatgatttatgtgatcatctccacccaaaatttaaaaaaaagttggagtgcatacacacacacacacacacacacacatgcacacatgaatataaaaatggcatacttcaggatcaattacttaaatatattttcagtaaaaagcaaaatattataggtgatacttaatacatggctgcctttaaatagcatgtgcttattaggtcctgtgaatttgttgttggttcagatacttattgttgatgcattctttggaaatacccttttaaaatatattggtaacacaagagtgaygattctcctttctggtttcatatttttgactggaaaaaaaaataaacctgattcatagcagtataaatgtatggttaattttttgtgttttagacccaccgtcctgtgtaaatgctcacttaaccataggctaagaaaatacttggaaatagaaaagaaaatgtgaactactgattgtcctcttagttgacaaatgcttcatgttttcgcttg

SEQ ID NO: 635807 - DNA, 586 bp, Homo sapiens
gtgcagtcaagcacacttttctgtccccaktccagcctctcctggctatttaactggcgccatgcctcccccacctcgcccattcaatttagtcaatgtttaaaaccgaattctatgctaataattctgacagcaattatggactcctgttaagttccagataccatcctatgttgcttacctaacattaatgcattttaaaagttctaactccaaccccaaagctccccagatccagggctgcttggatgaccatttcatggtccatttccactcagctgtcagccatcacccaaattcaagatgcttagaaaagacctccgtatctttttttagatattagcttggattttccctgtatgttcttttctgtcaggggcactatcattcacctggtagccaggtatcaaaccttggcttcatctttgagctctttgaaatacttttctgtgttaaaatgctcaattattctggctcatgtagtacaatctttagattcaattcagatttttctggtaacattacatatatttgccttgttttgcctacgaactgacttctgggatgagattttttcttataactg

SEQ ID NO: 635808 - DNA, 586 bp, Homo sapiens
gtgcagtcaagcacacttttctgtccccagtccagcctctcctggcyatttaactggcgccatgcctcccccacctcgcccattcaatttagtcaatgtttaaaaccgaattctatgctaataattctgacagcaattatggactcctgttaagttccagataccatcctatgttgcttacctaacattaatgcattttaaaagttctaactccaaccccaaagctccccagatccagggctgcttggatgaccatttcatggtccatttccactcagctgtcagccatcacccaaattcaagatgcttagaaaagacctccgtatctttttttagatattagcttggattttccctgtatgttcttttctgtcaggggcactatcattcacctggtagccaggtatcaaaccttggcttcatctttgagctctttgaaatacttttctgtgttaaaatgctcaattattctggctcatgtagtacaatctttagattcaattcagatttttctggtaacattacatatatttgccttgttttgcctacgaactgacttctgggatgagattttttcttataactg

SEQ ID NO: 635809 - DNA, 586 bp, Homo sapiens
gtgcagtcaagcacacttttctgtccccagtccagcctctcctggctatttaactggcgccatgcctcccccacctcgcccattcaatttagtcaatgtttaaaaccgaattctatgctaataattctgacagcaattatggactcctgttaagttccagataccatcctatgttgcttacctaacattaatgcattttaaaagttctaactccaaccccaaagctccccagatccagggctgcttggatgaccatttcatggtccatttccactcagctgtcagccatcacccaaattcaagatgcttagaaaagacctccgtatcttttyttagatattagcttggattttccctgtatgttcttttctgtcaggggcactatcattcacctggtagccaggtatcaaaccttggcttcatctttgagctctttgaaatacttttctgtgttaaaatgctcaattattctggctcatgtagtacaatctttagattcaattcagatttttctggtaacattacatatatttgccttgttttgcctacgaactgacttctgggatgagattttttcttataactg

SEQ ID NO: 635810 - DNA, 479 bp, Homo sapiens
cttttttcaggtcttacttttctactttttgacaattatataaaattgattttgttagctcttttaaagctgtgataaaatacacattgttaataataaaagataatgggggccgggtgtggtggctcatgcctgtaatcccagcacttcgggaggccaagtcaggaaaatcacaaggtcaggagatcgagaccatcctggctaacatggtgaaaccctgtctctactaaaaattaaaaaaaaaaaaaaattagccgggcwtggtgccacacacctataatcccagctacttggggggctgaggcaggagaatcgcttaaacctcgggaggtggaggtttcagggaaccgagacggcaccactgcactctagcctgggtgacagcgagattctgtctcccaaagaaaaaagaaaaaaaaaaaaaagataatgggcagagaaatttaaggaagttataggaatgtaaaataaacatttga

SEQ ID NO: 635811 - DNA, 558 bp, Homo sapiens
gccatgttggccaggctggtctcgaactcctgacctcaggtgatcgacccaccttggcctcccaaagtgctggtgtgagccaccgcggccggccaagtacaccttttccaaggaacaacctgcagccagtgactggctaatatggrcataaaagtcccatcttctttgcctaattggaacaacactgaagggccagcttcagagatcctattagttttgggatcagctgtcacttcacttcaggttagcttctccttctgtggagtcctgctttcttcatttccttacatttccccacaagatatcttcccgataaaaattctgcacccaagtttccatcctagatttgacttcccgggaaccaaaaccaaagtcctgaaaaagacctcatcatttagagatcatactatactatttacaggtgaagtgacaggacatatgcaatttgatttaaaatactgcagaaaaaaaagtttatgtaaggtccaatttatgattcaagaatcccaagaaaacaaataaaatgtgtgttatttagaatataatttcaataaagac

SEQ ID NO: 635812 - DNA, 535 bp, Homo sapiens
aagtcaccaacagccatagcaattatagacaccctggagaaagagacactgttgcacaaccaccaccacctccagaaggatctgctgtcccatcacattgggagcatggctgccaacttcctacaactatttctatgctccagatcccaagaccacagctgcattgtgtatgttcagctccagaccctgaatctgcaggtgatctacacgagaaagtattccacacctgggactgtagctgacaaatgcatacttacgtctcagccaycagaagcagtgctatcatgagctagccagaattctagatcccagaaagactgccattccatgaactccatgctccaaatcccatatccatggtcattctacaagcactcatgcatcagacagtagtgctaccaccaccgcaaaggtgcccacgatctgatcctgtcaccaagagtgacaatatcctcaatgggagataaagaaatcaggagggccctaggagcctttgccaccaaagatttctagcgcctttgctggtactgtgaac

SEQ ID NO: 635813 - DNA, 477 bp, Homo sapiens
ctgtcccatcacattgggagcatggctgccaacttcctacaactatttctatgctccagatcccaagaccacagctgcattgtgtatgttcagctccagaccctgaatctgcaggtgatctacacgagaaagtattccacacctgggactgtagctgacaaatgcatacttacgtctcagccatcagaagcagtgctatcatgagctagccagaattctagatcccagaaagactgccattccrtgaactccatgctccaaatcccatatccatggtcattctacaagcactcatgcatcagacagtagtgctaccaccaccgcaaaggtgcccacgatctgatcctgtcaccaagagtgacaatatcctcaatgggagataaagaaatcaggagggccctaggagcctttgccaccaaagatttctagcgcctttgctggtactgtgaacactcagagtcttggcttttgaagact

SEQ ID NO: 635814 - DNA, 539 bp, Homo sapiens
ttaaatttacttacgaatatcctgctataaatcagagcagaaaaaattgaaagaataatatggaatacaatttgtcaatgagtattaagtagtagagtaaaaagtttttcattaatccttgtatttattttactgagtgaataaaagaaatttttaaattggaaaaaatatgttattcgttaattttaagtaaacttttggtaatgcctatatttatctatacgaaattaatcgcccttttatatcatcatcttttcataataaatgttatattatgcagatagtaaaacaaatataattacctttctctcttattatcttcttatgttacctgtttatatcaggtttgttatggcataattatatggaagtattttatgtaatcccaaagaacaggaaaagcggtaagagaaaaaatcaggtatgcaagtatatatggagtttttgatggcaacagaaaggactcatgtctttcaagaggagtagaagaaatrtcaccactcagcttatgaacatcaagacatgcaaaagttgggtgt

SEQ ID NO: 635815 - DNA, 618 bp, Homo sapiens
aatttattataataaagattgtataaaaataaatattttataataaatatttataatatttatgttgaaataaaattttggataattgaaatcaatagcatatagaatataatttttaagttaacattaccttttctctttttttaaatctatttttacatggttactagaacatgtaaaattacacatgtggcttgcatttgttgtttgcattatatttctgttgagcagtgctgatttacacatggcaatccatayatgtcctttactgtcaactctggagccttgaacttgttgtgtcttccttgaaaaatgttctaacctaatatgtccatttttaaccaaatcaatttttagcctaaaatgaccatcagtacttcttagatggcctttaacttgtccccaatggactcagtgctcaattacttattacaatttattgagtaaatgcgcattgagtatctactacgtcaatcgccagtttaggagttgagaatgaagcagtgaatagcagattaaaatcagtactctctcctgatggagtcagacaatggtacggaattcaagtggtcagtctgaatcgaaaatgggattcaggaaatggggataaaaaatgtc

SEQ ID NO: 635816 - DNA, 556 bp, Homo sapiens
gtctcactgtgttgtagcatctgaaggaagtgaagaagctgagcatggcttcttgggaagagccttcctgtttacgggaacatcaaatggaaagttctgagcaatactggagcacacatagtggccttcggaaaggccattgtggctgaagccagagatccagagagagagatgtagatgagtcagggaatttgagagcaagggtgggtgtggggctgaacattggctaatcaaataggtcaccatgagtattgtggcatttatgtcaagtatctggagggttttgttcrgggtgagtaatatgaccaaaagtaaattgtaatattactctgggtgtggcaatgagaaatgtgtgagaggagatgaggttaaaagtgagtaggttggtatgagacaattgcaatagtccaggtgagaggtgatgatggcttatgtcagggtggtagctaaagaggtaaagtgccttctctcatagaggcaataacagcctcttggttgaatgttctgtgtccagagaaattacctgcattccaacccagccttacctttctccttt

SEQ ID NO: 635817 - DNA, 581 bp, Homo sapiens
ggtgggggaataaggaagagacacaaacacartccagtagccaatttgtattttgccacttatgatctatagatgtgtttctcgtgccttttttttttcattatcactcttctaagtattttttaaagattttttcccctaattaccctttcccctaaaatgtgttacccacagatatattgtatatgaaatatcatttggggacccacacattgttgtaatgtctaagttttttttttttcttgttcccatgagaaccaatttttactccactgaagaaaagatcacccccattgagaatgcataataccacatacagaatggtaattcacattcaataaaaataaaggcaggtgactttcagcaaattcacactctttactatagaaaaattttcattttgctgtacatgtatttaacaaatcatattgatggtggcaggaataaagttaaaaatctgtcaattgtgctttaaattctcagatgtgttttctatagtactgctccatgaaagggccatatatgcaaagtgacccccaaatgctgaaggagccacaccaaagaaggaggcagacaaacct

SEQ ID NO: 635818 - DNA, 581 bp, Homo sapiens
ggtgggggaataaggaagagacacaaacacaatccagtagccaatttgtattttgccacttatgatctatagatgtgtttctcgtgccttttttttttcattatcactcttctaagtattttttaaagattttttcccctaattaccctttcccctaaaatgtgttacccacagatatattgtatatgaaatatcatttggggacccacacattgttgtaatgtctaagttttttttttttcttgttcccatgaraaccaatttttactccactgaagaaaagatcacccccattgagaatgcataataccacatacagaatggtaattcacattcaataaaaataaaggcaggtgactttcagcaaattcacactctttactatagaaaaattttcattttgctgtacatgtatttaacaaatcatattgatggtggcaggaataaagttaaaaatctgtcaattgtgctttaaattctcagatgtgttttctatagtactgctccatgaaagggccatatatgcaaagtgacccccaaatgctgaaggagccacaccaaagaaggaggcagacaaacct

SEQ ID NO: 635819 - DNA, 581 bp, Homo sapiens
ggtgggggaataaggaagagacacaaacacaatccagtagccaatttgtattttgccacttatgatctatagatgtgtttctcgtgccttttttttttcattatcactcttctaagtattttttaaagattttttcccctaattaccctttcccctaaaatgtgttacccacagatatattgtatatgaaatatcatttggggacccacacattgttgtaatgtctaagttttttttttttcttgttcccatgagaaccaatttttactccactgaaraaaagatcacccccattgagaatgcataataccacatacagaatggtaattcacattcaataaaaataaaggcaggtgactttcagcaaattcacactctttactatagaaaaattttcattttgctgtacatgtatttaacaaatcatattgatggtggcaggaataaagttaaaaatctgtcaattgtgctttaaattctcagatgtgttttctatagtactgctccatgaaagggccatatatgcaaagtgacccccaaatgctgaaggagccacaccaaagaaggaggcagacaaacct

SEQ ID NO: 635820 - DNA, 581 bp, Homo sapiens
ggtgggggaataaggaagagacacaaacacaatccagtagccaatttgtattttgccacttatgatctatagatgtgtttctcgtgccttttttttttcattatcactcttctaagtattttttaaagattttttcccctaattaccctttcccctaaaatgtgttacccacagatatattgtatatgaaatatcatttggggacccacacattgttgtaatgtctaagttttttttttttcttgttcccatgagaaccaatttttactccactgaagaaaagatcacccccattgagaatgcataataccacatacagaatggtaattcacattcaataaaaataaaggcaggtgactttcagcaaattcacactctttactataraaaaattttcattttgctgtacatgtatttaacaaatcatattgatggtggcaggaataaagttaaaaatctgtcaattgtgctttaaattctcagatgtgttttctatagtactgctccatgaaagggccatatatgcaaagtgacccccaaatgctgaaggagccacaccaaagaaggaggcagacaaacct

SEQ ID NO: 635821 - DNA, 327 bp, Homo sapiens
agaaggcaagcaacaatgcctgattcaataatgtacttgttatgaatatttagcaatgtattcattattaatattattgttactgcaatggcatatttrctatgtctgttctcaacaatgcaacaatgccctcttgatgctgccgggaaatagaagggtctcctttgggacatgtggtcacagggagtctctgagtttgttgataaagggattcaccaggaaaatcatcttccaacctgggccacttcttaatgaagacaccccttgctgcctgagtcctgagtccacacagtggatcagctggtaccacaggcaagctggatgctg

SEQ ID NO: 635822 - DNA, 595 bp, Homo sapiens
cactaacatcttcatgagcacccctaatcagatactgcttagaatatgctgcgaatgttgtgcataatatttggtccaaaaaattgcagttaagtatgtattttgaggcaaaaagcccacttcgctctactctctataaatcaatagtttagatattaataaatacattcctgatgtattgtctactatccagaggcactgtttgtaagattttctttctttcggtataaatgtacccaaagttaaataacctactttctcactgggctttactatttgagcactatataacaagcagtgcacactccgacattattttaaggtccctggagttttggagtaatataccaagaaagattttatctttgttttcataatttctactccagagcagaatgtgtctatctttggacacttaaagggccacatgttttttttttcacctccaatataatcagtaaatggccacttgcttccaatgagtatttctttattcaarttacaatatttgctttgcattacagccaacttttgctaccaggagtggatagtggctaatgcagtctcgctttcaaagtaacgcatttcaccattg

SEQ ID NO: 635823 - DNA, 623 bp, Homo sapiens
cacaaatgtacaaatacaccatttgagtacaaaatacgtggagatatacattagtgttctatcacatcctcaccttcttcttctcccaattatcctattaaatgcaaccaaacaaggtctagagaattttggagctctactcctatgctttccatatttacaagaagtaggcaagagcaagcagaagcagatggtgattgttttttcctcaaagaaagaccaaaatgcataaaatatgactcaatgatgctaattttttaggtgtatgagcctcagttgatggtgttcattgttattaatatattgctgkgcttctgctttttccactactaagagcaagaaagattcacccttaaacattaccttgctcttggcttgacaaacagtgagttacaaaaagaaattccaggaaatgaatatgctatttcttaaagatttttaggctgctcatcttccctttgtaggtctaagtttgcatttgaaagctatgttcatctttatgattggtcagaaatgctatcaatatatacttcgttaatgaatgataaagttgaaacatatacaacttttcaaaataaattgtctactttatatgaagttaattattttccataataatgaga

SEQ ID NO: 635824 - DNA, 623 bp, Homo sapiens
cacaaatgtacaaatacaccatttgagtacaaaatacgtggagatatacattagtgttctatcacatcctcaccttcttcttctcccaattatcctattaaatgcaaccaaacaaggtctagagaattttggagctctactcctatgctttccatatttacaagaagtaggcaagagcaagcagaagcagatggtgattgttttttcctcaaagaaagaccaaaatgcataaaatatgactcaatgatgctaattttttaggtgtatgagcctcagttgatggtgttcattgttattaatatattgctgggcttctgctttttccactactaagagcaagaaagattcacccttaaacattaccttgctcttggcttgacaaacagtgagttacaaaaagaaattccaggaaatgaatatgctayttcttaaagatttttaggctgctcatcttccctttgtaggtctaagtttgcatttgaaagctatgttcatctttatgattggtcagaaatgctatcaatatatacttcgttaatgaatgataaagttgaaacatatacaacttttcaaaataaattgtctactttatatgaagttaattattttccataataatgaga

SEQ ID NO: 635825 - DNA, 582 bp, Homo sapiens
ggatggttttgttgctggggacctgcttatcttccctgaaacaatcatctgagagacaaatggtctatctttttggttcattgcctttgggttctctccattatcagagtttgcctactgtaatgcatcaagaattttcacrttcacgtttggtttcgccatcataggaattcagaatctctaaacagctacagacaaagtctaagggcaattgttcatttattaaagttaacatttaaaaatctattaaatacataaaatatattaaatttaaatatcgaaagctttttatgtatcatccagtactcattagtattatttaatgatgcacttgaaggctgataaaccataattaggtagctgttctcctagtgttatatatttagtttcattccaaaatgtgaggactctggagacggatttcttgagttagaattctgactgtactacctactggcagtatgactttgagtaagtcacttagcctctattttctaatctataaaatggaaatgatcataatatctaactttttggttcatttaaagtagtagatgagaaatcatgtacatagaattcaga

SEQ ID NO: 635826 - DNA, 508 bp, Homo sapiens
tgacagtctccaggaaaaagcccttctgtatttcaatgacaatgattacacacaaagcaaaattaagacagcactctaaaagaatccagttactagacttaccataacataacatgaaaaggacttctccgtacattggctctgaactcttactgctattgccagagctgttttacattttatagtagtgaacacagtgaggcagagaggatttttaataaaataacctacagatgagtcccaattctccttttagactgattgcctcaatttttcttttttataacataagaaaactctttcctacaacctagtgttatgagggagaactgaaatcatttagagaaaatatttattaacttccaaattcaactcaaaaatgtctaaagtcataaatttatttcctaaagaagaaaacatcaacagccacttcaratacaaaatagtgtatttactttttcctcaagttgtaccaagatgacaatcactttttaaatggacctagtca

SEQ ID NO: 635827 - DNA, 562 bp, Homo sapiens
caaaaaatataattagaaatatgtcagtaacataggaccaaaatatataaaatatttattgatattcttatttacatcaataccagtttttctgttttctaaaataatgtgaatgtgtttttgctaataattttcatgggaaatggtgttattacaacttttgagtaaatattctcttgttagtaaaatatgttattgccaataaatatttttatatatccagtaaatattcttgaattctatttcatattttaatgaaagcaataaattagaaagaagatttataagttagcgatacaatatctgtgtaggtttgtgtgacctatttgaatatattcagaaaaatgctttatgtgaattgctttattttccaaaatatcctatgttcttatgaaatcatagatmatttcattgtctctcttttgcatccttcatatgttatcattggattcaataattgcttgatcactgggacattgtttctgggcctcactatgggtttggcttcaaggtaatttatgaatgtttcatctaattattacagttacaaaacaatggctgt

SEQ ID NO: 635828 - DNA, 507 bp, Homo sapiens
tcctatatgccatatgttttaaaaagataaggtgtgagtacagaattttagctacataccactagtaattctaattttctattttctcccaaatcagaaaggtattttgaggtgtttaaaataaggcttcaatgtaagccataaaggggcccaacaatgcctgtgtctctgaaagtatttataaatatttatgaaakaatattataaattataagctactaggcacattgttatgatcacaaaaagatgacttattaagaaaatatattagaacattccaagcaaatgctcacaatgttcaaagaaaattaaaagttactttttaaaaattttttaccttgagactaatttttaaatgttagcaagtattctcacatgtggcaaagaatctcttccattatggaaagaatcagagtcactgactgttaaaatgaggtgccagaattatgagtaatcaatgttacctacatgaatgtttgatcctctagaccatgaaatttcataaat

SEQ ID NO: 635829 - DNA, 415 bp, Homo sapiens
tgcacagaaaccttaagcatcacttaaaagggctattacgtataataatactgttagaagtctgygagaatgttatatatattttaaaataaagcaaataaccacatgcattaacattattaggaaacagtttaaaagagatacagataaaaaattgttaagaaaagggacaatcacattagaaaattgtttgccagttttctaaaaataaaacatttacagctacattatgaaccagtaattctattcctaaagaaataagtcccactcctatgattaataaacagataatagttacataagaatatattagcagctttattcattatagtcaaagtctagaaaaaaatgaaacaaatgtttatgaacagaatagataaatctcagtatattcatacaaaggagtagtagtcta

SEQ ID NO: 635830 - DNA, 600 bp, Homo sapiens
gtcatttactggggatctaaaaataattttaaatatttcaaatttgattgtaataaagaaatttcactgggatccttatttaaattattctaaaggactgaaattaatttctctatttgtagaactagcaacagaactaggataaaaacttagtcctttaatacaccaaccactggatttttgtttgtttgttttgcccacaatgtctgagtcattgataattgttttatttctggttgtaatgaacatatattgacctttgaagctggcctgttcttatctgtaaggtagatttgattactattcaaaaatactcattgatattcctccatttccacggacagagttgttttcctcattcctcaattctaggatttgacaatgagatattagcagagatgayagaaacaaaaatttgaaaacaacttatatgtttgagctccaggtaaatacactttgattgttatatgacactgagattttgtgattgttagttacatacttactgtattcataattaactaatatacggatctatttcagtgatattaaatgtcactagaaagatcttagaaacatattcacagagctagaaaatgc

SEQ ID NO: 635831 - DNA, 615 bp, Homo sapiens
cacatgcattaacattattaggaaacagtttaaaagagatacagataaaaaattgttaagaaaagggacaatcacattagaaaattgtttgccagttttctaaaaataaaacatttacagctacattatgaaccagtaattctattcctaaagaaataagtcccactcctatgattaataaacagataatagttacataagaatatattagcagctttattcattatagtcaaagtctagaaaaaaatgaaacaaatgtttatgaacagaatagataaatctcagtatattcatacaaaggrgtagtagtctattgttactacataaaagataaaaaactaccaatagatgagacactatgaataaatccaaaaacaatttgatgaacaaaacaaggccgacacaatagaatatttatggcctataaagttctagaactgacagcattaatatatactatctctaaagcaaggaattgaccaggaagggacataagaacttttcaagatggaaaaaatcttccatatcttggtaagggagtgcattatacagttgcttgtgcgttttgtgatacatcaaccattatcactcaaggcagggtgtggtcgcccaagt

SEQ ID NO: 635832 - DNA, 615 bp, Homo sapiens
cacatgcattaacattattaggaaacagtttaaaagagatacagataaaaaattgttaagaaaagggacaatcacattagaaaattgtttgccagttttctaaaaataaaacatttacagctacattatgaaccagtaattctattcctaaagaaataagtcccactcctatgattaataaacagataatagttacataagaatatattagcagctttattcattatagtcaaagtctagaaaaaaatgaaacaaatgtttatgaacagaatagataaatctcagtatattcatacaaaggagtagtagtctattgttactacataaaagataaaaaactaccaatagatgagacactatgaataaatccaaaaacaatttgatgaacaaaacaaggccgacacaatagaatatttatggcctataaagttctagaactgacagcattaatatatactatctctaaagcaaggaattgaccaggaagggacataagaacttttcaagatggaaaaaatcttcyatatcttggtaagggagtgcattatacagttgcttgtgcgttttgtgatacatcaaccattatcactcaaggcagggtgtggtcgcccaagt

SEQ ID NO: 635833 - DNA, 607 bp, Homo sapiens
catgtcaatttggtgttttaatttgaaattgggcatttaaaaactgtgattatttaatactattattatttttgttttttacaacgcctatttttagatacrtaaggtacctgtgcaggtttgttacatgggtatgttgcacccaggtaggagagtatagtacctaataggtagtttttcaactcccctcctcccagtattccacaatgtctattgtttccatttttatgtccatgcatactcaatgtttagctcccactttaaagtgagaacatgcggtatttggttttctgttcttgcattcattagcttaggattatggcctccggctccatccatgttgttgcaaaggacaatatttcattctttctatggctgtgtagtatttcatgatatatatgtgaggcaggagaatagggtctggagcctaaggccaacctgaggctgacttcttggaattgaaccaaaaagaaaacctcacctctctatgcctaagtgacaagaaaccagagtcacctgcctctacaaacccctcccgcccccacactcccctgtagcacaaatgggaagtacctctgattggtctggggccaagccttcatttcag

SEQ ID NO: 635834 - DNA, 607 bp, Homo sapiens
catgtcaatttggtgttttaatttgaaattgggcatttaaaaactgtgattatttaatactattattatttttgttttttacaacgcctatttttagatacataaggtacctgtgcaggtttgttacatgggtatgttgcacccaggtaggagagtatagtacctaataggtagtttttcaactcccctcctcccagtattccacaatgtctattrtttccatttttatgtccatgcatactcaatgtttagctcccactttaaagtgagaacatgcggtatttggttttctgttcttgcattcattagcttaggattatggcctccggctccatccatgttgttgcaaaggacaatatttcattctttctatggctgtgtagtatttcatgatatatatgtgaggcaggagaatagggtctggagcctaaggccaacctgaggctgacttcttggaattgaaccaaaaagaaaacctcacctctctatgcctaagtgacaagaaaccagagtcacctgcctctacaaacccctcccgcccccacactcccctgtagcacaaatgggaagtacctctgattggtctggggccaagccttcatttcag

SEQ ID NO: 635835 - DNA, 592 bp, Homo sapiens
aggaaatacagaacgtagaagaacaaaggataccattaacaatcaattagaccaatacagaatatagtatattctatcactgaactaatctgattgtttaaaacaccaatttatggggaaatagtgagagaatctattctaaactaaaaagcaattaggaagatataacacctgacgcattaactacaaagcccttctctttgtgctcattcattatgtattttctgcttatttttccataccatttcttacataggctactattgcaatatgtttttccttatctatgttctttaaaaaaagtatatttttaactttaataaatgttaaaatcaacactatcttttatcttttaaggttactgtctgttgtargtatactatttcaacacaagtgacattcatcatgatacctgtcttaatgtgtgatcatgtgccataaactaaagcatactgcctaagaaagttgtctgtctctgagtgctacataagtaaaaagtaaacccatttagcaaacataaatatgaatgtatgccttgggtgtcaagatatcaccatcattcccagtgtcctgcttccagaattttatttat

SEQ ID NO: 635836 - DNA, 362 bp, Homo sapiens
cttcctattacgcttgtttttacctgaatgctccacctcactgctgcgctccaaattctctcacctccacaaagtaaaatcgacgggagaaggaagaacttccttccctctcttgccagcagttatagtgtcaaataaaggagtaggttacaatgacaactgtttctactcaacctagattaatggatagagcatacatgaggaaaaacctttgtgggggccaagatgtttaactataaaaagaggaaatacagaatgagtattgaaawttttaaggatctagaagctaaaaaagcagtggtcaggattatgggattgcctcataagtcattggtactgaaataagtaaataaagccttgaa

SEQ ID NO: 635837 - DNA, 369 bp, Homo sapiens
acagtgtaaatttttcttaatattctattggattcccttttccagtattgcatataggatagttacatctgtattcataaaggatattggtgtgtagttttcctttcttgtgctgtcatgtctggcttggggtcagggtaatgctagacgttgaaggacaataaaaacaccacaaagctttcctgccatatttaagttgtctgttattgactcagcgattgcttgattccatgaacctttgactgctttccagagttctgacaaagtggattgtgctgtttttccttgattttttcaatgwttctgtggcgagatggacacttcaagctgcctaccttgccatttttgctgacatctcgtcacacccat

SEQ ID NO: 635838 - DNA, 298 bp, Homo sapiens
tatatatatatttacaagtgaccaatgtagtatactataattgcatttatttkgctattataattttatgtttcctgaagttatgaagtgcctcatagtttcttgcttagttttcgatgcagttactaatctggaacattccaatagaagtacacatttccgagaaatactgacaaactcagaacataatatgagtgtcacttttattttattttgagacatcttttacctggcatcaactttcatcataatcctggaaatactcttgtagtcttttctatttagttctacttcctaa

SEQ ID NO: 635839 - DNA, 352 bp, Homo sapiens
aatttttggtggtgtaaagcagtatcacatagtggtcaagggcgtgaggtttaatgacagagagagayagagagaatgggagagataaattataaggaattggctcatgaaattatagaagctaagtcccaagatttgtagacagcaagctggaaactcaagaagttctgatgtttcagtccaaatccaaaggctggagcagatcaaggttccagctcaagcagttaggcatcagtagttccctcgttctcagcctttttgttctatttaggtcttcaattgtttggatgaaatccacccacattagagaaggcaatctgctttactcaatgcacccattcaagtgttaatt

SEQ ID NO: 635840 - DNA, 536 bp, Homo sapiens
taatggccatttgttgagtgattacgagccacgcactattgcagaatgaagttaagaactccaccacctaaactgtcaggccctttcctttcctttttatgccatactcatattaaccagggattttagcagaagagaaatgtaattgtttgtttgatttaaggcatatgtttccagaaggtgtcagttcataggaaaacatgttttctaaggaaaacgtttgatgataatgatggaaaagttctaagtcaatgacctcccatgtaaaacagaaaatttctctccactggaaattagaatccgtgttaaacacaactgtaagagtgttagcaaagcagttttggattggaagcattgagagtarcaattgatatgttgacatgaaagaaattagcatgttagtgtagacttgctaagctgacttgtgacctcatgggacgcagtaaacagggtcttagaagaattgtacacaacttacaggaaaagttcaaatgtatgtgtttgtgtcctaaggaagataagagctggatggcatc

SEQ ID NO: 635841 - DNA, 516 bp, Homo sapiens
ggattctggcaggcttgttgctgatgatgtaatgattgtggttgaactgtttattgttatacttgtagttcaaaaatgctaacctgtaaaaaaaaatcagcaaatctccataaatcccaatttatcagttgaaaaataggcakaactcagttacctccacaaactccgaaacaattgaccaactggtttctaaactaaccaattaacccttatcttttcatcctgaatattagtacctcagtattctctgtaatcctttttatgtctattttctataaagcattaatagtatattaattgtaacagagacaaacttgggcaatggaaataaagtatatatatatacacacacacacacacacacacacacacacacacacacacacatacacacacactgcttgggctgataaaatatatgaagaacatctataaaagctgccaataaatttccagagaaaatgactgcagaaaaaaacagaaaggtgagaaaagtcctacaaatgcaaataatga

SEQ ID NO: 635842 - DNA, 581 bp, Homo sapiens
gacaggtggattttttaatgttggatggaaatgtacattctaatgatcaagcatcactaacataatttactattgtctgtgaaatcagactttcaaatgagctgcatttctcttcctcaaagcatactcttggatttacttatgtttttacaaatctaggtcttaaacatctttgccatcatttataatgcagacttcatgctgagaagagcactcgacactgccaccgaagytctgtttctggtgttgttttgtcaattatgctgatgccacgggaccatggaacagtgccactatttccaagagcaacagcaaatcgaaaaatcttcatgcaatggttgttctagaaaagtctattacattggtttatgctttaaatatagataccaccagagtagtaattttccaatctatcctttaaaagttcaagtgtattattgcattttttaagttgtaaaagaatgatgtacacatatccttaaacatagtatataaaagcaactactcaatggggatttatgtgatgagattacttacgtaaagaaaattatttgtcttttgattaatagtgcaatttaaaa

SEQ ID NO: 635843 - DNA, 581 bp, Homo sapiens
gacaggtggattttttaatgttggatggaaatgtacattctaatgatcaagcatcactaacataatttactattgtctgtgaaatcagactttcaaatgagctgcatttctcttcctcaaagcatactcttggatttacttatgtttttacaaatctaggtcttaaacatctttgccatcatttataatgcagacttcatgctgagaagagcactcgacactgccaccgaagctctgtttctggtgttgttttgtcaattatgctgatgccacgggaccatggaacagtgccactatttccaagagcaacagcaaatcgaaaaatcttcatgcaatggttgttctagaaaagtctattacattggtttatgctttaaatatagwtaccaccagagtagtaattttccaatctatcctttaaaagttcaagtgtattattgcattttttaagttgtaaaagaatgatgtacacatatccttaaacatagtatataaaagcaactactcaatggggatttatgtgatgagattacttacgtaaagaaaattatttgtcttttgattaatagtgcaatttaaaa

SEQ ID NO: 635844 - DNA, 580 bp, Homo sapiens
gatgatggtaattattcaaaagtctacaaatctctccataaaaccagtckgagcagtgaacttaacaaaatcaaaattgtagatgcctataacaaaatgaggtgaaaagttatccctatgaaccctaagatacaagtaggttaagaaaatctactgacacttcgtgaattgcagaagatcagcatctatttgcgaaaatataagaaaaggaacaggaagtgagaatatgagaaccctgaagttggcaatagtcatgccttgacaaatgtgtcaggccaatgtgaaaacagtaaataagactaggagagttcacacatttttacacaacctgatttgtgagtgaatagaagaggcttgtggtaaagcctaaagaactaggacaattttaatcctgtatactctcataaacaaaacaaagcaaaacagaaaacacaaagcttccttcaaaaacacaccctctactgagaggagaatactgataacagaattcatattgataggaatagtggcaatacaagcagagaaaagaaataatccagataaaagtagggtatggggcagagccaggcatttttggaga

SEQ ID NO: 635845 - DNA, 580 bp, Homo sapiens
gatgatggtaattattcaaaagtctacaaatctctccataaaaccagtctgagcagtgaacttaacaaaatcaaaattgtagatgcctataacaaaatgaggtgaaaagttatccctatgaaccctaagatacaagtaggttaagaaaatctactgacacttcgtgaattgcagaagatcagcatctatttgcgaaaatataagaaaaggaacaggaagtgagaatatgagaaccctgaagttggcaatagtcatgccttgacaaatgtgtcaggccaatgtgaaaacagtaaataagactaggagagttcacacatttttacacaacctgatttgtgagtgaatagaagaggcttgtggtaaagcctaaagaactaggacaattttaatcctgtatactctcataaacaaaacaaagcaaaacagaaaacacaaascttccttcaaaaacacaccctctactgagaggagaatactgataacagaattcatattgataggaatagtggcaatacaagcagagaaaagaaataatccagataaaagtagggtatggggcagagccaggcatttttggaga

SEQ ID NO: 635846 - DNA, 584 bp, Homo sapiens
gcaaactatcacaaggacaaaaaaaccgaacaccacatgttctcactcataggtgggaattgaacaatgagaacacttggacacaggaaggggaacatcacacaccrgggcctgtcgtggggtggggggaggggggagggatagcattagaagatatacctaatgtaaatgatgggttaatgggtgcagcacaccaacatggcacatggatacatatgtaacaaacctgcacgttgtgcacatgtaccctagaacttaaagtataataataataaaaaaaaacaaaaacaaagaaacaaaaaaaactcaatacttttcagtagtcacatggtgcagctaaggggcaaataatgacctagaaattaggtcaaaataatctatcatgctgcacagagagataaaacaatagaaaataaaaaagagaaagatatagagaagatagaagatgttctcatacagtcacttctcattattggcaagatttatgttctataaagccactgtgaatactggattagttaatactgaaccattgttcctaggagaagtaaaaagttcctgtgaacatctgttcacattttttc

SEQ ID NO: 635847 - DNA, 582 bp, Homo sapiens
tatctcaccccaacttggaaggggccatttcaattccagaatactgagttagtctccctctgccaaattgtccttccttctccattctacaggtgtgatcccaagtgcatttcctaataaacctcctgcacactaatctctatctcaatttgcttcttctcatagccatttagcacagtttggttttaaactatttacatgaattaccttcttaaaataaaagttaacaaaaataagtaaagtaggctggcacaaattaaagtaaaaataaaatacataagtaaggttagtatacaaaattcacaccccaacgacctgtaatatagaggagtttaaatyagagtgcaagctttaaattagaataccaccagtgtgaaagagatgaacacagttaattacatgactcagtaggtgtaagataaaaataaacctgctcctaaagaggacattgtattactttatttcaagaataaagagaaatttttctcatgagttattaaataaacacttttgttgtaccaggtgtcattgatacattcatttagccagtccttccaaagccttgtaattgtacaacaggag

SEQ ID NO: 635848 - DNA, 614 bp, Homo sapiens
tactagtagagatgctgtacttcccatggaatcctctaaatggagggagtacacccttctatggctttccttgctctgtgccgtggaacacagctgagtttgagcacgaagctcatcaattttcagccttaatttgtctttttatacaaatgtctaaggctacaatttccctctcaaacaaatttcatggcctcccacaagttacgatatgtattatttttattttctctaattatacatttttaaacattcgtctacaacttgcttagttgtgaaaaaagtctttatgtagtacttctttgaaatctgttggaagtttttcaatttttataaatattctatataagtttctggagaattcaktttttaagttgctgtgtgaagcagtttctgttaactagtatattctgtttacgtgggtaatcaatcaatatttgagatatgttgaaatctcccactcgatgagtgtgaatttgtcaaattctcaattttaaaataattttttatttaaatatttgaatctatattattttctctctacacttttagaaattttgtaccttcctggtgaggtgaagattttattattttgttgcaaacttccttaacgctgg

SEQ ID NO: 635849 - DNA, 577 bp, Homo sapiens
attttctctctacacttttagaaattttgtaccttcctggtgaggtgaagattttattattttgttgcaaacttccttaacgctggcatagctttgtgctttaacatctatttttggatattatataactacactagattcctttaaacaatactttgtgttacagctttttataagtgttttaaaagtttaacccttatagctgggtttagtttctatcatggttagttgtgtatttaatttgagaagtttagttcatttacgtttatgataattatttatatttttgacttatttttaaaatcrttatttgtgctttcatttgttctgattttccattgcttttttaatcttcttttttcattgactgaacttgtatatttatctgtttctcttcttcattttaaaaatcttggcgctagtttgtaagtaattccggtctgtttaaacttattttagatggtgtcccttgacattttaccatacgtgtttacgtaaacgatgtttacaattacagtagtctccccttattcaaagtttccctttccacagtttttgttacgcacagtcaaccatg

SEQ ID NO: 635850 - DNA, 541 bp, Homo sapiens
gtcatgacattattctttgtcttyttccaggggtctgaagctgagtgccttattgatcttatattctcttattttgcattactgattactttcctatgaaacattgcacaatttataaattatttagcatgtaactactcaatagcaaattataatatttagttaccaaagtcaaaatcacagaagttcaatatagtgagatttgatatttttgtttaatgtaaattaaatatgtatgagcaaattatttttcttgcctcaaaataccatataagctatacttttaggttaaaactatataaatagatatatcaatatttatttcttattttatttaattaatatttattggattagtatgcactgaacatataagatatagtgtttactctgtcaagtagctttcaggctgatgagggaaatatggataagaatttcttaaactattataacaagtaatggaagttatcacaaaggcataattttaactagaagaaaggggaatgaggtagcaaggaaggtgaaatgtaaagatggaatt

SEQ ID NO: 635851 - DNA, 499 bp, Homo sapiens
aattcttctggctaagatacacagaccgatgctaaaatcaaaaactgaggctgtagagatagaatgggaacagattatgttsatccttaaaggacatattgaactgtttggcttttctcctgaaacaaatgagaaagcactgaaggattttaagctgtagaacaatatggtcatatttgcattgaatatattaggatgaggaacagattagagaggaataggttgcagtaagggagtattccaggaggtgggtatagaggctacttcattagtccagctggaaaagatgatagcttggactaggtgttggaagcagagaccatatgaacttttctaaaaccttaaagaagagcatctccacatttaatgaaagatttgatcagatgactatagtggctcctctgcatacacctttgagggaccatgtgaatatttcactaagaggtaagaaatctcttgttaaagaaatcatgatttccttaagtttcttttgctttta

SEQ ID NO: 635852 - DNA, 555 bp, Homo sapiens
cctgtgtacattgtttttaataggatggttgatgcattttattrcaaggaagcctgtgtaattttgtaaagtttttcttaaatctcaaagttgtaatatatcttaatgcataagagccaggctttgtagaagaaagaagaaagaattttctgtgaatttaacaagctgagttttacagatttagagcgaagctcagagtactcagcatggtgttttaaaccatcaaaggaagaatatttaatatggtaaaataccaaatactgcatcaccctgaaagaaacagaagttcaatcagtaggttaaaataaaaggttctgcagggacctagattgatattaatgctgatagagtaaggagacctttcaactgagaagatagatttggggaattcccagatttgggatcttgtgcctgaccttccaaaatgcaacaggcaaaacaacataaaatctgtttacattatcaatggctgcatggtggtgtttaggtaaatggtcctgcaggcagctccatagttttgatacactccagggtgatgtggtcaaagcaaccaag

SEQ ID NO: 635853 - DNA, 555 bp, Homo sapiens
cctgtgtacattgtttttaataggatggttgatgcattttattgcaaggaagcctgtgtaattttgtaaagtttttcttaaatctcaaagttgtaatatatcttratgcataagagccaggctttgtagaagaaagaagaaagaattttctgtgaatttaacaagctgagttttacagatttagagcgaagctcagagtactcagcatggtgttttaaaccatcaaaggaagaatatttaatatggtaaaataccaaatactgcatcaccctgaaagaaacagaagttcaatcagtaggttaaaataaaaggttctgcagggacctagattgatattaatgctgatagagtaaggagacctttcaactgagaagatagatttggggaattcccagatttgggatcttgtgcctgaccttccaaaatgcaacaggcaaaacaacataaaatctgtttacattatcaatggctgcatggtggtgtttaggtaaatggtcctgcaggcagctccatagttttgatacactccagggtgatgtggtcaaagcaaccaag

SEQ ID NO: 635854 - DNA, 555 bp, Homo sapiens
cctgtgtacattgtttttaataggatggttgatgcattttattgcaaggaagcctgtgtaattttgtaaagtttttcttaaatctcaaagttgtaatatatcttaatgcataagagccaggctttgtagaagaaagaagaaagaattttctgtgaatttaacaagctgagttttacagatttagagcgaagctcagagtactcagcatggtgttttaaaccatcaaaggaagaatatttaatatggtaaaataccaaatactgcatcaccctgaaagaaacagaagttcaatcagtaggttaaaataaawggttctgcagggacctagattgatattaatgctgatagagtaaggagacctttcaactgagaagatagatttggggaattcccagatttgggatcttgtgcctgaccttccaaaatgcaacaggcaaaacaacataaaatctgtttacattatcaatggctgcatggtggtgtttaggtaaatggtcctgcaggcagctccatagttttgatacactccagggtgatgtggtcaaagcaaccaag

SEQ ID NO: 635855 - DNA, 569 bp, Homo sapiens
cttatcatggtccacaaaatttctcatttgctttatctgtaatatacacacaacagtctcagaataacaatgtcaacactaccaccaagaatatgattacagaaaataactaaatattttacagctatttttgtcaaattattgtgatttaaataacttaggattattgatcactgtgtgtctacatgccactaactgaatacatgtttaagctcaattgcttagtttyattttagaattttagagattgatttatttttaatgtaattttacatggtctcaaagttgaaactacaaaagaggtaaaatcaaaatttaacttctattctttactcttcatttaataatcctaatagttgtcattttaaaatattatcatttacttttaattttaatatatattaataacataatcagtaccacttatacttttcatttgaaatattatagtttttccatttattttaacatattatacataaaagagttaaaatatatgctatatacatatttgtatatgtacacataatcatgtgttgcctttcttcttttctgttttttttttgttt

SEQ ID NO: 635856 - DNA, 563 bp, Homo sapiens
gcccaacaacttagtcaacatttagaaaaatgttacatttcaacaatatcctttatagtatcataataaattatgatataaaagcctaaaaactgctttttcatatatatataattgtaccattattgtagaaaatgttctgttcccaaatctaagagatgttctggcttccaaaatgtaggaaaccaaaattacrttcttggcactagacctcatttaccaattatatataataaactaagggtcaaattttagatgatgtagtttgacatttgggatgcttgtttgggaatatgaggtgaaaatattatatcacaatttaatttagtacctgccattactttcattgttaagattaatacttaaagtttctatcattgcctcacttatcagaataaaaatgataaagttgccacaagaaggcagcaacttagcaatgaaaaattaatataaggagagcaaatgtatttttgggcaaggacaaatatgctgtgtcaagtctttgtgaacttgcagtattcttttaaatgttaaaattaaataaattgatttaacattaaata

SEQ ID NO: 635857 - DNA, 419 bp, Homo sapiens
agtttgattgccagaaatcctttcttttagctctgacactattacatttataattgagtagctgcaacactgttttatgtgagatgtacccggttttagtttgccgtctcagcagatattgctgattcagagataaacaggattttggatgtcatcaggtcaaatcttttttttaaaaataagtagtraacaaacaaagactaagtcacagtgaattgagaaactttccctaaagtcactcagttaactgaaatatgtttatgttaaaaaattcccaaatcccgcatgcataactgattgaataaatcatatgcttattcaaagagcatttattgaaaaccaaatgcttatcaagctaatgtgctgggaactggggataaaaaggtgaacagggcatgggaactgctttgaaggaattc

SEQ ID NO: 635858 - DNA, 585 bp, Homo sapiens
ttatgcattcctgtttaacgacacacactatccagagaactggacagccatccttttttctacgaggttgacagatgttcccaaataccttgccctcatctcccagtagcttgataaacaaaaaataaaaatgcccaaaatttactctgctaggaaatttatgtgcatacacacgtgtttgtgtttttataggtgtgtgagctgacagagcagcaggaaattatgagatgtatagtcctcaccaggagagaactataggaagtaggccaacaggaaacctagtagcatagatgctggggattatattttttccttgtaccatgttgcttaaggccacatagtctaaggattgcttaagtcaaagattgcgtaagcatagcacaaagattgcttagtacaaaattgcttaaggcaattgaaaagtatgaagaaaataataaagattcatttatattttaaaatctcacctttcttttgtattttcatagaaattcaataatgtacatcacatgttagcacaacaatacgtcattatatttatarataaattcagtacatttatttatgtcatgagttcttacggaa

SEQ ID NO: 635859 - DNA, 567 bp, Homo sapiens
gagttacattattgattctacagaggcttgctattgattataaggagctctgatagcttaggcaaacttgctgcctcacacatgggttgattttttaaaaagaaaacaattgtattgagctataattcacataccatacattccacccatttaaaatgtacagttcaatagttttagtatattcacaaaattgtgccaccatcatcacaatcagttttagaacacttttatcaaccaagataaaataaaattaagaaagaaaccctgtgtgcatcagcagtcactcctgatctctcrctatcctcaactgtaggcaaacaattatctactttctatccttatttatttgcagattctgcacattctatataaatgaattatacaatacgttgtttttttcactgacttcttttacttatcataatgtctcctaactttctcaatgttttagcatgcatcagtactttattgctttttattgttgaattatattctattgaatttatgtgccatgatttctttgtccattcctcagtgaaagggttgtttctactttttggccattat

SEQ ID NO: 635860 - DNA, 453 bp, Homo sapiens
tatacaatacgttgtttttttcactgacttcttttacttatcataatgtctcctaactttctcaatgttttagcatgcatcagtactttattgctttttattgttgaattatattctattgaatttatgtgccatgatttctttgtccattcctcagtgaaagggttgtttctactttttggccattatgcataatgctgctrtaaacatttgtgtacaagtgtttgtgtgaatgtaggtgtttatttcagtacaattttaattttgggggactgccagactattttccaaagcagctgcaccattttgcattcctcccatcaatatgtaaggatttcacctccacattttcatcaacacttgtttttttttttttgcttccataaaagtttattcacagacactaatgtgaatttcatgattttcgtgtcatgaaatatatttttaatttgt

SEQ ID NO: 635861 - DNA, 453 bp, Homo sapiens
tatacaatacgttgtttttttcactgacttcttttacttatcataatgtctcctaactttctcaatgttttagcatgcatcagtactttattgctttttattgttgaattatattctattgaatttatgtgccatgatttctttgtccattcctcagtgaaagggttgtttctactttttggccattatgcataatgctgctgtaaacatttgtgtacaagtgtttgtgtgaatgtaggtgtttatttcagtacaattttaattttggggractgccagactattttccaaagcagctgcaccattttgcattcctcccatcaatatgtaaggatttcacctccacattttcatcaacacttgtttttttttttttgcttccataaaagtttattcacagacactaatgtgaatttcatgattttcgtgtcatgaaatatatttttaatttgt

SEQ ID NO: 635862 - DNA, 552 bp, Homo sapiens
tccaagcagctgctgtgtgtgtgagcagagagaaaaggtcccaagccctgtggtcaggcaggcaatgcattgataatcctgatggtttatacctcattggtttgggtttacactgcacttagatattctaccagatactttgggaagactgacttttaccttgytgacagccttctctttcagatattgggtgatgtagtttcccatgtttagatgtccctgtcatcagttcccatatatttttggtgtttagaaagtcccaaaaatgtcttgtctgatttacatcagaagatgtaaatcaccctttcttgatttcaccattgttagaggcttatttttagagcaagagcaatacttttatgttatgggaaataggagaggaaacatactatacggagcctattatattaaattaaagtctgctgataacatttatgagtgtttttgagtataattgactcaggtttaacagttgatactcaagactaaactccatgttttgctctttctcaaaaggaaattgtataacaattctaatagtgcgtttttcaa

SEQ ID NO: 635863 - DNA, 527 bp, Homo sapiens
gtgattattccgaaggataaaacattggatcattttctaaacatagctatttactcattcttcaactgccatggcttgatattgttgaaaagatactgacaattgtaatcattaacaacaactggaatgtaagctttatgaaaccaggactgtgtcattttgctcataagcccagcaccagacacacactgtatgtgtgctccataaataactgttaagtgaaagagaaagcagataatgayagtctccaggaaaaagcccttctgtatttcaatgacaatgattacacacaaagcaaaattaagacagcactctaaaagaatccagttactagacttaccataacataacatgaaaaggacttctccgtacattggctctgaactcttactgctattgccagagctgttttacattttatagtagtgaacacagtgaggcagagaggatttttaataaaataacctacagatgagtcccaattctccttttagactgattgcctcaatttttcttttttataacat

SEQ ID NO: 635864 - DNA, 445 bp, Homo sapiens
cctaaatatgtatgcacctaccaccagagcttcaaaacacatacagcaaaaccratacaagtggaaagaaaaatagacaaatccacaatagcaactgaagacttcaaaactctcagcccactgtcaccactgttactcgacatagtactggaagtcctagctagagctatcggacaagagaaacatatagggggaatccaaattggaaaggaaataatcaaattatctttgtttgctgatgatacgaacgtatatttgcaaaaacctaaagatttcacaagaaaactattagaactgatcaattcagtagttgcaggatacaaaatcaacatacaaaaataagtagcatttctatatgccaacagtaaacactgtgaaaaagaaattttaaaagtaatcccatttacaatagccacacataaaattaaatacctaggaattaact

SEQ ID NO: 635865 - DNA, 416 bp, Homo sapiens
gtgggtgtgtgtgagcatgtgtgagcatgcgtgtgaatgtgtgagcatgtatgtgaacgtgtgtgagcatatgaatgtgtctgagcgtgtgtgtatgattgtgtgtgtgaatatataagtgaatgagtgtgagcatgtktgtgagcatgtgtgtattagtatgagtgtgagcaggtgtgtgagcatgtttgtgtgactgtgagtatatgtatgtgaatatgtgtgtgtcagtgtcagtgcatgtgtgtgaatgtgaatgtgtatatgagtgtatttgagtatgaatgcatgtgagtatatgtgagtttgttagtgtgagtgtgagcatgtgtgagtgtatgagtatgtgtgtgagatgagtgtgagagtatatgtgtgagcatgtttgactatgtgggtgtgagcacgtgtgtggg

SEQ ID NO: 635866 - DNA, 538 bp, Homo sapiens
gaattcttttcctcctagtcacgtggcattgggttttacaaagactataaacacagacatgttagctactcttactccacgtaaaacacatatgttggtcatatcaaggcagagagataatttagttgctattattttgtcacaatgcatcaatttcaaagagaattaacatactatcacgttgagatgtgttgaaattcaccacatctcaaatgcatttgtgttgaaaatcagccagygggttttctggcctctgcctttgctgctggacttgtatctttgacagagcttttctgctacttttctcttactctcttctctcatctaaggctctacttagtatttttaggatgttgtcattaatcaactgtctttaggtgtaatttcagcattaaacgttaaaggctctgtgatgcgttgctgtgttttcgagcgagcgagggaacagcctcagccctcgagtggcccagcctcatctagaccggccttaggggactcttccgggagctcactttctggatttgcctaaaatcgaaat

SEQ ID NO: 635867 - DNA, 599 bp, Homo sapiens
aagcttagctatgttaatacatacaaatccatyaccaaaggaaggaaactattagagcaataactttaaaaaatgtcccaggactgaaggacactagtgtcttatcagaaggggcccaccaaatgccaagtaaaatggataaaattataccctcaagaaaaattggccggatgcggtggctcatgcttgtaatcccagcactttgggagtctgaggcaggagattcttttagctcaggagtcggagaccagcctgaccaacatgatcaaactccgtctctactaaaaatacagaaaattagccaggcgaggcatggtggcacatacctgtaatcccagctacttgggaggctgaggcaggagaattgtttgaaaccgggaggcagaggttgcagtgagccaagatcggactccgtctccaaaaaaaaaaaaaaaaaaaaaagcccagtggcacacacttgtcatcccaactatttggggtggggggaagattgctaatcatgccactgcaccctggcttgggtgagagagtgagaccctgtctcaaaataaataaataatgaaaattacaaacagaaaaataatgatgaaatttcagga

SEQ ID NO: 635868 - DNA, 597 bp, Homo sapiens
acatacaaatccattaccaaaggaaggaaactattagagcaataactttaaaaaatgtcccaggactgaaggacactagtgtcttatcagaaggggcccaccaaatgccaagtaaaatggataaaattataccctcaagaaaaattggccggatgcggtggctcatgcttgtaatcccagcactttgggagtctgaggcaggagattcttttagctcaggagtcggagaccagcctgaccaacatgatcaaactccgtctctactaaaaatacagaaaattagccaggcgaggcatggtggcacatacctgtaatcccagctacttgggaggctgaggcaggagaattgtttgaaaccgggaggcagargttgcagtgagccaagatcggactccgtctccaaaaaaaaaaaaaaaaaaaaaagcccagtggcacacacttgtcatcccaactatttggggtggggggaagattgctaatcatgccactgcaccctggcttgggtgagagagtgagaccctgtctcaaaataaataaataatgaaaattacaaacagaaaaataatgatgaaatttcaggacaaaggcaagtccata

SEQ ID NO: 635869 - DNA, 605 bp, Homo sapiens
acacgtatttgcccctgacttaagtttttctttctggaaatcagaagctaggatatattacgagacaaaaatattttggtttttaattattaacttgctataattaatatgaaagcattgtgtggtaaattgaataaaaatctcagtattgtggctgcattttcctccttttattactgatcaargcatcatcaaccttgaaggggcacttaatcgtcctcttctgaagacacatctatgcagtgggtgaaatatgatgttggacatcctgtgttttggtctatgctggaatgttctgaattcagatatatggtagacaggagtaggagtaaagttgatttttgttcactaactccacatcttccatcccctgactactgcgagagagaatgcatttctctccagggagaatcccatgagagcaaagtgaggaaagcatcggcaggaaataacgaacgctgaaatcagccttttacaaatgtatttaaagacagctcttacaaggttcctctttcatggtagtgtttgatttttaagtgtgcattacaagagcagtctctcaacttttttgcacattgacccctaaaataattttgggaaagtat

SEQ ID NO: 635870 - DNA, 605 bp, Homo sapiens
acacgtatttgcccctgacttaagtttttctttctggaaatcagaagctaggatatattacgagacaaaaatattttggtttttaattattaacttgctataattaatatgaaagcattgtgtggtaaattgaataaaaatctcagtattgtggctgcattttcctccttttattactgatcaaagcatcatcaaccttgaaggggcacttaatcgtcctcttctgaagacacatctatgcagtgggtgaaatatgatgttggacatcctgtgttttggtctatgctggaatgttctgaattcagatatatggtagacaggagtaggagtaaagttgatttttgttcactaactccacatcttccatcccctgactactgcgagagagaatgcatttctctccagggagaatcccatgagagcaaagtgaggaaagcatcggyaggaaataacgaacgctgaaatcagccttttacaaatgtatttaaagacagctcttacaaggttcctctttcatggtagtgtttgatttttaagtgtgcattacaagagcagtctctcaacttttttgcacattgacccctaaaataattttgggaaagtat

SEQ ID NO: 635871 - DNA, 600 bp, Homo sapiens
ctgagttgcaaccatagatttattgcgaagtgacaacgtgtctatggaatattttcgcagatgagacaggacatgcgctctagtcgtgcccagattaaagcgacgctgggccatgtgcctgtgtagtgcagactcggaggggcacacacatactcgtcaccacatgaccactgtctattaatattgtcatacctaaacactcgcaaaaacaaaagttgcttttcttccctgtaattaaatctaatttgttaattgtctttcctcttgcaatgttgttttcatcttgaggtgacacattattattttgtctgtctaatattatttacaaattaatgctgtatattttacattagtgaaacatataattaggtgtttggttcaatcggtatcattcagataaaacaaagcctatctgcaagattgattggaagtggartagttggttctaatttaccatcacagtcacagtttattgaagctacttggccccagattcacagaagctagttttacctaaggtgcatttgatgctttgtttacaagtgtttattttccccaaccacttaatgcaaaaaaaaaaaaaacaccttcaaatattag

SEQ ID NO: 635872 - DNA, 600 bp, Homo sapiens
ctgagttgcaaccatagatttattgcgaagtgacaacgtgtctatggaatattttcgcagatgagacaggacatgcgctctagtcgtgcccagattaaagcgacgctgggccatgtgcctgtgtagtgcagactcggaggggcacacacatactcgtcaccacatgaccactgtctattaatattgtcatacctaaacactcgcaaaaacaaaagttgcttttcttccctgtaattaaatctaatttgttaattgtctttcctcttgcaatgttgttttcatcttgaggtgacacattattattttgtctgtctaatattatttacaaattaatgctgtatattttacattagtgaaacatataattaggtgtttggttcaatcggtatcattcagataaaacaaagcctatctgcaagattgattggaagtggaatagttggttctaatttaccatcacagtcacagtttattgaagctacytggccccagattcacagaagctagttttacctaaggtgcatttgatgctttgtttacaagtgtttattttccccaaccacttaatgcaaaaaaaaaaaaaacaccttcaaatattag

SEQ ID NO: 635873 - DNA, 584 bp, Homo sapiens
tgtttgcttcctttagataattctctacttgyttctacatcattctgatatcttttaagcaacatccccatggtttccttgagcgccctggcacatttaagacagctgatttaaactttttgtctcctaagtctgatgtctggctttcctcaggggcagttactattaccttcttctgggagtgggccacattttgttttgttgcatgctttgtaatgttttttgtagaaaactggacatacgccgggtgcagtggctcacacctgtaatcccagcactttgggaggccaaggcaagtggatcacctgaggtcaggagtttgagaccagcctggccaacatggcgaaaccccatctctacaaaatacaaaaaatagccgggcatggtggcgcatgcctgtaattccagctactcaggaggctgaggcaaaagaatcacttgaagccgggggacggaggttgcagtgagctgagatcgcaccattgcactccagcctgggcaacagagcaaaactctgtctcaaaaaaaaaaagaaaaaaagaaaactggacatacattataatctggtaattctggaaattagc

SEQ ID NO: 635874 - DNA, 584 bp, Homo sapiens
tgtttgcttcctttagataattctctacttgcttctacatcattctgatatcttttaagcaacatccccatggtttccttgagcgccctggcacatttaagacagctgatttaaactttttgtctcctaagtctgatgtctggctttcctcaggggcagttacyattaccttcttctgggagtgggccacattttgttttgttgcatgctttgtaatgttttttgtagaaaactggacatacgccgggtgcagtggctcacacctgtaatcccagcactttgggaggccaaggcaagtggatcacctgaggtcaggagtttgagaccagcctggccaacatggcgaaaccccatctctacaaaatacaaaaaatagccgggcatggtggcgcatgcctgtaattccagctactcaggaggctgaggcaaaagaatcacttgaagccgggggacggaggttgcagtgagctgagatcgcaccattgcactccagcctgggcaacagagcaaaactctgtctcaaaaaaaaaaagaaaaaaagaaaactggacatacattataatctggtaattctggaaattagc

SEQ ID NO: 635875 - DNA, 584 bp, Homo sapiens
tgtttgcttcctttagataattctctacttgcttctacatcattctgatatcttttaagcaacatccccatggtttccttgagcgccctggcacatttaagacagctgatttaaactttttgtctcctaagtctgatgtctggctttcctcaggggcagttactattaccttcttctgggagtgggccacattttgttttgttgcatgctttgtaatgttttttgtagaaaactggacatacgccgggtgcagtggctcacacctgtaatcccagcactttgggaggccaaggcaagtggatcacctgaggtcaggagttygagaccagcctggccaacatggcgaaaccccatctctacaaaatacaaaaaatagccgggcatggtggcgcatgcctgtaattccagctactcaggaggctgaggcaaaagaatcacttgaagccgggggacggaggttgcagtgagctgagatcgcaccattgcactccagcctgggcaacagagcaaaactctgtctcaaaaaaaaaaagaaaaaaagaaaactggacatacattataatctggtaattctggaaattagc

SEQ ID NO: 635876 - DNA, 584 bp, Homo sapiens
tgtttgcttcctttagataattctctacttgcttctacatcattctgatatcttttaagcaacatccccatggtttccttgagcgccctggcacatttaagacagctgatttaaactttttgtctcctaagtctgatgtctggctttcctcaggggcagttactattaccttcttctgggagtgggccacattttgttttgttgcatgctttgtaatgttttttgtagaaaactggacatacgccgggtgcagtggctcacacctgtaatcccagcactttgggaggccaaggcaagtggatcacctgaggtcaggagtttgagaccagcctggccaacatggcraaaccccatctctacaaaatacaaaaaatagccgggcatggtggcgcatgcctgtaattccagctactcaggaggctgaggcaaaagaatcacttgaagccgggggacggaggttgcagtgagctgagatcgcaccattgcactccagcctgggcaacagagcaaaactctgtctcaaaaaaaaaaagaaaaaaagaaaactggacatacattataatctggtaattctggaaattagc

SEQ ID NO: 635877 - DNA, 601 bp, Homo sapiens
ttaaaaataagtcatttttgaaggtactatttcaagttaaataattcattgtaaatgtcctcttatatacatacaaaagataaaaatccactgcaaactttttaaacagactttggggttactatgaatacccattcagtttttcagtgtctccctcattcccaaggttttcagtcacttttttactatcttatgcctacttgtcatcgtttcccccactctcttcttaatacattgcttccttttgtactatggactgaaaaatcaaataaacaagcgcttgaaggatgtaagttaagcaagagttaaggccctgaatgaaggttaaggagaagtgtgcttgcatcagttatcatcttggatcacgatatttatttctgttgttcaaaggcctctgtacttaagaataggttaatgccatggtatagacatttgacctttatgagtgtgtttaaaataccaagatagattttagatraagtgacattatgcctctcagaaaatacgtatataccaatagaacacattacatgattattagtaatacatgtacatgcttgtgtggttgtgtgtgcatttgtatatatgtgtacacaacata

SEQ ID NO: 635878 - DNA, 587 bp, Homo sapiens
ttttacttctattcacttttccctcttaaattttttaactgtatgaattatatccaataattatgtgtaatataactacagctggccctctgtatccacgggttccatagatggggattcaaccaagcattgagagaaaatattcagaaaaaaaataaaaataaaaaataagaataaaacaaaaataaaaaaagacagtataactatttagatagcatttgcattgtattaagtactataaatcaactagagatgatttaaagcagaggtccctaamcccgggcctttcaagaatggcgctgcacagcaggaggggaggggagggcaagcgagcatgacctcctgagctccgcctcctgtcagatcagcagcagcattagattctcacaggagcaagaaccctattgtgaactgcacacgcaagggacctaggttgcacactcctcatgagaatctaatgcctgatgatctgaggtggaacagtttcatcccaaaaccaagcccactgaaccttggtccatggaaaaattgtcttccataaaactggttcctggtgctgaaaaggttggggaccactaatttaaagc

SEQ ID NO: 635879 - DNA, 359 bp, Homo sapiens
aacaatgatcagaaatattactaaatgatctcagcattaaaacttaacacagagatgtaaaaatccttaagttaatatcataaatggcattaattagcacataactgaccaaaaaagaaataaagcaaattatatgtaaaatcaccctctatcaatagctttaccaacacaggagaagagtgaaaaagttatatctaaaacyttattactaaaagtgatttctctatgtgaataaattcttatctacgaaacatctaatgtagaatagtcgttgacaaagtttcatatatacttaaatatcatgtataatatgatgtagagtagatgaatgttgcacccataatttgagacacacgtaa

SEQ ID NO: 635880 - DNA, 605 bp, Homo sapiens
cggcaataaaaaaattaagtatcaatacatactacaacagatgaacctcaagaacaccatgctaagtgcaagacgccagacacaaaatactacatgtattatgattccatttatataagatgtagaaagaaaaacttataaagacagaaaacaactcagtggtgcctaggattgggaatattaatagacatgaggaaacttcttagggtcatggaaatattctaaaactggattgtggcgatgcataacgctagaaatttactaaaagtcaatgaattataaaattacagtgtgtacattttacggcatgtaaattgtagtttgacaaagctgttaaaaataagccagttatgtgatcttgtttaaaactggaggaaaaaaatgaaacaagcccaaataattaagagcattaggtatagattcagagctttccmaaaagcatcttcagaaaatatcattttggtaatactcgtacctcactccaaaaaaaaaaaaaaccagaaaaatgtaaatggagaaaaaaagggaaacttttctaaaagttagtccaaatatttaccttacaaagtctaaaaaggtgatagaggaggaatactgatcaacta

SEQ ID NO: 635881 - DNA, 469 bp, Homo sapiens
aatggatagacaacctactcaaggtcacagagctaatgcatgttggtggctatatttgaactcatgaagacagactccagagctggacttcctaacctctctgctccatgccctcttccaactgacagcgatccctgacaggggtcactgaatgaacctgaaagaattcctctcttccagaccttctctatttaggaggagttccaaatatttgtcatatcctggcagtcctttccttgtcaactaaaacatccctagagtcagagacagtccaccagtaaggggcccaattactgcctttgcttattctcayagtgaccctgaagttaagggccatgcctatctattttatgaggaaatatgggcttagaagaattggataatgcctccaaatgggtaaatagcagggcttggatttgtgaacattatgactatgaaaacatatatttagttatttccttactgatga

SEQ ID NO: 635882 - DNA, 629 bp, Homo sapiens
caaagtgaaatgcctttgggtgattctaactgggtgaaaattagaggcaccattcgactggggctataagacatgttccctctccccaaagggtacagtaggaagacaagaaacaaaagaaagtatctggaggcatgtaataagggacttaagagaggtgcaaatgacaaaagtagttcagagatgggtgtgaccttttcagtctggctatgactggggaaggatcatggaggcagcatcattggacatcaggagaccatttaagcctgagaacggaggtccagagctgggatgatacaaggtatattggacagatatgttaacaaaagattaaacagaacatttcctgtcaaaagctttcacttgttgaagtatctctggaggtcagaccctgtacgtgaatgttctcaccctctcattgaacccaagtaaggcaaggactcacaagtctcaggtgtaacatcattgacmaaacacactgttgatttaggccaaattgcaggaaaaaaaaaagtggttcccattcagtggaaagagtattaaaactgtgattctatttgactgagaagacccatttcccagtaatattcttttccacggcagccaaaattttaagttctttagaattc

SEQ ID NO: 635883 - DNA, 629 bp, Homo sapiens
caaagtgaaatgcctttgggtgattctaactgggtgaaaattagaggcaccattcgactggggctataagacatgttccctctccccaaagggtacagtaggaagacaagaaacaaaagaaagtatctggaggcatgtaataagggacttaagagaggtgcaaatgacaaaagtagttcagagatgggtgtgaccttttcagtctggctatgactggggaaggatcatggaggcagcatcattggacatcaggagaccatttaagcctgagaacggaggtccagagctgggatgatacaaggtatattggacagatatgttaacaaaagattaaacagaacatttcctgtcaaaagctttcacttgttgaagtatctctggaggtcagaccctgtacgtgaatgttctcaccctctcattgaacccaagtaaggcaaggactcacaagtctcaggtgtaacatcattgaccaaacacactgttgatttaggcmaaattgcaggaaaaaaaaaagtggttcccattcagtggaaagagtattaaaactgtgattctatttgactgagaagacccatttcccagtaatattcttttccacggcagccaaaattttaagttctttagaattc

SEQ ID NO: 635884 - DNA, 393 bp, Homo sapiens
cactggtacttactaactgatatttggacacaaagcttcaatttactgaactgtaaaatgaggcacatgttacctgatttartttttaaaattgtattatattgtgttttatttcaataggttttggggaacaggtggtttttggttacatggataagctctttagtggttacttctgagattttggtgtacccatcacccaagcagtgtacactgtgtgcaatgtgtagtcttctatctctcacctccttccactcttcccccaccccacaaagtccattatgtcattattatgcctttgcatcctcatagcttagctcccacttataagtgagaacatacaatgtttggttttccattcctaagttacttcacttagaataatggtcttca

SEQ ID NO: 635885 - DNA, 565 bp, Homo sapiens
agtgtatgcaggtaatcctggaaggaagatctggagcaaagattgtaggaataaagagaagagcaccgattggagagatgtttaacaggtaaaatctataggacttggtgatgaattctgttttgacgatgacgtggatgattcccaagcttctgacttgggtcactgataaggttagcctttgtgtccccacccaaatctcatcttgaaatgtaatccccaggtgttgagggagagaccttgtgggaggtgattggatcatgggggcagtttccccaygctgttcttgtgatagcgagtgagttcccaggacatctgatgtatttataagtgtttgatagttcctctcttgcttgcttcttctctctcctgccatcctgtgaagaggtgccttctgtcatgattgtaagtttcccatggcctccccagccatgcagaactgagtcaattaagcctttgtttctttataaattacccagtctcaggtagtatctttatagcagtgtgagaacgaattaatatagtgaccttatgacagcggcagcatcaactatttcatggaact

SEQ ID NO: 635886 - DNA, 608 bp, Homo sapiens
ttgccacccctgtccccatcccagcaacaaccctgagatgtggtgatgttggctggcagcactgagattaaccaagaagggctctggctaaccagaccctagctggaggagggcttgagaactctctaccctgagcccctcctagcctgtttcagacgtctcaaaagacagaaarcaaagattgttgctgtatcaccataaacctgcagatgggctatacacagactgcagctgcaaatcaaagagtgattctaagtatgctctacaccatttgggcagatgggcatgtctggcagcatctgtcattttagtatctttaaagctcatcatttactgagtgatgagtctattttctttaaaatttttagttttcatagtagccctatgaggcatatgtttctaactccatattaaagaaaaatgaaaacctagaaagatacaagtttctatgtcattacattaaaattgtaacgcttaattttttattggttttcatttagcacagctaaatctcaaatcctgtttgtaaattcataattttacctaaagtacttttattttatgagagactttttttttctgttgggtgacatccttgataagaaatt

SEQ ID NO: 635887 - DNA, 608 bp, Homo sapiens
ttgccacccctgtccccatcccagcaacaaccctgagatgtggtgatgttggctggcagcactgagattaaccaagaagggctctggctaaccagaccctagctggaggagggcttgagaactctctaccctgagcccctcctagcctgtttcagacgtctcaaaagacagaaagcaaagattgttgctgtatcaccataaacctgcagatgggctatacacagactgcagctgcaaatcaaagagtgattctaagtatgctctacaccatttgggcagatgggcatgtctggcagcatctgtcattttagtatctttaaagctcatcatttactgagtgatgagtctattttctttaaaatttttagttttcatagtagccctatgaggcatatgtttctaactccatattaaagaaaaatgaaaacctagaaagatacaagkttctatgtcattacattaaaattgtaacgcttaattttttattggttttcatttagcacagctaaatctcaaatcctgtttgtaaattcataattttacctaaagtacttttattttatgagagactttttttttctgttgggtgacatccttgataagaaatt

SEQ ID NO: 635888 - DNA, 608 bp, Homo sapiens
ttgccacccctgtccccatcccagcaacaaccctgagatgtggtgatgttggctggcagcactgagattaaccaagaagggctctggctaaccagaccctagctggaggagggcttgagaactctctaccctgagcccctcctagcctgtttcagacgtctcaaaagacagaaagcaaagattgttgctgtatcaccataaacctgcagatgggctatacacagactgcagctgcaaatcaaagagtgattctaagtatgctctacaccatttgggcagatgggcatgtctggcagcatctgtcattttagtatctttaaagctcatcatttactgagtgatgagtctattttctttaaaatttttagttttcatagtagccctatgaggcatatgtttctaactccatattaaagaaaaatgaaaacctagaaagatacaagtttctatgtcattacattaaaattgtaacgcttaattttttattggttttcatttagcacagctaaatctcaaatcctrtttgtaaattcataattttacctaaagtacttttattttatgagagactttttttttctgttgggtgacatccttgataagaaatt

SEQ ID NO: 635889 - DNA, 598 bp, Homo sapiens
ctctgaatctcagagatcctaccacttccaagtgcagtctcaatgacagggacctacaattaaaacctagattttaaaataaaatacaaattcaccagactgaaccttggtcatgttggtacccaaattacagcacaggagtcgcaggaacagctcacacaaggcccaggtgttcactccccttctccctcctgctgcttatggcttgacttcagcttgtcaaggaatgacaagtacacaygtccattgctttccacactgatgtgtttttaaaaggttatatacacacaccttgttttgaccaaataagtttgctttttaaaaatcttatgtttacttttaattttttaacttattttctgaataggagcttgagataataaacatactataaaatgttctcaaatgtactttgcttcctgtttaagatgtgctggtatttgaaaagcttctgccaatacttaaaccaagcagggtactatgtaggataactttttagttgacaaaacaatatcgtctcccttatgatacaggagagtccatgttgtcttccaaaaaaaatgaagtactgagacttttcctccaaagcctatttaaa

SEQ ID NO: 635890 - DNA, 598 bp, Homo sapiens
ctctgaatctcagagatcctaccacttccaagtgcagtctcaatgacagggacctacaattaaaacctagattttaaaataaaatacaaattcaccagactgaaccttggtcatgttggtacccaaattacagcacaggagtcgcaggaacagctcacacaaggcccaggtgttcactccccttctccctcctgctgcttatggcttgacttcagcttgtcaaggaatgacaagtacacatgtccattgctttccacactgatgtgtttttaaaaggttatatacacacaccttgttttgaccaaataagtttgctttttaaaaatcttatgtttacttttaattttttaacttattttctgaataggagcttgagataataaacatactataaaatgttctcaaatgtactttgcttcctgtttaagatgtgctggtatttgaaaagcttctrccaatacttaaaccaagcagggtactatgtaggataactttttagttgacaaaacaatatcgtctcccttatgatacaggagagtccatgttgtcttccaaaaaaaatgaagtactgagacttttcctccaaagcctatttaaa

SEQ ID NO: 635891 - DNA, 598 bp, Homo sapiens
ctctgaatctcagagatcctaccacttccaagtgcagtctcaatgacagggacctacaattaaaacctagattttaaaataaaatacaaattcaccagactgaaccttggtcatgttggtacccaaattacagcacaggagtcgcaggaacagctcacacaaggcccaggtgttcactccccttctccctcctgctgcttatggcttgacttcagcttgtcaaggaatgacaagtacacatgtccattgctttccacactgatgtgtttttaaaaggttatatacacacaccttgttttgaccaaataagtttgctttttaaaaatcttatgtttacttttaattttttaacttattttctgaataggagcttgagataataaacatactataaaatgttctcaaatgtactttgcttcctgtttaagatgtgctggtatttgaaaagcttctgccaatacttaaaccaagcagggtactatgtaggataactttttagttgacaaaacaatatcgtctcccttatratacaggagagtccatgttgtcttccaaaaaaaatgaagtactgagacttttcctccaaagcctatttaaa

SEQ ID NO: 635892 - DNA, 488 bp, Homo sapiens
accctcactcaggcctctcctcagcctcacaccatggtagagggacagtgggcaaccacagcatcactcccaaacacatctcagtgctgactgcacacgggacgctgtcctaagcaygggaacagatacaatggcatgcttaatctgtccctggccagtcgaactaaggagacacatctgtacattcacatggaaacactatgacacagctcagtcaggcaccaagccaggagtgtgtgatgtgggtgctggtggtgatgggctggaaggaccccacggaggaggtgggatgaagggtgggtgctgatgatgtgggtgctgatggtggtggggctggaaggaccccacagaagaggtgggatgaagggcgggtgggactcttacatccaggttcaaaggagctgatccactgggaaaggaccaatggaagaggaccaggacgagtgacacccagggaagggtgctccatgaactcctagtggctgaag

SEQ ID NO: 635893 - DNA, 582 bp, Homo sapiens
ggagtaagcaaagcttgaagccaagagactaggagaatgagaaactggaggaatagcaaatccaaagttggtgggcacatgggcagatatgaagagaagtgtccccctgggatagagatcacagacatccctgccctctaagaccttccagtctagaggagcaggagattaaacaggtaaaatgacaactgtgatcagggttgtgcccaacacacaagtggggtcaggactgtctaagacgagactcaagccctgagcatgtggctcctgagctgagggtggaaggatgtggaggggtatccaagcagtgaggggctgaaagagggttccaagcagggtgacatatgtaaagagtgacacagtgagatttgcagcagggagtcagagggagagaacattctaggtctttctggaagagtgatttaaatctctacctgaagatcccagattggaagtttaatcctgacactcmatagcatggagtgaggaccttggggtttaggtctttgtgttacacagcattctttcacatcaatcttgcctcccaacttcaagccgtttgagggcagggaccaccaggtc

SEQ ID NO: 635894 - DNA, 524 bp, Homo sapiens
gaattcaaaaagtcctagaagcatatcaaaacaasgcaatgagtatgagctttttcacattacagtctacagtgggccctggctcatctcccttctgcagtcagagatacctgacagtacagagtcatggtatcacatcagcacattacagtgtccagacagagtagcaagatggtgctggtggcatactagaactgttctcagaacctgtcagattcaggtgacttcgcacactcaaaggcagtttctgcaaccttattaggtacctttgtgctggagttccagggtgatatgatgggggttataaaacacatgatgaccatcccatttccatggggcttcttgcaacctgacctcacttaaggcaggcataagaccatcagcaactacccaggtcacgtccaaggagaaactggagagatgcagacactttgctcagtgaacccccctcagtctgacgactctggtatttttcacatattaaagtaacccatatcacttctaggccttttggataagatcaa

SEQ ID NO: 635895 - DNA, 524 bp, Homo sapiens
gaattcaaaaagtcctagaagcatatcaaaacaacgcaatgagtatgagctttttcacattacagtctacagtgggccctggctcatctcccttctgcagtcagagatacctgacagtacagagtcatggtatcacatcagcacattacagtgtccagayagagtagcaagatggtgctggtggcatactagaactgttctcagaacctgtcagattcaggtgacttcgcacactcaaaggcagtttctgcaaccttattaggtacctttgtgctggagttccagggtgatatgatgggggttataaaacacatgatgaccatcccatttccatggggcttcttgcaacctgacctcacttaaggcaggcataagaccatcagcaactacccaggtcacgtccaaggagaaactggagagatgcagacactttgctcagtgaacccccctcagtctgacgactctggtatttttcacatattaaagtaacccatatcacttctaggccttttggataagatcaa

SEQ ID NO: 635896 - DNA, 524 bp, Homo sapiens
gaattcaaaaagtcctagaagcatatcaaaacaacgcaatgagtatgagctttttcacattacagtctacagtgggccctggctcatctcccttctgcagtcagagatacctgacagtacagagtcatggtatcacatcagcacattacagtgtccagacagagtagcaagatggtgctggtrgcatactagaactgttctcagaacctgtcagattcaggtgacttcgcacactcaaaggcagtttctgcaaccttattaggtacctttgtgctggagttccagggtgatatgatgggggttataaaacacatgatgaccatcccatttccatggggcttcttgcaacctgacctcacttaaggcaggcataagaccatcagcaactacccaggtcacgtccaaggagaaactggagagatgcagacactttgctcagtgaacccccctcagtctgacgactctggtatttttcacatattaaagtaacccatatcacttctaggccttttggataagatcaa

SEQ ID NO: 635897 - DNA, 555 bp, Homo sapiens
tgggttactaggagtcgggttccacacacagggaaggctgtcctgcctgagctaaggctgagcttgcagcagagcttccagcttgagtgtcactgactgagtccccggcctgggccaggctgctcgtgaagctggcaagagtgggctctgggcctggctctcctccctgtgtctgctcagagccatgcacccactgggccttcagctcatgctgagaggaacaggggctggatgggacttgggagctttgaggcagccacggccctgctttgatctctgccctgcttggggaggctccatggctcagccaggaggggttaggaagccaaagcacggtagctaagcccctgagtcagggaacaagcctgggtcctccagcttaagcagagccagaggctgggggctgtctaccgcatccaagcaacaacagtacctgcgcttcattccytatttcggaaaaaaaacaggaagggatgatatgctctgcaaggccactttttctgaacaaggatttctctgagggtctcacctgctccactgagacacccatcagcc

SEQ ID NO: 635898 - DNA, 486 bp, Homo sapiens
tggaacatgccatctgaccagcacagagcgcatgacatcatcaccaagtgggtcctgaaatctccagtcctatgaatgccacctaagaacatgtgacttcattgcaacaacctatgatctaaaacctgagccaaggctacagtctgggagtgccatggttaacagcatgtatgccacctacacctcctattgttttgaggcttgttkcttccctctgtctccctctttgattcatgaatgcaggtctctgacttggctttattattctaagccatacattaaagtggcctcagggggatttacttttcttgcttgcctaaacaattttggaggtaggcccatgttcctgatctttcatgaacagcaggaaaggaccaatcccacactcagctccacaccccaggtgggtgagagaatgcttccttgatcatatttctccaggtaccagccaaccccagtcttcccagccagctaacacagctgttg

SEQ ID NO: 635899 - DNA, 486 bp, Homo sapiens
tggaacatgccatctgaccagcacagagcgcatgacatcatcaccaagtgggtcctgaaatctccagtcctatgaatgccacctaagaacatgtgacttcattgcaacaacctatgatctaaaacctgagccaaggctacagtctgggagtgccatggttaacagcatgtatgccacctacacctcctattgttttgaggcttgttgcttccctctktctccctctttgattcatgaatgcaggtctctgacttggctttattattctaagccatacattaaagtggcctcagggggatttacttttcttgcttgcctaaacaattttggaggtaggcccatgttcctgatctttcatgaacagcaggaaaggaccaatcccacactcagctccacaccccaggtgggtgagagaatgcttccttgatcatatttctccaggtaccagccaaccccagtcttcccagccagctaacacagctgttg

SEQ ID NO: 635900 - DNA, 486 bp, Homo sapiens
tggaacatgccatctgaccagcacagagcgcatgacatcatcaccaagtgggtcctgaaatctccagtcctatgaatgccacctaagaacatgtgacttcattgcaacaacctatgatctaaaacctgagccaaggctacagtctgggagtgccatggttaacagcatgtatgccacctacacctcctattgttttgaggcttgttgcttccctctgtctcsctctttgattcatgaatgcaggtctctgacttggctttattattctaagccatacattaaagtggcctcagggggatttacttttcttgcttgcctaaacaattttggaggtaggcccatgttcctgatctttcatgaacagcaggaaaggaccaatcccacactcagctccacaccccaggtgggtgagagaatgcttccttgatcatatttctccaggtaccagccaaccccagtcttcccagccagctaacacagctgttg

SEQ ID NO: 635901 - DNA, 486 bp, Homo sapiens
tggaacatgccatctgaccagcacagagcgcatgacatcatcaccaagtgggtcctgaaatctccagtcctatgaatgccacctaagaacatgtgacttcattgcaacaacctatgatctaaaacctgagccaaggctacagtctgggagtgccatggttaacagcatgtatgccacctacacctcctattgttttgaggcttgttgcttccctctgtctccctctttgattcatgaatgcaggtctctgacttggctttattattctaagccatacattaaagtggcctcagggggatttrcttttcttgcttgcctaaacaattttggaggtaggcccatgttcctgatctttcatgaacagcaggaaaggaccaatcccacactcagctccacaccccaggtgggtgagagaatgcttccttgatcatatttctccaggtaccagccaaccccagtcttcccagccagctaacacagctgttg

SEQ ID NO: 635902 - DNA, 581 bp, Homo sapiens
ctgcagaactttgttgcagagggaaggaaacacaattcctccccactggctccgagttggagctgagacacaaagtgaggacacaggaaaacccactccatcctatcactgcttggatgtgacgaagtggcttgtagtttacccagggggcaacacatgccttcagggtaatgattttaaggcaggatgcatttttaaatcacctggggaaacttgtcaaaatgcagatgttcaggactcagtctcaggctctgacttaataggtctgagggggcccagcttctgagactgctgagtatgtccccatgactgacgtgcagccatgcgtgaaaacccgtgggtcaggctccagtccaaaggaacgaagacagatctcacacaaaagagccagacccaaaggctgtgagatcctgagataatgactcatatcattccaaaatcagttctctattattcttcctctgtgggatgtttaatagcaagggaagtaactgtgcgtctgttttaaaytcaaccatgattaaatagggagaggaagcaggccgcttctaaagcttccctttagttctccaatcttatgc

SEQ ID NO: 635903 - DNA, 606 bp, Homo sapiens
gcataaattgtaattcccttaatcaaagagggccattgaagtttcttttggaaacagctgtgcaaagttgtatggttacttgacaagctaatatgagctgaatcacttcgctgtgttgagttttcagcagccaaagagcagaatttttgtagaaaactcccaatttatccagcacccaactcaggtccctctggtcctatgaaggtctcctaaagtcacatcaacaaaataactgctcaactccacactgaagctagcacacattacacttgtatatttccttcagtagctaacaccttgttgggcasacagtatccactaaacctcacttgctttatccccagacacagtaggcatataccaatctcctggattaagcagttaggtagcattattattttaatcagtgacatcactccaaatggttaccatggttggcagatggaaaagattaagcaatggtgctgagtcaaaatattacaggtataagagcttcctgccctctcaccgctcatcctcaaagtaaatgccatcctacatgctgtggcttggttgtggtgagaggaaaaggattaggctctggattaaatggtgaggatgattcga

SEQ ID NO: 635904 - DNA, 475 bp, Homo sapiens
attgaggaatgaatggataagcaaaatggggtataaccacacaatggaatattactcagccttaacaaggaagaaagttttgacacacgcttcaacatggatgaagcttgaaggtatactaactgaaataagccactcacaaaaggacaaatactgtattaatccaattatatgaggttcctgggatcaccagatttacagaaagtagaaaggtggctgctagggactgggggagrgagaatagggaaatattgttaatgccgcagtttcagttttgcaagatgaaaagagttctagagatggatgatggtgatggtagcacaaaataaggaatgtacttaataccactaaactgtacacttagaagtggctaagatggtaaccaaggaggtgaaagacctctacaaggaaaacaacaaaacattgctgaaagaaatcatagatgacacaaacaaatggaaacacatcccatgct

SEQ ID NO: 635905 - DNA, 610 bp, Homo sapiens
gcagccttcagagcagattctgaataatgagctgtcacctctgtgcctagggcagccctgggggccacctctctttcaccaaacagagcagccatgcaaaacagcacagctgtacaaaagcagccggcatagggatcgctgaagctttcaaaaagaacgaaatgtacacaatgcacaggctaaaagggaaggaggmtaagggcctgggtgtggactaccccgtggaagcgccaaaacaacagatacctttagtagaaaaggatgtcatctaacctatgcgacagagctgctctggactctgtggacagagagatgaattcctgccctcggggagacttggcctcccacaggccaaggcagggcagccacgtggcccaccaattaatatcgtcagagatggcaagcccagagttttccagcatagcagttccaatacgacactcgctgcctttgctgatggaaatatcaaactcattaaacatctactagcagtcggccccctcactgtgcttggctggtctcatcaatctcgctcaaagcagagcaggcccctgctcaagccttggaggaaaccaattgtctgattactcagcatttattgaaattgaca

SEQ ID NO: 635906 - DNA, 610 bp, Homo sapiens
gcagccttcagagcagattctgaataatgagctgtcacctctgtgcctagggcagccctgggggccacctctctttcaccaaacagagcagccatgcaaaacagcacagctgtacaaaagcagccggcatagggatcgctgaagctttcaaaaagaacgaaatgtacacaatgcacaggctaaaagggaaggaggctaagggcctgggtgtggactaccccrtggaagcgccaaaacaacagatacctttagtagaaaaggatgtcatctaacctatgcgacagagctgctctggactctgtggacagagagatgaattcctgccctcggggagacttggcctcccacaggccaaggcagggcagccacgtggcccaccaattaatatcgtcagagatggcaagcccagagttttccagcatagcagttccaatacgacactcgctgcctttgctgatggaaatatcaaactcattaaacatctactagcagtcggccccctcactgtgcttggctggtctcatcaatctcgctcaaagcagagcaggcccctgctcaagccttggaggaaaccaattgtctgattactcagcatttattgaaattgaca

SEQ ID NO: 635907 - DNA, 610 bp, Homo sapiens
gcagccttcagagcagattctgaataatgagctgtcacctctgtgcctagggcagccctgggggccacctctctttcaccaaacagagcagccatgcaaaacagcacagctgtacaaaagcagccggcatagggatcgctgaagctttcaaaaagaacgaaatgtacacaatgcacaggctaaaagggaaggaggctaagggcctgggtgtggactaccccgtggaagcgccaaaacaacagatacctttagtagaaaaggatgtcatctaacctatgcgacagagctgctctggactctgtggacagagagatgaattcctgccctcrgggagacttggcctcccacaggccaaggcagggcagccacgtggcccaccaattaatatcgtcagagatggcaagcccagagttttccagcatagcagttccaatacgacactcgctgcctttgctgatggaaatatcaaactcattaaacatctactagcagtcggccccctcactgtgcttggctggtctcatcaatctcgctcaaagcagagcaggcccctgctcaagccttggaggaaaccaattgtctgattactcagcatttattgaaattgaca

SEQ ID NO: 635908 - DNA, 646 bp, Homo sapiens
atatcacagttggtgctccaggctcattttctgtccagataacatctgagtctcagccatttatattcctcctgtgtgagccacttaaaatgaccaaccatatattccaagaacaaatggataaaaacacaggcactttctttggaagttaaaagagctcacttctggaaaatggtctcacaccagagaaactatagaacttgggacatagcacttcctgatgargaatcaacatggttaccaatcactgcaatgtgctgtcagccatcacttgattgcatcttgaaatggaatcaatgcttgctctgccccggaacctatttatccaacagatcttaaagcatctatttcccagattttgttccttttggattcatgcctgagtttgccctccaggactccaatgcgtggggataggggtgtacaaacacgtctatctgcctgtgaatgggtaatgtgtatgagcacatccatgtggatttttaagcacatgtatgtacatgtgagacaatataatttggttccaccaggatttaataagcactggttccaccaaggcttcatgtttaaccagcactggaccagtcttggcttccttaaagaacataaaaccagtgatgacaatgcttatgtctacatgtagata

SEQ ID NO: 635909 - DNA, 574 bp, Homo sapiens
tcagggaatggggagagagaagttggcagcgtaggtgagaattccctcagttgatgccccagcctctcttctgccaactgtcacagcaactgctggcagcattcctggaagaatgaaggcttattccacactcctttcctagtcctgatctttcagttcttaggagtgcagggagattaaaggcgactggggtaaaaggaaagaaggcaaatagagaaggatgggctactyccctgccaaaacttattcacattaacggacagaaaagtgttttaaaaggacatttgaaaacagttcacattttcaaaaagatgtgatattgggtgggactgtgaggtcatgtggttccatcctcttgtgacatgaatgaggaacctgagtatgggagaaggggatttgctcaaaatcacagtgagttgaagcagaaactggggtctgtggactctccctgctcctccacagccgagtggcacatggggactgatggcagcccaggagctggtgggcacttgagagaggctgacctgggatctgattcaagactgtttcttcagtaaacattaacagatgaccc

SEQ ID NO: 635910 - DNA, 574 bp, Homo sapiens
tcagggaatggggagagagaagttggcagcgtaggtgagaattccctcagttgatgccccagcctctcttctgccaactgtcacagcaactgctggcagcattcctggaagaatgaaggcttattccacactcctttcctagtcctgatctttcagttcttaggagtgcagggagattaaaggcgactggggtaaaaggaaagaaggcaaatagagaaggatgggctacttccctgccaaaacttattcacattaayggacagaaaagtgttttaaaaggacatttgaaaacagttcacattttcaaaaagatgtgatattgggtgggactgtgaggtcatgtggttccatcctcttgtgacatgaatgaggaacctgagtatgggagaaggggatttgctcaaaatcacagtgagttgaagcagaaactggggtctgtggactctccctgctcctccacagccgagtggcacatggggactgatggcagcccaggagctggtgggcacttgagagaggctgacctgggatctgattcaagactgtttcttcagtaaacattaacagatgaccc

SEQ ID NO: 635911 - DNA, 623 bp, Homo sapiens
ctcttactgggcatgaaatggaaatacacactttaaaaccactccaccrcttaccaaaaatttaaacagtatctactctttacaaattcttccaaaaattagaaggaacacttcccaattccattctatgaggccagtgttactctgataccaaaaccaaagaaatcactaaaaaccaaactacagcccagtatctcttatgaacatagattcaaaaatcctcaactaaatactagcaagtggttatgataaaaacactcaaactacaaatagaagtgaacatcctcaacctgataaaaattccatagctcataccacactttatggtgaaagactgaatgcgtttcccctaagatcaggaagacaagggtgtctgctcttgccacttctattcagcattgtactgaaggttctagccagggcaataggcaagaaagataaaagcatccagaatgaatgctatctgcagatgacacaatcttgtatacagaaaatcctaagaaattcacttaaaaactattagaataaatgagttcaggttgcagggtccaatttcaatatacaaaactcaattgtatttgtatatatttgcaatgaacaatctgaaaaataaattaagaaaa

SEQ ID NO: 635912 - DNA, 623 bp, Homo sapiens
ctcttactgggcatgaaatggaaatacacactttaaaaccactccaccgcttaccaaaaatttaaacagtatctactctttacaaattcttccaaaaattagaaggaacacttcccaattccattctatgaggccagtgttactctgataccaaaaccaaagaaatcactaaaaaccaaactacagcccagtatctcttatgaacatagattcaaaaatcctcaactaaatactagcaagtggttatgataaaaacactcaaactacaaatagaagtgaacatcctcaacctgataaaaattccatagctcataccacactttatggtgaaagactgaatgcgtttcccctaagatcaggaagacaagggtgtctgctcttgccacttctattcagcattgtactgaaggttctagccagggcaataggcaagaaagataaaarcatccagaatgaatgctatctgcagatgacacaatcttgtatacagaaaatcctaagaaattcacttaaaaactattagaataaatgagttcaggttgcagggtccaatttcaatatacaaaactcaattgtatttgtatatatttgcaatgaacaatctgaaaaataaattaagaaaa

SEQ ID NO: 635913 - DNA, 485 bp, Homo sapiens
tagtctcaggagtttccagttctattcttgatcctttctggctttggacctcaccttctggtttttattcaygtagaaaggtcaccatcccattcatctgctcccaagggtagacaaaccacaagtgtggtattccatgatttgtaggttacaagacttgtagacacatttaacaggagtttccaagcaccacgtgctttctcccaaagaatgaatccacttcatgtctcatggtgggcaggctggcaggtgacttatctgggcagagggtcctgtgggcagagggccctcaaagcagcacatcaggagtgtggccttttatgggaagcctgcgtcttactttcttcttcccttaatctccacacctggatcccacctctggcccctggagatccctggggtctgggtgaaggcaggagctgatggtgctgaggcccgaggtgggaagaagatctatgcaagcccagcacatgctggcactgtag

SEQ ID NO: 635914 - DNA, 485 bp, Homo sapiens
tagtctcaggagtttccagttctattcttgatcctttctggctttggacctcaccttctggtttttattcatgtagaaaggtcaccatcccattcatctgctcccaagggtagacaaaccacaagtgtggwattccatgatttgtaggttacaagacttgtagacacatttaacaggagtttccaagcaccacgtgctttctcccaaagaatgaatccacttcatgtctcatggtgggcaggctggcaggtgacttatctgggcagagggtcctgtgggcagagggccctcaaagcagcacatcaggagtgtggccttttatgggaagcctgcgtcttactttcttcttcccttaatctccacacctggatcccacctctggcccctggagatccctggggtctgggtgaaggcaggagctgatggtgctgaggcccgaggtgggaagaagatctatgcaagcccagcacatgctggcactgtag

SEQ ID NO: 635915 - DNA, 533 bp, Homo sapiens
gtttgtgcccagtgctgctttgccagtcgtaccagctccctcccctccagtcttgtgccccatctgccacaggccactgcaacaggccacctccctgctctgtaccaacccagtccagcatcsccctgcagagccaggaagagtcttagaggagagagtcctgtgggaaagaggagaaatctttggtggtctgatcctctggaccctgagccagcagctcccttctttatggcaccttagtgaaatgggatgatgacactgacctgcctgccccatgatgtgaagtgtgtcaaaggcgaaatgctgtgttaaaactgcaaaacccttctcaaatgtgaggctttcaaaggagtggtagcttttgcaggaatatttgaagttcaaataagaggcaaggcaagcattattttagagaaacttatgtaagactgaagtccgactctgctgagcactgtgcctagggccgagggacccaggaagaacagattgtgacatctgccttaaacagatttgctccagctgtttggtttgtg

SEQ ID NO: 635916 - DNA, 533 bp, Homo sapiens
gtttgtgcccagtgctgctttgccagtcgtaccagctccctcccctccagtcttgtgccccatctgccacaggccactgcaacaggccacctccctgctctgtaccaacccagtccagcatccccctgcagagccaggaagagtcttagaggagagagtcctgtgggaaagaggagaaatctttggtggtctgatcctctggaccctgagccagcagctcccttctttatggcaccttagtgaaatgggatgatgacactgacctgcctgccccatgatgtgaagtgtgwcaaaggcgaaatgctgtgttaaaactgcaaaacccttctcaaatgtgaggctttcaaaggagtggtagcttttgcaggaatatttgaagttcaaataagaggcaaggcaagcattattttagagaaacttatgtaagactgaagtccgactctgctgagcactgtgcctagggccgagggacccaggaagaacagattgtgacatctgccttaaacagatttgctccagctgtttggtttgtg

SEQ ID NO: 635917 - DNA, 533 bp, Homo sapiens
gtttgtgcccagtgctgctttgccagtcgtaccagctccctcccctccagtcttgtgccccatctgccacaggccactgcaacaggccacctccctgctctgtaccaacccagtccagcatccccctgcagagccaggaagagtcttagaggagagagtcctgtgggaaagaggagaaatctttggtggtctgatcctctggaccctgagccagcagctcccttctttatggcaccttagtgaaatgggatgatgacactgacctgcctgccccatgatgtgaagtgtgtcaaaggcgaaatgctgtgttaaaactgcaaaacccttctcaaatgtgaggctttcraaggagtggtagcttttgcaggaatatttgaagttcaaataagaggcaaggcaagcattattttagagaaacttatgtaagactgaagtccgactctgctgagcactgtgcctagggccgagggacccaggaagaacagattgtgacatctgccttaaacagatttgctccagctgtttggtttgtg

SEQ ID NO: 635918 - DNA, 605 bp, Homo sapiens
gtgagtctctctactcaccaacatgtatayaacaatggggttgtgggtggcgctgacagaaaggatccagttaggatgctcatagtcagctgctgaatgggaagagtttgatgacagaagccactgagatatctgaacctggacccattatatggatttttatggagggctgataatttatacaaaagtgcaagtttagaaagtcttgtttagtttcgaatatctgagacacacattagagggagaactataactgctcataaattggcaaccccactgtttatgagaattcaggttaaaaaatatatgccacatcatactgcaggtttaatggatcaaggacaaagggaaaatataatggaggttaagcccaactattctctcaaaatatgtacagtcagattctgaatcttcctcagtaatcaatttcagtgtctcgcagttctagcaaaatatttttttcatgagctatagctttatgttgtttctacctatacaatgctcagaagaaatggtgaacaatcagtcctgccctcctacatttgaactcacatgtgtgataaagacaagttacttgttaaagcaaaccattgcttgggcgctct

SEQ ID NO: 635919 - DNA, 610 bp, Homo sapiens
tctgatgagggcctggtgtggtggctcatgcctgtaatggcagtgctttgagaggccaaggcaggaggatcacttgaggcaaggagtttgagagcggcctgggaaatatagcgagacccaacctctacaaaaaattttaaaattagctgggcatggtggtgcatgcctatagtcccagctactccagaggctgaggtgggagaattgcttgagcccaggagtttgaggctgcagtgagctrtgattgtgtcactgcactccagcctggatgacagaggaagactatctctcaaaaaaataaaaataagtatcctgatgaaagaatctgaataggaattattcatgagagtataaaaatttatgtgattacagttattagttacatcatcctagaaggaagtttctgtgtctctccacccatttcctgtaatcggagttgctcagcctcagcagcactgacatattgagtcagagaattctttgctggggcaaggggtgctgtcctgtgcatcataggatgttgagaagcatccttggcctctacccactagatgctacaagcatcccatcattgtgacagctaaaaatgtttttagacattgccaaatgt

SEQ ID NO: 635920 - DNA, 536 bp, Homo sapiens
cccactctggctctccctccgtgagctgacccccacccagttcctccagtggaatgtgttcctccactccgggccttccacgtgctgagctctttagggacgcccatccctccgcccctccatagtcttccaagcgcctccagcctcaatgacagggcccttcccacgtcacagcgctgccttgctctgccctacttcctgtctaagccacccatggaccttttgaaccagagaagcaggaaaaatggttatcttgtcgccccagtatcctgcacaggcctggcacgcagtgggtggtcaataaatattgttagtaagtgaataaattattayaaaatggaatttccaaatactgtttcaattacataatgtagcacctattatgtatatctataaaagtccattgactttaagtgtcacatcaaataatttctgcatgaatacacggtgttgcatgatcaaaaaaaaccacagccatgatccctagcatctaaagcccacaggaaaagaatccgatttaaatattaatgaatgtt

SEQ ID NO: 635921 - DNA, 594 bp, Homo sapiens
ggtcgcaaagtcctttggaatgtacgtcttaaagatgttgaggatgtccaggcgcttctcatgcccctcggccacyggctcctgtttgatggagtgtaggacggggggcgccccagccacgccgggctgggcctgcaaggccgcgtcgcccctggaccccgcagcacaggtggccagagtcctcagctcctgggctgccttcgaggggggctcgcggggaggtagaggaggagcgcccccttcgccctttgcaggaggtggaccctgaggctgagcactgaatttggctttcagggagtccggggcactgtgcttatttgtgggggcaaagccagcccccgctggggggaccccaaacttctccacaggcttgctattcgccgagggctgcgcgccagcccgggcgatgacggtgggcgtaggggtggcgctcctgctgaagcccccgccacccggggcaggcaccggtttggagctagcctcctgcctgggcttggccaggggcccctgtgtggccgcgccatgtggctcctggccgtgacaaggtttggtctgtcgatacccgtcagggccgggcgcccacagagcgcaggg

SEQ ID NO: 635922 - DNA, 601 bp, Homo sapiens
attagatacaacatcaatagcatgatttattaaaaaagcaatggacaaattaggcctcatcaccatttaaaatcttttcacttcaaaagatacarttaagaaaataaagacaagaaacagacttgaagaaaatatttatagaacacatatctgatataggacttgtatgcataatttacaaaaacaaaacaacacacacacacacccctcttaaaactcagtaagaaaaagacaacttaatcccaaaatgttcaaagatatgaagagacatttcaccaaagaagttgtataagtgactaagaagtatatgaaaatatgctcaacatcctatagttatagaagaaatgtaaattaaaaaccttaacacataccatttcacacctgctagagtgactataataaataagacacataataacaaatattgacgaatgtgcaaaaatgggaactctctgacactgctcttaagaatgtgaaatggagcagccattttggaaaacggtttgatagttcctcgaaacttatacataagactaccatatgattctctactattatacatatctacccaagggaaataaaaatatgtgttcacgaaaag

SEQ ID NO: 635923 - DNA, 608 bp, Homo sapiens
gttgattgtttcatttgctgtgcagaagtttttagtttgctataatcccatttgtctatttttgctttttttcttgcctgtgcttttgaggtcttttccacaaaattttctccagaccaaggtcctgaaatgtaccacctatgttttcttttagtagttttatagtttgggtcttacatttaagtcaataaaccattttcagttgatttttgtatgtagtgagagacaagggtctagttttatttttctacatatggatatttagttttcccaataccatttatttaagtgactatttcttctccagttaatgttcttaatgtctttgttgaaaacaagttggctgtaaacatgtggctttatttctrgtttctctattctggtccattgatctatgtgtctgtttctacatttttagttttttttttttctagtaccatgtcattttggttactatagctttataatatatttattttgaagtctggttatattatgactccagctttttgctcaaaattgctttggctattcgaggttttttgtggttccaaatgaattttaggatttttttttatgtctgtgaagaatgtcattggtattttaat

SEQ ID NO: 635924 - DNA, 650 bp, Homo sapiens
cagtacaaatactttggaactgtgcatatgaatcttcctatttgaagattctatgaattgattgaatatattggcttggtaaattcttttgcacaagaaattttagagtattctgtcgaaataatctattatcctctgcttggatttgttttattatgttcccccctgttcttccttaattcagacattagtgttgtttattttcttgtaactaaagattaactggagacaatagatatttcagattggtattttttctttgcctctttctcctctatacatttatctacttattcagaaagttctcaatcatatgaacaaaatgctcamttagccaattagagggaaaatttatcttcgttgttagtggtttaccaaatttatccttcagaatcagaagcaaactatattctcagagctgcaaaagtcacacatatgcctctaatcaaatttggatctgggtggcaacataacctctggttgagaacagctattttagattgaggaaaaatgacatgtcttacctgtctcaggtgaggcattcttttgagctgtaatactgaaataaagaagagagttgagcagagaccagtagaactgcagtggatccatggtgatgtgtatgtaacatgaccaataaataagtcact

SEQ ID NO: 635925 - DNA, 628 bp, Homo sapiens
agcactatgtcagtgttttctagagttgtttctacagagcagaacttctgtccctccttgctgtcaaggattgcacaggtcagccaggtgggagaaaggtacacaagtaacaattccaccagacaggctgtggtggatgctgaaatagaaccacagacagctgtgggacaaggcaagggagctagaaaaatggaatattgaccacattgtaaaactgcaaactcatgtgtattaggctgctggggttttgcctaaacctccagtctttgaaatctacttccaatagccatgactccaaagtgggagttttataatcgtatttgagcttcagagattgctgaatgcagtcttttagaaagatggagatttgcttagaaatccacctgaggactggamgcttcttgactctctttctggagcagggcctcacccaataagttagttcctaattggattgaattatccagctttcctggtgctgtaattgatgcttgtgtatcactattgccttcccagctcaacatgagcttcctgagccaggaactgtggtgtccattccagctcaaactcttgtctctcagggagttttcaagaacctcaggcaaaagttccatagcaattgccctaa

SEQ ID NO: 635926 - DNA, 605 bp, Homo sapiens
cacaaatctactagagagtgatgaacaagaattcaaggagaagaacacttccagcagatttacaggaaaggcatccttaccgagaaatggtagcttgtggttaagtttccccragggaaattgtgggagcactgtcggttgagacctgatggaaaacttgaaaatgcgttctggggaacagccttagccttgtgctctcaatagtgagccttttgcatgttcatttctcagtggatccaggcaggagcaacaaaagctccaactcactctttcctgatgtatctatttttctgtgcatgtggcataggtaactgccttaatgaggtaaaatacacataaaataacttcacttgttttaagtgcacagtttgataagtggtagcaaatgtatacaaccatgtgaccaccaccataatcaggataagaacatatccattacccaaaaagtgtccttctgcccctttgcagtcagtcctcttcccctgacaatcaccaatctttcttgcactgtggtttttgcctgattaagaattttatataaatggaatcatacagcatgtaactgtttgtgtctagcttgtttctcttagcatcacgtttatgtt

SEQ ID NO: 635927 - DNA, 462 bp, Homo sapiens
agactttccttgcagtctttctgaaatatagttttagagttaaaactaaattycaaatcctttgtctgaaatttggaaatccaaaaagttctgaaagttttttcataactcatttggtgccagtgactgacttgaagctatttggtagctatctgagtggaactgatatggggctatgtataatattttatttatcctacatggtgtaaatattcccacattttgctgcagaaatattgaagtttgattatagagtgttgtcccagactctttgggtatattctgtgacatacagcatacacaactgtgttgtctttctaacattcaaaaaatcctgaattccgaaacacatttggtcctgagggttttgaataaggaaatatatgccagtaatgcattctacctgtcaagtaaaagagtaattactttgtatcatctaaacttcccttcaccccctcttcc

SEQ ID NO: 635928 - DNA, 577 bp, Homo sapiens
tacaagcaatctttgattacgaaatgcttttcagtctttaaagtagtggttctcaaactttttggtctcaggatctcatcaaaattgaagacctgagtttttgtttatgaaggttgtatctatattttcatcttttaaaaattaaaactgagcattttaaaaatattgatttatttaaaataaactcattttgcattgatgtagaaatattttatgaaaaatactttccaaaatgaacaaatattgagaaaagtagccttgctttacatttgtcagatctctttactgtctagaagacaggtggaatttaatatctatgcatgtctttcatctgttgcagtatattgttttggttggaatatatggtcagaatttaaaaatctgcttgcgcagacgtgtagttgaaaagtgaggaatgttttaatagccttttcaggtaattttgtatcttcttgggcactacamcaaaactcaacatgtgattgttttttaaaggttagttgcagtatggaatctgcagtcacatgaactttactgttatattaaatccaccagtgtatcttgcactttgaatggg

SEQ ID NO: 635929 - DNA, 505 bp, Homo sapiens
acaagtagaaatccctctaaaatcattgacattaaaatttaaagtgtttaatactgtttttgctggatttaactgattaacttttagttgacctttgtcggaagttatgttggtatttacatagaataatatgctttatattaaaacactcattcacttgtgtcctctaaatgaaattatttcttactaacagttgcctctattaaatgtagagaactgtggcataccatacagccattaaaaagattgaggtaagccatttctactgacatggaaagatgttagcaaaagagaaattttaaaagaarctagcaatattgcagaagagtatgtaaaataaaatcatttttaaaaaagaaaactatatgtgaagatcaatattcatacctatacaggtatatatatgaagagaaaaagatctggaaagacacaccccaagctatgactggtgaatactgggggtgatgggagggaattattggtaaagagttacgttcacttctta

SEQ ID NO: 635930 - DNA, 619 bp, Homo sapiens
catttctagaagggtcatgggagagcccatttcttgatttctgccatttttggacagtttttgtttcctttgttgttcatctcaattattactttagaccctataaaatattcattggtcataaaaatccatgtttagcatagatcatacactggataatgggtaagtgtaatgtttcaaacttcactttctgttgcatcctacttgcttggaccatatttatgtattcatgcaaaacacaaagtcccagatggaggataaaaagcaataaataaaaatcattgtttaatatctcaatrgtgatggacataataaagaaaaagtaggatattgcgttaaaaataatgggtaaaaggctgttgtgttaaacaaggtggcccataaaagcctcctttgtcaagataactttggaacagagatgtaaatgaagtgagggcacgagcaatggcagttaacaggctgatgagattttcaagcagagggagcagcaactgtcaaaacccccaaatgggaacccctttggcatattcaagaaagtgcaaggagatcactgtgactagagcagcgtgaacagggctgtgaacagaagggaggtgatttattgttgaaaagttactct

SEQ ID NO: 635931 - DNA, 544 bp, Homo sapiens
accccaaaaatagtagtactataggtaatttttagtttctttttttatatttttcccggtgtttttcaaagaaaaaaatatttaaatcaggggtgtcttaatcttttgactttcctgggccatactggaagaagaagaattgtcttggtccacacacataaaatatactaacactaatgctagcttatgagctaaaaacaaaaaatctcatcttttaagaaagtttatgaatttgtgttgggccacattcaaagccatcctgggccgcatgtggcccatagaccacaggttggacaagcttggtctaaataaaaattatgcttctactaaaaattatttttgctaatgcaaagttcrtatataaagtcttttaagcctcagaagtgtgtccaaactaccttctcatacacttactcctaaaggaaaatattatattaaatggaaagcttctggttgagttttagatgcttttttctttaaagtgaataaaattagcatgcatagtattaaagtgtgcccttaatagcatctgtaataaggcata

SEQ ID NO: 635932 - DNA, 541 bp, Homo sapiens
caaacctgaaatcctaggtttgtgccaaaagcccgtatctgactttaaatagggccacttgtccaggggtttcaaggacacacattactttaaaatttggtggatttcaaaggcacccrgcttctgaatattcttaaaagaaattatgcttacaggattaatgagcatatctgttttgccaaggagggagcattattcgtttcacaacaaaggcttccttttcatattagcaaaggtatcagaattgactcccacaattgttagaggctttttcttcatttttggtgaggggtgtagattcagttttggaattttcatcaaggaaaattttcatcaaggaaatacaagaaggctcatgagcttgagctattttcacatggtttaggcatctcactgaaagaagagcttcttttctaatttttcacctttttccatgaagcagatagagagctgtttactacagcctttgtctgggtttggcattgattttaaatcacctggattgatcatgtggttatgggacttaaaaaaatcccaccaa

SEQ ID NO: 635933 - DNA, 562 bp, Homo sapiens
ttttcacctttttccatgaagcagatagagagctgtttactacagcctttgtctgggtttggcattgattttaaatcacctggattgatcatgtggttatgggacttaaaaaaatcccaccaaataccaaagcctctaaacacaattagaattgaggggtttttaatctgctagcattatgtccataggagtacattctaaattattcttaacttctgctcatgttaggtgaaaataaagcaccatgataatgtgtagtgtctgaggttcagcagatgctctctaaacacgtagaaatgttcctagttttcaaaatgaggaagcatctaaaatctatgtctgtcttggagtatttcactgccttggcagtttcctcagccaataagagaaaaatakgcaaatcaaccagctgtcatgtcacacactcctcagctgcaggacaacagcaggatttaggcaagctgatctcaaccagatttgacaaagaggtggaaggtctaaaattaaataggtcaacacaaattatctaataataggtaggtgtgaagggacaacaaggggt

SEQ ID NO: 635934 - DNA, 570 bp, Homo sapiens
gatcaaatttgacttcagtactgctatggtctgaatgttggtgttctcccaaatccatctgttgaaacttaatccccaatgtggtagcaggaagaggtggagccttttgggaagtgattaagtaaagagggctttgcccttatgaatgggattaggcccttataaaagaagcccttattattttttttaagaggagctagtttgctccttctgccgtgtgaggacgcagcaacaaggtgtcatctatggagcagarattgagccctcaccagataccaaatctgcaggtgccttgatgttggacttcccagcctccaaatctgtgagaaatgtttgttgtgtataaatcatcccagtttaaggtattttgttatcacagcccaaaagaactaagacaagtaaagatgattctaagacaaaatgcacaaatgcggaaactgctttcgaaaggcccatccgattgacctcccacccccagcccctactctttgcctgtgtgtgagccttcttcacccggctctgagctctatgcacggctgtgctaccaccagccccttccttctgcatgga

SEQ ID NO: 635935 - DNA, 507 bp, Homo sapiens
ctcagccataggtgcaaggccaaaggttgcacttaagtgcaaccttcttcccttacactgtttattgatcttcctcaacaacaaaagcaacatccattcaaatcaatagcccaagctagggtggactctgaatgaacaggaagtgaattgtcaggctggggccctaagccaagccctcatcctaaggcttgtacctccaggacataattcactaccttctgcggtggtggcctttgaaaaaccacccgggcagctagatgtccctcagaagccaggaagagttggaagacttcatcctgctctacataatttaaatggctacattcttctaggcattacttagaagttgccccagcgcctacattaawgttagctgcccctttgttaaatatgcttattgatgtgtggcttgtttttgtgtctgggactttgaggagctgaaggttataaaagcaaaagactggtgagtgttaacattgaatttgaccacacacacacacaaaaaat

SEQ ID NO: 635936 - DNA, 622 bp, Homo sapiens
agccaggaagagttggaagacttcatcctgctctacataatttaaatggctacattcttctaggcattacttagaagttgccccagcgcctacattaaagttagctgcccctttgttaaatatgcttattgatgtgtggcttgtttttgtgtctgggactttgaggagctgaaggttataaaagcaaaagactggtgagtgttaacattgaatttgaccacacacacacamaaaaaatataattatctcagtgcccccatctgcacatgtcacagtgaacatctgcacatgtcacagtgattctgttccaaaagaaagcactagttacagatagaccttgattccctacccaccattgctccttctacactgccagccagccagagctttccctgatggcctgcattcatgaataccagttttcatgaagccatggcattttgtctttggagagcaggatgtaaaactagagtgtgtcaacatgatggagaactatgctgccataaaaaatgataagcatgtggattgtgtcaatatatggaaataagtatgtgaaatagtgctaaatggaaacaagtacaacacccaatagtttgcacacatggattacaactccatcaat

SEQ ID NO: 635937 - DNA, 456 bp, Homo sapiens
catgaaaattatgggaactacaactcaagataagatttgagtggggacacagccaaactatattagtaagtgatacctgtccctaaaggcaccaaaagacaggcacatagatactctcactctgatcttacaacagccaggggatcaggatggcatttctgtccccaattcacaaaaacatttagctgtgggcatgtattgggattgctgccagcgctgtgttggaaccagctactaccagcccatggcagccgactggcacataccttcccagctttacattcagtgatatcatcttggtagcttgaaactgaaattgatgggagtatctacaccatggaaatcaggaagttctacaagtttgggcttttattttttccaagggggggtargagtttgttgtaagatattgggcagcacatcacagattgctggagtcactgaagctagaatgta

SEQ ID NO: 635938 - DNA, 567 bp, Homo sapiens
ggctctttcttcatcatatgagtcatcaaaaaactccataccaattgacaccgtaacatgtgtgtcactacaaagtggcttattctttggcaccaacgacattttgttaatttgtccctcccccacccacacctcatcctgcagctcctaagtagagaccttggtgaaagctacatttcatggtcacggacaattcattacttcctgtcacttgctatttattattggctctcttttgtaaacgtggcaagcaaaggatgaacttctacaaagttgtaacaagtactttaagtgactttctggcacctgcacttccatacttggtgagtgtatttgctaaatctaaaaggtttaatgagagaatcgaaggtgaaggaaatttgggtctggtcaggaaacgtaaggtaccaaagaaaaaagagtgaaagggaccatccccagaagagattcttctstaactgggcatgctcagctgtgcaggctttgaggatgaaaggagcactgtgtctgcattgatgaagcatctcctgtttgtaaagtactctcctacatggcacaggataatag

SEQ ID NO: 635939 - DNA, 591 bp, Homo sapiens
gctcaagtcatggacaatgacattgatttccatgctgcactctgaatttctgcatgcccaaggcagccaaatttaaattatgcaaacatttgaggaagaacctgtatattttgtattagattgatttatataagccagccaacaaggaatctgagattatattctccaggcatatgttcttctcctttggcacagttggcctctcatttatcgggttctgggataatcctttctgcatatctctgtgctgtaaatggtgtcctcagagccttcacagaagctccttaaatgtctgctcatgtttcagacaagtggttagatcatacatcaatgcatgatcttctcataacagattacctgcctctgaactccaaccttcacaaaatgcggtatttgattctaacctatcactcataggcagcgtgacaactcttaaaagaaggagacgaactctatatagttcattccttactgacatttttaaatgaacatctgttatgtaaactcaggtgaagttttcaaaaattcagctttactttttcattaattctgataactgrttgactggtttccttgactcctggttcatta

SEQ ID NO: 635940 - DNA, 576 bp, Homo sapiens
tttactttttcattaattctgataactggttgactggtttccttgactcctggttcattaatcttcagctatgatgatatttctctttagacatattttctgaataggttgtgcatggggggattagttaagaatgtcctttcttcctctgtaactggataagccctagattttttaaattggcagttaagtgatgttcaatcccaaaataaccacaaaggttgagctgatttctgcattatgacaaggcagtaaggagtagacattaaaatcgcaacgtgtcttagctttaattcatttgatgaacagtcagtcaggtatagccatgrgttaggagtctgagtctctttgggatgctggtgatttgtttttttttttctttctgaacacccatctcaattaattgtctcagcaaaatgagaaagtcaaatttcgatgggcctcattttaatttctaccctagtcaaaacattctacttattgatttctgctctaattcccctaaggggttataagaaattttctgtcttggaaaaaatgctccacagtgtcacagagctagtgggaacttcagag

SEQ ID NO: 635941 - DNA, 568 bp, Homo sapiens
aaaatggctaaaagtgtttctgaagtaaagccctttagtgagatctcaatgtgaagccaagagaacaatacatgtcttaagcccaacaagacagacacggggccctgaaatggaaataggatacatgttatgggccatatacttttttaagagcgagagcaaattaggataaacatgatcttggtactataaaaagcattggagttgtctgtagatgggtagcctgtggacacatcactttgatttgcaggcacatggccaagggaaacacccctagtgtgtcctgtgatcatgattttctcagctccaaatctgaagtgggatatcaaagttccaggatgtcttttgaggttaattttkcaatcacagataaaattctatatttttgaatactatttttatttctacttactttttattaaaaatctattttgatattgtggaaatgataatagccaagactgccttttgattataaataggagagaccaactgaatctagacaaatgaacaatttattgggaggaaactggggcacctcacagaaaaaccaagaccctaaaaggga

SEQ ID NO: 635942 - DNA, 601 bp, Homo sapiens
ctgaatctagacaaatgaacaatttattgggaggaaactggggcacctcacagaaaaaccaagaccctaaaagggaaaggattcatctgagattcagaaacagctggtaccaggaatatgacaatatcaagactactctctgtttcttgtgtctgctttacttggatgtcaactgtgttattccttctctctacacaccctctttctccacatagcagagaacaatggtrtttttcaagctctgagcctcacagatccatagtgaaataactgaacgcttttagtccctgatatgtactgaattgtgttcccccaaaattcatacgttaaaaccctaactcccagtgtgactgtatttggagctagagcttttaggaggtaattaaggttgaatgaggtcttaagagtagactcctaatccagtaagaatatggcctcctaaagaaaggaagagagagaaagagatctttctctgtatttccataagcactcaccaaggaaaggccatgtgaggacatactgagaaggctgccatctgcaagccaggaagagagccctcagcagaaattgaatcagctcacacagcttctaaaactgtgag

SEQ ID NO: 635943 - DNA, 614 bp, Homo sapiens
catgaaggatggtgctatctagtccagatagtccagatactatggttttccctcagtcttcacaacccacagaccaggagattccctcaggtgcctacaccacaagggccctgggtttcaagcacaaaactggayagctgtttgggtagactgagctagctgcagaagtttttttgttgttgtttttgtgttttttttttccccctggtggcacctggaacaccagtgagacagaactgttcactcctctggaaagggggctgaagctagggagacaagaagtcttgctcagtggatcccacccccatggagcccagcaaactaagatccactggcttgaaattcttgctgcacagcacagcagtgtgaagtcaacctgggatgctcaagcttggtggaaggaggggtgtccaccattactgaggcttgagtaggaggttttcccctcacagtgtaaataaagctaccagaaagtttggactggctggagcccactacagtgccacaaagcttctgtagccagactgcctctctagattcctgctgtctgtgcagggcatctctgaaagaaaagcagcagcctcagtcaggggcttatagctaaaactcccacc

SEQ ID NO: 635944 - DNA, 461 bp, Homo sapiens
ctgttcactcctctggaaagggggctgaagctagggagacaagaagtcttgctcagtggatcccacccccatggagcccagcaaactaagatccactggcttgaaattcttgctgcacagcacagcagtgtgaagtcaacctgggatgctcaagcttggtggaaggaggggtgtccaccattactgaggcttgagtaggaggttttcccctcacagtgtaaataaagctaccagaaagtttggactggctggagcccactacagtgccacaaagcttctgtagccagactgcctctctagattcctgctgtctgtgcagggcatctctgaaagaaaagcagcagcctcagtcaggggcttatagctaaaactcccayctccctgagacaaagcccccggggaaaggggctgtgcctagggcaaggggcagctatgggcgcagcttcagcggacttaaatgt

SEQ ID NO: 635945 - DNA, 592 bp, Homo sapiens
aatgtttaaaggatctgtttttcccctctgctggaagcctacctcctccacaagccatatactcaatccctaaaaccaccttagtctgctgcatatscacttttgtttcctattatgtggtcagtgaagagtcagggttctgctagaatgctaaggaggcgtgtgtcttaactgaaggctcagtataaattttttctgatttggcggaaaggagttctattttgtttatcaatttaataacatttattgaacacctactgtgtatcaagtactagccaggccctggggaaacaatgatgaataagatgatatcctcacggggcacaggagaggtaattatacagacagatgattccagcttcttcctatgctggagtagaattacataccagggactgaggtaggcaataaatggagtgcttaattctgggtatgggagtctgaaaaagtttcacaaaggagaaggcataataataataataataataacctgtgaaaaatgccttaataaaagtgtctgccaaatggaaagagggattttccctctgagggagttgtggtgatggaaaagtggtggtggattctggaagct

SEQ ID NO: 635946 - DNA, 615 bp, Homo sapiens
aataaggtggtgggaaggcttttcaggggaagtgacacctaaactgaggcttgagtgatgtggaggaagggctcagtgttcagggtgggtcaggaggtgtgggtggttaagaagggggcacaggtgcatgagtagccgtgagcaagggccggcatgtttgagggcctggcctgagaggaatcgggcaggagaagcctcgctggcttcagctattcatttacacgaggccttcacacttggtccctgggtctgtgactctaacagggcgtagggcataggataataaggtgttttcctagtgttcacctcatgtcccttttataattatctcatttttctttgcattctgaatttcccacataatactcataatgctcaaactgttcagaacatttcttaagatctcacrtagtctttggtaagcagttcatgagaatgcctatgtttagttctgaataaaatgaacattaattttgagcaactaattttggcaatagaatatgtttgatcctcactgcttaatttctatcccatcttctttttaattaccttactcttttagtcctgaaaattaccaagaaattaaacacccccaaaaaagttaatttaaaattt

SEQ ID NO: 635947 - DNA, 562 bp, Homo sapiens
cattttcccagtgagtatccacagcactggtgttttccactcctgaaattccacagtgattccattaggtgtccagaaactgggcttttgcagcagtggttctttaaggattttacctactgatttttttggggtcccccccrccgccactcgtgtctaactcaatggcctctgttatgtcagctgtaccttcatacaaattttcttttatttcctgttctcttgggatcttggaggaatatttatataaagctccactcattccacatttattggatgtctgagtggtaggtactggcctgtgcattagagacacagagatcagtaagtcatgggtccgtgcttgccagaaacctgtgttctgtccagggtttcttctttggaataaacaaacaaaacatctcttttttccaactttctttctgctaagaaaacataatttcttatataagaaatacctcacatattagccagatttgaaacttttcccagtattttcaggagtattttaaatgaaattttctaaatgttaaattatctttttcccctaagatcttcaagg

SEQ ID NO: 635948 - DNA, 510 bp, Homo sapiens
ggtgccagggccaaccctatttgctatggggctttcctggtgcccagaatttgctttctggattgttttaattgttgccttggttttgacaaacmgctgacgggcagagttgttcaggagtaagggctctgctttggagacagcaaggagaggacgctgagtccgagcctgttgggtcttggtggccccgcagactctgccgtgactgccctgaccatctttgcaaatcaggctttattagcgcagaaacttggactagtgggtcctctgcaaattctggttttaaataaaccacattctggaaacttgtaagcaatatctaaacttcccacaaagccccgattgtaagtaaaatcatcactctttaaacctgctgagaagcaacctctgccacattctgaagcaccccagaaaggccctggagcctctcccaagcctccttagttcggcttctttggcaggaacccctcaagctccaggaatacacagagctgatgatgctgatttaag

SEQ ID NO: 635949 - DNA, 510 bp, Homo sapiens
ggtgccagggccaaccctatttgctatggggctttcctggtgcccagaatttgctttctggattgttttaattgttgccttggttttgacaaaccgctgacgggcagagttgttcaggagtaagkgctctgctttggagacagcaaggagaggacgctgagtccgagcctgttgggtcttggtggccccgcagactctgccgtgactgccctgaccatctttgcaaatcaggctttattagcgcagaaacttggactagtgggtcctctgcaaattctggttttaaataaaccacattctggaaacttgtaagcaatatctaaacttcccacaaagccccgattgtaagtaaaatcatcactctttaaacctgctgagaagcaacctctgccacattctgaagcaccccagaaaggccctggagcctctcccaagcctccttagttcggcttctttggcaggaacccctcaagctccaggaatacacagagctgatgatgctgatttaag

SEQ ID NO: 635950 - DNA, 510 bp, Homo sapiens
ggtgccagggccaaccctatttgctatggggctttcctggtgcccagaatttgctttctggattgttttaattgttgccttggttttgacaaaccgctgacgggcagagttgttcaggagtaagggctctgctttggagacagcaaggagaggacgctgagtccgagcctgttgggtcttggtggccccgcagactctgccgtgactgccctgaccatctttgcaaatcaggctttattagcrcagaaacttggactagtgggtcctctgcaaattctggttttaaataaaccacattctggaaacttgtaagcaatatctaaacttcccacaaagccccgattgtaagtaaaatcatcactctttaaacctgctgagaagcaacctctgccacattctgaagcaccccagaaaggccctggagcctctcccaagcctccttagttcggcttctttggcaggaacccctcaagctccaggaatacacagagctgatgatgctgatttaag

SEQ ID NO: 635951 - DNA, 515 bp, Homo sapiens
cgagcctgttgggtcttggtggccccgcagactctgccgtgactgccctgaccatctttgcaaatcaggctttattagcgcagaaacttggactagtgggtcctctgcaaattctggttttaaataaaccacattctggaaacttgtaagcaatatctaaacttcccacaaagccccgattgtaagtaaaatcatcactctttaaacctgctgagaagcaacctctgccacattctgaagcaccccagaaaggccctggagcctctcccaagcctccttagttcggcttctttggcaggaacccctcaagctccaggaatacacagagctgatgatgctgatttaagaatcctacttttttttgttttgttattcaaaagcccttattgaactaaccagggttcttaatagcttcatttgcaacagttttatcccaagacttacttagggttcaagaacaaccagctgtgsccccaccccaaaaggcagctgcaaagaaccccctctgcaccctg

SEQ ID NO: 635952 - DNA, 632 bp, Homo sapiens
cagagtgagacccagtctcaaaaacaaaaacaaaaaacaaaaattcccaccattttaaagtgcacaattcagtggttttcactatatttacaatgttgtacaaccatcaccattatctagttccagaatatattcrtcagcccccaaaaaaagctgtacttgttagcagacactcccaattccccctgccactgatacccctgtcctcagccccttggaaaccactaatctactgtccatctctacagagttgcctagtccagacacttcatataaatggagcccagttagcatcatgtctgcaaggttcatgcatgctgtagcatgtatcagaactcccttcctttttatgactgaataatattccatagtatggatagacaacattttatctctttatcggttgatggacatttaggttatttctactgctatctaataggaatagtgctgctgtgaacacttgtgtccaagtttctctgtgggaccatgttttcaactctcttgggtgtatacctaggagcaaagttgctgggtcatatgggaaccctatgtttaactttttgagaaactgccagaccaaactgttttccaaaggggctgcaccatttcacattcccaccagtggtgca

SEQ ID NO: 635953 - DNA, 632 bp, Homo sapiens
cagagtgagacccagtctcaaaaacaaaaacaaaaaacaaaaattcccaccattttaaagtgcacaattcagtggttttcactatatttacaatgttgtacaaccatcaccattatctagttccagaatatattcatcagcccccaaaaaaagctgtacttgttagcagacactcccaattccccctgccactgatacccctgtcctcagccccttggaaaccactaatctactgtccatctctacagagttgcctagtccagacacttcatataaatggagcccagttagcatcatgtctgcaaggttcatgcatgctgtagcatgtatcagaactcccttcctttttatgactgaataatattccatagtatggatagacaacattttatctctttatcggttgatggacatttaggttatttctactgctatctaataggaatagtgctgctgtgaacacttgtgtccaagtttctctgtgggaccatgttttcaactctcttgggtgtatacctaggagcaaagttgcwgggtcatatgggaaccctatgtttaactttttgagaaactgccagaccaaactgttttccaaaggggctgcaccatttcacattcccaccagtggtgca

SEQ ID NO: 635954 - DNA, 408 bp, Homo sapiens
tgtgggaccatgttttcaactctcttgggtgtatacctaggagcaaagttgctgggtcatatgggaaccctatgtttaactttttgagaaactgccagaccaaactgttttccaaaggggctgcaccatttcacattcccaccagtggtgcatgagtattctgctttacccacattctcatttacacttattttttttctttttaaaaaagttataaccattcaactgggtgggaactggcatcttattgtgtttttgatttgcatttccctcttggctaatgctgttgagygtgcagctgaagtttagtgagcacactactcacctataactcataagtggagcaggtatgagattgagtccacaacttcagatattcaagcaatgaactttatgtttcttcaacat

SEQ ID NO: 635955 - DNA, 573 bp, Homo sapiens
tgccatcaagtcctctttttctgcaaaggaagctggaagttgtagtcttcatgagcggtggccatgcaccaggtagaaatctgtagttgtgtttctgataagaagagaacagatactgagggacagatcgcagttttggtcacactaggtctgttaaatgacatcattcccatcatttgagttggcacaaggtggtggaaaccacagggggaagacccaccctgacactctgacgatatttttgggctggaagaggaagaagaatcagaaatgccccaggygtgccccaagcacacactccattgaaggctgcccacaaatctccatggccctgcaccaccgtctgccaccccattttcccagtctgttctgtgtgtggtctcctgccaccccgtctcctttaccgcccatccaggtcccagtcaccgtgtcctctgaagtcctggcgaccactcccttgccttcctgtgcacatctttttggagccttctgagggtgaggagggatgtagcatccttccacaagtgaagcccttgacacccatggtctcactgaattctctagcatcccctg

SEQ ID NO: 635956 - DNA, 546 bp, Homo sapiens
cctacctgtaatatagggagaaataaaacgaaagtcatttataataaagtagttcaataagtaaatacacaggcacaactgtactcaaatgaatgccacagctatacacacagactgatggaggtaggttgtattgtatttgtgacttcaataccttaagtgttgttgctgttgattacgtgatttttcttttttttttttctttgagagggagtctcactctgttgcccaggctggagtgcagtggtgtgatctcggctctctgcaacctctgcctcccgggttcaagcgtttctcctgcctcagccttccaagtagctgggattacagacaggcaccaccatgaccagctgatttttgtatttttggtagagatgggktttcatcattttggccaggctggtctcgaactcctgacctcaagtgatccacccacctcagcctctcaaagtgctgggattacaggtgtgagccgctgcacctgactgattttgtgatttttctgaaatggcaaacaactctcggtaaagacacagtgcaagctcc

SEQ ID NO: 635957 - DNA, 546 bp, Homo sapiens
cctacctgtaatatagggagaaataaaacgaaagtcatttataataaagtagttcaataagtaaatacacaggcacaactgtactcaaatgaatgccacagctatacacacagactgatggaggtaggttgtattgtatttgtgacttcaataccttaagtgttgttgctgttgattacgtgatttttcttttttttttttctttgagagggagtctcactctgttgcccaggctggagtgcagtggtgtgatctcggctctctgcaacctctgcctcccgggttcaagcgtttctcctgcctcagccttccaagtagctgggattacagacaggcaccaccatgaccagctgatttttgtatttttggtagagatgggttttcatcattttggccaggctggtctygaactcctgacctcaagtgatccacccacctcagcctctcaaagtgctgggattacaggtgtgagccgctgcacctgactgattttgtgatttttctgaaatggcaaacaactctcggtaaagacacagtgcaagctcc
